United States Patent Application Publication US 2005/0228172 A9 - sequence listing, part 202

SEQ ID NO: 915045 - DNA, 606 bp, Homo sapiens
tcagtggcttggaaaggttaaaggcaagagagggtcgaacaggaggaacacagaggatttgggggatagtaaaagtactcagtatgacactacaatggtgggtacatgtcattagacagttttccaaactcacagaataaacaatgctgagagaatgctaatgtaaactatggactttgggtgataataatggtgtcagtgtaggttcactgattgtaacaaatcgctctaagggggacgctgataatgggagaggctgtgcaagtgtatgaacagggagtatatgggagaatctcagtaccttctgcctaattttgctgtgaacctaaaactgctctaaaacaataaagtctatatttattctttcacagtctctgttaagacggacttttttcttcttgctacagataaacagggaggaaatgacagagagaaagctctgattctcatggttatgtgaatatggactatcatgagatccaacctacttgcactgatgagggaagagggaagacaaccaatgtcagttcctgaaatgmaaccaaccaggggaaagctcagcaggaagaggttcagactcttcctctgtggatatgaaaatgggaa

SEQ ID NO: 915046 - DNA, 606 bp, Homo sapiens
tcagtggcttggaaaggttaaaggcaagagagggtcgaacaggaggaacacagaggatttgggggatagtaaaagtactcagtatgacactacaatggtgggtacatgtcattagacagttttccaaactcacagaataaacaatgctgagagaatgctaatgtaaactatggactttgggtgataataatggtgtcagtgtaggttcactgattgtaacaaatcgctctaagggggacgctgataatgggagaggctgtgcaagtgtatgaacagggagtatatgggagaatctcagtaccttctgcctaattttgctgtgaacctaaaactgctctaaaacaataaagtctatatttattctttcacagtctctgttaagacggacttttttcttcttgctacagataaacagggaggaaatgacagagagaaagctctgattctcatggttatgtgaatatggactatcatgagatccaacctacttgcactgatgagggaagagggaagacaaccaatgtcagttcctgaaatgcarccaaccaggggaaagctcagcaggaagaggttcagactcttcctctgtggatatgaaaatgggaa

SEQ ID NO: 915047 - DNA, 606 bp, Homo sapiens
tcagtggcttggaaaggttaaaggcaagagagggtcgaacaggaggaacacagaggatttgggggatagtaaaagtactcagtatgacactacaatggtgggtacatgtcattagacagttttccaaactcacagaataaacaatgctgagagaatgctaatgtaaactatggactttgggtgataataatggtgtcagtgtaggttcactgattgtaacaaatcgctctaagggggacgctgataatgggagaggctgtgcaagtgtatgaacagggagtatatgggagaatctcagtaccttctgcctaattttgctgtgaacctaaaactgctctaaaacaataaagtctatatttattctttcacagtctctgttaagacggacttttttcttcttgctacagataaacagggaggaaatgacagagagaaagctctgattctcatggttatgtgaatatggactatcatgagatccaacctacttgcactgatgagggaagagggaagacaaccaatgtcagttcctgaaatgcaaccaaccaggggaargctcagcaggaagaggttcagactcttcctctgtggatatgaaaatgggaa

SEQ ID NO: 915048 - DNA, 668 bp, Homo sapiens
cttccagcttaagtgttttaagagggacagtgggcaacactgctgtagtcataaaccyatggttgggcctgagctcatgccctgctcctgggtctactatcaagacatccctgagcagaaagagcctgcagcattgtcctgattgccacaaatcagcattaaattaggcatttatcatatgtgaaaagacactccatctgcagatctccaccattgtgtaaagttgtcacagacaatatgctacttggcaatctgcacatttaacaacaaatgggaaagttcaatagcaaccagaaataaacttgggctttagaatttcatttcttagatgtagttagtgtttggccagttcccagaacattaccttccatttatgagaatgtagagctaagcaaattcaaacctaaaaacatcttttaacttcctatgtgaacaggaaggaagagagaggatgaatgtaataagattctctgatcataggaaattggaatttgctatcttgccagaccatttttcttaatgcacatctgaagttggcaacatttccttggcagaaaaatgaaatcattctgattcaaagaaacatgaaatgagttggtaaagatttttctaatgacagtgtaggaagttttatgctgacaaataaaaggtaaatatacctttcctgt

SEQ ID NO: 915049 - DNA, 610 bp, Homo sapiens
catctgactttttttatatgtttaacttttcattggtatttttgtctcccctagtgaaatgtaagcttcatgaaaagaggttgcttgtctatttgtatactatgataacccctgaatgtgaaacagtgccggaggtgtgggagacactcacaaaaatgttttcagtgaatgaatggtaaacagaaaatgtcttagaggccccatcttactttggaataaaagtatataaataaataatgatgagatggtaaaacaaatatgtttatcgtgtatggaggatatatttatatatttatagtgtataattagatatattaatttccagttgtctttaaaatatatccagcatcagaccacgtctcaccatcaccatcacccaagtcaccaccacccctcaccagagaaattgcaattcccctgattctgtgcttttgaccttgccccattatatctgttctccacagagaagttagtgggatcctgttagactccttgttctttgtcttcttatgaccctccatggtatycccattaaactaaaaatactactttattccaaagtaagatgcagccactaagactatataaatatatattcaagaagaaatgt

SEQ ID NO: 915050 - DNA, 605 bp, Homo sapiens
tgaatcactaggaagagctctcttcaaataatcatctggcctgactctctggtgctccatctcacacttgcagagcacctccatgcagccrttgagttcagaattgagtttttacttgcactgaacatcagcagtcaaaaaagttgaccaaatgtttctattatgtgctggatgattagagtaaaaaaaaaaaaaaaaattctatttaaagttggagttgggaggttaaggtgggaggatcacttgaggtcaggagttcgagaccagcctggccaacatggtgaaaccctgtctctactaaaaatacaaaaaaattagccaggtgtggtggtgggcacctgtaatcccagctacatgggaggctgaggcaggagaatcacttgaacctgggaggtggaggttgcagcgagccaagattatgccactgtactccagcctgggcaacagagtgagactctgtccccaaaaaataataaaataaaataaaataaagttgggaacacaaagttgcatttgaaagcaatcacagacatcaccatatctaattctcacactttgcaagatataaaatgatattgccagagtcatacatccagtgctttctc

SEQ ID NO: 915051 - DNA, 653 bp, Homo sapiens
ccttatttaaaaggagcaaacaatcggggccaaagttaatctcaacatgtcagctatcttctttccaattatatagtgccttcaaaatataggaktgaactttcctgtcctttgcaagtcaatttgtggattggggtctcacaacagccgtaacatagttatgacaaagatgataattaagaatacttctggatgtcttcttcaacattttggtgaccaatatccagatggttttacttccaggttctccttaccgggataaaattactattgctattcttcaactccaagaagaagggaagctgcatatgatgaaagagaagtggtggcgtgggaatggctgccccgaggaagacaacaaagaagccagtgccctgggagtggaaaatattggaggcatcttcattgttctggctgccggactggtcctttctgtatttgtagctattggagaattcatatacaaatcacggaagaataatgatattgaacaggtgagtcatctctttctaggactggttagtttatagtttgcattatctgtcttaagtttgggggtttttaaggatgtttgctctttttcagtctattgaattagatgcccagaagagccatttttgagttagagcagagagctattgaatccctgccag

SEQ ID NO: 915052 - DNA, 623 bp, Homo sapiens
ataaaactctgctctcctgtacagccagctcwgcatgaattactctttcttccttgcaattcctctgaataaattggctctgtctaggcagtgggcaaggtaaacccattgggtggttacaacccattacaagattatagttccccttacctgctctatagataacaacatgaacattataagatgttgagttttccatctgagatattctttcaggtcctgtatatcaatgaaactactgatgtcagctggtctgaagggccccacaagatgctgactccctgaagaagcctatgtgattctgaggcctatgtgattctgagtttctacatcttgatggtttcatatctcatacactgaccaattaatggccccaatattccagcccttcatacttcatgatccccttaaaagcccccacccaggactcctcggggagatggatatgagggtctcctcccatcaccttacttagtgccctgcaatcattagactctttctctgctgcaaacactgttgtcttcgtgtaattggtatgttactgcacagtggacatacaaacctgttggtcctacaatactggtaagaggacagtatcattgaaataacacaaaaagagtaat

SEQ ID NO: 915053 - DNA, 651 bp, Homo sapiens
tgagagagtctctttctgttgcctaggctggagggcaggggcacaatctcggctcactgcaacctccactttctgggttccagagattctcrggcctcagcctcctgagtaactaggactacaggtgtgtaccactgcgcccagcttatttttgtatttttagtaaagatggagatttgccatgtttcccaggctggtatcaaactcctgacctcaagcaatccacccacgttggcctcccaaagtgctgagattacaggcatgagccatcatgcccagcaaaatattgtattttaatttaaatggagggtccgctgttacttaaactatcattgaataacaatgtttagaacaacaaagaccatttctgtacgctagggacagctattagacatttgttcaagtaatttcatatttactacaatacactttttttttttgaggcagagtcttgctctgttgtccaggctggagtgcagtggcgcgatctctgctcactgcaagctccgcctcccgggttcatgccattctcctgcctcagcctcccaagtagctgcgactacaggcgcccgccaccatgcctggctaattttttgtatttttttagtagagacggggtttcaccatgttagccaggatggtctcaatctc

SEQ ID NO: 915054 - DNA, 651 bp, Homo sapiens
tgagagagtctctttctgttgcctaggctggagggcaggggcacaatctcggctcactgcaacctccactttctgggttccagagattctcgggcctcagcctcctgagtaactaggactacaggtgtgtaccactgcgcccagcttatttttgtatttttagtaaagatggagatttgccatgtttcccaggctggtatcaaactcctgacctcaagcaatccacccacgttggcctcccaaagtgctgagattacaggcatgagccatcatgcccagcaaaatattgtattttaatttaaatggagggtccgctgttacttaaactatcattgaataacaatgtttagaacaacaaagaccatttctgtacgctagggacagctattagacatttgttcaagtaatttcatatttactacaatacactttttttttttgaggcagagtcttgctctgttgtccaggctggagtgcagtggcgcgatctctgctcactgcaagctccgcctcccgggttcaygccattctcctgcctcagcctcccaagtagctgcgactacaggcgcccgccaccatgcctggctaattttttgtatttttttagtagagacggggtttcaccatgttagccaggatggtctcaatctc

SEQ ID NO: 915055 - DNA, 598 bp, Homo sapiens
aaacgtcattattcccacacaacataatcacaacataattgtatgtataaaactctgaagaacttgcagacagttgagtaattttagcaaggtcattggatataaggtcaatttaaaaatcaattgtattttatatataaggaatgaacaattagaaaatgaaattttaaaaacagcatttacaatagcacggaaaatcagaatcgtgggaataaacccaaagaaaatttttctatacagaaactacaaaactaatattgctaatattatattattaattagtaattattagtaagtaaagagagagatgatgttcatgaatggaaagagtcaatattatgcagatgtcagttatctccaaattgatctatagattcaatgtaatcccaataaaaatcctggctttttttttcttttgttttcttttctttttttttgagacagtatctcgttcagatacccaggctggagtagagtggcacagtcatggctcactacagccttgacctccagggctcaagagagcttccctcctcagcatcctgagtagctagctgagatcacatgwgcatgccactatactaggctaattttgttt

SEQ ID NO: 915056 - DNA, 598 bp, Homo sapiens
aaacgtcattattcccacacaacataatcacaacataattgtatgtataaaactctgaagaacttgcagacagttgagtaattttagcaaggtcattggatataaggtcaatttaaaaatcaattgtattttatatataaggaatgaacaattagaaaatgaaattttaaaaacagcatttacaatagcacggaaaatcagaatcgtgggaataaacccaaagaaaatttttctatacagaaactacaaaactaatattgctaatattatattattaattagtaattattagtaagtaaagagagagatgatgttcatgaatggaaagagtcaatattatgcagatgtcagttatctccaaattgatctatagattcaatgtaatcccaataaaaatcctggctttttttttcttttgttttcttttctttttttttgagacagtatctcgttcagatacccaggctggagtagagtggcacagtcatggctcactacagccttgacctccagggctcaagagagcttccctcctcagcatcctgagtagctagctgagatcacatgagcaygccactatactaggctaattttgttt

SEQ ID NO: 915057 - DNA, 627 bp, Homo sapiens
caatcacatcacttttgtacttacagttctttgctggcttaagataaaagacggaaattctcaccaaagtctccagggccctgagctctggcctrcctacctccaagtcccctggctcttccctttgctctgctccagctgtctagacttttccccatccttcaagacagccatgctccttttggatttcaacatgctggtccctttttctaaaatgttcatcctcccgcaacacccgggttttgctagtttttgcttggccaattcatcctctagctttctcatccatcttgccttaaaatgctcctgaatatctcccttcctccctcgggctcagctccttcattcctcgcttctgctcccatggttcctgtctttcgtgactgtccgttcacggggcattattttccaatgtctgtcttccctgctgtaatagtaactgtatgcattcatccactggagttgcttccatcttttggccatcataaataatgctgcaatgaatattggtgtgtaagtatgtttgagtttctgctttaccaggtaagaaagcctggggatgctgtcacagtgagtaacagtgcccacttagacatttggaagccagtgcagacccacagggcagtg

SEQ ID NO: 915058 - DNA, 627 bp, Homo sapiens
caatcacatcacttttgtacttacagttctttgctggcttaagataaaagacggaaattctcaccaaagtctccagggccctgagctctggcctgcctacctccargtcccctggctcttccctttgctctgctccagctgtctagacttttccccatccttcaagacagccatgctccttttggatttcaacatgctggtccctttttctaaaatgttcatcctcccgcaacacccgggttttgctagtttttgcttggccaattcatcctctagctttctcatccatcttgccttaaaatgctcctgaatatctcccttcctccctcgggctcagctccttcattcctcgcttctgctcccatggttcctgtctttcgtgactgtccgttcacggggcattattttccaatgtctgtcttccctgctgtaatagtaactgtatgcattcatccactggagttgcttccatcttttggccatcataaataatgctgcaatgaatattggtgtgtaagtatgtttgagtttctgctttaccaggtaagaaagcctggggatgctgtcacagtgagtaacagtgcccacttagacatttggaagccagtgcagacccacagggcagtg

SEQ ID NO: 915059 - DNA, 605 bp, Homo sapiens
cagagcctgatcacaataaccagggctagagagcagtgtttgacaatgcagatasttgcctgtttttctaaataaagggaacatcaaaaactagcagaggatagaggaaacttgggatccctctgccctgtgaaggaggagggaggatggtgtatccatgtgaaagaaagtgccagaatgtcaggggtcccagccattgtctgtacaatataggcccctttctccccccaggagattagcagtgcagagttttggaaagttccttaagcctttctcttctttgcggctcttccttgagccttttcctggggctgtcagctggtgtcgttttcctgggtcattgatttttttttgccctcagggattccagcatcgatctcactcttaataagccagaggcagcatcatggccccctcctcctccctgtccatgctcgtgacttgttctaatcacctccaagcttgctagtaaacaggctccccaaacaccgccttctctctcatctccaaagattttgagatgtcgccagcggccactggaaggctatcatcactgcattaaaaatgaatcccagcgaaggcaagagaagttcatgcaaaattag

SEQ ID NO: 915060 - DNA, 578 bp, Homo sapiens; identical to SEQ ID NO: 914997

SEQ ID NO: 915061 - DNA, 678 bp, Homo sapiens
tcaataaataattgttaaatgaatgaatgttcaatacattttgaatcctcaatctctcccgtttttttttttttttggtctacaacccatcttttccctttctaaaccacattctatcctggttaaattctcagcatagaaccttaaaagcacctcaacctaaaaatctgtacttcattggtagctaaccggtaacaggaaaaggacatcaaaactactttcaccttttaccacatgatcttattttattatgatattctcttatgataccaagatatagcagtcttatgaggaaatgagagtgaaaaaggcgagtgatgtcttagtattcttgtaaagataattttgacctgtggaactgctgatttagataagtatatccccattgtttccaggggcagatatgcagatttctcaccacctagctgtttgctttgattgcttgtatagaggtgtctgggtggtaatgaaagcagattacttgtctggcctgttggtatggttaattcaaagctgactgtacctagataaaaataattctctataattatggtttatcattgctcttaaaaattgaagtcactgcttgttaccaatgcgaacatagygtctataatccattctatatcaacacacaagttctataataattacacggcttaaaatattcagcaagac

SEQ ID NO: 915062 - DNA, 563 bp, Homo sapiens
taccgcagccatttgggaggctgaggcactagaatccttgaaccaggagttggaggtggcaatgagctgagatccaccactgaactgcagcctgggcaatagagcaaggctctgtcaaaaaaaacaaaaaacaaaaaacaaaacaaaaaaaacccaccaaaacacaaaaatcaaaatggcagtcactgaaatagtgcagtactgacatgaacagagacagactgtaaccacaggtggcggtgcacacctgtagtctcagctatttgggataatcactggagcccaagagctcgaggccagcctgaacaacacagtgagaccctgtgtctgaaaaatgttgttttgaattgatatataaaagaagaaaatatatattactgaggagattaaggattactcagcaataatttggaatcactggctatgaatttggaggaaaatgcaaatatagattgtcactatatatggaatgaagtctrtatgggattaataaattcttaaaaataaaatcataggaaaatgaggtaaaaattaattgaatagtaaataaacttttaagataa

SEQ ID NO: 915063 - DNA, 621 bp, Homo sapiens; identical to SEQ ID NO: 915000

SEQ ID NO: 915064 - DNA, 610 bp, Homo sapiens; identical to SEQ ID NO: 915001

SEQ ID NO: 915065 - DNA, 487 bp, Homo sapiens; identical to SEQ ID NO: 915002

SEQ ID NO: 915066 - DNA, 487 bp, Homo sapiens; identical to SEQ ID NO: 915003

SEQ ID NO: 915067 - DNA, 487 bp, Homo sapiens; identical to SEQ ID NO: 915004

SEQ ID NO: 915068 - DNA, 643 bp, Homo sapiens; identical to SEQ ID NO: 915005

SEQ ID NO: 915069 - DNA, 676 bp, Homo sapiens; identical to SEQ ID NO: 915006

SEQ ID NO: 915070 - DNA, 597 bp, Homo sapiens
ttaggtaattcccagatacaatgggggtacaggcattgggtaaatatacctgtttcaaacgggagaaattggccaaaatgaaaaggctacaggcaccatgcaagtctgaaatccaatagggcagtcattaaacattgaagttccaaaatgatctcctttgacttcttgtctcatatccaggtcatgctgatgcaaaaggtgggctcccgaggccttgggcaactccacccctgtggctttgcagggtacagctcccctcctggctgctttcatggactggtgttgactgtctgtggcttttccagggggacaatgcaagctgtcagtggatctaccattctgaggtctgtaggacagtggccctcttctcacagcttcactagctactgccccagtggggactctgtgtgggggctctgaccccacatttcccttctgcactgccctagcagaggttgtccatgagggccccacccctgcagcaaacttctgcctggacatctaggcacttccatmcatcctctgaaatctaagcaaaggttcccagacctcagttcttgacttctgtgcacccacaggctcaataccatttggaag

SEQ ID NO: 915071 - DNA, 606 bp, Homo sapiens
cccgtgcataaactgggcaggctgtagacagcaggcttgccaagtaaatactacagccttcctcccaatattgagccctgtcccattgatcctgcaggggagatgtgtagggcatttgttcacggggaggccacaagtttgggcctctcatcactgtgacctcacacccctgttgagtgtgtcgtaaacagaggagccgttcttcaagccccctgccctgagtgcacccctctcattcttttgttattattagcaaattcccccagttcctgatcattctttcttaagcctttagtgactgggtaaggttcttgtggctgactccaagctttcttctaaaaggaatagattctaggggtgagtagaggagacaggaatgtcggagtcagagctcaggaatctgggttccagccccaggtcaatcctagataaactagagggctccttaacttacttccctaggttgactctgggtttttttatcacgctcgacaggactccttatgcatttcttcgaaagagcatccagtcttaacatcatcatttggcctcatttggtttaagaagcagaattagggyaaaagcaatgatggataagcctcattt

SEQ ID NO: 915072 - DNA, 580 bp, Homo sapiens
cttaaataactctatacaactgagaaacagggtcatttcagtatctcagagttttgcagacagcagcaccagaatatagtccttcctaagtaactttaattttgggggaaaataattagcaagacagaagttacttggaatactaaaaatcaagagatgatttgagaggtcagggacccctcttggccatatggaacactcaaagtgaggcacgcatactcataaaagtggattagatgttgactgggtttggatgataagcacttggtcccaatgaacttcaaaagtaggaaggcaatggccccaataaagtaaacagagtggctggtaagccttctccctgctcatataccccctctttcactcttatttagagattcattattctgagttttcttttctcccaaactttataaacaaatgcacatgtaccaaaggagacagtttattaaggtgcccaccacacagcctggccccaaaattcttcttattatcaacatctaattataatagaacatgttcaatayaagaatgccaagtgagtggatagcccaacactttttccatccctcctttggtg

SEQ ID NO: 915073 - DNA, 652 bp, Homo sapiens
ggcctagcattgaagaataacatgtgttccgaaccttaaaaatacttctgacatttgatttagtatsctggctctaactggagtctaaaataagcaaataatcaaagatggggttactgattacttagtaaatgttcattaaaatattactttaaatgataaagaattgaaagcatcctaaatatataaaaattgagttaatattaataaaacatgctgcatttatacagaataatatggtgcagtcattttgaaataatatataattacataggggagtattcaaaataatcacattacaaagaatacaaaaattagtttttctatattttataattattattttactaaagaaataatactagttactcctaagtagtgaataatgtgtatgttttttctaactttgttttccatactgtttgcaatgagcaattatggatagaaaaaaacaatgaatgtttttatttttctaccaaagtaactcagagtccaaattcctgtaatcttttcttatggagctaaatttctttttttaaatagtttctaatgtttttctctagaatattccttaattttctatattcttaataaaattcagatgataaaatagaatcaatattctcataagagtttgaatgatgctatacag

SEQ ID NO: 915074 - DNA, 585 bp, Homo sapiens
accttctagtttcgatctgatgctctaatttctgaaaaatcccacttttctttttctgttctattttaacctgcatgtttaattaattcacaattctcagcatgaaytaacatatggctgctagaaagttgcaaactggagattttgttggctgtaaccttgtctactatcgctaaaaaggaaaacaatcaattatttcccgattttttaaaaaagatatacattagataaagtatggtggagaaaatactctcttctgaaatgacctcgccaaatagtctttatgtttttaactacgaagtgaaccatatgcaatataatcacttgcacatattcaataaaaaagcagggttaagccaaattttgttaccaccaagaatatttgtactatacataagatgttttcaatagaaggattgagactttttttatctggcttataaaaggaaattgctcccttccctaaaggaacacagagaaaagctgatacatcttcagaaatattcattacagctcatatcttttaagtgaaactcgctatctggtgttgattctataaagattaagaaacttgtcatggttgtg

SEQ ID NO: 915075 - DNA, 602 bp, Homo sapiens
gattggaaagggaagaaaaagaaacaggacacagcagtgcaaataccgttatcaargataatgtcagaagcctcagaggcaagtcactaaaaaggaattgaagtctgagaaataacagcttattttcagagacaacaatgcttaacatgtttagttttatagaatacccaaagagttccctgcctagcaagctttagaatctggaaatatgtccctttatctaatagaaggctctcctgctacaattttaagtgcttttcctctatcctcaatggaaatgaaaaacataatctggtttttctgtaaatagcaataaaaaaatgaacaaaagtataggaaaaataataagaaagagaaaattttcttttcttgataaaaatgtcaatactatttcatcaattattttaagaatcaacagtgagaattatctccctttctacttcctttgggataagagtcaacagaactgggccagtcctgaaactttatgtgcacacaaatcacctgagaatcttgttaaagtgtagagtctaatttaatagaggagaggcctgagattctgaattttgaacaagcacaaggtgatgccaatgtgtcctgtc

SEQ ID NO: 915076 - DNA, 610 bp, Homo sapiens
gagatatcttgctgtttctcctattgtaaggtctctgttgtggcaacaagttaataaacccaactttgtttatctgtaggagtattcctggtggtcctggttggcaggcttcaacagtgcagtgtgagaatatgatataagagtaaacagagatgggacttctaaactggaacaaagaaaacttcttattcaagcttcacctttctcacctattgaacatttgcccacttaggcaaattacttagtctccatcaatttcctcatgatattgatttcccaagatagttgtcagaattaaataaaattctagggaagtattttttaactcactatgtaaacataggaggtataattattaatggcataagaggtattctgcagggatatttctagggaacagctctataatttggaaagtgatgtacagtttgttttaaagtggaggaatggattgggagtcagaccctccttacttatatattagtgttttacttcacagatgaatgatacwgcctgaaacaaattatttaacttctgaattttggcttcttcaataataggtggataataaaatctacctctaaaaattattatgcaagtagtgaaattg

SEQ ID NO: 915077 - DNA, 659 bp, Homo sapiens
gcagactctacaaaagctaaatattagaaaattttatataaagttttgattcactcattctctactattaatttctttatctttgcaatatttctttataaaaggacactcatcaggtattattcaagaagcacagtaccttaactgcaggaacaaatgaacacttgcagacaatgttgtatctaatattcagaattctgagaagcatgatccctttgcagaattgagcctggacaaagtctatttccactccagtgggctgcagtttacactaacaaagagcattactttttgactagctgaggaatgaataaaaaatgaataaattaaatttctctgtctctagtcagaattacaattgagattaacagacttttaagtcagcgagttatttccattactatattaataaatttgtgttttgtctgccaagaatatttcaaggccctgtgagtctcccacagaaaactctttttaaaacttaccactagactctataattgcttctcctcttttctcataaaaatgccattctctcagagccaaacartcccagttaggtatggacagcaggatgtaggggttggggagtgggtggaagacgctgaatacaccaattttgtgaaattaacttatatgaccattgatctttaattggt

SEQ ID NO: 915078 - DNA, 669 bp, Homo sapiens
catgatttttacatagagaaaacttaaggattccacaaaaatcttttagaactgatatgtcaacttagtaaacttgcaggatacaaaatcacctacaaaaatcagtagcatttctctacactaacaatgatccaccttaaaaagcaatcaagaaagcaattcttttttacaatagctacccccaacaaaaaaatccctagggataaatgtaaacaaagaggtgaaagatctctacagaaaaaaaaaaaaaaaaaaaaagttaaaaaaaaaaattgttgaaagaatttgaagaggggccaggcacggtggtttatgcctgtaatcccagaaccctgggaggccaagatgggcagatggcttgcactcaggagtttgagactagcctgggcaacatagtgaaaccccgtctttactaaaaatacaaaaataaactggtgtggtggtgtgcacctgtaatcccagctactcaggagactcgggtacaagaatctcaacagaagcatatctcatgttcaagaatttgaagaattaatgtcattaaaatgtccatactacccaaagtgatctacagattcaatgtaatcyctatgaaaataccaatgacattcttcacagaaataaaaagaataattctaaaacttatataaaaccacaaaagaccctaaagca

SEQ ID NO: 915079 - DNA, 627 bp, Homo sapiens
aacaatgtagtaagtcttcaacttaccacttgtaactggaatatattgagacactgccttatctcacaccccttttgtatctaaatattaagaatgactgtaaggatttctttttycttttcttttttttttttttttttttttgagacagagtctcactctgtcgcccaggctggagtgcagtggcatgatttcagctcactgcaacctctgcctcctgggttcaggcaatcttcctgcctcagcctcccaagtagctgggattacaggcacccacaaccacacccggctaatttttgtatttttagtagagatggggtttcaccatgttggccaggctgctctcaaactcctgaacccaagtgatccacgcaccttggcctcccaaagtgctgggattacaggcgtgaaccaccacatctagtcaggatttcttcttaaaatgtatttactattcctttcctttcagaaattgttttttatttttttatttgaagaggacaggggagagaactgatgaagattaagatgctcaggtacaattaaaattaaccaatccccaatcacatttacaggaaacgtgaggtgcctgattttttttccattcatcatgattatttaatttag

SEQ ID NO: 915080 - DNA, 622 bp, Homo sapiens
tctcgtccctgaggtcagaaagaacccctcccccgctgccctaggactcacagatttcttcacaaaagacacaaaytctgcatggtcaaagcacatcacacatgttctattttcaagtttctctgttttattgtgtttgattttttttctttttttttcctgaaacaggatctcaccgtgttgcccagactgcagtgcagtggcacaatctcagctcactgcaaccttcacctcccggttcaagcaattctcctgcctcagcctcccgagtagccgggattacatgtgcacgccaccatgcccagctaatttttgtatttttagtagagacagggtttcaccatgttggccaagctggtctcaaactcctgacctcataatcccccacctcgacctcaaaaagtgctgggattacaggtgtgaaccactgcacccatcctatcgtgttttatttttgtttgtttttttgtttctctttttttggtggggcaggaagcagagtggaccgttttctatttgttatcaagataaataaatcaggcaaaccaccactttattctaaagatctgttttgagagagccatagtcagtttccccagtgtaaggaggaaatcattcctat

SEQ ID NO: 915081 - DNA, 342 bp, Homo sapiens
gttctggggaacactgtctagggaaacgctaatagtgatcaagtaagtttaggccaatcagttttaaattaaatatatgatttttaaattctgattttcttgcgaaggtgatcacttctaatctctttccctagctttcctcttaagcaacagagatatatctgtacatctttattgaacatctgtatatctttacatccctactgtatatctatacatccgtatrtctctactgtacatccatacatctatacatctctattgtacgtctatacatctgtctctactgtacatctatacatctgcatgtctctactatatgtctgtacagctatacatgct

SEQ ID NO: 915082 - DNA, 634 bp, Homo sapiens
ttcattttttcccttctgaaatttgaactgtatcatttrctaaattattgtatagacttagatctatttctggactttctattcaagtgccaataaccactacacctttatgatgttttaacatcaatccagtagtactgtgtccttgttttgcttgcaattttcagactattttttcatagctgttcttgttgcttattattccataatttaatttataaattccaacacaattcccaataaaataccaatattctatttttaattggcaaaactaattctaaagttcattgagctttctttgtaatgagaatacatttctttagtgttggaattggaaattttacttgattcttctttaaatctcttttttcctatattgcattatccaccaccactcccaatcctagtccttgggtttcagttccatcatgtcttaataattttaaacatatttagtgtatattctctttatatcctcattgtaggtatattatctcaaagtctaatattctagaatccagcatcctgatctcactgtttatgattccctgtctcactaattttggctcatatcatcatttggtcattttgattagtaattattaagggtttatttttctgtgaaaaatcc

SEQ ID NO: 915083 - DNA, 517 bp, Homo sapiens
tagcaggtgttaggttgtttggggggtggttgcatcaagttagaaagttaaatatatgttaaaaaggtatatatggtgccaagttaacaatgggttgactacgtagttttatgcatgccaactgrtctactagcactatgattcccagaattatcttctgggaaacctgagcaagatttggaaggcagaagtgaacggcagccattgactcttcaaagaccatcattgttagtgcaacaagggatagaagcagaagtgctggcagattccagccctcattcatgttttccctcctctgtatctagctcttcttcctgactgcaagctttgctgactgtgataggtaattttatgtgtcaactcagagggcattttgagatgaaattaacatttaaatcagtgaactattaggtaaagtagattgccttccacaatgtgggtgggcctcatccaatacgttaaaggcctgaactgaacaaaaagatcagcctccctgagcaagaggaacttctccaac

SEQ ID NO: 915084 - DNA, 611 bp, Homo sapiens; identical to SEQ ID NO: 914992

SEQ ID NO: 915085 - DNA, 639 bp, Homo sapiens; identical to SEQ ID NO: 915038

SEQ ID NO: 915086 - DNA, 639 bp, Homo sapiens; identical to SEQ ID NO: 915039

SEQ ID NO: 915087 - DNA, 577 bp, Homo sapiens; identical to SEQ ID NO: 915040

SEQ ID NO: 915088 - DNA, 635 bp, Homo sapiens; identical to SEQ ID NO: 915041

SEQ ID NO: 915089 - DNA, 633 bp, Homo sapiens; identical to SEQ ID NO: 915042

SEQ ID NO: 915090 - DNA, 608 bp, Homo sapiens
gatcagtggcttggaaaggttaaaggcaagagagggtcgaacaggaggaacacagaggatttgggggatagtaaaagtactcagtatgacactacaatggtgggtacatgtcattagacagttttccaaactcacagaataaacaatgctgagagaatgctaatgtaaactatggactttgggtgataataatggtgtcagtgtaggttcactgattgtaacaaatcgctctaagggggacgctgataatgggagaggctgtgcaagtgtatgaacagggagtatatgggagaatctcagtaccttctgcctaattttgctgtgaacctaaaactgctctaaaacaataaagtctatatttattctttcacagtctctgttaagacggacttttttcttcttgctacagataaacagggaggaaatgacagagagaaagctctgattctcatggttatgtgaatatggactatcatgagatccaacctacttgcactgatgagggaagagggaagacaaccaatgtcagttcctgaaatgmaaccaaccaggggaaagctcagcaggaagaggttcagactcttcctctgtggatatgaaaatgggaa

SEQ ID NO: 915091 - DNA, 608 bp, Homo sapiens
gatcagtggcttggaaaggttaaaggcaagagagggtcgaacaggaggaacacagaggatttgggggatagtaaaagtactcagtatgacactacaatggtgggtacatgtcattagacagttttccaaactcacagaataaacaatgctgagagaatgctaatgtaaactatggactttgggtgataataatggtgtcagtgtaggttcactgattgtaacaaatcgctctaagggggacgctgataatgggagaggctgtgcaagtgtatgaacagggagtatatgggagaatctcagtaccttctgcctaattttgctgtgaacctaaaactgctctaaaacaataaagtctatatttattctttcacagtctctgttaagacggacttttttcttcttgctacagataaacagggaggaaatgacagagagaaagctctgattctcatggttatgtgaatatggactatcatgagatccaacctacttgcactgatgagggaagagggaagacaaccaatgtcagttcctgaaatgcarccaaccaggggaaagctcagcaggaagaggttcagactcttcctctgtggatatgaaaatgggaa

SEQ ID NO: 915092 - DNA, 608 bp, Homo sapiens
gatcagtggcttggaaaggttaaaggcaagagagggtcgaacaggaggaacacagaggatttgggggatagtaaaagtactcagtatgacactacaatggtgggtacatgtcattagacagttttccaaactcacagaataaacaatgctgagagaatgctaatgtaaactatggactttgggtgataataatggtgtcagtgtaggttcactgattgtaacaaatcgctctaagggggacgctgataatgggagaggctgtgcaagtgtatgaacagggagtatatgggagaatctcagtaccttctgcctaattttgctgtgaacctaaaactgctctaaaacaataaagtctatatttattctttcacagtctctgttaagacggacttttttcttcttgctacagataaacagggaggaaatgacagagagaaagctctgattctcatggttatgtgaatatggactatcatgagatccaacctacttgcactgatgagggaagagggaagacaaccaatgtcagttcctgaaatgcaaccaaccaggggaargctcagcaggaagaggttcagactcttcctctgtggatatgaaaatgggaa

SEQ ID NO: 915093 - DNA, 564 bp, Homo sapiens
atttgtttttctgtgtctggcttatttcacttagcttaaggccataagtaccaggggcctggatttcaacctcacccctattgtttattgctacttgggtcaaattatgtagcctccctgtattaatctgatctcacgctgctaatgaagacatatccaagactcagtaatttataaaagaaacaggttgaactgactcacagttcagcatggctggggaggcctcaggaaccttacaattagggtagacggggaggcaaacacgtccttcttcacatggtggcaggaagaagaagtgccaagcaaaaggggggaaaagtcccttataaagtgatcagttctcgtgagaactaactcactattaccagaacaggatgggggaaaccgcctctatgattcagttatctccacctggtccctcccactacacatggggattatgsggactacaattcaagatgagatccaggtggggatggagccaaaccacatcactcactgaacctcattttgtttatacttcattttgagatagtatttgctctgcctttctgataaagctat

SEQ ID NO: 915094 - DNA, 564 bp, Homo sapiens
atttgtttttctgtgtctggcttatttcacttagcttaaggccataagtaccaggggcctggatttcaacctcacccctattgtttattgctacttgggtcaaattatgtagcctccctgtattaatctgatctcacgctgctaatgaagacatatccaagactcagtaatttataaaagaaacaggttgaactgactcacagttcagcatggctggggaggcctcaggaaccttacaattagggtagacggggaggcaaacacgtccttcttcacatggtggcaggaagaagaagtgccaagcaaaaggggggaaaagtcccttataaagtgatcagttctcgtgagaactaactcactattaccagaacaggatgggggaaaccgcctctatgattcagttatctccacctggtccctcccactacacatggggattatggggactacaattcaagatgagatccaggtggggatggagccaaaccacatcactcacygaacctcattttgtttatacttcattttgagatagtatttgctctgcctttctgataaagctat

SEQ ID NO: 915095 - DNA, 623 bp, Homo sapiens
aagttattcaatcaaaatacatcaagtggctaaatggattaaccaaaaaaaagactcagtgatatgctgccaacaagagactcatttcatctctaagaacatacatagaccaaaaatgaagggatggaaaaagttattccatggaaatagaaatcaaaatagagcagggatagctatacttatatcacacaaaatagaccttaagtcaaaaactataaaaagaggtgaagaaggtcattatatgacgataaagtggtcaattcatcaagaagatatgacagttgtagatatgcatccatccaaagttggaacacctaaattggtaaagcagatattaatagatccaaggaatgagatagactgtaatataataatagtaggataactaaatactacacttttaacattggacagatcatctagacagaaaatattggacttgaagtatgctttatttatttatttattttgagacagggtctcactcttttgcccaagctggaatgtagtggcaagaccatggcttactgyaacctctacctcccctggctcaagtgatacccccacctcagcttcttgagtggctggaactacaggcatgcaccaccattcccagctaattt

SEQ ID NO: 915096 - DNA, 682 bp, Homo sapiens
acctgggtgatgggagcatttgtacccaaaacttcagcatcacacaacatacccatgtaaaaacctgcacatgtactccctgaatctaaaataaaagttgaaattttttwaaaaagaatgagttcacctaggatatactgcattttaaaataatttgatttttaaaaaatttaatttttaaactaatagtaaaattaactatttttggtgtacagttgaaacaattttaacacataaacagatttgaattcccatattataatctggatgagaagttttactaccctagaaatttcccttttgctcttcctttgtagtcaccccttcacctctcctccatcctctcaacccttggcaaatactgacctattttctgtcactctagttttgtgttttaaagaatgtcatctaaacagaattataaagtgtgtacacttttgagacttgacttttttcactaggcatgtttttgacattcattcaagttgttgcatataaaagtagttcattcttttttattgctgagtagtattccattctatggatgtatcacagtttgtttattcattgatttattgaagtgcatttgcattttttcccagtttttggtgattatcactagaactgctataagattcatgtgcagattttattgtgaacacaagttttgatttctctggtt

SEQ ID NO: 915097 - DNA, 639 bp, Homo sapiens
ttaatgaggtgtaattgatatacaaataactacacatatttaatgtggacaatttggtgagtttcagtatatgcaaacacctgtgatagcatcagtacatttgaggttacagatgtaaccgtcacctcccaaagctttcttgtgcccctatgtttttgtttttgtggcgagaacacttaacatgagatgagccttcttaacaaattttgacgtgcccagcactgtattgttaactgtagacactaggctgcagaacacatctttagaacttacttacaggcagttccattctcagcaaagattgcgtttgtctggaggtccaaagtccttaattaggtctgtaataatctctttgctctggtcatgtccagttgttgcagcaccatttgttgaaaagattatcctttctcaatggaattgcctttgttcctttctcaaagattagttaatggtatttgtttgggtctgtttctgagctctgtattgttttccattgacctgttcttccattcttctagccttttgcctgtatcacactgtctygactaatgtacctttatgtaatttataaactccaggagtttagtattataagttttttcctttttttcagtattgtgttggctattctgcatcttt

SEQ ID NO: 915098 - DNA, 577 bp, Homo sapiens
aaaggaaggaggaaaagaaggaagggagaaaagaaagaagaaaggaaaaaccacactaaagacataagcacctccatacttattttcataaccattttggtgttattttgtagtaattgagtgcattaaattttgagggtttttttttgccccaactgtgaagaaataaacaagaagaattgtaaaaaaaaaaaaaaaaaagaaaaaaaagaaaataaggtgccaacatactacttggcattgctcaggtaaatctctccttttaatggctaagggtcacttcctttcagagtaactgtacacaaatccacagaaatgtagtttggaagatggttttcaccaaatgttgcctctgagacccccacaagatgttttgaaaatactttttaagagatcataaaaatgagatagtaaatatattcatgatcatgcccaaagactgaataactcatagaatattccatggtgcttcaccagggycttttaaaagttattcaaaatcattctcagctgaacttggaaaaatgtgacttgatcttgacaacactcaattatagagaagaggcccttggtttta

SEQ ID NO: 915099 - DNA, 672 bp, Homo sapiens
agttcctgtatccagagtcaaacctaaactcaacagtgggtattccaggcatatgtcaccgtttgagccctttgcccatcacagggtctcacttgttccacacaaggctcctcatggctccccacttgcaccccctgttttcctgccactctgattttttttttttttttttgagacggagtgtcgctctgtcgtccaggctggagtgcagtggcaggatcttggctcactgtaacctccacctcccaggttcaagtgattcttgtgcctcagcctcccaagtagctgggattacaggcatgcgccaccacgcccatgcctagctaaattttcagattccacccgcctcaatctcccaaaatgctggtattacaggcatgagctaccactcccggtactgccactctgaatttgatgctctcctctgccaaaatagtcttagaattgcaaacccacatgccacagatgtctctgcgaggcccttcatgaacccgttcctgaccttccttcatgcttagaatcatgggtatcttaccgtgtgatgctttgtagctggttattagcatacatgtgcrtctctgtccattagattgtaaaatgctggactgaggcactgtgtccaactccttccatctgaattcttcacagtgcctgggacattttgggccgcgg

SEQ ID NO: 915100 - DNA, 677 bp, Homo sapiens
tcatataccataaaatttacccctttaaagcataaattcagtgtatagtcacaaagttatgcaagtcttgctactatttaattccagaacctttttatcgtccccagagggaaactttgtattccttagcagtcactcctcaatcccttttctccccagcctctggccaccacagagcagctttctgtctgcttggatttgtcagttctgagcattttatgtaaatggaatcatacatatgtggcctttttgactgacaggcttctttcacttagcataatcttttcaagtttcacccatgttgtggcatgtatcagtacttcattcctttttgtggacaaacaatattccattgcatggatatagccatattttgtttatccactcatcggttgatggacatttgagtggtttctatcttttggctgtgataaataacactgctataaacatttgtacacaagtttttgtatggacatgttttccactctcttggatgtcaacctaggagtagaattactaactcattttgtaaaatatacrtttaactttttgaggaactgtcagactcagactgtttttcaaagcagctacactactttatattcccatgttccaatttctccatgtcctagccaacatttattacctttttttttttttttttttttttttgg

SEQ ID NO: 915101 - DNA, 619 bp, Homo sapiens
ttttgtttttggaccttaggtacaaagaattaagaattaactcctcggccaggcgtggtggctcacacctgttaccccagcactttgggaggctgaggaggcaggatggcttgagtctaggaatttgaaaccagcctggttgacacagaaaaacctcatctctacaaaaaatacaaaaagttacccaggcgtggtggcatgcgcttgtagtctcggctacccaggagactgaggtggggaggattgcttgagcctgggaggtggaagctgctgtgaactgtaatcttgccactgcactccagcctgggcaacggagtgagaccctatctcaaaaaaaaaaaaaaggaaaaaaaaaagaattaacttcttatttcatagcatactaccattgtcagtttatagaaggcctttttcttgttttaattaattttgtttctttgtaatctgttttagataacgaattaccttaaaaataagaataaacaaggccgggtgcmgtggctctcacctgtaatcccagcactttgggaggtcgaggtgggcagatcaattgaggccaggggttcgaggtcagcctggccaatgtggtgaaaccttttctctactaaaaatacaaaaa

SEQ ID NO: 915102 - DNA, 572 bp, Homo sapiens
cccacctgccttgtcctcccaaagtgctggggttacaggcatgagccaccacacccggccactttttatatgttttaacagtcattctgaaatgtttctaacttgtgatttcttctttaacctgtcattagaattttgttacataatttcaaaatatttgaggattttctagatgtcttattgagttctagtttagtagcagtttggtcacagaacgtgattttagtcctttaaaatcgagacttgttttatggcctagcatctaatgtgtctttgtgaatgttttatgtgtgcttgataagaattgtattttgtgtttgtttggcgtagtggtctccagctatcaatgtagatcaaattgtttgatatttttcttcatatcttttatatctttgtgtgtatttgtgtatattctgtcagtaattgagagaagagtcttcattgataagtttggatttgtcttagactccctttgtaacattgctttatggtttttgaagctttgttaataggtatatgcatgtttgatattgttaygacttattgataaattgacccttttatcatcctga

SEQ ID NO: 915103 - DNA, 631 bp, Homo sapiens
acataggtaaatgtgtgccatggtggtttgctgcatctatcaacccatcacctaggtactaagcccagcaagcattaactgtttttcttgatgctctccctccccatccccatccctgacaggcctgagtgtgtgttgttcccctcgctctgtccatgtgttctcattgttcagcttccacttataagtgagaacatgtggtgcttggttttctgttcctgtgttggtttgctaaggataatggcttccattattccagcttcatccatgtccctgcaaaggacatgatctcattcctttttatggctgtatagtattccatggtgtatatgtaccacatttgctttatccagtctatcattgtgggcatttgggttgattctatgtctttgttatgtgaatagtgctgcaatgaacatatgcatgcatgtatctttgtaatagaatgatttatattcctttaggtatatacccagtaatgcgattgctgggtcatatgatatttctggttctaggtctttgaggaatcgtcasactgtcttccacaatgattaactaatttacattcccaccaacagtgtaaaaacattcctatttctccacatcctcgccagcatctgttatttcttga

SEQ ID NO: 915104 - DNA, 670 bp, Homo sapiens
atcattatcccattctacagatgagaaaaccgatactagaaagagtaagtaacttggataagatygcatagtattttaggtcaagattctgtggcctttccctcaactatgtaacctctgatcattccctggtcatagctaacagttcaaagcccggtattgtcacagccccagaggcagagaacaaatagctatcacctggaaatacctacctacctacctacatataggtaggtagggtgaataatgtcctcccaaagacgtccacatcccaatcctcagagcctgtgaacatgttactttacatggcaaaagggacgttgcagatgtgattctgtcaataaccttgagaaggggagattatccgggattacccaagtgggcccagtgtaatcacaaagctccttacaagagcatggcaggagagttagtgtcagagagagacggatggggtgggaaaagagagtgagagagagagagagaacagagacagaagtcagagtgatggggccatgagccaaggagtgcaagtagcctctagaagctggaaaaggcaagggaaagggtcctccctgagaaaccccagaaggaatgctggccctactgacaccttcatcttaggacttctgacctccagaactggcagaagcaaaatttttgttgctttaat

SEQ ID NO: 915105 - DNA, 664 bp, Homo sapiens
aagaaatgcacctcttccctgctctagaagaagacattcctttcccattatggtatttgcttagccattgatgtggctagccatttgctagcatgtggacacctagggtgatgggagaagaatctctatccagttctagttaaacatagagatgttctagtaaccagatggtttttgcttggcagtttaacaagcaaagtgtttattggctttggaaacccattcatagcattgtgttttgggtattcatggttctgtctgtttttttttttttcttccagagtgtggccatggtttatgttcccatcaattttattgtgtggtaattatatgttaattctttgctcagcctactgatagaatatccttacctaattatgtatttcattgtagatttctatgtaaaataagtgtgtggtatatttaattagtcatgagtttaatttaaatgaaatgtttggtatgttgaccacatgattagcattttgtagcatctatagaagttgcctcacatcttatatattttataatttgctgtatctttstaaggaccaataaactcggacattgggtacgactctaaggtctgttctcaacttttaaatttccttatgcattgagaaacatttatgcaatctttttcataatgacagagcacattaga

SEQ ID NO: 915106 - DNA, 635 bp, Homo sapiens
tggtatttttggagttgatatttttgtagtcatttggtttcctctttccaaaaaactaaatagattttatacatatttctttgtcttagttttttgggttcctggagcctttaaaaagtcataggttttgatgggtttataaccttatctactttgggctaaaaacattttgttttaaccgagatataggttataacccactgagtttgaaagccagaataatacatacagaaattgaatctgtcctaattaaaaaatgactttggagctattaagaatactggtcatctctactgaaaagttctctttaacttttccacagttctttgggtttaatttctttgtgttcctaacatatgtagtaactgcaacattgcccactattattatactttttttgtagccttgtttttctgtgaaactaaaatatgttcattatttaaaaacttcagaaaaaacctgaaaattataaatctaatgtcacccccagaggaaatcatggttacattttggtgactgctttctaggcctatttctttacctgtgcatatttacagatatgggaayatgatcctatcttcatagagataaatatgtcatatacacattttgtgttgaagcaactttttcactta

SEQ ID NO: 915107 - DNA, 671 bp, Homo sapiens
gttcttggactgctataaagaaatgcctgagactgggtactttataaagaaaagagttttaaggkgctcacggttctgcaggctgcacaggaagaatgatgctggcatttgcggcctctggggaggcctcaggaaacttacaatcatgtcggaaggaagaggtgagaagcaggcacgtcacatgacaagagcaggaggaagagacagagggggaggtgccacacacctttaaacaacccgatctcgtaagaactcactcactatggcgaggatagtgcatggatggtgttaaacaacttatgagaaattcgtctccataatcctatcacctccttccaggccccaactccattattaggattacaactcaacatgagatctgggcagggacagagacctaaactgtatcacccatgctaactgctgaggcttctgaagcccttcgtagggtgccagaagccacctgtctggtcatcgtgcacacacctgtttccacctgagatgaccaggctgatgtggggctgactgcttctcacctgcctggcatggggttcggctgtgtctttgctagtggtgcctggaacattacgggcacggaacatgcattttcttgtgggccgtgaaggtgcagaggccacttttcttgggtctccaggtgaaccttgggactg

SEQ ID NO: 915108 - DNA, 576 bp, Homo sapiens
attcttctatctctccaaatactttcactaaaattaaaaagaaaactaactcaacaaaagtgttttgatgatttttcaacttaactgccaatttcccccttactggtattaccaaagttaataattttgtaaaactccagagtgaatcaattatcttttggtacttaaatgccaattattgaagataaaatgaagaaacaagaaatgccatctcaataagctataaatccaaattcactgaatttaaacatcttaattccaccaaacttaaagttctaatacaatgaacttagaaaaaccaacctcactttgaaaagtattgtcagtttaaagctggtagcaataagtaactgccttttcccctcactttcttctttcctcctactctgcctatttctggtccatttccatttccatattacttacatatcatttgataaaggaagaactggtgaaaaagagaagagcttcaccttatctkcctgcctttccataaagagcatttatcttgttttcattaaggtttacatggtcaacattaaacccttgagaacagcaacattttctacctgtgaa

SEQ ID NO: 915109 - DNA, 537 bp, Homo sapiens
cagataggtagtagtaacatcttcacttaacagatggagaaactgaggcttagagaggttaaacaatattcccagagttacacaatagagagcagaggcagggctggaatctagatccatttgatttcaatatccataattgtaccacgttcttaggcccagggtttttgaaaagcccatcttgggctctgagaggagaataagtaatgccatagtttgtgtgatgaatccattagggaacctgctctccatgagttttcctgggactcccagaagcaaggtggcccaaggatggtccagggcatcacctattggctgggctagaactcatacaaacagactcaaccagaactagagggtggtgagttttgtgtgatagaggcgtagaatgcagcagacactgagcattggaaacttctggctgctggcctgtgtgatgcatgyttactttgctttttttttttttttttaatgacaaaggaacatgcttttgtttgttttaggagaagagggattgaaggaaccaagggtagctgt

SEQ ID NO: 915110 - DNA, 632 bp, Homo sapiens
tctgctgcctgaggaaaccctgtgagtacgggcatggagtgctgggtttaaggaaaaaccagcctgaagggcactgtctgggaaggatgggaaataatacctaagggtggctggggaactctaatcttggaagttatatcaaaagaggacaacaaccatctgccttggaagttttaggtgcaggttttcttccagttggggaagggattggggtgtgggggcactttccctctggtggttttgtagtaaacctttccaaatggacccaactacttagatgtatggacctattaacaagaaggcatagatactcttcggctcataaccagtggaaaggcatggttcctgtattggaagcatctactactggagtgaaattaactcctagtctgttagttttccagagctgctgtaacaagtctccacaactggatggtacaaaataatggaaatttattctcttacagctctggaggttagaagtccaaaattaaggtgtcagcagggtgggtcccgttttggaggtgctgagggagaatccattccctgcctctctcccagcctctgatggttgcttcaatccttggmattccctggtttgtcagtgctgatgcattcaatctctacctctg

SEQ ID NO: 915111 - DNA, 632 bp, Homo sapiens
tctgctgcctgaggaaaccctgtgagtacgggcatggagtgctgggtttaaggaaaaaccagcctgaagggcactgtctgggaaggatgggaaataatacctaagggtggctggggaactctaatcttggaagttatatcaaaagaggacaacaaccatctgccttggaagttttaggtgcaggttttcttccagttggggaagggattggggtgtgggggcactttccctctggtggttttgtagtaaacctttccaaatggacccaactacttagatgtatggacctattaacaagaaggcatagatactcttcggctcataaccagtggaaaggcatggttcctgtattggaagcatctactactggagtgaaattaactcctagtctgttagttttccagagctgctgtaacaagtctccacaactggatggtacaaaataatggaaatttattctcttacagctctggaggttagaagtccaaaattaaggtgtcagcagggtgggtcccgttttggaggtgctgagggagaatccattccctgcctctctcccagcctctgatggttgcttcaatccttggcattccctggtttgtcartgctgatgcattcaatctctacctctg

SEQ ID NO: 915112 - DNA, 664 bp, Homo sapiens
ctatgattgtatccttggatggctcaattgcagtctgttgaaattaaagaaaaagattctacgaaaaactataaaatggacaggtctggaagaacctctttttctaaggctatgtgtcataaaacgtacgtatttactttataaaatacatttcttgattgaatttaaaatatgttttcgttgttagaactttgatttccttgcaggttttcagaagcacattacttcaaatcctacgagcccactgtaggtgatgagaatataagcagtgaacaaaacataaaaccctggctttacagactcatagcctagtgggggagagagaaatgcacagataaataagaacaatagatagtatgtttggtgatgagtactacagagaaaggaaaagcaaagatgggggtgaggagctccaggtagtggggtggttgtcaggtaaatgaggtgggcagggaaggctcctctgagaaccttttatctgagtaatgacttcgaggaagtgaaggagacatgcagacatctgggagaagagggaatagcagatgcacaggtctcaaggcaggaggattgtcaaagaggcccccatggttgggatggagygagtgaactgggggtagtaggagatgaggtcaggtcagtgacggggagcagggcagattgaata

SEQ ID NO: 915113 - DNA, 617 bp, Homo sapiens
ttgcttgtcttcatcatgtatttcagcctcctgtgtcttttcctcctctttcttctttattttcccatcaattctccttgtctgcctgattttaccaccagaagctaatcatgatgcactttcctttatgataaagatgctcaccccattcactgagcatgggatccgactctttggatcttcttggtggtattcatttgctgcccattgcctgggagcacctggtaattgcagaagatattttcctctaagtgcttaaatgctggcagtccttaggggaatctgaggcttccataaaactggacttcagatgacaaagccatgctacattaatagctctagagatctgcagttgggatggcttatctttcagatgccatcattttggcttttaatttgtttgcgaacaatatcctttggggagctgcatccttcaacgtctgcctgcattatcacatgggcttcttccctgtgtgtctccagatctccctctcataattcatcggatttaggrctcaccctaatttagtttgacctcattttgattatatctgcaaaagccatgtcttttacctgagggtaacagatagtaagaacttgtgggcatcacctaagag

SEQ ID NO: 915114 - DNA, 680 bp, Homo sapiens
atttggctgccaacagggaattctaaacaactaaaaactccagatgatgaatgcacaacataatgatggttaaattaaaaaaaaaaaagagcacggtaataaaatttccatgaaatattttgtgtaagcgcagataatcagtcattttctttatagaattcttattcgtaaataatttagaatactttgttctttataatatatgatgggcaactatagtatgattcttctgagtgactcagttcttttttttttttcacatttaatgactttgtttctcctaagtgaatgcacagatagtatattaatcagggttctctggaaaaaccagaaccaatttattatcaggtactggttcatgtgattgtggaggctgagaagccccatgatctgctctctgcaagctggagacccaggaaagctgatgaaagtcaaaggcctaagagctggagggccgatggtatagattgcagcccaggtctaaaggcctgagaaccagaagcacagagggcagaagatcaatattccagctcaatcaggcaaagagaaaaagtcctcccttcctctccrtttttcttctattctgaccctggatggactggatgaggcccagccacattgaggagagccatctgctttaatcagtccaccaactcagatcctgatctcttccagaaaca

SEQ ID NO: 915115 - DNA, 563 bp, Homo sapiens
ttgcctaagaatgcttaaacgatggccagattttactctgagtgatactaccccctggaagtggggggaaaaaaagaaggagggaaaaaagttaagttttcattctaaacatcttcaaagcttgattggctttaataaggtatcattaattaattcaacagctaagaagggactgcaagtgttaaaaatcacggctgtcaaatgttatggcatctgggagccctagtggttggttacttaacatgatattttaggacaattctactctgcttaagcataataaaccggaaagacatgaacaaatgtcccaactgcttccctttctactcccaccccctgctctggaaagaagccctaacacctctaataccacaccactctaaaataaacccaaatgttgcacttattttactgctatgcattgagcattattatttggagatgctctatgctgcttcattaaagatctttcatayggggtggggaaactgagccacaggggatgattaaaagaaggaagaagtcagatgacttcggattctgttggctcctgactagagaac

SEQ ID NO: 915116 - DNA, 610 bp, Homo sapiens
ccccgtgtgtatgcctgtgtgagaatatgtgtgtgtgggtttgccatcgaaggaaaacctttattttggctgctaacatttggaaacatttagagaacaaacaatatcttttaaaaaacatcaaaggttcaaaaaaacaagacaagaaacaaactgttgtaaaatttcaactcctctaaatttgtcttaaattgaacttagaactaatctaataaaaatagtatgaagtttcaatggtgtgttgttgttgtctagtattttttggcattgttttttaaaaaccagtcaaaatttattcagctaaatattacattatttgtacagatttataataatagcttacagaagtgaactttattgttttccatgtttctattcatgtccaattttgatgacagtttaaatcatagtggacctgttatttaaatcaaaatataatacttatgcatataattttagagggtccaatgattttgaaataatgtattcataagagctattttaaatraatgtatatttaaaaatacaattttagaaattatagtactataaaacttcagaaagagaaattgcacatcaattaaataacagtagcttaactagaagataa

SEQ ID NO: 915117 - DNA, 611 bp, Homo sapiens
agcacatgttagacattgcctgcamacagcttgggtgagggcattgagccgtggcacatagaggtggcatcccagtagcgtttgtagtgccgttttccccatgtgagtctcttggtggaattgttttacaaacttaggggccaccatttcagggatggctagtctcccatcagagaatttccaccatcctccttcagtgcattttccagtttcttgggcaaaccaggccttctcatttggagagtaacttgggatctcggggagggaaggttctgggaggagaagcatagctaaggattccttttcaaagtgtggagtaatcattgctgtccgttttgcctccctgtctgcctttctgtttcctttggcctctagtgttcttgctttttggtgccctctgcagtgcataacagctaccttctttggggcctatacagtacctaagagctgtaaaatctcctctttgtattttatttctttttttcccagcagttaagagtcctctctccttgtatatagcttcatgaacatgcaatgtggcaaagacacacttttgtctttgtgatttggaatcagtgtaaatattgacctttttgtctctcatcagcaaa

SEQ ID NO: 915118 - DNA, 611 bp, Homo sapiens
agcacatgttagacattgcctgcacacagcttgggtgagggcaktgagccgtggcacatagaggtggcatcccagtagcgtttgtagtgccgttttccccatgtgagtctcttggtggaattgttttacaaacttaggggccaccatttcagggatggctagtctcccatcagagaatttccaccatcctccttcagtgcattttccagtttcttgggcaaaccaggccttctcatttggagagtaacttgggatctcggggagggaaggttctgggaggagaagcatagctaaggattccttttcaaagtgtggagtaatcattgctgtccgttttgcctccctgtctgcctttctgtttcctttggcctctagtgttcttgctttttggtgccctctgcagtgcataacagctaccttctttggggcctatacagtacctaagagctgtaaaatctcctctttgtattttatttctttttttcccagcagttaagagtcctctctccttgtatatagcttcatgaacatgcaatgtggcaaagacacacttttgtctttgtgatttggaatcagtgtaaatattgacctttttgtctctcatcagcaaa

SEQ ID NO: 915119 - DNA, 602 bp, Homo sapiens
atgcagcggttagaaaaagtacacatactgaggtttctttcaagattatatatagtattattcaaaagtcttattgtatatgaaaagtgacaagatttttgcaatrtgaaacaacagtagctagctaatactctagttacctttacagattgtctagttggtcacattataccttaatttttcaggatccaaccaaggcctggttaactcttactggcaatgtttgaaagggatgaaagaggtcctatgcatattactctaaattaatcttagtgcaggaagacaagtcatatttgaataactttattttgtatccctagctactgtcatcctagtatttgaaaagctccttttctcccaatgttcagaaagtcattttccaaacttgcaaatattaaaacctattcatgtctaatacttttctacttggtctatttccatgtcctgtcaatgacctatcaattaccctattcaattacccatgtcacttgagatttctcccaccagaatttaggttgcatattttcacagggcaatttattttaaaatcagaatggtccataaaactaatagctttgtgtgcacagacctaaaagatttgt

SEQ ID NO: 915120 - DNA, 597 bp, Homo sapiens
aaaaaaaaaaggaaagaaactaggtcctatttttcatgactaagaagttgacaatggtctttccaaattaagactcggcatctttgatttttgtaaacatatcctggagatcgaatgtgaacatttgatggctgatgggaagaattgaggaggattaggggagcacttgactttgccatgattctcaagttaaatccttggacctcttaaagatgttgttgatgaagctgctaaaatggtcaccagatgaatataaacaagtaggacccgcagtaatttccaggctaattttgtgcacgtgcgtttaggggcgagtcaaattaaatgaatgaggagctgatgttcatgtgaaagtaattactctcctccagtagaaatcctaatcctacaagtaactgcagaaataattaatcataactaagaagcaaaccactctcagggagaaaagctgtatctgaacttccacgtgctcttggaggatacgggtgattcacggcataagagtcatctaccaagtcatctgcaagagcgrgtgcagcttccaagagggtctgagtcagaacagataaaaggaagttcttcttaactcagaagatt

SEQ ID NO: 915121 - DNA, 608 bp, Homo sapiens
aacagattcttcacaaaaagaagatatatgaatggccaataaacatatgaatacattattctacatgattcgttgtagaaatgcaaattaaaaccacaatgagatgtcacgataaayccatgaacagaaaataaaaagactagcccaattgttaatgggtacatggagcaaacggaactctcgtatactgctaaacagaatacaaaatagcacaaccactaaggaagactgacaatttcttaaaaagttaaacacacatattgtaagactcagacattccattcttaagcactacccaagtgaaaagagaacatctgtccactcaaggacttggttgggcagtcatcccttggcatctgaaggggattggttccaggatctccttcagataccaaaatccaaggatactcaaattccttatatcaaattgtataacatttgcatataacctacatctattctcttatataccatctctagattatttataatcataatacaatgtaaatgctatgtaaatagttgtttactatatttgattttgaaacctattatttttattgttgtattctagtttgtattgttttgctatttatatttttgatcca

SEQ ID NO: 915122 - DNA, 562 bp, Homo sapiens
ttgattttgaaacctattatttttattgttgtattctagtttgtattgttttgctatttatatttttgatccatggttggttgaacccacagacacagagggccaactgtacaatattgttcatggaagccttcttcataatagccaaaatatctgtaaaccacctaaatatttatctattggtggccgggcacggtggctcatgcctgtaatcccagaactttgggaggccaaggtgggcagatcatgaggtaaggagttcaagaacagcctgaccaacacggtgaaaccccatctctactaaaaatacaaaaaaaacagccgggcatagtggcgagcatctgtaatcccagctactggggaggctgaggcaggaaaaatgcttgaatccgggaagcagaggttgcggtgagccgagatcgcgccactgcactccaacctgggggacacagcaagactctgtctcaaaaaaaaaaaaaaaaaaaaaaawatatatatatatatatatatatacacacacacatacatctatcaatcggtaaatggataaaaaaatatggtc

SEQ ID NO: 915123 - DNA, 600 bp, Homo sapiens
ggggaaccacttagcccagcctcatccgacatgggcatgaaatatctgacatgtttaagaaaaagggagaaatttggtgtggctgcagtrgaggatttcagagagagcacagcaacatacgaggatggggatgaaagctgggctcagatcaacaaggtccttgagtcttgctaacaaggttggattttcatttttagagatttcagagtaattgaaaatttctaagaaatttttaaaaatcttaaataacaccaatcacagaaaacttggtgatgaaaataaaaggctttattgggaatccaaatacccacattgggattcttattcaaccatttactggacgtaaacgtcaacctctctggaatttgttttatatttttctgtgggtaattaaatgaaatgttaggggaatagaaaagtaaatgagataatggatgtgaaagcactttgccaacaataacatactgcaaaaaaagaatgcatccacacactcgattttgcattgcaaactctgctaaaatggaataagaacaaaatctgttatcacaggggcagcctcctccttaagacacaaaagtccaatttataattttattttaa

SEQ ID NO: 915124 - DNA, 603 bp, Homo sapiens
agaaatgcctctcaggctctatccaatgcatacatttttttcatattccttggaatctgggaaccttcgctttctctagattttagatttctatcccagtgtttctggttgtgggatccacgccaatgaagcctcatttatctcctccacttcttgttagttggagttctgcagagaacttggacaatcaaaaaactatgggcttggcatggatgtgaacttcaagtctaaggaggtcaaaaccatctgaggcaggagcgcactttctgagtggggtgagatggagaaggtcattccacacctgaaagccatagctgggatgtggacaggaagggaaagtgtttgttcagcatgtgggaacttgaaaatataggtttgttctcagcatcacttacaaatgtgtctgaagcctatggagggatcttaggtgttggcagtgaagagggtacactgccatctgcggatggaggttacagtcagggtcacgcaggactcaggccctaacatgggcctggaatgcacagccctgcytgatggcatcctcacagctgtgctaacatgaaggaaattttaaaataataatggtctgagttcccatgaagt

SEQ ID NO: 915125 - DNA, 595 bp, Homo sapiens
caggagtttttattctaaatgtgtgcacttttgcaattctgatgccaccagtatctcattaaacaagaatcttcatctgaccagtgtgtcttttatttacaacacacaaaaaagcgaaacgtggtaagtgaaagaagcttcacaaagctgggtatgatcatttttgccccttcttgatatgattttcttttcttcttaattcttcagagaaggaagtattaacatcgtatattaaatgcagcatctagctttgtgttcacgtttttctaatttaacacattgcaattttagtccttcaaaactataaaaaaaatcttggattaacctcaaaggaaaaatgtatgtaggcaaatgaagtccatctaaagagagtatttctccaatatggtatcacttcagtgtcaaataatttcaccactcacaacactagtccagtgctaagaaatgagacccagaactagtgtccagatacatttgcacatacagatatacaaacacatacacatgcttacatatgtacacatatacatgtgtgcatgcatgcaaatacatacatgygcaaatacatatatacatacacacacatatatacaga

SEQ ID NO: 915126 - DNA, 637 bp, Homo sapiens
actatctcgtaaagatacccgcagtgccatattcattgcagcattactcacaatagccaagatatgaaaggaaccaaagtgtccatcaatggatgaatacataaaataaattgtggtggatatatacaacggaatatcatttagccttttttttttttgagatggaatctcagtctgttgcccaggctggagtgcagtggcatgatctcgactgactgcaacctctgcctcccaggttcaagtgattctcctgtcttagcctcccacatagctaggattacaggcacccacgaccacaccccactaattattaaatttttagtagagacgggctttcaccatgttggccaggctggtctcgaactcctggcctcaagtgatccacctaccgtggcctcacaaagtgttgggattacaagcgtagccaccatgcccggcccatttagctttcaaaaagagattctgccaattgccacattatggatgaatctggaggacgttatgctaagtgaaataagccacacacagaaagacaartactgcatgatctcacttatatgtaaaatctataacaaacaaacaaacaaagactcaatggggaaatggggagatgtaggtcaaagaatataaagtagca

SEQ ID NO: 915127 - DNA, 599 bp, Homo sapiens
ttaggtaattcccagatacaatgggggtacaggcattgggtaaatatacctgtttcaaacgggagaaattggccaaaatgaaaaggctacaggcaccatgcaagtctgaaatccaatagggcagtcattaaacattgaagttccaaaatgatctcctttgacttcttgtctcatatccaggtcatgctgatgcaaaaggtgggctcccgaggccttgggcaactccacccctgtggctttgcagggtacagctcccctcctggctgctttcatggactggtgttgactgtctgtggcttttccagggggacaatgcaagctgtcagtggatctaccattctgaggtctgtaggacagtggccctcttctcacagcttcactagctactgccccagtggggactctgtgtgggggctctgaccccacatttcccttctgcactgccctagcagaggttgtccatgagggccccacccctgcagcaaacttctgcctggacatctaggcacttccatmcatcctctgaaatctaagcaaaggttcccagacctcagttcttgacttctgtgcacccacaggctcaataccatttggaagct

SEQ ID NO: 915128 - DNA, 600 bp, Homo sapiens
cataaactgggcaggctgtagacagcaggcttgccaagtaaatactacagccttcctcccaatattgagccctgtcccattgatcctgcaggggagatgtgtagggcatttgttcacggggaggccacaagtttgggcctctcatcactgtgacctcacacccctgttgagtgtgtcgtaaacagaggagccgttcttcaagccccctgccctgagtgcacccctctcattcttttgttattattagcaaattcccccagttcctgatcattctttcttaagcctttagtgactgggtaaggttcttgtggctgactccaagctttcttctaaaaggaatagattctaggggtgagtagaggagacaggaatgtcggagtcagagctcaggaatctgggttccagccccaggtcaatcctagataaactagagggctccttaacttacttccctaggttgactctgggtttttttatcacgctcgacaggactccttatgcatttcttcgaaagagcatccagtcttaacatcatcatttggcctcatttggtttaagaagcagaattagggyaaaagcaatgatggataagcctcattt

SEQ ID NO: 915129 - DNA, 580 bp, Homo sapiens; identical to SEQ ID NO: 915072

SEQ ID NO: 915130 - DNA, 605 bp, Homo sapiens; identical to SEQ ID NO: 915059

SEQ ID NO: 915131 - DNA, 578 bp, Homo sapiens; identical to SEQ ID NO: 914997

SEQ ID NO: 915132 - DNA, 678 bp, Homo sapiens; identical to SEQ ID NO: 915061

SEQ ID NO: 915133 - DNA, 563 bp, Homo sapiens; identical to SEQ ID NO: 915062

SEQ ID NO: 915134 - DNA, 621 bp, Homo sapiens; identical to SEQ ID NO: 915000

SEQ ID NO: 915135 - DNA, 610 bp, Homo sapiens; identical to SEQ ID NO: 915001

SEQ ID NO: 915136 - DNA, 643 bp, Homo sapiens; identical to SEQ ID NO: 915005

SEQ ID NO: 915137 - DNA, 676 bp, Homo sapiens; identical to SEQ ID NO: 915006

SEQ ID NO: 915138 - DNA, 621 bp, Homo sapiens
tgactggagtcaatcataatgtattgtatatttcaaaataactaagtacattttgattgtctcaccataaaaatgataagcaaatgaggtgatggatatgttaatttgctcagtttaattatttcaaattatatgcataaatcaacacatcacatggtaccccataaatatatataattatgagttatcaatttaaaagaatattaataataaaaacaataataaactagaaacaaatgtgaactggtgggacattaatatacactgttacacccatatgggatgatgccatgtggccattaaatcactcagtggaataatatttgatatgaaaagtgttctggataaatttctaagtagaaaagtgtgctacaaaatattttgaacagggcgaccatcgtcttgaaatatgtctgacctggagaaagactagaagaaaatatcaacagtggttattcttacctggcagggttttgggtaatttccctctgttcttttctgtgyttccaaattttctgaattgctagcatattcattttagtaactatttaaatatatactttaattttaaaaatgtcaataagtaggtaagcagtaatgaacaaaaataaattgtacagc

SEQ ID NO: 915139 - DNA, 628 bp, Homo sapiens
tagaagactcctttttcctttcacttccctgagcccagaggactctataaactstgtctagccaacaacatagttccatttctttcagcctcagcttcctctcagaggtaacttaggcctctctacaacctgacttcaggccatggttttgtttctggtctccgtcttgcatgaaatacttgcaagggaacactaactacaggagcataggtctcaaccacaactacctgccttggattttggagcccaccatgcccataggttcagcccaatccctattctgtgcatcttattgaagatgccaaattggttctttaaatcgtctttggtttcatggaagagaacactttcaaaaatgtgtccttcctctgaaatccagcatttttatttattctactgtactgtttcttaggcttcagattacggttacatatattggatcaattgaacaatttgtcgctgcaggtcaaattcttccattgattctttaattggacagtttgttcctgtagattcttatccttttgtattttgctttgatttttttatatggtcactcattatcaagcaaaagggagatttatctatatgaatgtttgccaataatcagaatgtgtgtgggttacca

SEQ ID NO: 915140 - DNA, 668 bp, Homo sapiens; identical to SEQ ID NO: 915048

SEQ ID NO: 915141 - DNA, 605 bp, Homo sapiens; identical to SEQ ID NO: 915050

SEQ ID NO: 915142 - DNA, 653 bp, Homo sapiens; identical to SEQ ID NO: 915051

SEQ ID NO: 915143 - DNA, 623 bp, Homo sapiens; identical to SEQ ID NO: 915052

SEQ ID NO: 915144 - DNA, 613 bp, Homo sapiens
cgtaacaaacctgcacattgtgcacatgtaccctagaacttaaagtataataaaaaaataaaataaaaaaataaaagaagttaaagtacttatacttccttattcaaagacttaccacaaagccacattaactatgtgatactgacataaggatagacatatcaatcagtggaataagggaaagtgcccagaaacaaacccttacatttattatcaattgatttttgacaagagcgtcaggaccaatcaatgggaaagaataggcttttcaacaaatggtgctgaaacaactgggtaatcatatgcaaataggtggagttggtgtctatctcacatctcacgccatatgcaagaattaactcaaattttaccaaaaacctaaatgttagagctaaagttataaaactccttatattagttgttctcacactgctaataaagacatactcaagactgggtaatttataaagcaaagagatttaatggactcacaattccatayagctggggaagcctcacaaccatggccaaaggcaaaggaggagcaaagtgaagtcttacatggtggcaggcgagagacagagagcatttgcaggggaagcccaccttttaa

SEQ ID NO: 915145 - DNA, 587 bp, Homo sapiens
tggaagcagccaggagggaggctgtaccctgcaaagccacaggggcagtgctgcccaagaccatggaaacccacctcttgcatcagcaagacctggatgtgagacatggagtcaatggagatcatcctggagctttaagatttaactgccttgctggattttggacttgcgtggggcctgtagcccctttgttttggccaatttctcctatttggtatggctatatttacccagtgcctgtacccccattgtgtctaggaattaactaacttgcttttgattttacaggctcataggtggaagggacttgccttgtctcagatgagattggaatgtggacttttaagttaatgctgaaatgagttaagactttggggtactgttgggaaggcattattggttttggaatgtgaagacatggaattttggaggggccaggggcagaatcataaggwctggctctgtcctcacccaaatatcatcttgaattgtaactcacacaattcccacgtgtcatgggaagaagccggtgggaggtgattgaattatgggtgcgggtctttcctgtgttgctcttgtgatagtga

SEQ ID NO: 915146 - DNA, 600 bp, Homo sapiens
ctgtagtcttgtagcatagtttgaagtcaggcataatgcctctggctttgttctttttgtttagaattgccttggttccatatgaagtttttaatagtttttttctaattttgtgaagagtatcattggtagtttaataggaatagcattgaatccgtaaatttctctgaacagtatggccatttaaacaacattgaatcttcctatccatgagaatggaatgtttttccatttgcttgtgtcatctctgattactttgagcagtgttttgtaatttttgacatagagcactttcacctccctgattagctgtattcctagaataaccttgatttcaaaaccaaagtcttgacgcaaaggaagattgcagatcaatcttcctcctcaagatacatccaaaatattaagcaacttcttaggaaattatcaaattaactcaaatttgattgtatgtaaaacaatgatatctttttccactcataaattatgtaaaaagtaggcagtgakgtaagtattaggaaagtttagaggaatatcgagatctcatacactgttgttgtgtatatggataacacttctaggtgatgatttgacagtact

SEQ ID NO: 915147 - DNA, 657 bp, Homo sapiens
ggcctagcattgaagaataacatgtgttccgaaccttaaaaatacttctgacatttgatttagtatsctggctctaactggagtctaaaataagcaaataatcaaagatggggttactgattacttagtaaatgttcattaaaatattactttaaatgataaagaattgaaagcatcctaaatatataaaaattgagttaatattaataaaacatgctgcatttatacagaataatatggtgcagtcattttgaaataatatataattacataggggagtattcaaaataatcacattacaaagaatacaaaaattagtttttctatattttataattattattttactaaagaaataatactagttactcctaagtagtgaataatgtgtatgttttttctaactttgttttccatactgtttgcaatgagcaattatggatagaaaaaaacaatgaatgtttttatttttctaccaaagtaactcagagtccaaattcctgtaatcttttcttatggagctaaatttctttttttaaatagtttctaatgtttttctctagaatattccttaattttctatattcttaataaaattcagatgataaaatagaatcaatattctcataagagtttgaatgatgctatacagtggaa

SEQ ID NO: 915148 - DNA, 572 bp, Homo sapiens
ctgataaccttctagtttcgatctgatgctctaatttctgaaaaatcccacttttctttttctgttctattttaacctgcatgtttaattaattcacaattctcagcatgaaytaacatatggctgctagaaagttgcaaactggagattttgttggctgtaaccttgtctactatcgctaaaaaggaaaacaatcaattatttcccgattttttaaaaaagatatacattagataaagtatggtggagaaaatactctcttctgaaatgacctcgccaaatagtctttatgtttttaactacgaagtgaaccatatgcaatataatcacttgcacatattcaataaaaaagcagggttaagccaaattttgttaccaccaagaatatttgtactatacataagatgttttcaatagaaggattgagactttttttatctggcttataaaaggaaattgctcccttccctaaaggaacacagagaaaagctgatacatcttcagaaatattcattacagctcatatcttttaagtgaaactcgctatctggtgttgattctataaagattaa

SEQ ID NO: 915149 - DNA, 607 bp, Homo sapiens
gattggaaagggaagaaaaagaaacaggacacagcagtgcaaataccgttatcaargataatgtcagaagcctcagaggcaagtcactaaaaaggaattgaagtctgagaaataacagcttattttcagagacaacaatgcttaacatgtttagttttatagaatacccaaagagttccctgcctagcaagctttagaatctggaaatatgtccctttatctaatagaaggctctcctgctacaattttaagtgcttttcctctatcctcaatggaaatgaaaaacataatctggtttttctgtaaatagcaataaaaaaatgaacaaaagtataggaaaaataataagaaagagaaaattttcttttcttgataaaaatgtcaatactatttcatcaattattttaagaatcaacagtgagaattatctccctttctacttcctttgggataagagtcaacagaactgggccagtcctgaaactttatgtgcacacaaatcacctgagaatcttgttaaagtgtagagtctaatttaatagaggagaggcctgagattctgaattttgaacaagcacaaggtgatgccaatgtgtcctgtctgcag

SEQ ID NO: 915150 - DNA, 704 bp, Homo sapiens
cctctttgctttagaaattactcagtctcgggtagttctttatagcaatatgagaatggacaaatacaattaattaagtcaaattggaagactcatgatcaatgttctgcatttgttatcagtggcaggacaatgggcatgggaggaatcagagatgtcagcttgatgctctggaactaatacagtatgcaacctagaagagacctggcttcctacagtcttctccaaaattacctaatgcaagcccaaatcctgtaacaaaccctcctcactccatcttattgagatatcttgctgtttctcctattgtaaggtctctgttgtggcaacaagttaataaacccaactttgtttatctgtaggagtattcctggtggtcctggttggcaggcttcaacagtgcagtgtgagaatatgatataagagtaaacagagatgggacttctaaactggaacaaagaaaacttcttattcaagcttcacctttctcacctattgaacatttgcccacttaggcaaattacttagtctccatcaatttcctcatgatattgatttcccaagatagttgtcagaattaaataaaattctagggaagtattttttaactcactatgtaaacataggaggtataattattaatggcataagaggtattctgcagggatatttytagggaacagctctataatttggaaagtgat

SEQ ID NO: 915151 - DNA, 666 bp, Homo sapiens
tacacacgcagactctacaaaagctaaatattagaaaattttatataaagttttgattcactcattctctactattaatttctttatctttgcaatatttctttataaaaggacactcatcaggtattattcaagaagcacagtaccttaactgcaggaacaaatgaacacttgcagacaatgttgtatctaatattcagaattctgagaagcatgatccctttgcagaattgagcctggacaaagtctatttccactccagtgggctgcagtttacactaacaaagagcattactttttgactagctgaggaatgaataaaaaatgaataaattaaatttctctgtctctagtcagaattacaattgagattaacagacttttaagtcagcgagttatttccattactatattaataaatttgtgttttgtctgccaagaatatttcaaggccctgtgagtctcccacagaaaactctttttaaaacttaccactagactctataattgcttctcctcttttctcataaaaatgccattctctcagagccaaacartcccagttaggtatggacagcaggatgtaggggttggggagtgggtggaagacgctgaatacaccaattttgtgaaattaacttatatgaccattgatctttaattggt

SEQ ID NO: 915152 - DNA, 669 bp, Homo sapiens
tgtgtaaaaataaaccctcagaggacagtgtcaaggttgaaaaattctaaattgaaccattctctctgttgatgcctgttttcagattcatgtggtttttcatgtgtgtcttcaatgsagatcaaaatcagggtgctgtcaagaaaggtgagtagaatcccaagtgtttttcagcacaactaactcccatgtggcaaagcccatgtgtcgttggcatgggctccagtcctggccttccaaataaagagagggagacccatttgtaaccagacatgagtaatgtttatgtacagggcctaagagagaaggcaccgagtctcccaagatgtatcatccttccctgatccagaattgttcagggcctactaggtactctgtggggtaaggatactggaatctatgtaggagacaggtaaagtggataggtcttctcttaacatgacttaattgacctgtgcttatgccctttcaacatagttcttcttggtctgatctgcctgtctgggggattaggagtgtaacattaggccagcactatctcaggttggtaattagacttccagtgctgcattttaaattcttctcatacaattctcttatctgattgatgagaagccaagtccgaaacagggagcatctttgccaagcacatcgaacattcttgtgcac

SEQ ID NO: 915153 - DNA, 627 bp, Homo sapiens
tctcgtccctgaggtcagaaagaacccctcccccgctgccctaggactcacagatttcttcacaaaagacacaaaytctgcatggtcaaagcacatcacacatgttctattttcaagtttctctgttttattgtgtttgattttttttctttttttttcctgaaacaggatctcaccgtgttgcccagactgcagtgcagtggcacaatctcagctcactgcaaccttcacctcccggttcaagcaattctcctgcctcagcctcccgagtagccgggattacatgtgcacgccaccatgcccagctaatttttgtatttttagtagagacagggtttcaccatgttggccaagctggtctcaaactcctgacctcataatcccccacctcgacctcaaaaagtgctgggattacaggtgtgaaccactgcacccatcctatcgtgttttatttttgtttgtttttttgtttctctttttttggtggggcaggaagcagagtggaccgttttctatttgttatcaagataaataaatcaggcaaaccaccactttattctaaagatctgttttgagagagccatagtcagtttccccagtgtaaggaggaaatcattcctatatact

SEQ ID NO: 915154 - DNA, 337 bp, Homo sapiens
ggggaacactgtctagggaaacgctaatagtgatcaagtaagtttaggccaatcagttttaaattaaatatatgatttttaaattctgattttcttgcgaaggtgatcacttctaatctctttccctagctttcctcttaagcaacagagatatatctgtacatctttattgaacatctgtatatctttacatccctactgtatatctatacatccgtatrtctctactgtacatccatacatctatacatctctattgtacgtctatacatctgtctctactgtacatctatacatctgcatgtctctactatatgtctgtacagctatacatgct

SEQ ID NO: 915155 - DNA, 516 bp, Homo sapiens
tagcaggtgttaggttgtttggggggtggttgcatcaagttagaaagttaaatatatgttaaaaaggtatatatggtgccaagttaacaatgggttgactacgtagttttatgcatgccaactgrtctactagcactatgattcccagaattatcttctgggaaacctgagcaagatttggaaggcagaagtgaacggcagccattgactcttcaaagaccatcattgttagtgcaacaagggatagaagcagaagtgctggcagattccagccctcattcatgttttccctcctctgtatctagctcttcttcctgactgcaagctttgctgactgtgataggtaattttatgtgtcaactcagagggcattttgagatgaaattaacatttaaatcagtgaactattaggtaaagtagattgccttccacaatgtgggtgggcctcatccaatacgttaaaggcctgaactgaacaaaaagatcagcctccctgagcaagaggaacttctccaa

SEQ ID NO: 915156 - DNA, 437 bp, Homo sapiens
aatccatgaagacagagtgccgggggcagagaggagcaactgcttcacaggtacagggttacattttgggccagattaacaatttcagggctagatgggggagtgtttgcaccacatggtaaacgtactcratgttactgaattgttcgtgttaaaatggttgattttacattgtgtgaattttgcctcaatttaaaaaaatacaatgtcaggtaacaaagggaaaccccagagggagagaaatgtggaaggcccatgtcaattgttcaatgatttaaatatcatttattcatgtaattatttcctgagcattaggacaaagtgtcaaagcactaccagatggctattactgacagctgaatagcaggcaaaaatgtgctttgttcatttcactaaatcttttttctttagcatgaaatatacttatgcacatataa

SEQ ID NO: 915157 - DNA, 645 bp, Homo sapiens
ggaaatcaggaaaacaattccattgacaatagcatcaaaaaatatttaggaattaaccaaggagatgaaagacttataaaatgaaaagtacaaaacattgaatggaaaacatcgaacaatacaaagaaataagtggaaagacatcttatgttcatggattggaagtcttaatattgttaagatgtcagtactactcaaagccatctacagattcaaggcagtccctatccaaattctaattatggtttttgcagaaagactaactcattctaaaattgatatagaatctaaagacactctgaataaacaaagcaattttgaaaaagaaaaagctgtaagacagttctccaaataagatatacaaaaggtatacacctttgaaaaatgaaagcaaaataaggacattcttagataagcaaattttgttgttggctgacatcaccataaatactaaagaaagtccatcagactgaaagcaagtgacccccgatggcaatttttaaaaatttttaagttctrgggtacatgtgcaggatgtgcagatttgtttcataggcaaacatgtgccatggtgatttgctgcacctatcaaccaatcacctaagtccagcatgcattagctatttttcctgatgctctccctcc

SEQ ID NO: 915158 - DNA, 646 bp, Homo sapiens
ctcatgggttggagctgagtgcctgcagctttttcaggctcaagatacaagctgctggtggctctaccaatctcaggtctggagggttgcagccctgttcccacagatccaccaggcagtgccccaatggggactccatgtgcaggctccaatctcacatttcctttggcactgacctagtagaggttccctgtgggggcttcacccctgtagcaggcttctgcctgggcacctagcctttcccatacatcctctgaaatctaggtgaaagttgccaagcctccttcactcttgcattctgtgaacctgtatatttaacaccacattgaagccatcaaggcttatggcctgcactctccaaagcagcattctgagctgtacctgtggccctttgagctgagcctggagccagagttgcctgaaggcagagagtagcatcctgaggctgagcagggcacctataccttgggcctggcccctgaaaccattctttcctcctaaaactctgggtctgcgatgggaggrgctgtcctgaagacttctgaaatggcttcaaagccttttccaattgttttggatattggcacttggctttagtcatgcaagtctctctagcaagtggttgctctacaggatccctcccctg

SEQ ID NO: 915159 - DNA, 646 bp, Homo sapiens
ctcatgggttggagctgagtgcctgcagctttttcaggctcaagatacaagctgctggtggctctaccaatctcaggtctggagggttgcagccctgttcccacagatccaccaggcagtgccccaatggggactccatgtgcaggctccaatctcacatttcctttggcactgacctagtagaggttccctgtgggggcttcacccctgtagcaggcttctgcctgggcacctagcctttcccatacatcctctgaaatctaggtgaaagttgccaagcctccttcactcttgcattctgtgaacctgtatatttaacaccacattgaagccatcaaggcttatggcctgcactctccaaagcagcattctgagctgtacctgtggccctttgagctgagcctggagccagagttgcctgaaggcagagagtagcatcctgaggctgagcagggcacctataccttgggcctggcccctgaaaccattctttcctcctaaaactctgggtctgcgatgggaggggctgtcctgaagacttctgaaatggcttcaaagccttttccaattgttttggayattggcacttggctttagtcatgcaagtctctctagcaagtggttgctctacaggatccctcccctg

SEQ ID NO: 915160 - DNA, 636 bp, Homo sapiens
tatcaaaacattttgatcaaaaataaaatatagaagttcttattcccttcatttccacacaaaatcacacatggggcacagttgtctcctttaagatatacataaatacttttaccccaatcacattcaccccatgcacattcccactcacacatttaccacatgtacatctaaatgtcaacaaaaatacaacacagagagagccaagtggaaagcagatgatagattaagttaggctatacaatgaagaggggagaaagaaaaaggcggcaaaaaaaagctgatcatctgaggccatggcaatccctttacaccaaaatcctttcttgagacctgcacggtgactcctcccaccacatcacagccctagctaaaaggagcaagcaaattccagctacttgggaggctgaagcaggaggagagcttgaggtcagaagttcaagaccagcctgggcaccacagccaccctctctctcaaaaataaaaataaattagccaggtgtgatggtgggcacctgtagtcccagctacttsgtaggctgaggctaggagtttcagtgagctatgatagtaccactacactccagcctgggagcagggccagaccctcatctctaaaattaaattaaattaaag

SEQ ID NO: 915161 - DNA, 632 bp, Homo sapiens
taatttcactcccttcttttaataggtagagaagatgaatcacagaaaggctagtatttgtctcaaggtcatataaatgctagtatagcatctggggtcactggaaacgccagagaatgcagaaaatgccaggwctcctgaaattggcatgtggtccttaaaatgctctgaatcggccgggagcggtggcttaacgcctgtaatcccagcactttgggaggccgagacgggcggatcatgaggtcaggagatcgagaccatcctggctaacacggtgaaatcctatctctactaaaaatacaaaaaaaaaaaaatagccgggcgtggtggcgggcgcctgtagtcccagttactccgggaggctgaggcaggagaatggtgtgaacccgggaggcggagcttgcagtgagccgagatcgcgccactgcactccagcctgggcgacagagtgagactctgtctcaaaaaaaaaaaaaaaacaaaaacaaaaaacaaacaaacaaaaaaaaacaaagaaaaaaagaaaaaagaaaagaaaaagaaaaaagaacactctaaatcatcccaccctgcagcagtcacaccaaatccttcatttcatagctttgtgaacactgcaagaattcggctcc

SEQ ID NO: 915162 - DNA, 586 bp, Homo sapiens
gatataagttattcctacagaacaatccatttttacctttaaagatgagtttgtgtacttcagaagatgtgacgccagttggccaccatctcaatcagtagtaagtcacaccatcaatcccttgttaatgatggaactcatgtgaagtcaagaggaaacataatactctttacctcattccctggtagcagagaagttgactcatctttaatgtcagttattgagatgtaacacagaatcatattctacagaaaatatgtgataaactttacacaaatgaatacactttagaaaggcagtcatttggattttctttttgtcagagaacattgcaagtcttcctgaagaatttctgagaaattaaacactttatatgacattttacagcatgtagagaggttgaaactcagagaactaaaactcagatgatagtctaaatacttaatttgttgctgctttatgctggacatgaaaagtgtgagcttaaattataaataaaaaactrttgagctatcaaactatttggggtacatccttatctttcctctaaattactctttattcccattaaaatccacctatcccg

SEQ ID NO: 915163 - DNA, 623 bp, Homo sapiens; identical to SEQ ID NO: 915095

SEQ ID NO: 915164 - DNA, 653 bp, Homo sapiens
acctgggtgatgggagcatttgtacccaaaacttcagcatcacacaacatacccatgtaaaaacctgcacatgtactccctgaatctaaaataaaagttgaaattttttwaaaaagaatgagttcacctaggatatactgcattttaaaataatttgatttttaaaaaatttaatttttaaactaatagtaaaattaactatttttggtgtacagttgaaacaattttaacacataaacagatttgaattcccatattataatctggatgagaagttttactaccctagaaatttcccttttgctcttcctttgtagtcaccccttcacctctcctccatcctctcaacccttggcaaatactgacctattttctgtcactctagttttgtgttttaaagaatgtcatctaaacagaattataaagtgtgtacacttttgagacttgacttttttcactaggcatgtttttgacattcattcaagttgttgcatataaaagtagttcattcttttttattgctgagtagtattccattctatggatgtatcacagtttgtttattcattgatttattgaagtgcatttgcattttttcccagtttttggtgattatcactagaactgctataagattcatgtgcagattttat

SEQ ID NO: 915165 - DNA, 651 bp, Homo sapiens
ttgttaacagctttaatgaggtgtaattgatatacaaataactacacatatttaatgtggacaatttggtgagtttcagtatatgcaaacacctgtgatagcatcagtacatttgaggttacagatgtaaccgtcacctcccaaagctttcttgtgcccctatgtttttgtttttgtggcgagaacacttaacatgagatgagccttcttaacaaattttgacgtgcccagcactgtattgttaactgtagacactaggctgcagaacacatctttagaacttacttacaggcagttccattctcagcaaagattgcgtttgtctggaggtccaaagtccttaattaggtctgtaataatctctttgctctggtcatgtccagttgttgcagcaccatttgttgaaaagattatcctttctcaatggaattgcctttgttcctttctcaaagattagttaatggtatttgtttgggtctgtttctgagctctgtattgttttccattgacctgttcttccattcttctagccttttgcctgtatcacactgtctygactaatgtacctttatgtaatttataaactccaggagtttagtattataagttttttcctttttttcagtattgtgttggctattctgcatcttt

SEQ ID NO: 915166 - DNA, 577 bp, Homo sapiens; identical to SEQ ID NO: 915098

SEQ ID NO: 915167 - DNA, 664 bp, Homo sapiens
cttccagcttaagtgttttaagagggacagtgggcaacactgctgtagtcataaaccyatggttgggcctgagctcatgccctgctcctgggtctactatcaagacatccctgagcagaaagagcctgcagcattgtcctgattgccacaaatcagcattaaattaggcatttatcatatgtgaaaagacactccatctgcagatctccaccattgtgtaaagttgtcacagacaatatgctacttggcaatctgcacatttaacaacaaatgggaaagttcaatagcaaccagaaataaacttgggctttagaatttcatttcttagatgtagttagtgtttggccagttcccagaacattaccttccatttatgagaatgtagagctaagcaaattcaaacctaaaaacatcttttaacttcctatgtgaacaggaaggaagagagaggatgaatgtaataagattctctgatcataggaaattggaatttgctatcttgccagaccatttttcttaatgcacatctgaagttggcaacatttccttggcagaaaaatgaaatcattctgattcaaagaaacatgaaatgagttggtaaagatttttctaatgacagtgtaggaagttttatgctgacaaataaaaggtaaatatacctttc

SEQ ID NO: 915168 - DNA, 621 bp, Homo sapiens; identical to SEQ ID NO: 915138

SEQ ID NO: 915169 - DNA, 628 bp, Homo sapiens; identical to SEQ ID NO: 915139

SEQ ID NO: 915170 - DNA, 605 bp, Homo sapiens
catctgactttttttatatgtttaacttttcattggtatttttgtctcccctagtgaaatgtaagcttcatgaaaagaggttgcttgtctatttgtatactatgataacccctgaatgtgaaacagtgccggaggtgtgggagacactcacaaaaatgttttcagtgaatgaatggtaaacagaaaatgtcttagaggccccatcttactttggaataaaagtatataaataaataatgatgagatggtaaaacaaatatgtttatcgtgtatggaggatatatttatatatttatagtgtataattagatatattaatttccagttgtctttaaaatatatccagcatcagaccacgtctcaccatcaccatcacccaagtcaccaccacccctcaccagagaaattgcaattcccctgattctgtgcttttgaccttgccccattatatctgttctccacagagaagttagtgggatcctgttagactccttgttctttgtcttcttatgaccctccatggtatycccattaaactaaaaatactactttattccaaagtaagatgcagccactaagactatataaatatatattcaagaaga

SEQ ID NO: 915171 - DNA, 609 bp, Homo sapiens
tgaatcactaggaagagctctcttcaaataatcatctggcctgactctctggtgctccatctcacacttgcagagcacctccatgcagccrttgagttcagaattgagtttttacttgcactgaacatcagcagtcaaaaaagttgaccaaatgtttctattatgtgctggatgattagagtaaaaaaaaaaaaaaaaattctatttaaagttggagttgggaggttaaggtgggaggatcacttgaggtcaggagttcgagaccagcctggccaacatggtgaaaccctgtctctactaaaaatacaaaaaaattagccaggtgtggtggtgggcacctgtaatcccagctacatgggaggctgaggcaggagaatcacttgaacctgggaggtggaggttgcagcgagccaagattatgccactgtactccagcctgggcaacagagtgagactctgtccccaaaaaataataaaataaaataaaataaagttgggaacacaaagttgcatttgaaagcaatcacagacatcaccatatctaattctcacactttgcaagatataaaatgatattgccagagtcatacatccagtgctttctccacc

SEQ ID NO: 915172 - DNA, 653 bp, Homo sapiens; identical to SEQ ID NO: 915051

SEQ ID NO: 915173 - DNA, 562 bp, Homo sapiens
taacccttggctattggattccctggggagtcttttctaagcacttttgtcctctcaccccacatgctttcctctaaggtctcatgcattcccatgctgtatggtttctacaactttatccttaacccaggcctctctctggagtaccaggctagaatatccaattgtctatttcacatttccatttagaatgtttccagataactcaaatttaacccatcccaaacttgattcattttcttctcttctcctttccccttcaaaaactgctctttttccagttactcttgtttcagggattggtaatcaccatcctcccacttgtcaatcatctgggttgtcacccttgaccattccctctctttctcttgcagccaaacaccactgttgttggctttgccttctagacagctctgccatacatccacttgtttttgttcccactgccacaatcttactccatrctaccactgcttctctcccagatgacttgcaatggcctaataattagactcctggtgaccattttaacccactcccttctgtaaaggagaccatgcag

SEQ ID NO: 915174 - DNA, 630 bp, Homo sapiens
ttttataccagtaccatgctgttttggtcactgtagtcttgtagcatagtttgaagtcaggcataatgcctctggctttgttctttttgtttagaattgccttggttccatatgaagtttttaatagtttttttctaattttgtgaagagtatcattggtagtttaataggaatagcattgaatccgtaaatttctctgaacagtatggccatttaaacaacattgaatcttcctatccatgagaatggaatgtttttccatttgcttgtgtcatctctgattactttgagcagtgttttgtaatttttgacatagagcactttcacctccctgattagctgtattcctagaataaccttgatttcaaaaccaaagtcttgacgcaaaggaagattgcagatcaatcttcctcctcaagatacatccaaaatattaagcaacttcttaggaaattatcaaattaactcaaatttgattgtatgtaaaacaatgatatctttttccactcataaattatgtaaaaagtaggcagtgakgtaagtattaggaaagtttagaggaatatcgagatctcatacactgttgttgtgtatatggataacacttctaggtgatgatttgacagtact

SEQ ID NO: 915175 - DNA, 581 bp, Homo sapiens
cagccaggagggaggctgtaccctgcaaagccacaggggcagtgctgcccaagaccatggaaacccacctcttgcatcagcaagacctggatgtgagacatggagtcaatggagatcatcctggagctttaagatttaactgccttgctggattttggacttgcgtggggcctgtagcccctttgttttggccaatttctcctatttggtatggctatatttacccagtgcctgtacccccattgtgtctaggaattaactaacttgcttttgattttacaggctcataggtggaagggacttgccttgtctcagatgagattggaatgtggacttttaagttaatgctgaaatgagttaagactttggggtactgttgggaaggcattattggttttggaatgtgaagacatggaattttggaggggccaggggcagaatcataaggwctggctctgtcctcacccaaatatcatcttgaattgtaactcacacaattcccacgtgtcatgggaagaagccggtgggaggtgattgaattatgggtgcgggtctttcctgtgttgctcttgtgatagtga

SEQ ID NO: 915176 - DNA, 664 bp, Homo sapiens
aaaaataaaccctcagaggacagtgtcaaggttgaaaaattctaaattgaaccattctctctgttgatgcctgttttcagattcatgtggtttttcatgtgtgtcttcaatgsagatcaaaatcagggtgctgtcaagaaaggtgagtagaatcccaagtgtttttcagcacaactaactcccatgtggcaaagcccatgtgtcgttggcatgggctccagtcctggccttccaaataaagagagggagacccatttgtaaccagacatgagtaatgtttatgtacagggcctaagagagaaggcaccgagtctcccaagatgtatcatccttccctgatccagaattgttcagggcctactaggtactctgtggggtaaggatactggaatctatgtaggagacaggtaaagtggataggtcttctcttaacatgacttaattgacctgtgcttatgccctttcaacatagttcttcttggtctgatctgcctgtctgggggattaggagtgtaacattaggccagcactatctcaggttggtaattagacttccagtgctgcattttaaattcttctcatacaattctcttatctgattgatgagaagccaagtccgaaacagggagcatctttgccaagcacatcgaacattcttgtgcac

SEQ ID NO: 915177 - DNA, 604 bp, Homo sapiens
gattggaaagggaagaaaaagaaacaggacacagcagtgcaaataccgttatcaargataatgtcagaagcctcagaggcaagtcactaaaaaggaattgaagtctgagaaataacagcttattttcagagacaacaatgcttaacatgtttagttttatagaatacccaaagagttccctgcctagcaagctttagaatctggaaatatgtccctttatctaatagaaggctctcctgctacaattttaagtgcttttcctctatcctcaatggaaatgaaaaacataatctggtttttctgtaaatagcaataaaaaaatgaacaaaagtataggaaaaataataagaaagagaaaattttcttttcttgataaaaatgtcaatactatttcatcaattattttaagaatcaacagtgagaattatctccctttctacttcctttgggataagagtcaacagaactgggccagtcctgaaactttatgtgcacacaaatcacctgagaatcttgttaaagtgtagagtctaatttaatagaggagaggcctgagattctgaattttgaacaagcacaaggtgatgccaatgtgtcctgtctg

SEQ ID NO: 915178 - DNA, 661 bp, Homo sapiens
acgcagactctacaaaagctaaatattagaaaattttatataaagttttgattcactcattctctactattaatttctttatctttgcaatatttctttataaaaggacactcatcaggtattattcaagaagcacagtaccttaactgcaggaacaaatgaacacttgcagacaatgttgtatctaatattcagaattctgagaagcatgatccctttgcagaattgagcctggacaaagtctatttccactccagtgggctgcagtttacactaacaaagagcattactttttgactagctgaggaatgaataaaaaatgaataaattaaatttctctgtctctagtcagaattacaattgagattaacagacttttaagtcagcgagttatttccattactatattaataaatttgtgttttgtctgccaagaatatttcaaggccctgtgagtctcccacagaaaactctttttaaaacttaccactagactctataattgcttctcctcttttctcataaaaatgccattctctcagagccaaacartcccagttaggtatggacagcaggatgtaggggttggggagtgggtggaagacgctgaatacaccaattttgtgaaattaacttatatgaccattgatctttaattggt

SEQ ID NO: 915179 - DNA, 518 bp, Homo sapiens
tagcaggtgttaggttgtttggggggtggttgcatcaagttagaaagttaaatatatgttaaaaaggtatatatggtgccaagttaacaatgggttgactacgtagttttatgcatgccaactgrtctactagcactatgattcccagaattatcttctgggaaacctgagcaagatttggaaggcagaagtgaacggcagccattgactcttcaaagaccatcattgttagtgcaacaagggatagaagcagaagtgctggcagattccagccctcattcatgttttccctcctctgtatctagctcttcttcctgactgcaagctttgctgactgtgataggtaattttatgtgtcaactcagagggcattttgagatgaaattaacatttaaatcagtgaactattaggtaaagtagattgccttccacaatgtgggtgggcctcatccaatacgttaaaggcctgaactgaacaaaaagatcagcctccctgagcaagaggaacttctccaaca

SEQ ID NO: 915180 - DNA, 676 bp, Homo sapiens
gtgaacagaaaacctagagaatgggtcaaaattcttgcagtctatccatttgacaaaggtctaatatccagaatctcaaggagcttaaatttacaggaaaaaaacaacctcattaaaaagtaggcaaaggacatgaacagacacttctcaaaagaggatgtacatgcagccaacaaacatatgaaaaaaaagctcaacatcactgatcattagagaaatgcaaatcaaaaccacaatgaaataccatctcatgccaatcagaatggctactagtaaaaagtcaaaaaaacaacagatgttggtgaggttgtggagaaaaaagaacacttttacactgttggtaggagtgtaaattagttcaaccattgtggcaatttctcaaagacctagaaacagaaataccatttgaccaagcaatcccattattgggtacatacccaaaggaatataaatcattctattataaagatacatgcatgcatatgttcattgcagcactatagcaaagtcatggaatcaacctaaatgcccatcaatgatagactggataaagaaaatgtggtacatayacacgatggaatactatgcagccataagatgagagcatgtcctttgcagggacatggatggagatggaagccattatcctcagcaaactaatgcaggaacagaaaac

SEQ ID NO: 915181 - DNA, 676 bp, Homo sapiens
gtgaacagaaaacctagagaatgggtcaaaattcttgcagtctatccatttgacaaaggtctaatatccagaatctcaaggagcttaaatttacaggaaaaaaacaacctcattaaaaagtaggcaaaggacatgaacagacacttctcaaaagaggatgtacatgcagccaacaaacatatgaaaaaaaagctcaacatcactgatcattagagaaatgcaaatcaaaaccacaatgaaataccatctcatgccaatcagaatggctactagtaaaaagtcaaaaaaacaacagatgttggtgaggttgtggagaaaaaagaacacttttacactgttggtaggagtgtaaattagttcaaccattgtggcaatttctcaaagacctagaaacagaaataccatttgaccaagcaatcccattattgggtacatacccaaaggaatataaatcattctattataaagatacatgcatgcatatgttcattgcagcactatagcaaagtcatggaatcaacctaaatgcccatcaatgatagactggataaagaaaatgtggtacatacacacgatggaatactatgcagccataaratgagagcatgtcctttgcagggacatggatggagatggaagccattatcctcagcaaactaatgcaggaacagaaaac

SEQ ID NO: 915182 - DNA, 627 bp, Homo sapiens
ttcattttttcccttctgaaatttgaactgtatcatttrctaaattattgtatagacttagatctatttctggactttctattcaagtgccaataaccactacacctttatgatgttttaacatcaatccagtagtactgtgtccttgttttgcttgcaattttcagactattttttcatagctgttcttgttgcttattattccataatttaatttataaattccaacacaattcccaataaaataccaatattctatttttaattggcaaaactaattctaaagttcattgagctttctttgtaatgagaatacatttctttagtgttggaattggaaattttacttgattcttctttaaatctcttttttcctatattgcattatccaccaccactcccaatcctagtccttgggtttcagttccatcatgtcttaataattttaaacatatttagtgtatattctctttatatcctcattgtaggtatattatctcaaagtctaatattctagaatccagcatcctgatctcactgtttatgattccctgtctcactaattttggctcatatcatcatttggtcattttgattagtaattattaagggtttatttttctgtga

SEQ ID NO: 915183 - DNA, 627 bp, Homo sapiens; identical to SEQ ID NO: 915153

SEQ ID NO: 915184 - DNA, 337 bp, Homo sapiens; identical to SEQ ID NO: 915154

SEQ ID NO: 915185 - DNA, 629 bp, Homo sapiens
tttggagaagggggcattatttattacctaaaaaaaatagggcttaattcattaactccaatttgtaatcatctgaaatcttcaggctgctttcaccagaattcccatcaaaactagatcttcacattgactttgtgttggtttctaacagacctttcaacctatttagcaagtctagaagtgattttctgctatttgatgtagctccagctattccaatcagcttgtaaatttcatgaactcatttggtatgctttcctccaagtcaatgttttctaaaaattaaaataggacctatttgaaagatgaccttaactgatattccttgggtatttataaccagtcagctaaaatccacttagcaatactgtcatcctgcccatatttttctaattcattcataatgcaatcatatacaatacctttctgaaatatttggtatatagttttcactagacataacatactttacaaatggtagtctgttataaattgttagtgaatctgttctggctcttagtgactagcaatttctaaaattaataaaaactggcagacaaaagtaaactggcccagagtctacaatttctaaagtatgctttttyctactttttgaaataaagttgccg

SEQ ID NO: 915186 - DNA, 608 bp, Homo sapiens
ctgcagagcctgatcacaataaccagggctagagagcagtgtttgacaatgcagatasttgcctgtttttctaaataaagggaacatcaaaaactagcagaggatagaggaaacttgggatccctctgccctgtgaaggaggagggaggatggtgtatccatgtgaaagaaagtgccagaatgtcaggggtcccagccattgtctgtacaatataggcccctttctccccccaggagattagcagtgcagagttttggaaagttccttaagcctttctcttctttgcggctcttccttgagccttttcctggggctgtcagctggtgtcgttttcctgggtcattgatttttttttgccctcagggattccagcatcgatctcactcttaataagccagaggcagcatcatggccccctcctcctccctgtccatgctcgtgacttgttctaatcacctccaagcttgctagtaaacaggctccccaaacaccgccttctctctcatctccaaagattttgagatgtcgccagcggccactggaaggctatcatcactgcattaaaaatgaatcccagcgaaggcaagagaagttcatgcaaaattag

SEQ ID NO: 915187 - DNA, 568 bp, Homo sapiens
ttatgatctgtaacaaaaaaagaaaatgctttaaattgtgagtcaaactgccactttttttttggaatacaattttyccttaaaagaactaatgacagacggtggttattcagatttaggttatgtggcatttttttcaactaagcctgtctctttaagaaaaacaaccaagagcatttgttttcaatggaaaaacttgcgttttcaggcaaaaattagtattctggaaaacttgtatctgctaccatgatccttacagcttcccaacaattattttctgatgcagttaccaatgctggtaattaaccaatatgatgctttgatattatataatgaaatgtgttaaaatttggaagtgctacataacttagggaacccaagtgaccaatacatgatgttacaaaatcacgcaaaggtaaaagatgaattttagataatagagcagaaaaagttcatcaatatggtttcagattccattttgcaactaacctttaggacactaccatttggtatagtgtcttatccacacactacaccaagataatacttctctgttatctatactaca

SEQ ID NO: 915188 - DNA, 672 bp, Homo sapiens
tcaataaataattgttaaatgaatgaatgttcaatacattttgaatcctcaatctctcccgtttttttttttttttggtctacaacccatcttttccctttctaaaccacattctatcctggttaaattctcagcatagaaccttaaaagcacctcaacctaaaaatctgtacttcattggtagctaaccggtaacaggaaaaggacatcaaaactactttcaccttttaccacatgatcttattttattatgatattctcttatgataccaagatatagcagtcttatgaggaaatgagagtgaaaaaggcgagtgatgtcttagtattcttgtaaagataattttgacctgtggaactgctgatttagataagtatatccccattgtttccaggggcagatatgcagatttctcaccacctagctgtttgctttgattgcttgtatagaggtgtctgggtggtaatgaaagcagattacttgtctggcctgttggtatggttaattcaaagctgactgtacctagataaaaataattctctataattatggtttatcattgctcttaaaaattgaagtcactgcttgttaccaatgcgaacatagygtctataatccattctatatcaacacacaagttctataataattacacggcttaaaatattcag

SEQ ID NO: 915189 - DNA, 586 bp, Homo sapiens
ttggtgtggtggcatgcacctggtaccgcagccatttgggaggctgaggcactagaatccttgaaccaggagttggaggtggcaatgagctgagatccaccactgaactgcagcctgggcaatagagcaaggctctgtcaaaaaaaacaaaaaacaaaaaacaaaacaaaaaaaacccaccaaaacacaaaaatcaaaatggcagtcactgaaatagtgcagtactgacatgaacagagacagactgtaaccacaggtggcggtgcacacctgtagtctcagctatttgggataatcactggagcccaagagctcgaggccagcctgaacaacacagtgagaccctgtgtctgaaaaatgttgttttgaattgatatataaaagaagaaaatatatattactgaggagattaaggattactcagcaataatttggaatcactggctatgaatttggaggaaaatgcaaatatagattgtcactatatatggaatgaagtctrtatgggattaataaattcttaaaaataaaatcataggaaaatgaggtaaaaattaattgaatagtaaataaacttttaagataa

SEQ ID NO: 915190 - DNA, 619 bp, Homo sapiens
acctgaacatagctgaggctcaattaacaagaatgacagagggagtggattttgggtaacctaacagtaccaactgctatggcccaaatgtttgtgtctccctataaaattgtatgttgaaatgctaatccccaagggatagtattaagaaatggggcctttgggaagtgtttagaccatgagggcagggccctcttgaatgggattagtgcccttataagaagggcctgagggagcttggttgctccttccatcaagtgaggatgcaggaagaaggaactttttgtgaagaatgggccctcaccagatactgaatatgccagcactttgaggttggacttcccatgctccagaactgttagaactaaagtcctgctctgttgcccaggctggagtgcagtggcgcgatctcagttcacggcaacctctgcctcccaggctcaagtgatcctcccacctcagcctcccaagtagctgggattacagacacaccaccaagcccagctaatttttgtatttttagtagagaccgggttccaccatgttggcctggctggtctcgaactcctgacctcaagwgacctcgacctcccaaagtgctgggattacaggtgtgagc

SEQ ID NO: 915191 - DNA, 600 bp, Homo sapiens
caatgcggagagatggactgaggaaatgtacgtgaaacaagcatgggagagtttatagagtattagagaaatactaagcctagtagtttaatacaactgaggcctaaagatagccatgttagctcttgcttattaattttttttgttttccaaaaacaatcttgaggcatgtaaaaaaaaaaaatcctgaaatatccatatatagggagcccttagagtgaaattcgttgagcttttactatgtcccaggcactgttctacatgctttccccatattatcaaatttgacactcataataaattgtaaggaagacactgttacagatgaggaaaccgagacatagacgttaagtagctcactcagaatggcattagtttaataagtgaggaaatcagaattctaactcaggcaacctcaatccagagcctgcactcttaaacagaaagctaattttcaattttgtattctccagagtttaaggatcgtatgtcttcgtggaaaactatatatcctaagagaaatgatacagcatagtgcctgatacatagtaatcckgcaagatatgctggcattaatatgataacaaaaatcacattatt

SEQ ID NO: 915192 - DNA, 599 bp, Homo sapiens
aatgcggagagatggactgaggaaatgtacgtgaaacaagcatgggagagtttatagagtattagagaaatactaagcctagtagtttaatacaactgaggcctaaagatagccatgttagctcttgcttattaattttttttgttttccaaaaacaatcttgaggcatgtaaaaaaaaaaaatcctgaaatatccatatatagggagcccttagagtgaaattcgttgagcttttactatgtcccaggcactgttctacatgctttccccatattatcaaatttgacactcataataaattgtaaggaagacactgttacagatgaggaaaccgagacatagacgttaagtagctcactcagaatggcattagtttaataagtgaggaaatcagaattctaactcaggcaacctcaatccagagcctgcactcttaaacagaaagctaattttcaattttgtattctccagagtttaaggatcgtatgtcttcgtggaaaactatatatcctaagagaaatgatacagcatagtgcctgatacatagtaatcckgcaagatatgctggcattaatatgataacaaaaatcacattatt

SEQ ID NO: 915193 - DNA, 675 bp, Homo sapiens
aacaattcacaatacaaaaaattcaacaaaaaaattaaaacatgatgaaaaacaaccaaacaaatcctacagttgaagaattcaatgaattacatttaaaaaatacaataaagagcttcartaacagacttggtaaagcagaagaaagaatctctgaacttgaagatataccatttgatattacttaattgtagaaaaaacaagtgaaaccctacaagacttatgggacatcattaaaggaacaaacgttcatactatgtaagttacagaaagaggagaaaaggtaagaggcatatacaaactatttaatgaaataatagctgaaaacttcccaagtctggagagagatacagacatccagatccagaaagctcaatgattcccaaatagatttaacccaaaaaggttctctccaaagcacattattatctgttgtcaaaagtcaaagacagagaaagaattctaaaaatagcaagagaaaggcatcaagtcacatttaagaaaatccccattcagctaacagcagatttcttcacagaaaccttacagtgcagaagaggatgggatgatatactcaaacagccaagaatgctatgcccagcaaaactatccttcaggaatgagggagaaatacagtttttcccagacaagcaaaaactgagggaattcatcact

SEQ ID NO: 915194 - DNA, 599 bp, Homo sapiens; identical to SEQ ID NO: 915127

SEQ ID NO: 915195 - DNA, 599 bp, Homo sapiens
ataaactgggcaggctgtagacagcaggcttgccaagtaaatactacagccttcctcccaatattgagccctgtcccattgatcctgcaggggagatgtgtagggcatttgttcacggggaggccacaagtttgggcctctcatcactgtgacctcacacccctgttgagtgtgtcgtaaacagaggagccgttcttcaagccccctgccctgagtgcacccctctcattcttttgttattattagcaaattcccccagttcctgatcattctttcttaagcctttagtgactgggtaaggttcttgtggctgactccaagctttcttctaaaaggaatagattctaggggtgagtagaggagacaggaatgtcggagtcagagctcaggaatctgggttccagccccaggtcaatcctagataaactagagggctccttaacttacttccctaggttgactctgggtttttttatcacgctcgacaggactccttatgcatttcttcgaaagagcatccagtcttaacatcatcatttggcctcatttggtttaagaagcagaattagggyaaaagcaatgatggataagcctcattt

SEQ ID NO: 915196 - DNA, 576 bp, Homo sapiens
aataactctatacaactgagaaacagggtcatttcagtatctcagagttttgcagacagcagcaccagaatatagtccttcctaagtaactttaattttgggggaaaataattagcaagacagaagttacttggaatactaaaaatcaagagatgatttgagaggtcagggacccctcttggccatatggaacactcaaagtgaggcacgcatactcataaaagtggattagatgttgactgggtttggatgataagcacttggtcccaatgaacttcaaaagtaggaaggcaatggccccaataaagtaaacagagtggctggtaagccttctccctgctcatataccccctctttcactcttatttagagattcattattctgagttttcttttctcccaaactttataaacaaatgcacatgtaccaaaggagacagtttattaaggtgcccaccacacagcctggccccaaaattcttcttattatcaacatctaattataatagaacatgttcaatayaagaatgccaagtgagtggatagcccaacactttttccatccctcctttggtg

SEQ ID NO: 915197 - DNA, 648 bp, Homo sapiens
aaaggaaatcaggaaaacaattccattgacaatagcatcaaaaaatatttaggaattaaccaaggagatgaaagacttataaaatgaaaagtacaaaacattgaatggaaaacatcgaacaatacaaagaaataagtggaaagacatcttatgttcatggattggaagtcttaatattgttaagatgtcagtactactcaaagccatctacagattcaaggcagtccctatccaaattctaattatggtttttgcagaaagactaactcattctaaaattgatatagaatctaaagacactctgaataaacaaagcaattttgaaaaagaaaaagctgtaagacagttctccaaataagatatacaaaaggtatacacctttgaaaaatgaaagcaaaataaggacattcttagataagcaaattttgttgttggctgacatcaccataaatactaaagaaagtccatcagactgaaagcaagtgacccccgatggcaatttttaaaaatttttaagttctrgggtacatgtgcaggatgtgcagatttgtttcataggcaaacatgtgccatggtgatttgctgcacctatcaaccaatcacctaagtccagcatgcattagctatttttcctgatgctctccctcc

SEQ ID NO: 915198 - DNA, 578 bp, Homo sapiens
gcatgtatttattttgtagcaaacatttacatccatcatttttcactgtcttttgaaaataattaggcaatatctcatctgaggtaggatgtttctaggggttgtgttctgagggagaaaaactaatctgttctctttccactgcattccaggaacagtaagaggaccttgtgcatgaataatttgtttccacactacagagtgattaataagcagattagtaaaaacaattctgcttcacttagtaacagcctcctccaactcattttttctcaacaaacttatttttccagcagaagaatcacagacttcttagagaacccagtgagttttcacaccttaaatctgtgaaatcctcatgttttcttctgccgtatccatagttcaaacaaagatgaggcaaaactagatgcattcctgaaggaacccaagaaattcctctctttctrtctctggaatgaaatgcattatctagaccatcaattctaaccttcaaaaaccaaacctgtttgtgagatctccttcaaatactactgtagaccccagtgtttattcattaaatttttaaaatatttgtt

SEQ ID NO: 915199 - DNA, 612 bp, Homo sapiens
tggtgcgatcttggctcaccgcaagctccgcctctcgggttcacgccattctcctgcctcagcctcccgagtagctgggactacaggcgcccgccacaacacccgtctaatttttttgtatttttaatagagacrgggtttcaccgtgttagccaggatggtcttgatctcctgacttcatgatccacccgcctcggcctcccaaagtgctgggattacaggcgtaagccaccgtgcctggccttctttttgctttttttgagatggagtgtagctctgttgtccaggctggagtgcagtggtgcaatctcagctcactgcaacctccacctcccaagtccaagcaattctcctgcctcagcctcctgagtagctggggactacaggtgcacaccgtcatgccccgataatttttatatttttagtagagatgggttttcaccatgttggccaggctggtctcaaactgctgacctcaggtgatcttcccgcctcagcctcccaaagtgctgggattacaagtgtaagccacagcacccagcaaaaagtagatttcaaatgttctcactacagaaaaatgatacacttgtgatgttattgatatgttaatta

SEQ ID NO: 915200 - DNA, 612 bp, Homo sapiens
tggtgcgatcttggctcactgcaagctccgcctctcgggttcacgccattctcttgcctcagcctgccgagtagctgggactacaggcgcccgccacaacacccgtctaatttttttgtatttttaatagagacrgggtttcaccgtgttagccaggatggtcttgatctcctgacctcatgatccacccgcctcggcctcccaaagtgctgggattacaggcgtaagccaccgtgcctggccttctttttgtttttttgagatggagtgtagctctgttgtccaggctggagtgcagtggtgcaatctcagctcactgcaacctccacctcccaagtccaaacaattctcctgcctcagcctcctgagtagctggggactacaggtgcacaccgtcatgccccgataatttttatatttttagtagagatgggttttcaccatgttggccaggctggtctcaaactgctgacctcaggtgatcttcccgcctcagcctcccaaagtgctgggattacaagtgtaagccacagcacccagcaaaaagtagatttcaaatgttctcactacagaaaaatgatacacttgtgatgttattgatatgttaattag

SEQ ID NO: 915201 - DNA, 549 bp, Homo sapiens
cgcccggcttgatttgtatttttaaacaatctctctggtttctgagtgagaatagactgaagcggccgagggaagctggggaaactgatcacaattctcagctgggagctgatagagcccagaggggagatggcggtggcctggttggggacggcagcagtggagatgataatggctgggttttggatatattttaagtagagccatcaggatttgtgaaaggatcagatgcggatgtggaagaaagaaaaatatcaagcctgactcctgggccatcgacagtgggaggtgccatttcctgggatgaggaagaccacaagagaagctggggtggggctggggtttggggggatcactgtacctccatggccttctcgaagcctcacactgagtgtcttgtgaaaccagtcctcgctccctgctttggttcacttcctctttatgcttccccctggcctggcttgcctcctcttygtgtctggtttctgtggatgttcagcccgacggccactccctggcactgccagtccatctctctcccctcccctc

SEQ ID NO: 915202 - DNA, 576 bp, Homo sapiens
actaggtggggcctggatctttctgatcactggggccagccagtcagaattgragccagcctgcccctcagctgggagcctggcagtacctcccccagcggggtcctgggccaccctgcctgtattattagtaataaaaactgctaaatatgcaaggctgcagccaaaccaattagtgccaacctacaggaaggcctggggcaggctgaggtcacctggagtgctgggctggtccaacggcagaccactctgctctaggaccaagcgcctatccttactggcaggcataataggatgccactgggagatcagagtgaggtgcctccccttgggcactgaggagaagggaggcccagtgtggtagcagaaggtgctgctccgagccaggacacttctgggccagaatggtctcttcagggccaggggatggggcactgagttgggctgggttgaatgagcaacagtcaaggtcgaatgtacacgggaaatatcaattttggttttggggtttgtttttgtttgtttgtgttggtttgttttgagacagagtctggctgttgcccaggctggagtgca

SEQ ID NO: 915203 - DNA, 574 bp, Homo sapiens
taggtggggcctggatctttctgatcactggggccagccagtcagaattgragccagcctgcccctcagctgggagcctggcagtacctcccccagcggggccctgggccaccctgcctgtattattagtaataaaaactgctaaatatgcaaggctgcagccaaaccaattagtgccaacctacaggaaggcctggggcaggctgaggtcacctggagtgctgggctggtccaacggcagaccactctgctctaggaccaagcgcctatccttactggcaggcataataggatgccactgggagatcagagtgaggtgcctccccttgggcactgaggagaagggaggcccagtgtggtagcagaaggtgctgctccgagccaggacacttctgggccagaatggtctcttcagggccaggggatggggcactgagttgggctgggttgaatgagcaacagtcaaggtcgaatgtacacgggaaatatcaattttggttttggggtttgtttttgtttgtttgtgttggtttgttttgagacagagtctggctgttgcccaggctggagtgca

SEQ ID NO: 915204 - DNA, 476 bp, Homo sapiens
caaagcactaggtggggcctggatctttctgatcactggggccagccagtcagaattggagccagcctgcccctcagctgggagcctggcagtacctcccccagcggggycctgggccaccctgcctgtattattagtaataaaaactgctaaatatgcaaggctgcagccaaaccaattagtgccaacctacaggaaggcctggggcaggctgaggtcacctggagtgctgggctggtccaacggcagaccactctgctctaggaccaagcgcctatccttactggcaggcataataggatgccactgggagatcagagtgaggtgcctccccttgggcactgaggagaagggaggcccagtgtggtagcagaaggtgctgctccgagccaggacacttctgggccagaatggtctcttcagggccaggggatggggcactgagttgggctgggttgaatgagcaacagtcaagg

SEQ ID NO: 915205 - DNA, 634 bp, Homo sapiens
ctctacctgggctcttgttgaagaagccaatcagctcattggttggaggtcacatgatataaaacatggccatcttccaagccctatgtgtggacaaygagatagggacaagtaggcatatcacgttctgatacctggacccacatctgtcgctgggcccacgtctgtcctcaggcccccaggatatacttttatggggagttttcctcccttcccccaatgtggtcactcataactttacacccaacagtcaaacaggagtggaagctacagagtttcacgcaaacaataggctaggctgtgggactgagtaaaaggcactggactgtggtaggtcttactccaagatggccaaatggaagggcttttagctttctttgtttttgttttatatcctgagacaaaatgttcaatttctacactttagaataaaaagagccatattttatgtttcatattttttgtatgcttcctttcatactcttttgaacaatgcaatcatattttcattatgaggtataattcacataccataatatccgctctttcaaaatatactttaaaattcaattggtttaaagccaattcattggtttttagtatattaacaaagttttgtcaccatcacaattat

SEQ ID NO: 915206 - DNA, 466 bp, Homo sapiens
actctatttatgagtataagaaaacaaaacaaggccaggcgcggtggctcacacttgtaatcccagcactttgggatgctgaggcgggtggatcatttgaggtcaggagtttgagaccagcccggccaacaatacaaaagttagccaggcttggtggcacatgcctgtagttcagatacttgggaggctaaggcaggagaatcgcttgaacctgggaggcggaggttgcagtgaatcgagatgacaccattgcaccccagcctgggtgacagagcaagactgcatataaaaaaacaacatcaacaacaacaacgacaacaaaaacccattgtttcctgagtctaattaaggatacttttaggtggaaagaaaaaagtccgctttcraaaaaaagtcatagcttcacttaaataacttactgaagacttctgattatgatacagctaacataatacactgggactgt

SEQ ID NO: 915207 - DNA, 650 bp, Homo sapiens
aagcctgctgttcaagcaagccaaacaaaataatcagtaacaaacttggttacaggccaccatcttgtttcatgtccttgggaacatgacctgtaaccacrtggcagtactttgttttagtctctgccattttacaatggtggctgtcttcttgtgctaagtcaattcctgggtgagggccacaaaatcagataagccagtttgtcaatctgggtagtgccagctgatccatctagggtaatgtttataaaatatcttaagcactgatcttgagagcagttaaggaagggtcaaaaatcttgtagcttccagctgtatgactcctgagccatggtttccagtcttgtggctagttttttggtctggtccccaaacaagagggaagtatatcttaggaaaggactgttatcatctttgttttggactacaaacagtgaaccaggcccctcccaaagttggttcagcctacacccagggatgggcaaggacagcttgggggctggaaacaaaatgaagttggttgggtcagatctcttctactgtctcagtaacaattttttaaacacagtttcaaaagcgcttatcacccccttaaaaatactttgtacactcgcggttaagtcataacctaattaaggcttgttggcttc

SEQ ID NO: 915208 - DNA, 650 bp, Homo sapiens
aagcctgctgttcaagcaagccaaacaaaataatcagtaacaaacttggttacaggccaccatcttgtttcatgtccttgggaacatgacctgtaaccacatggcagtactttgttttagtctctgccattttacaatggtggctgtcttcttgtgctaagtcaattcctgggtgagggccacaaaatcagataagccagtttgtcaatctgggtagtgccagctgatccatctagggtaatgtttataaaatatcttaagcactgatcttgagagcagttaaggaagggtcaaaaatcttgtagcttccagctgtatgactcctgagccatggtttccagtcttgtggctagttttttggtctggtccccaaacaagagggaagtatatcttaggaaaggactgttatcatctttgttttggactacaaacagtgaaccaggcccctcccaaagttggttcagcctacacccagggatgggcaaggacagcttgggggctggaaacaaaatgaagttggttgggtcagatctcttctactgtctcagtaacaattttttaaacacagtttcaaaagygcttatcacccccttaaaaatactttgtacactcgcggttaagtcataacctaattaaggcttgttggcttc

SEQ ID NO: 915209 - DNA, 617 bp, Homo sapiens
tgttatatgagttttccccagtgctttaataaagaaattttaaaagacaaaagaaagtacttttcatatgcatccaattcaaggatctgtcrtttcacactttttaactgaaatattccaatataactttccaaatgcaaagaatgtattcgaactttatcaacttttgaataaacttttgcatcttggtttgttcaagcctttctttcaaatatccagaacatatttagagtcctttaagttttacaacaactccttaaagggtagaccattttattatatttagactcaaaaacagagcaaaacgaaagatcagccaaccaaccacacacaaaaagattccaaagaggccgggcacggtgactcatgcctgtaatcccagcactttgggaggccaagcctggcggattgcctgagatcaggagttcaagaccagcctggttaacatggtgaaattctgtcactactaaaaatacaaatattaaccaggcgtgatggtgggtgcctgtaatcccagctactccggaggctgaggcaggagaatcgctggaacccgggaagcggaggtggcagtgagccaagatacgctcctgcactccagcctgggtgacagagca

SEQ ID NO: 915210 - DNA, 617 bp, Homo sapiens
tgttatatgagttttccccagtgctttaataaagaaattttaaaagacaaaagaaagtacttttcatatgcatccaattcaaggatctgtcgtttcacactttttaaytgaaatattccaatataactttccaaatgcaaagaatgtattcgaactttatcaacttttgaataaacttttgcatcttggtttgttcaagcctttctttcaaatatccagaacatatttagagtcctttaagttttacaacaactccttaaagggtagaccattttattatatttagactcaaaaacagagcaaaacgaaagatcagccaaccaaccacacacaaaaagattccaaagaggccgggcacggtgactcatgcctgtaatcccagcactttgggaggccaagcctggcggattgcctgagatcaggagttcaagaccagcctggttaacatggtgaaattctgtcactactaaaaatacaaatattaaccaggcgtgatggtgggtgcctgtaatcccagctactccggaggctgaggcaggagaatcgctggaacccgggaagcggaggtggcagtgagccaagatacgctcctgcactccagcctgggtgacagagca

SEQ ID NO: 915211 - DNA, 630 bp, Homo sapiens
aaacagaattgtctcaacaaatttgcctaaaatctgaaaggaagaaaacacatctaagtctttgtattaaatatgggttaagtgctaagggaatgtattaacttaaaaaaaaaaaaagtcaagcttttaaaaattttaaaaccgtatatagaaattgtcagatcagaacaattactacatagtacaaaaataaaataatgtccatgcatacaaacaagtttaaattttaattttcttgcataaatacattaaattataatatttagtctgctggtactttaagaacgtggaagggatcattgtgctaactattcaagccacttatctcttttacccatgctgagtataaaaccagcttagacaacaatcttagacaacactcttcattagcggtaaagcatattcgttaatgcaactggatgttttcctgcataaaagaaggttaagatgttttcttgttgtaggacatttagattgacaacagatttgctattatattaaattaagtggctaatttatccaagtgaaytatctgcatagatagccactggagcttaagtagtaaattcagacacagttataacagtcaccaggtgagatcattggatgtggtgttaactacttattttt

SEQ ID NO: 915212 - DNA, 588 bp, Homo sapiens
gttgaaaaatatagataggtaggtaggtaaatagattagatagatagatagatagatagatagatagatagatagagtatakgcaactttaatccacgttatactgtgatctgatttgttccttttaaaacatcgttatatttatcagggtacacagcctttccttacttgagtgttctctttactggaacaacctagacttacatacagaaatgtttcagtgctcaataaaaatattaattatctccaataccatcctagcacacagagtattttggtaaactgttgaaaggaatctgtttcagtgttcagagaatagccaaaaatatggggaattctctctatccctgatgacatcatgaactacctttgcaaaaattatgacagtgagagaagtctgacatagctggctccatcttgcctctaacctccaagctgtccttgttcattcctgagcataggccaagctagctatgggagaaatttagtttataggttaactttaaagcaaagatgataaaagattctgtccaagactgaccctctccttgcctggagaccaaaactgcctttgtaaaactaacaaat

SEQ ID NO: 915213 - DNA, 588 bp, Homo sapiens
gttgaaaaatatagataggtaggtaggtaaatagattagatagatagatagatagatagatagatagatagatagagtatatgcaactttaatccacrttatactgtgatctgatttgttccttttaaaacatcgttatatttatcagggtacacagcctttccttacttgagtgttctctttactggaacaacctagacttacatacagaaatgtttcagtgctcaataaaaatattaattatctccaataccatcctagcacacagagtattttggtaaactgttgaaaggaatctgtttcagtgttcagagaatagccaaaaatatggggaattctctctatccctgatgacatcatgaactacctttgcaaaaattatgacagtgagagaagtctgacatagctggctccatcttgcctctaacctccaagctgtccttgttcattcctgagcataggccaagctagctatgggagaaatttagtttataggttaactttaaagcaaagatgataaaagattctgtccaagactgaccctctccttgcctggagaccaaaactgcctttgtaaaactaacaaat

SEQ ID NO: 915214 - DNA, 641 bp, Homo sapiens
attctgcaagcgtagcaaggcaggagccaactcaagttttttatattctatcagagaacaagcaaatcactgaaagaaattctgaatgtgatgtgcatcccaaccaagcaggggacataagacaggttttccttctaggtcagaaaaccaggaggagagagagcctcatgcaacttagataccagagcccaagaatcagacagacagaaagacctccttacattaggatatggggtgtggcggtgtcacggtgggatcagttacagaacagttgcttcataatgctgccaagtgctgagaaaagttatgccagacaatgagtcatcaggcacagaaaattattggactatgtcaaaatgctttctcctaaacagcaaagtcttctgacaacttgggaaacatgacttctgctcttgtctggtacagagaagagggctggggggagcttccagaaaactgaatagcacatacatctctgaaagacaagaaataacaacacaaataaaaaggcaagatgatatttttaaaagaaaagaattgaaacaaaaacatttgttgaatgtttattgattagtaattatgtagtgaaactcttctacacactggggatacatcargttccaacttctcacactcaggtg

SEQ ID NO: 915215 - DNA, 578 bp, Homo sapiens
ggttaaattcagaatattttaatatttttataattattctgttttttactacatgtaaaatacattgtatacaattgtataaaacataatctaagaaactgaacatccaacagatttcccttcttcttattttacaggttttgttttgttaacgttggttcctgcaaaatctatattttgaaatgctttatttaatactttgggttcttgggccaaactaaaactgaaatagcttcttttaaaatacattttattgcaatataatattatattgaaaatatgatcacatagaaatatggagagcttcccaatttatttaatgggctagtataagtccaatattaaaaaacagctggctcaaaaatgaaaagtaagaaggatataactttcttattgtatatttgcaaatagaatttatcactgtgttaaaaagattactgtgccattagggtttctaatgtaaaatggtaatttcacattagaaaacttattatctaactcagtagattttaaggaaaaatctattaatcttttggggttacaaaagccwatagaagcaacaaaaaaataaagtttga

SEQ ID NO: 915216 - DNA, 532 bp, Homo sapiens
tcaagcataaaatatctcagattatttatagattctaaaattcccttcctgttttatatgctcaataaactamatgtttttgttgtccatatgggagccttatgaaaacaaactgaagaacagacttaagatgttatcgactgtaatgaataacaattacatatggactcatttgtagagtactccaaaaaataaaggttaccaagaaatatactaagtgtttacatttttctaagaaatataccaataactaattttctatgttctgtcaaatttttaaagaggtaaatgaaaaataaaaaagaataaaagtaagtgaataaaatgacagaaaggaaatatttgggggaaaagatgaaataagaaaaacaatgagttgataactattgaagctgaatgatgggcccagaggatcattgtaccattttgtctgtttttgactggttgaaactttccacaataaaaaatttaaaatacaatagtaaattgcaaattattaaagtcaagatgtatgagagagagaaaatgacaa

SEQ ID NO: 915217 - DNA, 528 bp, Homo sapiens
cttaattaggtcccacttgtcaatttttggttctgttgtcattgctcttgaggacagtcattacgacttttccaaggccaatrttctcaatgatatttcctacactttcttctgggatttttatagtttgagatttttcatttaaatctttatatctttaacgcattttgagttatttatttaatgtgctgaaaggtaaagatctagtttcactcttctgcttgctagttattccagcaccatttattgaactggggttcttttcctattgcttatttttgtcatctttttcaaaaaccagatggttctgggtgtctggctttatttctgaattctctattctatttcattggtctatgtgtctgtttctgtaacagtagtatgctgttttgattactgtagctttatagtatagtttgaagtaggctaatgtgatgcctctgtctttgttctttttacttaggattgctttggcaatctgggctcttctaattctgtgaaaaattacgttggtaatttgatagaaac

SEQ ID NO: 915218 - DNA, 626 bp, Homo sapiens
tatttttatttttaataagatagaagtttacctgtctcacacagaatataaatctattagtttatgcatatccccatattccatctactgttatttgatacttagtacttcacaacactgtcttagatggctccaaccatctcattcacattagcagcgggaaaggggaagaggtgaataaagatgtggcctatcttttatttttatgtcagcctttttataacaaagataagtgatgtacagaaaagtgcacacatttacgtgtacaacttgatgatttcttacaaaaaatgcacgtaactatttcccagattattaaaatattaatagcaactgtctttttccagtgctataacagaatatcacaggttgggtaatttataaacaacagaagtgtgtttctcaccgttctgaagactgggaagtccaagatcaaggcatcggctttccagctggtgaaggtcttcttgcttcattctcacatggcagaaagtagagaggcaagaaggtctaaacggctccygcacactcattttataaagatattaattccattcaacaggacagcgctctcatggtctaatctcttccccaaatatcccacctcttaagactaccataatgag

SEQ ID NO: 915219 - DNA, 560 bp, Homo sapiens
gtaccacaaattttcctgctacctttgatgctgctggttttgaatcacctggggtgcgggagacttttaacctttaactgtatttctcacaaaagaaattgattcatgcattgttgttgagtctttgtctccatgggggaaaggagagactctatccttctattctgccatcttgctgacatcaacgatctgaaattatttttgactatacagtgaagagatagctaatgagagtgtttggaaatatacattaagggagtatgtttcacataaatataacaaaattattaatggagttacaaattgagctgtcattttcatttacaactaatctaatatttatttcatttaaacatacaactataaagtgatgaataatatcttattactttattgtgatccaagtttgaaataatggaccacagagcttagagactgaatatacaaataagcaatgaccagactgcatatcacaataagcrcaagaatgcaaaccacaacctctgcatcaactggcccagaattgtcaggacttggtcgtgacagcgtatgactgctta

SEQ ID NO: 915220 - DNA, 613 bp, Homo sapiens
taaatataagaataatctaacgccttactttatcatattactttaaaaactgctatgatttgttgatattacacattcagggagagaggaccggggtcatgcagtctgtataaagtgcaatattaaagccttctgtagtttttaatgtctcagagtccaaactctctttgtttcactcttcccagacactaaatctggtctttggccagggttattttctaactgagcagtaagaaaatactaatcataaaaataatttttgccagattttatgtaatttgcctgtgttcaataccagtcagcacttccgcatttagaatgctttgtatttctctggggctatgacaacaaatttaggttgctttcagtcttctaccattgttacatatgccaggatttagctttcagttactattatttgttaattccattaagtcagctggaaaccaacttctatattgtatttttttttctattttaaagatatttgaattctcttctttttttctgatatagtataccttgwggacttatgcttttgtttttaacaccactgctatcgattactatgggtacaagagggaaaataagtaaaattgtgtctaatccacta

SEQ ID NO: 915221 - DNA, 613 bp, Homo sapiens
taaatataagaataatctaacgccttactttatcatattactttaaaaactgctatgatttgttgatattacacattcagggagagaggaccggggtcatgcagtctgtataaagtgcaatattaaagccttctgtagtttttaatgtctcagagtccaaactctctttgtttcactcttcccagacactaaatctggtctttggccagggttattttctaactgagcagtaagaaaatactaatcataaaaataatttttgccagattttatgtaatttgcctgtgttcaataccagtcagcacttccgcatttagaatgctttgtatttctctggggctatgacaacaaatttaggttgctttcagtcttctaccattgttacatatgccaggatttagctttcagttactattatttgttaattccattaagtcagctggaaaccaacttctatattgtatttttttttctattttaaagatatttgaattctcttctttttttctgatatagtataccttgaggacttatgyttttgtttttaacaccactgctatcgattactatgggtacaagagggaaaataagtaaaattgtgtctaatccacta

SEQ ID NO: 915222 - DNA, 593 bp, Homo sapiens
attaaaataatatatccactttggaaagcaatttagtagttctttaaaaaaaggcaaatatacgaatgcaacatgatacagacatttcactcctaggtgagaaatgaaagcacatgtttattcaagacatgtacattttatttctaatgtctcaaaacataaggaacacaagtgtctattttcagaatgattaaacacatttttgtgtattgatacaattgatacaatgcactcaataataataagaaagtaaactattgacatacgcaaataaacagatgggtctaaatataattatgttgagtaaaaaaacagattaaaaaagaatacacattgtatgattacacttctgtaacactagataatgcaatgtaatatcttcctcggaaaacagatcagtggctgcctaatgaggtccaggagatgagaataagaaaaaaggaatgcaagggacatgaggaaactcatgwgagtcatgcatatgttcaacatcttagtttttggtggcttcgtatgtcaaaatgtacacgttatatattttaaatgcgcacagtgttattctaattaaatctcaacacagctataacaaagaa

SEQ ID NO: 915223 - DNA, 598 bp, Homo sapiens
gacttactctgtccaaattctaatgcatcacagtcaytggtgtgaagctaataatgaaagaagcaagaggaggctttcatttctatggagacaaattgacatagaagccagattagtcttttcttcctgaactaagaactgcttttgttagaaaacaaaataatgtattgtatttacctgaatactgctttaaaaagttattaattcttcttttacaagaggtattagaaattaaaacaactcagatttctaatccaaaatatatttatctttggaaagcaaggtaaccgttgtgaaaacattgtattaagagaataaaatgcagtgacctgaaatatgggtgaacatattcacacatgataatgtaaataaatatacagaaccactcaaatacacatttataaagagaatggcaaagtacctaaaatagcattttcacatataaaatttttatattaaaatattgctcataataaataagaggtgatatgaattccatttccctcttaaaaattatctctagtagtttacactaaggagttaatctgttgttttgacaggtgaattaaaatgtttaataaaatgacactgtaacagt

SEQ ID NO: 915224 - DNA, 605 bp, Homo sapiens
taggagtgttgagagagggcatccttgtcttgttccggctttcaagggaaatgtttccagcttttgcccatgcagtatgatgttgattrtggatttgtcataggtggctcttattattttgaaatatgttcattcaatgcctagcttgttgaggtttttaacatgaaaggatgttgaattttatcaaaagccttttctgcatcttttgagttaaccatgtggtttttgtttttagttctctttaggtgatgaatcacattaaaggcataaatgtataacctaaaactataaaaaactcaggaggataacctaagaaataccatttcagacataagactgggcaaagattttatgaggaagatgccaaaaacaattgcaacgaaaccaaaaattgacaaaggagatctaattaaactaaagatctgcacaccaaaagaaactatcaggagagtaaacagataagctccagaatggtagaaaatataaggtctaatatctggaatctgtaaagaacttaaacatatttccaagccaaaaacaaacaacttcattaaaaagtgggcaaaggacacaaacagacacttttcaaaagaagacatacacat

SEQ ID NO: 915225 - DNA, 652 bp, Homo sapiens
ttatatcaggttaattctgtttcctaatctgtaagatgatatagtattattaaggctatatgacagtttaaaaataaactagacatgaggcttagctatcatttcttattctagtaagagacttgtcctgtttcataatggaagcaatcacaggtatattactacagccacatgagaatatccctatttatgggtatagaacagttataaagtttagacataggcgtgatcacaaaaaatgccttaatcaactattactaagttgtataggccaatttggccattgtccaataatgttaaaaataaagtaacataatactttggatcaaagaaaaatttactaaaaaatattttaaatcctatggaacttgttaatcagaagaatatacctgtgattgcttcctttatcaaccccagggcaatcaggcaggagaaggaaataaagggcattcaattatgaaaagaggaagtcaaattgtccctgtctgcagatgacatgatcgtatatctagaaaaccccatcrtctcagcccaaaatctccttaagctgatacgcaacttcagcagtgtctcaggatacaaaatcaaggtgcaaaaatcacaagcattcttatacaccaataacaggcaaacacagagccaaatcgtgagt

SEQ ID NO: 915226 - DNA, 652 bp, Homo sapiens
ttatatcaggttaattctgtttcctaatctgtaagatgatatagtattattaaggctatatgacagtttaaaaataaactagacatgaggcttagctatcatttcttattctagtaagagacttgtcctgtttcataatggaagcaatcacaggtatattactacagccacatgagaatatccctatttatgggtatagaacagttataaagtttagacataggcgtgatcacaaaaaatgccttaatcaactattactaagttgtataggccaatttggccattgtccaataatgttaaaaataaagtaacataatactttggatcaaagaaaaatttactaaaaaatattttaaatcctatggaacttgttaatcagaagaatatacctgtgattgcttcctttatcaaccccagggcaatcaggcaggagaaggaaataaagggcattcaattatgaaaagaggaagtcaaattgtccctgtctgcagatgacatgatcgtatatctagaaaaccccatcgtctcagcccaaaatctccttaagctgatacgcaacttcagcagtgtctcaggatacaaaatmaaggtgcaaaaatcacaagcattcttatacaccaataacaggcaaacacagagccaaatcgtgagt

SEQ ID NO: 915227 - DNA, 622 bp, Homo sapiens
tgaccatggcctcagggctagaagattaaaaaacccattcacagcagtcagtgactagtaggttaatcataggtaaatagcctgaaataccaccagacactccatcatgctgtgtgagggttcctaagctagtgactttctttttcaccaagcaagatttatttatatttttccagttctgctgacttttgatagcaccctgttctgaaccatgacaaactctgccattaaaataacatcttggataaaccacatttattttgggagttcaaaaatactttttcacactttcaaatctataaactcagtaggagtgaataagtttatgtggctcaaattcaactgtttcatttgttttcaaagcaaggcaagaaaagaagggcagatatgactgccccatttgacagatgtagaaagcaaatttcaggtctcctgatgcccagtccaactgcagcccaccctctgtagctgtgggtttcacaaccatagcttcaaccaaccacaataaaaaaattcagaaaaaatttgcatctgtactggacatgtacagacttttccttatcattagtcccaaaacartacagtatatcaattacttacacagaatttgcataggattagg

SEQ ID NO: 915228 - DNA, 638 bp, Homo sapiens
taattttagcaagtctcaggactgcggcggtttctgagatggacaccaatccttgcgtctctcttgctcccctttctctttctacccacttaagggaaaccagccatatccattgacctgccactgctggctcttgttctgcaggtcaaagttagccaatctctgctccatccccaaatctaaggccatggcactgcctcttccctcctgtctttggaaggatctcccaggcatctaacttttttgagaaaaggcagtctgaaagtccctagccactgtccaagctcctttccttcagctaagccagctgatcaaccacaggatagtcacaggttgttctagggacagctgagtgtgttccttttttgccagaagctcagggcaggcttcttcattgaccccctcatctccaaatccaaggccatgggagaagcctgagagctctgaggaaggcctccagatatacagggggatatataggcaggatatacaggggggtgctgaytggactgcctggcaaatgctgaaaccaacagactgaaaagtctgcacttttccttctgattccacctcaggctgacagccgggcttatgacacccgggggcaggagaggtcagcggactgacagtcaggagca

SEQ ID NO: 915229 - DNA, 656 bp, Homo sapiens
actgtgaagaaataaacatttttcacagttccatgttatagtagtggtgactactgtagttaccatgttacaaacatagatattacttttcattaagcttaaaattttttcttcaattctgttacattatctttataattttaaaagaattaaatggatagtgtacctagaaaacatcaccatcctttagatgagacctgattacattgatgggttacatggctgtaagtaaattagtattaggaattagaatcaaaatgctcaggtcattctggctacagttatcaagtttccacagttgctcggagacctattaatataatttgtaggatgccaaaaggcagtcagacagccaacatcactgtagtttactgtgatttgatacagtgcatctgtaaatttgaactcagaaaaatgatagtaaagaaggtatgctaacatatacttgatagattactcttaaaggaccttagacattaggcaatagtaaacatatttaaatctcaaatattggaattctgttctttctcttgggttgcaaagacaagatatctggtaagamtatgtctcaaaaagacaatgattctttaactgtagggaaatcataaattgctaaaccatttcttgtctttgattagccacaattttttaggtcc

SEQ ID NO: 915230 - DNA, 643 bp, Homo sapiens
tttattgcaaaaggaattcctcagaagtttcccagagtaaggttttaacctatggcagccttgaggggctgttgaggccccagagcaccctcctcttccctggatgcagcctgctctggtccagcatctggctcccaaggcagccaaaacaggcagctctgttgcaatggtctgacggccaggtggtctgatggtgaagagacatgtggacttcatctgaagcctttgacttcagacactcccacagtttctttgtttgggacagccttggagtttctgtaggcctggaatgtgaccatttagtaaggcctctgtccactttctcatgggccctttaagcatgcagtgaaagtacccctccaattgctggcaacctgggagggagtggaggcagacttagacattagatggacttggagtagctgggaaaggagatgccatcaggagttgaatttcaagcaatagaagatgtagggtgctgttgaggtaaaatatgtctttaggttgaaacaggagagagcgtatttacatggttacaacagtgcactcttttaagagcagggtgggtgtgccctcctaagctctsgaatagcaaatgccaaactcacatgtctgtcactataactcaggcagaccatggggg

SEQ ID NO: 915231 - DNA, 630 bp, Homo sapiens
ttttaacctatggcagccttgaggggctgttgaggccccagagcaccctcctcttccctggatgcagcctgctctggtccagcatctggctcccaaggcagccaaaacaggcagctctgttgcaatggtctgacggccaggtggtctgatggtgaagagacatgtggacttcatctgaagcctttgacttcagacactcccacagtttctttgtttgggacagccttggagtttctgtaggcctggaatgtgaccatttagtaaggcctctgtccactttctcatgggccctttaagcatgcagtgaaagtacccctccaattgctggcaacctgggagggagtggaggcagacttagacattagatggacttggagtagctgggaaaggagatgccatcaggagttgaatttcaagcaatagaagatgtagggtgctgttgaggtaaaatatgtctttaggttgaaacaggagagagcgtatttacatggttacaacagtgcactcttttaagagcagggtgggtgtgccctcctaagctctcgaatagcaaatgccaaactcacatgtytgtcactataactcaggcagaccatggggggcggggagtgaggcgtggaattccaactc

SEQ ID NO: 915232 - DNA, 583 bp, Homo sapiens
actctagagctggtgctcttaatcaccctgytgtgcattctttcaaatggtctatgatttaataatttaatacagaggataccagtgtgtctgtgtgtgtgtgtatgtgcgtgtgtgcatgcatgtgagcatataatctcatggggtaaggaaataaaacgttacttcctctatttttgttgtccatctaaagctaaaaattaaccattattaatattcaatatccagatcaacctagcaatctcacttagtccatatttgagatgtcacatgtaacatatctcaggaggagggaagtttacaaaatggaggtgctgactgtgtcaccatcagtgcagtcgaggtgtgcctggtttaatggatttatggattttattatcccttcctccctcccttccttccttctgctgaatacatgataagaactatgccaaaccgtgattatacagcctgaatataaataagatacacaggagtttctagtgtcatagggataacatgcatatttatgtatttgtttaatttataatcaactgagaatctactatatgccatgcattgttccagggaatcagcagagaac

SEQ ID NO: 915233 - DNA, 593 bp, Homo sapiens
tagaatctcagcacatcaaagtgaatttagaaaatggaaggcacacacacatgtatatacacattttaaaaatgagaaaactgaagcccagataggtgaaatgcttagctaatgtcacayagcaaattaataaattatgaccagaagtcaagtctctggacttacaaattagtcttcttcttcctatattaatctggatacttcttggtcaccaatcaccactcataatccatttctctgtctacaaaatgcagattgtttctgtgtctagagtgctgctcttcaacaagaatagctgtgtccctcagtgcaccctaatgataactatgctgattataccccacttcagcaaaagcagctgctgcatgaaactgtgaactttaatcgctgttagcttagaggcagcaaaatacaactgaaaggggtataaattatagactgtactcattatctttgtaacccatgtttcattaagttccttgttattagtgcatgtattaagcacctgagtatcctatttgtgactattttgaaaaatatttataagtggacagcagaaaatgtataatagtgaagagtttggacattgtgag

SEQ ID NO: 915234 - DNA, 611 bp, Homo sapiens
cttcactgttgtcttactttatgaaatcgccacagccatccccacccccaccttcagcaactaccaccctgatcagtcagcagccatcaacatcgaggcaagacccyctaccaacaaaaacatcagaacttgctgaaggtacaaatgattcttcacaattttaaaaataaagtattttttaaattaagatatatacattgtgtttttagacataatgttattgtacaattaatagatgacagtagagtgtaaacataccttttataggtactgggaaaacaaaaaatattcatgtgacatgttttgtgatatttgctttattgtagtggtatggatctgaaccagtcatatctctgaggtatgcctgtacattaactctcccaaaatatcactggacaactaatagatataaattgtatgctaagttttttaatactccatgattgcttttttaaagtaccttcatacaatatttatgcttaaacccacctgcatccaaacttccatacctatgttcctagtgtaaaaggatcaaaaagaagaaaaagaggaagaagaagtaggagaaggatagacaggagaaaaacagaaagaggaagaaaaagaatatt

SEQ ID NO: 915235 - DNA, 623 bp, Homo sapiens
aagtgatcaataaaaatgtaaaaaatactaaactttgctaataatgaaataaaatttcaaattaacctgacttgcaaaaattttaaatgttaggccaagtgttaatgagattataataatctccttcattgttggtgggtatgtataaatagggtcaacttctttggaaaacaactgggcctcacctagcaatatggtaatgaaatggtcctaactctacaacagttttttgactcctaaggcatataccatagacagcatttgcacatatttacatataattacacagaacatggacattcacaatagaattgttcatattatttaaaacattgctgacaaactaaaagtccatctagagtagaaatgacactcaaagtggcaactcatacaataaaacaaatacaggagtgaaaactaataaaccttagctatgcacaccaatgtaaatgaacctcaaagacatataatgagcaaaacaagcaagtcatagaacaaatgcattgtaattccttgtacgtaaagttcacaaccaggcaaaactaaatactaaacmcttttgggatatgtgtgcatgtgggaaacgataggaaaggcagggagataagtgctaaattcaggct

SEQ ID NO: 915236 - DNA, 608 bp, Homo sapiens
atgggcaaaagctagactcattccctttgaaaactggtataagacaaagttgccctctctcaccactcctcctcaacatagtaytggaagttttggccagggcaatcaggcaagagaaagaaataaaggctattcaactaggaagagaggaagtcaagttgtctctgtctgcagatggcatgattttatatttagaaaaccctatcgtgtcagcctcaaaacttcttgaactgataagcaacttcagcgcagtctcaggatacaaaaccaatctgcaaaaatcaaaagcattcctttacaccaacaataagcaagcagagagccaaatcatgaatgaactccgattcacaatcactacaaagagaataaaatacctagaaacacagctaagaagggatgtgaaggacctctttaaggagaactacaaaccactgctcaaggaaataacagaggacacaaacaaatggaaaaacattccatcctcatggataggaagaatcaatgtcgtgaaaatggccaaacagcccgaagtaatttagagattcaatactattcccatcaaactatcactgacattcttcacagaattagaaaaaaactattttaaa

SEQ ID NO: 915237 - DNA, 608 bp, Homo sapiens
atgggcaaaagctagactcattccctttgaaaactggtataagacaaagttgccctctctcaccactcctcctcaacatagtactggaagttttggccagggcaatcaggcaagagaaagaaataaaggctattcaactaggaagagaggaagtcaagttgtctctgtctgcagatggcatgattttatatttagaaaaccctatcgtgtcagcctcaaaacttcttgaactgataagcaacttcagcgcagtctcaggatacaaaaccaatctgcaaaaatcaaaagcattcctttacaccaacaataagcaagcagagagccaaatcatgaatgaactccgattcacaatcactacaaagagaataaaatacctagaaacacagctaagaagggatgtgaaggacctctttaaggagaactacaaaccactgctcaaggaaataacagaggacacaaacaaatggaaaaacattccatcctcatggataggaagaatcaatgtcgtgaaaatggccaaacagccygaagtaatttagagattcaatactattcccatcaaactatcactgacattcttcacagaattagaaaaaaactattttaaa

SEQ ID NO: 915238 - DNA, 665 bp, Homo sapiens
agagattaatgttatcactaagacaaggaacaggaatacctttgattttcttttgtccactacacatgtgtttttccccactctcagactcaygatgaaatatgaaaggagatttagattctgcccaactagaactcatattcaaactaaaagtagaaactgatcaaagagtttgttgtttgggagcaagattaagaaggaggtaggtatggtgagaaagggaatttcttaaagtcatcttataatatttagtttctttcctacacaagtattaacatgaatttttttttttgaaacggagcctcactccgtcgcccaggatggagtgcagtggcgcaatctcagctcactgcaacctctgcctcctgggtacaagcgattctcttgcctcagcctcctgagtatctgggactacaggtgtgtgccaccacacccggctaattttgtatttttagtaaaggcagagtttcactatgttgaccaggctgttctcgaactcctgacctcgtgatcctcctgcctcggcctcctgaaaattttcatataaaataaaagaacaaaggaaaagtctttctgtttcattcaaccatgactttatttaacatcattgtaattaaatacatattaaatttttagacaatgaataagaaatacattacctagaa

SEQ ID NO: 915239 - DNA, 599 bp, Homo sapiens
tctctttaaagaaataatagctttaaagtgtagtaactgtggacccaaaggaaacatttttttggatcattttaccataacattttttaaaaggcccagagagtartggaaagtagataacccccccttcccatatctgtctattgaataaataggcaaacctagcctgcttctttatgtagcaaatcattataagtctgatcagctttcactggcataactgctaagaaatatggtctatttctttctttgtagctttgaagccacaaaggaatttatttctttatcaattttaactatgttaataagacaaaataagcaaagtaacaacattataaatttattttgaaagtgttaagtaagatatccagatatttagatatttaaaagcacctggattaaaaacaaacaaaaaacattatgtgtgttattttcatgggaatatacagaattagcatttgaaagacatggccctaatcctgattttgtttgttcctgcctgttaaatgggtaaaataaaatcagtcccactttttttctgtgtataataagagaagtatattagatgtgtctactcaatcaatttcttagtcataaga

SEQ ID NO: 915240 - DNA, 678 bp, Homo sapiens
gggctgacatgaatagacaattctcaaaagaagatgtacaaatgatcaacaaacatttgaaatattgctcagtatcgctaatgatcagagaaatgcaaaccaaaaccacaatgcaataccactttactcctgcaagaagggctataataaaaaaaaaaatcaaaaaataataatgttggcatggatgtgataaacagggaacaattttacactgctggtgggaatgtaaaccagtgcaaccactatgggaaactgtgaaattccttaaagaactaaaagtactatcatttgatccagcaatccactattgggtatctacaaagaggaaaagaaggcattatatgtaaaagatacttattcacacatgtttatagcagcacaattcacaattgcgaaaacatggaaccaactcaaatgctcatcaatcaatgagtggataaagaaactctatgtaaaaattgtaataaattgggttatttattactttctaatattattgctttttgtcttacagtcttatatttttctaaatgaataatattaagaagataaacaatatccaaatcattttcttatttgtacttcaatatgtcattataacaaatgtaataaaaacaaaatagcataagtttctgttrtagtaattttcttgctgctacaaaaaggcacatgttccca

SEQ ID NO: 915241 - DNA, 603 bp, Homo sapiens
gatgtccagacagaagtttgctgcagggttggagctttcatgaagaatctctgctcaggcagtatggaagggaaatgtggggttgaagcccctacacggagtccctactgggatgctacctagtggagctgtgagaagagggtcctccagacccgagaatggtagatccaccaacagcttgcgctttgcacctggaaaagccgcagacactcaacaccagcccatgaaagcggccaggagggaggctgtaccttgcaaaaccacagggacagagcttcccaagaccatgggaacccaccacttgtatcagcgtgacccgaatgtgagacatggagccaaaggagatcattttggagttttaagatgtgacatccttgctggatttccgacttgcatgggccccgtagcccctttgtttcggccagtttctcccatttgaaacattgtatttaaccaatgtctgtacttccattttaactaggagataactascttgcttttgattgtacagcctcataggagaaaaagacttgccttatctcagatgagactttggactgtggacttttgagttgattctgaaatgagttaagagtttggggt

SEQ ID NO: 915242 - DNA, 542 bp, Homo sapiens
gctaactactttcctgagtcatgaccattcctgcagggtataatcaagttctaccctctaactttaaatccacatactctttttgtctctaactctggttcttcaggtggctgtgaagcactytgaaagactttcttttcccggatttccaatcaagggggtagatttatcctcctttacactagaatgttcatgtttgcccaggggtctgtgtgtcactgccacagtaacagaagattaagagtcattcatccctttctcagttctttcccctcttactgggcttttccgccggcccgaaaatatttgtaagtgctttcccagccttttagaatgctgagtcttgttttgtgctttatggtaccactttgcaatttgagtttgccaggtgttggttattgcctttcccaattctcgagccattataaaaatgtctttccatttggtcctaggttgcaatacaataagaattaccactgttatggtttggctgtgtccccacccaaatctcaccttgaattgtaataatccccatgtgtcaa

SEQ ID NO: 915243 - DNA, 599 bp, Homo sapiens
gaatgtggctgaagtgaagggaaggaatttgtgggagggaagcgccagtgggaagtcaaagaagtgggagatgactgtgtaagctgaatcttgggcatttaagtaacacactatttttaaggaaatgactggtacaggcaataaagacccaatacattaaataaatagggggaaaagtggccttattcaaagtctctgagtggatatgaaaaacaaaatacatcaagcctgtagtcccagcactttgggagactgagacgggtagatcacctgaggtcaggagttcaagaccagcatgggcaacatggcaaaattctgtctctactaaaaatacaaaattagccaggtgtggtggccggtgcctgtaatccagctgcttgggagactgaggcaggagaatcgttgaaccacagaggcagaggttgcagtgagccaagatcacactactgcactccagcctagaggacaagagagaaactccatctgaaaaaaaaataaagatgtttgaaaagatcagttttaggggaaaaacaaaacaaaamcaaaaaacaaaaaaaacgcacacagaaaatagaatgaaaacctgaaaacagttttat

SEQ ID NO: 915244 - DNA, 578 bp, Homo sapiens
tctccctcaacccgcttccttcacatccccaamaggacttgatttcaagaacataccctaaaaaatttttgcttgttaacctccatctcagactcttcttccaaggagacccaacctgcaataacaaataagaactttaatttctgatttagcttcttagtagctgaattaccctgattatttcaactagcatttctgagcatcaggtttgtcattaataaaatgaaaataataataatcttattacaatattatttaatgagatgatatgttatgcaacaatgacttaataagccatagtactagacttctatcatctaactgaagtattttggtttagaaaaggaaaggaataaaacctttaatatttaaaggtaataaagagtaggtttactacaatagcatatgtagtaaattcacatcgaaagacattgtaattcttaagaatattaacattttgcttcctttaaattaggtaataattttttttaattcctgtaaatttatttggatttctctggcaattccttgttttccactttttgttctagaatgaaagctccaatttagttatttaa

SEQ ID NO: 915245 - DNA, 626 bp, Homo sapiens
actaataaaagttttgatggaaaacaacctgtggtaaaaagaatatccttgttgatacattcaagaagacagtaagaaacacacataactcatggttgcatctaatgaaactgcgataatctactaaatgaaatagagattacgaacaacaaaagtttaaaagacaatgtactcttttctatgtagatagtttatatattatgtatataaagtttaaaaaattaaatatatgcttgcataagtttaaaaagacatatcttttaaaaatatatgaatatttatatatgtttacatatatttttaaataaagtacatatcttgtaattaagcagaggataaacataaaaataaatccttcattatggcacctctgatttggatgataaataatatgggaattcattttagagaggcgaatatcgttaccaaatattaatttcattatgttttatttatttatttgtctgtggtttttttagtgctgattgccagattagaagytgattggattcaatgctttatcccggcgagttaaaatccaaatatctatacatcccaggtttcaatccttctggtaatttgtctcttctaaactcctgctatttgaattaaaatatcttaactgc

SEQ ID NO: 915246 - DNA, 621 bp, Homo sapiens
tggttatttcttggaaaaaaaaatgctccccaaagtcaatacttcctgttgtaaaacaccaaagcagaaacttgattttatctgaacaaaggcagtttawgaggaaagtactattttttagcttgccaagaggccaggctatgccagatgatgaaagtccacttaaaataaaactcaatttccatcaagaagtcaaatttttcactaatacaattactgttggcggtatgtgtgggagtatcttttcacactgtctcttctctcagagtgacatttgtgatattgctgctttctgcaaaatttcaaaattcatagtgtggacagctccgataagaggttttattgcaggaacttttgtttttcttccagcaccctcaaaatcttttaatcccttttctatttgagcccgtatttatggctacctcattactgtattgacggtgggctctgtatagtgacataacttcccttatctgtttttatctagagcattcagttataggacacagtggctgctttttctatagagttgttcagggtctgtaaaaactgcttccaaggaaaggtttttctcttctcctaacatttgtttcagctggagaatcagccccagaaaattct

SEQ ID NO: 915247 - DNA, 578 bp, Homo sapiens
attcaagtgtcctctcgtttttcaagtcttgggcatctgtatccacagagccataaaaatgtaattacctctgtattagtcagggttctccagagggacagarctaagaggatacacacacacacacacacacacacacacacacacacatatatgagtttattaaggaatattaacacacatgatcatgaggtgaggtctcacaataggccatctgcaagctgaagaacaaggaagccagtctgagtcctaaagctgaagaacttggaggctgatgtttgagggcaggaagcatccagcattggagaaagatgtggatgtaggctggaaagctaagccagtctaatctttcatgttcctctgcctgtttttttctggccatactggcagctgattagatagattgtgcatacccagattgggagtgagtctgcctttcccagtccactgactcaaatgttaatcttctttggcaacaccctcatagacacacccaggaacaatactttgcatccttcaatccaatcgagtcaaccttcaatgcatcacaccctccattccccaaagttccccagaat

SEQ ID NO: 915248 - DNA, 668 bp, Homo sapiens
aataggaaatctatatgtgattccttcccataactggaagctaagttaaatctcttaataccgtcttggtttatctccataaccagtcctcatgccttcctcatttgcttgatgaaaaacaggatcaaaccatcagtgccaaaactctgatacactaatgtaagatctgtgaatattaggaattttggccattgaaactacaaaaccaattgacagagagagagggcttattcaataaagagaaaacaaagtacaccaatatgaaatgagctcttaaataaataggggtatattaaatgtaggggaatccgaatctcaataataaaacacagtcaagagactcaataaacataaaagataagacccacaaaaaaatattatgtgcaaagggaaaataaatcatagtgtaagacataaactttaaaataagcatgcttaaaatacccactagttattaagtaagtacatccataaaatcagagcaataaacaaataaaacaaaacataagtggctactaatctgcacaggaaaaatgaagaggaaacaaataagaagacttgaaaataaaatttactttatcaaaaatgttgcaaaattcttcaatgaatggcatatatacaaacgtagacaaaactgaattyggaattagcatatagatgttagaact

SEQ ID NO: 915249 - DNA, 657 bp, Homo sapiens
tgtgtttgtgtgaggaggggcatggtgctctcagaacccacctcctgtggccagagagccctgtcctgtgagggtggttrtcacagtggcagggttcaattcagaagaccttgagggcaggctgatgtttcctgaatgggcccctggttgttgcttgtccctgactctccatttccccatctgagtggatttggacctaatagggcactggagctggttcgaatcctgactggactacttggcaactttatgtctgggagcaagttacttaacctccccaagcctgtgtctgtgaaatgcgggtaaatgaatgtagatgtttggcagcagctactccttgttgagctctcacagtgaactctcctgcctctgccctccttccccgcctcccctggtgcctagcgtcaggtctagccacttcctcctgggcccctctcccttttctgtggctggctgcctgcccgcctggcgctggacctttcatgtaacgggaatcagcatgtatattctggtctggtctgtttctacacttaattttgtttccagtagtatttccctgtaccggcagagttcacaaacacatttgaagaggctttttctcaggattcttaaccttcccaaaggaagtcccatggatgggtttctagaagtctataa

SEQ ID NO: 915250 - DNA, 608 bp, Homo sapiens
tgcatgcatcacgaagttctcgtgccacggttttcagctccatatggtcatttgaggtcttctctacactgtttattccacttagccattcacctaaccttttttcaaagcttttagcttccttgtgatgggttagaacatgaccctttagcttggagaagtttgttattaccgaccttctgaagcttacttctgtcaactcatcaaagtcattctccatccagcttttttctgttgctggtgaggagctttgatcctttggaggagaagaggagccctggtttttagaattttcagcttttctgctctgatttctccccgtctttgtggttttatctacctttggtctttgatgttggtgaactgttacagatggggtttttggatggatgtcctttctgttgatgttcatgcttttcctttctgtgtgttagttttccttctaacagtcaggtccctcagctgcaggtctgttggagtttgctggatgtccactctgtgctctgtttkcctgggtatcaccagtggaggctgcagaacagcaaatattacagaacaacaaatattgctgcctggtccttcctcaggaagatttgtcccagaggggc

SEQ ID NO: 915251 - DNA, 637 bp, Homo sapiens
cacagcctcaggagtgtccagggtgatcagagcacagtttggttttatacattttaggaagatatgagatatcaatcatcatatgtaagatgagtattggttcagtctggaaggtgggcaactcaaagtggggagggagcttccaggtcataggtagataagagacaaatggttgcattattttgagtttctgttaagcgtctgcaaaggaggcgatcagatatgcatttattttagtgagcagaggggcaactttgaatacaacaggaggcaggtttgccttaagcatttcccaccttgacttttccctttagcttggtgattttggggccacaagattcatttttcttccatagtttttaggtatcaccatgcttcactcattttttaatttttttttttttggtagagaaggggtcttgctaggttgcccaggctggaagtttttatttctccaggataaatgcctaggagtataattactgagttacgtggtagttacatgtttgattttatgagaaattgtcaaactgtttttcaaagtatctgcgtcattttaaatccccatcagcratgtaagagtggtatagtttcccacatcctcatcaaccactggtgttgttaccaaattatttta

SEQ ID NO: 915252 - DNA, 696 bp, Homo sapiens
tgtgaaggaggaaatgtcaaccacttataaaaccatcagatcttgtgagaactcactcactatctcaagaacagcctggrggaaactgcccccatgatccaatcgccttgcccttgattcctccatcaacacctggggattataaatcaagatgagatctgcgtggggacacaaaacaaaaccatatgacacaacacataaaatgtagttgttatgtctccaatgtccttctcaattcaagaaaagttagaaccacaaagtatctttaaaattctttatttcaagtttataaggagaaatctaaatccaaggagttaagatgacttgccaaggtcacaaagctctcagatgtgccccttataggttgtcttccacctggagagctggtgttttgggagaagttgcagcccacacaaggaccctggcacaggtcggtacctgctctctcccagacagtacaaatagtgccatcttcctgctgcctccctccctgaggtccttaatagggattataactatggggcttttgtgtagtttttcttatttgggatcctctgatcagcagatttcttcatagctattcacacctatgaaaggcatttcaaatgcttgggactgaaggaacacaaaaccaggaagtgtgaccattatccctattttttttaatgatcctacattttaattaccataatcccc

SEQ ID NO: 915253 - DNA, 580 bp, Homo sapiens
agggcactgtaaacagcctggctaattgtgggttaccctgcctagcagtcataagatagtattcatattttggagctgagcrctgctaaatatggaagcaactcctgaataattaagatacaactgcggaatctgacctaggtgcctttgttttgtgttgcagatttttctctcttgacttctctgagagaagattgcagtgtctcctgacacaccagggggaatgccgcagaacagaaggagtgaacttcagtactgtaaccaggctggtactctaacaccagctttgcaccttagtggcagcatgaagcactttgttagagtcccaaattagactctagttagatgtcttagccatcccccatctctcacatggtggctgtctttattgaggggcgaagggaaattctcctaagaaatataaagcccttctggggttaccttctaaaaagcatccagaagtgggtgagcccacacttgggattctttcttcacccagttggctcctcctccttcaagaatttttggggacaggatgaaagaactcaaggctccgggtttacccaccacaactttgcaa

SEQ ID NO: 915254 - DNA, 580 bp, Homo sapiens
agggcactgtaaacagcctggctaattgtgggttaccctgcctagcagtcataagatagtattcatattttggagctgagcactgctaaatatggaagcaactcctgaataattaagatacaactgmggaatctgacctaggtgcctttgttttgtgttgcagatttttctctcttgacttctctgagagaagattgcagtgtctcctgacacaccagggggaatgccgcagaacagaaggagtgaacttcagtactgtaaccaggctggtactctaacaccagctttgcaccttagtggcagcatgaagcactttgttagagtcccaaattagactctagttagatgtcttagccatcccccatctctcacatggtggctgtctttattgaggggcgaagggaaattctcctaagaaatataaagcccttctggggttaccttctaaaaagcatccagaagtgggtgagcccacacttgggattctttcttcacccagttggctcctcctccttcaagaatttttggggacaggatgaaagaactcaaggctccgggtttacccaccacaactttgcaa

SEQ ID NO: 915255 - DNA, 578 bp, Homo sapiens
cttccctctgacatgtctaccaaaatgagaagaaaccccaaaaccaattctggtaatatgacaaaacaagattctttaactccygcaaaagaccataccagttcaccaccaatggatctaaaccaagaagaaatctctgaattgcaggaaaaataatttagaaggttgattattaagctaatcaaggaggcaccagagaaaggtgaagtccaacttaaattaaaaacatgatacagaatatgaaaggaaaattcttcagtgaaatagatagtataaataaaaaacaatcacaatttctggaaatcaaggatacacttagagaaatgcaaaatgcactggaaattctcagcaatagaattgaacaagcagaaaaaagaacctcagagctagaagacaaggctttagaattaactcaatccatcaaagacaaaaaggattttaaaaaatgaacaaagccaccaagaagtttgggagtatgctaaatgccccaacctaagaataattggtattcccaaggaagaagagaaatttaaaagtctggaaaacatatttgagggactaatcgaagaaaatttccc

SEQ ID NO: 915256 - DNA, 674 bp, Homo sapiens
tcagcattctaagagtgcctttgtttctttaacttttattttaagtttagaggtacctgtgtgtatttgttatataggtagacttgtgtcatggggatttgttgtacagattatttcatcacccaggtattaagtctagtaccaattagttatttttcctgatcttctccctcttcctacccttcaccctccaatagatcccagtgtctgctgttcccttcttctacgtgtccatgtgtaatcatcatttagctcctacttataggtcaaaacatgtggtatttggttttctgttcatgtgagtttgctaagggtaagaaccttcggttccttccatattcctgcaaaagacattatctcattcatttttatggctgcatagtattccatggtctatatgtaccacattttctttatcccctctacctttgatgggcatttaggttgattccatgtctttgctattgtgaatagtgttgcaacaaacatatgtgtgcatgtgtgtttatgataaaatgatttatattcttttgggtttatacccagtgatgagattgctgggttggatggtacttcgatttttaggtctttgaggaatggccacactgtcttccacaatggttgaactaatttaccctcccaacaacagygtataagtgtttctttttctccac

SEQ ID NO: 915257 - DNA, 511 bp, Homo sapiens
gtgtctagttttcccagttctactttttgaagaaattatacttccttacccattgtgtatccttagcactgttgctaaagatgggttgaccatatatgtatgagtttacatctggtctctttattttgktccacttaatatatctgtctttatgctagtaccatactgttttaattactatggtttctaccacttctattctgtaaagtcctggaagtcttagccagaaccattaggtaagagaaagaaatagaaggaatcaaaattgtaaaggaacagaataaaatgttctctgtttgtagatgacatcatcttgtgtgtagagaaccctaaaactccacctacacaaaatgttagaactaataaacaaattgagtaaatatgcaggatacaaaatcaacgtacaaaaaatcagttgtatttcaaaacattaacaaggaaccattctaaaaataagctaaaaaacaattccatttacaatagcataaaaatcatacaatatttagaaata

SEQ ID NO: 915258 - DNA, 664 bp, Homo sapiens
atttttaattcatagtcttatttttgacacaccaatagcatgttatctagagcaggaaacaaaggaaattgtgtttttagttgtattacatatctctcaaggggctgcactccaaatcraaataaaaaataaagggatactcttctttccttgaacaatgccaagtaagtgtgtatagaacaatctttttctcacatctcctctctgggatatgtctacctgggtgattagttattgggccatttcatactgtttggcaagaacctgaggctctgacttttaactttctttaatcagctattatatgtcaatataatgtatcataaatataatcatcaatatcaatcatcatcaatataatataatcacaatgattaaaattatactataggtcagactggtaaaccataatcccatctagctattaatagaaatgaactaattagaatataatttttcatagtgaattctatggagcacttattctgcatgctctgttggggaaatattcagtattttaacaagaaagttttcattggagacttacatcgcatgttaacatatttaaggctataagaagtcctacttttaagagttttaataagtttatttcaggatctcttatatttatgtgagtacaaattctttttatccttggaatatc

SEQ ID NO: 915259 - DNA, 664 bp, Homo sapiens
atttttaattcatagtcttatttttgacacaccaatagcatgttatctagagcaggaaacaaaggaaattgtgtttttagttgtattacatatctctcaaggggctgcactccaaatcgaaataaaaaataaagggatactcttctttccttgaacaatgccaagtaagtgtgtatagaacaatctttttctcacatctcctctctgggatatgtctacctgggtgattagttattgggccatttcatactgtttggcaagaacctgaggctctgacttttaactttctttaatcagctattatatgtcaatataatgtatcataaatataatcatcaatatcaatcatcatcaatataatataatcacaatgattaaaattatactataggtcagactggtaaaccataatcccatctagctattaatagaaatgaactaattagaatataatttttcatagtgaattctatggagcacttattctgcatgctctgttggggaaatattcagtattttaacaagaaagttttcattggagacttacatygcatgttaacatatttaaggctataagaagtcctacttttaagagttttaataagtttatttcaggatctcttatatttatgtgagtacaaattctttttatccttggaatatc

SEQ ID NO: 915260 - DNA, 688 bp, Homo sapiens
agactggaccttagctagaaagaagaatagtactatcttgtacaagagaactgaagacaaaatgaaggtagatacatccgtctatgagtacatgaatagatttggtgacaaaaagttgagaagactcacccagtggtttttatatactctgtgaagaatgtaacaaagttacatgcagaagtttgaggagagtagaaaagttgtgaaatattttttgcacagaatgggagagggttgaccagtaaagtgtagcaggctcactggtcaatattaaggtccaagtaaggaactaatgaatggaagttgaaagcactatgctgagttcattattttctctatgagtgctcgtttgcttatgcacattcttagagaaaccaggtatttcaggtgatgaagggctggtactttgccagagagaagtgatgaaagacagaagggcaaggcaattttgcctatttttagagaggtattgaaactggcgtagatacgtaatttatgaaaagcaatataacattctatttttctctaactgaacttgattttactttcaatcaccatttatccctgaggtggaaaatttttattcaaaamaaattactaatgcatggaatctaagccagataggaagcaaagtgaagacagtaaagggataacaacaagggagatgacacaagagagactaagccta

SEQ ID NO: 915261 - DNA, 660 bp, Homo sapiens
accattcttttacagattccatgattaacctttgaaaaaattaagcccaacctccaaacacagrctatataaaaattatttataatttgcaggtattagtggcttaatacagcatatatttgctatcagcttttgcattttaaaagaaaaattaaagacaaaaatcttaatacaaagtaataaactactaatcataaaattctctcctatattcttttagaacacaatgaaaggaaattatttgctttttatgagaaactgatatactttctctccatagatgatgaaaataactttctttgactaccaagaaatatataatcaaatttgtagaccacttttaattttttaaaaaaatcctggatctgtattttttaccttcctgacctcttactataatttatcttttctctggtcctgaatctctgtaagctgacttgctttcaggggaatgacactgtgcacataatacagcatcacctgggtcttccaagatttggtctccaccatcacctcaccaccaccctgtcccacctgtccacaaacagtttggaagtttcctcttttcagctttcctctttccaaacttaagcttccgtatgtacaatgtagctctctcctacttaaagaaaaataaattcagagtgatcctcctaaagt

SEQ ID NO: 915262 - DNA, 680 bp, Homo sapiens
agaccataggttaagtcacaaaacaaatcttaaaacatttgaaataatatcaaacatcttctctaaccacaatgaaataaaattagaaaataataggaatgcttttacactgttggtggaaatgtaagttagttcaaccattatgaaagactgtgcagggattcctcaaagatctagaaccagaaataccatttgacccaccaatcccattactgggtatgtaaccccaaattataaatcattctattacaaagatacatgcacacgtatattgattgcagcactattcacaatagcagggacatggaataacccaaatgcccaacaatgctagactggatttaaaaaatatggtacatatacaccatggagtattatgcagccataaaaggaatgagatcatgttctctgcaagggcatggatgaagctggaagccattatcctcagcaaagtaacacaggaaaagaaaatcaaatgccacatattcccactcataagtgggagctgaaagatgagaacacatggacacagggaggggaataacacacacttggggggcctgtcatgtggtggggtggggggaaggagagcattagaaaaaattgttaatgcatgctgggcttaatacctaggtgaygggttgacagatgcagcaagccaccatggcacacatttacct

SEQ ID NO: 915263 - DNA, 655 bp, Homo sapiens
aaatagttaaacaggttgttaatgcttgcaagatttgccttaaaaatcatcccytcagctgaccacttctgcacccaggaactcaaaggacagcaggctgagggaaaactagcaaatggatttcacccatatgtcaaaggtaaggggcatccagtaccttctagaatgaacagataccttcactaactgggtagagccatttccatgtgggacaaagaaagcctccaaggtggtaaaagtactgattaatgagataattccttgccctggcctgcctaagcaacttcagagagataatggcctctcattcaaggcagctgtgacccagggggggtcacaaaggcactaggaatacactaccatcttcattgtgcttggagaccacgatgctcaggaaagatagaaaagacaaatgatattataaaaaaggcacctcagaaaactatctccctcagactaatcttccctagactaaccttctcaccatagctctactacatatttaaaacagccctttaaagctaggtttgagtccttttgaaatgatgtatggacagccttttctcaccaatgatttcttgctagacaaataaatctctgatttgctagacaaataaatctctgatctttggcccatttccaacaggaactggag

SEQ ID NO: 915264 - DNA, 373 bp, Homo sapiens
aaaattcacatggaaccaaaaaagagytcacatactcaaagagtaagcaaaaagaacaagtccggaggcatcacattacatgacttcaaactataatgtaatgccatagtcaccaaaacagcaaggtactggtataaaagtaggcacaaagaccaatggaacaggatagagaggacagaaataaagcaaaatacatatagccaaccaatctttgacaaagcaaacaaaaacataaagtggggaaaggacaccctattcaacaaatggtgctgggataattggcaagccacatgtagagaatgaaactggatcctcatctctcaccttatgcaaaatcaactcaagatggatcaaacacttaaatctaagacct

SEQ ID NO: 915265 - DNA, 580 bp, Homo sapiens
tgaggaaactcaatgatatctaaaataacacagagaaataattcagaatcctatcagataaatttaacaatgaaatggaaataactaataagaaccaagcaaagattctgaagcwgaaaaatgtaattgacatactgaagaatgcatcaaagtctctcaagaacagaattgatcaagcagaataaagaattagtggtcttgaagatgggctatttggaaatgcccagtcagagaaggccaaaaaaaaaagaagaatgaaacacaactacatgatctagaaaacagcctcaaaagggcaaatgtaaaagttattggtcttaaagaggagatagagagagagagatcagggtagaaagtttattcaaagggataataacagaaaacatctcaaacctagaaaaagatatcaatattaaagtacaagaaagttatagaacacaaagcagattttaccaaaataagactacatcaagacatgtgataattaaactcccagaggtcaagaataaagaaaagatcctaaaagtagcaagataaaagaaacaacatacaaaggagatccaataaatctaccagcagg

SEQ ID NO: 915266 - DNA, 607 bp, Homo sapiens
gttttcaattactaaattaagatcattataacatagtccaaaaaatgacaatttagttttaataggaaagaaataaactgtcaactaggcatgtctggagatatgatcaattacgttmagtgatttgaccaatatggctgcatgggaagaacatttctgaccctttttggtcaggccaagtatttttttgtcaatagttgtcagtagttgatctaaacacttaagaaaagtgacattttactctgaagataatcagcaaaatacagaacaaattatggagataaatgtaagtatatgtgtgcaggaatacatcctgaatataccaaaacagggcacatatttgcctttttataactttttttaaaaaaaggaaagttggggattaagatggcagataggaggcaggactagcttgcagcttccgcttggacagacagagcagcatgtggagattcacatcatgaacttctccaaaaactacggcaggagcataaccaggaaagccaagagaatccacagaccctttgaaggaactgaatcaccaatgcaggctccctgagatgctgaaaaactgtgagtccacttgctttctcaatggggaggctcg

SEQ ID NO: 915267 - DNA, 552 bp, Homo sapiens
ttaatgatttgtatactccaatttaccttttattattttgtctacgtatctatcataaccatgcttacataaatatatttatagtggtcactgaatcaccatatttgtgtcttttgtatgtgagttaaaagttttgcatgtcttatgagtctgtaaataattttacatagagcatgttttatgatctagatatatatattgtttttattactattccaaacccaaccatatgagaaaaatagaatacatggaaaaaatagaaattggctctctgcagtgatatggtttggctgtgtccccaacccaaatctcatcttgaattgtagctcctgtaattcccacgtgtcatggagggaccacacgggaggtaactgaatcatggtgatgggtctttcctgtgctgttctcctgatagtgaataagccttacgaaatctgatggtttcataaaggagagttcccctccacaagctctcttgcctgccaycatgtaagacgtgactttgctcctcaatcgctttctgtcttaattgtaaggcctccccagctttgt

SEQ ID NO: 915268 - DNA, 667 bp, Homo sapiens
acaaattggtgttgaaggtaaattggtgaacaaaacaaaattatttcctcttggaacttgtattccagctgtaggttgcaattgttaaatatatatgtcatcttggatgggtgctttaaagcaggaaacagagctgctggggtgagaatgtactttaagcggagtaatcaaggaaagattatctgctgtggtgacatttgaacagtggccataaggaaaaaagagagcatatggtacaggatctaaggggagaatgttggagccagacagatgaggaggtggaagcacctaaaactaattacccttattgtggaaaaaccataaggatgaggccagcatgggaggtgtggagagagcagggggtggcagtgatgggaaatgaagtcagaaagggaaccaggggggtaattttgctctgagttaggtataacatttttagaacaacaacacaagaaaaaatattctgtgattgtgtttattgcttctgtaatcaaaattctaccatagattaactaacactggttgtaaaaatgaccctgctctatagaggacttggagacaaggctggctctctaatcctttccccaacaccttgtatgaagatttctgggtcagaaatcttagactggccacatgatgtagkctgacaataacccgtcttgctggc

SEQ ID NO: 915269 - DNA, 664 bp, Homo sapiens
ttaacttttaatattcattttataatattcagtttwtaatgatatgatagcctttgttgctatatttatatatttaaataacttaattatttaattcctttaatcctttctaatttttttaaaatctggcaatgtgtatgtgttatgtatattgtagaggccaaaggaagaaattcgaagaaatttgcctttggctaaggaatcattacatacagtggtctattgtggaggtttcttcaaaagaatgtgaacatgttttatttttgctcctttactcactttacaattagaaagattcagatctcttgagtgtaagattactttttaaaaactatactgaacttataaaattgctttatattttcaaagctacatcgtagtttcatctcataaatgatctcatttttcaacattaatttttgcaaggcatggctcaatataatcataatggcttagatcaggtcatgaagtcatcaaattcctattgtcccttgtgcttatgacacaaaaagtatgaagaaaacgaacaatatacatacagatgcatacactacactatggaaggaatgtaatcaagattatcccattttttagtgctaagctaactcattatttgtggctgactcattataacaaaatagacttacttttcaaattactctgt

SEQ ID NO: 915270 - DNA, 496 bp, Homo sapiens
atatttcccctttttactgcccaggtagagattcttcatgatggcttttctcctgtagcagacttctgctttgacattcaggtatttccatacaaactctgaaatctaggcagaggctcccaaacctcaactcttgcattctgtgcacctgcaggcccaacaccacatggaagccaccaagtcttagggtatgcacccctgaagcaacagcctgagctgtaccttggctcaagctaaggcatggctagagatggagtcaccggaatgcaaggtgccatgtcctgaggatgcacagagcagcagggccctgggcctgcccccacaaaaccatttttctctcctagtcctttaggcctgtgatgggaggggctkccaggaaggtctctgaaatgctttggaggcattttccccattgtcttgctattaacattcagttcctctttacttttgcaaattttttctgccagttttaattgctcccctgaaaataggattt

SEQ ID NO: 915271 - DNA, 614 bp, Homo sapiens
attgcagatgtaatgatttgagatgagttcataccagagtaggttgggtgcctagtccagcatgactggtgttcttatagaaagagaaaatttgaacccaaatacccatggatggaggaggatgtgaagaggcaaggaagaagatggatatcagtaagcccaggagatagacctgacactgagctttctttgacccccttaaaaggaaccaacccttttgacaatgccttgatcttggacattgagcctccagaactgtgaaatgctaagtttctattgtttaagcaattcagtttgtcatacttctttacaacaatcctagcaaagtaatgtattgatcttacctgacttttgccgtgtttataacaaatctgaatacctcttccttcttgaaattcttcttttgtttgtcttccataatcatttgcttcccactttttccatggacaaatgctaaaactctaatgtttatcacagaataaagygtgctcttggtgacaaaatatgaacctcaaactatatttccactattatttgtcccctgagttacaaatcagtatacgtaaatggctattagatattatcatgtaatagttctataggcatttcacatt

SEQ ID NO: 915272 - DNA, 634 bp, Homo sapiens
gtagaatatgcctcagttattttaccagaaaggcaagggatttgggggacttatacattctcactctccgtaactttgagagccacagtttcattcaccggttttcctatgagatayacacacacacacacacacacacacacacacacacgtattatgaatagatcaatttttgacctatcaactataacattttaatatatgcattatggcagatataccctaaaataaaataaaaattgtgtctactcagtttttattttgctagcaacaatatgatgtagaatttatgtgtgttagcatgtaagcctgcttgtctagtttcagaaacctggcaagctacttagttactagatgaacttaggtaactcttaattattcttaacctgtatttttattgctgtttatctcacctttacctactaagttttttttcttgtaccagaggaaattattaatgaaagtggcaaagcaccaatgaaccaaaattttgaatatgttgaaatataatgaaaaacagaaaaaagaagttaaaactcccagatttcaatttccatatgaattaacataatgctatgtgaaaatgtcaatagcaatctacatttttatgtgaaaataaaattatgcgaaaatg

SEQ ID NO: 915273 - DNA, 653 bp, Homo sapiens
tgtctgcttattcaaatgttaatctcatccagaaacagcctcacagaaacatccagatgtttaaccaaatatctcggcagcctacaacccaatcgagtcaacacacaaaattaagtatcacagttacccgtatraaaatacttgcatttgtctgaaagaacattgaatattaaaattaaacttgtcagggggagcctgtcagcctgacagttgactaagtggtgtttgtgaagtaaagcaccttgttgtccctgtagtggataaattgagacccagcattatttatcatgagatatagtatgatgttgccaccttttgtacagtttaactctgcagttgtaatagaattccaaaagttacattccctgtgttctcctcacatctgggagatgaaggaataaaagcattaaatataagtataaggcttctacttatactttaagtataataaaagccttaagcataaggcttttatttgaaggaactgtctgaaacatacatagaatccataataattattactactcacaggcacattgttcagtaaatatttagtgagtgtctattatgttccaaccacaattctagggtctagacatagggtagcccagaatagaaaatggctttgaggagattggagttttgccacacat

SEQ ID NO: 915274 - DNA, 625 bp, Homo sapiens
cattgaaactgcttatcaaagcaygcaaaaatgacatgtttatatcattgagttttcccatccctccatttttttgtcatctaattttacccagatatttttaaatttttatttatttttttctttttttaatgttagggagggactaagcagaagtcaaaaacaggtgcttagtcagaaagtaagacttgggcataagagaaataaaaacctcaattgaagatctgatcttcagcttctacagaacaaactccctttagaaatttcaataattagagaagtttctcctatttgtatgttaaagaataagacactgtctgatacaatgacttcagggggttgccatgaccttctaagggttattttctgtttgcatgcaaggactacttcccttcctttctaatttcttagtcagcttgcttagtttcctttgcttttttctttctttatctttcacttttaaagtaagctaacccaaatttcccctgagatctactaaaaatttgatccctgctaccaaattccaccccaccaaccatcaaaaagccttttagtacatagtatgcctgtaaaatttcgtaagaaattcaccctgactccaaaccacccaccagcagggctgccc

SEQ ID NO: 915275 - DNA, 637 bp, Homo sapiens
ttttgtattaaagattcctttaatcttggttgatttttattaaaaatgtcttcatgtctgcccttaacaattttcattgtyctatgcactttttttgagttttcaaatttgatattttaatgaatctcaactgttcttaaaatagtctcattacttaactttttttgcttttatatttacttatatgctgctgctcttttgaatttagtctatttcctaggtagcattcataactcatggccacatacttgcttctgaatgaaatgttttcatttttactttacttccaaaatgaaatgttttcatttttactttatttcttgcaacccacatgctcttttctccttttggcttattcaccttattatttttctatgagttgccatgtggttgtgataaagttcaatttctttactttttaattttgctggtaatttaccacttaattcaaacatatcttgagcagttatggtctcatatacctaaatttgctttatattttttcttctggtatctgagcaatttaaaaacaactaagattttcttatttccatgagaaataaacatttaggaaatgtgtataattatcaccatattagtttgcatgccaaagaagtgagagctttgggtatgaaaa

SEQ ID NO: 915276 - DNA, 640 bp, Homo sapiens; identical to SEQ ID NO: 896544

SEQ ID NO: 915277 - DNA, 624 bp, Homo sapiens; identical to SEQ ID NO: 896541

SEQ ID NO: 915278 - DNA, 424 bp, Homo sapiens; identical to SEQ ID NO: 896542

SEQ ID NO: 915279 - DNA, 424 bp, Homo sapiens; identical to SEQ ID NO: 896543

SEQ ID NO: 915280 - DNA, 668 bp, Homo sapiens
taatttaaaggacagagaaatgactagaaaccaccttggagcctacccctatttcttgccctaccgtgagtgtagcaggaaggcagacacaaagaggagtgggtgytaatatgagtaacattttccatgccacatacttataaagtttattctataatctaagagttccagaaataactctccttttgaaggtttctctaaaaaaagattctctttttctcccaatcacagaagcacgtaagtggtagcatacttccatctttctacattgcaatttctatactagtactcttctttttataaaacttaacaaaacctctcttccatcctacaatcttctgtttgttgtcccctctctaacttctggccaaactctctcttccatggacaactagacacttgacttaaaaccctcttcactaaaactgctgccattactcaagctaacctcagtgtccacacttgctgcctaccaaacatcttagctttagttgtccttcaacatccaacccccttgtttcatcatagacctaattatctggactattttcccttataaactatacttcatgtttctatgcagtatagatctgtcactcaagctatttttatggcacctatttggctctaatattctttcattcatagtaaactttcaaatcttctcg

SEQ ID NO: 915281 - DNA, 662 bp, Homo sapiens
aaaaaacaaagattcttaccccatgagatattgcattcttgaaatatacataataaataggtcatcagcaatatacagaatatattatgtacaatattataaagtgaaaagtaagcattacaattttttttaaaaaaagaaaggaaaataggttaagaaaaatttgaaatgccagggtagagtgcatgctccattctcattcagcttcttgtggggaggggtatacataaactagaaataagatagatttaactggcttttgataatgattttgtagaattaatactgcaaaatgatttgcagttgtaagcaacagattaattatagtgtttgaccatgaaacaaattgagaaacagatggtgagaaaatattcagagggaacaggacagtcaaaagatgatggaaccaatggattagatgtttttctgggtcaaagattgttgaaatcaggaaactagagagattgagtagatagcaaacctatgcctttcaatttatctgatagacagaaagtcctatctatgaaatggagattataaagaagttacagttattgatgatggcaaggtcacggttcttttttttaacttttaagttcaggggtacaagttcagrtttgttacataggtaaattcatgtagtggggctgtattgtacagat

SEQ ID NO: 915282 - DNA, 547 bp, Homo sapiens
aatccattcattcaatggaaggtttttcagggaaaaaataaatgagctattaaaccaagaaaagaatgagtgaaaccaacggatatttgctatgagaagaaarccagtgtgtaaatgctacacactatacacctccaattatatagtgttctagaaaaggaaaaaaatacagaaacggtagaagtaacagtggttggcatacattcaggagaaagggaggaaggctgaatagatgacgtgcaagagattttgaaagcagttaaaataatctgtataattctttaatattgcatataagaagttttgtatttgtcaaaacttacaaaactatagcaaaaagagtaaacaataatctatgcaacatttaaaaataattggaaaaacatgggatcttggaaggaatgcagattgtgacaagagaatataactgcacttcaaatgtattaaacaacctcagtgaagggagtggagggaaaagttgccatcttacgcaactttggaaatgaattttagtttgtaatacatatgtactgttctctagttgata

SEQ ID NO: 915283 - DNA, 624 bp, Homo sapiens
atcagaactataccgcattttttccagttwtgtattatgtctaatatatactaatattattctcttaaaatttgatgaaaaaaataaaatataatgattttcttaaaaacccatatttaaaaggagacagtgattgctagttgaaactttcaaaatccatttttgaaaatttctactacgtaaagaaatctagaatctattctaataagaacatattttcatatgctgaagattgcaattaaatcagtgtaagccctttttcctctagacaaaactgtcccgattcttagaactttctgtatatcatattttccatatctcttataaaatatatttgcttttatgaaacaccttagagttcttcacattccatttaaggttatatggctcacaataaaagaaaagagaaaccttctgttttatgcagcattttctagtctctagtctttaatcctgcagataaaaagtccaagggccagaagtatagctacacgatggaagaaaatatttgcacatcttaatgtaagttaggttattcatcataaaatttaacacagatatggagcagtgaaaagaaaaatgagttttaatactctataatgtgctagagatcatctgtactga

SEQ ID NO: 915284 - DNA, 641 bp, Homo sapiens
ttggatgtggtcgttgtgcatcartgtaggctaaatgttgccatatcttccaattttttttgtagaaagctgagaatataaatatttatgtgaaattatatttgtgtgccatcaaattaaaaaaaaaaacaaaaacatgttcacaagtggagtatagcatacatcccgatggtttgagtgtctctattgagtcgatgagatagttatatacttccacttttaggggcctttctagatttatctcaatcttacacaccctttaccattgtgccactgatttatttcaagcacatcatgagaaatacagctataaaactctctattgcagttactctaaggaaacttattgaactcagtatgtcttctttaagaaaattctcagaccacaatgcatttttaattccagttaacaggtttacactgagaatcaggaaatggaaaatgttattattatgttcttgagagctgtaaagaagtcatttcattttatctcatgcaaatatatgaaatcatttggcatatatttttagtagtagtttaaatgtattacatcaatgagttctagctgaacctaggaaatactccctaaacatctaagataatattctacttactctcataactaccttaataatgttaat

SEQ ID NO: 915285 - DNA, 641 bp, Homo sapiens
ttggatgtggtcgttgtgcatcagtgtaggctaaatgttgccatatcttccaattttttttgtagaaagctgagaatataaatatttatgtgaaattatatttgtgtgccatcaaattaaaaaaaaaaacraaaacatgttcacaagtggagtatagcatacatcccgatggtttgagtgtctctattgagtcgatgagatagttatatacttccacttttaggggcctttctagatttatctcaatcttacacaccctttaccattgtgccactgatttatttcaagcacatcatgagaaatacagctataaaactctctattgcagttactctaaggaaacttattgaactcagtatgtcttctttaagaaaattctcagaccacaatgcatttttaattccagttaacaggtttacactgagaatcaggaaatggaaaatgttattattatgttcttgagagctgtaaagaagtcatttcattttatctcatgcaaatatatgaaatcatttggcatatatttttagtagtagtttaaatgtattacatcaatgagttctagctgaacctaggaaatactccctaaacatctaagataatattctacttactctcataactaccttaataatgttaat

SEQ ID NO: 915286 - DNA, 601 bp, Homo sapiens
tgccttgtgcctttaaaccatgacatctaggatgtctccaatccaacatcacttgagtctttaataccctctcttctagtctwgtgcttcactgttatatgacccttgatgctggtcctgtttagattatttttaatgcaactgtactgtggccaatgcctccatttgcactgatcacatctggtgccactcactccactgacattaaattactatggatgttttaatacacagtgcagccaacagtatcacagtgcggtgataatctgccattatcactaacagtcttgattcttttatcacaactagtggtgcagcttttgtccaattgtttctgttgagttagctactgctgttgttgagcttttgtttgttggtttttgtttttgattttgttaccaccagtcttgtacttaaattctaacagtaaactttctgccactttttattaccattgttcaggtcagtcaattcaacagatatttcttaagcatctagactgaccatccaggattagtgctgtgtatgagggaaacagacatagtcccagccctcaagacattaataattctaaggtagaggcaaacagatattatatctc

SEQ ID NO: 915287 - DNA, 606 bp, Homo sapiens
cacaccgatgagtgaggaagtctcagagggctcccatgtgcacaagctatttgaaggagaaatggaactatgacattgcagtcatgttccagactattgataactggggcgggggtgggggggaagaaaggaatcctgttgtttaatttgagtgtgatcaccctagaagaatgggggttcaaattatagtttaacttgagttatgaaaaatgtatatatttaaaatatttaagtttaaggtttctcatctgttgtgaaataaaaaacaaaagaaagggagggaggaaggaaggaaggaaagggggagggagggactgagggaaagagataaagagaaagaaagagaaggagggagagagaaagagaaagggagggagggaggaagtaagaaaggaaagaaggaagggaggaaggagagaagaagcaaggaaagaaaagagagaagggggagggagggaagaaaggaagggaragaagaggccctcagttattagtcttatcctcattctcatattttagctgttatatatttgacttgttgattcactattcattgaaataatctagcaataatagtattcaactgtgtacatgagcttaataggt

SEQ ID NO: 915288 - DNA, 390 bp, Homo sapiens
aaaattctcaacaaaatactagccaatcaaaaccaacagcatatcaaaaagataatccmccatgatcaagtgggtttcataccagggatgaggggctggttcaacttacataagtcaaaaaatgtgatacaacacataaacagaattaagaacaaagatcacacgatcatctcaatagacgcagaaaaaaattgacaaaatcaagcatccttttatgattacaatcctcaggaaaattggcatagagggtacataccttaaggtaataaaaaccatttatgacaaacccacagccaacactgtactgaatggggaaaggttcaaagcattccccctgagaactggaacaagacaaggatgccctctttcaccacatgaattcaccatagt

SEQ ID NO: 915289 - DNA, 697 bp, Homo sapiens
acccagaatgctgacaaaacattgtttctgggtgtgtctgtgaggatgtttccagaagaaaatagcatttcaataagtagacgaagacctaccctcaccartgtcagtgagcatcctgcagtctttgaggttccatatagaatgtgaaaacagagaggaaaaaaaaaagggaatttgctcttgagctgagacatctatcttctcctgcctttggacatgaaagctcctgattcttggcctttagactcagactgaattataggaccagatttcctgtttgtcctgtttgcaaatggaatattgttggaacttctcagcctcaataactatgtcagacaattcccataatatataccattttattcatccatatatatatatatatatatatatacatatgctattagttcttttcctctgcggaatcctgctacagtacctgaaggcaatattttaatggatttttcaaaactttcatagtgaaaaagaaaaataaactatattgacaaatcttttctattgaagaactcctggaactgatgcattgataagaatgttattttaaatgtgaaagaatatatttttgcttatttgaaaatactttaagaaagcattttttaaaaagcagagacatatttaatttgtattactttaaacatttgtaaactctgtttaaaaattccccaaaaccaaacag

SEQ ID NO: 915290 - DNA, 613 bp, Homo sapiens
aactactaaaagccataggagaaatggactggcaaatctgaatttctgtattcataatttggccaggttaatggcaagctctatgatcctggccaagattgttcctcattatgtttatacaccttcatagtgagcctattggcgaacatgacgcctgtgttatatttgggcttccaaattctatgttaatgacagaatcctgctctctaaagcaaaccttgcttacagtccattgcagtcctgctttcatgtggagtgttcacttctgcaacatcaagaggaagtctcccatttctaactcttgatttaacggatgagtcaaatttgaccaatacaacaaagcagacagggttgcaatgttttacatgaaaaacatctgagcgtgctatggttacaggcaacagttcattttgataatttttaaaaggaaaatataaataaagaaatgacagagaataggatgattttacaaaggtgaattaaccatggaatcacagaaaaaaagataactaaagtacctaaatayacaattattctgggtttcctgggaactttaacaattttgttttcagatctactttatttcatttttttcctcatctgttttccatgt

SEQ ID NO: 915291 - DNA, 672 bp, Homo sapiens
tcagcattctaagagtgcctttgtttctttaacttttattttaagtttagaggtacctgtgtgtatttgttatataggtagacttgtgtcatggggatttgttgtacagattatttcatcacccaggtattaagtctagtaccaattagttatttttcctgatcttctccctcttcctacccttcaccctccaatagatcccagtgtctgctgttcccttcttctacgtgtccatgtgtaatcatcatttagctcctacttataggtcaaaacatgtggtatttggttttctgttcatgtgagtttgctaagggtaagaaccttcggttccttccatattcctgcaaaagacattatctcattcatttttatggctgcatagtattccatggtctatatgtaccacattttctttatcccctctacctttgatgggcatttaggttgattccatgtctttgctattgtgaatagtgttgcaacaaacatatgtgtgcatgtgtgtttatgataaaatgatttatattcttttgggtttatacccagtgatgagattgctgggttggatggtacttcgatttttaggtctttgaggaatggccacactgtcttccacaatggttgaactaatttaccctcccaacaacagygtataagtgtttctttttctcc

SEQ ID NO: 915292 - DNA, 541 bp, Homo sapiens
agagatagctttcctaaacatctttaaaagtaccccatgaactgtgaaacacctttcctgctttttcttcatagtacttatcacttcctgatattatgttagacaacargcaaataagtatatgctgttcccactaaaatataagctccatttgaacaggagccttgattattcctgagtatacccctagtgcccagaacctagtagggctttaataaatattagattcatttgttgaatgaaaaaatgaatgaataattgaataaagatatccaggtagagtgtccgggcagcccaacctatgtgaagccagtacaagaatgtttctgtgacatagtgagcgcaattattcctctaaatgatgaacttgcatgagtacacaaggataaaattaagcacgtagtttagatttctgcaagtctcttcctcagattgaggaaaaacaaagaaattgagcttattctcacctcattcttacatgaactaaatccagaataaagcatcatttaaataccaagcacatccctacctcagccactca

SEQ ID NO: 915293 - DNA, 633 bp, Homo sapiens
cagtcactgaaaaaaggactacaacattgctraggctacttacaactgtttcttaataaataaatacatgcttcatataaaaatattatttttaaaactgtaatgtaaaaatttcagatgtatggtaaatatgcaaatgcaacaatattagaaaaaactggtctatattctcagtttactgtttacagttgtgagaactgagtgagagtccttattctcccagtgtaataattattacacattatgcttcctgccaaaactagctgactgccttagtcctttgagttgtgaatatcagtatcaattcaaaaacaactatttaataacaactttcttaaagaaaggaagaaaatataattttatgaaatgaccacttttattattcttgagtgtctcagaaaatttagtgtaaagtgtcctttgctatccaggatataacagctggttccagataacatggtatgtctcattagagagatactagatctaattatgcaacatataagcaagatcattatagaaacattatctcgatgaggtaagtaaagtacatgtgaaatctaactctgctgtttgaaagaatttttgaaagcaaatgtaaggaattaataattacttaagtgtatgaagaaa

SEQ ID NO: 915294 - DNA, 606 bp, Homo sapiens
ctgttatttattaacagttatttaaggacttgtaccctataaacagaaactrtacatttttcaagcatctatgatttaccaaaatagactagtattagttaagaacaagataataataataaataacagaaatttcaggaattacataaggtcacaacttaataatacaaaaaaaataatcttttcataaaaacattccccaaaaatattaaaaacaaacaacaaatcaataacaacattaaaataagcaaaccatttgcctaaataactgttgtgacaaaaggcaaactaaaccataactgtaggccatttaagaacctactaaattacagcaccacgtttcaacactgatgtattaccaaagctcttcttagagacaaattcataggctttaacagtctattaaaaagaagtataaaagaatcatgtctttatcacaggaacttaactggactacaataaagcaaagatgaaacttagaaagaacacaaatttaattgcattagagaaattggaaaatcaacaagtaaatcacagaactaatatttttaaagaaaaaaattcgttactattttaaaaggaataagcagcaggaaaaaaatgaga

SEQ ID NO: 915295 - DNA, 615 bp, Homo sapiens
cacatatatggtcatttgattattattacaaagttcccaaaacaatacagcataaaatatagtctttccaaataatgatgtaggataaattaaacaataatttaagtatggggaaaatataaatcttacttgtatgttataataaaatattagtttcagtcagagtgtaattctgaatgtgaaaaacaatgcaataaatcttccaggacaattttgttctgaatttgggattcctaatggttataaatcaagaatcataaactggacttagttaaaatgaaaaacttctacctatcagaagctactgagggcaaaaaaaaaaaagttagctgctgtataagcaagcatgtttgcaataattttatttgaccaaggacttctgcttaaaatagatgaaaaaattctacaagtgaatgaggaaaacataattcagttttaataaatgacttgaagtctttagcatttcacaagaaaaacatggaaaggacaaagaaaggtgctttaacatcttcactaataagagaatgtaaaacagtagatgctgacragaccagatatcaagtgttagtgaggatgaaaaataactagaactttcacacaataatactgggagtc

SEQ ID NO: 915296 - DNA, 655 bp, Homo sapiens
aattacatttgcaaaatccctttggcatataacacatcatcagtgaagtgatatctaatcatattcacagtttccacccacacatatgggtaagagattacacaaaggagagggtcattaaagtcattttgaaattctggctgccacaaccctcctaactgagctttccacttccttcaacctctaatctgctgccaaatagtttttttttcctaaatgcaattatgaagaagttattcaataccaccatcactatcatctgtaccattaatgtttaaagtattttgttggttttcacttgttcattcttatgatagcacatttgggtattgtttcttcaaatattttctgcctctcaaatcttcatacacagtgctctaactccatttacctagttttagtaccttttgaagacctatttcccctccagactcccttatccttagagtttgtatttctccaaacctactgcctgtctctcaacttccgcttgtttctttaggttcattaagattcagcttggaaatcatatctttcaaggacattttctagtacctttccccatccttagccccttcattttagagagatgcctygtctctgcaatctcagataacttgcatgattctcctaacttcactctgtattttaattg

SEQ ID NO: 915297 - DNA, 607 bp, Homo sapiens
gctactcccagaccctaacttataaattattaattccttcaccttcrgctttcctgcttttctaaatagtcttcacatgaaatctgtagttagattttacttagtgctatagaaaaagatatttaccaagcaaatgctaacatgagaagattttgagtgctaaaattaggagtgcactcattgtattaatctgttttcacactgctatgagaactacctgagactgagaatgggtattttataaagaaaagagttttaattaaatcacagttccacaaggctggggagggctcaggaaacttacaatcatagaggaaggcaaaggggaagcaaggcatgtcttatatggagacaggagagagagcgagggaggaagtgccagacttctaaaccatcagatcgcatgagaaaggactcagtatcaggagaacagcaagggggaagtccacccccattattcagtcacttcccaccatgtccctcccctgacatgtggagattacaattcaagatgagatttgggtggggacacagagtcaaaccatatcattccagccctgacccctcacaaatctcatattcttctcacattttaaaataaatcatg

SEQ ID NO: 915298 - DNA, 607 bp, Homo sapiens
gctactcccagaccctaacttataaattattaattccttcaccttcggctttcctgctttyctaaatagtcttcacatgaaatctgtagttagattttacttagtgctatagaaaaagatatttaccaagcaaatgctaacatgagaagattttgagtgctaaaattaggagtgcactcattgtattaatctgttttcacactgctatgagaactacctgagactgagaatgggtattttataaagaaaagagttttaattaaatcacagttccacaaggctggggagggctcaggaaacttacaatcatagaggaaggcaaaggggaagcaaggcatgtcttatatggagacaggagagagagcgagggaggaagtgccagacttctaaaccatcagatcgcatgagaaaggactcagtatcaggagaacagcaagggggaagtccacccccattattcagtcacttcccaccatgtccctcccctgacatgtggagattacaattcaagatgagatttgggtggggacacagagtcaaaccatatcattccagccctgacccctcacaaatctcatattcttctcacattttaaaataaatcatg

SEQ ID NO: 915299 - DNA, 624 bp, Homo sapiens; identical to SEQ ID NO: 913208

SEQ ID NO: 915300 - DNA, 624 bp, Homo sapiens; identical to SEQ ID NO: 913209

SEQ ID NO: 915301 - DNA, 640 bp, Homo sapiens; identical to SEQ ID NO: 913210

SEQ ID NO: 915302 - DNA, 640 bp, Homo sapiens; identical to SEQ ID NO: 913211

SEQ ID NO: 915303 - DNA, 635 bp, Homo sapiens
ttcagacttcctgaattcagttcagactgccttttgttttctttcctgttgcaatagtcttttgcaacaagaaagataaatcttccttatctttctaactatgtaccttttaatttccctcgacactacytggggactttcctaattctttgcccttcagacttcctgattatatactctgctcctgcctctgcagaaatagtcttttcttattttttttacctttccagaaacagaacttaagttctcccaccttgtttgcctcctctttctgtggcccttgtctttgtaagactctgaccaatggcttcattaactttaacttcatatattttctattttggactaagtgtccttcctggcctgctgcttccacaggtgatggattaggtgcgtgggttcagcttccttattgtaagatcttttctttcctttcccacatttgtagacacacttgttgcaaatattcttctacttagcacatttatcttacctgttttgtcctattttctttagattcctgagcctttacttaatattttcctgaattaaaaatggaaatgtgcgtatcaactatcagagatgctggaacataaaaagtaataaagtgaagctatttgtgggctattacttca

SEQ ID NO: 915304 - DNA, 593 bp, Homo sapiens
tcagtactcatttatcttttcaaaatacaaacatattgcctaattgtyctccagtttgtttatcctggtttacatatatatcatttgtatttgagaagcataactttctaaaaatttaccaatatttcatattaagaatgtttaatttttcataataagtaaatctgtagaaatagatcacatttccaaaaacattgcataaaatgtatggtggtaactattgaaaataacaatgtcataggtattctcaggacttctttagaaccaatataaacaccgattaaaagaaaagagcagggaagagaaatagctcactaatatccccgtaaaatcttttgttatacttaactaaaaaaataaattatattacattgtgttttctgctgttttgaaaatactgaaatgttgatccttctcaccaagtagaacatttatagaagagcaattatttttgtaggggtggtgagatagaaagtctgtaaattataacctaagtatcaaaataatccagctgtacagagtgatgttatttcaatctggggcaatacatattgtctagaccactctcaagatattaagaaactcaatgacat

SEQ ID NO: 915305 - DNA, 614 bp, Homo sapiens
ccagttgtaacaactgaaaataaatttagcatctgactgaatttcccttcatttaaaattagattatggaataacaatttttgaggcaacttactttatattgtctgagatgcttctgttgcattagcagaaagtctgggaaaaagtaaggtagataggagtgggataataaaggagatactgtgttcctgttggaccagagaccatacagaaaacaaaatagttgaaataaatatcccagaattcttcttaagaatatatttgctaatcttttcaaatcattatgagtttgtctttgtttgttatggatgaaaaaggacattttatggaattaagttttgatattattttttcctcttatatcagttagaagcgtatgcactactttctgcaggaagaatactctggaagagaagatcattaataagtaaatttttgcaggtggtattgattggaacaatattttatacaaaacataaaattgtcattgcatagtaagtcagaatatgctgcttttctttaaaatatgaaatatgtttcaaaatgaagacaaggatgaggtagcatygtattgaaatggcattatctgcagattttcctataaagctatagat

SEQ ID NO: 915306 - DNA, 614 bp, Homo sapiens
ccagttgtaacaactgaaaataaatttagcatctgactgaatttcccttcatttaaaattagattatggaataacaatttttgaggcaacttactttatattgtctgagatgcttctgttgcattagcagaaagtctgggaaaaagtaaggtagataggagtgggataataaaggagatactgtgttcctgttggaccagagaccatacagaaaacaaaatagttgaaataaatatcccagaattcttcttaagaatatatttgctaatcttttcaaatcattatgagtttgtctttgtttgttatggatgaaaaaggacattttatggaattaagttttgatattattttttcctcttatatcagttagaagcgtatgcactactttctgcaggaagaatactctggaagagaagatcattaataagtaaatttttgcaggtggtattgattggaacaatattttatacaaaacataaaattgtcattgcatagtaagtcagaatatgctgcttttctttaaaatatgaaatatgtttcaaaatgaagacaaggatgaggtagcattrtattgaaatggcattatctgcagattttcctataaagctatagat

SEQ ID NO: 915307 - DNA, 596 bp, Homo sapiens
atcacatcaaatagagtgtttgtcagctggaaaaaaaatagttccttcttaagcttctaaaaaaagatgccaccttaaaaagtattcaaataagagcratatgtgggaaacctcattctttggcaacttatcacaacaactgattatgtatttaagcatgcataaatatactttctatacacatttaacctaaactgataacttttaacccataaaccaattaaattaaatcattccaaagtgatcttacattgctagtgttataataagcaggtttttcctagcataactatttttcaaaattttgattgtgtagagactcaaagtaaataacaagataatctatgataaaacatatctaaaacataaagtccaaagtttaattgctctgtgtttgttgattttcatgtatacattgcactccttgttgttgacgatggtgtggcattattcagaaacaaatagtttcacttaacggattcactgataaataccagtgatttcattagagatttatgctattgaaattactcagatatttatcagtgaatacactagtaattggataattattggatcataatttgtgctaaaat

SEQ ID NO: 915308 - DNA, 622 bp, Homo sapiens
gcatgtttggttgggtgcagatagtttttgaaactaggtggtgacccaacttacaaatatgtcaccagtggtgacctaggaaaacagactgatataagggaaagctcttctcagtgagrtgatttagacatttgaaagggcaagggcaatgaatggggtatgcatgttaggataatgaaattaacttctaaagcctaaggtgtattgagataccacaaagaaatgataaaaaaaaaaaaaactggtgccattgcacaaataatatttaacagtgaaagttggcctcttatacagcttataaggagtgtaagaaaggatacagctgagatgcaagtacaagtcttagtagagtcacagagctccaaatatgttgaaatgattagctaaattagatctgtcatgctgtaaacaggtcctaattgagaaaatctgaaactctaaaatatggcatgctatatctatgccagcttgcaacagtgactcacccttttaaaaaaaattgttggctgggcgtggtggctcatgtctgaaatcccagcactttgggaggctaaggcgggtggatcacttgaggtcaggagttcgagaccagcctggccaacatggtgaaaccttgtctcta

SEQ ID NO: 915309 - DNA, 645 bp, Homo sapiens
ctatttatcagcccttcataggactccaagccatcaaagaagaygatacgatgctcacagagccatgaatttataagttagcaatatgtgtctagattatttgcaaagcatttctaattagactattcattccttttatttttttaagtaatgtttgaattcctcgtcagcccagatttcaccattatgcagtatatgcatgtaacaaaacggcacttgtactccttaaatgtatacaaataaaaataataacaatttatctttaaattctaccataaaactacataaattgaagaaatatatttaacattaatacttgttaacaaaatatcattacataatttgctgtgcatagtaaggaaaacattcttatataaattatctcatctcaaagaaatggcctccaaacaaaaacaaacaaacagaaaaagaattctggcaatttctcaaacacctttcatactgccagaatagtctgctgtgaacaatttgtcccagcagcactccatcagaaagcactgtattgcatcagtaacacttctttctgtagtttatcaggaaagaccatgaaagagagtacttttaattattttttcgattcaaccgacctgctttctaagaccatgtccataaatcattgtattt

SEQ ID NO: 915310 - DNA, 600 bp, Homo sapiens
ggtttccagttgcatccatgtccctgcaaaggacatgaactcatccttttttatggctgcacagtattccatggtgtatatgkgccacgttttcttaatccactttcttactagtcaccgctttcacgatagtgttatctgtgagctacaatttctatgggggactgttttttaagactactgttcattttaggaataagattttagttaaaactagaaaactccactttcataggcaaactgtagtccctagacttacattgaaaacaaatgaaaaatgcaagcaactctgtggaaccttatgattttgagaaaatcttgagtgttccccaggacatgttcaatatcctaatcaatatctccctactgcacaggggaccagatcagttcttatattttatattcattagcattattcattccttaagtttaaaataaattaactattttaaaaataagtaattacaaatgtcacagttttctaccacaatggatagtcttgcatatacctgagtatgtcatcctcatattaagaaaccagcaattttaactctctcgaaagaactcttagacatcttatcctagtataaatttgggtca

SEQ ID NO: 915311 - DNA, 585 bp, Homo sapiens
ctgtggataaatataaaaacaaaaatgaaaatacaatraactaaggtactgaaaaatgacaaagaaattacaagtagattctggagggaaatagtttggaagaaggtagtagcatgtggtatgcttttttcatttttacagcttttatcctgaggatagaccaaataagttatgcagaattagtaaacctatgatacaaaacccacagtctttccagcgtaaagaaccaaatgacagagttcaggctaaccacagccactgaaacatgaggaaggaatcctggaaaagacatggagctgacttctgtttctaaactctttccaagtctctggcttacccctgcatgtgtggggcagactggaagtagtttgtatctaaggcttaaagaacacacaccaactgccagtgtgaatgtttgcagtgggtgagtctgaccaagtgtgatggttagtgttatgtatcaacttggctaacccatagtatgcagttgtttgaacaaatactaatgtacagataatgtgaaggtattttgtagatatggttaacatgtaaaataggttcacttcaagtaaaggacattacctt

SEQ ID NO: 915312 - DNA, 652 bp, Homo sapiens
cagataatttttgtatttttaatagagatgaggtgtcaccatgttggttggctcgaatcctgacctcaggtgatccgcctgccycagcctcccaaaattctgggattacaggggtgcgctgctgcgccaagctcaggtgtatccaatttgcttttgactcccagatcttccagttcctaactgtagttttctcacctgtgaaataggcactaaaatgcctacctcacaggctcctctacttgagcctggcatagacgcagtaaatttgttgaagcacttagataacacctcacccttgctgctgtcacaggtatttccatgggggtgccccactgacgatcatcatggcaaatcacactcactacccttttttgattaccctcatgtccttcattattcatggttgttttagcaggaaaaccacattgatattgcccactccttctcattgctagcatacagtggcatgtaggtttcctgtctctgtgcttctattgccttcccaggtcttttcagtctcctctcctggggaaactctcactcctgaatgcagacacaggccctcactggggaagttccagatgtctctttatggttccttactagtcccctcctattcaattccctcagaaagcctctcctaaagagtcat

SEQ ID NO: 915313 - DNA, 652 bp, Homo sapiens
cagataatttttgtatttttaatagagatgaggtgtcaccatgttggttggctcgaatcctgacctcaggtgatccgcctgccccagcctcccaaaattctgggattacaggsgtgcgctgctgcgccaagctcaggtgtatccaatttgcttttgactcccagatcttccagttcctaactgtagttttctcacctgtgaaataggcactaaaatgcctacctcacaggctcctctacttgagcctggcatagacgcagtaaatttgttgaagcacttagataacacctcacccttgctgctgtcacaggtatttccatgggggtgccccactgacgatcatcatggcaaatcacactcactacccttttttgattaccctcatgtccttcattattcatggttgttttagcaggaaaaccacattgatattgcccactccttctcattgctagcatacagtggcatgtaggtttcctgtctctgtgcttctattgccttcccaggtcttttcagtctcctctcctggggaaactctcactcctgaatgcagacacaggccctcactggggaagttccagatgtctctttatggttccttactagtcccctcctattcaattccctcagaaagcctctcctaaagagtcat

SEQ ID NO: 915314 - DNA, 637 bp, Homo sapiens
tgaatccctgaatagattgataacaagttctgaaattgaggcagtaattaatagcctatcaaccaaaaaaagcccaggaccagatggattcacagttgaattctaacagaggtacaaagaggagctggtaccrttccttctgaaactattctaaacaatagaaaaaaagtgattcctccctaactcattttatgaggccagcatcatcctgattccaaaacctggcagagacacaacaaaaaaagaacatttcaggccaatatccctgatgaactttgatgcgaaaatcctcaataaaatactggcaaatcaaatccagcagcacatcaaaaagcttattcaccatgatcaagttggcttcatccctgggatacaaggctggttcaaatacacaaatcaataaatgtaatccatcacataaacagaaccaatgacaaacaccacatgattatctcaatagatgcagaaaaggccttcgataaaattcaacaccccttcatgctaaaaactctcaataaactaggtattgatggaacatatctcaaaataataagagctatttatgacaaacccacagccaatatcatactgaatgggcaaaagctggaagcattccctttgaaaactggcacaaggc

SEQ ID NO: 915315 - DNA, 628 bp, Homo sapiens
  misc_feature 160, 212, 287, 354, 365, 375, 376, 385: n = A,T,C or G
ctttgatctctgacctccccagaatgcttttagtttagtatgaaatgcaatatttggatcttctaggaattttccaagatcaccccttaaatagtttatggcacttaaaaaatgagacaatacaccagacattaagtacagcaaagccttcctataagtntcagtgtgcagctggctatcagacagcaccatgataaacatccgcctctttncacagcccctccaactcagaaatacaataaaacatggtcaacccttgaggccaagggctttgctaagtccaaaancttagcaaaaccaaaacataactgatttacccacaaattagataacaataagtgattcaggtttgcnagccataaganttgagtcagnnctttaaaantcaattatttagcagtatggagtggttatttacttagtgatatattttttatagttctctgcctcatatcatttcagtctatttagaaacctgctattttagcacaaaacagtatcaaggagaggagtgaatgtggtttgcagcagraaaaataacaatagattgttttctgtagtttaatgtcatacgacaagaggcagaatgtgggcaagctcaggttttgagagtcattctgagtgtgtc

SEQ ID NO: 915316 - DNA, 449 bp, Homo sapiens
cagctcttcattttttaggtctcagcctaaatgttgcctcctcaaagaaccattctcccactaccctgtatttcctgactcagctgcctttctttgttttgacacagggtctcattctgtcacttaggctggagtgcagtggtgtgatcatggctcactgcagcctcgactttccaggctcaagtgatcctcccacctcagcctcccaagtagctgggaccactggtgtgtgccaccacgcctggctatttaaaaaaaaaaatttttttttctggacacaggtttccccatgttgcccaggctggtcttgaactcctaggctcaaggaatcctcctgcctcagcctccctaagtgctgggattacaggcatgraccaccgtgcgtggccttagctgcctatttgattccttcgtgacatctaacagaacgtgttatttcgtctacttgt

SEQ ID NO: 915317 - DNA, 449 bp, Homo sapiens
cagctcttcattttttaggtctcagcctaaatgttgcctcctcaaagaaccattctcccactaccctgtatttcctgactcagctgcctttctttgttttgacacagggtctcattctgtcacttaggctggagtgcagtggtgtgatcatggctcactgcagcctcgactttccaggctcaagtgatcctcccacctcagcctcccaagtagctgggaccactggtgtgtgccaccacgcctggctatttaaaaaaaaaaatttttttttctggacacaggtttccccatgttgcccaggctggtcttgaactcctaggctcaaggaatcctcctgcctcagcctccctaagtgctgggattacaggcatggrccaccgtgcgtggccttagctgcctatttgattccttcgtgacatctaacagaacgtgttatttcgtctacttgt

SEQ ID NO: 915318 - DNA, 449 bp, Homo sapiens
cagctcttcattttttaggtctcagcctaaatgttgcctcctcaaagaaccattctcccactaccctgtatttcctgactcagctgcctttctttgttttgacacagggtctcattctgtcacttaggctggagtgcagtggtgtgatcatggctcactgcagcctcgactttccaggctcaagtgatcctcccacctcagcctcccaagtagctgggaccactggtgtgtgccaccacgcctggctatttaaaaaaaaaaatttttttttctggacacaggtttccccatgttgcccaggctggtcttgaactcctaggctcaaggaatcctcctgcctcagcctccctaagtgctgggattacaggcatggaccaccgtgcrtggccttagctgcctatttgattccttcgtgacatctaacagaacgtgttatttcgtctacttgt

SEQ ID NO: 915319 - DNA, 655 bp, Homo sapiens
aaaggggagttcccctgcacacactctcttgcctgccaccatgtaagacgtgactttscttctcattcaccttccgccatggttgtaaggcctccccagccatgtggaactgtgagtcaattaaacctctttcctttataaattacccagtctcaagtatatctttattagcagtatgagaacaggctaatacaggcgggataggcacacctgagaaggaggacagggtcagataaggtggtaagctttgaacagaagaaagcgtatcataggggatgttgagcttgttgggatgaggagcatccaatgggctagagcaggtggtttagggctgaggctgtaaaccacaggggattacctatgtttatctggggcaagttgcaggataaccacaggacaagactagtagttggccagaaataccaatttttattattctagaatagattaaaatataaaataaaattagattttctctaatatatttagaattgaacctttttgggtacaatattcttttttagtatttcttggtgatttttttttttacaacaaaaaatagagcaatacctttcttggttagtaaaataaatccctaaatatttgccacaatctctagaatcttctaaatcaggaaattttaatgattttcaca

SEQ ID NO: 915320 - DNA, 655 bp, Homo sapiens
aaaggggagttcccctgcacacactctcttgcctgccaccatgtaagacgtgactttccttctcattcaccttccgccatggttgtraggcctccccagccatgtggaactgtgagtcaattaaacctctttcctttataaattacccagtctcaagtatatctttattagcagtatgagaacaggctaatacaggcgggataggcacacctgagaaggaggacagggtcagataaggtggtaagctttgaacagaagaaagcgtatcataggggatgttgagcttgttgggatgaggagcatccaatgggctagagcaggtggtttagggctgaggctgtaaaccacaggggattacctatgtttatctggggcaagttgcaggataaccacaggacaagactagtagttggccagaaataccaatttttattattctagaatagattaaaatataaaataaaattagattttctctaatatatttagaattgaacctttttgggtacaatattcttttttagtatttcttggtgatttttttttttacaacaaaaaatagagcaatacctttcttggttagtaaaataaatccctaaatatttgccacaatctctagaatcttctaaatcaggaaattttaatgattttcaca

SEQ ID NO: 915321 - DNA, 655 bp, Homo sapiens
aaaggggagttcccctgcacacactctcttgcctgccaccatgtaagacgtgactttccttctcattcaccttccgccatggttgtaaggcctccccagccatgtggaactgtgagtcaattaaacctctttcctttataaattacccagtctcaagtatatctttattagcagtatgagaacaggctaatacaggcgggataggcacacctgagaaggaggacagggtcagataaggtggtaagctttgaacagaagaaagcgtatcataggggatgttgagcttgttgggatgaggagcatccaatgggctagagcaggtggtttagggctgaggctgtaaaccacaggggattacctatgtttatctggggcaagttgcaggataaccacaggacaagactagtagttggccagaaataccaatttttattattctagaatagattaaaatataaaataaaattagattttctctaatatatttagaattgaacctttttgggtacaatattcttttttagtatttcttggtgatttttttttttacaacaamaaatagagcaatacctttcttggttagtaaaataaatccctaaatatttgccacaatctctagaatcttctaaatcaggaaattttaatgattttcaca

SEQ ID NO: 915322 - DNA, 659 bp, Homo sapiens
agtagaccttaggctcagaggcttccaaaggcaacagagttcagcaattgctctgtttacagtgtgtacagattacactaccgtctctcttggcagagtgcgcctgatacccatctatgwcagtgatataaatgttctttaaagcaatctttaaactaaagagtaaggcaacaaaaatatgaacaaatatcccaggtgatgtaatttgcagatgtggcagaaattgaaaagatggtatgtgagtgaaacttagaaagtcccggttaaagagtgtaaacgcatcacttcctaaggagagcctcggtggcggaacaggagcagcaggtctctggccagagtatgtgtcaggcttggttttactgttaaagctgtgactttggcctgacagtcagaaagctatacataaaactaaagcttatcatgcaaatgagcttccagaggtcataaactgcagaagatggaagagaacagtttaagtttggaatgcctgctgatgccaaataccacttcctttttcactagtatgaattcagcgtgatctttgatacaagccacctgtctggggaagaggaagttctcagcttcattgttactgctcagaggtaaggggggggtttaaacacttttttcaaagatgagagatttatgggaccaggaaa

SEQ ID NO: 915323 - DNA, 621 bp, Homo sapiens
acttgtagatttagggggacataacattgagactgagcagtttcttgaacctctcctctcagcagccaccagcctggcttttgcagaccactggaaagtatcccagctcattagcttttggaatgacgggaagccttttgatgtttgacgtctttatctcaactcttcaacttagctcattctggagcagtcacacgatgacagatgagacggtttgggcgtaagccggccaaacaaacggcagggcaagacctggcaggatgctggggtgggggcgggagtgggccaggatggtgttaacccatccacaggggagttgcctttggctgcccacagcagtgatcccaaggcttttgtcaccccttgggaaaggaaggacaaggaagtcaggctgtgtgggcacctgatcctgctgcttttgcaaactgtggatgcccctgagggactgatgtcaccccatgtaggaagacagatgaggagccagggcagagactgtggscctatggggtcagcgtcacacagcaccattgtttcagaacaataggagggagaaggagaggggatgtgagagctatttaagtgctgttgccattcagcacttgctggttgagagaggaaggc

SEQ ID NO: 915324 - DNA, 634 bp, Homo sapiens
aaatatcctggagtttttttccaggcctgggcaactcgtgggtcaatgcacagctatttctgtatgtaagtaggctgggagaatactctgtcagttcacaaaggccaggggcckgactgcctgagctaggcttccttccccccctccctccttgtgccacagctgggcactgcagaagtgcagaacatgttctccagacctacttgtgtttgcatacctatacctgctgcaaggtgttttattctgagttgtggtttctttagattgtgagaaccttggctcccatgtccaaggtgtaacacacaggtctgaacaacataggctttgggaactgtaccatggagaagtagctttggaatacaccatttataaaagagaaataaacaaattccagctgatttgaaagcctgatatttttccaggttttagtcatgcttataggagaagatactctcaaatccaatgaagaggagagaagagtatggactggcacccagggattgagttctcagctcagctctgcaaatcgcccattgatttttctgggccaggcctttcccctgcagaggcgcagtacctttcaagtcaggagggttgggttagttagttcttgtgccggatgttttctgtttgc

SEQ ID NO: 915325 - DNA, 672 bp, Homo sapiens
gctgcattttgggatcttgtgagcagaggattttccttctcaagaagctgctctgagatgggacccctctccttggaatatttagaacagtttccagcatagaatttacagctttcccttctcagaaaaacagtattggaattttgcctcaagttgattattaacacaacatgacagaaagacaggttctctgaatatattttcacctccaactttttttaaaaagtgaagtgtaaggtagaaaccagaataggaaataggtgaggcaggtgttgagggccatttccagaaaggattacttaatagtagtaggagttttctaatccaaaaccaggtcctggagaagttgagctcgaattggtggaaggctgcagtttcaagagctggagaactggttagcgggaagaagcctacagcggaggaaggatcagcagagatggaatgggaaaaggggccagggtttcccttcctcaggatagtggagtctccatcagcatctgttcctggggcctctcctggattccaggagttgcgttcgctgggccctgggggaaacagagaagaaagttgagtttgcctgagtaagccaagtgaaaagcccacaggatagctggagaagggaamtggctagaaggtcaggagcccagagagctaattttaaaggatagggaa

SEQ ID NO: 915326 - DNA, 612 bp, Homo sapiens
tctatgcccattggggtttatgttcacaacacccactgtgaaatatgtactgctatcccatggatgattctcagacccacagtaagtagaaccaaagctaggactggagcccaggtctactgggccaagatgaggcctcctattttctgtttttacaaatggcacctcttgcaggggtgggggcaaaagggattgggtgtaggaaaagttagtgtgtatgtggggggtgttcagtgaggggagggccctgggaggtaatgtcctttggggcacatcgggggacctgctagagaagccagtccaggcatagcagaataaagagtggaagaagtaaggtgaaggaaggaggatggatgctgtcgcatcagtctgagggcttcagaggcactagaaagagctggctggctcgctcttgaatctagttctggccctattttccatgactaggaactaccttatgatgcccccatcatctcccaaagaactayagatggcaactcatagggcatagaaatttggggagggggcctcctgcaggaacatagtactcactgggtaccaggcactgttctaactgctgtgtagatattatctcattcaatcttcgtagca

SEQ ID NO: 915327 - DNA, 663 bp, Homo sapiens
aatactagcaaaccaaatccaacagcacatcaaaaagataacacacctgggctgggtgtggtggctcacacctgtaatcccagcactttgggaggccaaggcaggcagatcacctgaggtcaggagttcaagaccagcctggtcaacatggtgaaaacccatctctactaaaaatacaaaaattagccaggtgtgatggtgggcgcctgtaatcccagctacttgggaggctgaggcagaagaattgcatgaaatcaggagatggaggttgcagtgagctgagatcacaccactgcactccagcctgggcgacagagtgagactccttctaaaaataataataataataataataataataataataataataataataacaaaaaccaaaaaaaaccccaccataatcaagtgggatttataaaaggggtgcaaggatggttcaatatatgtaaatcagtaaacatgatacaccatatcaacagaatgaaggacaaaaactgtatgatgaattcaatagaagtagaaaaagcatttgataaaattcarcatcccttcatgatagtctcaagaaattaggcaatggagggaacatacctcaaattaacaaagggcatatacaacaaatccacagctaacatcatactgcatggagaaaagtgg

SEQ ID NO: 915328 - DNA, 618 bp, Homo sapiens
ccattgtttctaaatattacaaaattatcaagaagaaaccataaaaaaagagcttcaaataaatttaaggaaaatcttatagaattttacatgtataagaattaaagtttgcacatattaccttcactgagtttgaaactatccaaccagaatgctatctaaataacacagaagacacaatctttatattctagagtaaaatgtaaagtaaaatgtaaagaaaactttacatttcttttttttttttcagagaaagatatgccacttttataatagacaaagttaacctgccttaattattaggaactcttataaatcaacaagaaaaggaaagctattcattagaaacatgaacaggtggcctaaacagcaaatttacaacgaaaaagaaatacaatggcttctgaacatactaaaagatatttagcttgtaattgtaaatgtttgtctagcatggagctaacctgcacaacatgcacatgtaccctaaaacttaaagtataataataawaaaaaaaaaaaaaaaaaaaagaacacaggcgctgtccaactgcagcctggtagtaaagttgccctattccacttcgtttctcttcctacatttctaaagagaagaga

SEQ ID NO: 915329 - DNA, 636 bp, Homo sapiens
ttttgagaatcttcacagaagactttttaaaatccacatcattctctggccctgctcctaactagacccttagtatcattgcatattgagagctttacaaaggagaatgtgttttccacaagtaaacagtgaagaaaacacaaaatagaaaacgtgagaacaaatgggttaaagtgctttttattggctaatgacaatttcatttggttataacttcactctaattgtttgcatgtatattctttaaaccactgtttcctaaaactgtctgatgagaaagttacctagaatattcattaaaaacacacaatcctaacatgaaaaattataataccaacaatctgtacttctaatcaattccactgaaattcaaaataatttggcaattttagcaaacaatcttggtcttatcttagttttaataaaacagaatgtccagagcaaaggcaatgtgattggtattaaagtaatcaatttgtattaaaaaagaaagaatacaccattwtaacgaacgaatatatttattcagatcattgctttttaaactattttctaagtatatattgatgaattattgttaaattgatattctttaatagaaaccacaattactgacattaaatataaaacaaatat

SEQ ID NO: 915330 - DNA, 618 bp, Homo sapiens
ttatgttgtaggatcacgtcagttccatatataatttgtttatcacaactgcacactgttactgaatctgaaatgcttcaaaatctgaaagttttgagcacttacatgatgctcaaaggaaatgttcattggagcatttcagatttcagattttcaaattaaggatactcaactggtaagtataatgcaaatattccaaaatctgaaaaatatccaaaatccaaaatacttctggtcccacgcattttcgataagggatactcaacaagtattttaaaagatcaaaataagggtaagagaatatggatatttaggcttatggttacttacatggaacagttgaggccattaaaaaatgtctaagacataggcagtggaaggctgaattcaagaaaaagtctcagagctgaggaaacaaagaacctatgaggttaaggtgttaaatgagccaaccacatgagtgtgaaagggaggccaaatgagaaaatgatgytgcttgggtgtagaggaagttctggaataaatgtggcagttgttagaagacattatagttagaagacattatagttagatggatagacagtaaagaaggggcttttgtattaaaatagaggaata

SEQ ID NO: 915331 - DNA, 479 bp, Homo sapiens
tttttaacaaggttcttctcagcaattctagtatccagatataggcccatcatagacatcacacaagcgtgtacttcataatcctggtgaatacagaagtttcctggactccttgatgagctactgctttcgctcctatatcagtgttttcagctgatgtcatttgtgattgtgtttctgactttctgtaggcagaaaaaaactttcattttttttgcttacatgcacataaatgtaagcgctaattcttatattaaactgtttatttctataatacttaattggctgttttcctggctgaaccaaaccaagagcataagggatgataaccttcaaaactgattaaattagagatcaataaatggagctgttttaattctattattcttctttcatagatkaaatagaaaatttttgtagatagtttttcttcgctgtctctttggttaccatgaggtactgcttgtagtgaaaaggta

SEQ ID NO: 915332 - DNA, 589 bp, Homo sapiens
cctcagttcctttgcctaccttatttctaaaatagggaaggtatttgtctttttaatatttaataaatgacatttattatcattctgcctactgaatttcacttgtctgtctggtaataacctactcccrtaagaatcaatgagttcttggtacatattggtctaaatttgcctcctctttgaacctttttccagttttccaggcaaggttgatttatctatctatttattctatgtttccataacaatctttccaagcataatacagtaaaaaaagagctgattcatcatgtcctgtccgtttccctctggagactttggagccaatgtgagggtacaggtatgctcctgtataagctctttggtcgcctttgtcagtttaggacagttctcagtatgtaattgttctcaggtgccattaaactagacctgaataattgaaggattgaaagtgttcagaaatcacccaggatgcttcaataattcatcctaattagggatatggggatagtttgcatgagaaagaagtttttctttttgaggaaaagttaaaattcagcaggcagaatgaaaataaatgtcaataatt

SEQ ID NO: 915333 - DNA, 552 bp, Homo sapiens
gatagtttgcaaatacgtttccccattttttggattttctctttgttgactgtctcttttgctatgcagaagctttttaacttagtgcaatcccaattgtccacttttgctttggttgyctgtgcttgtggggtattgcttaagaaatctttccatagtctaatagcctggagaatttccccaatgtcttcttgtagtagtttaacctaccaagattaaaccatgaagaaattcaaaacctgaaccgaccaataacaaataatgaaatcaaagccttaataaaaactaccaacaaagaaaatcctggaagcaatagcttcactgctgtattttaccaaacacatacagaataactaacaccaatcctactcaaactatcccaaagaatagaggagggaggaatatttcaatgcctgatacttaaaccaaagacaaattaaaagagaaaactacaggccaatatccctatgaaaaattgatgcaaaaatcctcaaggaaatttacaaacaaaacaaatccacaacatattgaaaattattcataatgactaag

SEQ ID NO: 915334 - DNA, 607 bp, Homo sapiens
ctaaaccaagttcaggtcccctctgacagtggggcttttgccactgcacaggtggcacctctatgaagccagccttgtgcaggggtttggtttaatgaacatttacttagcgcccactgctcagctcttctggctctgtaatatggtgtggctctgtgtctgcacccaaatgtcattttgaactgtaatccccacgtgttgggggaggggccttgtgagagggcattacatcatgggagtggttcccacatgctgttctcgtgatactgagtgagttcccacgagatctgatggttttataaggggactttcccctcttctgcacttctctctcctgctgccacgtgaaggatgtgtttgcttccccttccaccatgattgtaagtttcctgaggcctccccagccatgtggaactgtgaattaaacttctttcctggagtgtgaaaatgaactaataaactctgtgacctcagagactccctctcwgtgaccctgttctcaaatgtatgaagatgggtgctcaaagatctctctctaaacatggaacagggcctgtctgaagacataagtgattaacttctaatctataactaaggtctgagtcct

SEQ ID NO: 915335 - DNA, 658 bp, Homo sapiens
ctaaacatacatttcaccatgttggccaggatggtctcgatgtctttayctcgtgatccgcccatctcagccacccaaagtgctaggattacaggcgttagccaccgctcccagccttggcttcttaattttgttttataagctttcttcaaaggcctggtcatcatttgctgtgtgtttatatatttttattttttcagtgggcaaaatacatgtaacataaaatgtatcacattaactattttaagtgtacagttcagttgctttaactatattcataatgttttgtaatgattcccaccattcctctctagaactttttcatgtgaagctctgtacctgtaaaacagtaattcctaactcctgtcatcttccagtccctattaaccaccattctactttctgcctctatgactttgcctatcttaggtacctcatataagtggaatcatacagtatttgtctttttgtgtttggcttatttccattagcataatgtattcaaggtttcattgttcatccacattgtgaaatgtgtcagaatctccttcctttaaaaaggaataatattccaataatattccattgcgtgcatatatcacatttgtttatccattcatccaccagtgggcatgatgttgcttccaccttctggcta

SEQ ID NO: 915336 - DNA, 658 bp, Homo sapiens
ctaaacatacatttcaccatgttggccaggatggtctcgatgtctttacctcgtgatcygcccatctcagccacccaaagtgctaggattacaggcgttagccaccgctcccagccttggcttcttaattttgttttataagctttcttcaaaggcctggtcatcatttgctgtgtgtttatatatttttattttttcagtgggcaaaatacatgtaacataaaatgtatcacattaactattttaagtgtacagttcagttgctttaactatattcataatgttttgtaatgattcccaccattcctctctagaactttttcatgtgaagctctgtacctgtaaaacagtaattcctaactcctgtcatcttccagtccctattaaccaccattctactttctgcctctatgactttgcctatcttaggtacctcatataagtggaatcatacagtatttgtctttttgtgtttggcttatttccattagcataatgtattcaaggtttcattgttcatccacattgtgaaatgtgtcagaatctccttcctttaaaaaggaataatattccaataatattccattgcgtgcatatatcacatttgtttatccattcatccaccagtgggcatgatgttgcttccaccttctggcta

SEQ ID NO: 915337 - DNA, 626 bp, Homo sapiens
tgtggggtattgcttaagaaatctttccatagtctaatagcctggagaatttccccaatgtcttcttgtagtagtttaacctaccaagattaaaccatgaagaaattcaaaacctgaaccgaccaataacaaataatgaaatcaaagccttaataaaaactaccaacaaagaaaatcctggaagcaatagcttcactgctgtattttaccaaacacatacagaataactaacaccaatcctactcaaactatcccaaagaatagaggagggaggaatatttcaatgcctgatacttaaaccaaagacaaattaaaagagaaaactacaggccaatatccctatgaaaaattgatgcaaaaatcctcaaggaaatttacaaacaaaacaaatccacaacatattgaaaattattcataatgactaagtggaatttatgccaggaatggaaggatggttcaaaatatgcaaatcaatgtgatcatcatatcaacagaatgaaggacaaaatttatataataatgtcaattgatgcggtaaagcatttgataaaattcaacattttattgtraaaacccttcaaaaaacagggtatagaagaaacatacctcaacacagtaaaagccat

SEQ ID NO: 915338 - DNA, 562 bp, Homo sapiens
acaggcatgaaccacaacacctggccaggattgtttttttctgttctgtgaagaatgccaccagaactttgatgaggattgtgttaaatctatatatttgctttgggtagtgtgaacatttwaacaatattaattcttctgatccataaacataggatatcttttcatttgttcatatctaaatttctttcatcaatgttttatggttttcaagtgtacacatcttccgtcttattggttaaattcattcctaagtatatgtttttctttgatgttattgtaaatgagattgttttcttgatttctttgtcagctaggttatttgtatatagaaatgcaactgatttttatatgttgagtttatactttgcagcttaactgaattgatttagtagttctcagagttttttgtggaatgtttggagttttttacataaagggtcttgtcatctgcagatagagataattttacttctttaatttagttgcttttttttcctcatcagattgctcttgcaagtactatgttcaataaaagtgatgagactgggcatccctatct

SEQ ID NO: 915339 - DNA, 615 bp, Homo sapiens
ggtgtttggttttttgtccttgtgatagtttgctgagaatgacagtttccagcttcatccatgtccctacaaaggacatgaactcataaattttayggctgcatagtattccatggtgtatatgtgccacattttcttaatccggtctatcattgttggacatctggattggttccaactctttgctattgtgaatagtgccgcaataaacatatgtgtgtatgtgtcttcatagcagcatgatttataatcctttgggtatatacccagtaatgggatggctgggtcaaatggtatttctagttctagatccctgaggaatcgcaacactgacttccacaatggttgaactagtttacagtaccaccaacagtgtaaaagtgctactatttctccacatcctctccagcacctgttgtttcctgactttgtaatgatcgccattctaactggtgtgagatggtatctcattgtggttttgatttgcatttctctgatggccagtgatgatgaacattttttcatgtgtcttttggctgcataaatgtcttcttttgagaagtgtctgttcatatccttcgcccacttgttgatggggttgtttgtttttttctg

SEQ ID NO: 915340 - DNA, 600 bp, Homo sapiens
gctactttggggcttaacactttctccaattaagaagagatgttgagagcttctaggaacccatcatccaagactgcggcactaaaaaaacacacctgagattttrctctacgaagttattttctattaaattcactgcctttttcacatcagagtgaataatgacaaaacattgtagcttggtcgttttgcactcttcattctgattttgcagcaacttgcattcctttcaactgctcataagttaaatttctcaatgaagtaatcacaacagaactatctccttgaacagtttggagtttcctgaaaaaaaacagatatactaccatatgatccaaaaatcccactgcttggtatatacccaaaagaaaggaaatgagtatatcaaagagatttctgcactcctaggtttgctgcagcactgtttacaattactaatatttgaaagcaacctaagtgtccatcaacagatgaatgaagaaaatgtggtacatatacacagtggagtactattcagccataaaaatgaaagcctgtcatttgcaacaacatggatggaactgaagatgattatgtcaagaaaaataagccaggcacaga

SEQ ID NO: 915341 - DNA, 603 bp, Homo sapiens
ataatgaagcagtgtcatttagagcaacacagatgaacctggaacacattatgttaaatgtaatgagctaggcctagaagacaaacactgcatgataccactcgtgaaatcttaagatgtttatcttaatgaagtagaaagcacaatattggttaccagagtttgggagatagagggggaatggggaaggattgattatggaaacaaagttatcttaacattaaaggaataaatctgaagttctcctcctcagcctggtgactggagtaaacaatatcatatttttctagagcaagaagggagaattttgaatgttctccccacaaaaaaaaaaaaaaaaaaatgcctggacgagcaaatagagatcctaagtaccctgatttgatcattacccaacctatatgtatgaaaatgtacccctaattatggacctttatgttgtgaaaaaaagttaatagaaataaatagstattgctaaaaatcacagggaaccacaaaagcaatgaatatctaaaggaatcctcagaaatacaaagtgaagacccacaatcctcaatatcaaattacactgccaagttgtagttatacagctgatatatgata

SEQ ID NO: 915342 - DNA, 208 bp, Homo sapiens
ctgcccccacctcaactccatcctgcgtcagggcccgcgaggggccctgtggactggacccaggccgcccattcccagggagaggctattaattattgcctcaatttcagagcctgttatcggtctcttcagagattcarcttcttcctggtttagtcttgggagggtgtatgtgtcaaggaatttatccatttcttccagattttct

SEQ ID NO: 915343 - DNA, 605 bp, Homo sapiens
agaaaaacagaccctcctctacccaccatcctcatacacagccttccagcccaggatctgaaccatttattcattttctctcatattcattcattcattcaattcttcatcacacatttagtgaagctctgccgtggaatgttcacacagaaggtacaaaaatgaggcaggtgtattttctcccatctaacaggggatgaccacatgaaaagaactggtggcctgtgtgtcccatggtcttacagggcagtggtggagggtggcccggtcatccactttctggggaggcagaaccagaagcaccagttggacaactgctaaaaagatatttatgcagcctcatatgttaagtcgtatattttgaaagctttttaaattttttctttaagaagattttagatgcttatcactgagtaccagagggatgtaggctgatgcccttatcaacaaagtcagggactgtggcacacaaggattgactactrcagacacggtcacaatgctacctctagagggcctgaatccccctgccctctctggtggggagaagggctggcagagccattagcatgggctccggccaatcctggccactttgacactcc

SEQ ID NO: 915344 - DNA, 474 bp, Homo sapiens
tttgaaagctttttaaattttttctttaagaagattttagatgcttatcactgagtaccagagggatgtaggctgatgcccttatcaacaaagtcagggactgtggcacacaaggattgactactgcagacacggtcacaatgctacctctagagggcctgaatccccctgccctctctggtggggagaagggctggcagagccattagcatgggctccggccaatcctggccactttgacactcctggtgctgacccagggtcctggaggaagggatgaggtgggcagtagagatgctcagggcagtggcccctttccatccacactggaactatttcartattttaccaccaattcagccattcccttgtgcgctggctgaacatcagccctgctccaggtctcagtttcccctttgtaaagggaaagctctggattcaggagtgatgagaggtcatcatggtcttgagatt

SEQ ID NO: 915345 - DNA, 572 bp, Homo sapiens
agaaggaatggactccaggaacagggatgagaaaaacaagttcttatcagcttccccctttgagattctttcccaggccaatatttctttgctctgctctcataactatttttgtaactatttctgtaagtttrtaaggattttttaagttcctgttttccatcggtgtgaccctgagaaggtcacaagacatgcctgtgcaagcctaaaacagttgccatctgctgagagcctgctgggtggcccagcagaggtcaccagacatgtttgagtcatacacttgtcactgtttgattaactgcctttgttctgcttctgtaagcttgctaagcctgccctgtaagtttttcaaagctgcatgcttaaaaaacaggccccatcttttttccgggctcagccttttggatgcaaatccactgggcaagtggtcattttaataaaatcctcctgtctcacccattggtctctccagtctcttgactccctcaacactgagacggctccaaggtagcatgtgagatttaagtaataacttttttgtttgtttgtttgtttttatttttgtatgagac

SEQ ID NO: 915346 - DNA, 652 bp, Homo sapiens
aggctagcttcctagaagtagaggtattaggtccaaggttgtgaattgttttaaagctattgatttttctggataaaattgcttccagatatattgtcccrttgcattgcaatcagtggatctcaccttcagtattttgtgcaaaaaaaaaagaatgtttctccttttaaagattatatttaaaatagctttcaaatattaaaaatttgtatctacaaataagagacagtgaaaaaattaataaaagaaacacaaaagtagaaagtagatgaaaacattaaaattcagatcacagccctctgtcatggagaagacagctgcaatagcttttttgttcttttatctatccttgatacatttttcttttaattaatttttaccccaacttttagtgctggctgagttgtcgatttgttgctgggatggaaagaagaaatttgcaccttgtcctttgcaggttatgagagccctgtctgtcctcgtggttatgtggatgtcttttagattattgtgaatattgagctttgaaaataacctaacagtcaatcaattgctgagattctattaccagtagtgggacacaatgtacatcatgtagagaggcagactcgtcgctgacaaaagggctgacccctggaaaaccagcacagag

SEQ ID NO: 915347 - DNA, 677 bp, Homo sapiens
gatagcaattgaggacagggcatttcatcagcataacactcctctcaatacatgccaaaatgggaaaaaggaaaaattgcaaggacgaagatgggacacagcaaaatgacaagatgactaacaagatgacccctgtggaaagcatttactgattcaaaaaccaaataatgaagaaaataagagcaaatttgctgagtttatatgctctttatgcttattagggaagggcagaagccagcccctcaacattgttattattaattaacatcatcaccacctgctcttaagtgtctagatactttctagaatctagtattatcttcactcaaatgttttttggatatgcccttcgtgcatgtgatactgcaaaaacattctacattagccacagcaagatggctatgtaataattgggatcactttaggggaggctatttgtaccacattttgagacagaaaatgaagtaaagatgtccatttgtcaatttcttctacgttatgtcaaacattcaaagagcttattttatttatttcaaagatgtatacatgttgaaattaaaatttaaattaagaaaatktataaactgagtcaaaagaaaagtaagtgaggcagttggttaatgtgtcggttaatgccaccatagttctgcatgccctggaagtgtcaggcataaaca

SEQ ID NO: 915348 - DNA, 786 bp, Homo sapiens
tgtcattccaggacgttgagaggctaaggcaggtgggttgcttgagctcagaactttcagaccaagcaagggcacatggtggaaccccgtctctatgaaaaatatgaaaattagccaagcatggtggtgcccgcttttagtaccagctactggaaaggctgagacgatcatttgaccccaggaggttgaggctgcagtaagctctggttgcaccactgcactccagcctgggtgaaagagggaaaccctctgcccaggactcttgggatatgactatatccatagggactgcccgcagtaacctcacatttgagtggaagtggagatcgtatgtacctacaccaatatgtagcaaaaaaagaaaaacagaaatgatagcagaaatggcccaaagaataaaagaaggtgggggtaattgagagaggctttctgctgataaaatttgaactgatttctggagaatgggtttaattccaatagggggagatggaccaaatttaattttgatgagggaaatgtcttgagcaaaatctagaaaaggaaaatatgcccattttaagttttaatgagtggtccagttggggcacagtgcaagaagagagttctagtgaaaaggtagttggtctgataggtcagggtcttgcaggcagaggcagatactatcattattcygtttttcagattggaaaacagacacagagagtccaaggtcacaaagacagaaagggaatctgggcagtctagcagtagcaccctcttcttaaatgatccgttaaagggcctctt

SEQ ID NO: 915349 - DNA, 655 bp, Homo sapiens
ctttgccagcctctggctgcatggcaggktgactgtgtctttgaatatccctgatggaagctggtcatccttttgtctttgggtgaatagactactcaggaaggcagggatgaatgcaccccccaccctgctttcttgttaatgagtttgccatttattttggcagatctgaaatagtatttcaaaggcagtgcagaagcagatggggacattacttgtaattgtttaatactgttatgacatgacatttgcttacagaaagagaggcaagccaccatcttcaagggagggcatagtcatcgactgtgatcctggtgtccatgttggaatatcatggcaactatctcccagcactggacttgattacttctactgcattcccagtgatagctgagttgcttaatttactttcttcaacaccgtttgtgaaagggaagctagaaaactgcactatgtatggcttagtgcactgaaaatttgacgttatcaaaggagccatgatctcgtctttctctatccctcttcaaatgttttctataattatattcaaaggctcatgggtcttaccatgggtcatcgaggaagggctggtaactctttaaaccacaggtaaaatattacaaacatctgaaacctgcatttttacaggtgagag

SEQ ID NO: 915350 - DNA, 608 bp, Homo sapiens
gctactttggggcttaacactttctccaattaagaagagatgttgagagcttctaggaacccatcatccaagactgcggcactaaaaaaacacacctgagattttrctctacgaagttattttctattaaattcactgcctttttcacatcagagtgaataatgacaaaacattgtagcttggtcgttttgcactcttcattctgattttgcagcaacttgcattcctttcaactgctcataagttaaatttctcaatgaagtaatcacaacagaactatctccttgaacagtttggagtttcctgaaaaaaaacagatatactaccatatgatccaaaaatcccactgcttggtatatacccaaaagaaaggaaatgagtatatcaaagagatttctgcactcctaggtttgctgcagcactgtttacaattactaatatttgaaagcaacctaagtgtccatcaacagatgaatgaagaaaatgtggtacatatacacagtggagtactattcagccataaaaatgaaagcctgtcatttgcaacaacatggatggaactgaagatgattatgtcaagaaaaataagccaggcacagaaatacaaa

SEQ ID NO: 915351 - DNA, 497 bp, Homo sapiens
catcttgttcagagctccatcttgctcagagttccaactgctcagagaactgttgagagttccaacgactccaagctttatcttgctctgggctccatcttacacagaggaacatcggctccaagctccatcttgcttggagctccttcttgtctgagctatatttgctctgagctggacactccatgctccatggtgctctgagttccatctgctaagagctccatctgctccaagctccatcttgcttggagctccaatcactccaagctccatcttgctctgagcaccatctgttctgagctccaccttgctcagagccccagtcactcctagctccatctggctctgagtaccatctgctcggagctccatcttgctctgagaccacaggctyggtgctccatcatactcagaaacatctgctccgagcttcatattaatcggagctccatctcacctggagctccatctgctctgagctccatcaagcttgg

SEQ ID NO: 915352 - DNA, 705 bp, Homo sapiens
cttggagctctaatcattctgagctccatcatgctctgagcaccatctgctctgagcaacatctgcaccaagctccatcttgcttagatctccttattgctcagagtttcatctgctctgagcaccatcttgttcagagctccatcttgctcagagttccaactgctcagagaactgttgagagttccaacgactccaagctttatcttgctctgggctccatcttacacagaggaacatcggctccaagctccatcttgcttggagctccttcttgtctgagctatatttgctctgagctggacactccatgctccatggtgctctgagttccatctgctaagagctccatctgctccaagctccatcttgcttggagctccaatcactccaagctccatcttgctctgagcaccatctgttctgagctccaccttgctcagagccccagtcactcctagctccatctggctctgagtaccatctgctcggagctccatcttgctctgagaccacaggcttggtgctccatcatactcagaaacatctgctccgagcttcatattaatcrgagctccatctcacctggagctccatctgctctgagctccatcaagcttggagctcatcttgctcagaggtccatcttgctttgcgaaccatctgctccatgtatggttatagcagcactattcacaatggtaa

SEQ ID NO: 915353 - DNA, 705 bp, Homo sapiens
cttggagctctaatcattctgagctccatcatgctctgagcaccatctgctctgagcaacatctgcaccaagctccatcttgcttagatctccttattgctcagagtttcatctgctctgagcaccatcttgttcagagctccatcttgctcagagttccaactgctcagagaactgttgagagttccaacgactccaagctttatcttgctctgggctccatcttacacagaggaacatcggctccaagctccatcttgcttggagctccttcttgtctgagctatatttgctctgagctggacactccatgctccatggtgctctgagttccatctgctaagagctccatctgctccaagctccatcttgcttggagctccaatcactccaagctccatcttgctctgagcaccatctgttctgagctccaccttgctcagagccccagtcactcctagctccatctggctctgagtaccatctgctcggagctccatcttgctctgagaccacaggcttggtgctccatcatactcagaaacatctgctccgagcttcatattaatcggagctccatctcacctggagctccatctgctctgagctccatcaagcttggagctcatcttgctcagaggtccatcttgctttgmgaaccatctgctccatgtatggttatagcagcactattcacaatggtaa

SEQ ID NO: 915354 - DNA, 538 bp, Homo sapiens
cacagaaaaataggaacactgtgtagagagataaacagaaatagccattacagtgaactgcgtgtcagcaactctacaagtcagaaaccaatgatacaaaatttttaaataacttaaaaaaagtcaacccccaatcttacatccattaactatatagtgaaaataacaatgaaatgaagacattttcagattaacactgcaagagtcccttgctaacaggtctgcactaaaataaatgtcaaaatcatttcttgaggcaaaaggaatatggaagcagatgaaagttgaaactacacaaagaaataaagagtgccagagaagatataaagatatatagcccaattattttacattgctctaaagataattgtcttatttttttaaaaaaagagtaactttatattatggaattcataatatttgagactataatgcatgayataaatagtataaaggagagagaaaacaaaaatatacattttaaggtttttataccatagttggtataatacaaattataggttactataataagcta

SEQ ID NO: 915355 - DNA, 544 bp, Homo sapiens
tgatcttactgttgtttttctgataatttgtgttttttcctttcttaaatggctctaagttaactcttattagaaagtttcaaacccccttctctcatcatcatgccccaaaatttgtcaaaaaaaagtttcagagatattatattgagttatttaggccaaaggcaataaatggctcttacaataagactttgaaaataatgtaatactctacaataggcatggtgtatcatgcatataatcctagcactttaggaggctgtggcagaaagatcccttgaggtcaaacatttgagatcagccagagcaacatagtgataccataatctcgacaaaaaaaaaaaaaaaaaaaaaaaacgtgaaaaaattagccacgcatgatgccttatgcttgtagatccaactggttgggagattaaggcaaaaggatggcttgsactcaagagttcagggctgtggtgaattatgatcaaaccacggcacttctgcctcgataacaaagaccatatctcaaaaaaacacaaaataatcctataaataagga

SEQ ID NO: 915356 - DNA, 544 bp, Homo sapiens
tgatcttactgttgtttttctgataatttgtgttttttcctttcttaaatggctctaagttaactcttattagaaagtttcaaacccccttctctcatcatcatgccccaaaatttgtcaaaaaaaagtttcagagatattatattgagttatttaggccaaaggcaataaatggctcttacaataagactttgaaaataatgtaatactctacaataggcatggtgtatcatgcatataatcctagcactttaggaggctgtggcagaaagatcccttgaggtcaaacatttgagatcagccagagcaacatagtgataccataatctcgacaaaaaaaaaaaaaaaaaaaaaaaacgtgaaaaaattagccacgcatgatgccttatgcttgtagatccaactggttgggagattaaggcaaaaggatggcttggactcaagagttcagggctgtggtgaattatgatcaaaccacggcacttctgcctcgatracaaagaccatatctcaaaaaaacacaaaataatcctataaataagga

SEQ ID NO: 915357 - DNA, 415 bp, Homo sapiens
tggcatgcacaggccccggggaccgacatgctgctctgactgagaccgtcctgactttgtcaaattctacgtctggcctgggccacagaagcacaagtcccctgggtggtaccactggctgctttctggactggaacataaagtcctcctcaagatgacctgtggtctgcctcttggcaaccaacaagcccgcagtgtcatacgacccatgagacatggactgaaggcccaaagggagtgcacaccatgctccagagccagctgctcctttcctctatatggccccatttgcagcacagttgttgcactgaggcttgtgcatgctgggcaagggcaagctggctcaaagggcaaccagctatctttgcacrgatgtgccagcagcaggcagaccagccatcaacctcacacgctg

SEQ ID NO: 915358 - DNA, 652 bp, Homo sapiens
ctttgccagcctctggctgcatggcaggktgactgtgtctttgaatatccctgatggaagctggtcatccttttgtctttgggtgaatagactactcaggaaggcagggatgaatgcaccccccaccctgctttcttgttaatgagtttgccatttattttggcagatctgaaatagtatttcaaaggcagtgcagaagcagatggggacattacttgtaattgtttaatactgttatgacatgacatttgcttacagaaagagaggcaagccaccatcttcaagggagggcatagtcatcgactgtgatcctggtgtccatgttggaatatcatggcaactatctcccagcactggacttgattacttctactgcattcccagtgatagctgagttgcttaatttactttcttcaacaccgtttgtgaaagggaagctagaaaactgcactatgtatggcttagtgcactgaaaatttgacgttatcaaaggagccatgatctcgtctttctctctccctcttcaaatgttttctataattatattcaaaggctcatgggtcttaccatgggtcatcgaggaagggctggtaactctttaaaccacaggtaaaatattacaaacatctgaaacctgcatttttacaggtga

SEQ ID NO: 915359 - DNA, 669 bp, Homo sapiens
ccttttagcacaaaggtcagcaaataagcacctgtgggccaaatccagcccactgactgtttttgtaagtcaagtatcctggaacacagccatgcttattcactttacagtccatagtgwcaattagctgggtgtgatgttgcacacctgtggtcccagctagtagagaggctgaggtgggaggatcactagagcccagaaagtcgaggctgcagtgatcacacaaccatgatcacacaactgcactccagcctgggaaacagagccagaccctgtctcaagaaaataaatatatgtagtccacaaagcctaaaatatttactaattggttctttgcagaaaaagctggccaactcttggtttagtagatcaaagatctttgatgtattttaataaaagttttacccaatacactgaaatgtttatattaaatatagatccccatgtacaatcccttggcaatattcagactgagggtccaatatttcagcactcaggcactgacaacaaaaatttaataattagcaatcttgttgctaacaaggtacagtgtcaatgtagcatgtagcttccatttccaacacagcagatattacaagaattttaacaagaactcctaagatgtgtcattaaactaaatgctttaaatacattttaattgtgaaataa

SEQ ID NO: 915360 - DNA, 630 bp, Homo sapiens
ggtcccattctgcaagatatgattcctttaataggcagtygggttgcttttttgacctggttccctccctaaacagaaacactgaggtcaatgagagaccacaaggcagaatatatctttaaccttagtatcagtgactgacaatataaaactgcagattttcaatcactggccatgattactctttaaccatgaatccagctcagggaccatcagtgttacattgttcataattctattgcttaataatataatccaataattgatgttacattcttcatcatgttaggatgttgtaaaaataaaagaacaaagttctgaaatttgtttttgcctctattccaaaaggaaagattagctataagctaatcaagaaggcagataagaatattttaaaataagagtattttaaatttcatagtgggttatgttgaagttaaatatcaaatattaaattagaatctattgattcttttaataaggttgctgaatttattacaataaattttaagaatctattaaaatatttttttttttttttttttttttttttttgacacagagtcttgctttgtcacccaggctggagcgtagtggcagatctcggctcactgcaagctccacccccca

SEQ ID NO: 915361 - DNA, 558 bp, Homo sapiens
gacacgaagccaagcagggcactctaggactgaatttgctgtgctgccttcatacgctccttgctctttcttttctggcagcygtgactcacacagctcatggagagtatcattccctaagaggaacaactccgatattcatctttatctattaagttcatctgtcccaattctgtgttctgtggatgctgactttcggtcatggatggtgatacacatggacatttatcatccactttcagattcttggaactttgacaagtcttattagtgagagtcagactactaggatgcaagttacaaatgctgattatccaattacctactcaaaatatcctacacgaatattccattaaacatgcatagaaaaacattagtcattcctgctgacctgctgttctttgctcttctgtattcaccagaaaatttcctactccttcctcacgtctaggttaaatactagtgtacaacctggaaacctgtacatcatctgagatttctctctgtcccccaagcctttctcattcaattatcactaaatcatattgacgatacctc

SEQ ID NO: 915362 - DNA, 551 bp, Homo sapiens
tactccaaggatgtatgacaaggaaaccatagctgactactgcaaaagcttcctttgtctcctggtttctttacatagtaaagaaccttccatcaatcccagcmaactataggctacagactaaatccaatctgcattatggcattgtgagtaaagttttataggagctcagtcatgcctgtttgcttacatataattctggtggctttcacactacaacagcagacaacagcagggttaagaagacatgacagagaccacatagtctaaaatatttcccacctagtcctttacagaaaaagctttctaacccattttacaccataaccagaagccttaatactcaaatttaatcttgtgactcccctgctcaaatttctccaatgagcccctgcagcacacattgttggctccctatcaatagccattccttattctttcttgcagaagaaacacaagtctattgggatatttattatcccaatccccctcctcagcctcagaaagagaaatgtttattctaagctaatcatgtattttccttcccagtg

SEQ ID NO: 915363 - DNA, 578 bp, Homo sapiens
aagtttctgagatataagaatttatatattacatttatgtattcagtggttcttaagcaggagtgtatccagattttgagaaaattgttgctgttgttattgttgctgtcgttkttagagacaggggctcattatgttgacaaggctagactcgaactcctgagctcaagcaatcctcccacctcagcctccctaacagttgggactacagccatgcaccaacatgcctggcttcaaggaaacatttttaaatatacatatccaagctttattagacttactgtatcaaaatcttcaggaataagcctagacttgttgattatttaaaaattttcctcaggttactgggatgcacaattctagctgaaagctagtacaatagacaattacttcagtctcatttctcaccacccagataaccaattccctttcttatttgaagatttggccaaaaagagtaaagagtaggagagagacccatttgctgaaaacaccacataatttttcccggtaacacaacagtatctagtcaactcaaaatccaacttgatcttgttactcatttatcttccaccttc

SEQ ID NO: 915364 - DNA, 578 bp, Homo sapiens
aagtttctgagatataagaatttatatattacatttatgtattcagtggttcttaagcaggagtgtatccagattttgagaaaattgttgctgttgttattgttgctgtcgtttttagagacaggggctcattatgttgacaaggctagactcgaactcctgagctcaagcaatcctcccacctcagcctccctaacagttgggactacagccatgcaccaacatgcctggcttcaaggaaacatttttaaatatacatatccaagctttattagacttactgtatcaaaatcttcaggaataagcctagacttgttgattatttaaaaattttcctcaggttactgggatgcacaattctagctgaaagctagtacaatagacaattacttcagtctcatttctcaccacccagataaccaattccctttcttatttgaagatttggccaaaaagagtaaagagtaggagagagacccatttgctgaaaacaccacataatttttcccggtaacacaacagkatctagtcaactcaaaatccaacttgatcttgttactcatttatcttccaccttc

SEQ ID NO: 915365 - DNA, 572 bp, Homo sapiens
tctgagatataagaatttatatattacatttatgtattcagtggttcttaagcaggagtgtatccagattttgagaaaattgttgctgttgttattgttgctgtcgtttttagagacaggggctcattatgttgacaaggctagactcgaactcctgagctcaagcaatcctcccacctcagcctccctaacagttgggactacagccatgcaccaacatgcctggcttcaaggaaacatttttaaatatacatatccaagctttattagacttactgtatcaaaatcttcaggaataagcctagacttgttgattatttaaaaattttcctcaggttactgggatgcacaattctagctgaaagctagtacaatagacaattacttcagtctcatttctcaccacccagataaccaattccctttcttatttgaagatttggccaaaaagagtaaagagtaggagagagacccatttgctgaaaacaccacataatttttcccggtaacacaacagtatctagtcaactcaaaatccarcttgatcttgttactcatttatcttccacctt

SEQ ID NO: 915366 - DNA, 657 bp, Homo sapiens
ttcttcacagaactagaaaagataattcgaaaattcatatggaaccaaaaaagagcccgcatagccaaagcaagcctaagcagaargaacagatctggaggcattacattacctggcttcaatctatactacaaggccatagttagcaaaacagcataatactggtataaaaataaggacatagaccaatgaaacagaatagagaacccagaaataaacccaaatacttacagccaactggtctttgacaaagcaaacaaaaacaaagtggggaaaggacaccctattcaacatatggtgcttggaaaactggcaaaccacatgccaaaaaatgaaactggatccccatctcttaccttatacaaaagtcaacttaaatctgagacctgaaaccataaaaattctataagataacattggaaaaacccttctacacattggcttgggcaaagacttcatgaccaagaacccaaaagcaagcacgacaacaaaatgaagataaacaggtgagacttaattaatccacaaagtttctgcacagcaaaagaaacaattggcagagtaaacagacaacccacagaatgggagaaaatcttcacaatctatacatctaagaaaggactaatatccagaatccacaaagaactcagcaggaaa

SEQ ID NO: 915367 - DNA, 576 bp, Homo sapiens
ggaaagtttgtcaaatataaaatgtttaaaacacttgatattaaaaaataggattacaggtcattgtaaagtcatttatttaaccaaagtgataattcaaggattttttaaaagtgaaaaccttcatcctttgagacaggagacttaattttttaaacaagaagccctaataaaaacagcatgaagccaattacatttgttttttaaaattttctaaatctataaaatgtaatcttgattataaaatataacttccataagccttttataacctgtactaaggagttggtaaatgcttcaagaaaaccttgttaatctgacacaggggtccatatactggttttgcatcattgtgattttgacattaataattaatgtatagagaaactgaaccaactttatctttcaaaatcggcccttacaatcttatgctcccacctctttcacaatagtctcttggtcttgaggagttcaatagctttcatttcctgccctgtgtctcaggaatgcagcartttatttaaattggcatcttctactggtcctgaagatgaggctttaattgctgtgggtatt

SEQ ID NO: 915368 - DNA, 670 bp, Homo sapiens
acattctgtacacaatacataaatacatctaaaaatctatcaggcatatctatggaagtactgaaaccacttttgcaaaactgcaactaaggaaattatgacagtgaaagaaatcagaccyaaccgactctatcttgcttctaacccttaagctgtccttgttcattccttggtgtaagctcaactaactttgggaaggaatttagttcacggtttgactctgaaagcaaattgataacaaccctttcctgaaaagaaccccttcttgcctggggagcagtctgcctttgcaggactaacatattagctacaagattagaatgtacagtttaggggtcatgcagtctctggcttcgaaagtctgaacctccccaaactgctcctgcaggtaacatcacatcactactgtaaaacctaagatcagggcttgatacgtgttgcagaccctgcccaggccagtaatctggcccaaccagttgtgccgtcatacccatgaatagaagacagaaagataacctaacttcaaccccctatgattctatctccaacctgactaatcagcactccccacttcccaagcccctacccaccaaatatctttaaaaactctgatccccgaatgctcggggagaccgatttgagtaaaaactttggtctgccatgcagccgg

SEQ ID NO: 915369 - DNA, 649 bp, Homo sapiens
tctaccttgataaatcggttctgtctaggcagcgggcaaggtgaacgcattgggctgtcacggtacattttatagattgaagayctccccctttttttctctctcagactttcagattcttggtaacttgtttcacaaccctaggcagctgtcaactaaacagccttaaatttgaacgttaagggaaacaattcaggtgaaaatcaaatagcaaaatttactacataaagcacacaaggaaagagtctggtggtgctagagggagacactaatattttcttcgagccaaactaaacattaaattaaactacagtcttccttaaaaacccaagagtagcctctgttgcaataactactttagtcaagaaaaatcaagtgaaaacagaattcagtcaactgagaaaaaaaagacaaaaaaaacataaacacagttgctcaacaacaacaaaaagacaaggtcttaggagagtaaaacaaacaaaaaaacaaaaaacatgaaggcctttcaaatacaaacatgcgcacacatgcacacacatctggatgttacccttttaattaagctgacttttacacaattgtgctcctttaaacaaaactcttttaatcttattaccatatttcagcgaggacaaaatgctgctaaact

SEQ ID NO: 915370 - DNA, 646 bp, Homo sapiens
tcttgttggacgcaagtaaaactccaaaaaaaaaaaaaaagaggagttgtacagcaaaataaactttagatcttgaccaaagttttggagatgaaggattctttggagggrgtgctctcagatctcagcaaattgtcctattggtttgggtcataaagtgagctcacactggtcccaagcactgacaggagatttgccaaaggtcaggggcatctccactcagaatccctcgtggttaccaaaaggggaactctgaaaatctgaaacaggtctcagttaatttagaaagtttattttgccaaggttgaggacacactcctgacaaagcctcagaaagtcatgaaaacatgtgcccaaggtggtcagggcacagcttggttttatacattttagcgagacatgagacaacaatcaatgtatgttaagaagtacataggtttgttctggaaaggtggaacaactttaagcaaaggcaggaagactggaagcagggagggagcttcaaggtcatggataagagatacacaaataattacattatttagaggttttggttagcttctccaaaggaggcaatcagatatgcatctatctcagtgagcagaggggtggcttttaacagaatgggagacaggttggccctaag

SEQ ID NO: 915371 - DNA, 618 bp, Homo sapiens
atcactaatcactccaaacatgtaagtcagaatcacactccaatatcagataccatcaaactccactgagaatattaccaaaaacaggaataacatttttggaaggtagcrgccagtgtagacttacagaaagggaaactcttatacgctattgatgccaatgtgaattagtgaatacactgtgaaaaagttgggatgttcctcacactgcgtatgcatttaaagcaaaggaaaccggtaccttaaggagttacctgccttcccatgtttcatgacagtattcgcaatatagaagatatggaatcaacctacctgtccatccatagatgaagggatgaagaaactgcagtatatctgcacaacacaatactcttcatccataattaatgtaattttcatttggagccatatggatgaacctggaaaatatgttaaataaaataagccaagcatagaaaaataaccacagattcatctcacttatatggaatccagaaaactttgccttggataagtagtggttttctgaggagaggggaaggagggaatgggaggattggttgtggaaacaaagttgcagttagttgggacagatacattcttgtgctctataccaca

SEQ ID NO: 915372 - DNA, 613 bp, Homo sapiens; identical to SEQ ID NO: 896834

SEQ ID NO: 915373 - DNA, 664 bp, Homo sapiens
acattctgtacacaatacataaatacatctaaaaatctatcaggcatatctatggaagtactgaaaccacttttgcaaaactgcaactaaggaaattatgacagtgaaagaaatcagaccyaaccgactctatcttgcttctaacccttaagctgtccttgttcattccttggtgtaagctcaactaactttgggaaggaatttagttcacggtttgactctgaaagcaaattgataacaaccctttcctgaaaagaaccccttcttgcctggggagcagtctgcctttgcaggactaacatattagctacaagattagaatgtacagtttaggggtcatgcagtctctggcttcgaaagtctgaacctccccaaactgctcctgcaggtaacatcacatcactactgtaaaacctaagatcagggcttgatacgtgttgcagaccctgcccaggccagtaatctggcccaaccagttgtgccgtcatacccatgaatagaagacagaaagataacctaacttcaaccccctatgattctatctccaacctgactaatcagcactccccacttcccaagcccctacccaccaaatatctttaaaaactctgatccccgaatgctcggggagaccgatttgagtaaaaactttggtctgccatgc

SEQ ID NO: 915374 - DNA, 655 bp, Homo sapiens
tctaccttgataaatcggttctgtctaggcagcgggcaaggtgaacgcattgggctgtcacggtacattttatagattgaagayctccccctttttttctctctcagactttcagattcttggtaacttgtttcacaaccctaggcagctgtcaactaaacagccttaaatttgaacgttaagggaaacaattcaggtgaaaatcaaatagcaaaatttactacataaagcacacaaggaaagagtctggtggtgctagagggagacactaatattttcttcgagccaaattaaacattaaattaaactacagtcttccttaaaaacccaagagtagcctctgttgcaataactactttagtcaagaaaaatcaagtgaaaacagaattcagtcaactgagaaaaaaaagacaaaaaaaacataaacacagttgctcaacaacaacaaaaagacaaggtcttaggagagtaaaacaaacaaaaaaacaaaaaacatgaaggcctttcaaatacaaacatgcgcacacatgcacacacatctggatgttacccttttaattaagctgacttttacacaattgtgctcctttaaacaaaactcttttaatcttattaccatatttcagcgaggacaaaatgctgctaaactaacaat

SEQ ID NO: 915375 - DNA, 544 bp, Homo sapiens
tacaaaactctagaataaacatgacgcaaaatgttgaaagttctcctttgaggtcaagaacagggcacacttctagtcagcactgctggaagttctakgcaatagaataagggaagaaacataaataaaagttatacacaattgaaagaaagaaataaaactatttctggacagttttatacctgaaaaactgaaaataatctacaaactattagaattaataaatttatttagcaaggttgctgggtataaggtcaatataaaaaatggactatattcataaaaactaccatcaaacaattagaaaatgaaaaacagctgagatcatgccactgaactccagccagggcgacagagctagactccatctcaaaaaaataaaaaaagttggtgcggtggctcaggcctgtaattccagcactttgggagactgacacaggcgcatcgcttgagcccaggagtttgacaccagcctaggtaacatagtgagaccccatctctctaaaaaagtcatttataatagcatctcaaagtagaagcagct

SEQ ID NO: 915376 - DNA, 544 bp, Homo sapiens
tacaaaactctagaataaacatgacgcaaaatgttgaaagttctcctttgaggtcaagaacagggcacacttctagtcagcactgctggaagttctatgcaatagaataagggaagaaacataaatwaaagttatacacaattgaaagaaagaaataaaactatttctggacagttttatacctgaaaaactgaaaataatctacaaactattagaattaataaatttatttagcaaggttgctgggtataaggtcaatataaaaaatggactatattcataaaaactaccatcaaacaattagaaaatgaaaaacagctgagatcatgccactgaactccagccagggcgacagagctagactccatctcaaaaaaataaaaaaagttggtgcggtggctcaggcctgtaattccagcactttgggagactgacacaggcgcatcgcttgagcccaggagtttgacaccagcctaggtaacatagtgagaccccatctctctaaaaaagtcatttataatagcatctcaaagtagaagcagct

SEQ ID NO: 915377 - DNA, 673 bp, Homo sapiens
ctgcgcatcgatgaccagacagtcaaggtgatcaaccagtaccaggtggtgaaaccaactgctgaacgcacagcccatctsctgtattactgccgagtggacctgctgtaaaccctgtgtgcgctgtgtgtgagcccagtgtccgctttgtaggacaccacctcacactcactttccgcctctctttattggctctttagagagaaactctttctccctttgcaaaaatgggctagaatgaaaaggagatgccttggggttcgtgcacaacatagcttctgttgactctaactttgaaatcaaaatcatttggttgaaacagactgtcgcttgattttaaaaaacacacaaaaacccatatttctgaaataatgctgattcctgagataagaaagtggatttgatccccagtctcattgcttagtagaataaatcctgcaccagcaacacttgtaaatttgtgaaaatgaattttatcttccttaaaaaagaaatgttttaatccatcacatttttcttccctaccctttagtttttgataaatgataaaaatgagccagttatcaaagaagaactagttcttacttcaaaagaaaaataaacataaaaaataagttgctggttcctaacaggaaaaaaattagtaattgtgctgagggaaactgcttacata

SEQ ID NO: 915378 - DNA, 619 bp, Homo sapiens
aatgaaagatgagttagaaaaaccagaggctttagttcaaaaatgacaatctttggtactgcagcaaggaaataactagctggtgaaattratgactccacctggctttatctcggtaatgttctgaaatacatgcaatgaacaacttgacattgtttgatgttcttaattctttacagccatctctattggtagtcttaatagatcagatcaatcagaaatgatcatattatgaaatgtatatcacttcacatgacttatctggaaaatgtgcttgtacttacttgcaccatctcaagttccaagagccaaaaacatacacatgctcatggaggagaatttcctttctgattttagaacagtctgaaagggtgtgaaaaaatgaaaaaagaagggggagcttacaaataacaaaaatgtatatccaaatgaaagttagaatgtctatggaactagtagtagtaacaacagtagacaaaagataggatgtagatgttaagaagatgtctacaagggaagcacaagactccaaatgctcttgctactaaaatgcagattcaaggtttaccatctgtaatattctgctgccatgtacatctatggccactagtactgtcta

SEQ ID NO: 915379 - DNA, 621 bp, Homo sapiens
tctatggaactagtagtagtaacaacagtagacaaaagataggatgtagatgttaagaagatgtctacaagggaagcacaagactccaratgctcttgctactaaaatgcagattcaaggtttaccatctgtaatattctgctgccatgtacatctatggccactagtactgtctaaaaggaggatatatattaagaaatcatcaaaaaggactgcatagcagaaacttctgatatcaagggatcaacttaactacaattatatacaggtgccaatttcctctggagtaaactaccacactgggcctcatgtaccagttagataatccaagtcagcctttattgcataacctatctaaaagattggactctacattttggctctgcagaactgagagaagaaatgtataaataggatagtgatattgcctttgtctatgggaattcttgagtctaataaaaactctgggaaaaatctaacttcatgattacactcgggcacatagatgattaatacgaatgaagtaacaaccataaatacaatcataaccacaagaacaacagtaattcaaattttctcacttcatagatgttcttacaatgctttattggtatcttgtag

SEQ ID NO: 915380 - DNA, 661 bp, Homo sapiens
aaaggcaaacacaccacactctcctctgttcaatgtctgccatccttgtctttttggcctctgactcttccctatactactgtctatgcacttgagatcttcactgatatagcttggctctgtatttattgataagaatatctcttttctcttagactaggcatggccaaaaggttaatctggattcaaagattaatgacaatgaccactcagtttttattcaagatcaattttatttgttgtaaaaacaaacatgggttatgttccagacaaacagatataagtgagtagacttatgcctttgtgcctccttgactcttcacaggttgcaaaaacaaatcctgccagcaggaggtggcaggttgctgaggtggctggttgctctttgagccatcttggccttgtctggcatgcacaggccctggcactgcaaaatattcagggagtaagagtgttgcacaaaggattttaccaacctcgtcacattaagcagcattcaaggatttgctgaccaccacttaaacaaatkttgtgttatgctatagcaatgaacttacttgttctatttctaaacacaacattgggttcacacacaggcctggacaaagcttcccacttctgaactatttactgatcttcctattctcaaagaatgcaagat

SEQ ID NO: 915381 - DNA, 763 bp, Homo sapiens
tgtggaattttccacttgtggcatcatgtcagcactcaaracattttggattttggagaatttcagattttggattttcgagtaggtgtgttcaatctgtatatatgggccagattaagttgtttcctttaatccttggctgaaggaagcacagaagactttggggcctcaatctctcatatgcagtgacattctcaaagccattgactcagcttctcacctgggtttccttccagtgagccacagatagaagtcacaggtgatgacaggggcctgctggctgatggcattccagtactgggttgtgaagttgctggtggtgaaatcagcatatggcctcatcaaagctctctcaaatggaattggaatttcaaaggttgccaagacctggaatcctgggggaaaaaaagagagtaagtgctagaggagaataggaaaatatatgcccatcatagtggaaggtatttataatgggtcacaacaataaagacgaaggatttgctgtgtagagtcaagaatcaatttctgagaacaaggtaaagatttttatgctaggcaagtggttatctgcaaaatgaaacaatgtgaatgggttaagaattggaccatttatttgaaacatctactctaaaacaaattcttggggaaacacatgtagtcaataaaagggggtactgttcagaaaaacataaatccacatttaattctaaggttatctagtttattctgaaagccccaagacagaggctagaaactttatttt

SEQ ID NO: 915382 - DNA, 653 bp, Homo sapiens
acaaagcagcataataaagagtcaataggctgggcatggtggctcatgcctgtattcccagcacttttggaggctaaggtgggtggatcacctgaggtcaggagttcaagaccagcctgaccaacatggagaaaccccatctctactgaaaatataaaattagccaggtgtggtggcacatgtctgtaatcccaactactctactcaggaggctgaggcaggagaactgcttcaacccgggaggcagaggttgtggtgagccaagaaattgccattgtactccagcctgggcaacaagagtgagaccccatctcaaaaaaaaaaaaaaaaaaaaaaaaaagagaaagaaagaacaaagaaaaaagtcaataaaggccaaagaagtaaatacattttaaaacacacaaaatcttaggaaaagagacaaatataatttactaaaactgattccagcataaaatagagcctgcaaaattctttaactattaaagacactgaagcaataaaaagtcttctcacaaaaaattatgaatccagataatttaaaggtgmttttcacttactgtagccttgtagtatagtttgaagtcaggtagcgtgatgcctccagctttgttcttttggcttagaactgacttggcgatgtgggctct

SEQ ID NO: 915383 - DNA, 668 bp, Homo sapiens
ccgggtaaagctcttgtttgggaagattcatttgattgtatgacatgttcctccattctctctctctctgtctctgtcttttgttgttgttgatgttgttgttgttgttgttgttgttgttstaagaatctagaatgaaaaccacaaggccagggtttgctaccatggaccactctctcctttgcagaaagagctgcttctgagtgaaatagaaggacaagggtgccaaattaactcctctccacaaagtgaccccacgtggaaaagtacttgagaagctctgtaaagacgtggtaaaagcttaccaaagacagtagcattatcctttccttacacacaaagtggagggaaagcgtgggtaagtggtgtgtctaaaagcattgctttaaattatacatccatttgtaaacattcattttttcttaactacatgtcgtttgtaaattggacaaaaaatgcatatttgtcatggaaaaattaggaaataaagatattagcataaaagaggaaacaacgaatcttaattacccataatcccatgacttcatgtttgtgtgagattatataataatattgtttcatgatctgccattttcactcagtgacatattttgcacgtgaaatacattttacttaaatatttgtataatttgagtagttattacctt

SEQ ID NO: 915384 - DNA, 640 bp, Homo sapiens
aggacagtaaggaaagggtgtctcagccaaagaagtcaagagaacttctgccagatcttggagcaattcttattcttcgttagttcttctttactaatcatttgattaactgatattaaacactccctagcactgcaataagtgttttatataactttattcaacctcacaacaatcaaatgggcccattttacaaatgaaggacctggggttcagagaggccaagggactttctcaaagtcacacagctagttagttgtggagctatgccaaactcatgtcggaatcaaaaatgtttcttctgaaattttatactattcattgtacttgctttatctagtgacaatgctaagttcattaagaagcgagaaaccacttctttgtatagtattcccaagtacctcatgcaatcctatacaatttagcaaaatgtttctttaagaattttctatcccccttctctttcagcagtatattccccaccaggggatgaaagaggtaacagggacaaggtarctaaggctagcaccgtttcaaagcattttgctgcaaaactgtttctcttcatcgtctcattaatagacagctacaaagaatcaaagagagcaacattctactcacaccttgatccctttatttg

SEQ ID NO: 915385 - DNA, 640 bp, Homo sapiens
aggacagtaaggaaagggtgtctcagccaaagaagtcaagagaacttctgccagatcttggagcaattcttattcttcgttagttcttctttactaatcatttgattaactgatattaaacactccctagcactgcaataagtgttttatataactttattcaacctcacaacaatcaaatgggcccattttacaaatgaaggacctggggttcagagaggccaagggactttctcaaagtcacacagctagttagttgtggagctatgccaaactcatgtcggaatcaaaaatgtttcttctgaaattttatactattcattgtacttgctttatctagtgacaatgctaagttcattaagaagcgagaaaccacttctttgtatagtattcccaagtacctcatgcaatcctatacaatttagcaaaatgtttctttaagaattttctatcccccttctctttcagcagtatattccccaccaggggatgaaagaggtaacagggacaaggtagctaaggctagcaccgtttcaaagcattttgctgcaaaactgtttctcttcatcrtctcattaatagacagctacaaagaatcaaagagagcaacattctactcacaccttgatccctttatttg

SEQ ID NO: 915386 - DNA, 510 bp, Homo sapiens
actaacttatcaagtgatcgcagagaagtaggattaagcacataytatgctgttcttatagacaattttgcatttaacaaaattttagttcattttgcatagtaatctataataaatgctaaatgcaacacaatgtttgattcaccatcttgtcatgttttctttccacaccaaaggtcaatttcacagagttctttaataattctttcttgcagctgggcaggaaaggaactagggtggctaggaagttgaacaaccttaagattatttctgctctgcaacagaattggtggtgtcgctacattattcgtgctagaggatggaagaagtgttgatactaactcagaagtgacaagcaatagtttccccttcttcatgatattgtcatggaggaagaaatttcctaggagaggcaataaactacaatagggaaagtatgggctttagagattagagacctgcattccaattttgctgtataactgggcacaaattacataaccctggata

SEQ ID NO: 915387 - DNA, 510 bp, Homo sapiens
actaacttatcaagtgatcgcagagaagtaggattaagcacatattatgctgttcttatagacaattttgcatttaacaaaattttagttcattttgcatagtaatctataataaatgctaaatgcaacacaatgtttgattcaccatcttgtcatgttttctttccacaccaaaggtcaatttcacagagttctttaataattctttcttgcagctgggcaggaaaggaactagggtggctaggaagttgaacaaccttaagattatttctgctctgcaacagaattggtggtgtcgctacattattcgtgctagaggatggaagaagtgttgatactaactcagaagtgacaagcaatagtttccccttcttcatgatattgtcatggaggaagaaatttcctaggagaggcaataaactacartagggaaagtatgggctttagagattagagacctgcattccaattttgctgtataactgggcacaaattacataaccctggata

SEQ ID NO: 915388 - DNA, 637 bp, Homo sapiens
aaaagtaatgttgggagaaggaagttgtggacaatccgtgaatatcccaacatctgttgtargaaggttaagattttttttttttttttttgctgtacttaactgaatactcatatttatagtgtgagacaaatgtaatgttgcatataaatagaactaggaaaatgtgccatttgtcttagcatttaatcaagatggaagtctgggcctacctcctctcttttattaatatgtagacaggacaccaacacacatttgaatgaggacaaacaaaatgttagcaaatgaagaatggtattaattggttaaaatgcgatgaaatagagtggtgaatatttacatagaatccatgatgtgttaggtgctatttcaagctatttgcacatatagctttcataccaatgacactaaaatgtatagcacaaagattcatatacataaaaattacaacattgaaaataatattaggtgacactaaaactgtcatagaaatacacatttatataaaacataaagtaacatcaagtattaaataaattttagaaactttgattactaatcagatgaacaagtgattaacctttttatccagtaaacaaagcatacatcttattttcaaattccagagacaaatatt

SEQ ID NO: 915389 - DNA, 624 bp, Homo sapiens
tgcttgctttataataggtgattgaatattttttattttatattttaaaaactgtatgtatttgtggcatacaagatgattttttgatatgtatacatggtgaaacgattaattcaaactaacatatttatcacttccacatactttcattttattgtatgagaacatttaaaatctcttctaaaaacttcaagtatacttttggccctatgtttccatgagttccacattcaggcatccaaccaactggatagaaactattaggacaaaaaacccacaaaaaatacaataaaagcagtaaaaataaaaaaaatacgttataacaactatttataaaacatttatattttattagtattataagtaatctatagatgatttaaagtgtatggaagaatatgcataggttacatgcaaatataaaattacatcattttatataagggacttgaacatcccaggatttcggtgtccttggggagtcctggaacaaatcrccccccagatattgcagatatttagggacaatggtataacacatgactattaactacagtcactatgttgtacagtagatctccaaaacttattcatcctgtttagctgaaacattgtaccttttga

SEQ ID NO: 915390 - DNA, 624 bp, Homo sapiens
tgcttgctttataataggtgattgaatattttttattttatattttaaaaactgtatgtatttgtggcatacaagatgattttttgatatgtatacatggtgaaacgattaattcaaactaacatatttatcacttccacatactttcattttattgtatgagaacatttaaaatctcttctaaaaacttcaagtatacttttggccctatgtttccatgagttccacattcaggcatccaaccaactggatagaaactattaggacaaaaaacccacaaaaaatacaataaaagcagtaaaaataaaaaaaatacgttataacaactatttataaaacatttatattttattagtattataagtaatctatagatgatttaaagtgtatggaagaatatgcataggttacatgcaaatataaaattacatcattttatataagggacttgaacatcccaggatttcggtgtccttggggagtcctggaacaaatcaccccccagatattgcagatatttagggacaatggtataacacatgactattaactacagtcactatgytgtacagtagatctccaaaacttattcatcctgtttagctgaaacattgtaccttttga

SEQ ID NO: 915391 - DNA, 498 bp, Homo sapiens
aaaggcctcactgaaaaggtgatatttggtcaaagatttgaagggagtgtgggggaaagaaacataaatatctgggaaaagagcattccaggcagaggagatggcatgtatacgggccacaaggcaggagcatgactgccatacttgagagaccgtaaggaatcttcatcttttcctcatgtctttctcacctctaatatatttaaatatggcttccccccaccacacccttaaaatggccattgcataaatcaccaataacatttgttttagtccattttacattgctataaaggaatacctgagactgagtaatttataaagaaaagaggtttatttggctcatggtcctgcagtcagtacaagcgtggcatcagcatcttcttagcttctgaagcctarggaagcttttactcattgaagaaagcaaagggggagcaggtgtgtcacatggcaagagagggagaaaggtggggagggggttgtcccacactcttt

SEQ ID NO: 915392 - DNA, 457 bp, Homo sapiens
gctattctgggcttctctttgatgggagactttattacaattcaatcttattcatttttggtctgttcgtacttactttttcttcatgattcagtcttggtatcttgcatgtatcttggaatttatttatttcttctgctttattcaatttgttactgtacaatttttcatagtactctcttatgagctttttttcttatgagcttttatatttctgtggtatcagttgtaatgtctcccttttcacttttgattgtattaatatttgagtcctttctcctttttccttggtctggctaaaggcttgttgatttgtttatccttctgaaaaaaatactctttattacattgggttcttttctrttgtagttttagtctctattctgtttatttctattcagatccttgttatttctttccttctgctgactttgggtttagtttgttctttttttat

SEQ ID NO: 915393 - DNA, 619 bp, Homo sapiens
ggagtgcaggtatctctcagatatcctgatttcctttctttcgtatatatacctaccaatggcattgctgggtcatatggtagctctatttttgtttttgttttttttytgagaaacctccaaactgttctccatagtaattgtactaatttacattcccaccaatagtgggttcccttttctccacatcctagccagtatttcttactgcctgtcttttggatataagccatcttaactagggttagatgattcgtcttgtagttttggtttgcatttctctgatgagcaatgatgttgagcactttttcacatgcctgtttgccatttatatgtcttcttttgagcaagatcttttgcccatttttaaattggatgatcagattttttctatagagttgtttgagctccttatatattctagttgttaatcccttgtcagatggatagtttacaaatattttctcctattttatgattgtcttttcaacatcaattgaaatgatcctgtggtttttgtttttaactttatgtgatgaatcacatttattgatttgcatatgttgaatcatcctagcatttctagaataaaactcaattgatcatggtgaattaaatt

SEQ ID NO: 915394 - DNA, 579 bp, Homo sapiens
catatacccaaaggattataaatcattctactacaaagacacatgcaagtggatgtttattgctgcactgttcacaatagcaaaaacttggaaccaacccaaatgtccatcaatgatagactggataaagaaaatgtggcacatatacaccatggaatattatgcagccattaaaaaggatgagttcatatcctttgcagggacatggatgaagttggaaaacatcattttcagcaaactaacacaagaacagaaaaccaaacacctcatgttctcactcataagtaggagttgaacaatgagaatacacggacacagggaggggaacaccccacaccaggtgctgttgggggatgaggggctagtggagggataggattaggagaaatacctaatgtaggtgacaggttgatgggggcagcaaaccaccatggcacgtgtatayccatgtaacaaacctgcacattctgcatatgtaccccagaacttaaagtataataaaaaacaatctttttttatcaaaaagaagatttaaccccaagaatttaatgttttgtcaatataaatatctgcacatta

SEQ ID NO: 915395 - DNA, 551 bp, Homo sapiens
acaaacattcgtaccctcgaagcagtgttctggaatcctaagtgagggacacacactgagaaaygaggagcagtcttctggaatcccatgtgagggacaaacactcagaacccagcaggtgtgttttgaaatcctaagtaagggacaaacactcagaacccagccactgtgttctggaatcctatctgagggacaaacattcagacacttgtagaagtgctctggaatcctacgtgaggacaaacactcagaaaccagcagcagtgctcagcaatcctttgtgagggacaaacattcagaacacagcaggagtgttttggaatccgatctgagtgacaaacactcagaacccagaagcaggtttctggaatcctatgtgagggacaaacaccaagacccagcagcagtgttttggaatcctatgtgagggacaaacactcagaacccagcagcagtgccctggaatcctatgtgagtgacaaacactcagaacccagcagcagtgttctaaaatcctttgtgagggacaaacactcagaacccaacatcag

SEQ ID NO: 915396 - DNA, 630 bp, Homo sapiens
atcttatgtgagggacaaacactcagaacgctgcagcagtgttctggaatcctatgtgtgtgacaaactttcagaacatcgtagcagtgttgtggatttctatgtcatggacaaacactcagatggcagtgagggacaaacactcagaaaccaacagcagtgttctggaatcctatgtgatggacaaacacacagaatccagcagcagtgttctagaatcctttgtgagggacaaacactcagaactcagcagaagtgttctagaatactttgtgagggacaaacattcagaacctcgtaacactgttctggaatcctatgtgaggggcaaacactcaaaatccaaccactgtgtactggaatgctatctgaggctaaacattcagaacctcggagaagtgttctggaatcctaagtgagggacacacactaagaaatctgtggcagtgttctggaatcttttctgaggacaaactaacagaactcagtaggagcattgtacaatcctttgtgagggaaaaatattcagaccttgtagcagtcttctggaatcctatgtgagggaaaaacattcagaccctcrctgcagtgttctcaaatccaacatgagggacaaacactcagaaccca

SEQ ID NO: 915397 - DNA, 596 bp, Homo sapiens
aaaccagcggcagttctctggaatcctttgtgagggacaaacactcagaaaccagcggcagttctctggaatcctttgtgagggacaaacactcagaaccccacagaagtgttctggaatcctttgtgatgggcaaacattcagaacctcgtagcagtgttctggaatcctatgtgaggaacaaacactcagaacccagcagcaatcttctggaatacaatgtgagggacaaacgctcagaacccagcagcagtgttttggaatccggtatgatcgacatagactcagaacttcttagcattgttctggaatcccatgtgaggatcaaacactcagaacccagcagcagtgttctgaaatcctatgtgagggagaaacactcagaacccagtagcagtgttctggaatcctatgtgagtgacaaaccctcagaaaccagcagcagtgctctagaatcctctktgtgggacaaatatccagaaactcgaaacagggttctggaatcctatgtatgaaacaaacactcagatccctgaagcagtattctggaatccttactgatggacaaacattaagaccttcatagcagttttctt

SEQ ID NO: 915398 - DNA, 633 bp, Homo sapiens
cattcagaacctcgtaacactgttctggaatcctatgtgaggggcaaacactcaaaatccaaccactgtgtactggaatgctatctgaggctaaacattcagaacctcggagaagtgttctggaatcctaagtgagggacacacactaagaaatctgtggcagtgttctggaatcttttctgaggacaaactaacagaactcagtaggagcattgtacaatcctttgtgagggaaaaatattcagaccttgtagcagtcttctggaatcctatgtgagggaaaaacattcagaccctcrctgcagtgttctcaaatccaacatgagggacaaacactcagaacccagtagcattgttctggaaacctttgtgagggataaacattccgaccctcgtagcagtgttctggaatcctaagtgagggacagacactcagaaccaagcagcagtgttctgaaatcctatgtaagcgacacagtttcagaatttcatagcggtgttctggaattctatgtgaggaataaacactcagaagccagctgcagtgttctggaatccaacgtgagggacaaacattcagaacccagcaacagtgttctcgaatcctatgtgagggactaacccagagaacac

SEQ ID NO: 915399 - DNA, 611 bp, Homo sapiens
tgtgtaatcctatgtgagggacaaacactcagaacccagcagctgtgttctggtaacctatgtgagggaaaatcacttagaacccagtcattgtgytctggaatcctatctgagggagaaatattcaaacactcgtagaagagttctggaatcctatgtgagggaaaaaccctcagaagccagcagcagtgctctggaatcctttgtgaggggcaaacaatcagaacccagaagcagtgttcttgaatctttcgtgagggaaaaacattcagaccctcgtaatagtattttggaatcctatctgagggacaaacactcggaacccagcagctgtgttctggaatcctatgtgtgggacaaacacttagaacccagcacaatattctggaatactacgtgagcgacaaactttcagaagtttgtagcagtgttctggaattctatgtgagggacaaacactgagaacccagcagcagtgttctggattcctaagtgagggacaaacattcagaacccagcagcagtgttctggtatcctatgtgagggacaaacactcagaacccagcagcagtgttctacaatcctttgtgaggaaaaaatattcagaccc

SEQ ID NO: 915400 - DNA, 552 bp, Homo sapiens
tgtgagggacaatccctcagtatcgagcggcagtgttttggaatcctatctgagggacaaacactcagaactcagcagcagtgttctggaatcctgtgtgaaggagaaacactcagaacccaacagcagtgttctgattcccgaagtgtgggacaatcactcaaaacccagccactgtgttctggaatcctatctgagggtcaaatattgggaacctcggggaagagttctggaatcctatgtgagggaaaaacactcagaaaccagcagaagtgttctggaatcctttgtgagggacaaacactgagaaatcaagagccgtgttctggcatcctatgtaagcgacaaacactctgaacccagcagcagtgtttttgaatcccacgtgagcgacaaacactcagaacccaaaagcagtgttctggaatactttttgagggacaatcattcagaaccttgtagctgtgttctggaatcatatgtgagggccgaacactttgaacccarctgcagtgtttttgattcccctgtgaaggaaaaacactcagaacc

SEQ ID NO: 915401 - DNA, 606 bp, Homo sapiens
tgtgtaatcctatgtgagggacaaacactcagaacccagcagctgtgttctggtaacctatgtgagggaaaatcacttagaacccagtcattgtgytctggaatcctatctgagggagaaatattcaaacactcgtagaagagttctggaatcctatgtgagggaaaaaccctcagaagccagcagcagtgctctggaatcctttgtgaggggcaaacaatcagaacccagaagcagtgttcttgaatctttcgtgagggaaaaacattcagaccctcgtaatagtattttggaatcctatctgagggacaaacactcggaacccagcagctgtgttctggaatcctatgtgtgggacaaacacttagaacccagcacaatattctggaatactacgtgagcgacaaactttcagaagtttgtagcagtgttctggaattctatgtgagggacaaacactgagaacccagcagcagtgttctggattcctaagtgagggacaaacattcagaacccagcagcagtgttctggtatcctatgtgagggacaaacactcagaacccagcagcagtgttctacaatcctttgtgaggaaaaaatattca

SEQ ID NO: 915402 - DNA, 680 bp, Homo sapiens
tgagggtttgtccttcatattggattccagaacaatgctgcgaatgtctgaaagtttttccctcacrtaggattccagaactcagttacgagggtgtgaatgtttttccctcccaaaggattccagaacactgctgctcggttctgagtgtttgtccctcatatagggttccagaacgctgctatgaggatctgaatgtttttccctcacaaaggattttagaacactgctactgagttatgtttttggtcccacacaaagaattccagggcactgctgcagacttcttagtgtttgtccttcacataggattccagaacactgtgatgaggtttggaatgttggctctcagataggattccagtacactgtggctggatactgagtgtttgtccctcacatagaattccagaacactgctacgaggttctgaatgtttgtccttcacaaaggattctagaacacttagtctgggttctgagtgtttgtccctcacaaaagattctagaacattgctgctaggttctgaggatttgtacctcacataggattccagaacactgctaggagggtctgaatttttgtccctcacatagaattccagaacactgctgctgatttctcactgcttgtccctcacatagaattccagaacattgctacgaaattcagaaagtttg

SEQ ID NO: 915403 - DNA, 270 bp, Homo sapiens
ccagaacactgctgctgggttctagtgtttgtccctcacataagattgcaaaacactgctacgaggttctgaatgtttatccctcataaaggtttccaggaaactgctgctgggttctgagtggttgccctcatattgtcttccaaaacaatggtasgagtgtctgaatgtttttccctcacctaggattccggaacactgttatgagggtgtgaaagtttttccctcctaaaggattacagaacactgctgtcgggttctgagtgtttg

SEQ ID NO: 915404 - DNA, 270 bp, Homo sapiens
ccagaacactgctgctgggttctagtgtttgtccctcacataagattgcaaaacactgctacgaggttctgaatgtttatccctcataaaggtttccaggaaactgctgctgggttctgagtggttgccctcatattgtcttccaaaacaatggtacgagtgtctgaatgtttttccctcacctaggattccrgaacactgttatgagggtgtgaaagtttttccctcctaaaggattacagaacactgctgtcgggttctgagtgtttg

SEQ ID NO: 915405 - DNA, 270 bp, Homo sapiens
ccagaacactgctgctgggttctagtgtttgtccctcacataagattgcaaaacactgctacgaggttctgaatgtttatccctcataaaggtttccaggaaactgctgctgggttctgagtggttgccctcatattgtcttccaaaacaatggtacgagtgtctgaatgtttttccctcacctaggattccggaacactgttakgagggtgtgaaagtttttccctcctaaaggattacagaacactgctgtcgggttctgagtgtttg

SEQ ID NO: 915406 - DNA, 721 bp, Homo sapiens
gctgctgagttcagagtgattttccctcacataggattccagaaaactggtgctkggatctgagagcttgtctctgtcaacgagttccagaacactgctgctgtgttcagagcgtttgtccctcacataggattgcagaatactgctgctagtttctgagggtttgtccctcactagaattctagaactctcctgctgtgttctgagggtttctccaacacatgggattctgaaacactgctacaggggtcagtaagtttgtcggtcacaacggattccagagcaccgctagtgggttctcaatgtttgtccctcacatcggattgcagaacacagttgctatgttctgagtgtttgtcccaaacataggattccagaactctgcttggagggtctgaaagttttttcctcaccaaggattccggaacactgctgggttctgaatggttgtccctcacctacgattccagaacaatgctgggatggtctcaaagtttgttcctcagaaggcattctgtattactgctacgagtgtctgaatccttgtctctcacataggattccagagcactgatactgggttctgagtgtttgtccttcacataggattccagaacactgctccgagagtctgaatgtttgtccctcacataggattccaaaacactgctgctggtttgtgagtgtttgtccctcacataggattccagaacaattctgc

SEQ ID NO: 915407 - DNA, 527 bp, Homo sapiens
tgcaaacagtgtctgaatgtttgtctctcacgaaggtttccacaacactgctgctgggatctgtgtgtttgaccctcacataggattccagaacactgctatragggtctgaatgtttttccctcagataggattctaggacactgctatgagggtctgaatatttgtgcctcacaatagattgcagaacactgctgctgggttctgagtgtttgtccctcaaatatgattctagtacactgcttcgagggtctgaatgtttgtcccttacatagcattccagaacactgtttctgggttctgattgtttgtccgtcacatagtattccagaacactgctgctgggttctgagtgtttgtccctcacataggattccgggacactgctacgaaggtttgaaagtttgtccctcacataagactccagaacattgctacgagggtctgaatgtttctcctttatgtacgattcaggaacactgctaaactggtgtgaatgattgtccctcacgaagaattccagatca

SEQ ID NO: 915408 - DNA, 721 bp, Homo sapiens; identical to SEQ ID NO: 915406

SEQ ID NO: 915409 - DNA, 603 bp, Homo sapiens
aaggcttaccagaagctttattttacattatttctaccaaaaattcatattctcaaatattaaaagtggtattctgtattaccatttttcaagtaatgtagtctgcatttattagtacmtttcaatgtattttttttttacatggggtaaggttattaaaatgtcttgcagttgattttctaggtaacaacggaatctgttttctcaaacagtagcatgagaattcttgatataccaccttcagaggtactgaaaacaaccatatacttttgctgaaatttggattttttcataacctcttcagaggctgagtcatggcaacatatgacagcttaatttattcttcttctctaaatgttgtggagccacatccacctgtgtaaataacactaactgggtaaaagcttttttatactaagccagaaatcattatacctggtggttttattttaaatgtatgaacagtattctataacattcaaataagtaatagaaatttaattctatatatatggaaagaaaagttatacaggcacactgagaataaattggaatctggaactgaatgctgattagcatggcctataaaatcaaaaccaagtt

SEQ ID NO: 915410 - DNA, 596 bp, Homo sapiens
atttctctgatgaccagtgatgatgagcattttttcatggtctgttggctgcataaatktcttcttttgaaaagtgtctgttcatatccttcacccactttgtgatgggattgtttgtttttttcttgtaaatttgtttgagtcctttgtagattctggatattagccctttatcagatgagtagattgcaaaaatcttctcccattctgtaggttgcctgttccttctgatggtagtttcttttgctgtgcagatgctctttagttaattagatcccatttgtcagttttggcttttgttgccattgcttttggtattttagacatgaaatccttgcccatgcctatgtcctcaatggcattgcctaggttttcttctagggtctttatggttttagatctaacatttaagtctttgatccatcttgagttaatttttgtataaggtgtaagaaagggatccagtttcagctttctacctatggctagccagttttcccagcaccatttattaaatagggaatcctttccccatttcttgttgttgtcaggtttgtcaaagatcagatggttgcagatgtgtggtattatttctg

SEQ ID NO: 915411 - DNA, 628 bp, Homo sapiens
aaatgtattagtacttttgggataaaaagaactgcatattttaaaaatcactaattcatacactgaacaaatatatattgattgcctaccaggtagaaggcattatactaagctctgcagattaaacagataaaagcaaaacctctgcctgtgtttaacttaaaatgtgctaaaagacaaagctccagaaaagtgacagttataaattcagatagatactgtaagaaaacagattgctaagaattagatctatactaggctcacggaaaattcccccgagggatgtatagctacactgaggaatgaagaatgaaaaggaagcagttgagcaaacaaggaaggaaagcactttagccagtctgtggcatgtgctgaaactctagtgtagtctgcctctagccaagggagagcaacaggtatgatttttcttcttagctaaaataactaaaatcaaaacacacaaaatacattaaacaattttttagacactgtacattaggcaaagaagataataatccctgaaaaacagaaaaaaaaacacgaaaraaagcaaaccttatgaatgtttcagcttcctgccttgacagagattccgagacatgacacaggaagaaaaaactgaggtggg

SEQ ID NO: 915412 - DNA, 612 bp, Homo sapiens
ataaaggcattaaagtcagaaaggaagaagtgaaattgtctctgcagacaacatgatcttaaatgtagaaaaccctaaagagtccaccaaaaaaaactgttggaactagtaaattaattcagtaaagttgcaggatacaaaatcaacataaaaaaacgagtagcatctgtatacactaccaatgaactatctgaaaaagaaatcaagaaaacgatttcatttataatggctacacaaatacttaggaattaatttaaccaaggaggtgaaagacctgtacactgaaaactataaaacattggtgaaagaaattgaagaagacacaaataaatggaaatatatcccatcttcatggattagaagaattcatactgttaaaatgttcttagtacccaaagtgatctacagattcttatgtaatctctatcaaatttccaatgatattttttacataaacagaaaaaagtccccaaattcacttgaaaccacaaaatactccaaatagcaaattgtgagcaaaaagaacaaagtaggaggcatcacattatccagtttcaaaatatactatgatgttatagtaatmaaaaatataacatgatactggcatacaaa

SEQ ID NO: 915413 - DNA, 579 bp, Homo sapiens
agggagatgccatatggttatcaatggaattctcagcaaaaactctacaggccagaagagaatgggatgatatattaaaagggctgaaagaaaaaaaaaaaactrtcagccaagaactgtattgccagtaaaactgtatttcaaaaatgaaagacaaacaaagagttccccagagaagtaaaaggtgagggagttgatcaccactagacctaccttacaaaacatgttaaagggagtcctccaagtggaaatgaaaaggcattggatagaaatgcaaaagcatacaaaatataaacttctttggtaaaggtaaatatatgagtgaacatagaatcctttaataccctaatggtggtaagcaaaacactttttttcctttacttttttttttttgagacaaagtcttgctctgttgcccaggctggagtgcagtggtttgatcacggctcactgcagccttgcagtcctgggctaaagcaatcctcccacctcagcctcccgagtggctgggactacagacatgcaccaccacactcagataatatttttaaatttttagcagagataaggccttgctgg

SEQ ID NO: 915414 - DNA, 579 bp, Homo sapiens
agggagatgccatatggttatcaatggaattctcagcaaaaactctacaggccagaagagaatgggatgatatattaaaagggctgaaagaaaaaaaaaaaactatcagccaagaactgtatwgccagtaaaactgtatttcaaaaatgaaagacaaacaaagagttccccagagaagtaaaaggtgagggagttgatcaccactagacctaccttacaaaacatgttaaagggagtcctccaagtggaaatgaaaaggcattggatagaaatgcaaaagcatacaaaatataaacttctttggtaaaggtaaatatatgagtgaacatagaatcctttaataccctaatggtggtaagcaaaacactttttttcctttacttttttttttttgagacaaagtcttgctctgttgcccaggctggagtgcagtggtttgatcacggctcactgcagccttgcagtcctgggctaaagcaatcctcccacctcagcctcccgagtggctgggactacagacatgcaccaccacactcagataatatttttaaatttttagcagagataaggccttgctgg

SEQ ID NO: 915415 - DNA, 602 bp, Homo sapiens
agttaggaaaagatgaagtcaaattgtccctgtttgcagatgacatgtttgcatatttagaaaaccccaccgtctcagcccaaaatctccttaagctgataagcaacttcagcaaagtctcaggatacaaaatcaatgtgcaaaaatcacaagcattcctatacaccattaatagacaaacagagagccaaatcatgagtgaactcccattcacaattgctacaaagagaataaaatacctaggaatccaacttacaagggacgtgaaggacctcttccaagagaactacaaaccactgcttaacgaattaaaagaggacacaaacaaatgcaagagtattccacgctcatggataggaagaatcaatatcatgaaaatggccatactgcacaaagtaatttatagattcaataccatccccatcaagctactaatgactttcttcacagaattggaaaaaaaactactttaaatttcatatggaaccaaagaagagcctgcattgccaagataatcctaagcaaaaagaacaaarctggaggcatcacactacctgacttcaaactatactacaaggctacagtaaccaaaacagcatggt

SEQ ID NO: 915416 - DNA, 607 bp, Homo sapiens
agttaggaaaagatgaagtcaaattgtccctgtttgcagatgacatgtttgcatatttagaaaaccccaccgtctcagcccaaaatctccttaagctgataagcaacttcagcaaagtctcaggatacaaaatcaatgtgcaaaaatcacaagcattcctatacaccattaatagacaaacagagagccaaatcatgagtgaacgcccattcacaattgctacaaagagaataaaatacctaggaatccaacttacaagggacgtgaaggacctcttccaagagaactacaaaccactgcttaacgaattaaaagaggacacaaacaaatgcaagagtattccacgctcatggataggaagaatcaatatcatgaaaatggccatactgcacaaagtaatttatagattcaataccatccccatcaagctactaatgactttcttcacagaattggaaaaaaaactactttaaatttcatatggaaccaaagaagagcctgcattgccaagataatcctaagcaaaaagaacaaarctggaggcatcacactacctgacttcaaactatactacaaggctacagtaaccaaaacagcatggtactgg

SEQ ID NO: 915417 - DNA, 347 bp, Homo sapiens
accaaaggcaaaaataaaatcttaaataatctagacagagaaagagagattaatcataattgaataaacaatagagcagattctcaattcttatcagcaacaatagaagatggaagataattaaataaagtcttcaaagtacagagataaataaaacattcaatgttgaattctgcagtcagttaactttcactcgaacaaaagacaaatgaaagatattgtcaaacaaacacatttaagaacatatgccattttttaccagggaaaaatctactgaaagatatgctttagaaatatgacayagaaccaaaaaagatggaacaatgtgcaaagaaattggtaaaatt

SEQ ID NO: 915418 - DNA, 403 bp, Homo sapiens
catatccagccaaactaagcttcataagtgaaggagaaataaactcctttatagacaagcaaatgctgagagattttgtcaccaccaggcctgccttacaagagctcctgaaggaagcactaaacatggaaaggaataaccagtaccagccacacaaaaacatgccaaattgtaaagatcctaggaaaaaactgcatcaactaatgagcaaaataaccagttaacatcataatgacaggatcaaattcacacataacaatattaaccttaartgtaaatgagctaaatgtcccaattaaaagacacagactggcaaactggataaagagtcacgacccatcagtgtgctgtattcaggagacccatctaacgtgcagagacacacataggctcaaaataaagg

SEQ ID NO: 915419 - DNA, 670 bp, Homo sapiens
gccagcagcccacctgtgacaggagcctggctctgctcctagctggccgtgtgaccttgggcaagtcactggcttcttctgtgcttctgtttattgtgaaatgaggatgttaatgctaacgtatcccagaggatggtttcaagggttaaagaaaataaagcactagagagaggtctggcacttagtagggccatttcctcaatttggcttccttgacctctcaaagtatgtccccacagtcactttcctatcacccagttttcttcacagagcttggcagtgtgaagtaaccttggttattcaactttttttttttcccccaagacggagtcttcctctgtcacccaggctggagtgtagtggcaagatctcggctcactgcaacctctgcctcccgggttcaagcgattctcctgcctcagcctcctgagtagcagagattacaggcgcccgccaccacgcctggctaattttttgtatttttagtagagaccgagtttcaccacgttggccaggctggtctcgaactcgtgacckcgtgatccacccgcctcggtctcccaaagtgctgggattacaggcgtgagcccccgcgcctggtcaactattttatgcaatcagtatttattatgctcctactatgtgccaggcactggttgtaactgccatc

SEQ ID NO: 915420 - DNA, 613 bp, Homo sapiens
acccaactacgtgagaaactccaataagtaaaaygtctctcagtttgtgcatatttgtttgtctgtgacatattagaataatcattgcaggtaaaaattttttgaataaattaatttataattgcatatgttattctccagttcagcaattttattttctcaggatttatagatatacagattttatatataaaaaattttcggcttctccaaattttttttgaaatttgagttataaatatcaatatatactatattataaattaaaactgtgaaattcaagaactatttattatttaaaatagcagaaataaattcattgcatgttaacaaaaattgcacaattttataaaaatagctatattttcaaaacaaaataaaatgtaaatgattatattgttttacatttttacaaattaatgtaatgtccaaattcaagaaaagatggggattatcatatctgcttttttatgtaatctattgtgataccacatgtctataaagcctttgaaaatattcactgtatgctcatgaggaaaagactagaaagagcaaataatgtcataatattataattaatgtggttttgagtccatgggcttccaaaagtata

SEQ ID NO: 915421 - DNA, 613 bp, Homo sapiens
acccaactacgtgagaaactccaataagtaaaatgtctctcagtttgtgcatatttgtttgtctgtgacatattagaataatcattgcaggtaaaawttttttgaataaattaatttataattgcatatgttattctccagttcagcaattttattttctcaggatttatagatatacagattttatatataaaaaattttcggcttctccaaattttttttgaaatttgagttataaatatcaatatatactatattataaattaaaactgtgaaattcaagaactatttattatttaaaatagcagaaataaattcattgcatgttaacaaaaattgcacaattttataaaaatagctatattttcaaaacaaaataaaatgtaaatgattatattgttttacatttttacaaattaatgtaatgtccaaattcaagaaaagatggggattatcatatctgcttttttatgtaatctattgtgataccacatgtctataaagcctttgaaaatattcactgtatgctcatgaggaaaagactagaaagagcaaataatgtcataatattataattaatgtggttttgagtccatgggcttccaaaagtata

SEQ ID NO: 915422 - DNA, 596 bp, Homo sapiens
gtggtggctcacgcctgtaatactagcactttgggattacctagccaaggtgggtggatgatgtgaggtcaagagtttgagaacagcttggccaacatggcgaaaccctgcctctattaaaaayacaaaatttttctggctgtggtagcacgcctctgtaatcccagctactcaggaggctgaggcaggagaattgcttgaacccaggaggtgcaggtctcagtgagccaagattgtgccgttgcactccagcctgggcaacagcagtaactccgcctcaaaaaaaaaaaaaaaagaaaagaaaagaaaaacaaaacaaagagccccatgagcttccagttcaaaggtaatataataagtaactttatactctgttagactacctataggtactaaaactaactaatcattagtatgtatatattctattatttattactatatattaatttaattattactataaatcactttatttttaactataatgtgaaaaaacttccatgcagaaagaattttcccattcgtttaataatttactatagaatcacttcctatatttcaatatctacctttgactgcagtagtatggctac

SEQ ID NO: 915423 - DNA, 697 bp, Homo sapiens
attgatctattacctatgtaccttttgcatttctctgaagaaatacaatagcatttttatttctaattgttcatatctgcttatttcctcccattttaaatttttccttgatggaggactccataatttaagayattttataaggattgtatgaaacaatgcataaaatatgccaataataattcctggctcacgaaaactattttctacatattattattcttattcaattggtgcttttgtagtttgagtttgcaaagttatgcttcactaacatgcatcccctctatatcagtggacttataataataaatatgtatttttcagtcagtactaaatatgtgaaacattacattttatctatcgtggctgagacacataagttgtaatgttccatgtgtcttcttcaagataaaattcatgtttgaaaagcagcccacattcaaaacatgcctttatcattggcaaaagcaaagagcaacaagagaatcacacaaaggcatatctgaaagatattgtgggctcagttccagaccactgcaataaagcaaatatcacaataaattcagtcacacaaatgtgttggattcttagtttatgtaacggttctctttgctatacagtagtctatgtgtacaatagcactacaaacaaacatgtacataccttaattttaaaatagattattgctacaaca

SEQ ID NO: 915424 - DNA, 629 bp, Homo sapiens
ttacattttatctatcgtggctgagacacataagttgtaatgttccatgtgtcttcttcaagataaaattcatgtttgaaaagcagcccacattcaaaacatgcctttatcattggcaaaagcaaagagcaacaagagaatcacacaaaggcatatctgaaagatattgtgggctcagttccagaccactgcaataaagcaaatatcacaataaattcagtcacacaaatgtgttggattcttagtttatgtaacggttctctttgctatacagtagtctatgtgtacaatagcactacaaacaaacatgtacataccttaattttaaaatagattattgctacaacaaaattgctgacacagagacacaaaatgagcacatacttttgggaaaatagtgccaaaagatgcataattgtcacaaatcctcaatttgttaaaaaaatgcattctctatgaagcacaataaatttaagtgcaatagaatggggtatgcctgcaattactttttaccctactgctcaggcayagcataggtctcttttgctcaccttctatcaaccatgcaagctgcttaggtctcaactgcttgccctttggcagtgatttttcaaaaaatataatcatct

SEQ ID NO: 915425 - DNA, 598 bp, Homo sapiens
tacctggttcttctgttacagagtttactattattaaaatcagtaggaaataaagtatgtgtgttataattcaatattgtcaaagttgtggtagaatctaaaaatctaaatatttaagagagctgaaggtggagcagctagggtgcccagccatcctggttttgctgggactgtgccagtttgagcaccggctatatcaagtgctggaaagattttcagcccaagtaaactgggatgattagtcacccaagaagtaactcatacatgaggcagtcaacccagaaaacttcctatgaacccaattatgaatgcattagatctttcaggaagaatgaataagaatgtaacaggttgggggtaaaaaaggaaaaatgacctttcataataagagaaaaagtaagtgtcatactgtggagccatgaaagtatgtagaatagagttaaataatgatagaatacagagtgtgtgagaaattagcataagatgaggcaaaaaaaaaggtcasatttttaaaaatttgtatgtccattaattttttctaattttatcatctaggtttgaagtcagcaaactatagccagagagtcaaatcctgcca

SEQ ID NO: 915426 - DNA, 607 bp, Homo sapiens
ttcgtatacattgcggatgggaatgcraattggtaaagtccagctggagcgggtgatagggagaataatggccccgttgaatgtccagatgtcagacctcatcatttccaagtttgtgagcttacatagccaaagagactttgaggatgtgattatggttatgaaacttcagatggggaaatttttctagttctccaggcaggcctggtcttatcacagacagagtctttcaaagcaggggaactttctctgatgtggagaaccgtaaagatggcagcatgagaaggacttcatataccattgctgctttgaagggtgccgtgggccacaaaatgtgggcagtctcaaagcaggaaaaggcatgggaatagaaagagatgcagccataccaactctgtgctgggcatctgacctacacaactgtgagataataaatatgcgctatttaagctaccaggggtatggtaatatattacagccagagtagaacactaatacataagagaagctggaaatcactactaacacataaacttgcaaatcaacaatgcttctttgggaatttactctgaagttacacctttagcaatacacatatatgaatgta

SEQ ID NO: 915427 - DNA, 591 bp, Homo sapiens
tgttcatgcaactgtgggggctgacaaccctaaaatctgcaaattaggccagcaggctagagattcaggtaagagttagtaagagttgatgaygcagtcttgagtctgaattcacagtgctgtaagcgggaaactcaggcagtttctatgttgcagtcttgagaatcccttctttctcaggaaacctcagtctttattcttagggccttcaacaaatatgaggaggtatacccctattatttatgaagggctatctgctttcctcaaagtttactattttaaatgttagtcatatgtaaaaaatgcctttacaacaacatctacactggcatttgacaaactactggctaccatagccttgccaagctgacacgctaaaggtaactattgtgagtggttattcattaaggctttaatcagtgtcatcaaatcaggcattaaagtattagcaaacagttatttcatcagaaagatgattatttgtcattctagtatttactctttttgctgatttatcatgtcttcattttgtttcaataatgttaataatgtagaacttgtacattaaaatatgtagatattttaatatca

SEQ ID NO: 915428 - DNA, 650 bp, Homo sapiens
tagctctcatgagatctggttgtttaaaaatgtgtagcacttcccccttcactctttctactgcttcccttgtaggactgcctgcttctccttcattttctgccatgattgtaagttccctgaagcctccccagccgtgcttcgtgtacagcctgcagaactgtgagtcaattaaacctcttctctttataaattacccagtcacaggtagtagtttatagcagtgtgagaatagactaatacaaaaagtaaaccaattttttgaaggatagcaaaaaatttaaactgaacattttatcttgagtatgccaatcagggtaaacaaaaaaaaaattatttcagttgttcaatgatttagagaaacaataaacaaacttttgagtttagttttggagcttatgttcagactgtctccaggtaatatctgctaaaactcattttttcagccatctccaccttagttagactagatctacaccattctcctattatttcacgtgtgagttgatgtcttttatcaagattggtaaattcccaactgtactctcttcaaatattgyttctgccccatcctctcatctttcttttgcttagattccaattataagcaaggtacactttttaactacattacatatggcttatactct

SEQ ID NO: 915429 - DNA, 650 bp, Homo sapiens
tagctctcatgagatctggttgtttaaaaatgtgtagcacttcccccttcactctttctactgcttcccttgtaggactgcctgcttctccttcattttctgccatgattgtaagttccctgaagcctccccagccgtgcttcgtgtacagcctgcagaactgtgagtcaattaaacctcttctctttataaattacccagtcacaggtagtagtttatagcagtgtgagaatagactaatacaaaaagtaaaccaattttttgaaggatagcaaaaaatttaaactgaacattttatcttgagtatgccaatcagggtaaacaaaaaaaaaattatttcagttgttcaatgatttagagaaacaataaacaaacttttgagtttagttttggagcttatgttcagactgtctccaggtaatatctgctaaaactcattttttcagccatctccaccttagttagactagatctacaccattctcctattatttcacgtgtgagttgatgtcttttatcaagattggtaaattcccaactgtactctcttcaaatattgcttctgccccatcctstcatctttcttttgcttagattccaattataagcaaggtacactttttaactacattacatatggcttatactct

SEQ ID NO: 915430 - DNA, 425 bp, Homo sapiens
ggctacctgtactacccaggctcctaccccagcagcctggtctacagcactgccctctgctctcccagcacctgccagctgcgttcctctctctacagggactgtcagaagacctgctgggagcccrccagctgccagaaatcctgctaccgccccaggacctccatcctctgctgtccctgtcagacgacttgctctggatctctaggctttcggtccagcagctgtcgctcccagggctatggatctaggtgctgctactcgctgggaaatggatccagtggcttcagattcctgaaatatggaggctgtggttttccttccctgagttacggatccagattctgctacccaaactacttggcttctggagcctggcagtcttcttgttacagaccaatctgtggatctcgcttctatcaatt

SEQ ID NO: 915431 - DNA, 610 bp, Homo sapiens
atttgacagttctaatataaaactgaattcatttaatccctagtgatttgtttttcctgctactggaggggcatgtcattaactattggttcaattattttctgtacatgcacaagaatatgtataatttaacacgagtgaaaatgacttaaaacagttatttgacctaaatgaaaatgtctgtatcagggtgatgtattgacacactttttgcaactgttaatagtaaataatcatcttaggacttggtcttcttaaacatttttctgtcttttgaagtagatactgatgtatcttcagtaaaactatgtctttcacttttcatgtggtcaatgatatcacctactctcatgttgaataataaatatcatcaaattgttgtacaagttcatgcagtcaccatcaaccggatttagtggtagaaattcagaacccaacttttgtttttttcattaaaaaatgagcttttatttttggcttattttccttttcttctatctacaaaatttaaagaagaaaagtgttaccgrataataaaaaatagttgtagatttaaaaaatacaagacatggccaaatcactgtagcaagagcatttagattatccttta

SEQ ID NO: 915432 - DNA, 595 bp, Homo sapiens
taaagttatgaaaaaatttatgagattctagaaaggcaacatgctgctctttagacctgtgtccacaaattgattgggaataargtgaactgacttctcctggaggagcaattatgagtgtgacagaaacccagcccataatctgggtcaagggaggtccctcatccacagaggctgaaaactgcagagtccacagccccatgctcaaagccctgtcctctggacaggctgatgaaagggtgtccataagagggcacaggatggctgctaggttctttgctggccaggagaaacatggtagacattgggtgaaggaggtccctgtggccactcaatacctgggatgggaggaactcactttgacagatggcgggtatattagtctgcttgggctgccattacaaagtaccacaaattgagtgacttagtaggaatgtgttgtcttacagtcctggaggctggaaggctgagatgaaggtattggcaggtgagtccttctgaggggtgtgaggaaagcatctgttctaggcctctttctaggatacttctccccagatggccatctccctaaatggtcctgaatggttttctccct

SEQ ID NO: 915433 - DNA, 633 bp, Homo sapiens
aatgttcattgctttctccttatgtagtacttttatatactttacttttgtttgtaccgttgttctctttttaaatgttgaracgttagactctatccaagcctgttcttaccttccttctcccagaagtggcctgctgttctgtgagagtggtgcttgcattatggtaaccatttttctctttgtaccatgggaactcatctgtgtttcctatgacttgagtacaaacttcattaagtcagaaagtcagcttgtggcagattttgtttttaacgtaatacagcatccagcccaattttttttttattacatagtaggtactccattaatgtttattgcattctacttaatataattagagagggttacctatataaacaatgtttcaagtaatgatttctacaatattgctctcctttctaactttatggccattaacaaatatggaattacttgttacatgacacaataatcattgtatgtgtaaccttctatttctttaagaaatagtgaatgggttctaatgggattagtgactgacattatatttggggtacatgcttagtacatgttcaatgaaatgtgaattattgcatcaataaataaatattgaaacttacaggtaatcataac

SEQ ID NO: 915434 - DNA, 616 bp, Homo sapiens
tatgaaagttacaaattgaatactggagtgaaggtcaagtaaatgttaaaaagttagtgcacaaacacaatcaccatgctaagtgagctgcaggtaaaactgactttctaatttggaggattagtacaatcaaaagggtcaaataagttgtacatgatgccataatcttgatgttcatcgcttaaatctttattgagattaggttgccatttctttcaagtcttttgtcattaatatggatttttttttgccaaagactgaaccttttataaagcaagaaaagtattaaagaaaattaataaataaatgagtatttctctacatcgtataaaatcaatttgtttgatcatttgcttggattaatttattttcaatgatacagacttagttttaaaatagcattccatgctgctcctgagtattagatacacatttgctttacttgttttaaatattatggtcttttaatattttctaccactaagaataagaaaaaaaaaactgtccataccaacaaaatactccyataaagaacctgactatgatatgctcctcaaatgaaaaaaatccatcagaagaataatgtcctttcaataactccgtcacatcacatctc

SEQ ID NO: 915435 - DNA, 494 bp, Homo sapiens
ataattcctttcattgctcccagtagcgatgtcttaggcatttgaattaagcttggctaatcaactgtctcaactggtcttggatttttagcaaagtgacacaaagacaaaaarcggtattcagaatgtatctagagcagaggtatccagaagcagaaaaaaatggcaagaggaatgtcagtagtagcagtgccccactctagtggtggctaaaaagaaaaatggcagtaatgacaaaaataatatcctaacaagactattgctgtgtcattgatttgggtgctatattagctatattgacaaccctgggtcgcatcccacttctcaacccagtctcccagatttcccacagttcgtcaaactacccatagtctcagtaaagtttttgcatgcttattaaatagtctgcctggtagacagggcttgtgtttcagtctcttcatacagtacagactgttgacataaaagttctaataaattactgtacttatatt

SEQ ID NO: 915436 - DNA, 529 bp, Homo sapiens
aatacttttattcagattaccaaattgctcaggtatcctgaatttttattctatacacatatccaatacaatattgattcaattgatctttcatagtaatagagcatttttaattgattaaagagtttttatattgatttgcattattagaggtttctgtgaccaatctgagtgcagtagtaagatgtgaccatgattattatgtctgaaaaaactttttcggtggaagaaagaaattttactttttgtatccatgtttcaagaaattattcattctccaattttatcctttaacattaatcttggatcctaaattatgcaatcactatgcacaagcatgactaggtacacatgacactattataccttcctcaaaattagaatttatagttttcatcakgaaattccccctctacttgcattcataagaattgtatgttctgtagtatattttaaattttgaaggtgagttctacagtatatcttactgatatactgtaatagaaatcaacagaaattcagttctccc

SEQ ID NO: 915437 - DNA, 607 bp, Homo sapiens
aatgaatctaactcatttattgaaagaaaaagaaatctaatcataagatagatcaattgatcatttaatagatcaattcaaaaggaaatgaactattcaaatactagaagaaaacaaaggtaaattcctctctaacttatggtttggaaaatatttttacatatgactcaaattctgcattcaagaaaatgtagatatctctgactttaaaagattttaaaaaactttgttttccaaactaccataaaaaaccaacaagtgacaaaagcaaataacaaaaacttagaagaaacttgtaataacagagataaaggattaatgtatattttaagaatatgaaacactcttaaaattgaaggaatcaagaccaaaaccatacaggaaaataaacaaaacatgaatagggatgtcccaaaattatataatgacctttaaaacatgatatatttacattcacttataatagatgcatrcatctcaaaaccatgctgagttaccacttcttgtctgtcagattatcaaaaattaaaatcttggtaacttattccattggtgaggctattacaaaacagtctcacagattcatactttataaaagaaaatttgg

SEQ ID NO: 915438 - DNA, 607 bp, Homo sapiens
aatgaatctaactcatttattgaaagaaaaagaaatctaatcataagatagatcaattgatcatttaatagatcaattcaaaaggaaatgaactattcaaatactagaagaaaacaaaggtaaattcctctctaacttatggtttggaaaatatttttacatatgactcaaattctgcattcaagaaaatgtagatatctctgactttaaaagattttaaaaaactttgttttccaaactaccataaaaaaccaacaagtgacaaaagcaaataacaaaaacttagaagaaacttgtaataacagagataaaggattaatgtatattttaagaatatgaaacactcttaaaattgaaggaatcaagaccaaaaccatacaggaaaataaacaaaacatgaatagggatgtcccaaaattatataatgacctttaaaacatgatatatttacattcacttataatagatgcatgcatctcaaaaccatgctgagwtaccacttcttgtctgtcagattatcaaaaattaaaatcttggtaacttattccattggtgaggctattacaaaacagtctcacagattcatactttataaaagaaaatttgg

SEQ ID NO: 915439 - DNA, 596 bp, Homo sapiens
gtgctagcaatcagtgagtctccatgggtgtaggaccctctgagccacgtgcgggatataatctcctggtgcaccgttttttaagcctgtyggaaaagtgccgtattagggtgggagtcacccaattttccaggtgccatctgtcacccctttctttgactgggaaagggaactccctgaccccttgctcttcctgagtgaggcaatgcctcgccctgcttcggctcgtgcatggtgcgctgcatccactgtcctgcacccactgtctggcactccccagtgagatgaacactgtacctcagatggaaatgcagaaatcacctgtcttctgcatcgctcacactggaagctgtagaccagagctgttcctatttggccatcttggctgccagacctgtgaaatcaatttttcttacaaaagtatagtgactcctactcttcttagtttctattgtcacaaaataactttctccttccctttattttcagtctatgtggatctgtataggtgaagtgtgtttcttataggcaatagagcaatgggtcttgtttttaaatccattcagccactctatgtcttttgattggagagttta

SEQ ID NO: 915440 - DNA, 614 bp, Homo sapiens
acaagattacctccctgaactataaaatttcccatacattgcatacacagagaggatgaaatagatatgatgatcgcagacaggaaaggaggaaattatgataaaaagttggagattctgttgccgacatctcatcagggtagtcagaggctggggtccgtccaaatacctttggataacaatggtggtaaccctggccggaaatcctcaggtacaccaggacttcttccagccccacatgacagctaagtcctccgtgaaaggaagctggttcaaacagggccagtatgcccagtgacccatgggtactgggggatgctccatgttctccctagcaatcctgtcccccaagtcttgtaaggctggcagccatgctaattatttttaaatggctgaaaggggccccgtatttggtttgatctggttctaaaatggaagccaagggcctcagaataaaaggacagagttggagtctgctcctctactcaccatctcgatgaatgttgtatgttgttatcccggacgagcccccattataaagcagctatgtctggggtgtaaacccagggtttgtcrtcacgcaccaggaaaatttaggacacagacacatatga

SEQ ID NO: 915441 - DNA, 426 bp, Homo sapiens
agtttgggcagtaaaagctattttgagaagggaatcaaaatgggaacctatatacatccctcccctagggtgcattatcagtatgatacactaccatcttcctggtgggatggaagagattacagccacggtacagaagcttgttgaagttaatattatatggccagctgagttctttcagtcttatgtgacaggtaaggaaacttgatggcacctggcacatgagagtaggcttccagaaattaaataaggtgattcctgagatacatgctggtattcctaatatagctcaagtgatagaacaactaatacaaactctargcacttgccatgctatattagacttggccaatgctttcttcattattgctttataccctgacacatggaatcaattcccttttacttggaatggtcaataatgga

SEQ ID NO: 915442 - DNA, 565 bp, Homo sapiens
tcttaacacttctttagctgcatcccagggattctgggacatttcctctttgttctcattagtttcaaagaacttcttgatttctgccttaatttcattatttacccaggagtcattaaggatcasgttgttcaatttccatgtagttttgtggtttttagtgagcttcttaatcttgagttctaatttaattgcactgtggtctgagagactgtttgttatggtttcagttcttttgcatttgctgaggggtgttttacttccaattatgtgatcaattttagagtaagtgtcatgtggcaccacgaagaatgtatatgctgttgtttttaattgaagtgttctgtaggtatctatcaggtccacttgattcagacctgagttcaaattctgaatatctttattttctctcaatgatctctctaatattgacagtggggtgttaaagtgtcccactattattgtgtaggagtctaagtctctttgtaggtatctaagaacttgttttatgaatctgggtgctcctgtattagatgcatatgtatttaacatagttagctcttct

SEQ ID NO: 915443 - DNA, 625 bp, Homo sapiens
accctacatgacttcaaactatactacaaggttacagtaacaaaaacagcatggtacttgtataagaactgacacataaatcaatggaacagaatagagaactcagaaatcagactgcacatctacaaccatgtgatcttcaacaaacctgacaaaagcaagcagtggggaaaggattccccatctaataaatgctgctgggagaactggttagccataagcagaaaattgaaactggatcccattcttacacctcatacaaaaactaactcaagatggattgaagagttaaatgtaaaacccaaagctataaaaaccctagaagaaaatctaggcaacactattcaggacataggcacaggcaaagattttatgatgaaaatgtcaaaagcaattgcaacaaaagcaaaaattgacagatgtgatctaattagactaaagagcttctgcacagcaaaagaaactatcatgagagtggacaacctacagaatgggaaaacacttttgcaacctattcatckgacaaaggtctagtatctagagtctacaaggaatttaaacaaatttacaaggaaaaaaaaacaacctcattaaaaagcgggcaaaggacatgaacagacagttc

SEQ ID NO: 915444 - DNA, 633 bp, Homo sapiens
tagcagagacaaagttgctgccttcttgggatgcaagtggcagcatgcaggcataccttctgtaaagtaaatgaataacataattttagataatgataaggttctgtgcttgagagtaatggaggaggaattttgaatagagtggtccaggaagaaagcatagagccacaccaggctgtgcactgccgaattccagtgccgtttccatagtccctaatacggataatgtcccctcaactgtgctacacagcagccctaagggttcggggaagggcctctttgaagagatgacatttgagtggagtcctggttaattaaaaagttatcatccatataaccctctgaggtagaagtgttcaggcaaaaggaaccaaaaatcccaaggcaggtaggagtttggtgagtttgtgaacaggaagaagaccttggtggctggtgtagcaaaacgtgaagattgtgttagatgagattggatggcaagcagaagccaaaccatgtgaggccttgcaagttatggtaagcagtttkgcttttactctaagtgttctgaaaaacttccaggggtcctacttagaaaagtgatctgaagtgatctgtgaattgaaaagatcactttggctattctctgtagaa

SEQ ID NO: 915445 - DNA, 653 bp, Homo sapiens
gatatgatgcatcttttcctcaaaatattttaatgtatagttcctaaaaataaggcttttaaaaatataaccacagtatagttttttaaaaaaatgaaatgaatgttgatgtaatatctaatttacaggtatgcaaatcttatcaattatcaataatgttccttatcctgtattttcatgtgagaacttatcaagtattgtaagtggcagctaaattatgagaacacatggacatatagaggggaccagtacacgctagggcctatcagagggtggaggttgggaggagggagaggatcaggaaaaataactaatgggtactaggcttaatacctgggtgatgaaataatctgaacaacaaaaccccatgacacaagtttaagtttacctgtgtaacaaacctgcacatgtacccctgaacttaaaaagttaaaaaaattatcaagtattatgtcagtagcttttcctcaaagttccagtctgtctcattcttttctacactgtatttatctcccatttcacttggtggcataaaaaaaaaaatcacaagcaaggcctckggtctgacttcaagttgataaatacgttaaataacatagggccacatacagagcatgacgggacacttcccgtgtaggttgataattctgctg

SEQ ID NO: 915446 - DNA, 578 bp, Homo sapiens
tcaattgttgtattacaggcatagcaaggccaaggcagaaagagagagccagggcaaacaggctgctcagtggaacagtcagaatacaaacatcatttatctattagttttgttgtcttacacgggcttgtttgtggcaacccaaaacaattacaatagtaacatcaaagatcactgatcacaaatcaccataacagatataataataatgaaaaagtttgaaatactgtgagaattactgaaacgtggcagaaagatacaatgtgagcacaagctggaaaaatggtgccaattgacttgttcactatagggttgccacaaccttcaatttgtaaagaatgcagtatctgcaaagtgcaataaagcaagacatgataaaatgagagagttatgcctgtaatggccttttgtgtgtattacaagctgaagaatttatttacatattcaaaaataaataaataaatattcaaaaaactaagtacaaatgtctacttctaatgtatgactatagccaatcttcctyagaactataaatgtaattttctccaggactgcttcaagttcacttagttttcagc

SEQ ID NO: 915447 - DNA, 622 bp, Homo sapiens
gatcctatgtgttcatttttgctttggctgcctgtgctttttgtgggaaaaaaaacacaaaaactaaaacaaaaacaaaaactaaagagtttcctcgatgtttaattttagttgtttcatagtatgtggacacatatttaagtcttcaatccatttttatttttatatacagcaagaattaggggtctagtttcactcttctgcatatggatagccagttttcccagcaccatttattgaagggactgttctttccaccaatatatatatatatgtatatattcctggcacctttgttgaaaatgaggttagtgtagatggatcatttgtttctgggttctctattctgttccattgttctatgggtctgctttcatgccagtaccttgctattttggtgactatatctctgtagtataatttgaagtcaggtaatatgagtcctccagtttcgttctttttgcttagaatagcttgtctattctgggtcttctgtggttccatataaattttaggactatatttttctacttctgtgaagaatatartaggtattttgataggggttgcattgaatagagattactttgggtagtatggacattttaacatattgattctt

SEQ ID NO: 915448 - DNA, 634 bp, Homo sapiens
aaacctagggaaaaggggtgtgtgtgtgtgtgtgtgtgtgtgtgtgtgtgtgtgtgtgtaagagagagagagagagagtgtgtgtgtgtgtatatgcacattcacatgcgttgatrccagggaagaatgagtcttagtgaccctctgaagttacactggctattttcatggccgaattaggaagaccagaaggaagatgttgatgttttctgggaaagatgattcagaaaaggtagagtaggtgtttggaaagacaacatgagacttccgctttgaaaggaagcactttaaccaacatttttgggtatttactcctaaaaacatgtgtgcttccaattatttttggaaatgttcaatgcaggtcttgctcttggctgtatgtacagcatcccctgggaacgtgatgttccactccttcatttagaattcaaacactgagataatgcactgctccagtctttatttctcttctcactggtccatagaaggcagaagggaacaagatagtatagatgatgaaatgttataagaagaatgttgaaaaatatgtctctactcagaaatttagtagatgtaaaataaacatactgaaacaaaaacagccagaattactgattaatggcagcaaatttca

SEQ ID NO: 915449 - DNA, 376 bp, Homo sapiens
ttgtctgtaatcagagtaccaacttctaccctcttgctttttttttccatttgcttgatagatatttcctcatcccttttctttgggcctgtgggtgtcattgcatttgagatgactctcttgaaaatggcatactattagagcttacttctttatccaacttgtcactttgtaccttttaaggggggcatttatcccatttacattcaaggttaatattgatatgtgaatgyttgattatggcattgtgttgttagctgattggtatgtagacctgattgtataattgctttatagtgacagtgggatatgttgttaagtgtgttttaatggtggcaggtagtagtcttttattttcaggtttagcattgtctta

SEQ ID NO: 915450 - DNA, 585 bp, Homo sapiens
tctagatcaggagagaaaacaaaagcratgaggttaaatgacatgccccctaactcacattgttagctaatggtagagtcaaggtgagaacagccaggtgctgcctggtagtcttccaagctggtttgtgtaatcacactcaaaggtataatgagatatgaaactattttctgtcagataactcttatccatttgggaagcttttctaatgaaaagttcaatgtacatcctccaaagtacttggcacacttcctggaaaatggtatttagtgctacctgggcttttaaaacacacacagaataaagtgtttcactctgtgtagctttggattaaaaaaatgaactggccattgcctgatgaagtatgaggccctgagatatccacgagggcagactaatatccagaaaaaaagttttttttatgagtgactacctgtattacctaaggaatatgtctttaaaaacactgccaacagacacccattgatttcttctcagtcatgatcacttgagtggcaggaagaagcccaataaaacagccagccaacagataccctgcgagtgccaccaaggtgatagcatgtg

SEQ ID NO: 915451 - DNA, 410 bp, Homo sapiens
gagagcgtgcaatgcagatcaacaaaattgcctttccaacccacagctaattgcaatcacataattgagcccagctgaaaccctcaacattacccagctgactattattgttagcaataaaaaatgccttcaggatggagtccagtataaacatactcatccctctcactttagtctctaacttcccttctcccaaatcagatactattgcttaaacttcaaaagcaaaaaaaaaaaaataacatgcatcaatattctggaaattcgattatgaaataaaacagaatatatgctgtgggcaagaargaatatttaaaatgcttggcctatacttctgtggctagagatgtgatagttcccttaaagtctgaatgtttcaaatagttaagcgcttgaatatatttcattat

SEQ ID NO: 915452 - DNA, 668 bp, Homo sapiens
tgtttatttttgaagttttgtagtttttgttagtgaagggatcttccgcatctatttctktttgtatttttggatttcatcacaggtttttaattgttaaaaattccaatagtcattgttgctggtacatataaaaaaactgaattttttatttgacagttgggtcctgtaaacttgctaagtttcttattctaaccatagttatgtctgtagattctttagggttttctgaaacactatcatgttacctacaagaaagggtagctcattaattcgaaagatataggagtgttttagtttttctttgtacatttcaggaaggttgtcctttccctgcattttgcctaatgcatcttagctgtcaactttactgaaataatgtatttcacaatcatacttttctaaccttttaaagtctaaaggctctgtggaatgattatttgttttataatttatgatactggcaatttgaatttatctttgttttctcttgaacattcttgttaacagtttatcagtttcattataaaaggaccaattttgggccattttaattttctctattttatgttttacattttattggtttctgatctgaaatttatgtccttttgtttacctaccttggcttttttttactcttcttattctagcttcttaaggtgaag

SEQ ID NO: 915453 - DNA, 600 bp, Homo sapiens
ttacaagtacacaattaaattgccaaatagaattatcctgttgaattctaattttgataatgaaaggggaaaaagacactaaaccttgcagcaagtaaggtgtgaaaaaataatagacttggctacagactacattattcccctgtgttcttcagtaggtgtgtctctatcagtctatagcttcaatatgacagaactctggaatcagctggaagtggtaatgtgaaggagacatgtggaatgttcagcaaagttggtgtttagaggaaactcaaactctctgcacacatcctcctctactcccagatgtgtataaatggaatcatcctatctacatttgaggtgtagtaatgctacagttttcctaccagtgaattatcagaaagtttgggtttgtatctctacttgtccccttgttctctgtaatttaagtttgctctttaccatcagatctagagactttgagaaatccaatgtgtttttttcttccgagttttcttttttcttttctttctttccyttttttttgttgttttttttttgtttgtttgttttgtttgttttgttttgtttattaggatttggtctgtgtttgtttgg

SEQ ID NO: 915454 - DNA, 613 bp, Homo sapiens
tctatattatgtttaagcatctttatattttggtcatctgctttggatagtgccatacttctctaacaactgagataatgagaagtctatgtggaactgtggaaactgtagccactaggaactaattccatatgcgtggatcagccatccatttcatgtgttttatgatcacacatagttgcatgaggtatctacaataacgttcagtgagagaagcattgcttttctggaccacgatgtgagtatttgaagccactgaaaacagatattcattgaaaattcctgtgatatgttgaaatgtagctaatgtcttaaatctatatgattttcttgaaggaattctaactgggaaagataagctagcaagcatgaaaatttttcagaatatggaatgtatatttggttttaatatatagcctatttttttctttttccgtttgccaaataagaagaaaaacatgtcccatattacatgtatagtaaaccaatagatttataataataascttagtttatggaaagttatttttatatgatacattagtaaaagtgtacaattactttcagatatatttgattagagagtttaaaattgcagatcatgtcaagtgtg

SEQ ID NO: 915455 - DNA, 555 bp, Homo sapiens
gtttttttttaaaaaaagaggtgaagttttaatagcatcaggaacaaaaataccattgtaagccagctctcattttttgacattttttggtatcatctggacaaggtcatttgtcacagggtatgactctatccatgatgctacagacatcatagaaagtccaatgatgaaaacaattttccagaatgaaaaatccctgggagactagaagtcttatagttcttgcacaattgtagaagatctttggttttacaccatgagttttccaagtctttgatcctgtgtaacttactcagtgtagtataactatagtggttttctttaattcacttcctcttcaaaagaacaaatttttataatggggtctaacactgtaaacatttcataatattgtagcttcaaagaaggcaggctgtaaacacatttgcatccagttagctgacggtttatagatctgagggactcttgggtccwtgctttccatgaggaagcatttatttcattggctttgcctctgaagtgcagttcccatcaacccactcagagaggaagtgc

SEQ ID NO: 915456 - DNA, 658 bp, Homo sapiens
tttactgaggttacactatcaggaaggcactgcatgctggctatgagatgcccacgacagtctcctggatctgaagaaaacacaygcacatgatggcgatacatgtgctaataaatgtacactaaggccaaatgtggaaagagccatgacgactacaaatgctacatgccaaagaaatgtagaggatgaatgaattactgccatgtggcgttatcgaggagggcatcatagcagaggtgaccctggagatgctgaaccctgaagcatgccaaagtttttaagtggatccggtatggatggggcacccaggcattgtgcaacacaaaagtgagggaaagaacaaaaccaaagagcatgtcaaagtactggagagatgtctttaattctatttgtagaattagaaatgtcatgatattatttagctttctgaagatgaggtctcttacagggtacatgtctattgctcaatttctgcacatagagctacaaaagcaatggatgactatactcagagacaatgccattctgtctcattatctgacctaaatagcttctcctccaccatcttcatctaccacctctgacacttccacaggtgtcagccttgccaacactgccattggaagtgtttctgcacctctcttctgtgcttccatag

SEQ ID NO: 915457 - DNA, 619 bp, Homo sapiens
aagctgtttgtcaacagcatttgcagagagcgggcaacaggcccttcattaaagagagatcttggtgacacatcacagtgtccaacccattctactcctcatgttgcttgaatcctctctttcatttatatgaagagggcagcatgtccaaaatctagtaacctatcttcctgggggaaatttacaaaaagattggtctacagctggtctcaactaatactgatactctccctcctctattatctattccagattcctctcacccttggctggcacttctgccagtttcagttacttaactattggcctgaacaatcgttcctgaagggtctgaacccctgagcctcacagtggggtggtggctgcattgtacatttactgtcacaactggttgagaaagcaccaagaggcacccagttgagcagtacctcaactgggtaccaaacatatttctgcctttccccattttgtaactgcatttcctattcttgatcatcagagttaattacccaagatctgacttcacttcttgtmtaatgttccctatgaataataagcttgaattacccagatattaaccacagcatatagttcaatgatcatttttatgtacccctgg

SEQ ID NO: 915458 - DNA, 601 bp, Homo sapiens
tccagtcaccccttcgttcactgacaggatgggacctcgaagctgctactaccagaggctgcctctggggatgtgacatttgggacttgccacgccaaaagaatgtgggagatggggtgagagaaaaaggaactaaagagatggattagaggtctctctgtctgcctctgccttccagataagttgcagtaagagttttcatttatatctcttctatagtctaagactggtgaaggacatctgaaagtcacaatgtgtttttaatacattttccttaccctcgaatctcagttgtgctgctgtgttccctgcagccctcttaacagctgatcatgggctttctctctcctctaactacataaagaatgcctgcatggttaattttataactgagggaaggggaattgtgctgtggtaaaaatgcaactcatcgctcccaaatagttcaaccctctccctccactcatcttgcatataaatttgctaaaaattgtagcactacaataaggattgcrtacatgctagacagcttcagaaatcgtagccataaaaaaataagcagtaatcaataatagttttttttaaaaaaaatgcttaacac

SEQ ID NO: 915459 - DNA, 636 bp, Homo sapiens
tacatgcaattaccatgtaaaaacagaccatgaagttgatgtaaaaaatgacaaaatcactaagtcaccmaaactagaaaaaaaaaaatgaaatggaaactgagaaaagacagttaataaaacataaggaacctaacaaagcagctttaaaaataggccatactaatccttccattttcaaaagttcttatcaagtaattccaaaaactgccatttataaaatgacattctaaaaatctacacttggaatttcaaagtatctcaattcagaaagctttgactactgtttctccccagcccacaatttcaaataatgcaggaaaagtattgacgtaaggaagaaaatactccaacagaatgttatagtttttagaaaaatgaacttactgctttccagaaccttttaagacccacagtcagcattaacaatcatttttcctattttcatccattattttccaatatcatgttagagatgaataaattctttgagcccataactaaaagatcaacaaacctggttttattatgacaccatatttttgtcattggtactgcacaaaattatatacaaagaaatatatacaaaatgttcaagtattagttaaatttcaattcaaggcttctgtttcaaaa

SEQ ID NO: 915460 - DNA, 605 bp, Homo sapiens
tcccattctgtaggtcgtctctttactctgctgtagttcctttgctgtgaagaagctctttattttaattagctcccacttatcaatttctggttattttctcccattctgtaggttgtctctttactctgttgtagttcctttgctgtaaagaagctctttattttaattatctcccacttgtcaatttctggttttgttgcaattgcttttaaagtctttgtcctttagtcattgtcttggctgagcccagaatggtattccccagattttatcctagggtttttatatttttacattttacattttgctcgttaatccatcctgagttgcttttcgtacatggtgaaaggtaggggtccagttttattcttctgcatatgtttacccagttatcccagcagcatttattgaacaaggagtactttccctattgcttgtttttgttggctttgtcaaagatcagatggttgtagygtgcagctttatttatgggttctttaatctgttccattggtctatgtgtttgtttttgaaccagccatgctgttttatttactgtagccttacagtacagtttgaagtcaggtagtgtgatgccttca

SEQ ID NO: 915461 - DNA, 695 bp, Homo sapiens
aatgccatggagcttagtaaacaagttgtaagaaatgccattcaaaatgtttattttcagactgttcctagtgactgcaaatcagccagttgaacgtgtttgcatcttgctgatctgctccacctttggaaatgcacttttttctttagtatagatacagtctgtgttttagggacacaaatcagaggaataacagaaccagtattactccattgagtcatggcctttgattttcaatagaagcagcctgcttcattttgtcactgagttcttttcctagctcccatctgaaaggaaagaagaatacaaaaatgaatgataaaagccagccctctgatggaccagggcagggaacacagtgtcaggatggcgtttcataatgataagaaaaaagtaatttgctgatctaggtgagtgctttatcctctgtgcgtgtgtaacctgaagagggtaaattactttttcctggtaccacttggtatccatgaggaggtaatttgcctcataatgtcaagacaccctgctgctgtgaaagtggttatactcctggcttgctacaaggagagtgtttggctcacggtcgagctgatcccttcataaatcacccmatccaaggctgagatatttcaggacatacaagcaagtgcagaaatgaatagatgctttttttttaagggggtggttgcaagtatgtt

SEQ ID NO: 915462 - DNA, 601 bp, Homo sapiens
tatcatgaggcttgcaaataatatcttatagttcagtattttaaactgatgacaacttaacactaattgtataaaccagcaaaaatataactaataaaaactgtacattttaacctcatctctccactttttaactttttgttgtttatatttatatcttattatactatgtcttgaaaagttgttgtagttattatttttcaaaggttcatcttttagtctttctatgccttgcatagaaagtttacatactacagttatagtattataatattctgtgttttttttgtttacttactattacccctgaattgtgtacctttggattatttcttattgctcattaacatccttctttttaagattgaagaaatccatttagcatttattataggacaggtttggtgcttatgtaatcccacagcttttgtttgtctgggaaagtctttatttctccatgtttgaagggtattttccctagatatactattctargataattttttttccttcagcactttaaatatgtcacgctactctctcctggtctttaagatttccactgagaagtgtgctgccagacatattggagctcctttgc

SEQ ID NO: 915463 - DNA, 597 bp, Homo sapiens
tggtcctgggtgctccgctgttaaagctgttaacatcactaataccgcaatcactgtcagcatcaaaatcgatgggattgcgtttttttgttcccctttacttaaacaaaactccacatttctgtaattctgtttccactcatttaactgaggtttttacctacctcactggaatgttttaggttcacattagtaaaagtaatcactgaaaggaccttgcactgccagtagttactgagagtctgttcttaatgctaaagctcagacaccaatttcccaaaatatggtgctttgacatgctaaaccgaagaagccagggggtctctctgaccatacccctctcttccagctcctctctctcaatcctttgtctctcccatagcacagaataaagctgttctctaaagttcccttatctgcctaaagtccagaactactaaaggcaaaaacaaacaaacaaaaaaaaaaagagtttcttycctgagttttcattaaccgaactattatctcaggaagaaggactgcagtctgtcaatacaactggcagccttctgtaacaaaactctcgtctgccctgtagggccaacagactttgtc

SEQ ID NO: 915464 - DNA, 607 bp, Homo sapiens
agtttagcagttagaaaaataattgggaaaagacaaaacttcagtcatggctcattcttaatctctttagtaatataatacagtctgtactataatagtatgagttaattttttctttaaatgatgggctgttattttacttaaagggcagtgagaggccaggcactgtggctcaagcccataatccagcactttgagaagcctaggagggaggatcctttgagcctaggagtttgagaaccaatctgaaagagatcctgtctctccaaaaaaaataaattagctgggtttggtggtgtgctcatgtagttgcagctactcaggctgaggcaggaggatcttgagattgactttttgaaaaaaaaggacaaaggcagtgagatgagaaaaactaaatattttatcctaaattcatttggtggtattataacaattatgaggatatcagtttttacatacttttcttttttttaagaagaaaagtccctctcttacccaggctgtaatgcagtggcattatagctcactgcagcctttaactcctgggctcaagccatcctcctccctaaccctccccrgaactataggtgtatgctactatgactgt

SEQ ID NO: 915465 - DNA, 528 bp, Homo sapiens
tgagacaaaacaatactgaaactagccaattaacaaccctacaatggcctgtaagtattcaagtgaaagagtcatgcctctctctctctttaaatcaaaagctagaaataattatgcttagtaaagaacgtatactgaaagctaaggcaggccaaaagctagaactcttgtgccaagcagttaaccaagttgtgaaagcaaaggaaaagttcttgaaggaaatggaaagtgctatcccagtgaacacgaatgataagaaagcaaaacaaccttatcactgatgtgaagaaaattttagtagtttaaataaaaaatcaaatgagccacgacattccctcaagccaaagcctaatccagagcaaagccctaactctctgcactctgtgaaggctgagataggtgaggaaactacagaagaaaagctggaaactagcagaagttgrttcatgaggtttaaggaaagaagtcatttttataataaaagtccaaggtgaagcagtacgtgctgatggagaagctgcagcaagt

SEQ ID NO: 915466 - DNA, 607 bp, Homo sapiens
agaaactatcacgagaacagcatgggaaagacctgcccctgtgattcaattacctcccaccagttccctcccacaacatgtgggaattcaagatgagatttgggtaagggcagagccagactatatcattccaaacctggcccctcccaaatctcaggtcctcacatttcaaaaccactcatgccttcccaacagtcccccaaagtcttaactcacttcagcattaacccaaaagtccacagtccaaaatcttacctgagacaaagcaagtcccttctgcctataagcctgtaaaatcaaaagcaagttagttacctccttgatacagtgggggtacaggcatcggaataaatacacctattcaaaatgggagaaattggccgaaatgaaggggttaaagggcccatgtaaatctgaaattcagtgggacagtcaaatcttaaagctccaaaataatctctttgactccatgtctcacatccaggycatgctaatgcaagaggtgggttcctatggtcttgggcagctccaacactatggctttgcagggtatagcctccctcccagctgctttcacaggctggcattgagtatctggggcttttcc

SEQ ID NO: 915467 - DNA, 643 bp, Homo sapiens
gtgtttgattttctgttcctgtgttaatttgctgaggatgacagcttctaactcyatccatgtccctgcaaagaacatgatcttgttcctttccatggctgcatagtattccatggtgtgtatgtaccacattttctttatccagtctatcattgatgaggattaaatggttaattttatgttatgtggatttcacctctattaaaaaagcattggatcctaaatttcagcccccaccccaaaaaaaagtagcagaaaatttgatttgagtgatcttgattagcagtataattaaaattaggctactctggtaaagtacatgtattaggtaaagggtacatgggaactgtctgttattatttcttttcttgattgatacttaataaatgtacatatttatagggtacaggtgttattttgatacatgcatacaatgtgtaatgatcatatctgggtatttaggatatccatcacctcaaagacatcatttctttgtattgggaaaatttcatatcttctcttccagctattttgaaatatactataaattgttaactatagtcatcctactttgttatcagacactagaacttcttccttctagataactatatgtttatacccattaaccatcctcctcatt

SEQ ID NO: 915468 - DNA, 643 bp, Homo sapiens
gtgtttgattttctgttcctgtgttaatttgctgaggatgacagcttctaactctatccatgtccctgcaaagracatgatcttgttcctttccatggctgcatagtattccatggtgtgtatgtaccacattttctttatccagtctatcattgatgaggattaaatggttaattttatgttatgtggatttcacctctattaaaaaagcattggatcctaaatttcagcccccaccccaaaaaaaagtagcagaaaatttgatttgagtgatcttgattagcagtataattaaaattaggctactctggtaaagtacatgtattaggtaaagggtacatgggaactgtctgttattatttcttttcttgattgatacttaataaatgtacatatttatagggtacaggtgttattttgatacatgcatacaatgtgtaatgatcatatctgggtatttaggatatccatcacctcaaagacatcatttctttgtattgggaaaatttcatatcttctcttccagctattttgaaatatactataaattgttaactatagtcatcctactttgttatcagacactagaacttcttccttctagataactatatgtttatacccattaaccatcctcctcatt

SEQ ID NO: 915469 - DNA, 589 bp, Homo sapiens
  misc_feature 543, 544, 545, 546, 547, 548, 549, 550, 551, 552, 553, 554,555, 556, 557, 558, 559, 560, 561, 562, 563, 564, 565, 566,567, 568, 569, 570, 571, 572, 573, 574, 575, 576, 577, 578,579, 580, 581, 582, 583, 584, 585, 586, 587, 588, 589: n = A,T,C or G
gtgccaaatgctgtttagatacagggatttaggtataagcaagaaggataaaaattcctggccatcagaaacaaacttcctcaggaatagccattggcagatgctgccactaaaagctagtgtcaatggagaactactaatggtggtggctctgtccctgggtccatgaatggtgcacatggacagaagcacctgcagaggaaatcctgaggtctctccaccactccaatgtgagccatccaagattcaggggaaagagtggcggtcactgattttttaaaaataaaatgtctttttctataaaaaagttgtgacttgattcccaatgttagtttaccttgattaattctccacatctgtgcactgttcttctctcttatattacttatcacttgctagcttatcttacggttaacttttcttaaaaggaatatagactagaaggaagtagaattatcattgctggaaaatttattaaagatatccrtgctttagtaagaagtctaagatagtttttaaaggttgagtgactcagtaataacnnnnnnnnnnnnnnnnnnnnnnnnnnnnnnnnnnnnnnnnnnnnnnn

SEQ ID NO: 915470 - DNA, 658 bp, Homo sapiens
actccatgtctcatattcagggcaygctgatgcaagatatgggatgccacagccttgggcagctctacctctatggctttgcagggtatggcccccctcctgactgctttcacgggctggcgttgagtctctgtggcttttccaggctcacagtgcaagctaccggtgaatctaccattctgaggtctggaagacagtggtccgcttctcatagctctactaggcagtgccccagtggggactctgtgtaggggcttcgatcccacatttccctttctcactgggctagcagagattctccatgaagccttcaccccttcagtaaacttctgcctgcatatccagacatttccacacatcctctgaaatctagttagaggttcccaaacctcaattcttgacttctgtgcaccctcaggcccaaaaccatgtgtaagccatcaaggtttggggtttgtaccctttgaagccatggcctgagctataccatggccccttttagtcatggctgggacacagggcaccaagtcctgaggctgtacaaagcagcaaagacctagtcctggcctatgaaaccattttttctttctaaggctctgggcctgtgatgagagggactgctgggacaacctctgacatgccctggagacattttccc

SEQ ID NO: 915471 - DNA, 647 bp, Homo sapiens
ggctttctgaaataaggcattcatacaaaaatagagaaaaatgaatgaaatggaatgaacagaacctctgagaaatacaggattatggaaagaaaccaaatctatgactcactggtgtgtccctgaaagagatggccagaatggaagcaacttggaaaacatatcttaggatatcatacataagaacttccccaacctagctagagaggccaacattcaaattcatgaaatgcagagatccccacgaaaaggtcattcccgagacacgtaatcatcagattattcaaggtcaaaatgaaaaaaaaaatgttaaagacagaaagatctggtcacctacaaaggggagctcattagcctaatagtggacctctcagcagaaatcatacatgccagaaaagattaggggccaatattcaacattcttaaagaaaagaaatttcaaccaaaaatttcacatttggccaaactaagcttcacaagcagaggagaagtaagatctttttcagatgagcaaatgctgagagaattcatcaccaccttacttgccttataagagctcctgaaagcactaaayatggaaaggaaacaccattgccaggcattacaaaaacacatataactatacagactagtgacattggaaagca

SEQ ID NO: 915472 - DNA, 610 bp, Homo sapiens
gttctcatttttaaattaagtcattgcatattgtttaaagtcaactttatttcatttttatttatttatttatttgtttgtttgtttattatagagatgggcatcttgctgcattgcccaggcaggtctcaaactcttggcctcaagtgcttctcccaccttagcctcccaaagtgttgggattacaggtgtgagccatcatgcccagcctctacttaccttaaatagcaaaaaatttttcattgcaggttactaattcatagggaaattattttttttccattgggaaaatgaggaaagctttcactttcattttgtggaataagtcaaagtacagacttcaagctttaaaaacactgattgagatggatgtatattgagccctttggtctactcagcttggaacattctcagcctcctgatacatacaattatcccaagtacaatgtatttatgtgtgtgtatgtatacatatgtacatatatgaataatatgtctacaccaagtacttgawtttttttaatatttccagaattggaacagcaagtgaaaaggttggaaatatgccagaagtctagaactgttatttcatctagaaaagaagaaaacg

SEQ ID NO: 915473 - DNA, 639 bp, Homo sapiens
tttcttaagcttattgttttcagattctacataatttccttcaagagtcgtaatttcaaatatcatgaagaggtaggcaagaccacagaggtgggtctgggttagacctttagcaagaatgaccagttaggtaaggtttaagcttgttttcctgtcattttactatctaaacagtgtacaaggaatgcaaataatgtatataaggccaagaatacaagcaaatgtaccatcatttttactgttccctagttctaaacagtgtgccaatggagttcagtggttttagccacttggtcagaggaagccagaactttgacttaaatttaagacctgaaactgtgaaactactcgaagaaaacaatggggaaaatctctaggacatttttctgggcaaaaatttcctgagtaaaataccctacaagcacctacaggaacaggcaatcaaagcaaaaatggataagtgggatcacatcaagttaaaaagtttttctgcgcagcaaaagaaacaatcaacaaagcaaacagataacccacataatggaagaaaatccttgcaractacccatctgacaagggtttaataaccagaatatataaggagctcaaactactctatagggaaaaaacctaataatctga

SEQ ID NO: 915474 - DNA, 651 bp, Homo sapiens
atgaacaaattttcagtaagtccactgaatcatgttktataggattttcaaacaatttgttttgtttcgcagggtagtcaagaagtttctatatatccgtgagagattcaaggtcaagatccatgctttggtttacaaatctctctgttgactctgtctaagagcactcataatgcattaggatctatttagttgcctgacttcacccatagactgaatgtctagaaaacaccccaacttctggcaactgctgttctttttattattctataactttgccttttccagactgtcttataaaggaaatacaatatcttgctttttcacatcactttacttataagtatttatgattcatgtataattttgcagtggcttgacagctcactctttttcattgctgaataattatctgttgtaagaatgtaccacaatgtgttcacccagttacctattgaaggattctgattgttttcaattgggggcaattatgaataaagctgctataaatatttataggaaagctttttggttgacttacattttcaaataagttggataaatatctaaggacttcattgctggattgtatggtaagattatgtctagctttataagaaattataaaaatgtcttccaaagtgattgtac

SEQ ID NO: 915475 - DNA, 614 bp, Homo sapiens
caaaattgcagctcaacaaagccaagggagctgctacctctaccaggatttgcagacccaagaaactgctgctgtggccactagctctagaacaagccacctctgccataattgggtggctgccaaatcarggtcaagtgctttattgagaagtggtcagctctggaactacacagcttgttgatatatatcgtcaaaatagaaattttctgcactctgcctctcttcccaaataatttagtacttttagaggcttatataagcaatattattggtggatcctaaatcatatatgggatgccagttatacagtggagcagaaaattcagctttttaaagcacgctaatctgtcttttccaccgagaatggaatgccaaaaagtgttgaacacagaatctgacgtatgccccttcattgtgcccactaggaatttatgtgtggcactcaccccctgcagcagataaggattataatattattgcagcatgtctgtgatttttaatcagctatatcagcagggcctatctcacagtactgttataatctcaaataaataaatacataaaaatacttcaaagtgtaatccacacattaaaaactctaaaataactgt

SEQ ID NO: 915476 - DNA, 619 bp, Homo sapiens
ctcatatgtgtctgtgtcctaaattttcctggtgcgtgaygacaaaccctgggtttacaccccagacatagctgctttataatgggggctcgtccgggataacaacatacaacattcatcgagatggtgagtagaggagcagactccaactctgtccttttattctgaggcccttggcttccattttagaaccagatcaaaccaaatacggggcccctttcagccatttaaaaataattagcatggctgccagccttacaagacttgggggacaggattgctagggagaacatggagcatcccccagtacccatgggtcactgggcatactggccctgtttgaaccagcttcctttcacggaggacttagctgtcatgtggggctggaagaagtcctggtgtacctgaggatttccggccagggttaccaccattgttatccaaaggtatttggacggaccccagcctctgactaccctgatgagatgtcggcaacagaatctccaactttttatcataatttcctcctttcctgtctgcgatcatcatatctatttcatcctctctgtgtatgcaatgtatgggaaattttatagttcagggaggtaatcttgtttgg

SEQ ID NO: 915477 - DNA, 622 bp, Homo sapiens
ttttctgcataaggctagccagttttcccaacaccatttattaaataggggatcctttccccattgcttgtttttgtcaggtttgtcaaasatcaggtggttgcagatttgtggtgttatttctgaggcctctgttctgttccattggtctatatatatttgttttgatatgagtaccatgctgttttggttactatagcttgatggggatagcattgaatctacaaattactttgggcagtatggccattttcacagtattgattcttcttattcatgagcatggaatgttttcctatttgtgtcctctcttatttgtttgagcagtggtttgtagttctccttgaagagttccctcacatcccttgtaaggctggttcaacatatgcaaatcaataaatgtaatccatcacataaataaaaccaatgacaaaaaccacatgactatctcaatagatgcagaaaaggccttcgatgaaattcaacacccctttacgctaaaaactctcaataaactaggtattgatggaaagtatctcaaaataatgagagctatttatgagaaacccacagccaatatcatacttaatggtcaaaaactggcaacattccatttgaaatc

SEQ ID NO: 915478 - DNA, 622 bp, Homo sapiens
ttttctgcataaggctagccagttttcccaacaccatttattaaataggggatcctttccccattgcttgtttttgtcaggtttgtcaaacatcaggtggttgcagatttgtggtgttatttctgaggcctctgttctgttccattggtctatatatatttgttttgatatgagtaccatgctgttttggttactatagcttgatggggatagcattgaatctacaaattactttgggcagtatggccattttcacagtattgattcttcttattcatgagcatggaatgttttcctatttgtgtcctctcttatttgtttgagcagtggtttgtagttctccttgaagagttccctcacatcccttgtaaggctggttcaacatatgcaaatcaataaatgtaatccatcacataaataaaaccaatgacaaaaaccacatgactatctcaatagatgcagaaaaggccttcgatgaaattcaacacccctttwcgctaaaaactctcaataaactaggtattgatggaaagtatctcaaaataatgagagctatttatgagaaacccacagccaatatcatacttaatggtcaaaaactggcaacattccatttgaaatc

SEQ ID NO: 915479 - DNA, 601 bp, Homo sapiens
gaggctcctagaactctagaccatcaaataaaaacttcacttaagatttagcttatgaaatgtgaattaacgtcactctggcatttcgtaatgtgggacccaaggcaagttacctaaataactttgagaaatatttcccagataattaagtggatgcaatgatattaaagtctttcttatagggatgctttgaggtttaattgtaataactttcatgtgagtaactactggggtgccttatacatttttaatgagaaaaatttaaacgtttctctctttatatatatatagtttatatatgctatatatttacactatatatactatatacttatatatagtatatacttatatttatatacacttatatacgtatatatacttatatttatatatacaagtatacatatatatataaatactatatataatatgtataaatactatatatattatatataaatgctatatatwttttatatatatatatatatatatatagtatatttatatttacttttgcaactaccaaccggtttactcaagtagatctcttcagttctctggttcttcattttgccagatgtgaagtgagaaagtt

SEQ ID NO: 915480 - DNA, 603 bp, Homo sapiens
aataaattcttccagattctaaggacttcaactaacactttcaaatgaatatgaatataatccacaagagagaggtgggaggtcatgattttatgtccataatgctttgttttaatgcctaagcatatggtttctttcagcatttcttgaaaaatatatactctctgattcttaaacagaaatactttatttgttgatttacagtgttttccttttcttccatactcttccctactttttcctaatatgcaaaaaaagtgtgtgtgtgtgcgtgtgtgtgtatctccttcattgtaatacttcatggcacaataatctcaggacattacatttctgttgcttcatttcactaagcgtgtttgggaaaagacaatactaaaatcttggccaggtgtggtggctcacacctgtaatcccagtactttgggagactgagggaggaggatcgcttgagcccatgggtttgagaccagcctgggcaacaaagtgagacctcatctccacaraaaattaaaaaattagctgggcatggtggtacatccctgtggtcccagctacatggaaagttgagacagaaggattgcttgaaccccaggagttcaa

SEQ ID NO: 915481 - DNA, 694 bp, Homo sapiens
ttcccctggcccccccataacctactttctttttcttttccttttttttttttgagatggagtytctctctgtcgcccaggctggaatgcagtggtgcgatcttggctcactccacctcccgggttcaagcgattctcctgcctcagcctcccgagtagctgggactacaggcgcccaccaccacgcccagttaattttttgtatttttagtagagacagggtgtcactgtgttagccagggtggtcttgaaatcctgacctcgtgttcggcccgcctcagcctcccaaagtgctggaattacaggtgtgagtcactgcgcccagcctctactttctttctctatagattttcctctatagattttctggatattttgtataaatagaatcatataatatgtggacttctgtgactggcttttttcacttagcataatgtttttgaggttcattcaagtggcatgtatcaatacttcatttctttatatgaccgaatattctgttatatggatataccacattctgtttatacatttgtctgtggattccttaagattttctttaaaaaaaaaaaaatgttttaccaaatacccagacttcaaggaggaggattttccatatgtaagactgtgttatctgtgaacagagatattttcatttcttcctttccaatctggataccttctattgctt

SEQ ID NO: 915482 - DNA, 603 bp, Homo sapiens
gcaaaagactaatttccaatcagaataaatatctagcataattactatatagctaytattttgctcataaagtacaactttttcttttatctgttttactatatattttatatatcacactatataaaatttataattctgatttgatacttttttatatcacattatataaagctcacagttccaatgtgtgtaaaaacaaccattgtatttttataagggaattaaaatatatgtttgtgagttaacaggcactcaaacaaggtctttgtctaatattaagcatgtaaggtatgtaagacataattttgagtgtcaaacctattcaatattgcgataccttgggaaagcagtgttaagcaaaagattagaccctttcaaagggggtttcaccatggagagaatgacttggactgtagtatggtccctaaaggatggaaagggttgatgaataaagatggtgaggaggaaggagctgctgcatcataaagcaaaggcacagaggcaggagcttggagaatgcttaataaattattaatcattgatagttaatagagcaggctgctggagtaatgtattcataaactacattatgctttatta

SEQ ID NO: 915483 - DNA, 639 bp, Homo sapiens
agcaggtgaatgatatagactggggatsagttgaataaccactaggtgaggcactggtactcctaatcagtaagagactgatgaccaaataaacaacagaaacttagttttaaaaagtgtgtagccggactcaaggtaaaggcttggcccaagggaaagcttggttagagctgtctggatggaacaaggaaaaataccacagaggagaaacaacttgaattgggtcttgaaggttgagaaggagcgtgcaagactgatgcaggtgggggtgtttattacgtgaagacagcctgccatgagagaataaaatgaatggtcttcaccctgttcttgatctagttctctctgcatgtggaagggaaggcacctggtccaagcacctgggttaaggcagaagctgtaaactcataattcctgcatttcttcaggaaatgcaatatatcttcaggccaatattgtcttgattgtcctgccttttttccatctctcttttttttttttttttttttcaaaaaagtttggtctggtggcccgggtgggatggccggggaacaatttgggtccctggaaacctcacctcctgggttcaagcaattcttctgcctcagcctcccaagtagctgggactacaggtgcgtg

SEQ ID NO: 915484 - DNA, 603 bp, Homo sapiens
cccagccatcccattacggggtatatacccaaaggattataaatcatgctgctataaagacacatgcacacgtatgtttattgcagcactattcacaatagcaaagacttggaaccaacccaaatgtccatcaatgatagattggattaagaaaatgtggcacatatacaccatggaatactatgcagccataaaaaatgatgagtttgtgtcctttgcacggacatggatgaagctggaaaccatcattctcagcaaactatcacaaggacaaaaaccaacactgtatgttctgactcataggtggtaattgaacaatgagaacacttggacacaggaaggggaacatcacacacctgggcctgccgtggggtgggggaggggggagggatagcattaggagttatacctaatgtaaatgacgagttaatgggtgcagcacaccaacatggcgcatgtatacttatgtaacaaacctgcacrctgtgcacatgtaccctaaaccttaaagtattataaaaaaaaaaaaaagaaacggtgcaactagactaaaaataatgatcgtctgtttagagttctgtagaatagcttaggaaggatcaa

SEQ ID NO: 915485 - DNA, 603 bp, Homo sapiens
cccagccatcccattacggggtatatacccaaaggattataaatcatgctgctataaagacacatgcacacgtatgtttattgcagcactattcacaatagcaaagacttggaaccaacccaaatgtccatcaatgatagattggattaagaaaatgtggcacatatacaccatggaatactatgcagccataaaaaatgatgagtttgtgtcctttgcacggacatggatgaagctggaaaccatcattctcagcaaactatcacaaggacaaaaaccaacactgtatgttctgactcataggtggtaattgaacaatgagaacacttggacacaggaaggggaacatcacacacctgggcctgccgtggggtgggggaggggggagggatagcattaggagttatacctaatgtaaatgacgagttaatgggtgcagcacaccaacatggcgcatgtatacttatgtaacaaacctgcacgytgtgcacatgtaccctaaaccttaaagtattataaaaaaaaaaaaaagaaacggtgcaactagactaaaaataatgatcgtctgtttagagttctgtagaatagcttaggaaggatcaa

SEQ ID NO: 915486 - DNA, 605 bp, Homo sapiens
taataaagcataatgtagtttatgaatacattactccagcagcctgctctattaactatcaatgattaataatttattaagcattctccaagctcctgcctctgtgcctttgctttatgatgcagcagctccttcctcctcaccatctttattcatcaaccctttccatcctttagggaccatactacagtccaagtcattctctccatggtgaaaccccctttgaaagggtctaatcttttgcttaacactgctttcccaaggtatcgcaatattgaataggtttgacactcaaaattatgtcttacataccttacatgcttaatattagacaaagaccttgtttgagtgcctgttaactcacaaacatatattttaattcccttataaaaatacaatggttgtttttacacacattggaactgtgagctttatataatgtgatataaaaaagtatcaaatcagaattataaattttatatagtgtgatatataaaatatatagtaaaacagataaaagaaaaagttgtactttatgagcaaaatartagctatatagtaattatgctagatatttattctgattggaaattagtcttttgcta

SEQ ID NO: 915487 - DNA, 539 bp, Homo sapiens
atgggcatttaggttgattctatgtctttgctattgtgaatagggctgcaatgaacatatccgtgcatgtgtctgtatatagacaattgatattcctttctgaacatacccagtaatggtattgctgggtcaaatggtatttgtctttaggtctttgaggaattgccacactgtcttccacaatagtttaactgatttacattcccatcaacagtgtgtaagcattcctttttctccacaaccttgccagccactgttattttttgactttttagtagtagccatcctgactggtgtgagatggtatctcactgtggttttgatttgcatttctctaatgattagtgatgttgagcttgttttcatatgatgagggtcctgggaatataaccatataaatgcagtctgttgtacgttattaactgaggaaaaattgatgcttttttaagactaggaaacacaaaataagtyaaaaggagccaaatcaggaatgtaagttgggtgtctaatgatttcccattgaaatttttgcaaaatgt

SEQ ID NO: 915488 - DNA, 541 bp, Homo sapiens
gtggattcatctacctttggtctttgatgttggtgacttcggatggggtttttttgtggacgtccctttttattgatgttgatgctattcttttctgyttgttagttttctttctaacagtcagtcccctctgctgcaggtctgctggagtttgctggaggttcactccagaccctgtctgcctgggtatcaccagtggaggcagcagaacagcgaaaattgccgcctgttccttcctctggaagctttgtcccagaggggcacccaccagatgccaggtggagctctcctttatgaggtttctgtcgatcctgctgggagatgtctccaagtcaggaagcatgggtctcagggacccacttgaagaggcagtctgtcccttagcagagctcgagcgctgttctgggggatccattgctgtcttcagagctggcaggcaggaatgtttaagtcggctgaagctgtgcccacagccaccccttcccccaggtgctctgtctcagggagataggatttttatccataagcccctgaccgaggc

SEQ ID NO: 915489 - DNA, 542 bp, Homo sapiens
gtagggcaggcataggatagacactgacatcgtgaaaaggagaagatggaaggaataaagggtcatttgtcccaagcaagttcaaaactcagcaaagcaaattccgttaggccccaagkcctgagaataactttctgtggcccatgccctgcccttgagagccatactttctctttctctttgatctgatagttactttgcacactgtgactgagtgaatgtgtgtacttccacatatgcatatgccaggtctgaatttttcactctgatgcaacttgggtgaccaaaaccgtgattttattgttttgtaactgaaccaactaggtttaactcttccttttggtaaatagcaaatttcttggtatatttacatccaggtaaattgagtcatttgcagacatttatttgtcttctttaggaaaatagtctaattgaggggtttcccctttgtttttactttctttactttctacctctctccaatgagtaatctaaatgctgagttgggtagaggcagtgggtgtatgcattgtcctagcatt

SEQ ID NO: 915490 - DNA, 542 bp, Homo sapiens
gtagggcaggcataggatagacactgacatcgtgaaaaggagaagatggaaggaataaagggtcatttgtcccaagcaagttcaaaactcagcaaagcaaattccgttaggccccaaggcctgagaataactttctgtggcccatgccctgcccttgagagccatactttctctttctctttgatctgatagttactttgcacactgtgactgagtgaatgtgtgtacttccacatatgcatatgccaggtctgaatttttcactctgatgcaacttgggtgaccaaaaccgtgattttattgttttgtaactgaaccaactaggtttaactcttccttttggtaaatagcaaatttcttggtatatttacatccaggtaaattgagtcatttgcagacatttatttgtcttctttaggaaaatagtctaattgaggggtttcccctttgtttttactttcyttactttctacctctctccaatgagtaatctaaatgctgagttgggtagaggcagtgggtgtatgcattgtcctagcatt

SEQ ID NO: 915491 - DNA, 542 bp, Homo sapiens
gtagggcaggcataggatagacactgacatcgtgaaaaggagaagatggaaggaataaagggtcatttgtcccaagcaagttcaaaactcagcaaagcaaattccgttaggccccaaggcctgagaataactttctgtggcccatgccctgcccttgagagccatactttctctttctctttgatctgatagttactttgcacactgtgactgagtgaatgtgtgtacttccacatatgcatatgccaggtctgaatttttcactctgatgcaacttgggtgaccaaaaccgtgattttattgttttgtaactgaaccaactaggtttaactcttccttttggtaaatagcaaatttcttggtatatttacatccaggtaaattgagtcatttgcagacatttatttgtcttctttaggaaaatagtctaattgaggggtttcccctttgtttttactttctttactttctacctctctccartgagtaatctaaatgctgagttgggtagaggcagtgggtgtatgcattgtcctagcatt

SEQ ID NO: 915492 - DNA, 690 bp, Homo sapiens
gatgggaactataacactgattccaccttttttaatgaatgagaaacaaattgaaaggcaacattccaaagaaattctccgagaatgaayagtgttattttacagcaagaaatgcctgtttttatcaagaaagatccagtgattcttatgacccacagccaaacaggattttttaccacttcacattagtagtatatagcaatgaggagacagagggaataaaatgaaatgcgtctctgggagggaccctaattctaagagaatgcagatggtattttatatccttcagtctgataagaaccacagaaataaccatttgagaaacctcacaggatttatttcaagtgatgaattttggaaggcggtaaggaggaagaagattccccagctcttttcatattgtacccaggcgttaagataatacagtgtgttgataaagaactgttccagggcgaaaatcaattgggcatgttcaaggttaagattactttctctcctttcaggaggtagataaccaagacagggggagtagagagaaataagcagataaaaagccctagttcatcttctgtgactcagaaaataaaggcatgcacacatatacatcatacacatcacacacacacacacacacacacacacacacacacatctctgtcagatgttttatgctgttgcttatagtattct

SEQ ID NO: 915493 - DNA, 597 bp, Homo sapiens
caccttaaggacttcccacctccaawactgtgagaaaagatatttctgttgtttaagttacccagtgtgtgttattttgttatggcagccctagcaaactaacacagcatccctaatagtcaatgaggactcttttttctgaactccttcctttcttaatttgttccttcattttcactaatattctgattgttttataacaggtgcacaggagataatgcatgtctgataattcctttattttactatataatttaactgaatgactagatgtaggattcttgatggaaataattggtcttccagaaggctccattgccttctagcttccagagttgttggtgttgggaagttcgatgctattcttgattcattctctctctctctctcacacacacacacatacacacacacacactcactctctctctctctctttcaaaagtgttcttcattccaggtgttctgaaatttcacaatgatgtatgtgccttactggtggtccttcatcttttgcagtgttaggtacttgataggctcttttaatctggaaatacatgttcttgattactgggaaagtttaactttcttttttca

SEQ ID NO: 915494 - DNA, 665 bp, Homo sapiens
ggctctgcatcgtcagagagtgtgagggtcgagtttctgccattacagtgggcctgctttctctgttttccactctctcaccaccttatttagtggctgctggcttctctccagacttttttccagagatggggccaaatctccatcctcatctccttaggtcctcttttccatctctggtgatggtattttccatgctatggcatttccggccgtttgctggtggggcaaatgctactgagaacaactctgaatctccctgcctggagagtccaggaatgtggtggtgggggcggggaggccagggattcaaggactctctgggaagctctgtggctcttgccccatgccttccccaccctccgggcaccttttccaggaaagccagggaagctctatctgccatcggatccacttccccgggtgcctgcaggaggtcccctgttagcacttccttggcccggtggggcgttcagaaggtgtgccgcatggtgttgcatgtgcccaggtgctcatgactcctggctgatgggactcccattcctagaggtttgtggcrtcctcaccttgactattcttttgggctccgcaaggtgatggccagagaaaggggtgggactctgcattcaaaacccagtggtagtggggagatctggagcaatcca

SEQ ID NO: 915495 - DNA, 665 bp, Homo sapiens
ggctctgcatcgtcagagagtgtgagggtcgagtttctgccattacagtgggcctgctttctctgttttccactctctcaccaccttatttagtggctgctggcttctctccagacttttttccagagatggggccaaatctccatcctcatctccttaggtcctcttttccatctctggtgatggtattttccatgctatggcatttccggccgtttgctggtggggcaaatgctactgagaacaactctgaatctccctgcctggagagtccaggaatgtggtggtgggggcggggaggccagggattcaaggactctctgggaagctctgtggctcttgccccatgccttccccaccctccgggcaccttttccaggaaagccagggaagctctatctgccatcggatccacttccccgggtgcctgcaggaggtcccctgttagcacttccttggcccggtggggcgttcagaaggtgtgccgcatggtgttgcatgtgcccaggtgctcatgactcctggctgatgggactcccattcctagaggtttgtggcatcctcaccttgactattcttttgggctcckcaaggtgatggccagagaaaggggtgggactctgcattcaaaacccagtggtagtggggagatctggagcaatcca

SEQ ID NO: 915496 - DNA, 633 bp, Homo sapiens
cccctaatcttttctggcatgtatgatttctgctgagaggtccactattaggctaatgagctcccctttgtaggtgaccagatctttctgtctttaacatwttttttttcattttgaccttgaataatctgatgattacgtgtctcgggaatgaccttttcgtggggatctctgcatttcatgaatttgaatgttggcctctctagctaggttggggaagttcttatgtatgatatcctaagatatgttttccaagttgcttccattctggccatctctttcagggacacaccagtgagtcatagatttggtttctttccataatcctgtatttctcagaggttctgttcattccatttcattcatttttctctatttttgtatgaatgccttatttcagaaagccagtgttcaagttctgatattctttcttcttcttggtctactctgctattaataattgcagttgtattgtcaaattattatagtgtgttttttagctctatcatgttcgttatgttcttgtctatatggctattttgtcttttacctcctgtataattttaacgtaattcttagctttcttggattaggcttcaatgtattcctgcatctcaatgatcttcgttcctt

SEQ ID NO: 915497 - DNA, 632 bp, Homo sapiens
gggttatcttctagaagttttgtagttttgcattttcgttaggtctgtaatccagttttatgtaacttttctgaggggtgtaagatctatctacrtttatatttttgtatgtagatgtccagttgttccagcaccactcgttgaaaaaattattgttgcttctttctattgcctttgctcttttttcaaagacaagtggactatatttatgtggacctatttctgagctctctattctgatctattgatctgttttttttaattctttgccaatggcacactatattactgtagctttatagcaagacttgagattgagcagtgtcagtcctctgactttgttattctccttcaacattttgctgttttggatcttttgcctctccgtataaactttagaatctttagaaactttaatgatatccataaaataacttgctagaattttaaatgggatttcattgagtccatagatcaattgcaaagaactgatatgttgacaatattatctttctatccataaacatggataatttagttatttgatttttttaatctgaatcttgtggtttttcttcatatagagtctgtaaaaattttgttagatttatatctaatatttcatttttggg

SEQ ID NO: 915498 - DNA, 616 bp, Homo sapiens
taatgaattaaggttgaattccagtgattgccagccattcagtccctgatgaaacccacccagctccagatgcagaacacaacagcactagacataatagtgttgactttttctcagcacgtcctctagagcacctagaaacaatggcccttgattctggactgctaacatccacagtgtctagtaggagaaaaggaaaatctgtggagtaagaaaatgacatcttaggtatcaaattacttacataagtaattattttaatacaacatggtgagcataatctaagacaaacagcaaataagaagataaaactatgtaagtcataatgagcagaacaagttaaagacagaaatataccctcaaaattttagttaaaaaattatcaggtgctgtctgtatgatacattattatagtttatcagctattgcttggaaaacctaaacttttctcttttttatcggtacatttgttttggagagaattttattttctyctaccaagtcttgggataatcaaccaatttaagaagagctcaaattttatgaataaaagtaaatgatacccaaatcatttataataacactgcagaaaatcaaagacagatacatcgtttta

SEQ ID NO: 915499 - DNA, 612 bp, Homo sapiens
acagaaacgttttaggggatttaaaatacaaayatattgaattaaaacatctgacatgactataaattggaagggtagaaatggagttaaagtcttttaaattacttgctcttttgaaaaggaaggtcaagataagacaaaaaaactttattaagtcagaggttcatgttttaatttcttgagtgaagaaggttcaaaaaaaatgtaaacatcttagttgatggaacaaggaaagcttcacttgagattttttaaaaagaaaatggtgtcttccctccttacttctattcaacctgacaccagatgacctaatcagatcaggacagtgagaatatgaaatacactacaataatgaactgggaaaacaaaaaagaaatacactgctactagtgctgataccaagtttgctgcttaaattttccaatcttagtaatcagactgtgttcaatagtgtacatgttcttagcagtttttttttaaatatctggatgttgcaggctagtagttatggggatagctagggtgagggctgatgtctgtgtccactggagggttaaattttagaatttggcttatttccattggtttctgtcttaaataggatggatattc

SEQ ID NO: 915500 - DNA, 655 bp, Homo sapiens
ctgctcttcaaatactggagcacagaataaagatgtctctgcatgaatcaagaattattttgttgttkttgttgcttgttgtttgtcttttaatctaactttttcaagcaatcattgtatttagccgaccactaaatctaaagcctacatttgtgacttgtgtttagaaagatgatttgaataatgattttctagaaaataacaaggtgagaaaaatgttaaggctatagaaactattggaaacatcttttctttctttctattctaagactaaatatttaccatcaagaaaaaataagatggaagaagaaatctttggtatggtgtaaaccaaagtatgaatccatatgaggaaatcaagaccaatgtaaatgacttcctctttccagtgttcatgaataaaatttcatctaccttctatacatgatggttctatctggctagtgtccaaggacaaagaccatcatttttactactgatgtttgtatagtggcaggaagataaatgagtaaagttatctgtttcttgtgaaatgatgaagtattgtgaacaatatgcatgcccaaattaacaaaaacatgttacataaaaataaatgaaatgaatggaaatccagacaagagcatggactcaagaaaagggtagggttatattt

SEQ ID NO: 915501 - DNA, 611 bp, Homo sapiens
ctgtaaaatgccaatcttagaataatatcagacttgtatataatggttactggtctgtaatgcaatgacaaaataagacagtccagtgggttaagcacaaaactaaaaacttattaacctagaggactgccctttgtagcgagattatgtcttgtctgccttttcatgtgttaacaccgtctcattttcataaagcagaattgatggtagtgttcatttgttttaatgtcctcatgggacaaaattacacagggttattttttaaaataatcagttaaatctaaaactcaggtgaactctgctgtaaatttctattcgcagtttctctcattaatcctttctttccattcccactgccatcacccagctcaggcttttattgccatttttcttgataattacacaacctcttaaccaatttcttggtttccatggctttgctcttttccaatatcctgcaaacagatcactatcaaaagaaacttataaaaccataactttggtcatattactgtctttcacaacatccactgccaccagcaccggggccaccaccaccagtggctatctcttgcctgctatgatcygagattcagctaaatgcaagagct

SEQ ID NO: 915502 - DNA, 638 bp, Homo sapiens
aaatttatacattcatttgttttagtgctttcatttattttctaatgttacataggaaactaaaattttttctaaagatcataaaaatttgaacctcctccgcttattgaaagtatactaaatgtgtgttgaattttagagagattattgtttatttatttgtttgtttgtttatttttgtagggatgggatctctctctgtgttgctcaggctgatctcaaactcttggcctcaaacaatcctcccactttagccttccaaaacgctaagattacagatgtgagccaccgcatgtggcctagagagattatattttaatcttttctacttaacatttaaattatgtaggaatatatgttgtgtttattatcttccttaggaaaaaatacaatgcatgtaaataaatgacaagatttgttataaggaagcatactagtaaaacaataaaactttatactggccagaaagctctacccatacaaatgttttgaaatctgatggttataaatttgccttcataagccaggcaagcaaatgagataakaataatcatatccttacacacttaacttgtactttttgctcaggagcaaatgaatgaaaaagaagcattacggggtaaatcagtataaatagc

SEQ ID NO: 915503 - DNA, 638 bp, Homo sapiens
aaatttatacattcatttgttttagtgctttcatttattttctaatgttacataggaaactaaaattttttctaaagatcataaaaatttgaacctcctccgcttattgaaagtatactaaatgtgtgttgaattttagagagattattgtttatttatttgtttgtttgtttatttttgtagggatgggatctctctctgtgttgctcaggctgatctcaaactcttggcctcaaacaatcctcccactttagccttccaaaacgctaagattacagatgtgagccaccgcatgtggcctagagagattatattttaatcttttctacttaacatttaaattatgtaggaatatatgttgtgtttattatcttccttaggaaaaaatacaatgcatgtaaataaatgacaagatttgttataaggaagcatactagtaaaacaataaaactttatactggccagaaagctctacccatacaaatgttttgaaatctgatggttataaatttgccttcataagccaggcaagcaaatgagataataataatcatatccttacacacttaacttgtactttttgctcaggagcaaatgaatgaaaaagaagcattayggggtaaatcagtataaatagc

SEQ ID NO: 915504 - DNA, 624 bp, Homo sapiens
gctactgatacttgtgtatgcttcatgaagtttttgtgctgtgtttttcagctccatyggatcatttatgctcttctctgaactggttattctagttagcaatacgtctaacgttttttcaaggttcttaacttcctttcattgggttagaacattgtccttgagctcggaggagtttgttattacctacttccgaaggctacttatgtcaattcgtcaaactcattctcggtccaattttgttccctcgctggcgaggagttgtgttcctttggaggaagagaggtattctggtttttggaattttcagcctttttgtgctggtttttcctcatcttcatggatttatctacctttgatctttgctgttggtgacctttggatggagtttttgcgtggcctttttgttgatgttgatcctattgctttctctttgttaattttccttctaacagtcaggcccctcttctgcaggtctgctggagtttgctgagtgtccactgcagaccttgtttgcctgggtatcaccagtggaggctgcggaacagcaaagattgctgcctgctccctgctcttgaagcttcatcccagaggagcgcccaccagatgactgtcggagctctc

SEQ ID NO: 915505 - DNA, 624 bp, Homo sapiens
gctactgatacttgtgtatgcttcatgaagtttttgtgctgtgtttttcagctccattggatcatttatgctcttctctgaactggttattctagttagcaatwcgtctaacgttttttcaaggttcttaacttcctttcattgggttagaacattgtccttgagctcggaggagtttgttattacctacttccgaaggctacttatgtcaattcgtcaaactcattctcggtccaattttgttccctcgctggcgaggagttgtgttcctttggaggaagagaggtattctggtttttggaattttcagcctttttgtgctggtttttcctcatcttcatggatttatctacctttgatctttgctgttggtgacctttggatggagtttttgcgtggcctttttgttgatgttgatcctattgctttctctttgttaattttccttctaacagtcaggcccctcttctgcaggtctgctggagtttgctgagtgtccactgcagaccttgtttgcctgggtatcaccagtggaggctgcggaacagcaaagattgctgcctgctccctgctcttgaagcttcatcccagaggagcgcccaccagatgactgtcggagctctc

SEQ ID NO: 915506 - DNA, 606 bp, Homo sapiens
gagttactgggaaaattaagagataggcataaaaaaataaagaaaatatgaaaagaaagcaggacaacaaggaagaaaatcaaaataatagaaaaatttcatgtgtacaagacacatgcaaacattgaagaaagttaaccttttttacttaaaagtttacacaaaatagagaagctcagaaattctaaagtaaaataatagatacaaaaattatgcctggaaaacaaataaaaataaagtttaaacaattatttgaagattaaaaatataattttaggcaaaacttcagtaataggattggggagaatcattaaataatgtgttaacttcatctggaaaaatgcatattctaaatttgtaagaaattaataaagagtctcaaaatatataaagcaaaaatttacaaaacttaaagacattgaaaacaaagcgttgtaagaaaaaaatttaatctaccttttattaaaaattgatgaktccaccagacaataattaaacagataaataacaaaaattttgataagcattatttcacaattagttaaataactattttaaagtgtatacaaatgtgaaaatgctttatcacagcattaaattaacagt

SEQ ID NO: 915507 - DNA, 606 bp, Homo sapiens
gagttactgggaaaattaagagataggcataaaaaaataaagaaaatatgaaaagaaagcaggacaacaaggaagaaaatcaaaataatagaaaaatttcatgtgtacaagacacatgcaaacattgaagaaagttaaccttttttacttaaaagtttacacaaaatagagaagctcagaaattctaaagtaaaataatagatacaaaaattatgcctggaaaacaaataaaaataaagtttaaacaattatttgaagattaaaaatataattttaggcaaaacttcagtaataggattggggagaatcattaaataatgtgttaacttcatctggaaaaatgcatattctaaatttgtaagaaattaataaagagtctcaaaatatataaagcaaaaatttacaaaacttaaagacattgaaaacaaagcgttgtaagaaaaaaatttaatctaccttttattaaaaattgatgattcmaccagacaataattaaacagataaataacaaaaattttgataagcattatttcacaattagttaaataactattttaaagtgtatacaaatgtgaaaatgctttatcacagcattaaattaacagt

SEQ ID NO: 915508 - DNA, 606 bp, Homo sapiens
aatactacatcacagaatataatatyactgtaggaatattgtaggtatcatttgtgagattctgttttcttttcttagtttactaaaagttttttataagaattttgaaatatttcaggtattttttgtgcatctagagttataacttttaccttaactatgttaatgtgttgaattacattgatttttcagaaattttaaaccatttttgtactccaaggataaacactactcttttggctcatttgttttaatgttaaacagttcttgtattactactataaattaaaattggctatgaagtgttcacttaaaaaatgtttctgttcttaggaaaagaggaagtcaaattgtccctgtttgcagatgacatgattgtatatcttatggctaatcttttaaggtgctgacatatagttttgcatgatatgtgcctataatttgcattcttgtaatatccttgtcatgttttgttaccagaatttttctggcttcataaaacaagttgtaaagtgctcccttttattttcttcatggatatgtttgttaaaaacaaaagattaatattataatctcttatgtgtttaaaattatgcacctctaaag

SEQ ID NO: 915509 - DNA, 630 bp, Homo sapiens
gacacatacttacatattgagaggaagacactgtaatattctttactaggtatagttcatgttgaagacagtccagaaattccatttcaataacacagttcatcagaagttgyagtcattgtgctcattttatttccttattttcatatgaaaattaatattttctttcttcatatggtaattattttagaattaaaaaattaaggaaccatctgttcaactaataaaaggtaagcacattttttttaggggagttcctatatcttttacatttcaggaccttgtctgcttctatcacatctctccacagctcttaaaaattatttttaccttgtatctgatcaaaatttttctgttcagaaatttgagttcaagcctttgcagttctctcagcttgctggtgattattgctcaatagcattcacttttctccatctcttgttgaatatagcttctattttctcttcaagaaaaggttataaatttctgcaatctgttttgccctacgtgaatcacatcaaacatgcccttgagagattatggttcatcctttctgacatctggggaagcagcccaaagctcagaagaaaaattcaacactgagctctttgagtaaggggcttgaaaatt

SEQ ID NO: 915510 - DNA, 652 bp, Homo sapiens
caatactggctttataaaattagtagagaaatactcttttttgaaatttctggaattatttgttagaattggtataattttttccatgcatgtttgctagacatgcaaacatctacagataaggccatccrggcctggagctttatgtgtgggaaggttttgtcaaaaacgaggtaggggctgagattttagccaacatgcaagccaacaatttagcctgccacagttttgtgaatgcagaaagaggacacaagacaacttgactactcacagcacaggaagcatcataagtattaccatatttgtgtcatttcccttttcacttaagttcatatgttatcctgttggacccggatagctgcctgcatatgcaatgagctgtgttatttgagaggaacctttagttaatgaaactcacatatttttttcccgtggtctgtagacactttgttgccatcctgaacagtaggtgagcctgtattttcctctagaggcagatactatctctgtcctctgagactgtaaggaaacattctctaacctcccaaggctgacattgcctctatcttccaagactgtttgctctttaaacattgttaaaaatgttatctgaaacaaagggcagttagtacctctctgctcaaaagatatg

SEQ ID NO: 915511 - DNA, 597 bp, Homo sapiens
gttttatacgcaggggaaagtggcagtaggggtgtgactayaggttactcccacatagatgtcagaggactgcaggcaactgtgcaattgcaagacctggtgccacgctgctgacagctaagaattcaagggacattgggttcaagttccgaagaattaggctacaagattttggtaaagggggtctaaaaggctgtctgatatacttcaaatgcatgttttgttattaccatgaatctgtttgtcccaggatgactccttctgaaataagcatctccttttatttataccctttgaatatcaaagaaatggtcaaaagaccacatggccatgccttaaatttgccctcaggaaagagggaatatgtgagtcctaaactgaagttggatgacaggagggaggatgatttattacctggggcacttagtattcttcagaatgtcccagactggccaacatatgatacacagaagtactgcagtcagctacttcctgggctactgtgtgcaggctccaaactcttcctggatgacctgctgattaggagtaaacacctgggtccttccgagggattcctggcagatctaccaagtcccc

SEQ ID NO: 915512 - DNA, 703 bp, Homo sapiens
tgccggaggagccccctgagaaatgtgcctggcgggcatgcctgctgagtttaatatgctggttatctgtcacttactctgacttaaaggtaagggcttctgtaatttgttgctgcmaagaattggtaccttgttctctttctaaggcttcccactaattggctcttgagggaagattggaatgagagttagtgctcgacttctgtagcttctcctgttagatctctggttttttttttttaatatgtgaaggaaaaataaccttggctattttttgactattggtggaatgtctattcacttgttttcaaagaaaaacaacataaaacaccctttgattcatgatgtttattttaatttaaaacttttcctggactagtaaagaaatgtagtgtatgtgtagtcaatcttttcaatgatttctgtaaactgtgggaataggagttgtgatcttatcccaagataagaatattttactttaacagattgcatttttaccgattgaaaattacagtgcattttatttagtaatcagagtgaggaaagttagagactatttaaatgaagtacaatagtaacatttacattaattggtcagttactgtagtgtgggaatacacatgttgataaatatacattactaattatgcttcttgttttctgtatacttagaggaaagttttgtgtctgtgcagaattgaaa

SEQ ID NO: 915513 - DNA, 575 bp, Homo sapiens
actgggtatatacccaaaggattataaatcattctactataaagatacatgcacacatgtgttattgcagcactgttcacaatagcaaagacctggaaccaacccaatgcccatsaatgatagactgtataaagaaaatgtggcacatatacaccatggaatactatgcagccataaaaaaaggatgagttcatgtccttttcagggaaatggatgatgctggaaaccagcattctcagcaaactaacacaagaatagaaaaccaaacatcgcatgttctcactcataagtgggagttgaataatgagaacacatggacacagggaggggaatatcacataccggggcctgtcggggggtggcgggctaggggaggaacagcattaggagaaatacctaatgtagatggcaggttgatgggtgcagcaaaccaccatggcacatgtatacctatgtaacaaacctgcacattctgcatatgtaccccagaacttaaagtataataaaaaagaatgtatatcacacaaattcctagataatgtcaatgctgctgctctgggaccaccctttgggag

SEQ ID NO: 915514 - DNA, 629 bp, Homo sapiens
tagctttaaatttaaagacccaggttttttagcacttcagaagtattaattttcttgaccatttcaggtttcttttcaactcttgtcttctgtaaatacaatatgtcaattttaaagaattttcaagtaattaacctatatgggacctcttctagaaaacatcttggccgagagtgtacagatatttttaaacctttgaaaatattttacatttagttaaaagctttatatttttctatttctgtgttttctttactagtttagggacagagctatattatatttatcttaaatatcatcttaatagtctcattttaccttttttaaagtggaaaagaaaatagaacactgaactcttgaccttctctatgagtctgtgggcactttttcttatatgtttattttgctgtgctgtttacttctacagatgtttacataaagagcttttcacagattttggaaacttttaggttcctatgaaagcacggcaactttgtaaatggggatggttaagagacagttctaaaaggtggccctatttgcacacatacacagtagttacttcgatattttagctatgtttgtcaggtatttagygcaacatgcaaaccatagcagcagtaacaggg

SEQ ID NO: 915515 - DNA, 616 bp, Homo sapiens
taaatctttcttttattgcaccattttggaagcactgttgtttttttttttgattctgtgaatggacatttgggagctcattgggagcaatggagaaaaagttaatatcccaggataaaaactacaagaaagttatctggcaaacctctttatgatgtgtctattcttctcacagaattaaacctttcttttcattcagcagcttggaaacactgtttaggtagaatctgagaagggatatgtgggagctcaatgaggccgatggtgaaaaaggaaatatcttcagataaaaactagaaagaagttttctgagaaactacttcatgatgtgtgaattcatttcgcagagctaaacctttgttttgattcaacagttgggaaatactgtttttgtggaatctacaaaggaatgtttgatagatcattgataccataggtgaaaaagcaaatatcccaggaaaaaaactggaaggaacctatctgagaaacagctttgtgatgtatgcattcatctcacagaattaaacctttgttttcattcagcaatttggaaacactgttttggtagaatctgaaaarggaattttgggatcacattgaggcctatggtgaaaaa

SEQ ID NO: 915516 - DNA, 616 bp, Homo sapiens
ccattgaaatgggaggttacagacaagggaagggttaaatgacctgtgtgatagttgattgmcattgaagacatcaatatgaactcatgtttagcttaatatagatataggcagttgcatatagaaatatttagaaatatgtgtatgtacattggttagtatatacacataaaccttcttgctctgttagctgagagggcccaggagcaatgccaccccagtaacatgaacacatctaacacacaaatcttggtttcttataccattttccaattaaagagaacaagggctccttatagaaatggctgataatatgactgggaggaaatgtacaagatgagtctggggcatcttgtacttctataaagtgagaaagtgcttttaaaaaccaccacaatgacaagggcatgtcaaagtgatacaggaaccaactaaaagaactcccaatgaccacagttggaacaaattagtattggattacaaaacaaagtacaaaatacatagctatgagaccatactgatataaattattgaataaataaataaatgagagaaaacagagaattcaaatgatttatatagataaactgcctttaaggacattgtcccttcttaa

SEQ ID NO: 915517 - DNA, 640 bp, Homo sapiens
ctgggaactatcattctcctccctatctccattagttcaattgtttcaatatttgtagctgcctcaaatgagtgagaacatgtgaagtttttctttctgtgcttggattacttcacttaacatacatgttgcaaatgacaggatctcattcttattatggctccattatgtgtatgtataccattttctttatgcatttgtttgttggtagatatttagattgcttacaaatattgattattgcaaatagtgctacaataaacatggaaatgcagacatctcttcaataaactgatttccttttgggcgagcatatacctagcagctggattgctggatcatatggtagttctatttttagtattttgaagaatctccaaattgttctatatagtggttgtacaaatttgcattcctaccaacagtgtacaggtgttctcttttctttgcatcctcaccataatttgctattgtctgtctttggacaaaagccattttaattggggtgactcacaccaatgtgtcctgtatgtgggacatggagtcaaaggagattattttggagctttaagatttaacgactgaacttctgtgtttctaacttgcatgggrcctgtagctccttcctttcggccaattt

SEQ ID NO: 915518 - DNA, 639 bp, Homo sapiens
gagtgcatgtaataaatagtgctgtgataatcttcaagaagcacatgatcaaataggaactatatctaaaataaataatgagctatgttttaagaaagctagaaataaatatggtagcccaaagggtagaaaattcattttgcctggttgaatgagtggctaaaatcacagtcctacaatttcaggtgtgtcatgttggaaaatgtattagtcagttttcacactgctgataaagacatactcgagaatgggaagaaaaacaggtttaattggacttacagttccacatgggtggggaggcctcagaatcatggagggaggtgaaaggcacttcttaaatggagatggcaagagaaaaatgaggaaaatgcaaaagtgaaaacgcctgatataaccatcagatcttgtgagacatattcactacccctagaacagtaagggggaaaccaccctcatgattaaaattatctcctattgggtccctcccacaacacgtgggaattattggagtataattcaagaygggatttgggtgggaacagagccaaaccatatcattctgctcctggcccctccaaatctaaggttctcatatttcaaaacctatcaggccttcccctcagtcccccaaattcttaa

SEQ ID NO: 915519 - DNA, 673 bp, Homo sapiens
caaatcccacatttctaaatttcttccaaatctatctttggagttatttttcctgtattgagttcacttttctatcaccatggaaaccaattacaattagtgttgttaggatctttaaaaatacaactctattcagcaagtcttcaaatgttcagaaaagttctttctccatatggagaatggaaatcagtagcatagagcagggtaaaaatataccacccacccacagaagaaaccattcaccaaagcctaatcaacggattgcaaatggaacacggaaagagttcttttcttttattcatcttttgtagttctataatggctgcaatttcatgtgtcatacctatggggtttgtaaacaagttttctttcacctcacagcctgtgtagcagacgtggagacacaaaaaaatgatttctgttgtataatattatgtggtccacccaccctaccttcaacctcctaatatttgacactgaaaatactactttaaaactactgagttcaggacgccaagaggaagaataattctacagcagaattacatcttacatggttaataagtgaaataagttctaattccagcacataaggygaaaatcaataaaaggcaaaattacccttcagatttaccaggaaaaagctagagacctacaagcatcttaacagacc

SEQ ID NO: 915520 - DNA, 538 bp, Homo sapiens
tgggcatttaggttgattctatgtctttgctattgtgaatagggctgcaatgaacatatccgtgcatgtgtctgtatatagacaattgatattcctttctgaacatacccagtaatggtattgctgggtcaaatggtatttgtctttaggtctttgaggaattgccacactgtcttccacaatagtttaactgatttacattcccatcaacagtgtgtaagcattcctttttctccacaaccttgccagccactgttattttttgactttttagtagtagccatcctgactggtgtgagatggtatctcactgtggttttgatttgcatttctctaatgattagtgatgttgagcttgttttcatatgatgagggtcctgggaatataaccatataaatgcagtctgttgtacgttattaactgaggaaaaattgatgcttttttaagactaggaaacacaaaataagtsaaaaggagccaaatcaggaatgtaagttgggtgtctaatgatttcccattgaaatttttgcaaaatgt

SEQ ID NO: 915521 - DNA, 648 bp, Homo sapiens
tgaaagcatgtgataatgaaaagagcaccagcttttgagttagacaaacatgggtctaaatcctagttctatcactctttatcygtaagatctggaacattcatactttcctctgagcctcagttctctcattctaggataaagataatccgtgccttgaaagaatgctggaaatcagattatacatgtacaagcatcatttatgtactaatctgtacctttccttcttcttcagctgctcttctggtaaacgttcaagaacaagggggttagaagggacctccctgcctgctccttccacactgctggaaacatgcaagaaaccaggtttagcgctgctcttaggggatgaggagcaataagctgtggtttacatcaaggattattttatctttcttgtaatatattagagccaatttctcacacacgtagcccaatggattggttgtctaaaaggtgaaatgaagtactgcactgttgaactccaaagggacaatggaggcataggctacttccaaggagacaccactagcaattggtgctgtctgcaagtggttcattgtgatgcttagacaaaacatttaatactgcttcaaggaaaagatttttccctaattagtgctcatgtgactctaaagggaaaaacat

SEQ ID NO: 915522 - DNA, 557 bp, Homo sapiens
ctgggaattgaacaatgagaacacatggacacaggaaggggaacatcacacaccggggactgttgtggggtggggcgaggggggagggatagcattaggagatacgcctaatgctaaatgaggagttaatgggtgcagcacaccaacatggcacatgtatatatatgtaacaaacctgcacgttgtgcacatgtaccctaaaacttaaagtataatttaaaaaaatcggaattagaggctctcatagagcctctaatggttttcaaatcaaagactgaattccaaatgttctcatacatcaaggaagacctaaagctagcccatgtggcttagaggtgacagcgtatcatcaaagagctaaataactgaccagtattctaaagggactaaaacattctttcccagtctcagccttcaagtggcaggtcactgctgaaaacttgaaggwagagagattaaccctttaagatatttggtaagttctgtaaccatagtttgtatatattcccctactattgaactgagattgctaataaaatcagagaaatcaaggttta

SEQ ID NO: 915523 - DNA, 687 bp, Homo sapiens
actcaatctgaaatacattcaaggatgaaccagcctgagggaaagcaatagcatgagggtaagatagaagaggagaactaaataagagaaagatggtagcagaatcatttttacatatccacatggaaaacactgaagttgccctgtcagggttctaagaacaactaaaaggcaaaaaagtgcaaaaaagcacctgaatgaggaaatgaatgaaaagtatctccagagaccacaaaaagactttctttcttctccttttcaaaacgagtgctcatttcttcttgagacgcctcttcatcttccctttcttcttgaagtcttttcatcctttccattaaggcctctagctcacttagagaatccacaatctggaaacagataagataatgttgggtgctattcatactaaaagtgttccagtaaatatctccatctccaaatgtcaccttactatgtacagcggaacaggcacagttatgaagttcttaagtcggtttttcaccaatttcaaaggaaatcatgacagattccaacattttcagaagtatgattttttttttagttataaatatagaagtttataagtatatatgtgtgtgcataaaatctacaattctagcattkggtatatattaaatattatagtttagtttaaaaaaatgaggcagcacaattgttttacttttt

SEQ ID NO: 915524 - DNA, 621 bp, Homo sapiens
ccacaaagtttagttttcctcaaaagaaataaaaatcttagccttacttttctgcatgttctgcagtatactccctcttatacaaggaaatcattgtcctttcagkagagaatttgaaatgaaatgttcagatagtgagtcatcagttccactgtcatctaagtactggattttcactgtatctcgtttgagattattcagtccaagaattagatgtgtaaaagtggttggactgtgaaaaaatatatctatagtggagtcagccataatttacaggcagtttacttatagtattgttgagtctgaaactgtgaagagtctgagatgttttcctactagtaagctaacaagttggcttcccacaactacagacacactacacacattctcactctctctttctctgtctctctgtagcctccctttcccccagcagaaacatcaagtctctggaccagaaattaagcccttgtttacttgaaaagtaacttatgttggttccctaggccctggttctccataaagtgatatggtgacaaccagagatatcctgtgtttacaagtgggatttggtaccacaagagaactctgcacttatgaaacttgaagcttatacaggat

SEQ ID NO: 915525 - DNA, 705 bp, Homo sapiens
gctctattcccattctgggaagaaaaactcttaggtctgttaagatgcttgtaggtctctagctttttcctggtaaatctgaagggtaattttgccttttattgattttcrccttatgtgctggaattagaacttatttcacttattaaccatgtaagatgtaattctgctgtagaattattcttcctcttggcgtcctgaactcagtagttttaaagtagtattttcagtgtcaaatattaggaggttgaaggtagggtgggtggaccacataatattatacaacagaaatcatttttttgtgtctccacgtctgctacacaggctgtgaggtgaaagaaaacttgtttacaaaccccataggtatgacacatgaaattgcagccattatagaactacaaaagatgaataaaagaaaagaactctttccgtgttccatttgcaatccgttgattaggctttggtgaatggtttcttctgtgggtgggtggtatatttttaccctgctctatgctactgatttccattctccatatggagaaagaacttttctgaacatttgaagacttgctgaatagagttgtatttttaaagatcctaacaacactaattgtaattggtttccatggtgatagaaaagtgaactcaatacaggaaaaataactccaaagatagatttggaagaaatttagaaatgtgggattt

SEQ ID NO: 915526 - DNA, 644 bp, Homo sapiens
tttaatatctttccatcttcctgtcaggttttcctgtgttcttaggcacagcagcctatttcctcagaatgcagcctcacatattctccttttgccttccagttgtttttttgtttgtttgtttctgaaggttaacagttcaaaagtttacattactctaccaattaggacattttatttactttgcactatttctactgacacaaatttcatcatgaaaaagagacagatgttataactcacacttacagagaatgaaactgataattttacaagtcaagtgactctacccaatactacataatacctatgctcgacctaggatctccaagggcaagacttggtccattataacagcaagtgctggctgggtgtggacaggaccatggtgcctaagtgtctggctctaaactccaggtccacctcactaagtgtttagggttacatcattggtgtaatagcatcatctcttgcttcatattttctgctcaactacaagatgccctttgtaataaagtttatttctggaaggatgcaaaactcacaaacytctccccacctatgccacaaacactactattactacaagtttttctaatttgtgctctatcctcgacacttctcaatttttcgtatgagttgag

SEQ ID NO: 915527 - DNA, 635 bp, Homo sapiens
tattggaaggatcaccatctaagcttacacttttattctctctgtttaagagtatttctctgctcccctgacttcctaaataatttttggaaaaataacaaccaaacgcacacacacaaaacctgtcttcattgtacacccagtagtttgggttaggcaattctgccccctcctcttcccttgtctctggaccttgctatataactctgcacacttatcagattcattttcctgtgagtttgcttgcttgtgtcacatgtcaaatcactgtataattattgggtcatatccccttcttggcagcattacattataaaaatagtatggacttggcttatacacaacagacagttttatgaagttgtgtctatttaactggagctgggcactgctatcattagagattagcattaggtacagcaggataatgctgtgcaacaagtcttaatgaaagttagaacacctgtatttgagttccggctctaccagttcatctataaaatggaaattatgctaacttcactttctrtttcacagtatttctgtgtgaaacacatgaaccgatgaaaaagcccttttaattgcaaagcagcacatcattatcttagcatttaatgagtaagtgcataggcttt

SEQ ID NO: 915528 - DNA, 582 bp, Homo sapiens
aactcacatcactaagaaagttcagagctccaaggctaaggaacagatcctaaaaactttcagaagagaaaaacaattcatactgatacaaatcagaaatcaaaatkgcaacagatatttcagcaataaacatggaaactttaatattattgagctatgagttcaaaaactcaaagggaaatgatttcccactagaattctctatccagccaacctatcaatcaaatgactaagatctcagcaattttacttccaaagtgtcttttctcaggaagctattaaagatttgttctaccaaatcaggagtataattatagaggaaggaaggcagagaatccaggaaacaaaagttctaatacaaacttttggcagaggaaggcccccgtaagagaagtacaaaccagacttaaagaggcagtaagttgtatgggagcaggaagatatagatttgcaggaggggctctccagggaaataaagaaactgattattttgtctgtcagagcatttaaaaaaaaaattctgaacaggcattctataaacctgagaaaattaccaataggtatatagaaaatcagtaaatg

SEQ ID NO: 915529 - DNA, 542 bp, Homo sapiens
agcctcggtcaggggcttatggataaaaatcctatctccctgagacagagcacctgggggaaggggtggctgtgggcacagcttcagccgacttaaacattcctgcctgccagctctgaagacagcaatggatcccccagaacagcgctcgagctctgctaagggacagactgcctcttcaagtgggtccctgagacccatgcttcctgacttggagacatctcccagcaggatcgacagaaacctcataaaggagagctccacctggcatctggtgggtgcccctctgggacaaagcttccagaggaaggaacaggcggcaattttcgctgttctgctgcctccactggtgatacccaggcagacagggtctggagtgaacctccagcaaactccagcagacctgcagcagaggggactgactgttagaaagaaaactaacaarcagaaaagaatagcatcaacatcaataaaaagggacgtccacaaaaaaaccccatccgaagtcaccaacatcaaagaccaaaggtagatgaatccac

SEQ ID NO: 915530 - DNA, 556 bp, Homo sapiens
cacggatgaagcccacttgatcttggtggatacactttttgatgtgctgctgggttcggtttgccagtattttattgaggatttttgcattggtgttcatgagggatactggtctaaaattctctttatttgttgtgtctctgccaggctttggtatcaggatgatgctggcctcataaaatgagttaggaagatttccctctttttctattgattggaatagtttcagaagaatggtaccagctcctccttgtagctctggtagaattcggctgtgaatccgtctggtcctggactttttttggttggtaggctattgattattgcctcaatttcaaagcctgttattggtctattcagggattcaacttttttctggtttagtcttgggagggagtatgtgtccaggaatttatccatttcttctagattttccagtttgtttgtgtagaggtgtttatagtattctctgatggtagtttgtatttctgtgagaccggtggtgatatccccttcatcattttttattccrtgtatttgattcttctctcttttg

SEQ ID NO: 915531 - DNA, 416 bp, Homo sapiens
catcttccacaacggttaaactaatttacattctcaccaacagtgtaaaagcactcctgtttctctgcaatctcactatcatctgttgtttcttggctttttaataatggccattctggctggcatgagatrgtatctcattgtggttttgatttgcatttctctaacgatcagtgatgttgagctttttttcatatgttttttggccacatgaatgtcttcttttgagaagtgtctgttcatgtcctttgcccactttttaatggggttgtttttttttcttgtaaatttgtgttccttgtatattccggatattagaactttgtcagatggataaattgcaaagatatttctcctactctgtaggttgcctgttcactctaatgttagtttcttttgctgtgcagaagctcttt

SEQ ID NO: 915532 - DNA, 416 bp, Homo sapiens
catcttccacaacggttaaactaatttacattctcaccaacagtgtaaaagcactcctgtttctctgcaatctcactatcatctgttgtttcttggctttttaataatggccattctggctggcatgagatggtatctcattgtggttttgatttgcatttctctaacgatcagtgatgttgagctttttttcatatgttttttggccacatgaatgtcttcttttgagaagtgtctgttcatgtcctttgcccactttttaatggggttgtttttttttcttgtaaatttgtgttccttgtatattccggatattagaactttgtcagatggataaattgcaaagatatttctcctactctgtaggttgcctgttcactctratgttagtttcttttgctgtgcagaagctcttt

SEQ ID NO: 915533 - DNA, 603 bp, Homo sapiens
ttgaggataattttattactttggttttttcactcactaaatatttcttactgcttactacrtgtcaggcagtgttctacctaatgatgatacccaaacactcaaagctcttgtctttacggagtttacatctcaatggttactaactagctttgtcacttcacctgttgtcaacatccctaaaatgggaatagtacaatttaccacatgggtcctttggatagtaactaagaacaaccagatgtaaaggctgcctatatacttgcaaagtgttgtgcaagtgtaatatttgtgttttcttatctgtaatatgtagataaatttgttttccaagctacctcatagtttaggttggagtaaaaaatacgtgacaatattaccactaaattctttacatttaatatctaataagttgcagatgttatcccaaatactttagaatgtgtcttttacatcttacaacctacatagcagtaggtgctgtgaccactttcatttattgggtgaggaaactacagtttagagggtaagtacttgagattcgtgagagaaccaggctttgaattcaaggctgtctaattccatcttgtgctcttgaccact

SEQ ID NO: 915534 - DNA, 642 bp, Homo sapiens
gtagtaggatgagcccctattccaacatgtccggtgttcttgtaaaagggggagatttagataaagacatggaagggagaacaccatgtgatggtaaaggcagaggagggggtgatgcttttacaagccaaggaacaccaaagattgccagcaaaccaccagaagctaagggagaggcaaggagcagatgcttccaaccctcagaaggaagcgaccctgcagataccttcatccaggactttgaaccttcagaactgtgagccaatagatttctgttggttaagccactcagtttatggtgcttttctacagcagtcctaggaaactaatatagatactagtatcaagttcattggcctgattttttattgttttgtaagatttgaaagagataaccatgaaaataaagcacttaatataacgtctggcacaaagtaagtgttcagtataaacatcttgaataagtacataagcaaatgaataaatattcatttgtacaaataaacatcattaagtacataaatgtatgtctattcatttgtttatgtacttaatacataaaattttatttatgtatttaatatatttgatgtttccattgtgtttgcacaattattggaraaatggagatgttgacctgaa

SEQ ID NO: 915535 - DNA, 630 bp, Homo sapiens
cacaagcttcagtagctgattcgatcaagcttcagtagccgattcrattcgatgaaagaaagggtatcagcaactgaagatcaaatgaatgaaatgaagtgagaggagaagtttagagaaaaaaagagtaaaaagaaacaaacaaagcctccaagaaacatgagtctatgtgaaaagaccaaatctacatcgattggtgtacctgaaagtgatggggggaatggaaccaagctagaaaacactcttcaggatattatccaggagaacttcccaacctagtgaagaaggccaacattcaacttcaggaaatacagagaatgccacaaagatactcctcaagaagagcaactccaagacacataattgtcagattcaccaaggttgatatgaaggaaaaaatgttatgggcagccagagagaaaggtcgggttaccaacaaacggaagcccatcagactaacagtggatctctcggcagaaactctacaagaaagaagagagtgggggccaagattcaacattcttaaagaaaagaattttcaacccagaatttcatatccagccaaactaagcttcataagtgaaggagaaacaaaatcctttacagacaagcaaatgctgagagattttg

SEQ ID NO: 915536 - DNA, 589 bp, Homo sapiens
tgtgaatataaattttcaaatctgtttggtagatacctaggggcataagtgctgaatcatgtggtaagactatgttcagctttgtaagaaactgtcaaactgtcttccaaaatgggtgttacattttgcattcctaccagcaatgaatgagtgttcctgttactctacatcctcaccatcaattggcatggtcaatattttgaattcagccatcctaataggtatgtaatatattccattgttatttttatttacattttcctaataatggatggtgctgagcatcttttcatatgcttattttccatctgcatattttttcttatgagatgttcatatcttttgcccactttttagttgggttgtttgttttcttattgttgagttgtaagagttctttgtatactttggacaaaagttctttatcggttgcgtgttttgcaaatacttttcccagtttgtgacttgtgtttttattctcttagcagtgacttkggcaaagcagaagtttttacttttaataaagtccaatttattaattttttctttcatttatcatgtttttcatgttgtaaggtctacaacaatt

SEQ ID NO: 915537 - DNA, 615 bp, Homo sapiens
ttatagagactgtgttgacattgtaattaatttawcattttattaatcagtccaatggacttttctctcatttcccttgactgctctgtagtattaggtagtgttaactacttattttgaatagttgcatttgctaagtattaaatcttgttttatatcttgtccctgggctacataattccattttatggatttgatttagctgtcacctagctgtaacctctccatagaatgttaaagctgtatttctgcttgcttaatgaatatatccactttgatgttttgcaagaacctcaagttcaatgttcaatgatatcaaaatctattgaattatttccacataccacatcctagccaaacctgctcgctcttctatattttctatctttgtcattatgtggcctcgttccgttgtctattcagtgatcttactgctctaatacaataacttattaactgacctaagttcctctagaatttttttcccagtggatgctccataacctgagcagaatgtctctgcacatagaactatttgacacttctactcagaaatgtttgatggcttcccattgtcctcagaacataatctggatttttagcatggtatcgagg

SEQ ID NO: 915538 - DNA, 596 bp, Homo sapiens
gtaagaggaagactgcttggatgaacagcccaggttttatgacactttcaagagctcttatgttctgggtctgtgtataaggcaattgagatatgttaactgagatatttcagagargctgacacagccctgattacagtcttttatttctgaattgggctaaaaatgtagatcaagctttgatattcacctttcagtattttactgccattaattagtaagcttggggtgggaaaaagaagaaataacctggcatggaattttattattgctaatagtcgattatcattcaaacatttaagtttatatatgcatgactcgtgaagatcatgagatggtaaactcagatagtcctggattcaaatattagctcactattttaagctgcagtatgattttcagcaaattacttcatatctttgtacctgggcttctgtatatgaaaaatgaggggcaagaatccctgtccgacagggtccttataagaattacacatgagagcttttagaatccagtaggtactcaatatttgttaattgagtctaaaaaaatctaaattttttcccctgtaaattctataccctggttctactgtt

SEQ ID NO: 915539 - DNA, 684 bp, Homo sapiens
aaaatcacctggaataaaattattgacataaaccagtgtattgagacagtccagttgggaactgctgccttaaaaakaattattcttctctggaaagtctcagattcaagaaacagaacacagaattacactgttaatcaaagagcttagtaataattctataagcaagatgctctgttttatgttaaagaattaccctaaaatacatgtcaagaggaaataacattatttcagctcaaaaaaaaatacattcttgcaagaagacataagagctgtcatacacttgaattatggtgttcatttatcaaataattttgacttggtttaccacaggtgaaaatagatatgattctacagaggaactttttgtttttccccagcaagacttgtcccaaatttaaataaaaattaaaaagatcctatgtggaagttttgaaacgatataacattgaatctggagtgtgcctcaatgtaaagagtaagagtgcattaatcagagctaaaggagatttgaggaaatacctactgtttcttttcaaacattccattttattggtcctagcatggaaccacataaaaatcctaagagaacagtaagtgaaactgagtttagggagaattacatactaggttcccatatttccttctacttttcattttgatgttcttgaatttagaattctg

SEQ ID NO: 915540 - DNA, 684 bp, Homo sapiens
aaaatcacctggaataaaattattgacataaaccagtgtattgagacagtccagttgggaactgctgccttaaaaataattattcttctctggaaagkctcagattcaagaaacagaacacagaattacactgttaatcaaagagcttagtaataattctataagcaagatgctctgttttatgttaaagaattaccctaaaatacatgtcaagaggaaataacattatttcagctcaaaaaaaaatacattcttgcaagaagacataagagctgtcatacacttgaattatggtgttcatttatcaaataattttgacttggtttaccacaggtgaaaatagatatgattctacagaggaactttttgtttttccccagcaagacttgtcccaaatttaaataaaaattaaaaagatcctatgtggaagttttgaaacgatataacattgaatctggagtgtgcctcaatgtaaagagtaagagtgcattaatcagagctaaaggagatttgaggaaatacctactgtttcttttcaaacattccattttattggtcctagcatggaaccacataaaaatcctaagagaacagtaagtgaaactgagtttagggagaattacatactaggttcccatatttccttctacttttcattttgatgttcttgaatttagaattctg

SEQ ID NO: 915541 - DNA, 573 bp, Homo sapiens
cattcattcacacacacacgaacacacatacacacacatacacacacatgcacacacatacacacacacacacagtcactgggttttatccctaaaacaaaaaaagatggtaaagcataggcctagactgagtgtatggatatagaaaatagaatcatgaaggaaaataataagaatgctctttaaaatgtgatcatattgcctcagtttgttctataaataggtgagactgaattataaataagtaaaattggaataaaaaatgataaactaattttgtcagcaatatcacatccttgtcaccatttcctgagcacttactatattcaggttctctcttcattttttctgttcttcactataccactatgaggcaggtaagaatgtatccaaatttacacagaggtgtgctgtgaatcaaaacagctaaaaaaaaattttgtccagttctaagactgaaacrtggccaaggagctgctctgaaattcagattcagtctgccgggcccaggccccattctctccattctgccccaatctctttcttggtttaacgttttctcctgcagggagg

SEQ ID NO: 915542 - DNA, 582 bp, Homo sapiens
attatcagcccataatatgaagccatgactgtgtttttccatcccacaatctcaacaaccatgattacaattgtctggggaccaycttgaaactggcctatgtccctttatttgttctctgttttctcttcttacctgggtcccagtatttcttaggtgtttcttaagaactccaaatagtgtgttcagtgctgaaggcaaaagatgaacaagatggtatctctgccttcacacaatttatgagactaataggcaaaaaagtactgtaagcaaattctttctatttggtttgtttgttaaatgcaacaataaaagcatgtacaatctgtagagaaaaacaaggacagtctactctgaatgatgaggtgatgagatgacaggttcctgttctgcaagaccccaggctgcttttgatggtactaagagttaaccacagagcgaagggaaaatgttctgtaacctaagtttggagtgataactttaaagttgagatctcatctgtctttaggaatttctcgttacctccaattttagcagggatatttgacacaaactgcaaagaattattaatcctctaggctc

SEQ ID NO: 915543 - DNA, 613 bp, Homo sapiens
ttttctttttccagaattttcatatatatgaaatcatacaataaatggcctctgaagtctggcttctttcgcttagcaaaatrcatttcagattcattgataatttttctgtgaattaatagctagttcctctttatcactgcatagtattccattgtaccacagtgtgatggttaattttatgtgtcaacttggctaggctgtatgtccagttattcaatcaaacactaatttatgtgtctctgtgaaggtattttgtagatgtgattaacatctatactcagtttactttaactaaaggtgattacctttgatcatgtgggtagcctcatctaatcagttgacggccttaaaaacaaaatctgagatttcccagagaggaagaaatttggcctcaagactatagcatcagctccttcctgagtttccagcctgttggcctgccctacaaatttccgacttgccagcccctacagtcatgtgagccaattcctttcaatctcttcctatttcaatagatagacagccaataggatatagatcctccggtttctctggagaaccccgaccgatacacaccgtttgtccattcacctattgaaggagcaggcca

SEQ ID NO: 915544 - DNA, 609 bp, Homo sapiens
gctataaagaaatacccgagactgggtaatttataaaggaaagaggtttaattgactcacaattctgcatgactggggagacctcaggaaacttacaatcgtggtagaaggtgaagggaaagcaaggaccttcttcacatgcaggcaggagacagtgtgagcaaagggggaagaaccccttataaaactatcacatctcgtgagaactcactatcactagaatagtatgggtgaaaccacccccgtgatccaatcacctcccaccaggtctctccctagacacatggggattacaattcaagatgagatttgggtggaggcacagccaaaccatatcaccagggtaccaaaatcattcccccgagtggtgtccctatccagaggccacagacaggacacctgccatgtgaaggtgacatggcttgaatgtttgttccctccaaatctcatgttgaaatgtgacctccattctgcagttatacaagcagtaagaataaaacaaaatgaaacaamcaaaaaagaaatgtgacctccaatattggagatagagcctaacaggaggcattgcaacatggggatgaatccctcatgaatggcttagtgccatcc

SEQ ID NO: 915545 - DNA, 620 bp, Homo sapiens
agaacctttgttagggcagtgcagaagggaaatgtggggtcagagcctccactggggcactgcctagtggagctgtgagaagagagccaccrttcttcagaccttagaatagtatgtccactgacagcttgcactgtgtgcctgaaaaagccacaggcactcaacaccagcctgtgaaggaagctgacagggtggctgtaccctgcaaagctacagatgtggagctgtccaaggccatgggagcccacctcttgcatcagcatgacctggatgtgagacatggagtcaagggagattattttggagctttaaaatttaattactgccttgttagatttcagacttgcatggggcctgtaaccactttgttttggccaatttctcccatttggaatgggtgcatttacccaattcctgtacctctattgtatctaggaagtaataacttgcttttgattttacaggctcataggtggaaggaacttgccttgtctcagatgagactttggacttggacttttgggttaatgctagaatgaattgagacttttgggtactgttggaaaggaataattgtgttttgaattgtgaggacatgagatttgggaagggccaggggc

SEQ ID NO: 915546 - DNA, 701 bp, Homo sapiens
cgctcctgtgtgggttggtaggacagcagcagcagcagcttctgtrgggctccaggtccgacccagccccagcccctccctccctggctccaggaagtctggagccccgagactcccaggaagggccccggcctgggcctgctggggcctctgtgggctgagacacggggaagatccaggccctcaacacaccagactttcatgtgctggagtcagggcagcatctggaggtggggcagagccaggaggaacctcagtgtcatctggtcatcagaggtaaagaggtcccaaagatggccatatcttgcccagagacacatagtgaatttgaagacatgcagtggaccactctgtaaaggacggccctttcatattcttcttcccagcaaggctgtgagggaggcagggatcatgagtcccattttaccaggagggaacagaggttcaaagatgcagtgatttgcccaaagacacacacagtgacaggctgtacctttcccagttcctggtttttctgtttgtttgttagtttctctctctctctctgtctctaattactgaccaatcagcaaactttccccaaacacttagcttggcatagaggacccagagaagaattggttcaaggggctccctgtctggagtgtccaaggaacaagtgcatgtgaaggagagcaatacctaagagggaggggaagtgg

SEQ ID NO: 915547 - DNA, 698 bp, Homo sapiens
ttctgctatagcagcccaaagggacgaagacatcatcatattgtcctttataagacccagcatcygtaagaggggaccttaccagatgccaaaataggtggcatagatggaaaacttctgccctgttcccctcccagagctgtggtgaggttcaaatgagctaatggtcatgagcattctgtgtaaactgctgggatctgtaatatcactcatttctagagcaggagagcactgtgaggtgagtagcatgaaggcttgacaccacctggtgccttttgggaacagaagaatttcctctggctgaagcccagagggtaggaggggagggacttggggcgaggctggaagtgaagacagggccaggtgtgagggccttgaggggctgggttaatgaccctcaactgtgttctaagggtgatggggagcaaagagaggatctctagtggggagttcagctggtgtgcacagcccatggcatctccatcaggaatacagagaccttcaaagaagaagagaccactggaagtgaggatggctgagccccaacagcaggaggagagggagctctggtgctcctcggagttggagcctggagccacagacaggagctaagctggagaattctggaaggcacataaacctaggcatgggccttctgcctgcccaggccccacaggccctcctgacacaagagagga

SEQ ID NO: 915548 - DNA, 429 bp, Homo sapiens
ataagggtggagccctcatgacgggattaggaccctcgtaaaagagatctcagggagaccccgcatcccttatgccatgtgagaacacagcaaaaaggtggcagtccctgaagcagatagtgggtcctcaccagacactgactctgtctgcaccttgatcttggacttctcagcttccagaaccacgagcaatacatttcagttgtttataggctaccaagtctatggtattctgctatagcagcccaaagggacgaagacatcatcatattgtcctttataagacccagcatccgtaagaggggaccttaccagatgccaaaataggtggcatagatggaaaacttctgccctgttcccctcccagagctgtggtgargttcaaatgagctaatggtcatgagcattctgtgtaaactgctgggatct

SEQ ID NO: 915549 - DNA, 653 bp, Homo sapiens
tgtcaatatcctggtttcaatattgcactataataatttaagatgtcactgttggtggaaattgggtgacgggtacacaggacttttctatactaccttcacaacttcccgtgaatctatcattgtttcaaaataaagagttgtcttaaaagaatcaaatagccataacttgcgacagtctatttgcagcctctctctgtggtttcattgacctctgtctatggttccttcagtaacacacagttttgatgaccaaagtctttcaatcaaacaggtgattcctcccactttattgttctttttctagatagttttagcctagtttccttacctttctgtataaattttagaataatctaatctatagaaaaaaaccttcgtgagattttgattggaattgagttgaacttataagcaaacttctatgaatctgtaattatttaaaaataaaaaaattaaaaaaaaatttaaaagacacagagaggacctggaggtagagggaggaaggagagagagcagagaggaggaaggagctgatgtccactccgaggaccgtgcagtcaggggagcaggcacagggagawgagttttctactgttttcagggtctgcagtgtgtgggggctcagtcctctaacactccacatgtttcct

SEQ ID NO: 915550 - DNA, 600 bp, Homo sapiens
aatggaatttggaataaataatatgttgaattaaaatctaaaagaatttaatatcaagcgaaatggacaattcggatactaattttctacttgggatacttggactgctttgcttccatggcctgtgtcttttggaaatatattgtattttcataaaggagattttgaacatgtaaatacttttaaaatttcttgcctagcctgagtaagcaaggataaatagtaggtagatgtatcagagaccaaatgtgggttagaatgataaaaaaaaacataatgcttatagaatgggaaattacagtgagattttggctcatagatgcctctggttctttcaatggaattaatagaaagaaacatatgttagattatgaatttctatattttttctatcactggtattatttgtttttatcgaagcaatgctccatattgtcaggccctatctagatttgatttgcatttcgccaacaatagactttgcatcacaaaataaaatacmaaaaaaggagatttcagataggtctctaatataaaaaggagaattgccatgtgatctcccatatataaaagataaaatttataactacattctacaga

SEQ ID NO: 915551 - DNA, 600 bp, Homo sapiens
aatggaatttggaataaataatatgttgaattaaaatctaaaagaatttaatatcaagcgaaatggacaattcggatactaattttctacttgggatacttggactgctttgcttccatggcctgtgtcttttggaaatatattgtattttcataaaggagattttgaacatgtaaatacttttaaaatttcttgcctagcctgagtaagcaaggataaatagtaggtagatgtatcagagaccaaatgtgggttagaatgataaaaaaaaacataatgcttatagaatgggaaattacagtgagattttggctcatagatgcctctggttctttcaatggaattaatagaaagaaacatatgttagattatgaatttctatattttttctatcactggtattatttgtttttatcgaagcaatgctccatattgtcaggccctatctagatttgatttgcatttcgccaacaatagactttgcatcacaaaataaaataccaaaaaaggagatttcagataggtctctaatataaaaaggagaattgcmatgtgatctcccatatataaaagataaaatttataactacattctacaga

SEQ ID NO: 915552 - DNA, 677 bp, Homo sapiens
tgattagaacttggggttagatcacatcttaacaaaagaacaatttgtagagaagtgacaaaacaaaggaaaagtactttgaatttctggggtggcaaattgtgggagagcaaatatgtagggaaattaattatagataaaggctggttagtatttgctatgtagactactctgggtgcagtcttcaggatgataaaggtctagagtggtctctggtgattaacttctgtctttcctggtagagagggaagggggaacaccttgacaaatttatatcccacttttaggcagataggacgaaggcagagacctttcttgtgtctgcttcttctcaattgcctttacctaaaaataatctttatgtcaaagtggcatatttcggtgtggcataccttgcttcctttcaccagcaaataacaaatgatcccaaggaccaagctaggagaaaaagaaagttgtcctgggctcaggcgacttcctaagtaaggtggtactccagtgcttttcacctactgatacacactaaaacattttacaataatcaccagtaggcatcttgaaaataaagtgtggatttcattgtattacatagttctgaaattgaccatgtctttactactaactaccactactactactactactactactactactactwctactactacagattt

SEQ ID NO: 915553 - DNA, 605 bp, Homo sapiens
ttcttctctaacaagattttgttagtgaactttccttttcccgggcattctttgtttgtacctaccacttccaacctgcccagtcccaaggctatcataggmactattgatttcttctgtgaacataccaccactctgcagttgttggtcccagggataagaatggcccaagagattcaaagtgattttttcttccaaaatgttcaaactaaaacagagtcagtttctgatttacccagagttataacaatgaagacttgctaatgaccaccattttctcctcgtttttaagaacacttctgcaatgagagaataatgtagaagagcctatagatgcagaggtcaggtaacttggcccattcttggctcagttatttatgtggcccaattacgtatctgttggaattttaaatatagtctacttttgaataatcggagctatataaaagcataagtaaatgattatatttctttttcaataactcagatcagctctgttctgtaaagtcttcccttcccataccattacaacatcttttgcctttttctcctatgataaattaagctcaatgaaaacctcaatttcatatcaaatttaatgttcc

SEQ ID NO: 915554 - DNA, 651 bp, Homo sapiens
cactcacgatttggctctgtgtttgcctgttattggtgtataagaatgcttgtgatttttgcaccttkattttgtatcctgagacactgctgaagttgcgtatcagcttaaggagattttgggctgagacgatggggttttctagatatacgatcatgtcatctgcagacagggacaatttgacttcctcttttcataattgaatgccctttatttccttctcctgcctgattgccctggggttgataaaggaagcaatcacaggtatattcttctgattaacaagttccataggatttaaaatattttttagtaaatttttcttgatccaaagtattatgttactttatttttaacattattggacaatggccaaattggcctatacaacttagtaatagttgattaaggcattttttgtgatcacgcctatgtctaaactttataactgttctatacccataaatagggatattctcatgtggctgtagtaatatacctgtgattgcttccattatgaaacaggacaagtctcttactagaataagaaatgatagctaagcctcatgtctagtttatttttaaactgtcatatagccttaataatactatatcatcttacagattaggaaacagaattaacctgatata

SEQ ID NO: 915555 - DNA, 651 bp, Homo sapiens
cactcacgatttggctctgtgtttgcctgttattggtgtataagaatgcttgtgatttttgcaccttgattttgtatcctgagacactgctgaagttgcgtatcagcttaaggagattttgggctgagaygatggggttttctagatatacgatcatgtcatctgcagacagggacaatttgacttcctcttttcataattgaatgccctttatttccttctcctgcctgattgccctggggttgataaaggaagcaatcacaggtatattcttctgattaacaagttccataggatttaaaatattttttagtaaatttttcttgatccaaagtattatgttactttatttttaacattattggacaatggccaaattggcctatacaacttagtaatagttgattaaggcattttttgtgatcacgcctatgtctaaactttataactgttctatacccataaatagggatattctcatgtggctgtagtaatatacctgtgattgcttccattatgaaacaggacaagtctcttactagaataagaaatgatagctaagcctcatgtctagtttatttttaaactgtcatatagccttaataatactatatcatcttacagattaggaaacagaattaacctgatata

SEQ ID NO: 915556 - DNA, 639 bp, Homo sapiens
gtgttctttttaggtttgggtattcaggtcatgctggcttcataaaacgaattgtgggaaattttcatcttatgctatggtctgaaatagtttgaataacaaaggatctatctggtttttgaagactagctagtacccggttataagaccatgaggacttttaaaaaagggaatctctttaataaaatttctaatgtattttatgattattggtctattcaggtgttccacctctttggggacattttattttgccaggaacttctccatttcctctagattttcaaatgtattgccatagattttcacatacaacgctttgataaactcttttgcgcctttcccaaatggtgattaaatcttctttctcactctaataaacttttcaaacttcctccattgtaacaatattagctaatgcttattgatcactgatcatgtgcagagcacacggtcctaactgctttacttgtactaaactcagttcatcctcatgacaattccacgaagtagatactcttataatcctcatgctacagttgggtatgtagagaagttaaacaattgccattaggtcacatagtagcatgcagctctagcatgctgcctactaacgtscccgtgtgtgtgtgtgtgtgt

SEQ ID NO: 915557 - DNA, 628 bp, Homo sapiens
cactttatcccagctaaaagatcatggaggaaatagttaaagcccatcctaaactattgctgctaaaatctggactagtgtatatacaggcatacctcataaatattgtgtgtacagatccagatcastgcaaaaaaagcaattatcataataaagtgagtaacatgaattttggggtgttccagtatatatagaagatatgtttatactatgctgtactctattaattgcgcaattgtgtgtatcattatgtctataaaaacaatatacataccttaattaaaaaatgctttcttactaaaaagtgcaaaggatcatctgagccttcagtgagtcataatctttttgctggtggagagtcttgcctggatgttgatggctgctgactgatcagggtggtagttgctgaaggttggggaggttgtggcaatttcttaacataacaatgatatttgccacatcaattgactcttcctttcatgaaagatttctctgtaacatgtgatgctattaggtagcattgtacccacagtggcactgctttcaaaatttcactcagtcctctcaaatcctgccactgctttagcaactaagtttatgtaatattctaaaccctttgctgtccttt

SEQ ID NO: 915558 - DNA, 487 bp, Homo sapiens
ttataataataaaagaatggaaaatggtagaatttcctcttgttatgacttgtcatccttgtctaggtgaaattacccaatcagtccctgtgatatggtttagctctgtgtccccacccaaatctcatcatggaatcaggaatcccatgattcctatgtgctgtgggagggacccagtgggagataaccgaatcacgggggcagtttcccccatagtgttctcatcatggtagtgaataagtctcacaagatctgatgattttataaggggttttccctttcttttggctctcattctctcttgcctgctgccatgtaagacatgccttttgccttccaccatgattgtgaggccgccccagccacgtggaactgtgagtccattaaacctctttttatttataaattacccagtctttagtatgtctttatcagcagcgtgaaaatggttkgtaaggtttggaatccagaaagaggtctccatagc

SEQ ID NO: 915559 - DNA, 649 bp, Homo sapiens
ctctttgttgatatgactgatttttttatttgtttacactttcatccccaaatagttaatgatgtatgaatgtgaggccagaatgtaatgccagcagctagagaatttatctggaagaagtttaaagcattagttcaggtaatagcagcttattagcatttattcttccatgttaaaaatatacactcctttaaggacagtgacagctatgtaatttttggggcccaatgcaaaataaacatgtgaagccctagcagggcatagtagtcaatctcttcttctcctgtgtcttctgccctaatcagtagtgaagggcaaccgctaaaggttttcaacctcctttcaggaacttgcctggtaccaggattggggatgggtgggggaccatctccaaattacctctaaactccctgtggtgttgctagcccagagcagagatggttgctgacttactctactaccagacaccaccccacaatgcagaccttcaccttgcctgtaccaaggcccctgaaggaggtggaggggggtggagagaactgggccttgagaccttttgttggaggtcarcagcaggctggggtgggaaaagaaggatcagggatgatgtgggatagggacaaagggactgaagaggaagcctgagaat

SEQ ID NO: 915560 - DNA, 591 bp, Homo sapiens
cctggctgtatccttataatagaatgatttatattcctctgggtatataaccagtaatgggattgctgggtcaaatggtatttatgcctctaggtctttgaggaatcactacactgtcttccacaatggttgaactaatgtacactcccaccaacatttaataatttgttagtttaataatagcaattctgattggtatgaggtggtatctaattgtggttttcatttgcatttctctaatgatcagtgatgttgaacttttttcatatgtttgttggtcacatgtatgtcttcttttgagaagtgtctcttcgtgtcctttgcccactttttaaatggggttgtttgttgttttcctgtaaatatgtttaagttccttgtagatgctggatattagacctttgtcatatgggtagattgcaaaaattttcctccattttgtaggtagtctgtttactctgttgmtagtttcttttgctgtgcagaagctctttagtttagttagatcccatttgtcaatttttgcttttgttgctattgcttttggagtctttgtcatgaaactgctgcccatgcctatgttctgaatgg

SEQ ID NO: 915561 - DNA, 476 bp, Homo sapiens
accttggtgccctcttcctggtcattgatttctcagtcaaatataacctctcattcaatcagtctccatatactgcaacttatggatgccctgctataggagataaagatgatgtcctgatgaaacyataggggacgatgatctcaccttagtttttttaattcaatataacaggaattatattgttatattgatgaagaagaggttctccattaatgacctttttagtttttaaatcaagattattttattatgtagtaagactgatagagtaggcagcagtcattattgtcaagagtcttgattttagactgggttgagttctgactccaccacatttaaatgttttatttcatttaatcctcaaaaaatctttgtaaggtattgtgacccctcattttagagatagggaaaatgagtcttagaaaggttaattgaattttctaaaatctcacactgcatggtggagctattta

SEQ ID NO: 915562 - DNA, 659 bp, Homo sapiens
ccccatcatagacatacacacttaccatctgtattagtccatttttgtgctgctgataaagacatatgcaagactgggggaaaaaaagaggtttaattggacttatagttccacatggctggggaggcctcaggcactcaggtgaaaggcacttcttacatggtggcagcaagagaaaatgaggaagatgcaaaagtggaaactcctaataaagatccatcagatcttacgagacttattcactaccatgagaccagtatgggggaaactgccctcatgattcaaattatctcccaccaggtccctcccacaacgtgtgggaattataggagtacaatttgagatgagatttgggtggggacactgccaaaccatatcattcccctcctggcccctccaaatctcatgtcctcacgtttcaaaaccaatcatggcttcccagcagtctcccgaaatcttaactcatttcagcattaacgcaaaagtccatagtccaaagtctcatctgagacaaggaaagtcccttccgcctatgagcctgtaaaataaaaagcaagccagttacttcctagaaacaatgggtgatacaggtattgggtaaawacagcctttccaaatgggagaaattggccaaaacaaagggtttacagggcccatga

SEQ ID NO: 915563 - DNA, 642 bp, Homo sapiens
cttgattttgaatattatccaacagttagatcttttctgcagaygcaggggcagatggactgaggtcccctatgtacagactttctttgccctgcaagacaacccagacctttacaagttctgtacaatcaactcagctcttttagtacccatggcaggcaagcccacagagctaaagcagattccagaggtgcaatctgagactgctactgaatgtctcaacccttccagtacccctccaatcataccgtcagcttctccagctccagcatctccagtattacctactctcccctcttcactcttacctctgcaggaaatgcctgatgggaatggtcccatgagggttcaagttcccttctcattacaggaccttaagcaaataaagggagacttaggccaattttctgaagaccccgatacgtgtgtagaagctttccacaatttaactcatgtctgtggtgtttttccttctttcatagtttcaaatgtctcttttataatattcttccaacctgggaaaagttaattttccaaaccttagaatgcttggcttagagttgagctagggagaagggaaaccagaagcctgacatgctggcaaaagggtaaacattttttaccagtcgggcgtttggcttc

SEQ ID NO: 915564 - DNA, 655 bp, Homo sapiens
gccacaatagagtaaatctctaaatcaatagcaagaactttagaagcttgacaaacacatgaaaattaaacatgttagtgatgaatgggtcaaagaataaattaagaaggaaattgaaaaatgatttgaaacaaatgaaaatgaacacacaacatatcaaaatctatggaatacagcaaaagtcccagtaagaggaaagttaatagcaataagcacctacatcaaaaaagtagaaaaatttcaaataaaaaacctggccaggtgcagtggcttacacctgtaatcccagcactttgagaggctgaggtgggcggatcatttaaggccaggagttcgagaccagcctgggcaacatggtgaaacccccatctctactaaaattacaaaaattagccaggtgtggtggcacatgtgtgttgttggcacatgtttgtaatcccagctacttgggacgctgaggcacaagaattgcttgaacacaggaggtggagtttgcagtgagccaagatcctgccactgcactccagtctgggtgacagagggagactcwgtctcaaaaaaacaaacaaaaacaaaaaagcctgatgatgcatctagaagaactagaaaagcaagagtaaaccaaaaacaaaaattgtaaaagaaaagaaacaat

SEQ ID NO: 915565 - DNA, 598 bp, Homo sapiens
gcaatgcgtaattgtgtaatcgaaaggaataaaattaaatagaattaacataytaacgagcagttaaaatatgcagaatgctatgctaagtattgtaggaaacataaatacaatataaattcttatccttctaaatcatcaacaacattaaattctaataatggactttctttctctatactaccatacagaatgttagagcaacactacacatgtaattcctgtagccaattttatttacatgctcctaaacttgaagcccactgctttatgcttctgttaaatagctttctttattattttaatgtttaaaaatcttttgctaattttacatttactagtattttcttccttaacattattctctgtagttattggcaaatgacataaggaaggttcttacattcatctatatttagccttatgtaacatggagagattttctgtaaattgtaattccatctgtttaagaagatttctgttaatacctgtattagtctcccataataaaatatcatagatgggtggtttaaacaacaaaaatttatttcttacagttctgtagggtgggaagtccaagattaaggtgctggcaagg

SEQ ID NO: 915566 - DNA, 626 bp, Homo sapiens
ctgctataaagacacatgcacacgtatgtttattgcagcactattcacaatagcgaagacttggaaccaacccaaatgtccaacaatgatagactggattaagaaaatgtggcacatatacaccatggaatactatgcagccataaaatatgatgagttcatgtcctttgtagggacatggatgaaattggaaatcatcattctcagtaaactatcgcaagaacaaaaaaccaaacaccgcatattctcactcataggtgggaattgaacaatgagatcacatggacacaggaaggggaatatcacactctggggactgtggtggggaagggggagggatagcattgggagatatacctaatgctagatgacgagttagtgggtgcagcgcaccagcatggcacatgtatacatatgtaactaacctgcacaatgtgcacatgtaccctaaaacgtaaagtataataataaataaataaataaataaataaataaataaataaawaatataaataaataaaaaattaaaaaaaggaaaaatattttttctacatttgaaaactcaaacgccaataaatagctgtagaggttaaaacaaacaaacaaacaacaacaaaaaaaaggtt

SEQ ID NO: 915567 - DNA, 606 bp, Homo sapiens
agctgagttgggcatactgcctgggaaatgtccctgtacccctttcattcagaatgtccaataatgcctagcatggtcactaaggactactgagagaaggctgccaggagggtatgttttatagaacatcttgagcctctggagttattttggcctccctcccacttcccctttaccttcccttccatagaaaggtgctggtgataagcattggggtccaagaacataatttaacctgagttctcgatctctccagctttctgaaggatccaagtcaagaaacgctttgcaatttacaacccctaccttgtggtactgccaaatctttcttaagaaggctgttttatattccctcttgagtttagtatgccatgtttcccttcgtatattaaaagatgaaaatcaaggtgatggacatgttcccttagtaccagagtcagctgtcaagtttcgctggttgactttatctcctcctacaacacttcattgccagtatgrtcttcacagggagaacctaggagagtacatatgtctctctcacttttttcacctggtgagctacctgggaggtgaccagaaaaaaagaaagtgaaattcatacacaag

SEQ ID NO: 915568 - DNA, 432 bp, Homo sapiens
tctttgctaagcataacaagagtgtcttttactccatttcccaaaaagttcctcattgtacctgagaccacctcagcctggacttcattttccatatcactatcagcattttggccaaagccattcaataagtctctaggaagttgcaaactttcccacatcttcctgtcttctaagtcctccaagtttctatgtaaagttccaaactttcccacatttttctgtcttctgagccctccaaactgttccaatctctgcctgttacccagttccaaagttgcttccatattttggggtatccttatagcagtgccccacacccttggtaccaatttactgtattagtttgttctcacactgctaataaggacatacctgggactgggtaatttatacaggaaygaggtttaattgactcagttctgcattgct

SEQ ID NO: 915569 - DNA, 603 bp, Homo sapiens
acaagagatgggaaaggcaatttgtaccccagtcatggaatggggatatggtttctatgttcatatttacatttcaagacaggtttaagaagatttaagccagatctaaatagaaaatatagctgaaactggatgtaagagttacaaaataaaaagtatacattatataactgatggtggaagacatccaactcagaatgagaaaacagattcaaaaacaccttgaccccaaagtctgatggcctagtccactagaataattgtctttagtttatgaaacgtttgcttataattatccaaaattttgaaagaatcaaggtcaagtatggaagagagaatttccttcagagtaagagaggtctgggttctgcctcgggcaataaatctctcagggctcaaattctttctcatgagaatggagataatcacacagtatcagtgtggcatgaccactggaccgttagagataatgaaaataaatactatatgtgacatkaaaatattaatcatgggaatatagtgttccttctgcacttggaattggagcatgattggataatatgttccagatatttaactgttacaacatgtaaatgaaacaaa

SEQ ID NO: 915570 - DNA, 628 bp, Homo sapiens
ctttattctctaatcttgtcttcacactttatttcattaagttgatcttcaatctctgatattctttcttcacttgatcaattcagctattgatacttgtgtgtgcttcacaaagtcctcatgctgtgttttgcagctccctcaggtcatttatgttcttctctagactggttattccagttagcagttcttgcaacctcttatcaatgttcttagcttccttgcattgggttctgaagcctacttctgtcaattcgtcaaactcattctccacctagttttgttcccttgctggcgaggagttgtgatcctttggaggagaagaggcattctggtttttggaattttccgccttttgcactgttttttccttatcttcatggatttgtctacctttggtctttgattttggtggcctttggatggggtttttttttaatatatactttaagttttagggtacatgtgtacaacgtgcaggttagttacatatgtatacatgtgycatgttggtgtgctgcacccattaactcatcatttaacatcaggtatatctcctaatgctatgcttccccgctccccccaccctacaacaggccctggtgtgtgatgttccctttcctgtgtc

SEQ ID NO: 915571 - DNA, 566 bp, Homo sapiens
tttatcatgcagatcttgttcaacaggttaaagataagcagaattgtctaaaatagaataatacacttaatagaattgttggcaatttttatagaacactatagataacatttaaaccagcaaatatccatctaagaactattaataaagagagacagggcttaattcacatacatgctggagatcatgacattttagattttgatccacaaaatttcacaaatgaaagataaaaagtgatggccaacatccaaatagcatcgatgaaaactcccagcaataacatgacttataaagataaatatctttccctgatatctcccccacttacccaacctaaaggcttccttcttccactctttaacaaaattgtgcagcaactgacatcagggaatagctcttctttcctgagcctctctcctgactggggatccagttagagtctgttaagatatttttcttaaataaagggaaatctatttcaaacgttgacagcaaaattacgtatyattattacaagggtatattagggaatttaaatgcaaggagcatagctgagtttcagt

SEQ ID NO: 915572 - DNA, 613 bp, Homo sapiens
tgatattggatgtgggtttgtcataaatagctcttattattttgagatacagcccatcaatacctaatttattgagagttttcagcatgaagggctgttgaattttgtcaaaggccttttctgcatctattgagataatcatgtggtttttgtcgttagttctgtttatatgctggattatgtttattgatttgcataggttgaaccagccttgcatcccagggatgaagtcaacttgatcgtggcagataaggtttttgatgtgctgctggattcggtttgccagtattttactgaggatttttgcatcgatgttcatcagggatattggtctaaaattcttttttttgttgttgtgtctctgccaggctttggtatcaggattatgctggcctcataaaatgagttatggaggactccctctttgtctattgattggaatagtttcagaagaaatggtaccagctcctctttgtacckctggtagaattcggctgtgaatcagtctggtcctggactttttttggttggagggctattaattattacctcaatttcagagcctcttattggtctattctgggattcagcttcttcgtggtttagtcttggg

SEQ ID NO: 915573 - DNA, 593 bp, Homo sapiens
aacactacacatctacaaccatctgatctttgacaaacctgacaaaaacaagcaatggggaaaggattccctgtttaataaatggtattgggaaaacaggctagccatgtgcagaaaactgaaaatggaccccttctttacaccttatacaaaacttaactcaagagggattaaagacttaaacataagacataaaaccataaaaacgctagaagaaaacctaggcaataccattcagaacataggcaacataggcatgggcaaagacttcatgactaaaacaccaaaagcaatggcaacaaaagccacaattgacaaaagggatctaattaaactaaaaagtttctgcacagcaaaagaaactatcaccagaatgaacaggcaacctacagaatgggagaaaatttttgcaatctatccatctgacaaagggctaatctacaagtaacttaaacaaatttacaagaaaaaaaacaaacaaccccrtcaaaaagtgggcaaaggatatgaacagacacctcgcaaaagaagacatttatgtagccaacaaacatatgaaaaaaagctcattatcattggtcattagagaaatc

SEQ ID NO: 915574 - DNA, 593 bp, Homo sapiens
aacactacacatctacaaccatctgatctttgacaaacctgacaaaaacaagcaatggggaaaggattccctgtttaataaatggtattgggaaaacaggctagccatgtgcagaaaactgaaaatggaccccttctttacaccttatacaaaacttaactcaagagggattaaagacttaaacataagacataaaaccataaaaacgctagaagaaaacctaggcaataccattcagaacataggcaacataggcatgggcaaagacttcatgactaaaacaccaaaagcaatggcaacaaaagccacaattgacaaaagggatctaattaaactaaaaagtttctgcacagcaaaagaaactatcaccagaatgaacaggcaacctacagaatgggagaaaatttttgcaatctatccatctgacaaagggctaatctacaagtaacttaaacaaatttacaagaaaaaaaacaaacaaccccgtcaaaaagtgggcaaaggatatgaacagacacctckcaaaagaagacatttatgtagccaacaaacatatgaaaaaaagctcattatcattggtcattagagaaatc

SEQ ID NO: 915575 - DNA, 621 bp, Homo sapiens
gaacttagccctccaaaactccaatgtttgaagactcagcacagaagactgagaaactagagcytggaatgaattagtaaaataaaaacagagtagaaatctgggaggccaaatgagaaaaatgtttccaggaagaagaatttatcaactgcaacacataaacatttggatctaataatatggaaaacattaagaccttccttactaagaagaaatttggtgataaacgcctgataggattgagttaaaatgtaaatggaagggaagaaagtgagaaaagatttgctgtcaataatatcaggtaatagggcagtagcttaaggagaaaatgggttcatcaaagtttattttggtttctgcttttcaaattgagagacatcactgtccgtttgtatgtcaggaggttggtgatttcttaatggagcttatcttacactacagatattattttgtctgtgtcctggctttccttgcttccccaaaagataggtaaggttctgattccattgattcactggcaggtgtattcagagatgagggcagcccttcctggtgcatcttcctatgcaggcttataggggaggcctcagtttttacagtagtattgccttaccaaagctt

SEQ ID NO: 915576 - DNA, 619 bp, Homo sapiens
agtaaagtgtcagcagagaggtagtaagagatactgagagaatgatttgaaagttctgacaatagctaggctggatagtgagatgrcaagggtagggtggacagacaggaaggaggcactttgaaagggcatcatctttgctatgggaactcatggagaaactggtggcagggctacccatgccttaggacttggaagggctgtcctgaggagtttaacctaggtggagaaattaaatgacccctgagaggagacaaggtcaaaatggagagagcaactgggtatgttggacttgaagaaggcaatagcaggtatgcatggtgtagaaaaagaggcaataatgttagtaatgtcaagagctacttgggattattcagggctgagtttggaagtatagtacgcattgggtagatgggacttaaagaagtcttcatgtgctggacaccaggcagggaaacactaaataatcatttggaaccaaagatgcagtgcttaagattttatttctgaatatatgctaaatgtataggaattccattttgtctgtgttatttgcatagaatcaatacaggattttttgaattaattgcacaggatattttgaggtgagctgaaatcc

SEQ ID NO: 915577 - DNA, 705 bp, Homo sapiens
tataaatggggagccaagtggccagtggtgtggtacagacatacaggtttcactctcactgatcggcctccgtaagcatcaatgtgtgcagctttgcctgtgggttcccataaacaagactacagtctgtgccagtagctaccagcaccagcacccgctgtacattgctgggggaccagtggattgctaattctacatgtggcctccagtcgcccagtgtcttcctaagcagggcaccttggccagttccctaatcaaacagaaaaggctctgcatttccacctggctgcagcaagcagtcttcaagctggagccgcccaggtgggacagcgttgtgcagcagtgtccttctcccccttggacattttctggaattgctgctccagagacaactgtctccacaaagttaagagtacttcactgggctgcttattgattttctctcagtcaaccctggccaaaatcaaatctatgcacatatgtgagcgtgtcactcattggggcccccttttatcccatgggggaaccccctgcaggtgggggagcttcctcttctttacagcatggacccctcagtcccgccgatggccttctgcttccctgagagccaccatagcagtggtcasttcatgtgcgcggcaccctacgtactaggtgaagacagcagctagggagccaaaggcactgaggggcacaggtcccaac

SEQ ID NO: 915578 - DNA, 577 bp, Homo sapiens
ataatattggctgtgggtttgtcatagatgctcttattactttaggtatgttccttcaatacctagtttattgagagtttttaacataaagtggtgataaattttatcaaaagacttttctgcatctattgaaattatcatgtggtttttgtctttacttctgtttatgtgttgaatcacatttattgatttgcatacgttaaccaaccttgcatcccaaagcctacttgaacatggtaaataagctttttaatatgctgctgggtttggtctgctagtattttgttgagaatttttgcatctatgttcattgaggatgttggcatgaagttctttgttgttgttgtatctctgccaggttttggtatctgatgattctggcctcacagaatgagttaggggtgacacccttctcaattttttggaacagtttcagcaggagtggtactagctcttccttttatatctggtagaattcagctgtgaatccatctggtcctgggcttgttttggttggtaggttattcattrctgactcaatttcagagctcgttattggtctgttcagggattcaat

SEQ ID NO: 915579 - DNA, 596 bp, Homo sapiens
gtgtctcagccaggttttggtattaagatgatgctggcttcataaaatgagttagggaggattccctctttttcttttgtttggaatagtttcagaaggaatggtaccagctcctctttgtacctctggtagaattcagctgtgaatcctcctggtcctgggcttcttttggttggtagactattaattactgcctcaatttcggaacttgttattggtctattcagggattcgacttcttcctggtttagtcttggggtggggggtgtatgtgtccaggaatttatccatttcttctagattttctagtttatttgcatacagctgtttatagtattctgtgatggtagtttgtatttctgtgggatcagtggtgatactccctttatcacttttattgtgtctatttgattcttctctcttttcttctttattagtctggatagcagtctattttgttaatcttttcaaaaagccagctcctggattcattgattttttgaagggttttttctgtttctatctccttcakttctgccctgatcttagttatttcttttcttctgctagcttttgaatgtgtttgctcttgcttc

SEQ ID NO: 915580 - DNA, 600 bp, Homo sapiens
aacgttgcaagtatgtggaaattaaatatacatttttgaacaaccaatgggtcaaaaaagaaatccaaacraaacatatctggaaacaaataaaaatataaatagaacttaacaaaattttctgaatgcagcaaaagaagtactaagaaggaagtttacagtgacaaatgcctatgttaaaaaagaagaaaggtctcaaataaaaaaccccattgtatatctcaaggaaattgaaaaataagagcaactaaatccaaagcagactaaaggaaataataaagattatagcagaataaataaaatgaagaagagaaaaacaatagaaaatcaatgaaactaagagttggcttttgagaagataaaattgaaaatattaagctagagtaaccaagaaaaaagagagaagactcacataaaatcagaaaacagagagaatacattacaactgataccacagaaatgcaaaggattataagagattactattaacaattatacaccagaaacctgggaaacctagaagaaatggataaattcttggaaacatacatcctaccaagactgaatcatgaagaaataaaaagtctgaacaggccttta

SEQ ID NO: 915581 - DNA, 458 bp, Homo sapiens
gcttggagggttccatgcccacagagcctggctcactgctagcacagcagtccgagatcgaactgcaaggcggcagcgaggctgggggaggggcgcctrccattgctgaggcttgagtaggtaaacaaaacagccaggaatcttgaactgggtggagcccactgcagctcaaggaggcctgcctgcttctgtagattccacctctggtggcagggcatagctgaacaaaaggcagcagaaacctctgcagattaaatgtccctatctgacagctttgaagagagtagaggttctcccagcacggagtttgagatctgagaatggacagactgctttctcaagtgagtccctcacccccgagtagcctaactgggagatacctcccagtaggggccgactaacacctcatacagccaggtgctcttctgagatgaagcttccagaggaaggatcaggcg

SEQ ID NO: 915582 - DNA, 551 bp, Homo sapiens
gatggatggaaaggagtaatacacaggactaacaagatgaatatttactgaagatttctacawtgttcacttagggtcctcaagcccctcttgcttctacattcaggatgatctccagccagacattcacatccagtttccaaaaaagcacagttctttttaaaactaaaactgaataaactgtatagagggaaccaggcaaatttatttggatgctggtatctggaagaaaatcttgcattttggcatgttgaggaactgtagcataacaacttcctgacctttcaagctgaaacaaatcctgctgttggcccagaggacagagttagccatctatcttatttcttcacatttaagtttaaacaggcaacaacacattactgccttttgaggaaagcctgcaagagaaaaatgtgagatagagaaactgatccaagaaaaaaacatttatcaggaaagataaaaaaaaaaaaagttacattacaattgtaactagatccactttgattttgaagatgttttatacatcaagaaaaggatgtcacgaataa

SEQ ID NO: 915583 - DNA, 585 bp, Homo sapiens
ttttacttaaaatattcagaagcatttccccctctcttagaaagccaatctagttgttcctcaaaatccattatataaaagagtgaaatacacacacacacacacacacacacacacacamacacacacacttctccattagattttctaatctaagcattgtagatacaaaacaaggacagcaggattatcagtaaattgataaaattataagtgcaaaatttgtttagaagccatggaatgttataattaaaaatgaaacccccaaacaagtaaccaatatctttgctttggttgattgctgtgtaacaaaccaccctcaaaattcagtggcttaggctagcacttaattattctctctcacacttcggtgtgttgattgggtcaatatggtggctctcacttggggtctctcattgaattcaaatagctgctggggctccagcttgctaaaggctttactggcctagacatatacaatagcatctacactcacatgtcttctccttggctgggttgactgaaatagctggagaatgtccacgtatctccgttttccccatgttgctccactgcttggctagg

SEQ ID NO: 915584 - DNA, 649 bp, Homo sapiens
tctaggaagtgaagtttggaggtgtgagttctgtttctgccccagaaacctgcgctggctctggttctgggagatggagccttgagcatgctgtgatgtgacatggtggctgcagccagggctggtcgtcctccaaagcaccctgcccaggccccaggggagacagacccctgccttccttgctgggtcttcatgtgcttcctcatcactacactccaggccttgatcaaataaacgcatctgacctattcctagattgtttcccaccagcccaaattagtttatcagttttgtttttgttgccttaggaagcatggagcctccatcttcttggcagaaaatgtcgctgtgagggagaaagacaaagaggaacgcaaggtgactagggctccaacagagcaggcctggactgcaggatcgtggatagaaacaggtagtttggaagaggctgctgcacaggaaaccatatggggcgggtgctggagcctggtgcctcgacggtggtgtctgcagatttttagggctgcccgtagaggggcctyctgcagaaaatgagtcatgatggagaggcagccaccgttccaatgcagtgagcttactctacttccactggacttctagagggtttttttttttcaattatagaata

SEQ ID NO: 915585 - DNA, 621 bp, Homo sapiens
tagaggatatactaataaaatctgtgaatgacctaaagctacaaggggtaataaataccagtatagtagtaatactttttaaaaaatagctaacagctaacatactacagcacttaccacatgcttggcacttttcttaaacacatcacgtgttggcatttaatttttgtagcagcccaatgaggtacttcacattgttattctcatcttacagatgaggaaactgagataaccagttgcagaactaagattcaacctcaggccatctggctccagaacctatactcgtaaccccttgctatgaaataaacatgatacaaagctatttcaatagactggagttatgggtaggacatgagatgaaactgaataggaatatgtgggaactactgtttctagaatcagaaggcattgagacaggatgggggatgagatttgtcagcaacatatctgaaacacccagaggagtttggttgtctacacctcagcytgaatccacagggtggcaaggcgggccagtccacagcctgaactccaggctccatgcttctatctgtttatttattgtttcgtttttctttttagttgccatacaattgtatatgtttatgagatacagag

SEQ ID NO: 915586 - DNA, 655 bp, Homo sapiens
gccttcacatctgaggccccactgcctacaaactgaaaatgaaatctgccaaaacgggttggggagctccactcctgaacatagctcgtcccagtcccttctaggcatgaggtccctccacacctgggggagaccctcccccaatctcccaatgccaccttctttgcccctccagtgtcaggttgaagctctgggaatgaacgtttgaagttctaaacaggatttcttcccaagtcctcagtcactcaacggcaaactatgaagtgtccccagcctgtgaggctcctcctgcagccaaaactgggagggggcactgagtctgggcccaggctttcttccaaggctaggacactcgggcccttccgtggctctcccagtgcagccctgggctcagcactgccctcccaatgtcccggaaggaggccgctgtggccctggctccgaggcccaggcccaatccatcttcccagccagtgactcgctctgacaacagggccgagctgccgtggcatttgcctctgatctcygctggccaggcatttgtcaggcagcctgctaggaatgaagaatgggcgcttggtgaggcacagattacccgccccagaggcccctgatgaattgcagttcagagctcagctgcctggggccatggatc

SEQ ID NO: 915587 - DNA, 646 bp, Homo sapiens
atattctataattgaaaaaaaaaaaccctctagagtccagtggaagtagagtaagctcactgcattggaacggtggctgcctctccatcatgactcattttctgcagraggcccctctacgggcagccctaaaaatctgcagacaccaccgtcgaggcaccaggctccagcacccgccccatatggtttcctgtgcagcagcctcttccaaactacctgtttctatccacgatcctgcagtccaggcctgctctgttggagccctagtcaccttgcgttcctctttgtctttctccctcacagcgacattttctgccaagaagatggaggctccatgcttcctaaggcaacaaaaacaaaactgataaactaatttgggctggtgggaaacaatctaggaataggtcagatgcgtttatttgatcaaggcctggagtgtagtgatgaggaagcacatgaagacccagcaaggaaggcaggggtctgtctcccctggggcctgggcagggtgctttggaggacgaccagccctggctgcagccaccatgtcacatcacagcatgctcaaggctccatctcccagaaccagagccagcgcaggtttctggggcagaaacagaactcacacctccaaacttcacttcct

SEQ ID NO: 915588 - DNA, 655 bp, Homo sapiens
ttctccttttctctttctgagactattaaaggtggttcttatcagtaagggcagcttttccccttttctcacttcctccccactcccccttkgtctggaggttcctgtggcagaaaggaacatgtgtttcttatatgtgagtaactctgatatctattagagtctgctgagtgcagagagcttagtcactcctgggggatgatgcgtctatatcgggcctcagctcctatctacagcctccgtcaatgtcaaaaagatttcagggcaggtgtgaggtttagaattgagggaaggacaagagctagtgagacagccttcactgagagagggactgacggggcccccatgaccatctcgtgtttggagggtctctggaagggctcctgagactcagcacacagtgctgctcatggctgggctttattcctgtgccatggtgaggacacagggctggatcataaggggtcaaggcacaggcagagtctgaaggaacccatgtgagactttcttatgctctttccgtcccaagagggtcccacagagcccactgtccctccacaaaaatgcagcaaaacatgtgggatgtttctgcccagggaagcccagtagagactcagagtctaaggtcttaactggacgctggtcatatcgtcac

SEQ ID NO: 915589 - DNA, 584 bp, Homo sapiens
aaacagccagcatggggtaacagtgtaagcactgtgaacatttcttctctgttcttacccatcttcaaacagaaacaaccaggagcagtttaacagtgatacttgagttatgaacttcatacatattgcttaattgtaatggcaaattaatgtgttaacatttatagaatggtactgtcattgaagtttgaatttaaatgtgggttttaacccagttctataataattgctgtgctctgggaaacactgaatcttttcaaggaggacagctatttaactataagtagagtcatttgaaatgcagaagaccagaatatttattcaaagagtggtagcaaagaagtgagatgagaactgaggtggagtgttctttccatcctagtggagagaacacagagctgtgagtcagggtatctggaatctaagcatgtctccaggcttaagtttctattgtgagtttagctaaggcattcctgttgwtaatactattgctctaataccaaaaagtgtccactagaaaatagagtaacctttgtgcctttgtaatgatagtgttcttttggtataatactctactaccacaa

SEQ ID NO: 915590 - DNA, 579 bp, Homo sapiens
gaaagtagagaggctcttcaaaattcatgcaagtttcaagaaagcttctgagaaagacttgaagtatatccaggtggaggtcatttctgagcagaagacgtaacatgtgcaaagatgtgaagataagcaaaaatgcatcaaattcaggaaactatgtagttcttataataaaagtgcgtggtagagtcaagattggtatgtaaagaacaagaaatattctaggataatttggaatatagctatttgattaaggaacatacaatcaatttacacaaacatcaaatatctcaagggcagagatgtaaaccttttgatttttgcattgccagtatgcagtgtagtgcttgacatatagtaggtgctcaacaaatgtagagcttggactaaccagagaatagttccttggcaatgttgaataatagattttaaaggaggaggatagagagaaagaaggaatattgggctcctaatctgtgccwggtgctgtgttaagtgttttacaggtgctatgctaattaatagtcacaataacctcctcgggggtatatatatatctatatgtgtgtatatatatatata

SEQ ID NO: 915591 - DNA, 596 bp, Homo sapiens
agaaagaaaagcctagagccagatggcttcaatggtgaattctaccaaacatttaaagaatgattagtaacaatccttcasaaactcttccaaaaaagtgaaaaggatggcatacttctcaattcattgtcaaaggccagtattacccaaataccaaagccagacgaggatatcacaagggaagaaaagtataaaccaatgtaatatctattatgaatatagacaaaaaataatcaacagaataccaacaaaccaaatcaagcatcatattatacattctgaaggttatctaaggaaggcaaggttcatttaatatacaaatattaattaatgcaaacactatattaacaggataaaggacaaaaagcacaatattatatcaacagaagcagaaaaagcatttgacaaaatctaacgtcatttatgacaaaaaaattagaaattaggaatagaatggtgcttcctaaactagagtaagggcatctacaaaaaaacgatgtataatatcatatttaattgtgaaagactcaatgcattttctccaaattcaggaataaaacgatatctgctctcacaacttctatttaatattgtac

SEQ ID NO: 915592 - DNA, 602 bp, Homo sapiens
cctggaaaaggcattctgattgggatgacaaggatgcagagtctagagctgacagcagggtgtgattgctgaaacacaagaaagagagaagaactttgcccccttctcccagtgccagcagcccagaggtagcaggatcctgttgaaggtaggaaaagtttcaatactaaagaaaatgaagaattgtgattattgctgaatgttccacagttctgatggaagactgtgtttacaacttaaaatgccagtaggccaggcagggtgattcacgcctgtaatcccagcactttgggaggctgaggcgggcagatcatgaggtcaggagatcgagaccaacctggctaacacggtgaaaccgtgtcactactaaaaatacaaaaattagcctggcgtggtggtgggcaccggtggtgccagctacttgggaggctgtgaggcaggagaatcgcttgaacctgggaggcagaggttgcattgagccgagatcgctccactatactccagtctgggtgacagagtgagacaccatcacaaaaamaaaaaaacaaaaaagtgccggtaggattttctatatatttatttattttttgagacgagtctcc

SEQ ID NO: 915593 - DNA, 659 bp, Homo sapiens
gactctctgtactatcctcacaatgttttgtaaaactaaagctattttaaaattaaaagtttcttaaacaaaaaaaagaggggtgattcaggcctgggaagtggaagaaacgagctcagtgttttaccagccaggaagcatggggtgctccctccactgcaaagccaagccccccaactccaggagactcagggcttcagggagttaacctgccctggccattcttccataatccattcttagagctgctcctttccatgtgtgccctgggcaggaaactgattgtttaaaataataataataaggtaagaaaagcttgatgcaaaaaattatttctaaatgactttcactaatgtcctctgggcttctgggtgggtaatctgcgccccttctgtgtacaggcaaatgtgattacaacagggcctgcactggccggtctctgagctcccagccccccaggctgttgcctgccctaaccacattagcagcacaagggccatccatcagactaatagggggcctgggacagcccagccctgctgtaagcagctggaccctatggtcaggagatgcctggctctcacttctcacaatcacaggaccgaggatgagcctgtkgaactggcctccctggtcttaacccctttctcctgcccagc

SEQ ID NO: 915594 - DNA, 607 bp, Homo sapiens
tttaattctttctgtcaaagctccctctagatctgtgatgtggtagccaggagtcttatgaacscatgagccggggacactgggcagggtagcgagggttctagctgtgaatgcaggaagccaccatgggtagtgccactcaaaacttttggtggcagaaatgaggctcttgtcctagagggacatctgtaagcaaagtcctggcttgagatttctaatatctattaattattgtgcgcgagcttaggtagagaggaaagatggagaatgatggctagatggcagttgatggatgttaaataatagatagtagctggtagatagtaggtaactatagacagtagagaataaaaagtagctgaccgattgttgcacatggcaggtaatagatagtagccgatagtagatcacagataacaaatggaagataccagataatggttaaggataatagaagctgatagtagataatagtagatcgttgataagagtggctaataatggataataggagctaggtgataatagtagctaatggtggctaatagttggtattgataatagttgctaatagagggcagtgctatagcaggtaatagtgctggct

SEQ ID NO: 915595 - DNA, 603 bp, Homo sapiens; identical to SEQ ID NO: 915480

SEQ ID NO: 915596 - DNA, 670 bp, Homo sapiens
acacccttccaggttgcagacggccatcttctcattgtaacctcacatggcagaaagcagagagagaaagcaagctgtcctcttttttaaaaagcactaatcccattcatgaggaccccaccccmatgcctcccaataccattacactaggggctaggatttcaacctatgaatttagggggtacacaaatattcagtccatgacaaggagttggtgtggatgcatacattgttcaaggtcaccgagttggcagtagcagagctgaggataaaatccaaatttccccagtttcagagtctgtgttcttgacactaaagaacactgtcaatttgtggacagctcacgggcagaaattgtgcattactcatctgtatatctgtagcatttaatatgacacttggtacatagtagatgcttagtaagtctgtgttgaacagatgagtaagtgagtgagccagttaaactattcccagtgaaaagccagcgctgagctagactctgtcttgctattttgtgacaaatgatactccggagagagggaggaatgaggtcaaataagagtgaggagcagtggagtcacagttcctgctgaggactggggtgatctgtctgagagctgtctgccctcccttgcccatgagcagggaagatggcagagaccccattaag

SEQ ID NO: 915597 - DNA, 647 bp, Homo sapiens
ggcatgagaatcacttgaacctaggaggcagaggttgcagcgacccgagattgtgccgctgcactccagcctgggtgacagagcaagactctgtctcaaaacaaatacttacaaacgaaaaamcacaaagcaactcccatgataccacatgagtagaggtggtaggtacactgtttgtggaaattatcttttttatttctttctctttctttaactatgtgccgagctgaaataaataaacaagtaagtaagtaagccacaagccgaaagccttggccttgctttagtaatctctgaggctacagagctcaccagctgcctcaaaagcaaagggttacaaaataattctaagggcgaccatccactgaggcttattatcagccagtcactgtggtccgtgctttacgtgatttatctcattcactcctcccaacaaaacaatgagcaagaacttgtattattaacccaactttgcagatgagaaacctgagctcagagagatcacatagctgtaagtggccgaggaggatttgaagccaggtctgtctgaccccacaactctagttctcaatcagtacactttactgcctgtcacgtgagacaggaagcattgagaagaaagatttttgtactttaaacctgggcca

SEQ ID NO: 915598 - DNA, 609 bp, Homo sapiens
ggcaaaaccccatccctactaaaaatacaaaaaaaagttagccaggcatggtggcgtgcacctgtaatcccarctacttgagaggctgaggtgggaagatcacttaagcctgggaggcagaggttgcagtgagccaagatcacaccactgtactccagcctgggtgacagagcaagactccatctcaaatacaaaataaaagaaaaagaaaaaaaatgcaaagagagcaaatctaagtgttcttatcacaaaaatgataaccatgtgaggcaatgcattcgatttaactgttccacaatggatatatacttcagaacatcatatggtacatgacaaatgcatacaattttatctgtcagttaaaaatgtccagaataggcaaatatagagagatagaaagtacacaagtgattgccagggcctgaggggttgtagggagaggatgggggcagagagaaacagggaatgactactaataattatggagctttttggggggttaaaagaatgttctaaaattgattttggtgatggttgcaaactgcaacatactaaaaaccattggattgtacattttattttattttattttattttattttattttat

SEQ ID NO: 915599 - DNA, 630 bp, Homo sapiens
atttatgaatttgcatatgctgaattatcctttcctctcagggataaatcctactagatggtgaatgatccttgtaattgtgctgtttgaattcactttgctagtattttgttaagaattttgtatctatgtttattagagatattggtctataattttattttcttgtagtgtccttgtttggctttggtatcagggtaatgctggctttataaaatgagtttataagtgttccctcttcttcaattttctggaaaagtttgagaatggctgatattcgttcttctttaagtatttggtagaattcagcaatgaagccatcaggtccagggcatttctttaattggagactttattactatttcaatctctttactcattttaagtatgctcagattttctctttcttcatgaatcagttttggtaggttgtgtatgtctagaatttattagtttcttccacatgttctaacacttccctaacccagtgtgccgggtcccattctttcccaatcactgccctcacatttaatgtagacactctatgaggctgggagttcaacctgcattgtaaytcagctagcagcaggataagattctgcatttgattttagcaaccttaaccctgta

SEQ ID NO: 915600 - DNA, 622 bp, Homo sapiens
ttatagagactgtgttgacattgtaattaatttawcattttattaatcagtccaatggacttttctctcatttcccttgactgctctgtagtattaggtagtgttaactacttattttgaatagttgcatttgctaagtattaaatcttgttttatatcttgtccctgggctacataattccattttatggatttgatttagctgtcacctagctgtaacctctccatagaatgttaaagctgtatttctgcttgcttaatgaatatatccactttgatgttttgcaagaacctcaagttcaatgttcaatgatatcaaaatctattgaattatttccacataccacatcctagccaaacctgctcgctcttctatattttctatctttgtcattatgtggcctcgttccgttgtctattcagtgatcttactgctctaatacaataacttattaactgacctaagttcctctagaatttttttcccagtggatgctccataacctgagcagaatgtctctgcacatagaactatttgacacttctactcagaaatgtttgatggcttcccattgtcctcagaacataatctggatttttagcatggtatcgaggtttattc

SEQ ID NO: 915601 - DNA, 598 bp, Homo sapiens
ctttaaagtggatctctgctctgagtataactgagacccaggtgaaggttttaaggatactattttccacatgcctttataatggtaagacacagcctagctacatttggcttttaaagggattttataggttaaggaaaacaattgtaaataaccaatgtctgcttagggctgtgccgggcactatgacatttttctctattccaaaggttctcaaactttcatgtacataagaatcacttggggagggtgacaaaaatgcagcttcccgaggcctcagtcttggacattgtggtttataaggtctatggcaaaaccctggaatcttcattttaacaagtcttgcagcatggtccctcccattccagtgaacttgctttcttacagatctccaatgatgtcttaggagttaaaaccagtgtcctctcctgatctcctaaaccattttttgcagcttctaccactgttggtcatgccttctcatcctgtccattcttctytgtctgaacgttaaataaaaccattccccaaagaccaatgcttggccatttgttctttttcatttagtaagcctccttgctaggtaccttcaccttca

SEQ ID NO: 915602 - DNA, 609 bp, Homo sapiens
tgggtcacacctgtaatcccattactttgggaggctgaggtacacagatcacttgaggtcaggagttcaagactagcctggccaataaggtgaaacactgtctctacttraaaaaacaaaaaaaaaaacaaaaattagccgggcatggtggtgggcacctgtaatcccagctcctcgggaggctgaggcaggagaatcgcttgaactggggaggtggaggttgcaatgagccaacattgcaccactgcgctccagcctgggtgacagagactccatctcaaaaaaagaaaaaaacaaaaattaaaactgtaatctccaattatagtagacaaatgtccaattaattagacatttaaaattgaaacattcaatccctacatttaacttacctttaagtttgtacatgcatttttaggatcataacagactactaaatccactaaagaaaaagccaaacatctaattagttactcctaagctccgagctgtcctgaaagagctatatggagctactgatacttttaataaagtaattttgtcttaaatttttaagtttacctataatatagggagtgaaataaagctgtgatttgaggaatatttgtgctg

SEQ ID NO: 915603 - DNA, 626 bp, Homo sapiens
tctgtgcttccacaggttcctatgaatatttccatcgttgcttttaccacattattttgtattttgtgtttgtatcttctctactaatctgtgagttccttgagggtgtcttcatctttttatccttatggtagacaccagacttacgttgagtagatggatgagtggatgagtgaataaatcgggatggaatgtagtgagaaaaaagaccataaaattagatggagccaaattatgggaggccatagaggtcatactgagagtttgggttttttttgtagagtagcagtgaccaaccagtggcagtttagagtaggggcatgaagtgattaggatagttggtctgtgtaagatggattagaggagtgtctctgtgtaaaataagtagagtggatagaacatcatttgtaggtctggctgtgctagtttaaagaagaatgaaggtccggcctagggattaacatcactgaacgtttattaaaggtgtgtgtgtgtgtatgtgtacatgtgcacaccttacakatgctctcgttcccatttgccatatatcttaattgttcttcaaggtcttgcttgaatgtttcctcctcctctgtgacttgttttgtttctccttaattttacct

SEQ ID NO: 915604 - DNA, 671 bp, Homo sapiens
gaacttggggttagatcacatcttaacaaaagaacaatttgtagagaagtgacaaaacaaaggaaaagtactttgaatttctggggtggcaaattgtgggagagcaaatatgtagggaaattaattatagataaaggctggttagtatttgctatgtagactactctgggtgcagtcttcaggatgataaaggtctagagtggtctctggtgattaacttctgtctttcctggtagagagggaagggggaacaccttgacaaatttatatcccacttttaggcagataggacgaaggcagagacctttcttgtgtctgcttcttctcaattgcctttacctaaaaataatctttatgtcaaagtggcatatttcggtgtggcataccttgcttcctttcaccagcaaataacaaatgatcccaaggaccaagctaggagaaaaagaaagttgtcctgggctcaggcgacttcctaagtaaggtggtactccagtgcttttcacctactgatacacactaaaacattttacaataatcaccagtaggcatcttgaaaataaagtgtggatttcattgtattacatagttctgaaattgaccatgtctttactactaactaccactactactactactactactactactactactwctactactacagattt

SEQ ID NO: 915605 - DNA, 658 bp, Homo sapiens
atacttgaagaagcaacaaagaagctacatttttctgtattttctctggttgtaaacaaatctgtgactctgacagtacatgcatttactgtgactctgatagtatgtgtatttattgacctgtttttccagcttgggacacaagcatgttcacatgtctaattttttcaattactacttcaaacacccaccaattcctcctcttatgttctctccttctgtatcctcaattgtccaaggaccccaggcaaaaaagactagctgtgcttcaacatcccagaggagacaaggaactagaaggagaaatcagtccatcagctctactgctgtagttattgcccacaacactcttgctgctggagacctggtctatgcagactggtggatgcttattcactgtgcagtgatctcttatctagtccaatctcatgcctgtgctttggcaagggcttaggcaagggctttggcaaggggcttcctactttagcttcatgctgcttcccaattttcataccttgtgttgagctccagtaccatcccaaacttcctttcccttctggtgagtgcttytgggggactttgcttgctttcttgctaggggaacttgcacgagaccatctcagtccattctgatgagtccttctaactttgaatctta

SEQ ID NO: 915606 - DNA, 623 bp, Homo sapiens
aaaggaacacagaaatcacagaaacagtctgtcctgtgtgcctttctccaaagagaaaaaggcttcagtatttaaaggggaaacgcagtttggaggggaaagagagaaggtgtggtcacattactgaatccacgtgttgcacgagaaaaggagcaggtaggggaaaagccaattatgtatttgtctggtgctcagtaaatcagcactttacataagataaggtgaacatagagtagctacctgtggagatatctggccttttatctgcagccgtgtgcttagggacaaaaggaagagcagtttcttgcatgacttagatttcagctgaatttttcccttttggcatagtgattttcatagtgaaattttattttcctttcagacttgataatgctgtccattcaatatgagacatcagggagtttgctctacatagtcactcaagctgatggggatgtcactctcttattctgccacctctatttttggcttttggaaggtggagggggagagaaaaaagatctgaaaactagcatggggtattttagttcatcaagtctagaaatgacagatgtcacatccaytcacagcccactggacataactagttgcacaaacctgtc

SEQ ID NO: 915607 - DNA, 578 bp, Homo sapiens
actgtagatagatagcttggggactcgctgagtcctgtcaatcagattaaactcacagacagaaagaacaagaaccatgggcataatgagtagttgaagacaggaaacattttattagatcagctctgagacaacacctatgcacatctgatcaagaattcagtttgcttctgattctaattctgcagtaatctagaaaccatgattccagccagcactgatataagtggaaattttagcatggacagtacagtattgggggttatggatagagttccatgatcttggaatattctctcataatgttgggagtggcagtatggttaattgaactgtcatgtgaaacctctgctcattaagggcctcctggtaagtggaaacccttttcctttagtgaatcgcatgtagcacactaactgtatgatgagaaatttgataggcagcttgtggtgaactcaaagaaaaaaaaattaagaaactcaatggaggcagggcacrgtgactcgggcctgtaatccaagcaccttaggaggctgaggaaggcggatcacttcaggtcaggagttcgacagcctggc

SEQ ID NO: 915608 - DNA, 639 bp, Homo sapiens
tatttgctaatcttttattttacaagtattgtttatttgtttgtttgtacttacttgaaaaaaatctttcctatctaaggtctttaaggtaatgtcttatattttcccttttttattttaggckttcttttttctacttaaatttaactacacctcttttcaaatttgcctgtcacctcacacatttttttccattgagtactcataccctagttacctcaccattcagatgtcacttccatgccatttcttcccctgagtgttcttttgttcttcaggttaggagcaatcttcttgcctgccagagagtcttgcaaaaaaaaaaaaaaaaaaggtgattttcttttcttctccggaagtttttatattgtacttaaactagtcaagacagtattatgcttgtttcagtatattattcttccaaatagttcttgagaacaagatctataaatcttgatatccccaaagagtcctactcagtgtctcaaagaataagtttaccattaacttttgtaaagagaaaaaaaaatgtatgtttagtttggacaactgaatgctcatctgggacacacagtaattatttccaaatacttgaacacctatcctaggttaaaggaattgaagtggtcctatatggtc

SEQ ID NO: 915609 - DNA, 548 bp, Homo sapiens
agcagaaacttggttaggtttgcaattagaaagaacattctggtggaagtgtgttcatggggtagagagataagagacatcactcctaatttttccttttcmaaacagctttcccaaggactttttgggtctctcaagtacatagggtcagaagtctaaaaagcagcttaaggaataaaccatcaaacaatccctctactgtcaggtaagaatatatggttgagtatcacttgtccagctcagtcatcttgcaagcaattgacgttggttatttctgtgttgaaattaagtcatgaaacacaaagcgctgaaccagattcttaatttggacttaatcgcatttattatagtgcaaaacaaatacattcttcccagaccagagcaacattgaatagcattgtaaactaatttttttgatgtcaaggaaagatgaaaacaagataaaacatgcgagagaagcagcttgcattagatcaggcacagtaaaactaagaaacatcagttgctactagcaaagaagcaaaagtccatggagtttgaatttttgt

SEQ ID NO: 915610 - DNA, 605 bp, Homo sapiens
attattttcctttataatgaaccttcttcagatatttttcatctttattctgtgctttttttattgactgcagacagatgatcagttcctatgtttatcgcattaggacaccgttcttagcatagtttcatactcatggcacagagccaaccagcacaatttctataacatattctataatatatttggctcagctaatgacaataaaatagaagtatagtcttagtgcactaactagactccctttctaaggtctgaagaagcccaagaacattcagcaattctcagtaattcttatgcaaacacttccttgaaagactgaggatattataaatttaaaagggcacatctgaatactttcagctttataggctgcacactcatcttgtatacaatacctttgtaacacacgcaagtcatttataattttgaataaccacacttgtatgtttaaagatctcagtgtgccctccacatgaaccctacagccacccatttaattcttacgcatatatgtatttattattgcacggaggcttcgttattgcacagagrcttcattatagcttgtgactttcttgcttaaagataccaaatggcttctc

SEQ ID NO: 915611 - DNA, 620 bp, Homo sapiens
tactacttccttgaggggtttcatttgaagggactacttagattatggcacctctgaaaayctgcttttggtagtacacattgcggtgggaaaatagtagatcttatctagaacagcattcctcctcctagttctcagtgtgagagtcatctttttcaatggtgaaggaacaagagctgacatttatggttcaagcaaatgtagccagaactcatgatttggagtgccaaatctagttataaagctctcaacataaatttcctatgtttcatttttcttgactataaagtgaaataaaatgggcacattaaacaccatttcaccagtatctttaatgatttaattttttaaatgtatatgaaaggctctgagcattatccacttagcataccctggatgaagcggcttatgcaaattagtctgactgagacatgaggcacagcgtattagtcagggttctctagagggacagaactaataggatagatgtatatatgaaagggagtttagtaaggagaattgactcacaggattgcaaggtgaagtcccacgataggccgtctgcaagctgaggagcaaagaagccaaatagtggctcagtccgagtcccaaaacctcaa

SEQ ID NO: 915612 - DNA, 584 bp, Homo sapiens
tgtcaccagcaattaggtctaaatcttattcatacttactttagagcatatggaaattagaacagtgtgagtaatttgagcaaattatattttctatattaaaggttgaaatataagtctacctttttcataccattagtactatttcaggttcttaaagcacttctaggtacagcaactgtgagatatttaacagaaaaactttgtcacattataaaaacaaactctaaatgtgaaagatgatgtttacaaattttgtaagtttcttctcatgattacagttttctctaatagatgaaaataggggaaaaaacatttaaagtgaagtgaatgcacattcattcatccgcttatcccaaaagtactaagtcacagtgttttgccaagtactttaataagtgatgggtatacagagatttggttggttttattttagggagggacagcggaggagatacagttttactaagatataattcacatactataaaattcacccatttaaaktctaaaattcattgtttgttagtatattcacagagttttgtaaccatcaccacagtcaattttgattttcatcactc

SEQ ID NO: 915613 - DNA, 714 bp, Homo sapiens
taaataaaaataaagccaatatgttacactagattaggtgcacaattctaaagataatcatcttttaaacaatcttgatgcagtactctcacctgatcttttacttgtgactgtctcatcctatgtataactaaatttattttgtgtgcaaataattttagcaaacacataaaaaattagaggacacaactaagaataataaaggaatcaaagagtgttaagatgttatcgacgtttttggatcttctgttaaagtgtttatcttccaaagataaaatttggatacttcttcaaaataacagggtatttttttcatcctaagacctgatggccactgtaaagcaaaatgattgaaagcagtagaataagttcactttttaaaaaccttcaaagtatatgtgaaccaatgaactctgtttttaataagttcctatgaagcactgcttgactgtgacccaaatatttcattttgtgactgttaagaagagataaagtgaccgcaattgagttctatccagatttttctcattttttcttttacttttttagtatgtattatttcctttaattagtataaatgacagttttctttttatttttgaaatcataggcttaacaagaggacagttacttcaaaaggttctttgagtggttggttcctatcttcacaygctaaaaatatagcatttcctagtttcaggctaaagatcaata

SEQ ID NO: 915614 - DNA, 601 bp, Homo sapiens
gggaagggtaaccagatgctattttattcttgctcaatgtggaagggtggttttgagcatttgggaaacacttgacagakcactttctcatttaactattagagtaacactgtgaagtaggctaagttggttattcctggtacatgaggtagaagctgacaccccccaaaaagttgtgacttcactggtttttctgactttagacactctgttctttttatgttgctcgtcacagcaacgtaagtatgaagaacacttttaagttgcctgactctattcgtctctagcatttgcaccaacatttctcagatattcggctgtgttttggtagttatagggatgccaggatgaaaattgtgtgaaagaaaaattcatcctttgtagtaagtagttttcttgtttgcagggttatatatatatatatacatatatatacgtatacgtataatatatatatacacacacacacagtgtgaggttttttttaaatggattatattttgtgtatgtcatcataatcattttctttgtgtgcgttttgctgcaatctctggtgctttgaaagcctgctaagagtaactgttaggactatccaaaatca

SEQ ID NO: 915615 - DNA, 572 bp, Homo sapiens
caattttcattttaattacacacaggcaaaaatctaataaagaatcataaggaagttgaatcagatttttttttttttttaaataaaaacggggcmccattttgcccaggcggggtctcaaacctccggggctcaggtggtctcccgcctgggcctaccaagtgtgctggggttacaggcttgagccaccatgcccggcccagatctatttttatctacaaagccattcaaataacccacacagagcatctgaaaaatgttactaacgctttctctcttcaaatttctaataaatgacaaagaattgcacaaagaattgactggtacatttcaatgaaatactcattcagttctgaaaacgaatgtagcgttctcctctggcatttattcgggaggttaactcaaactataagcctgtctcaaatgctgcctgataacttcatttttcagctctcacagtggccaccctcctcgctggctctcttctacatgctaaaactcaccaagagccttcttccctttgatcctcaacctcgaattttctccagactgagttcagttcttatcactga

SEQ ID NO: 915616 - DNA, 618 bp, Homo sapiens
gggaatctctgcttacttatttgtgtgtctatggtkgggggagtgggaagtgagagggcatatataagaggaggagattgagatgagaggctatactactagatgtgtgagtttcatactgcagatagtagaaagcccaattttagctaaagattcaagctatattctctaatttaatacaagtagcaacaaacctcatctttttatttgtttgattaaaaaaaaaatctgtcagccacctactcaattgattccagattcagtgttgaggaataaaatggtatggttaatggtcctacctcaactctcatagaaattccatgaagtctataaagtctatattatctccattttacagatgagaaaactgagacttccagactttaagtaacttgaccactttcatgcgcctaatcaagaggagaagaggaattacatcccgagcatgttcaactccaaagcctgtgcaatcacccgctggattaacaaatgctagcgcttaaacctgggtgatttcacagaatcagggtcttgttctccagaccttgccactagtagtccacggctaataggaagaactgacaatagaacctcgctgtttccaaacctgggctttca

SEQ ID NO: 915617 - DNA, 619 bp, Homo sapiens
tccatgtgttctcattgttcaactcccacttatgaatgagaacatccagtgtttggttttctgttcctgtgttagtttgctgagaaagatggtttccrgctttatccatgtccctgcaaagaacatgaactcactcctttttatggctgcatagtattccatggtgtatatgtgccacattttctttatccagtctatcattaatgggcatttgggttggttcgaagtctttgctattataactcaccaagcttcttgactttaaaacatactgaagttatctggagtgaaagaatgaatgggtgctctaccaccttgagctatgggaaggttgtgctggagattttgacacacgagtctcaggaaggccttaactcagtcattccaggattcttgttctctcctgggacctaatggctgctttgggtgctcatgaggtttcattctacaacaacggcaaaagcagttcccagatggcttctctcaccattcagaaggctttgacctggccccttgaactgccagttggtttgcgataaaggaatagagactcattttaatattggtctaagacaatctgctgtgtctaaaagttcctaaaagttaactgtaaagaact

SEQ ID NO: 915618 - DNA, 598 bp, Homo sapiens
aagaaaaaaaaaaccatctctttgttcatctggaaaatgagaaggctagacaaatgatccctctggtctcctccaagtcttaaattctctatttctctgatgctkggagacatataagggattgttttaggaaagaaatactaagtaccaatgacattttttggcttccatttaaaatagatatcaaatacctgtttatgctttcagatgtgtgcattcccatagcaatttcttgttcaattcaacatggaggtacactggctgacagagtggaaacactgtaaacaggtggttttcgtggtttatattttaacactgaaaggactcaaagaacctcagacagccaggaataggagaaaatatttccctccaattaaattgttcctatatatcctaacatgcttgcgacacgtgtgactcattccaagtccagaatcgtaggtatgagacagtgaaaaggacactctgcttccacctgatatagtctctgctgtgctaccaagtttacagaagaagtatacaaggcccagagagattcacagggacgttagcctgaggaagctgttgattaaaatcaaggctactgtgtcctcgttaa

SEQ ID NO: 915619 - DNA, 611 bp, Homo sapiens
atcctccaaaaaggttttagggccatttccagagaccagaggtttggttattcatggaaagaagtaaaaactgtgktttttttttgttgttgttgttgtttggttttgctttttgtttcttttttttttagaaaacaaaacaaaattttaaaaatggatctggaagagtaggatttgggaagcaattataagtttccatcaatatggacaaaaagtcaacaattctattctaatccctctctttataacaatactcccattgtcttgttgataagggaacatctattttatgacttctccaatctcctggttaatgcagatagctgtttggctctgcaattgttacattatctaacatagctggaacagtgagcaagttagagattggctgcctggtgttactctggagcttgtcagtggggagctggtcaattggtctgggcagggggtgggggatgctccatggaccttctagttctcatctgtggagaaggaaagacctttcctctactttctgagattctgtggctaaggcctatggatgatgctgacaaaagacagattaacaggagaaaagcatgcaaattttattggaggttagacatttttac

SEQ ID NO: 915620 - DNA, 689 bp, Homo sapiens
ttttaagaaggaaacgggccaagaagctgagctccataaatgttatatgtgattattcagataccttgcatccctcttattgttatcctacwattaaggggctacgttatagtgaatgtaagcttcatgtcccagcagacgtttgctgcatttatgggcctacccatgctagagctgttggcagtagacgcttacctcccttgtggattcagtcatgtagagcactgtattcccttgtgcgaacatctctaaatttcaaagagccttgtaaaatagaaaggacagtacgcaaatttatcaattctatcagttaaaaatatgacacataaacttgacttaggaagagtaattttcacattaagtgttccagtagttattaaagtttaaatctacaaccaaaaacatagaatgatagcagtatagttttcaggcttccattctttgctctgacagcatggaatggataacacagagacacttgctgtgtgtgtgcatcatttgccctaggtgaccctattctgcaactttttttctattcaacagtgtcttccacctttttttttgtttctacaaactttctggagttctcatcatccccacatttcaagctgctctctcattattaatttgtgctaactagtaaatgactaacatcagtttatcaataacgtaccctcagtaataggcca

SEQ ID NO: 915621 - DNA, 626 bp, Homo sapiens
agtttatagtgttttgcagttccatttgtctgacaaaatttttcataccgtttttatttattttcttgaataaatcatctgtaatgattgtaaatgcttctcctggtaagtcagtctccaraactcctgcagtctattacatcatttgttctttcacttaattttcagtcatgttacttgtttcctgtgtgactaattacacttttttttgtttgaatgctggagattgtatataaaatattatagaaataatttaagacttaggatgattttgcagggaaattttagtgtgcttcttgaaagagactaggggctctagcagttagcgatcaggggatttaaagctgggttttggtctctgtgaggacctgtctacttctggttcacctctatgttttggtattacccttatacctgtggtcatgttcccatctcaaagtggggagggctttctaaggtctttgccctaggaattcttaggctccagtttatgttctcttggccctggctgtcaaaaatgctgctcagcttctcaacctttccattaccttttctggagccagaagatgcccacaggataaaagcaccaccaagtttacttttcacttctcaggtttatcttctgc

SEQ ID NO: 915622 - DNA, 653 bp, Homo sapiens
ttccatttgatggagtgattcatttacttagaatattttaatacctttctagtgctgtaggataaaggacaataccacactccctttactttctgctccagttataatagattactttcactttgttaaatatgccatgatctcttttctccctgggccttttgaacacatgatcttctctgcccttctactagtacgcccctgcaaacaccctcatctctactgcccccagctgcccttcaccttactatcctctatgacctgaataacttcctacttatacttcttaaatgcttcgaggaggcttttttggctccccaatatgttaggtgtatttgatacaaattcctaaacaactccgtatttctcttttcaaaacacttatcatgcttgaaatgtataattaaagtccacctttcaaacaagattacaaattccctgtccacagggaatttgttttgaatttctgactcgacttaaagacattgcctggtatatagcaggtgcttaataaatattggctgaatgaacgaaataaagcattccattccatgtgcatattataaacatatttgatrtttttgcccttcaaccaagatcatagttctctgagggagggaccatgttttatacttgagtgtccttagcagtgc

SEQ ID NO: 915623 - DNA, 578 bp, Homo sapiens
ccagcatggggtaacagtgtaagcactgtgaacatttcttctctgttcttacccatcttcaaacagaaacaaccaggagcagtttaacagtgatacttgagttatgaacttcatacatattgcttaattgtaatggcaaattaatgtgttaacatttatagaatggtactgtcattgaagtttgaatttaaatgtgggttttaacccagttctataataattgctgtgctctgggaaacactgaatcttttcaaggaggacagctatttaactataagtagagtcatttgaaatgcagaagaccagaatatttattcaaagagtggtagcaaagaagtgagatgagaactgaggtggagtgttctttccatcctagtggagagaacacagagctgtgagtcagggtatctggaatctaagcatgtctccaggcttaagtttctattgtgagtttagctaaggcattcctgttgwtaatactattgctctaataccaaaaagtgtccactagaaaatagagtaacctttgtgcctttgtaatgatagtgttcttttggtataatactctactaccacaa

SEQ ID NO: 915624 - DNA, 563 bp, Homo sapiens
acttgtggtagtagagtattataccaaaagaacactatcattacaaaggcacaaaggttactctattttctagtggacactttttggtattagagcaatagtattawcaacaggaatgccttagctaaactcacaatagaaacttaagcctggagacatgcttagattccagataccctgactcacagctctgtgttctctccactaggatggaaagaacactccacctcagttctcatctcacttctttgctaccactctttgaataaatattctggtcttctgcatttcaaatgactctacttatagttaaatagctgtcctccttgaaaagattcagtgtttcccagagcacagcaattattatagaactgggttaaaacccacatttaaattcaaacttcaatgacagtaccattctataaatgttaacacattaatttgccattacaattaagcaatatgtatgaagttcataactcaagtatcactgttaaactgctcctggttgtttctgtttgaagatgggtaagaacagagaagaaatgttcacagtgcttaca

SEQ ID NO: 915625 - DNA, 594 bp, Homo sapiens
ttacctaaatggcaaaatatgcttattattttttaactttttcatgaaatagacctattcatgtctatatggatctgccacattctttttatgggctacataaaaagatacatcataatttatttaaatgctcccccttgtgacaggcatttaggttgtttccagtttctctctattagcacattgccatgatcgtccttctacacacatttggtcataatacaagaatttctaaggaaaagattcttagaaatactcattaaaatgtagtgaaggctacccaattggtctacactgagcttcctaactttcactctccgctagggtacctgagaatgaccctttccttattcacaacaaagccacatgttatttatctccttgaattttaccaatttcattctgtaaaatatctccttatagtaatttgcaatgaattgatttctagtgaaatcaatcatcctttttatttttattatccacttgtatttttttactgtatatttcctgtttatttaatcaatttttckattggacttttttttacattttcttatattattttcttagaattctatgttattttgtgtatag

SEQ ID NO: 915626 - DNA, 643 bp, Homo sapiens
atattctataattgaaaaaaaaaaaccctctagagtccagtggaagtagagtaagctcactgcattggaacggtggctgcctctccatcatgactcattttctgcagraggcccctctacgggcagccctaaaaatctgcagacaccaccgtcgaggcaccaggctccagcacccgccccatatggtttcctgtgcagcagcctcttccaaactacctgtttctatccacgatcctgcagtccaggcctgctctgttggagccctagtcaccttgcgttcctctttgtctttctccctcacagcgacattttctgccaagaagatggaggctccatgcttcctaaggcaacaaaaacaaaactgataaactaatttgggctggtgggaaacaatctaggaataggtcagatgcgtttatttgatcaaggcctggagtgtagtgatgaggaagcacatgaagacccagcaaggaaggcaggggtctgtctcccctggggcctgggcagggtgctttggaggacgaccagccctggctgcagccaccatgtcacatcacagcatgctcaaggctccatctcccagaaccagagccagcgcaggtttctggggcagaaacagaactcacacctccaaacttcactt

SEQ ID NO: 915627 - DNA, 646 bp, Homo sapiens
ataaatgttggcatgcatagtattatatatmatattaagaaaataatgaatacaactaagtgggatttattatagaaattcaaggttggttcctactaggaaatctattatgatcatatgcaatatgatttttccatatatgctgaaaggccttaatgaaattcaacattcactcattataagaatattcaagaaattgaatgtgatttttaacatattaaaaatatatatttgtcaatgctaaaattggtattttaattggacaacactagaagcattcctattcacatcaggaacaaggggaagatgctagttatctccattactatctattattttactgaaagtgttaaaaaaatgcaattagacaaaacaaatctattaaaggtattagaattggtagagaagaggtaaaagtatccctacttatagatgatatgatacctgaaaaacacttaagaatcaataataattaatattgttaattcccaaatcgtaaaataatttagtaaggcaacaggatatgaaattaatattcataaattaagatattaatccttcatgtacattgcattataaataaataaccacagtgaaggggatgggaaagaatagaactaagctaaataacttttagaaaacagtg

SEQ ID NO: 915628 - DNA, 601 bp, Homo sapiens
tcaaaggatgttttcctctgcttttgtttcttcaagactcaactccagcagcagtgagacttgcttttctgttagtccacaaatctataccccttcctctaacaccaggacttccagtcaggagtagtgacactcttctattcctctttacatgctgtgggtatctccagcacatgctattttgagcttataaattcagcacatatttattgagtattcaccatcatgtcgtcactcaactgaacccctcacaaggccatatcgtggctgtccactgccactgccttccatagtgcctgtaagcagtaaacacaaggtaaaggcttgttgaatgaatgaagtagtaatgaagaaatgctagtatttatttgtatgatatgtattaaatgttcacattaatatttaggttttagccattttatacctggttctgtgtaccttgtgacctagcaagccaaagtttctcaagacataaaccatatattgcatttctccttaactcccatctatctccatcttagaacattttctatgtgttaagtacattgaaattacatggyttttaagaatatctttggtgtgcagcttgactgctgataga

SEQ ID NO: 915629 - DNA, 628 bp, Homo sapiens
atccgctggtatcctttcatattcttgtatgcaggtttgatgaaatgacccaaaccatggacaaaggrttcccgcagagagtggtaaaacactttcctggaatcagtatccgtgttgatgctgctttccagtacaaaggtaagcatggatgtctcacttattgggatacttgagagactgtgttgactgtgaaaaaagacagcacaaaaacttaaatgcttttattttaatgcaattttgctactcttaagtatatacaataataaacattaaccccacaaacattatcacaaactgaatccataaatcctgaattatactctctgttatactatctcaaatctatgtaaaaagtaccaaatccattttactcatcattgataagtaaagacaccccctaaagtgtgcgaagtgactaagcacatgaacaaaacaatgattctcaaactttaatgtatgtaccttaatgtacatagcttggggtttgtgtgtgaaacaaagtatttgaggcagaattgtgagtgatacctaagaatctgcagttttaaaagaacctcaggcaatgtaatgaatacaatccagcaactatatcatccaagacaatgacctagaccatggggtaatctag

SEQ ID NO: 915630 - DNA, 603 bp, Homo sapiens
gttctttatagcagtatgaaaatggacaaatacagcaagattacccttaagctttctttttctcttcaataagccttaaatgttaagtgtatgttggaagttttcatcctatctttgctaatatcactgttaaatttcaattcaattattaattaatggggatttaaaaattatctaaaaatgaacacaaaaattgatattaatgtcatttctatttccttgttcatattagtaatttgatacctaattagtgactatttgtattcacggataatattttttcttgtgtgggaaaggaaattagttttcactgatattaagcatactacttgcagaaagacatgttgaatagatattttaaattgttgattaacaataatctgtgttggtatattggtagaaatgtaaatgtgtacaggtactatggagaacaggttggaggttcctcaaaaagctaaaatagaactaccatatgatccagcaatccctctgctaggtatgtaccccaaagaaaggaaatcagtatatcaaagagatatctggatgcccatrtttattgtagcactattcacaatagccaagatttggaattaacctaattgt

SEQ ID NO: 915631 - DNA, 654 bp, Homo sapiens
ttcaatgatgtccaccatgactcagggaaaggaagaaaatccttctgccttcctcgattggctacgggaggccttaagaaaatatacttccctgtcacctgactcactagagggtcaattgattctaaaagrtaagcttattacccaatcagctgcagaaatcagaagaaagctccaaaagcgagccctgggccctgaacaaaatctggaggcattattaaacctggcaacttcagtgttctataataggggccaagaagaacaggcccaaaaggaaaagtgagatcagagaaaggccacagccttagtcatgaccctcagacaaacaaaccttggtggttcagagaggacagaaaatggagcaggccaatcacctggtagggcttgttatcagtgtggtttacaaggacactttaaaaaagattgtccaatgagaaacaagccacctccgcatccatgtccactctgccgaggcaatcactggaaggcacactgccccagagtacgatggttctctgggccagaagctcccaaccagatgatccaacaacagaacttatggtgcccagggtaagcaccagctcttgtcatcaccctcactgagccccggctatgtttaaccattgaggaccaggaaattgacttcctcctgga

SEQ ID NO: 915632 - DNA, 670 bp, Homo sapiens
tgcttcaagccaaagaacaaaagaaaaggtttctgtccagaagcraagtttactactaatgggaatcggaaaagcagcccaggccattgtttcaataaacagtgatgacttttcctttacttaaaaatatccctttaacaattcaacttcagccaaaactcctgtcactttttactatatatttgtgttattacaagaaaccatgaacataggggaaacaggcctctgtcctccatgtctaatgggtctgttgtatgcctaaaagccaccgtgtttcctttgagctggtctgattaattgctagtgactacttgcttgttgaggatggagaaggagtggagaggcaccgaagggtatgatatgtcgctgccttcacaagggtaaataaatgctggcaacaccttggggtggggagtagttcattttgagtagactgagagagaagtaaaaagccttagtttccaggaaatattagaatgggtaaataaaaattcagatggggctcagtcagaatactactcgattaataccacagactgagcttgtcacctgtcccctcccctaattttcccttgaattccatagagctgtctatgtcaggtatctgtgtacagaaactttggcctcaccagcaaatactataattattttgaggtcatgggaggatcta

SEQ ID NO: 915633 - DNA, 616 bp, Homo sapiens
cctttaatggcagcacggtgtaagacaagtctttattaaagagaaagaagtttataaagttctctatcaaggtccccctaaatcttcacaaccccccccccaaactttcccaccctccccctaagctaaagctaatctgctgatatataagatataatcttaatctgtggctactggcaaattataggcactccttccaagtagctttgatcttctgcacattaaaaaaaatcccaacaacatgctatgtaattcatatacccaattttgcattctaggtagaatttcattactactctaaaactccatctgcagtggccatttccccccagacttaattcaagatttaatctttctgctgttttcttaataaaagccttagagtcaattattatgagtgatcaacctatgaactattatatacaacacagtgattgcatttttttgagcactgaaagtacttaaaataaaacttcttacttccaacttttgccctcctccaaattgaagggccaaaatacttagatttcgtaattggggggaaaaaaatctatcttcccaagctgaggcttttcatagcagctttkgccaggagaagagatatgcctgttatgaa

SEQ ID NO: 915634 - DNA, 639 bp, Homo sapiens
taggataaatgtatccacgaataggaaaaaaatatattgtctttattcctctagatgttgcccctaatttggtgtatcacagcaatacccaaagattaagatgcaaagtctagggcaggagtgtccaatcttttggcttccatgggccacattgaagtagaattgtcttaggccacacataaaatacactaacattcctaatgatagctgatgagctaaaaaaaaaaaaaaaaaaaattgtgaaaaaaattgcaaaaaaaacacctcataatgttttaagaaagttcaagaatttgtgtagggtcacattcaaagccatcccgggctacatgtagcctgtgaaccacaggttggacaggcttggtctagggtcaggaatgcaaccctcctggggtaactgcatatttgctgcttcacctcctgaggtctataacctccactgcccaaatactataaaacagcaattccacttaccttttatttatctctattttcctgtttcacattttttctccayagatcttatcaagaagtaacatattacatatatttcattgtttatttccattgttctatgagttaatctagcttctctgagatgcagacaagatgaaattactcatgcaagagacctgccgg

SEQ ID NO: 915635 - DNA, 585 bp, Homo sapiens
tatatatgtaacttttcctaaaatttctagatagttgcaaactttacagttttaatagtttgttttttaaaaagcataatttacaaagcatacatgtatgcccttccttccttccctttcttccttcctttccttccttctttccttccttcctccctccctgctcgcttgctttctctcttttcttttcattttctttccttccttccttccctccccctccctcccttcattccttccttctctctctctctctctctctctctctccttttatttattttttttttgtgagacagggtctcattctgtcacccaggctagagtgccatggtgccatcttggctcactgtaacctccacctcccaggctcaagcaatcctcacacctcagcctcctgagtagcctcctgagtagccggaactagaggagtgtgtcatcacgctggctaattcttgtaatttcggctkgtctcgaactcctgggctcaagcaatccacctgcctctgcctcccaaagtgctgggataacatgtgtgaaccatcgtgcccagcccagcacgtattctttttaaatacagcccagg

SEQ ID NO: 915636 - DNA, 421 bp, Homo sapiens
cttgctgtgttgcccaggctggagtgcaatgacgcwatctcagctcactgcaaccttcacctcccgggttcaagtgattctcctgtctcagcctcctaagtacctgggattacaggcatgcaccaccatgcccagctaatttttgtacttttagtagagacggggttttaccatgttggccaggctggtctcgaactcctgacctcaggtgatcctcccatctcggcctcccaaagtgctgggattacaggtgtgagccaccatgcccggccaacatatgtgattcagccttaaaaacgaagacaaattctgacacacgtgataacatggatgaacgttgatgacatgccaagtgaaataaacctgttagaaaaggacaaacagtgcatgattccacttgtgtgaggttccttgaatagtc

SEQ ID NO: 915637 - DNA, 630 bp, Homo sapiens
taccactgggagccctcaattattatttgaagatgcccaagttagtctgttggaagatgagacaatgtggaacaaagaagagccattgatgaagacttggataacctgttggaatgttargcaatatagatcagaaaacattcatcctgactaagttcccctaaactaaccaggctgccacctgtcagaaataattgaggccaacattgttcatccagtcattgatcaaccagtggcagccatcctgccaggtaatataattctaaccattattggttaaatttaaatgattgatttttttactttatagaacattgtttatataaaccaacatacataactgtatatattatatacagaatagcagacaacatgtgctccatgttcacattggtttctgactatataaaagctctggccacataaaagttgcatacaagtcttatcttgaaaattttgatataccttataattttttaatatccatatatagtaaagtataacatttacttgattaaagcaatgaaacaacacctttctgcaactgtatttatttacctacaaataatcctataaaattaaaaaaaattccacttaaatgcacaatatacaaattcattaacactgtca

SEQ ID NO: 915638 - DNA, 608 bp, Homo sapiens
tgtaatgttatttattttgaatatagttggatatgcaaatttagagtcattccatttctatyattgcaaaattctatattggaatataagtagaaatcattgaaaacatggatctatcagtctaatacatggatttctctttcaaatctatctaagatcaagactgagaggctaaggcccagcttgaagagatttaacaaagtatgtacacaccacaagtgacatgatgtagagagaagatcatcagtagtttccaattaagaaatctcaaagggtttcagccaactagtaacctctatgtgacctggtggatctacttactgctttctgctgaattcaacgcaatctccataatcagtgtcttgaaatcagaatcaaggctactgtgagaaaattggtaaatatttatctactggtggaaaatcaaaaagaaaataatccccaactcatatttattttgattttgtattatgcatcagatttacacagcaactagaaactgggtatatggcaagaaattaggaaactgccacacacacactcaggagaattttgtttttagcacataggaataaaattagaaaacatcttttttaattggagggctt

SEQ ID NO: 915639 - DNA, 578 bp, Homo sapiens
ttactcatgtaaccaaacaccacctgtatcttaatarcctatcaaaatataaaaaaaattcagatttatcacattgcctacaaatgtcatttagaaaatggagaaacattttaatattaaaataaaacataacaattaaaaaaaagacttcctcggacaaataaaagctgaaggatttcatcaataccaggcctttcctacaaaaaaaatgctaaagagagtaattgaaacagaaagaaaatgacattagtgagcaatatataatcaccagaaggtataaaactcactggtaatggtcagtacagagaaacgcacagaataatataacaccgtaactatggtgtgtaaactacttttatcctaagtaaaaagactacaaaatgaactaaacaaaaataattaacaactacaacttttcaagactgactatgtctttatgtctttttgtactgactatagtacaaaaagatataaagaaaaaatgaaaagctaaaaagcaggcagatgaagttaagcacagagtttttattagttttccacaagaaaactgtaggtgcatataaacaaattcaatgaag

SEQ ID NO: 915640 - DNA, 591 bp, Homo sapiens
tagtggtactgtatgatgtgtcacctctcttctagttcccactgtcatttcccttaatctcctttaagctttcactgacagatttctccaggccttgcaggcttcattaagactattcctagctccctttaggctgtcattaacagaaaccttaaggctcaaagaaatgttgtatattttaggtttgggttatggcagatcctacaagcggttccattatcagctccaattatttacaaacgcatattcaactactccaaatgttcagtttaaaacaatcattttattatgcttacaggtactctggggcaggaattcagaagataagcaaaaagaattttcatctgctcatgagagcagaagcttcactggagaggcttcaatttctgtgcaaaggaatcaagtggtgtcaagtggtggcatgctcactcacacatctgttggcagatgctggcagaaggcaagatttctattggctttgtcctccagascagtacttcacataccctgtccttcctcggagcatagaaaccttggacttcttacattaatattcatggcttcaaagatctcaactcttccttaaatgaa

SEQ ID NO: 915641 - DNA, 591 bp, Homo sapiens
tagtggtactgtatgatgtgtcacctctcttctagttcccactgtcatttcccttaatctcctttaagctttcactgacagatttctccaggccttgcaggcttcattaagactattcctagctccctttaggctgtcattaacagaaaccttaaggctcaaagaaatgttgtatattttaggtttgggttatggcagatcctacaagcggttccattatcagctccaattatttacaaacgcatattcaactactccaaatgttcagtttaaaacaatcattttattatgcttacaggtactctggggcaggaattcagaagataagcaaaaagaattttcatctgctcatgagagcagaagcttcactggagaggcttcaatttctgtgcaaaggaatcaagtggtgtcaagtggtggcatgctcactcacacatctgttggcagatgctggcagaaggcaagatttctattggctttgtcctccagaccagtacttcacataycctgtccttcctcggagcatagaaaccttggacttcttacattaatattcatggcttcaaagatctcaactcttccttaaatgaa

SEQ ID NO: 915642 - DNA, 674 bp, Homo sapiens
gagtaccatggttgtaagaaaaatttctccaggtcaaayaaaaaaatgtattagtgtaagaaaaagagcctgttctttaatgtttactagctcaatattggcttactttctcaatcactggaactttctactttaggaactggtggtatggtcaagaacattactctttactgttaggggtttaaaaaattctccttacagtttctctgctcaaatatttctctttggaaaactttttaaattattgtcacttttatatttttttaaccagattggaacttacagtctattatcattatctgctcatacaattttctaaaattcacttgaggtgcaggttttcattcatttaattgtgaaattctgatcagcctcaaactagagtctaataaatcaaaataaccaatatattggcttatcaaaaagaaaatggactgccataaatttctcttctctttgtatgtatgaaccaccctacttcactcatctagagattaagttcaaacctctaccacactgaatcagtgctgcactgaccaaaaacatatagcagcagtgacacaaaacctgtccttcaagacggtttctgttactatgtcttatcatagaggcttaaactttcacattagaggtttgtactggaaagaaatgacataggcaggagtgtggaagca

SEQ ID NO: 915643 - DNA, 666 bp, Homo sapiens
tgtggtcactaccaccaaaacatttcaagaatcttaccacaatttcttacttgcattatcaccctgctccaagcaatcatctaatctcacctgtattattacagtygccgataactgatcacttggatgcatcctgtgcttgctattgctagtgaatacagtcagagtaatattgttaaactcagtctgaaatcatcaacctctagagaatatttaaagccatgaaagaagcctgagggctcacaggaaactatataatgccagttaggaagatcaagaattattttcaggcactccaatgtttagaggacaggaggatgctgagaaggcagaaaggagttcagagataaataagtagtaaagtttagagtaggctcaatccagtaggtaggtgggagcaccgagacattatattcatgatattcatggttattttatattgtgttcattaatggatgttaattagctttatttatgattttacaatatgtatcaaaatatcacatcacatatcataaatacattccatttatatttttaaatttaaaagataaatttataatttttttaaaaagcaataaaaaatgcaatgccattctctcattggaatctaagatggtctctaagaaacattgcctaatatatatatacacacacttacatata

SEQ ID NO: 915644 - DNA, 563 bp, Homo sapiens
gctccactgctatggctttgaaggtatagctcccctcctggctgctttcacaggctggtactgagtgtgcagcttttccaagagcacagtgcaagctgtcagtggatctacaattctgcagtctggaggacaatggccctcttctcacagttccactaggcagtgccccagtggggaccctgtgtgggggttccaaccccacacttcccttccacattgccctagcagaagttcttcatgaggggtccacccctggaacacacctctgcctggacatacaggtccctccacacatcctttgaaatttagggtttcattaaacctcttgagttttctgaattttctaagaatgcaccagaattttaattattcaaaatgtccattgaaactttgctaagcactattttcaaaggtctatacaagcgaaggatttggatcagttgatgttggaggggaatacatttgtgtaggtaggtagatagatagatagatagatagatagrtctgatttattaagaatcattcaccaggtattagtgttacattttagaaagggagaaaga

SEQ ID NO: 915645 - DNA, 610 bp, Homo sapiens
atgattggaagacgaccatggcatcaaactttgtttccttctgtattagtgcttagcccagagcttcaacctaacttgaccttgargtcttcagatggcttccagtagcaatcagagctatgtgctccttgtttacgttcagcaaaagatagagaaactggtttctcatctaacactttcaaaaggagagaactttctgaaacacctacaggaaatttctccttgcatctctttgactggaattgagtcacataccaacttctaaaccaatcactgccaagaaaatagcacttcctttagacaagacacatccaactcttgagcctcatattacatcgtaacttctcaataggggaaggtgggagcagatgtcggggagtctaccgtaacctccaccactcacatgcatttgtgactacaaggtttcctcagcttcttttttaatgtggcaggtctagaatgggtaacaagtaatgacttcaattctctgaataaacgaagttttggctttctattgaaaaatcaagtttgcattggtgactctggacacactactcaatttctaacaatgcatagaaacagaactctcacaattgcaaatggagctaag

SEQ ID NO: 915646 - DNA, 614 bp, Homo sapiens
tactgtcatggagggaattacagtaattctaccaacttttgaggcaaccttcttctgacactgtgtgaaacagactgaaaagactctaaagatggagagagctcaatgcttgagaaaaggaattctgtcctttgaaaggtctctagaacaaagggtatgcaatatgtttatcacttcaacttcagaaacataataggctctagaaacacattctcattgatctgtttctactgcttctgttttttttttttctgcttcacccaatcgtcttcctatttttatctctttcattccactctggagccatgttgcttggtcaggccacccttcaaaataaatgattttttccctctttcatgttatacctgttttcttaattcttggctgttacttttctcagttaacctttggcaaatcataatgaaattaaatttagctggttgtagagagaaagagtcattgtagaagttgggatggtctggaagtgaattaaaaagtattttgatagccctcagaatgtggacaaaaatagtaaaaatccagctgggagtcagtgtatcyattttatgtcatttgcagtaaattgttgggcgtctccttgtagctgccacaat

SEQ ID NO: 915647 - DNA, 558 bp, Homo sapiens
ctctcctcaactggaataacaggagctgaaagaaatgtgcaaccatgaggacaccataacctataaataatgtgctgataccagaaacccaaaatgatggtaactgrgagtggttctaaggccctaagttttggtacactctcatctaagtgagaacctgaccaaaaagggggaatttttttttttttttattttctgaggtggagtcttgctctggtgcccaggctgaagtgcagtggcatgatcttggatcactgcaacctctgtctcccgggttcaggtttaagcaattctcctacctcagcctcctgagtagctgggactataggtgcgtgccaccatacccatctaattttttgtatttttagtagagacgggttttcaccatgttagccaggatggtctcaatctcctgaccttgtgatctgcctgctttggcttcccaaagtgctgggattacaggtgtgagccaccgtgcccagccaggcagaatattttaaacaaaattctgggaggccgttgttttggactaagttcatgtactaggtctcaacaaac

SEQ ID NO: 915648 - DNA, 572 bp, Homo sapiens
accatgaggacaccataacctataaataatgtgctgataccagaaacccaaaatgatggtaactgagagtggttctaaggccctaagttttggtacactctcatctaagtgagaacctgaccaaaaagggggaatttttttttttttttattttctgaggtggagtcttgctctggtgcccaggctgaagtgcagtggcatgatcttggatcactgcaacctctgtctcccgggttcaggtttaagcaattctcctacctcagcctcctgagtagctgggactataggtgcgtgccaccatacccatctaattttttgtatttttagtagagacgggttttcaccatgttagccaggatggtctcaatctcctgaccttgtgatctgcctgctttggcttcccaaagtgctgggattacaggtgtgagccaccgtgcccagccaggcagaatattttaaacaaaattctgggaggccgttgttttggactaagttcatgyactaggtctcaacaaaccaagccaaaccaaaccaaaccaaaatggagttgcttgtgctaggactttaaggaa

SEQ ID NO: 915649 - DNA, 635 bp, Homo sapiens
gcaataaataataatgaagtgctacaaactgtttacaaagataaatctcaccagtataatttaatcaaagaattcaggcatgaagaagcacaagttttatgctttctttgaggtaacatttaccagcatgcaaaagcaaactgtaaaccagttttcatgaacacctgttcagtattgccttaatattttttggtgggagtgagaaatactgaattcactttctctttattgacctatagtttcacatatgtttatgaatactaaaagcaaaatgataattgaaaataatcatgtactgtttaactgaggacaaacacagttttgaattctttttaacttcgtgatttataggtttattaatccattaattgttctctaattaattaaatatttatcaaacacctaatagtatgtttaaggtaaatttgttccaaaaagcccttaacaggcaaccagtctaataggctagagagaaaagccaatgtttacaaaataatgcatactttaattaaataattcattckttcataccaaaaatattttttgaattactacaaaatgcatcacatgtatgtagttggaaagcaatggattttataaagtgggggcaaacagagaaaatactaaatgcagtg

SEQ ID NO: 915650 - DNA, 648 bp, Homo sapiens
ttcccatctttctgttcatgtattcattgtttagctcctgcctataagggagaacatgtggtwtttgcttgtctgttcttgcattaatttacttaagcaaataccacatgttcttgcttataagcaggagctaaacactgagtggaagatggcctccagctgcatccatgttgctgcaaaggacatgatttcattcttttttatggctgtgtagtattccatggtgtatatgtacagcatttttattatcattttattttattttattttttgagatagagttatgctcttgttgcccaggatggagtacagcggcgctatcttggctcactgcaacctccgcctcccaggttcaagtgattctccttcctcagcctctcaagtagctgggaatacaggcatgcaccaacacacccccggctaatttttttgtatttttagtagagatagtgtttcaccatgttggttaggctggtctcaaactcttgacctcagatgatccaccggtctcagcctcccaaagtgctgggattacaagcatgagccactgtacccggcctcacatttcattatctaatccaccactgatgggcacctaagttaattccatatccttgctattgtgaatagccctgtgatgaaagagaa

SEQ ID NO: 915651 - DNA, 503 bp, Homo sapiens
ttgattcatcaagccaacagggaagggtctccttacataatgggcattataatattatataatgtaatcatgtacatataatctccacrtctcattatttttgccttattgtattagttagaagtaagtcatgggttctgccatgaaagaagaggatattatgcaaaggagtaaatactaggagagaccatgaaggggacaacttaagagtgttttcatggcagagaaattttggaaagcaagagtaggagtggagagaaacatgtgtttggagggggagagagaaggagaggtgagagagaggtccatgttgttgtgggtgggtgaagaactaatggcatttaagttgaattcaagtatgtgtaaactgatagtacttctttattttatggtaaaatgcttggtcttttattctgtattttttcaagtaattattggtttctcttgctagcacttccactgattaggaatcatagtttcatatcaataaaatattttttaaa

SEQ ID NO: 915652 - DNA, 644 bp, Homo sapiens
ttgaaatcctgaacagaacaatatcttgctttgaaattgaatcagtaataaaaacaaaaccctaaagcagatggattcatrgccaaattctaccagacatacaaagaagagctggtaccagttctactgaaactactgcaaaaatctgaaagaaaacaaaaaacttacaatgaataaacaaattcaataaatttacaagaaacaaaatcaacatacaacctacaaaaaattgcatttgtatttctatatactaacaacatacaatctgaaaaggatattaaatcaacctcatttataatggaattaatcccattaaaaatagaaataaacttaaccaaggaggtagaagactttttttttttacactgaaaactataatatattagtgaaagaaattagacacatacagatggaaataagtataatgtttatattttggaatcttaatattgtgaaaatatttatgttacacaaagaattggaattctattcccatgaaaatcctagtgacatttcttttagaaatagaaaaatagtcctaaaattcatatggaacaacagaagactcaggatataaaaagtcatcttgagaagaaagaacaaaactggaggcatcacactgcctaacttaaaacatattacaa

SEQ ID NO: 915653 - DNA, 576 bp, Homo sapiens
tatctgctcaatttagcacctgtaaagactgcttatctccctggcaagattatatttcacttcaaagatggagactgtatcttgcttttctatctactataatatctaccctaatatgaagaatataggaagttatcaataaatccatttttgaaaaaaggtgtttacattgttcattctattacatatcatttatcttcctctctatttttataaaacctagactgttaataagccaacttgaatacagtttaaattaaaagctgacactaaacaaagtctttctagttcacttgctctctctcaagcatgtgtgtctgaatttccatggagtcaataaaacagagttatagagttcactatatctttaatcttttccctcttgtctactaattgcaaagaaagcagactgagtctagatactgttaggctgtttataattatccacctttgcttgactatgyatcctttctagtacagaaaaccaatcaacaaacaaacaaaaaaaacaaccaattgtcactgtgtgatttatttcctaaactaaaccaccatcaaacagatagctacacaaat

SEQ ID NO: 915654 - DNA, 613 bp, Homo sapiens
tacaataaaattgtaacaattatttggtgtataaatgaatgaatgatccactcttcctctctctttgctcctgggaagtacttgctccttatccagtatcttacatctcagtaaaggccaccacaatttaatcaattgcttgggacatttacctgggattttgtttttaactcctttccttcacaacacacattaatccatgagaaaatcctattagtttttttcttcatattatgtcatgaatttaacaacttttcacatgctcaactattgcctgaactattacaatttcttactgactgatgtcctcaggttacacttgacagttcccgtagaggagtgttatcttttaatataaatgtaaatctgatcacattgctgtgttcctcaacatggtttttttggttccacatctgtctatgatgtagaaaactgaaaagagcatcattcccacttaaacaattaaaggccagatacactacaaaattaacgctttctttgaacccataagtcaatttctactattccacatatartatttaacattcaataacaaaataagcaataattaaaacacaaaaaaaggaagaaaaaaggattactaatagacaaa

SEQ ID NO: 915655 - DNA, 582 bp, Homo sapiens
gtgggacaaaaacacacagcgtaaaacacacaatataatctgcatgcaatttgacagagaagagaaaggatggatgagaaaaacaggacaccagaccccccccataaaagcgcattcacacacacacacaaaaatgaaactctgtggaaaccgctaatataaaagtaaatataaaaatatttgtttttcttatgttcaatgactctaaaacagaggtcctcaagcaggaaaaattttgcccctcagagcgcatttggaaatctctgtaaacactttttatttttaagttggagagtagggggtgctactagaatctagtgggtagagacaagagatgttgctaaactatatatagtactataacacaggacagctcccaacaacaaagaattacctgatccaaaatgtaagtaatattggtactgagaaaccctgttaaaatatagttgatgttctaaaggaaaatgataktgttttatgtggctttataacatagttaaaattaaaatgtgtgaatataatggcacaaaattgggataaatggattggaaatagaaatctgtgaagttttacaataaaggt

SEQ ID NO: 915656 - DNA, 582 bp, Homo sapiens
gtgggacaaaaacacacagcgtaaaacacacaatataatctgcatgcaatttgacagagaagagaaaggatggatgagaaaaacaggacaccagaccccccccataaaagcgcattcacacacacacacaaaaatgaaactctgtggaaaccgctaatataaaagtaaatataaaaatatttgtttttcttatgttcaatgactctaaaacagaggtcctcaagcaggaaaaattttgcccctcagagcgcatttggaaatctctgtaaacactttttatttttaagttggagagtagggggtgctactagaatctagtgggtagagacaagagatgttgctaaactatatatagtactataacacaggacagctcccaacaacaaagaattacctgatccaaaatgtaagtaatattggtactgagaaaccctgttaaaatatagttgatgttctaaaggaaaatgatattgtwttatgtggctttataacatagttaaaattaaaatgtgtgaatataatggcacaaaattgggataaatggattggaaatagaaatctgtgaagttttacaataaaggt

SEQ ID NO: 915657 - DNA, 660 bp, Homo sapiens
ttcatgaaaatttaccttggtgcaagtgatatgagctattaaatccatctttcggccagatattccattctgccttagaaagcccaatactaatccaagaaagacatggaaacatgaaattcacacttatttctaagagttgtaattgctgtgagttttcagcatatcttagcccatttggaagaatggggttttcttgaggctttcttgaacccggagagctttcggaatagtactttccaaggagtctgagatatttctttattttattttaggatagctttggtgctttctctgagggtggcttagggtaaatggcattgaacaagatggccttaaaattccccttagcttgtctgaactttatacaggcttctttttgtctctaggtaactgacctccctctcactctggaccaggtgggctaaccacagaggatcctgaccttccttccccctatcccttacagaacccaggttacacaatcacagagcaaaacattccaagcaagaggccctaatcacaaacttaatatataacttaatgtacttgacacaccccattgatcaatctccctgcaacatcctttgttacttttccactaactcaccacarctcttaaaaaccctaccattctttgttacagaagaggtaagttca

SEQ ID NO: 915658 - DNA, 626 bp, Homo sapiens
tttcaattatatgttatgcctgtggaagaaaccataaataaaatatgacaaaggtatagatgtaagaaagcatagggcctatttaaatgagaacaaacagagtatgtagattttcctggaaataaatgttataaagggggacagaaagaaataagccaggacacaatggcattaataacttcaattcattaagcataatgaagaaccatggacacaaagtttcagtgggtgcacccagaaaataaacaaatacaaaaatatataacctatcagttggtggcaaacgttgtagaaaactaaagcctggaaggaaagattgagtatgtaaggaaggtatatttcagataacatattttaaggacatatctgaaaaaaatgtgaaagatggatctatgctgatctctgagggaataatcttctaagagaagaaagagaatacgcaatgatctgctgtaggatgggccaagagcaagtttaatttattttagaaacagaaagaaggcccctatatcagtatcagaaagagtatgtgtggggaagaagagtggtagcagatgtagttataaagggatttacagcctcactggagagggccttgactgaaagwgtgaagaattctgactaga

SEQ ID NO: 915659 - DNA, 701 bp, Homo sapiens
taaatgtaatgcactgggctagagggacaacayaatgaataaaaatcaatagaaacaaacaaatagttctccaaggacttctgctattgagaatatcaaatagcaatattaaacagcaaattaaacagacaagaccgaaaacagaatgagagacagagagagagacagacagaggacagacagaggaagatagagggagaaaaacgtgaaaaaattaaagagatttcaccacatattacagaggaaaagggctatggaatactgaaacaaaagatgttttaaaatatgcttttcatataaattaatgaaggagatgatttcaggataacataagagaaacaattttgcgtgtgtgtgtgtgtgtatacactatttgagaattttctagtaccgaataaatccatgatgcaggacgcacagtatctgttcattagcactaacagaaataccttagtaactagataaacaatagtatcactagagagcaatttatgaagcaagatctgttgaattatcttcaaaaatgataacaaggctgacaagcaatttctcaacaatgaaaaaagaagccaaaagtcaattagagaatgtcttccagatgctgaaagaaaatgttcatccagtagaactgtgtacttatggcaggacaaataaacaatttcaaggattcattaaaatatgttctatttgatagaaaatga

SEQ ID NO: 915660 - DNA, 423 bp, Homo sapiens
cggggagacgctagacaatttcaaaccatcctatctcatgagaactcactcamtatcatgagaactgcatgcaggaaactacccccatgattcaatcacctcccaccaggtccctcgtccaacatataaagattacaatttgacatgagatttgggcagaaacacagagacaaactatattaataacttttcacaaagactaccaaaactttacaccaaaaatacttctgtgaggacatctgcccagtaactgcctgttcaaccttgtactcacaccacccttgttactgatccttgttgccaaactttccttcctttatctccctaaatatgcccatagcttactatggcatcatattccacattgcaatgttcactcccaaagaaacatattatctttggagaatctctgtacatctgtta

SEQ ID NO: 915661 - DNA, 589 bp, Homo sapiens
ttttacaaaggggcatttccctgtacagactctcttgtctcttgctgtcaccatctaagaggtgactttcgccttctgccatgattgtgagsccccctcagccacatggaactatgagtccaataacctcttttttttttttttaattgcccagtctcagctatgtctttaccagcagcatgaaggtagactaatatggtatatgacaatttgtttagcattcacctgttgaaggacatttgggctgtttctagctactggatattaattaataaagctgctatcaacattcctgtacaagtttttgtgtgaaaatacattttgatttcattaggacaaaagtctaaggagggaaactgctagatcatgtggcaagagtatgcttagttttatatgaaattgccaagctattttctggaatggctgtgtaattaagcattcccattagcaatgaatgagtgattcagtttattttcaaactcagaaaaaaagatcgtggtgatttcactattttttaaaaattataactgttgtgataagtgtagtaatatatcattattggtttaatttatatttcctagtgacaaac

SEQ ID NO: 915662 - DNA, 577 bp, Homo sapiens
tattttcatcgccaccctctcacccctgctgtggtttacctctttggcattttattattgaaaaatgcctacccaccatatgaaattatttatccaggactatagccgaagaacaataattttaaaagctacaaaacattataatactaaaaacacacgaaatagattgtcctcctttttaatctcatagtgttatcaaaaaagtattaattttcactgagactcaggcaaaaaatattttttacttttgcaagagcatattgtatttattgtccatataatactgtcttaaacacgttagatttgtttactatttattcccgtaaaagcagggaattggaaaccaaaggaaatcagacctttaaatcctctcacctaatgtgagccatttttttttctgagctgagggaaagaaccatcatataataaatcgaatcagctgaaagatctctcttcagcaagtaagctgtatatagttggagtgtraaagacaagtggccacagaacagtccctacgcctggaaacttaattaacttatattttaccatcataagaaacaaggttagggtctctacc

SEQ ID NO: 915663 - DNA, 697 bp, Homo sapiens
aagagtgcaatctaaattcccctcaacaatacttgctctttcattatttttaagacaaattgcaacattcagtttactgaaacttcatcattttgttcataatttaattcaggaaacatttataagcagtaagtagtttcaccagacactttgctaggacctcaggacacagagtttatgcactgttcatttttatcaacgttataaagctggtcttaggttgctctatgtgatgacactcccattgcagtgaatctgtcatcttctgccaaaatcagtttttgctgaaagactcactgtatagtatagtagccaagtagaagatttatacatatatttcatttatcaaaaagtagtgaatatattcaatatatgtagacacagtctaggagaaaaaaagtctgtagtgtatatgtcttccttttttattttatttccaagtaagtagtatattcataaagatgccaatttgacattccaaatttgacatttactacagacttcacatagcttttctcttttctgcatgattccagtatatatcagatctatcagaatgaacatttctaaactcagagcacagyatcatcagtattttcccagttctcaggtgcacagctggataaatcactcatttttctgtttcaaaaatcacttcttttaacctggttgtttcaatgtatcaacatcagtcatc

SEQ ID NO: 915664 - DNA, 624 bp, Homo sapiens
agcttgcagatggcctattgtgggacttcaccttcttatcatgtgagtcaatactccttaatatattccctttctatctgtctatctctcccatttatcctattasttctgtccctctagggaaccctgactaataaatacaacaggaaagacggattacacgttagaaaccagcaccctgcaaatatatcatgtgttttctcacattactcaggcctttttcacttagaaggccaagtgaatagttatgagttaaagtgacatgtgttactttgagaagcctagagtaatcagcacttatttcttaaacagttttttcctcaccttcacaattaaaaactgcatgtattccaggttatgctactacaaaataatggcatatttatcagcctgagtataagagattttgtttctattgctgtgcaacaaatttccacaaacttcatggcttatagcaacacatgtattttggttatttactcttttgtttgtgtatatgttaatttgttttatttttatcatagcatccatgggggaaaagcttgcataggtcttacctgagtcctctactcagtatatcactctgactatgttgaattttatcacacactttttcatcctcta

SEQ ID NO: 915665 - DNA, 638 bp, Homo sapiens
ttgagaagcctagagtaatcagcacttatttcttaaacagttttttcctcaccttcacaattaaaaactgcatgtattccaggttatgctactacaaaataatggcatatttatcagcctgagtataagagattttgtttctattgctgtgcaacaaatttccacaaacttcatggcttatagcaacacatgtattttggttatttactcttttgtttgtgtatatgttaatttgttttatttttatcatagcatccatgggggaaaagcttgcataggtcttacctgagtcctctactcagtatatcactctgactatgttgaattttatcacacactttttcatcctctattgaaataatcatgtaattttgttctttattctgctaaatatgttatatcacattaattgatttttgcatgttgaaccatccttgcatcacaggaatgaatcccaaggtaaacaaatggccatggtatatgatccttttaatgtgctgctggattttgttttctaaggttttgtggaggatattcacatctatatacgtcagggttattggccaatagttttcttttcttgtggtaccttgggctttartatcaaggaaatgctgacctcataaaataagtttgga

SEQ ID NO: 915666 - DNA, 611 bp, Homo sapiens
atattcacagtaacagatacatggaatcaacctaagtgcctgtcaacaaatgaatagataaataaactgtgygtgtgtgtgtgtgtgtgtgtgtgtgtgtgtatgaatactattcaagtctaaaaaataaatcatgttttttgcagcaacatgaatatagctggagtttatcatattaagtgaaactcagaaacagaaaaacaaatactacatgttctcacttataaatgagagctaaacaatatgtttacatggacatagagtctggaataatagacaatggagactcaaaagggtggaagtgtgagagggaagtggataataataaattacttaatgggtacaatgtttattatagatatactgaaagcccagattttgccactatcaaacatataaatgtcacaacattacagttgtactccttgactttatagaaataataataaaaaaaacctgaggtaatggtgcatttgaatcggaaagtttactgcagtcagtataatttccaaagatgaaaaggttaatggagtgtgtttctttattgtagtgcagtagttctgttcttttttttttaattgaaacacctataatctttctctattttgacc

SEQ ID NO: 915667 - DNA, 650 bp, Homo sapiens
ttgaaacttttgagtgggtgagatctagatgaaattttgcacctttagttgatgttgtaataggttgagacttttgaatatgtttggataggtaaatakagtttgcatgtggaatgaatgtgaatatttggaggtcagaaggctatgtgtgaaaaaaaagtgccccttgtcccccaaaagatctccctgttgtaacccttgacattttttaatacattaacttacatggcaaaatggactttgcagatatgaataagaaagtatcttgagatgggaagattatcctggattatctgggtgtgcatggtataatagaaaacctagtgtaaaccaaagagggtggcagaaaatgagagtcaataggagatgcgaagatggaagcagagatcagaatgatgaaagaaaaaatacaggagactaggaatgcaagtgacttttaaaatctagaaaaagcaagtacactaattcttccctacatattgtagaaggaataaaactttgcttactcattttaaacttctgaccttcagaactgtaagatgataaatattaatatgtttagtttcactataaagagtttataatttactatagctgcaataggacactaatacaacttacacttcattacttatacctcatggttttga

SEQ ID NO: 915668 - DNA, 601 bp, Homo sapiens
actcatttatttataaaaccattctctcaaagtatctaggattcttgaaagaccttgttttgctttctttgtttgaagtgaagagctgaaaataaaatcaataggattactcctcctcaaattattcttggaagaggcaaataagttctgcctactcttcagccttaatgaagaattgaaagcatcaaaactagtcaaaatttgaggcattaatctctaaggaatgttctgacacagttcatattcacaagttcctattatacggttttattttaaaatggtgaaaattattgaaactcagatgattaaacagtcttcaaagcttgagtaccttatacactttatataactgctatgaatattctcttgaatgctagtggaggaagggttatccacagctattgtagaagttttagggaatcacattctaaggattgcacaaaagaaaattaataaagcaactgctagaaataaacccacatcttaagaacaatttgrcagaaaggagagtctcccaacaattgatgtagaatatctaaaaagggaataaaaatataggacatagatcttgggaaaacagtatttctcaattagcgagatc

SEQ ID NO: 915669 - DNA, 661 bp, Homo sapiens
ctgttagtggaaatcttggttgtatarcatttaaataaggttattttaatgaagtccaaagataagtaaatttaaaaatgtccaaatttctttttcattctaatgagctgtctggaatctgtcaacattctgaactgtaaatgtatgtagaagttcaatactgaaaaaagagcttaaagcataaatctataatttataaaatgtatggaggagaaaacctccctttaaaaaaaatgaatgattctctctaatcattaatgacatggcagcattgccaatgcaagaattatattttctgttttctatttaatttaactaattcttctaacatttggaaactactgtggtatttaatataaatataatattcaaaacacttttttaaagtttcaaaaataagaattatcatctgtcaggtatagcctacaattcaactgaacgctttttactttgctggcaatgatgagttcccttgtgttagcttatgaaagaaaaagtagcttttattggaactttctcgatattctcttcttgaccactaaatttttttttttaatttgcctctaaaagttagctactagaaagggccaagtgccttttgacaaattaagaatataggaagatattaaatcttaatcctgtaaaaaaatgatgcagttag

SEQ ID NO: 915670 - DNA, 652 bp, Homo sapiens
ttacatcttgctggaagcaatatggctgaacatatcttgcctttcagtaaatagaatttaatttgtgggtatgtgatttagaactagaataaaaggtacatacaatgtttaattaagtacattttagaagagataaactaatgtaggttaaactaactacaatagaaacatagaagttaatcttatccatattttcacattctagaaagttatgcatctttttttctcaattaaaaagattatcatgggttaaaaatttgtcataaaattctttaaagggtaggataaaaatgaaaaaaactctcactggaaatctgtatttgcataattactgtaaaataccaattttacacacaaacaaacagaagccaaaaatgcttcgaaatctcatttgaataatgcatgcatatgtattggttctgcatggctaagccaacagttgcatcagtgaaaatatttaccttttaatgtcaacactagaaataacaattatcaatatgaaagagaaggccctagtataaaatacatactatcatcaaacaaatctaatttcttattttgttatgaagtaaaataatacatttgttatgcatttctaaarcaaaaaattacataagtatcaggggtctattaatttttaaaagtacacata

SEQ ID NO: 915671 - DNA, 592 bp, Homo sapiens
ggcttgtgaaatagaaaacaattaacaaactgacattggtaagcccttgcctgtttatcagtagttactttaaaataaatgaaacaaattttccaatcaaaagacataggttggctgaattgatttaaaaaacaaacaaaagtaagatcaaactctatgctgtctacaagggattcactttagttttaaggatacacataggctgaaagtgaagggactgaaaaagatactttgtgcaaacagtaaccaaaagagaagaggtaagattatacctctatcagacaaaacagactttaagttaaaaactgtccaaagtaacaaaaaggtcattatgtaaagataaaatggtcagtttcttaagaggatatcgtaatgttacgatgtatgtagcccacactggaactactaaatatataaagcaaatattaacagaaatgtaagcagaaaccagaagcaatawaataatagtggagaactttagcattcaacaatagataaatcatccagacagaaaatcaataaggaaacagtgaacaccaataactctgtagtccatataactctatagtccaaaagtatacaaaacattaca

SEQ ID NO: 915672 - DNA, 592 bp, Homo sapiens
ggcttgtgaaatagaaaacaattaacaaactgacattggtaagcccttgcctgtttatcagtagttactttaaaataaatgaaacaaattttccaatcaaaagacataggttggctgaattgatttaaaaaacaaacaaaagtaagatcaaactctatgctgtctacaagggattcactttagttttaaggatacacataggctgaaagtgaagggactgaaaaagatactttgtgcaaacagtaaccaaaagagaagaggtaagattatacctctatcagacaaaacagactttaagttaaaaactgtccaaagtaacaaaaaggtcattatgtaaagataaaatggtcagtttcttaagaggatatcgtaatgttacgatgtatgtagcccacactggaactactaaatatataaagcaaatattaacagaaatgtaagcagaaaccagaagcaataaaataatagtggagaactttagcattcaacaatagataratcatccagacagaaaatcaataaggaaacagtgaacaccaataactctgtagtccatataactctatagtccaaaagtatacaaaacattaca

SEQ ID NO: 915673 - DNA, 571 bp, Homo sapiens
ttgggcagctgctgcagccgctctgaaaagaactcatgaatcagtgggactgtttatagtttttcctttttaattttgaggcaggagtgattaatttgagcctcgttgaggcaagggacaaataagtgctgataatggcaagacctaagaagggttgagttcctgccaggcctgggcctcccagagtgtctctgaactggttgggcccacctgcaggcttcttcccacacccatcccaaggacccctttgagcagagacctcacaaccctgcctggccaatgcatggagctgggactgtgtccttcatcccaccctccacctaaacttgaatttccgctgctgcgagtcaccaaggtcctctctacctgcccctcttcccattgcctctgcattcaatccttgggctgtcctgggcccatcatccagcctctcgtagcacaggcctgctctgcctctcagctgcttgttccaggcatagcctcctgaactcaggtccgctctcctaagaagactgcagcygagttgaggggggctgaaggcgaggggtcagtcaggtgacccagggtgatc

SEQ ID NO: 915674 - DNA, 689 bp, Homo sapiens
attaattgccactcctgtttgtgtctcttgttctagtaagtcacttttcttcccccacctatacttttaccatgacattgtttaaataatggaaacacattagttcttcgtctcttgtgaactttaaaaacttccttgggtcataagaaaaaaggcttacctgattttccaaaaagtgtttctccttgttccatgcaggaagggcttctttagcatccccacactggtaataaattattaaaggggtctcatatggacctgctgacagcactgtgataaatactcatattaattataaaaaataacagtggtcaaaaattcaaagttcaacatgactttcagaacagctttttctttttctttttttttcctgagataggtttcaaatttcaacactgaactttccgaaaaacagactgcaacttgatcctaaagattagtttagcacactctactttttacctttgtttttaaggagaaaaaaatggaagaagctcatcataatcatgatcatctagtgtgagatatactcagagtccaggataggccaggtaggaaaccagggactatttcaaacactgggcatgggccatcctatgtaacatgggatgtgggtgtggaaccacagracttgaggccagagaccacagaacaactgcagggttaagatagggcagggtcaaaaaaga

SEQ ID NO: 915675 - DNA, 618 bp, Homo sapiens
acagctgtgttgagggaaaacgaaattgtgtatgagaatttaaattggcaaaacaacctaaatccttataaatttcataccacttataaatctgtgagacttcttagccttcttagccttttagtttaaagccagaacagaatatgaagacactgacctatgaaagtcaagtaaacatgcatctttttatcatcacagcaaactgcttgacattgtctgaaattttgaggggaggaggaaaaaggaagacagatttttaaatacacaaattattacaaactgacatctcaggcagtcatttggtctccatttgtaagaccatcctgggccatttagacctgagagtgaagtgattaatagcacggattgaaagaagttattttaaaaagtgcattatcaccttttattttcatgaggtttagggatcaggaggttaccatgatacttagttttattatttaaataacccactataaataaggatttgtcatatttttccacttgaatcattttttttctctgaggtttctttttttaatcatagtatytaggtacttagaatctaaaaataagatgttaaatctttttactcttttgtgctctcagaggacattcata

SEQ ID NO: 915676 - DNA, 623 bp, Homo sapiens
gctttgggtccaatacacaaagctatatggagtttcagcagagcagctgctcactaactccagtcccaggatctggcaaagtggaaaattcatctgtacatattcctaggaagagggctgaatccagggagccgaacagcacccctctgcaggccccacttccatggcacctcacaacttaatacccactgacttggaaccccagccagccaatggcagcaggctggagtccacctgagatgggagtgagttccttgggggaggagtggaccccatctctatggttcaatagaagcagccattccagcttgccagctgtggagaatacaggtggtctggttgaggagggaccacaaacaatgcagtacagctgccttgtcagatcatagtcagactgcttcttgaagcagggcctcaacccatttctcctcactgggtgggaccttggttccacagatagagctctgatctctccttgggatgatgctattgtgggaaggggtggctgtcatctctgtagttttatagayttagcaattccagcctgccagctgtggaaaatacaggtggtctgaatgaggaaggatgccccccagcacagcattactgctctaccaagaagc

SEQ ID NO: 915677 - DNA, 588 bp, Homo sapiens
tataaaactatttaaagcagttatagaaggaaaaggttggggaaaggttgtccttccgaattgggacagcctcttacaacctgggccctctgcaggacacagtggtggagctgcgagcttcaccaggtgctgacttggtcctcgcccagtgctatgacttgtcggctcggtttcagttaggaatgctcccaatgaatgtttcaaagaccctgactacagtggcttaagcaaatggaaaaaaacgcctttcttctataatgtgcactcccaggtgaatgggtggatgttcacaggctcaactacatcagcacccaagtctttcaagtctctctgttttgttttccccattttatgctttgagccacatgcccttactccaggagaaagagggcaagagaaaagggcagctcctaatatccggatattaaaggctttcttagaaccccacagcaggcatctgcttacatctcactggccagactatgccacatgcctgaagagggcagaggaactgcrtgtgacttgagccactcaatgaagtcagcctcagagcacaataaatacctggggagagtcaggaagagaaag

SEQ ID NO: 915678 - DNA, 682 bp, Homo sapiens
gggcaaaagagaattttgatgttttaaggtacctatggatattgcaaatattatacagcactacttctagccctatwaacataaatttgcaaaataaaggccaactttaatcagttcttctttttctataaaatacaacctgttttcaacaaaaagttacaagacatgccaaaagacaagaaaattagtgtggaaaaaaaatttgtagagccaaactcaaatatcacactgactttggaattaacagagaaataatttaaaataactattaatcatatgttaagaactctcatgaaaataatagacaacatgcaagaaaagaggagtcatgtaagtatcaggggcatttgaaccagaatgcctccatcttgaacaggtactgggtcaaatgaggctgagacctgctttggtgcattgccaggagttcggcattcttagtcacaagatgtttatgaataagggaacagattaatatgtttattaaacagacccacacctaaaagactcagggaatgtcctgatgtcctgttatcttaagggcaaaagcattcttcatttaagaataagtttcactttaaataaaaccatatagagtcttgtcaaagtcagtagttaaacaaagatgaacaatactttgtcaggagtcgttgtaatagaacacacctcccctatgttttttttt

SEQ ID NO: 915679 - DNA, 625 bp, Homo sapiens
gggtgtggaagagactgggtgggtgagaataggctgggccagactctgagcctcagccctggctctgcctccgagttgcaggtgcccagcttgctgactgtgctctggagggccctgggccaacccctggatcttcttggggagaggagagggtggcctgggcagggtggggcaagggctgggcagaggccagcgggcagaatgccagggctagggaggagcagctggaggggtggagctgagggggattaggaaggattgtaggggttaaagcgcagccctggcagggctcaatgggaacagcttgtccttccatagaccccgggaacaggagaagtggggcagagtagggagatgacaggttgggactggggctcctgggtctctgcagggctgagccacctgagctggcttggagtccccacttgggttagtgaacactttttttccaccatcactgttcctcctctctgcattttaagcagaaggtgaagkctcaggggaggccctcattatacaagtgctgagctgcgcccctctggcctggcattttgttggtgcttacacaagcatggggaggggataattctgaatttatgtggcgccccctgccacccgcccctgc

SEQ ID NO: 915680 - DNA, 559 bp, Homo sapiens
cacactgtttctataaacactttagacacagtgagccactcttctcagggaatggtggaaaccctcccaattccaatttccttaacaccagccaagggccagccttgcatgcaggcctttctaaggatggcagtctcttgcctgctatatgaaatcttttctgcacaatgcttatagccccaatttaatttttagtgttgttttaaaattttattttaataacacataatattataagataaggtaacttggtactaatttctgttgtatgatccatcttaagttgcaatgctggttactttttgacttttggtgactaacaggtatttgtatataagttaccatagcaatgttaggtaattataatctgtcctttttatctcattaagctttcagtaaaattgttaaattaaataagcataataatttgagttaaaattagaataaaaattgtattttattttaattacatgaataatctagttttcatattgtgctaaatccctgtttagaattatgaaataagataaartattcaatcatttttatcaatattttc

SEQ ID NO: 915681 - DNA, 586 bp, Homo sapiens
aaaccccaagtagccaaatcaatcttaaaaactaacaaaattagaggactaacacctcctggtttcaaacttactgcaatgcttcagtacccaaaacaatgctgtaccaccatagagacagacataaagaccaatgcaatagaaataaagaaccaaaaaacacagtcatgatttttaacaagggagtcaaaactatggggaaaggacagtatatttttaaacggtgttaagaatgaatatttacatggaaaacaatacagttggagccttattttacaccatataaaaaacttaatttaaaatggactaaacatctaattgtaagagctaaaactataaaacccttagaagaaacataggaaaaatgtttcataacatagaatctggcaataatttcttggatatgacagtgaaagcacagacaacaacaacaccaaaaatacataaaaagaacttcatcaaagtgacaagctgttatgtatctgaagacacaatcaatagattgaaaatggaataggaacagctctggtctacagctcccagcrtgagcgatgcagaagacgggtgatttctgcttttccatctg

SEQ ID NO: 915682 - DNA, 624 bp, Homo sapiens
aatgctgctttgctgccaaaaagtgactataattaattgcagaggacatcaaaagagagactgaccatgtaaaaggaaatgcccttgtagatgccacagccaaggcccctgcactgaaagggccaatgaagcttgtgggcgtgctggtcagcatacatagaactgggccggaataccctgaagaagaacaaaaatgggccagggattgcatttcagtccagggcccctcaggctgaatgatggtaataaattactaatgccaagtaccaatcacaggagtataactcagcactttcatgattcttttcaccctagaagggattctttgtttctgttaatgtctcatttgtttataggggtaaatcttttcaagacactaaaacaggtgactcagccctgtgagctctgtgcctgacatgacccaaacggccagcaattttctccttctccagttaaacctgtccaaaattgaggaacctatccaggtgagaactggcaactctaatgtactccgatacctttctgcaggagattcaaatatttgctaatgcttactgataccttcactggttagatygaggcattccccaccccatctgaaaaatgtttaccagaagaaataac

SEQ ID NO: 915683 - DNA, 664 bp, Homo sapiens
tatttgatagaaatgtaaaacgtagtctaagtgtcttacatgtgaaagtttcgggttcagcccagagcctcctggggcgccctgccctgtggacaccccgggcaccttagtggattgctttgggagcgctgcaatggtgccaggcctcctcagcaataaagtttgagagacgctatgaagaaaggataaaacttttacagaggcttaaagaaggtcttcatttcataaatgaacaattgcccagagaaacttacaggcaagagtagcccttttatctaaactgagatctggatttcaatccaagggatatttagtgtgaatgacaaaggagcctctgccgccttttccaggctgtgtcttctcagcagtctgagggcagattctctgcagctcccctgagccgagccaccaggagttgacagtcccagagaggcctgggggaggctttgtgggtgtctggacatagggcttttccagtgcgggctgcattccttcccattccaggggtccctggcacctcagctcaagctgcgcggtatggacagtctccctgggtagctgacrtgtggatctggtatgtttttatcggaaaggggagcaaatactgccagaacagcaaccaaccagtttttgaagctggctactgtcttagggaggatggaga

SEQ ID NO: 915684 - DNA, 665 bp, Homo sapiens
gttctccatcctccctaagacagtagccagcttcaaaaactggttggttgctgttctggcagtatttgctcccctttccgataaaaacataccagatccacaygtcagctacccagggagactgtccataccgcgcagcttgagctgaggtgccagggacccctggaatgggaaggaatgcagcccgcactggaaaagccctatgtccagacacccacaaagcctcccccaggcctctctgggactgtcaactcctggtggctcggctcaggggagctgcagagaatctgccctcagactgctgagaagacacagcctggaaaaggcggcagaggctcctttgtcattcacactaaatatcccttggattgaaatccagatctcagtttagataaaagggctactcttgcctgtaagtttctctgggcaattgttcatttatgaaatgaagaccttctttaaggcctctgtaaaagttttatcctttcttcatagcgtcttcaaactttattgctgaggaggcctggcaccattgcagcgctcccaaagcaatccactaaggtgcccggggtggccacagggcagggcgccccaggaggctctgggctgaacccgaaactttcacatgtaagacacttagactacgttttacatttctatcaaat

SEQ ID NO: 915685 - DNA, 593 bp, Homo sapiens
gttggacctgtgtctgcctctcattctaggaasttctgttataaacagacaccatctacgacgtgcacagcgagacagggacattaataaaataaaagcaaaccaaaaactttggcatattttcaccaagggatacaaacacaaacttgatcaaattaacaatattcaagaggctaaaagaggtcccccacaaagggccaaaatcctaggaagcaaaataagctcagtgagggaagtgaatacagtggacgtggagtgaggctggggaggcttcctcaccgtgaggggccaagcctcctgtcagggactatgggcccctctgcactgttagggaactggcttttatgactgcttactctggggcacttctgctggctggcctcggtgctcatgatgggggcatgtggttgcgctgtgctatagcaaaaataaccatttgttcgttcattcaatatttacagggagaatgctgtgtgctatgcgtgggggaggccatgaagcagcagctctcagtctttaccatacaacttcaccactgggacagctaggatctggattcaggagacctggggttaggcctgagaaattttgat

SEQ ID NO: 915686 - DNA, 600 bp, Homo sapiens
agtctgtgagattttcagaagaaccattcatrttacaagtttatattcaggtttcagtcactgaggaattattggtggcagtgatcttataattatcagttctttattatcttgaatatcactttattggcttatctggtagtctctttttaggatttgtacactctcatctctacattatctataatacctaatgccatgtaaatgttggcaaatagttgttacactgtattgtttagagaataatgacaaggaaacaaatctgcacatgttcagtacagatgtaatcatcctttttttcccaaatatttttgatccacagttggttgaatctgtgaatgtaaaacccacaagtatggagggctgaccatatgttatacataatctgacacatatttgttatatatatacaatatatcatctaaaactgaatatttgttgctccaaatagcctcaaaatacgccccaaaaatttataaaatttggaggaatttattgtttataatgaacatttatcaaaattaagtgaatcatctattgttatactttttcattaaaaaatacaaagcaggtatggatttaatatcttaatgaactatt

SEQ ID NO: 915687 - DNA, 660 bp, Homo sapiens
aaatctgtagtagtagwagtagtagtagtagtagtagtagtagtagtagtagtggtagttagtagtaaagacatggtcaatttcagaactatgtaatacaatgaaatccacactttattttcaagatgcctactggtgattattgtaaaatgttttagtgtgtatcagtaggtgaaaagcactggagtaccaccttacttaggaagtcgcctgagcccaggacaatttcttttctcctagcttgtccctgggatcatttgtaatttgctggtgaaaggaagcaagttatgccacaccgaaatatgccacttgaacataaagattatttttaggtaaaggcaattgagaagaagcagacacaagaaaggtctctggccttcgtcctatctgcctaaaagtgggatataaatttgtcaaggtgttcccccttccctctctaccaggaaagacagaagttaatcaccagagaccactctagacctttatcatcctgaagactgcacccagagtagtctacatagcaaatactaaccagcctttatctataattaatttccctacatatttgctctcccacaatttgccaccccagaaattcaaagtacttttcctttgttttgtcacttctctacaaattgttcttttgttaagatgtgatct

SEQ ID NO: 915688 - DNA, 703 bp, Homo sapiens
tggatcatgagctcccatgtagcacyaactatatcttttttctattcatcactacatttctagtgcctaggacaaccttggcatataattagaaatcataagtatattttcataaacaagtgatggtgtcatttacatgtgtatgtccagtgctttctttcctcagaagcatcttgctgcatcttaagccaaccattctcagtaattgtatctcttgtattctaagacctattttactcaatttggtaataatttattcagcatgtgccatgttccagacataggggatttagaaattaataggcataatcttcatctttaacttttatataatctaatatggcaaacagatatgttcacaaaaaaactataatctgctcattcaatgcttgctggacacttactgagggcttattaagtgcctagatttctaggccctagaaatatagcagtgaattaccctttgtggagtttctaacctggtgaaatgtgctatacatttattctgaaggcatgaaatgacagtaagaaagaagcaattaactcttcttctaggcgatagggaccgttgagaaagacatgatacaagcaacaagtagatgctccccatgtagaactctgggacctacaatttgagtacctttgatgccttaccacagagttttatcctgaggctactgaagcatgtttaagcattagagtg

SEQ ID NO: 915689 - DNA, 602 bp, Homo sapiens
taataaagcataatgtagtttatgaatacattactccagcagcctgctctattaactatcaatgattaataatttattaagcattctccaagctcctgcctctgtgcctttgctttatgatgcagcagctccttcctcctcaccatctttattcatcaaccctttccatcctttagggaccatactacagtccaagtcattctctccatggtgaaaccccctttgaaaggatctaatcttttgcttaacactgctttcccaaggtatcgcaatattgaataggtttgacactcaaaattatgtcttacataccttacatgcttaatattagacaaagaccttgtttgagtgcctgttaactcacaaacatatattttaattcccttataaaaatacaatggttgtttttacacacattggaactgtgagctttatataatgtgatataaaaaagtatcaaatcagaattataaattttatatagtgtgatatataaaatatatagtaaaacagataaaagaaaaagttgtactttatgagcaaaatartagctatatagtaattatgctagatatttattctgattggaaattagtcttttg

SEQ ID NO: 915690 - DNA, 618 bp, Homo sapiens
tgtgaaataagagtaataaagctttatgaaagacccctgagcaggggattagtagtttaccaaacagaaaggtaggaagacattttgaatagaagactttaggttattagaaatgtgggagagatcacagctaaaataaatatattaaaatttaatgacagggaggaggaagtcaagaatgaaagctggagagatcgggggaggccagataataaagaagtcaaatcatcaaagagttaatactaaagtattgaactaaatcttgcagacagtaagaggccattggcaagtagttcaacaggaaaattataggcttggatttacattgaaaaaagtatgaaatatgggaaaatgcattagaaagtataaatttgattaaagcaactagattgtgggagggaaaaatggataattattgtagtgattcagagaagcagtgaaaagtggtaagttttagcctgactggctgattaaacatgaagtgtgaaggaatytaaaataatcccctagtttctggattagataaaacctacagtgatataaagcatataagacataacagaattggaaaaaatgatcaattctattaggataagttgagtttgagataactagaga

SEQ ID NO: 915691 - DNA, 645 bp, Homo sapiens
tgcctcccagttcaagcgattctcctgcctcaaactcctgagtagctgggcctacaggcgcctgctaccatttccagctaatttttgtatttttagtagagacagggtttcactatgttggccaggctggtctcraactcctgacctcaggtgatccagtcaccttggtctcccaaagtgctgggattacaggcgtgagccacgtttggccaacactcacttttcccaaaatgtcatgataataatattcagtgtggaaggactgaattctgagtcacctgcaaaccatgatacagtctgtagcagtggtactgagtgtaatccatagaccagtgccattttgcaaaatgttgactgaccatgatgagagaagtacggaaagtaagaagggcttgtaaaattttagagcaagttgacatcactgtgacatcagtatgagctcagtgctccagttcctctaaataaggtgccgaccacttcagacactgcagcattactcacatttgggcactcattggtagggccacattacaacatgtgaccttttaaggtcagtttgtcaaggataaatcaaattatatgaaaatctgagaaaagggaagcacttattttcataacttattttcataatctgagaaaagggaa

SEQ ID NO: 915692 - DNA, 635 bp, Homo sapiens
ttacatgagctacctagattaggtaagttcacagggacagaaaggagaatccaggttaccaggggctatggaaagggggaagggggaattagtgttcaacaggtaaagagttttttgggggatgatgatttttaaagttctggaaatgatgtggtgatgcttgtacaatattgcaaatgtgctcgatacccctgaattatattcttaaaaatagataaatgataaaatttatattatgtatgttataccacagtagatttcttgttaataatggtggcttaaaccataggaaaacaagcagataggcctggtatgattatcagggacccaggttccatccattcagccacctcaacacagggcttcctctttatgatccaacatggctgctccaactccagtcatcatctcagccatgcaacagggaggtgggaggaggaaggacaagggcactcctctacctggaagttcaaccttcccttgagggatactttctggaagtggcacacagtccttccattctattggtcagaacttggtcacatagttgcacatggcttcaagggaagctgggcaatgtwgactttgttctgggcacccatcttttcagctaacattgaggaagaagagacaaa

SEQ ID NO: 915693 - DNA, 601 bp, Homo sapiens
catgaattgcattagtacctttacaaaagggaccccagggagattccctcacccttttgtcacagtgtgaagacccagcaagaagatggacatctatgaatcaggaagagagccctcaccagaacccaaccctgctacactctgatctcagacttccagcctttagaactgtgagaaataagtttctgttgtttatatgccactcaatgtatagcactttgttacagcagcccaagctaagacagcctattatgtatgagcaggtggctttgagataattgagaaaacagagactataactacaaccagccagagatgggatcattgcaaatgggactcgggttcacacaaggtttgtgacacacacacaaaaaaacataaggcagataaatcagcaagggtagcagtcaggaattgacagacgattaatggattgaggaaacagaatagataatttaaaagcaaacctttgtacacaaaagaattcaggaggtgataaaagtaacattttcatatcagttggaaagtaagttattcaatagcaacagaacaatcatttattgaggaaaaawaactatttctttcctggttcaatcttggg

SEQ ID NO: 915694 - DNA, 673 bp, Homo sapiens
tataaacaaggctgtaaaatcatctcattactttacccaggaaatctaacagaaacatgtcttaaaggaagtcacctataaagagggcctattttaacagaagattaaaaaaaaattcacctgtagtcattctaagggttcacttgggtacatacaataaacacataatgcaatgtaataaaatgttaaatcaagcatagtaccttagacaagtgtaaactattatttccaaaaaagtgttcagaaaatcacaaaatattcaaactttcaaaatagcttcatgtattcataaatgtatacttcaaattaaacagtataacacatttggatgttttgcaaaatgtacctaccttctaaaggatggtctgttatttcaatgtcctttttaatgcactgagttttttgggaaaaaaaaccacataagatcgtacccaagctattcaagatttacacagaatatttgatttaacatgcatatgaataaggatgaaaataagaacaaaaaaataacattttgggtcacaaaatcaagtaatttctattcatgtagctayaagtagggcacattaactctcaattttataattcctgtctataggagccatatttcagcagattccaatccttgaagccaaagaaagaaaagtataaggtgaaagttcttggtacacag

SEQ ID NO: 915695 - DNA, 649 bp, Homo sapiens
aaaataaaaagaattatcaattgatgtgatcaaagaaaaatgtttatctcatggggtgttggaaaaggaacatcataaaaattaataggtagaataatcatcaaaaacaatctgcacaacaaatatkacatagctgaggggaactatcattaaaatataatgtatacaaattgctgagaaactcactacaccttctaaatcatgtcaaaagagttgtttgcatataagctgtctgcacttcttctctctctctctttttttttgttcatattcactgcaaggtggcttttgtccacccatgcaaatcactcatatgaaggtcacaatgatgtccaggtggccaaagcctgtggctaatcctcagtcctcatctcaccgagacagcagtttcttagcccttctcctacctccactggcttctcttctcagctcctctgtagttccccctcctctttccaacctgtatgcattggaggggcccaaagctcaaccctaatgctcttctgcatcttggtccctaggtgatctcacctagtcacccagcctcagatagccttaggcttaggaatcacaaatatatctctcacatgacctctagactcatatcaacctctcaacatcacaatttggatatccaacaggcatctcc

SEQ ID NO: 915696 - DNA, 646 bp, Homo sapiens
tgcctcccagttcaagcgattctcctgcctcaaactcctgagtagctgggcctacaggcgcctgctaccatttccagctaatttttgtatttttagtagagacagggtttcactatgttggccaggctggtctcraactcctgacctcaggtgatccagtcaccttggtctcccaaagtgctgggattacaggcgtgagccacgtttggccaacactcacttttcccaaaatgtcatgataataatattcagtgtggaaggactgaattctgagtcacctgcaaaccatgatacagtctgtagcagtggtactgagtgtaatccatagaccagtgccattttgcaaaatgttgactgaccatgatgagagaagtacggaaagtaagaagggcttgtaaaattttagagcaagttgacatcactgtgacatcagtatgagctcagtgctccagttcctctaaataaggtgccgaccacttcagacactgcagcattactcacatttgggcactcattggtagggccacattacaacatgtgaccttttaaggtcagtttgtcaaggataaatcaaattatatgaaaatctgagaaaagggaagcacttattttcataacttattttcataatctgagaaaagggaag

SEQ ID NO: 915697 - DNA, 677 bp, Homo sapiens
cactcctctacctggaagttcaaccttcccttgagggatactttctggaagtggcacacagtccttccattctattggtcagaacttggtcacatagttgcacatggcttcaagggaagctgggcaatgtwgactttgttctgggcacccatcttttcagctaacattgaggaagaagagacaaacaagtactgaaaacaacaaccaatcctgcataagttgaaaatcaccttgagtgcaaatgttttttagcacaggactgcacacctttatgttttcctaggatcacagtcaaaaagaagaagctttaagaaatggttctgaggactttcttctttgttaagctcactttgcaacataagaggaattcagacctcatagggatgtgagctacatagttattcaccatataccctcaggaagaagtagagctaaactgagaagcactacaaagaaaaaataaatgaagaagaacaaaaatgaagataaagggtcactttcttaatgcctcatcctatgcattttgtagaatttgaaacccctggaatggaaagcataaagctctgacaatctgggctgcattcagccttggcagaaaccaggatgtgaccactggctcattcctaatgtttcaggtgggtaacaaatatttgctttttccggggagttgaccacac

SEQ ID NO: 915698 - DNA, 532 bp, Homo sapiens
acaacacatgaggattatgggagctacagttcaagatgagatttgggtgaggacacagccaaaccatatcactgagattcagctgtatcaaagaacttgctccaaacccctagagacagtaggtagcaggaccaggacatctagtgctgcctcccaggctgaaaagcccctggggaaaaacagagtgattctgaatgtgcattcaggagtaggaccgcctggttcatatccagccccaccactaagagctgtatgactcagggaaagatggttgccagcccaccatctgtggtaggttcttaatgagcatttgagtgagagagttcatggttggtgcttagaccatgccaggtgcaatatacgtgctcaatacatgttttcagtggttgttttcttttcagcactccactctgcccctccagctactccagagcctcactgtgaagacacccccttctttggcacctcactgactagtcttcagayaggctccaagatggcggatcctctatggtaaagaggatgttgagaa

SEQ ID NO: 915699 - DNA, 394 bp, Homo sapiens
aaaaataagaacaaatgaaatcttttcctccaagatagaaataagggaaggatgcatactttcaccacttcyattcaacattgcgttggaagttcaagccagagcaattagacaagaaaaagaaataaaacttataaattgggaaggaagaagtagaattatttgttcacagatgatatgattttcgtatttgtccattttcacactgctataaagaaatgcccaagactgggtaatttataaaggaaagaggttaaattgactcacagttcagcatgccttggaaggcctcaggaaacttacaatcatggtggaagatgaaggggaagaaaggcactgtcttcacaaggtgacaggaagaagaggtgccaaatgaagaaggaagagccccttc

SEQ ID NO: 915700 - DNA, 393 bp, Homo sapiens
aaaataagaacaaatgaaatcttttcctccaagatagaaataagggaaggatgcatactttcaccacttcyattcaacattgcgttggaagttcaagccagagcaattagacaagaaaaagaaataaaacttataaattgggaaggaagaagtagaattatttgttcacagatgatatgattttcgtatttgtccattttcacactgctataaagaaatgcccaagactgggtaatttataaaggaaagaggttaaattgactcacagttcagcatgccttggaaggcctcaggaaacttacaatcatggtggaagatgaaggggaagaaaggcactgtcttcacaaggtgacaggaagaagaggtgccaaatgaagaaggaagagccccttc

SEQ ID NO: 915701 - DNA, 585 bp, Homo sapiens
ctgggggattaaagacatttttaccatggaattaatgacagcggggatctcaccacccagcttaaccagatgtcattaattccataaccaaaggttttttttttttttttttaatttattctgkttttttggaaccatttgaaattcagtgctgtagccacatggcggcacctcccccgggtctctctgcaggtgcctcctggaagtgagggctttctcccgcctgcccacagcgagtgcagctgaagatggccaacttctatatatatatagttatcaaaagaagcagaacatcatgcaacagtcgtatccaaatttcccaaaaagctccccaaattggaatcagataggtctgtgcactgccctggtgaccctgacgttctcgtctcatttaacccaggagcgtcctcccgggaccagaccctgagcattctggacactgctgggaggtcttcatcaaggaaaacacgcccatgagacaactacttcaggcggggccgccagggacgccaaagccactgtcaggaggtgcttgagcaacagggtgtccccacagtgccacatcccccagcggaggccacacag

SEQ ID NO: 915702 - DNA, 585 bp, Homo sapiens
ctgggggattaaagacatttttaccatggaattaatgacagcggggatctcaccacccagcttaaccagatgtcattaattccataaccaaaggttttttttttttttttttaatttattctggttttttggaaccatttgaaattcagtgctgtagccacatggcggcacctcccccgggtctctctgcaggtgcctcctggaagtgagggctttctcccgcctgcccacagcgagtgcagctgaagatggccaacttctatatatatatagttatcaaaagaagcagaacatcatgcaacagtcgtatccaaatttcccaaaaagctccccaaattggaatcagataggtctgtgcactgccctggtgaccctgacgttctcgtctcatttaacccaggagcgtcctcccgggaccagaccctgagcattctggacactgctgggaggtcttcatcaaggaaaacaygcccatgagacaactacttcaggcggggccgccagggacgccaaagccactgtcaggaggtgcttgagcaacagggtgtccccacagtgccacatcccccagcggaggccacacag

SEQ ID NO: 915703 - DNA, 606 bp, Homo sapiens
atttctttcttcaaatctgtccatttttgtttcatatacattggtgatctgatgataaacatgtatatatttataattgatatatcttattgatggatggacattaatcactacataatgtcctgtgggcccagcccccgccgatcagtctgctccagcttctgtatgacagtggcttcctcatcaggctcctttcctggcctatggctggcccctccccagtagggccatcatgtccccaggtaacatccacgtggccccctgggcagcacatatcattcctcagttgctctcactagaagccaatacttcaggccccacttcctaaggtctggaaaattatggcagcctaataaaacaagctgataaatttaagactggtattatttctcttccagttgtttgagaatattcagcagggaaagtatttgggtctgtagttggctctgtaggaaagcttttgatgttagattcaagttatttaatcaatatgggatatttgtattttttttccttttgtgtggattcggtgtcttgacaaatatagacagttgtgtctccaccaacrcaatcaatacatagactcctctcatcatcccatacatt

SEQ ID NO: 915704 - DNA, 607 bp, Homo sapiens
aaaacctgccccggtttttggggcagctggcaggggccgagccttcatcctaggtctccggggccatcctcgggaggggctccccacacatgcatgtctgagccccacatcactgtgctcactgatggccacagggtcagaacagagagccaggaggagggcccggggctggctctctgacctcctccacatttgccattgtccccaccttccctgtccaaggcaccgacaggacccagcctgtctggccgtccccagggaggatacctcctggtggggggtctcagctctgactcctactctgggtcctcattcgatgtgtcttctgcctcatcagagcttcaacccccagtgaaagcaccttggaaaacagttcctcaaaatgtcactcactgtgtgaccctgtgaccctgtcagtccagttctaggcatctaccccggaggaatgaaacaaacgtccacacacagatttctgtgcccatgtacacagcaccactgacagtagccaagaagtggaaagagcccaaatgtccatcagaggatgaatggacaagcaaaacacagccyatccacacaagcaaaacacagcccatccccatgggaatat

SEQ ID NO: 915705 - DNA, 610 bp, Homo sapiens
gtctatttctttcttcaaatctgtccatttttgtttcatatacattggtgatctgatgataaacatgtatatatttataattgatatatcttattgatggatggacattaatcactacataatgtcctgtgggcccagcccccgccgatcagtctgctccagcttctgtatgacagtggcttcctcatcaggctcctttcctggcctatggctggcccctccccagtagggccatcatgtccccaggtaacatccacgtggccccctgggcagcacatatcattcctcagttgctctcactagaagccaatacttcaggccccacttcctaaggtctggaaaattatggcagcctaataaaacaagctgataaatttaagactggtattatttctctcccagttgtttgagaatattcagcagggaaagtatttgggtctgtagttggctctgtaggaaagcttttgatgttagattcaagttatttaatcaatatgggatatttgtattttttttccttttgtgtggattcggtgtcttgacaaatatagacagttgtgtctccaccaacrcaatcaatacatagactcctctcatcatcccatacatt

SEQ ID NO: 915706 - DNA, 629 bp, Homo sapiens
ctcctctcatgctctgatttccagtttgacctctaactcccagcctgggggaccagagtgcttacgtgtgtgcataagtgtgtgcacgttgtatagtgcacacattgggtgtgttcatggattcgaatgtgttcggctgcaagcatttatatgtctgggttgattggttccatttctcactcagttttatccaaagcctcccagtttaaactacacaataggtccctgaccaccttgcctaaaagatgatgaaaccagttttttaaccctaaactcaacacttgcctccaaggcaaataaaaatcttggaatcgaaggcagccagtagtgagaacgttcttcaggggacagttctgggctatgctatctggaatagcagactcctggggcaagagggctggcccatctactggggaacgtttaacctgagacagtcacagcagagccccccaggaggggaatacagcccagacaggggaaatgcagaagaatgctaccagcacaacgcagactgggaaaagcaagttccagattacattctgaataattyccttttcatatcaccagaaattactaaattagaaaacacccatttcaggaatacatagagatatgactcaactctattt

SEQ ID NO: 915707 - DNA, 609 bp, Homo sapiens
cattcgtatacattgcggatgggaatgcraattggtaaagtccagctggagcgggtgatagggagaataatggccccgttgaatgtccagatgtcagacctcatcatttccaagtttgtgagcttacatagccaaagagactttgaggatgtgattatggttatgaaacttcagatggggaaatttttctagttctccaggcaggcctggtcttatcacagacagagtctttcaaagcaggggaactttctctgatgtggagaaccgtaaagatggcagcatgagaaggacttcatataccattgctgctttgaagggtgccgtgggccacaaaatgtgggcagtctcaaagcaggaaaaggcatgggaatagaaagagatgcagccataccaactctgtgctgggcatctgacctacacaactgtgagataataaatatgcgctatttaagctaccaggggtatggtaatatattacagccagagtagaacactaatacataagagaagctggaaatcactactaacacataaacttgcaaatcaacaatgcttctttgggaatttactctgaagttacacctttagcaatacacatatatgaatgta

SEQ ID NO: 915708 - DNA, 607 bp, Homo sapiens
tcctgtcattatgatgttagctggttattttgcctgttaattgatgcagtttcttyctagcctcaatggtctttacaatttggcatgtttttgcagtggctgatactggttgtatctgcctgtttagtgcttccttcaggagcttgtgcaaggcaagcctggtggtgacaaaatctgtcagcatttgcttgtctgtaaaggattttatttctgctttacttatgaagtttattttggctgaatatgaaattttgggttgaaaattcttttctttaagaatattgactattggcccccactctcttctggcttgtagggtttctgcagagagatccactgttagtctgatgtgcttccctttgtaggtatcctgacctttctctctggctgtgcttaacattttttccttcatttcaaccttggtgaatctgacaattatgtgtcttggagttcctctttactgatttggatgccctttatttctttctcttgtctgattgctctggctagaacttccagtattatgttgaagaggagtggtgagggtgggcatccttgtcttgttctagttctcaaaggaaatgctttcaacttttcccctttcagt

SEQ ID NO: 915709 - DNA, 593 bp, Homo sapiens
attttgttttaccggaaagaatccatttcatcagttatctttgtccaaagaaaataaccattgtgaggaaacagaagtgtgattcagtttctgtaggatgctcaaggccttccttgagaatcccatactgaggatgccatctggtggtttaaagggacccagcttgccagtgacaccggcccggctttgggcttctctattggctgatagtcatttcttcaccaaatatttgagtgcctactctgtgctgggcactgtggtagcgccaccaacaatagtattagtgacatagttttagaatgatgcaggcataccttgtttcattgtgcttgctttattgcactttgcagagactgattttttacagattgaagttttgtagcaaccctgcatggaacaagtctactgatgccagtttcccaacagcatgtgcttactttatgtctctgtgtcatgttttgttagttctcacaatatttcaactttttaattattgttatgwctattacagtgatctatgatgggtgatctttgatgttactactgtaactgttttggggtgtcatgaactgcacccatagaagatggcaaac

SEQ ID NO: 915710 - DNA, 605 bp, Homo sapiens
gaggtgccaagcacctgttgtcctccctccacatcctccatctgccctgaaaactttctctgacrttcctttactgctccactcttgctttaggtctcaataccaatcacttccttgaccactcacccccaatcacaagtccccctggtgcacccctgtatctttcatccttggcacatttcctagcttgtgctcatatgtttatttgcgtaggtaattgattagcgtctgtcttcccagtagattataagatctaaacgagtaaggaccatgttttattctctgctatagcctcagatccttgtgcatggccagccacagcatactactacatgctacatactacatgctacatgccacatgctacagtcagtcatgctgctgtctgctacagtcacgtgtacttaaccagaggacactacagtgctactacaagtcatgtgtcacttaaagacagagatacgatctgagaaatgtatcattaggcaatttcaatcattgtgtgaacataatagagtgtatttacataaacctagctgctataggacactatacaccgaagctatatggcatagcctattgctcctaggctacaaacctgtaca

SEQ ID NO: 915711 - DNA, 605 bp, Homo sapiens
gaggtgccaagcacctgttgtcctccctccacatcctccatctgccctgaaaactttctctgacattcctttactgctccactcttgctttaggtctcaataccaatcacttccttgaccaytcacccccaatcacaagtccccctggtgcacccctgtatctttcatccttggcacatttcctagcttgtgctcatatgtttatttgcgtaggtaattgattagcgtctgtcttcccagtagattataagatctaaacgagtaaggaccatgttttattctctgctatagcctcagatccttgtgcatggccagccacagcatactactacatgctacatactacatgctacatgccacatgctacagtcagtcatgctgctgtctgctacagtcacgtgtacttaaccagaggacactacagtgctactacaagtcatgtgtcacttaaagacagagatacgatctgagaaatgtatcattaggcaatttcaatcattgtgtgaacataatagagtgtatttacataaacctagctgctataggacactatacaccgaagctatatggcatagcctattgctcctaggctacaaacctgtaca

SEQ ID NO: 915712 - DNA, 575 bp, Homo sapiens
agttgaagacccagctcagaaaattcctgaaaacttaacaattggctctcaagagccagtgtttttttttttttcctcttggcagtgggcggcggaggcaggggtcctaatgaaacggtcagtgcttgcttgtgcggcagcggcacaccatccaaatgcagaatgtgcatatcctgtttcctgaaaagccaaccaatccctcactgagtgtcatgatcaccccttcacctagacctacttatttcttctccatttctagtgaaacaaaagtcagagaactaggaggtgagagtgagtgtggggcctcgctgttctgaaatgaagagctctgtcaagcacttacaagcagtgcacaaccgtgcggccttccccgccattgtactcctcttgccacttgtccacctggcgaatgagcttcaagaaggagcgcttagacactggtgtgtccctgtacatcggccagcccaggaactggaattgctgcaccatccgatatccatcttggggctacraagaacaaggcaacaatcggggagtggaaagaaaacaggcattatttactgaattccagtggg

SEQ ID NO: 915713 - DNA, 575 bp, Homo sapiens
agttgaagacccagctcagaaaattcctgaaaacttaacaattggctctcaagagccagtgtttttttttttttcctcttggcagtgggcggcggaggcaggggtcctaatgaaacggtcagtgcttgcttgtgcggcagcggcacaccatccaaatgcagaatgtgcatatcctgtttcctgaaaagccaaccaatccctcactgagtgtcatgatcaccccttcacctagacctacttatttcttctccatttctagtgaaacaaaagtcagagaactaggaggtgagagtgagtgtggggcctcgctgttctgaaatgaagagctctgtcaagcacttacaagcagtgcacaaccgtgcggccttccccgccattgtactcctcttgccacttgtccacctggcgaatgagcttcaagaaggagcgcttagacactggtgtgtccctgtacatcggccagcccaggaactggaattgctgcaccatccgatatccatcttggggctacgaagaacmaggcaacaatcggggagtggaaagaaaacaggcattatttactgaattccagtggg

SEQ ID NO: 915714 - DNA, 674 bp, Homo sapiens
atgttcttgaagatccatcatttatttatccagtgggccccaaacatcggaaggttatggttctcatttgttgaaaaatacgactctaggagaaatccgtgactccatagaatcttttggttttactgcttccaagatgcaaaacactaatgaatagttggtttttaatcttctggcttgaattttgatcaccattaggcaaataaccaagtgagtcagtcaagcttaatctacacgctttacaggaaaacatgagaggtggaaagggccatgtcattcacttagatgctgtttctttttacattttaacgtatttaagaactatatttaataatcagataatactacttataaaatacagtaacagccagaaacaactgtcagagagaatctaagcgggggcatttcaaactgggttcctttgagtcctggtcatgtggagacgtctcagggagggctgttgggtctctgggacttcagtgtcactgctgtgtttccatctgtttccccatccttctgtgtgccccaaacacctcaggccccataacaractatcttggaaatggcctcttcttatcttaaagctctcatgattttgggcggaagtcagctcaacaagagatttgttgtaaacaatgtttgcttgtctaggttaaagatttctgaactcagga

SEQ ID NO: 915715 - DNA, 705 bp, Homo sapiens; identical to SEQ ID NO: 915577

SEQ ID NO: 915716 - DNA, 598 bp, Homo sapiens
aaacaatgtcagccatgtatgttatttcatcaattcyagcagccacattaaaaactaaaaaacagttgcagtgagtatctgtagcatacctgtattccattcatggcattctagctcagacacatggatctacttgccatgctgctaaatattaagacaaatgtaagcattagtgatgctcagaaatatcttcagtttttctccccttcctagatattcagaaagattacacttctcatctcccttgacattaagcatgacgacatgttcaacagaatcagcaggtagaagggacacatatcactttacagcagaagcatttaaaagttgatgccctcctcccctgcagtggtcattctttctggtaattatgaaagaacgggccagctggaggtaatacaagatcaagcccacaggatgagtgaaccacccccatggagaactgccctgagagtcatccatatctacaatggacttagcatgaatatcggtttttgtgttaaacacagaaaactggtggtaactgttagtgtggcacatcctagcccatcgtgtctaataaggcctcagcttgagtgacctacaacaagacagtaaa

SEQ ID NO: 915717 - DNA, 626 bp, Homo sapiens
gccaatatgtcatccagtgccatagmatgtcactcctgaattagttctactttaaaaattctaaaacttatgactcagagaggtgaaggaacttcttgagaatcagatgtttcacagctaactctctggctcctaacttctttatgctggggttagagtaaatctgtttcatacatctctgtgcacaaaaataaatgtagccattaccaacaaaggactaaggatttgtttaaaataaattgaagtcttaacaggatgtgaaaattttaactttcatgttttcctcccccaagttagttgaacattacggtaaatgtacttttcttaagacatttagaatggattagttcaaaacatattttgtgtggataataattacctttaacatctagatatattcaaaatatctacctgaatttatgttttccagaatactttgcttcacacacatacacagataagaataatcttcaagtgattagctcattaaaatcacccctttaatatgatctaaaaccaaaaatactttaaagggtttcagaaagatcaatgaaaattaatatatctcttttctactaacactgctccttactgccaacacatcctagcattaaatattattttaa

SEQ ID NO: 915718 - DNA, 562 bp, Homo sapiens
agtactgtattgacaaactgtytccagttaaaattcaatacctgtttttctaaaatgattataagcagaaagactatattaaaaagctctatgttatatatatatttaaaacacagtaatttttattctttcactaagccaagtttgtgaaatgttagcatcattttattttaagtttaacattttgaaaaaagattaagaaaacaaaatatttaggataattataccataccttaacaacctttaaaattcccacatttgttctttcattcatttctatctcaaaccaatttccttcatttccagagataaagaaaattactgccatccagttagctgagaactcttcatccaaatcaattactctaatctcgagcaaatttgaatttagagtattttcttgaatttctatggtatactgaaacaagaagtgaaaactcttagcacaaactgtgtgaaagagagagaactacagtaggcttatactggaatgttgataacttcattatttagaaaagatatctgtggttttcatctcatttttcattgcttaactccattt

SEQ ID NO: 915719 - DNA, 617 bp, Homo sapiens
tttaaaacagttttttttttttcaaattctgggaagaatgtcattggtagtttcataggaatagcattgaatctgtcaattgctttgggcagtatggccactgattcttcctatccatgagcaaaaaatggttttcatttgtttgtcatctctgatttctgagtactgctttataaaattctcattgtagagatctttttcttctctggttagctgtattcctaggtattttattctttttgtggcaattctgaaagggattgcgttcctgatttggctcttaatttagatagtattggtgtataggaatgttactgatttttgtaaatttattttatatcctgaaactttggcaaagttgtttatcaaatctaggatcttttgggagtgactttgggttttctagatacagaataattgtcacctgcaaagagggaaaccttggcttcctcttttcctatttggatgctttttatttctttctcctacttaattgctctggccaggacttccaatactatgttgaataggagtggtgagagagggcattcttgktttgttctagttttcaaggagaatgttttcagcttttgctcatttggtataatgttggctgt

SEQ ID NO: 915720 - DNA, 592 bp, Homo sapiens
caaaaggctaaatccacttcacaatgcctcaaaaattgtgtctactcaaaagatgtacaaaacatttactagatatccacaaaatctagcaagttctgtaaaagctccaaagccatattttgaaacaattttcatgtacccagaaggcttaaagatatattaaaattctatatcaaaatatcattattttagcctagtaaactactgagactcacctgcttcaaatataaataagggtggtagactaatagcttttacattgttgcagaaaatgtcaagttattatctgttacagaaattctaagacttttcacctttccttgtatttttattctaattaggttttagaagattgtttattgtatctatttggaggaatgtgtttcatgctgtgtccttcattaaaaagattatgtacttgatcaatccttaacctcttagtgcatctcattagtttggtaatttattcatcaaaaatgcamtccaagatgtggtgggattgaagaactggtgttgatccaaaaaagcacgctgtgtagtgccgtgaacctcatcacttagggtaatgtgcctgcctgagaaaaaggagcag

SEQ ID NO: 915721 - DNA, 577 bp, Homo sapiens
acctatgtaacatttatgtttcataaatgtcagaaaaaggtcttgcttcaatttgtgcttgaactttctacagccaacaattttctctaccaacacctactagaaaataacttcacccctaaatataacaagcttttccctttggtttgtattttgttttatgacccaattaactttaaattaagtaggctttatgatgaaagaacaccatcaaattggcatataaataatgttataaatagactcccaaaggatgaacaatgaaatctgttactgcaacccattttaaaaaaccagctcttacgagcttgatataaatggttttcttaccagttggagactgcattctatttgcaacagtccaaagtgtgatggacaattaattttactttttcctcaaaaacaggaatttttcatgacgcgtcgtgaatatgtaccaagtctaactcagacctttggggactgtggyatgagcaatctcatgagtcttcagttttatttatactgtatactttacatcaagagcaactatacttatagcacttactttggaagaaatgtctctacctttagaaag

SEQ ID NO: 915722 - DNA, 601 bp, Homo sapiens
acccagtaatgggattgctctgtcacatgatatttctgtctttaagtctttgaggaactaccacaacatcttccacaatgrctgaactaatttaaactcccaccaacactgtataagtgttcccttttctctgtaacctctatagcatctgttgttttttgactttttaataatagccattctgactggtgtgagatggtatctcactgaggttttgatttgcatttctctaatgatcagtaatgtttagttttatttcataaattgttgactgcatgcatgtcttcttttgagatgtgtctgctcatgttctttgcccactttttaatgttttttttttcttgtaaattcatttttcttgtaaagttccttatagatagatgctggatattagacatttgtcagatgcatagtttgcaaaaattttctcccattttgtaggttggctactactctgttgttagtttcttttgctgtgcagaagctccttagtttaattagataccatttgtcaatgtttgcttttgttgcaattgcttttgacattttcatcatgaaatctttgcccgtgcctatgtcctgagtggtatttcctaggttg

SEQ ID NO: 915723 - DNA, 464 bp, Homo sapiens
actatactcttctgcctgtggagttgcaagtgtaatctttcttgacagcaagagtgctcataggctgggcacagaggctcacgcctgtaatcctaacactttgggaggctgaggcaggtggactgcttgagctcaggagtttgagaccagcctgggcaacatagtgagatcctgtctctacaaaaagtaagaagacaaaaaaatcagtcaggcatggtggcacacgcctgcagtcccagctacttaggaggctgaggtgagaggactgcttgagctcaggaggtcaaggctgcagtgagttatgattgcaccactgcactccagcctgggagacagagtgagatcctgtctccaaaaagaaaaaaaaaacccaaaaaccaacaacaaaaagaaaccaaaacaaacaaaaaagaaagtgctcaccamaaattagctgcagaaagttggcaacacgtggtcaggtg

SEQ ID NO: 915724 - DNA, 598 bp, Homo sapiens
aaatagttcattaagatattaaatccatacctgctttgtattttttaatgaaaaagtataacaatagatgattcacttaattttgataaatgttcattataaacaataaattcctccaaattttataaatttttggggcgtattttgaggctatttggagcaacaaatattcagttttagatgatatattgtatatatataacaaatatgtgtcagattatgtataacatatggtcagccctccatacttgtgggttttacattcacagattcaaccaactgtggatcaaaaatatttgggaaaaaaaggatgattacatctgtactgaacatgtgcagatttgtttccttgtcattattctctaaacaatacagtgtaacaactatttgccaacatttacatggcattaggtattatagataatgtagagatgagagtgtacaaatcctaaaaagagactaccagataagccaataaagtgatattcaagataataaagaactgataattataagatcactgccaccaataattcctcagtgactgaaacctgaatataaacttgtaayatgaatggttcttctgaaaatctcacag

SEQ ID NO: 915725 - DNA, 658 bp, Homo sapiens
ttatgatttagccacaggatgggacactgtgtgtaactaggacarattgtgttttttagaaatagttaatgatgtggaaaaattctctccaagctaagtgaaagtaggacataaaagtgtataaaattatagtacctatgcctgaatgaaaatattgcaaaattttataagtggttatctcagggttataagattacaggttgtattttctacaaacatttaaaataaactttcttcttaacagaaaataaacactattttaataataataatacaatgattgaaagggtggtgtagatgccctccaaggagaaaaggagcttgtttgtgtttgttcctgcagcaaatgatgcaattgaggcaggagagcccaagcaaagggccctcttcagaaagggagacttggctggggttcactctggttttgaacaatgaatcatctcttctgttaataaggattagcaggttataatataggaaatggctcttgccatcagaaaaactgaatatctctgtgttagctcatttgtgttgctattaaggaatatctgaccctgggtaatttataaataacagaggtttaattagctcatggttatacaggatgtacgagaagcatggtgttggcatctgcttggcttctggtgaggatctcaga

SEQ ID NO: 915726 - DNA, 643 bp, Homo sapiens
aactgaaagcagagaccagtctgtccacgtggtcccagtctgcctctccctgagatgtcaagagccttaagaatcactaggattctagtatcctgttaagcctgtgtatataaaaawgtttgttttgtttttcatatgtttattttatttttcttctattctgaccctgtagtatatcatttgtggtgtttgtgcttacgtttgattgacatctttttttttctataacacgtagtaaaattatttcaaatggtgtaagcaatgttaagcaaagaagacaaatcatataggcatttaatacctgatataaaaatatagaattcttttaaaagcaagaaatcaaaaaacggtgttaaattgtttttaatactatatattctataataaacgtacagtgattctgtatgtctacatgcataattaaatattgagagatacataacagaaaaagagccgtttgtgatataactatgttcacttttatcattttaagttaattatgtcttactagtgatataatagttgatatagtaatatagtgaatttgtgacataagtaactaatctgcctccttgtacgcttcatgctaaaggctatgaaaataggaaaagactaaaatttcaatgtcacgacaattatttgt

SEQ ID NO: 915727 - DNA, 682 bp, Homo sapiens
tacactagacatttgtttaaaaagtcatttatctaaaacagcttaagtactttgatcaaaagtgtttaataaagccaaaaaaaaagtcaccaaaaaatgtttgtattgtttttggttggtttgtcattataagtatcgtaatatgtcagtcagtagggtatgtttaaatttactgccaaatttccacagcctgctcattttgtgggtaataaatattacactgtcaataaaatccttaaaaataggagaatttcagtcaacattttttgattccccagatttttaattttgttattgagtcagagaaaataattatgatatatgggaaccaaagtttcagcattcgagagatgccatatcttatgaaagaattagtatctttgtctatgtaaaaataaaaatctactcatactctgaagtctttattttgggagaatacataattttagccaattcggatagcaggttttatgccattactagattgcttgcatgtcttgcagtatctcgacctaggcctcttttcttgcctattggaagtcatattcatgtcagtrtttgtttggacgacatagtctacagctttaagagcttgaatccccacctgaggaattgatcaagtcacttaaccactctgtgcttctgtacacacacacacacacacacacacacacacacacac

SEQ ID NO: 915728 - DNA, 617 bp, Homo sapiens
atgtgtatgtgtgtgctttgggatrttgagtgtaggggatcagaatatgttaccttaaagtatgccactttggcatgaagattattttgagctgaagaaaactgagaaacagcagatgccaaaaataagtgaatgaatgactgaatgaataaagctctctgccttcctcccatttgcctatcagcaggcttagattcttcgttggcactggagataactctagacttatgagccctgggacagcacttagaagaatttacataacaaaacttactgaaataacccttattttccccatatatttaccttcccacagcttgctgcccctaaaagtctaaaccctttatccttctctacaaatttattgttctttgtgaagatgctatacaagcccccaaattctatccctccatttgaattactcatctctgagtttctcccgcatgtatatgcattgcacatgttaacactctctatttgttttcctcttgtttatctctcttttgtccattaaattttcaggtcgctaatcagagaacctaggagtgtagaggaagagttttgttttcctcccctataggagcaagagaagtatgagtacccgatagatacagtgt

SEQ ID NO: 915729 - DNA, 546 bp, Homo sapiens
atattgtatattttgcatcacaaagctcttcacaatcagtgacaaaatatagagggattacaaattcaagagatggatcaccatcactgttttgtgaagcggcatgccactgttggctgckgagggtacgtaggaaattacaaagggctgaaatcccctgtgctaagacagtgatctggagtacaaaggcatgggcatgacacctcctcccaaaagaagtgcctgaaactgcccttgaggggcaaagaacaacaccatctgattgcttctcacacaaaccattgccatatactgaggcctggctggttcgctttaggggtgacccaggtaggccaagtaaaaagaacagtgatgtgaagaagaatatggcaagacatcggattttgttgaaggaagagaacatgcagctgagaggaggctgttccagaataatttatcagggaataaagaatgaacagaggaaaataggtcttttactcaataatagccctttgcattgattcttagggttcctttaacagtaaagccctcctctctcttctcagc

SEQ ID NO: 915730 - DNA, 584 bp, Homo sapiens
ttcaccttccaatcagttattaattttaaaagaaataaatctacgcttcacaggggatacagcaacacatcctgagtttcattggtaactgagatgtttttatgtaataatcattttgaatatgttaactgggttagtgatgaggatgagtaccaggatttgaggaaagacatctcagcttaggcggaccttacatatgaggaggtgggtaaaccagatgaaccacagttatggttctactgcagcaccagtggccaggcccctggagtttccctaataccacaggacttatactagtagtgtgcagagaggggacagttcttctctggcaggctttgaaggaatggtcagatcagaatagcctgttccttttccctcaggcaagtgaacagcatagctttgggtgactcaaactagatgaaatcagagtcattctatcctcttgagggacatgaaagatggaggaaatattcagacaagatgggcagatccaagaaagtttctaggagccattatgattctggggagcctttctgtgtatgttctttgctaccrtgaaactttccatctcttaagaattgcta

SEQ ID NO: 915731 - DNA, 592 bp, Homo sapiens
tgaaggtacctagcaaggaggcttactaaatgaaaaagaacaaatggccaagcattggtctttggggaatggttttatttaacgttcagacaragaagaatggacaggatgagaaggcatgaccaacagtggtagaagctgcaaaaaatggtttaggagatcaggagaggacactggttttaactcctaagacatcattggagatctgtaagaaagcaagttcactggaatgggagggaccatgctgcaagacttgttaaaatgaagattccagggttttgccatagaccttataaaccacaatgtccaagactgaggcctcgggaagctgcatttttgtcaccctccccaagtgattcttatgtacatgaaagtttgagaacctttggaatagagaaaaatgtcatagtgcccggcacagccctaagcagacattggttatttacaattgttttccttaacctataaaatccctttaaaagccaaatgtagctaggctgtgtcttaccattataaaggcatgtggaaaatagtatccttaaaaccttcacctgggtctcagttatactcagagcagagatccactttaaag

SEQ ID NO: 915732 - DNA, 588 bp, Homo sapiens
agggtaacacagcaagacctcgtctctatttaaaaaataartaaaaaaaataaattccagacttgattttagcaagttttagaaagtaccataattgaaagttaagcaagattgacattttcaaaagtgatctgaaacctgattatttttatattgctcttaaatcctcacccactagaaatcataaagtgatgaatttgttggatatgtttatagaagggtctttctgaaattaatttctttggggaaaattgccagtaatttactccattctgatgcaaaggcaaggatgtgagtttatgctctagtcttttctggtcagcctttaactagtctacatagaaatcccagtatgtgtctcttaatgtcagagcaatgccgtcaagtggtgtctgcctagttactcagaaacttgccatgatagatgggcaaggtggttctatttgtatttgtaatggaacaaaggagagcagctgctaagttgcgatcattcttaatttctgcattatatccaagagaagaatgcatatgtgtttacattgaccaaatttggactatgcagaagagatgcattcactggggaagaag

SEQ ID NO: 915733 - DNA, 602 bp, Homo sapiens
gacctgggtagagatgaaaaacctcatgactgagcttggagaaaaagcagctgaagcttagcatccaggcccaagggagcaagacatggaggcatgctcctgtctagggtcttcctccaattctgatgacctgtctaaagagcgtcttcctgtgaaaatgactaaccttgagagtagtgatctcattcagactatagtcccaatcaactttgaatgattttacttcatgacctcagtaaagaacacaaaaataataaagtaagattaatatctacgtaagaaatacacattaccactgcatagattatgtccagtataataggataggcctatgtcagtttgtaaaaactttattaatggaagttttgttgtcctgttctataatcgtatggcattcttatacttatgaatgtgagctatttatgtcacatctcgtgtcttctgtttgtcaaaatggttcaccattagaggctgggcctttaactactactaattattaatacaatggcttacacactctcataagtggccactaaagagagaattcacatgcttttaattatattgctgtgcatrttaacgcaagataatttttgccactc

SEQ ID NO: 915734 - DNA, 665 bp, Homo sapiens
tatacttcaaattgtaaggtacatgtgcacaacgtgcatgtttgttacaacatgtgccatgttggtgtgctgcacctcatttaatgtgtgtttgaaaagactattcagtagttgttggttgtagtgtattattaatggttattaggtaaagtttgctaataggctaattcacatcttctaaattctgacctagtttagtctacctgttttactttctcagagtggaatggtatagcctctacctataattgttgattgattcctgttaattctgtcaggatttcctttcagttcttcaggtatttggaagcgctggtagtggcatacacgtacaggatttttatgtctttcttgtgaaatgattcttattatttgaaatgacctccgttatatctaatcatgttgtaataaacttgggtcctgatactaatagagacttcccagccatcatatgattagtgtttgcatgatgtgtttttacatgcttatgtttttaaatctgtttccattcttttcttgtttgcattattyctgatgcactgtcaccattgttcttatttgttcttttgtgcattaagtgacttttttctctagctgctctcaagattttaattcttgatttttagaaatattgttatgatatacctcattataatttctttatg

SEQ ID NO: 915735 - DNA, 621 bp, Homo sapiens
agaatggtaccagctcctctttgtaactctggtagaatttggctgtgaatctgtctggtcctgggctttttttttggttggtaggctattaattattgcctcaatttcagaactkgttattgttctattcagagatgtgacttcttcctggtttggtcatgggagggtgtatgtgtccaggaatttatccatttcttctagattttctagtttctttgcatagaggtgtttatagtattctctgatggtagtttgaatttctgtgggatcagtggtgacattccctttatcttttttattgtgtctacttgattcttctctcttttcttctttattagactagttagtggtctatctattttgttaatttttcaaaaaaccagctcctggattcattgattttttggagtgtttttggtgtcactgtccccttcaattcttctctgatcttagttatttcttgtcttctgctagctttgtggttagtttgctcttgcttctctagctcttttaagtgtgatgttagggtgtcgatttgagatctttctagctttctgatgtagacaattagtgttgtaaatttccctcttaacattgctttagctgtgtcctagagattct

SEQ ID NO: 915736 - DNA, 642 bp, Homo sapiens
atatatataatatgtatatacatacatakaacataactttcaaaagacaaaacttataaacttattatttttcaattttaattttttttcagagaatagtacatttgtatatttgtggggtacatgacaacttttgatacaggcatacaatgtgtaataatcaaattagggaaaatggtgtatccatcacctcaagcatttatctttcgtgttacaaataatccaattatacttttagttatttttaaatgtataattattattgactatagtcatcctgttgtgctattaaatacctgatcttattctatttttaacacaaacctatttgaagttcacttctatcctctgcaatgacaaaaagatacttattttttcataaaaataacttcaagcaacctacgattgtaataagtttataaagttaattttctatatatagaaaaaagtactagctattagtattttagcaattcttcaccataataaaatagggctcctatatggttaaaaaagagtaggatcttaatctgatgggatcaatggccttaaaagaaaaggaaaagagagttctctctgagtctctatcccacaagtgatcacacagtgagaaggaagctgtctgcaaagccaggaaaagag

SEQ ID NO: 915737 - DNA, 377 bp, Homo sapiens
cttatcaaaatgactaataatactttttaatcaaattatctttttactgttatttactcaagcataatttactaagcattaatattaaaaatatttattaaacatctatacaacaagagacaactctaacttctgtgaatacaacttgtgaaaaagcagactcattcctttctatcaggaaacttttattctggcaggaaccacattttaatttaaaaaaatcaaatgataaataatttttataaatgttatgtaaaataaataatttacctactcatatttatgtaagcaagttgtgaagaactaaagcataagraagagtaggaattaactagctcgtgtgtgtctggtggggtgtgtggaagatggttcttcag

SEQ ID NO: 915738 - DNA, 512 bp, Homo sapiens
aagcccaaacagtgaagaatgcaattaatacctaactctttaatacccagacactgaagaacatctactagcattaacaccatccgggaaagcatgacctcaccaaatgaactaaataagaccccagagaccaatcctagagaaatagaaatatgtgaactttcagacagagaattcaaaatagttgtgttgaggaaactaaaaaaaatcaagatgacacagagttggaattcataattctatcagatcaatctaacagagattgaaataattacaacgaatcaagtagaaattctggagctgaaaaatgcagcaggcatattgaagaatgcattagagtcctttaatagcagaattgttcaagcagaagaaatagtcagcttgaagacaagctacttgaaaatacacagaggagaaaaaaagaataaaaaaaatgaagcatgcctacaggatctagaaaatagcctcaraatgaaaatcaagagttattgtccttaaaaaggagatagaga

SEQ ID NO: 915739 - DNA, 692 bp, Homo sapiens
catagtgtatttactgtatttttccactttgggagatttacgtaaaaacatactaaaggacaagcgcaatgactatagttaacatttgtttaatagttattatacgtcacatattgttacaagcatatcatatgatattgtagcatctcctgtaggatattgtgcttcttgcttaaaaaaacaacctctcatttgtctgtaatttgaactagattaactatactgcttaggcactgggtactaattatatcactgattttaacaatatttatcatgtacctagcatggagcctgcctaatcttatttaattctcaccagatgtggattaaagcaaccagcactaaatgagtgcattagtccacttgtgctgtcataattcttcagtaaaatgtcatcaaaatctcagtagctttcaatacaaaagtctgtaggtctcttttaagtatgctatagcagcatgctctagacctgagtctggtttctgatctgctccacatattctcttaattcaggaaacagcctgcagggaaaatcccatctggggtgtgatgtttgaaaatttccatgataaaatacaaaatgtaattttacaagaagacaagtactagagaatagtgtcatcaaatcccatgtatatgtcacccagcttcaatagttatcaatactttkcccttccaattcacacgtttta

SEQ ID NO: 915740 - DNA, 643 bp, Homo sapiens
tttcagttgttttcactttttgacattattaataatgctgtyattagcatttatgtacaagtttttgtgtggacatatatcttcatttctctttggaatgtaattacaattctctgtttaacatttggaggaactgtcaaacattttatacaaaacatctgcaccattttacattcccactcacagggcatgagggtgccaatttcttcacatcctggccaacatggtttactatctgactttttcatggtagccactccaatgaatgctaagtggtatcatgattttgatttaaatgtccttgatggctagtgagtttcagcatcttctcatgatcttattggtctttcttttgcttgggtacttcttattgtagtcttgtttatttctctaactctttcatatcttaccccttcaacctcatatttaatttgatagttccagtgagcccctttaaactctttcaacacagctttttttttcctcaagttcaagcccacacagttaccatttttttcctacttttcttacttttttattggtgagggctgactttgtaggggtacaactcatgcaactgcacagattctgcactctttaacgaccccaagtttgagctaatatgctgcagtcatcgtcatct

SEQ ID NO: 915741 - DNA, 586 bp, Homo sapiens
attttcctgagtgaaaaaaatkaagtcctggctagtgagtccttcaggtcaatgttatatttgcttggggatatgtttactgctagtaagtagcataaaagaaataattttattagagctttatccagcctctccttgtggcattacccttcagtgtctttctcagccctgaatgctaagccaccatttagaatccttattgttaaattaccataaaatagagtttcaaagtaaaaaattctaccagaattagttaagttaaataaaacattaaaatctaccagtttacactcagtttctctccccacttaattcatcaccactctcttcttggtaattagaatattaggtccatcttggtcctaatggttaggtcaatgtttggaaatgcagctttcaaagattattaagtcctgttaccagcttttgtgaataagttcatggaatgtccctgcattaattgtctttgtttctgattacagtcttttaagaaaaatttctctaaaataacttcctggtagctattttatatacttctatactctgacataattgtcttcttccttcagtaatcataattacacaa

SEQ ID NO: 915742 - DNA, 586 bp, Homo sapiens
attttcctgagtgaaaaaaatgaagtcctggctagtgagtccttcaggtcartgttatatttgcttggggatatgtttactgctagtaagtagcataaaagaaataattttattagagctttatccagcctctccttgtggcattacccttcagtgtctttctcagccctgaatgctaagccaccatttagaatccttattgttaaattaccataaaatagagtttcaaagtaaaaaattctaccagaattagttaagttaaataaaacattaaaatctaccagtttacactcagtttctctccccacttaattcatcaccactctcttcttggtaattagaatattaggtccatcttggtcctaatggttaggtcaatgtttggaaatgcagctttcaaagattattaagtcctgttaccagcttttgtgaataagttcatggaatgtccctgcattaattgtctttgtttctgattacagtcttttaagaaaaatttctctaaaataacttcctggtagctattttatatacttctatactctgacataattgtcttcttccttcagtaatcataattacacaa

SEQ ID NO: 915743 - DNA, 614 bp, Homo sapiens
atgtggaaaagtttgaaacttcctagagactcagagggcttagaagacaggaaggtgtgggaaatttggaacttcctagagacttgttgaatggctttgaccaaaatgctgkcagtgatttggacaaaaaggtcgatgctgaggttgtctcagatagagatgaggatcctgttgggaactggaggccactcttttatttatttttctgagaaggagtctagctctgtcacccaggctggactgcagtggcgcaatcttggctcactgcaagctccacctcctgggttcacgccattctcctgcctcagcctcccaagtagctgggactacaggcacctgccaccgtgcctagctaattttttgtatttttagtagagacagggtttcaccttgttagccaagatggtctcaatctgacctcatgatctgcccgccttggcctcccaaagtgctgggattacaggcatgagccactgcacctggccaggtcactcttgctatgcaaagagactggtggcattttgcccttgccctacaggtgtgtggaattttgaacttaggagagatgatttagggtatctaggggaacaaatttctaagtggctaagcattca

SEQ ID NO: 915744 - DNA, 589 bp, Homo sapiens
ttgttgtaggtcactcaagctgaggccttattagacacgatgggctaggatgtgccacactaacagttaccaccagttttctgtgtttaacacaaaaaccgatattcatgctaagtccattgtagatatggatgactctcagggcagttctccatgggggtggttcactcatcctgtgggcttgatcttgtattacctccagctggcccgttctttcataattaccagaaagaatgaccactgcaggggaggagggcatcaacttttaaatgcttctgctgtaaagtgatatgtgtcccttctacctgctgattctgttgaacatgtcgtcatgcttaatgtcaagggagatgagaagtgtaatctttctgaatatctaggaaggggagaaaaactgaagatatttctgagcatcactaatgcttacatttgtcttaatatttagcagcatggcaagtagatccatgtgtctgagctagaatgccatgaatggaatacaggtatgctacagatactcactgcaactgttttttagtttttaatgtggctgctrgaattgatgaaataacatacatggctgacattgttt

SEQ ID NO: 915745 - DNA, 672 bp, Homo sapiens
agagtcatgggttgggtggtctgggggtgagatgatgtcagggttcaggccacagggtgtaaatgcagaaggacttcgacattgcggactccaaagtcctacaggcaggctgggcacaggcaggccccagcacagtgcctgagacggacctctgtgtcttgaatgagatcaccagtcctggtgggtatttcaaggttgttataaagtcaggcaatgggaccaagacagaagctttgaggacagaaacagtggttctatgagtagttcagtaatgcagaatcagggccacaggaagctcagcttctgcaagctggtggctgcctccgtaaaacatgggtctttacaaggctcgtggccgctgcagttatctggggtgtgcactggcttttattctgatcacttgtgagtctacctgtctccctgtgtatttagttgcccttctgttgtaaagggtttagggcttgggaagggctggattcctgcccccaagtcctcacccctcccttggactagtgccattggactgtgccttggttgtgtccatggacagttgtgcatgtgaacaggcttgaccacgtgcccggtgcaccaagacataagggcaccaastgcatctcctcacacctcttgctctcctgagctctgtcaggagacagtgtgtctcaggtggct

SEQ ID NO: 915746 - DNA, 628 bp, Homo sapiens
gcaggggcgggtggcagggggcgccacataaattcagaattatcccctccccatgcttgtgtaagcaccaacaaaatgccaggccagaggggcgcagctcagcacttgtataatgagggcctcccctgagmcttcaccttctgcttaaaatgcagagaggaggaacagtgatggtggaaaaaaagtgttcactaacccaagtggggactccaagccagctcaggtggctcagccctgcagagacccaggagccccagtcccaaccctgtcatctccctactctgccccacttctcctgttcccggggtctatggaaggacaagctgttcccattgagccctgccagggctgcgctttaacccctacaatccttcctaatccccctcagctccacccctccagctgctcctccctagccctggcattctgcccgctggcctctgcccagcccttgccccaccctgcccaggccaccctctcctctccccaagaagatccaggggttggcccagggccctccagagcacagtcagcaagctgggcacctgcaactcggaggcagagccagggctgaggctcagagtctggcccagcctattctcacccacccagtctcttccacaccctt

SEQ ID NO: 915747 - DNA, 644 bp, Homo sapiens
tttatgaagctttgtttcactggatgcaaaattcttggctgatawttattttgtttaaggaggctgaagataggaccccaatcccttctgacttgcaaggtttctgctgagaaatctgctgttaatctgttaggttttccttttgggttactgatgcttttgcctcacagctctttagattctttccttcatcttgactttagctaacctgatgactatgtgcctaggtaataatccttttgctatgaatttcccaggtgttctttaagctttttatatgtggatgtctagatctctagtgagatcagagaagttttccttgattattccctcaaataagttttccaaagttttagatttctcttcttcctcagggacaccaattattcttatgtttggtcatgtaaaataatccaaaatttcatggagactttgttcattttttaaaattcttttttatttgtcttttggattgggttaatttgaaagcgttgtctttgggctctgaagttctttcttctactttttcaatactattgctgaaactttcctgtgtattttgcatttctctaagtgtgtctttcatttccagaagttgtgatcatcttttctttatgatatctatttctctggagactttttca

SEQ ID NO: 915748 - DNA, 628 bp, Homo sapiens
ctttttctaaaaatgactttatctttccttcatttatgaagctttgtttcactggatgcaaaattcttggctgatawttattttgtttaaggaggctgaagataggaccccaatcccttctgacttgcaaggtttctgctgagaaatctgctgttaatctgttaggttttccttttgggttactgatgcttttgcctcacagctctttagattctttccttcatcttgactttagctaacctgatgactatgtgcctaggtaataatccttttgctatgaatttcccaggtgttctttaagctttttatatgtggatgtctagatctctagtgagatcagagaagttttccttgattattccctcaaataagttttccaaagttttagatttctcttcttcctcagggacaccaattattcttatgtttggtcatgtaaaataatccaaaatttcatggagactttgttcattttttaaaattcttttttatttgtcttttggattgggttaatttgaaagcgttgtctttgggctctgaagttctttcttctactttttcaatactattgctgaaactttcctgtgtattttgcatttctctaagtgtgtctttcatttccagaagt

SEQ ID NO: 915749 - DNA, 630 bp, Homo sapiens
ctagctagcttctgtacgtggtgccttccccgctagtattgtgttttcttcttgactgcatagttcgagtacaagacacaatgtcctgtgtgcaggtagcttttctatttaaagttcatcttacgtattacgtatgaaggatttaagactctgttatgcattgggaaacttccctttctgttccaaagttaaatggcctgctgaaggctcagcagtgacttgataaatgtttgaggagcacccccctggctcattttatctacataacagggataggcaaattaccctctctgtctccttttttaatgattgtttatcacagggggacacccttcctctactagtaaaccttccagagtcttattgttacaatttaacagtagaaacgtattttgtatctagtgtaacaatattttttattaaagcagaaggtcattttctcatgccaccttactagaatggtgaaagtttatcaacagctgcctgatgagaaatggttactttgtagaaacagattatcctgaaggccactcttgaattcgtggcaagtctggattgtataattcagatattatgcatataggaattagaaatayatgcacagttagaagccttcttttggaatatagg

SEQ ID NO: 915750 - DNA, 618 bp, Homo sapiens
aagagcagcctctagcatgtagagcaggcaagagtgctgagtgagtaagacttacaagcatcagagtgcgctagagaaaacctacacatggctatatttttcttttcttcttttgagacagaatctgactctattgcccaggctggagcacaatggtgcgatcttggctcactgcaacctccacctcctgggttcaagcgattcttctgcctcagcctcccaagtagctgggactacaggtgtgcgccaccacgcccagctaatttttgtatttttagtaaagatggggtttcaccatgttggtcaggctggtcttaaactcctggcctcaggtgatccatccaccttggtctcccaaagtgctgggattacaggcacgagctaccgtgcctggtcagggctattttttctgaatatacttttctccttgcttcccattacttaagctgccttttctccccagtggggcaacactgaggctgtcagacacgctgagatgaccaagagtttcacagtaggcacttattcctgawatgaattctgtccctgaaagcaagccggagtcggggtgcagagaaaacagaaacagaagaagaaaaaaggacaagaagtaacagg

SEQ ID NO: 915751 - DNA, 632 bp, Homo sapiens
tcatcctctttcataatttctttgcttaagggtgtgcacaaatgaggctctcaggaaaagaagacagagggccaaggagaaggtctggcccgttggatggggaattccaaggtccaagatcatattttggaagaggatgcaggctgcgtgcgggcatatcccctcagtgcgaatggctgcttggcagatgggtcaaggctggaatctctaaagccctaattcaagaatgaggtccctttgcttgggtcacaagatggggctgtctaactattttacttcatattcagtgtacatccggattccttataaccccattacccaaaattgttcacttgttttaaatttgcattctttcttcatttggaacaaagagatcaaaatcctaatttattatgtggactcactgctgcctacatttttctaagtaggtattttatcttttattaaatatttatctcatcttaatttttttagttatgataagatactacattgctcaataggtatgtaatrtgtccaacattaaaatggaaaatctatatttttaactctatgaaaattttaaactttgcaaaatcatacataaaagggttaaaagacaagatgaactgtaaaagtaagtgtaataaata

SEQ ID NO: 915752 - DNA, 564 bp, Homo sapiens
gcacaagtggtaagcattggtgacatctacatggtgctaactctgcagstatgctgagtacaagagctgtgggaacaagcttcctccacctaaacttcaaaggaggccaaggggacccttggggtccaggcagggatccgctgtagaagcagggtcaccaccaagtccccatgggataatgcctagtagagccatggaggcaggaccactaccgtgagccataactgtagatccatcaatatgcaatggcatcctggaagagctacaggcacctgactccaacctgtgagagctgcagcatgggctgtgcccagcaaagccaggggagtagggtcccttggaaccttggggattcaacacccatcccagtgtgtctagaaggtggggcatgtaactaaagattgttctcaagccttaaaatttaatgtttgccctaatccattttggacacagttggatctgttatcgctttcttcttgcctgttctcatttggaatggaaatgtttatcttatgcctcttctaatattacatgttaggagcacataattggtttgctttctca

SEQ ID NO: 915753 - DNA, 559 bp, Homo sapiens
tgccctctctgtttccaagtattctcattgttcaaattccacttatgagtgagaacatgcagtgtttggttttctgttcctgtgtgagtttgctgaggatgatggcttccagtctcatcctgcaaaagacatgatctcattcatttttatggctgcatagtatttcatggtgtatatgtaccacattttctttatccagtctatcattgatgggcatttgggttggttccatgtctttgctattgtaaatagtgctacaataagcatacatgtacatgtctctttatagcagaatgatttatattcctttgggtatatactcagtaatgggattgaggagtcaaatggtatttctggttctagatccttgaggaattgccatagtgtcttcctcactggttgaattaatttatattcccaccaaaagtgtaaaggcgttcctctttcttcacagccttgccagcatctrttgtttcttgactttttaataattgccattctgactagcatgagatggtatctcattgtggttttggtttgcatttctgtaatgatcagt

SEQ ID NO: 915754 - DNA, 616 bp, Homo sapiens
taacacagatcattggtgtttcaaaaaacccatccatccatgtcttcatttatttgcaaaacaagggcaggaaaaactagaattaaatcgttaattctctctcggtctctcagggcaatatgttgggcagttacttgagtgagatattttttatcaaaccaaatatgctgaggcaggaataacatcaaaggtgtttgtgatgtactgttgctctcattagttacctgcagatcaaacaggtatctgttctaacacttcgattttgaaacttaatgctgtgtttgttaaatttacttaattaggacctcttaacacctcagatagtcgcttaaaacaacaacaacaaaaacaacagtaatacccagctgttagccctgcggatgaaacaataaatgcaaagttaacactttttaaaggtgaatatgtacattttgatgcctcgacagcattcagtaaaaatcaagtgtgcttagagataatctactaarttgctgattgtttctggacctgtaactcttaataaatattgcaaatatctaaaagatatggatcattatttaggggaaatgtatgtgtatgcataaatgcaatcttttataatctaaaaatacttttc

SEQ ID NO: 915755 - DNA, 671 bp, Homo sapiens
aagaaaaaccaaggtactgtgaaatctctctactggagcattttaaagtaaagtataggcactaacagaattaattacagatttttgtttattttcccctatgttctactaggactacaaaaaccataaaactcaccagaatcttacattattttattcaacaaatgtagaagtattgcttgatcaagtaatgtggtgcttgatttttaacaatttactgtagactttgttatcaatatttaactagtttacttcaatattaaacagatcaataaccatttgttatttaaacaaatgtttaaccacaaacatacctatatgtatatggatgtgtgtgtttgtgtatgtatgtataattgagctgcttatatatcatgtagttttttaaacaaaaaaatagataatagcatcttaaaattaaatcttgagacattgggttataagtttcaattttgcttttctttctgcgtattcatggtctgtagaggagactagacttccctaatgttttagtttccaaatattttgccaagtatgaatgaactaggtcaacgaaggaaaacattctttctgaagcctacattaatattctactgtttgaaaaactggrctaacccttcaatcattttgttaatatttgtagcttctcacagagttgtaaaacctcataa

SEQ ID NO: 915756 - DNA, 542 bp, Homo sapiens
attgggttacaatatcccaaacagagagctagagattgagaaaattggttgagataaacgatgagttatttgggtgtttctcctcctctctatattttgtgtaggtgtgcaccgggatatttcgggaatccccagaaattcggaggtagctgccaaccatgcagttgtaacagcaatggccagctgggcagctgtcatcccctgactggaggtaaggccgacccacacccctgctaacttgcatttataaagctggtataacttaacagcctaagaacccaagcacacatcttcaggatgcataatacacaattccagccagcaagctgtccccaggatgcataatacacaattccagccagcaagctgtccccttgttttgacaaacctgggaatgcttagatagtattttcagctttggtgaataacctgtttcaatgcactttttttttttaaaaagtgaattgtttttgaaacttacctaattataaccaaaataacttcagatcctacttkggtgattttgctgagatctccctttg

SEQ ID NO: 915757 - DNA, 527 bp, Homo sapiens
gaggccctctaagatgaggttcttattcaccttgtcttttgttatctctttttaatttttttaattatagttttttaagaaaattatttggcaaacataactttagaggtagaaattcttgaacattgccttgtacttaatatttttaaatatctgtcttctctgtattctcatttgatcacaatttttagattattatcacaaaatatatgtgtgtggctcaggaacaacttatctagacagagctcatctctctagaatgttctcatatccaaaacattatagtatctaaaaagcgttacataaggaaggccattttctagaaagtcaaaatagacatttcatttatatacatgccagtgctcactttttctccctcttacacacaattcttacaaatgtatttttttttkctttcccagccagcctagaaagtagtaatacttcttggctgggtgcaggggctcatgcctgtaatcccagcactttgggaggccgaggcaggcagatcagcgaggtcaagagat

SEQ ID NO: 915758 - DNA, 666 bp, Homo sapiens
aaattctttgtaaagtggaaagtgctactcaaatatcaatgcttgyttttcagtctgagcagccattttcgtgtctgctgcctccttagagcagctattgactactctccagaaaaaaagagaatctgataggtttcacagaggtgatagagaaatttcagccacttccaccttttgtaagtgaatcacataatattctccattgtatccacaataaaggcaacaggactcatgtaggtgacctaacagggaagggaatgttggttaggcagcaccacctaatggctgctggacagaacctgtatcctcttccttgagaacatgggctgctttatcacttttttgtagatgggttttagatacaggcagactaggcattacactattaatttttaccaaggtcaaaagagatacatgactttgaccacctccttaaatgctgttagaaatgtgactggacaatgtcaggcatatcagaatcactgccactttgcctactcaaagctaatagatttagggcaccatgactaataagatggcatcttgctttctattaaagacacttcttttaatttctgctacagatgaagaaagaggaaataaaagctacttagaataaaccctgctataacttagcatatgtctggaaaagaacttcaggggaaa

SEQ ID NO: 915759 - DNA, 628 bp, Homo sapiens
ataaaagttaaagtgtgagaatatatcagaacttttttgttttttgttttttgaaatggagtctcgcagtgtttccttggttggagtgcagtggtgcgatcttggytcactgcaacctctgcctcccaggttcaagtgattctcctgcctcagcctccagagtagctgggattacaggcgcccaccaccacgcccaactaattttttgtacttttagtagaggcggggtttcactatgttggtcggcctggttttgaactctgaccttgtgatctgcctgcctcggcctcccaaagtgctggcattacaggtgtgagctgccgtgcccagccagaactttctaaatgagtacgtctgtctttcgtttgttcaatcattgatccattcaacaaataattatagagcacatgctgtgtgctaagcacttagttagataagcaaacacaggcctagtccctgccctcgtgaagctgagaattatcagataatagtatttatagttaagattattctgattgtaaaattactaaatattagtatggaatattttggaaagatagaaagcaagtcatcatctccaatttcaccacttagagaaaatctctttttattaatgatctactttata

SEQ ID NO: 915760 - DNA, 564 bp, Homo sapiens
tttttacctgttggcaattatataattcctctttaagactctgtgcagaggctgggtgtggtggctcacacctgtaatcctagcgctttgggaggctgaaggggttggatctcttgakctcaggagttcaagaacaacctgagcagcatggcaaaactccatctctgaaaaagaacaagaaaatagcagggcgtggtggtgtgtgcctgtagtcccaactaattgggacactgaagtgagaggatcacctgagctgggggagcttgagactagtgtgctgtgatcatgccactgcatgggtgacagggtgagaccctgtctcaaaagcaaaaaaaggactctatgcaggcccacacagcatatcaaattcataagctccaaaagattactttccattacttttactttgctgttacattcagtggccaaaaccacaattacttttgcaccaacctaataattagcagatttggggtgactttcttttacaaaataaaaccatatacatagccatagtaaagccatcactggactaggagtcagatgacttgagttttgcctctg

SEQ ID NO: 915761 - DNA, 640 bp, Homo sapiens
aataaaaatgtttattttccatatgatcagtcaccagaggtataccgttgtttcatggggaaaaatccattctgtacaatttcaatccttggctatggggctgtaaggcttcgggggaacatgggcatttttaaatttttgtttgaagaaaaaaatacatgtgactgtggcttttattggctctatagtatacttcatgatcaagaatttgagagagtccagttaaaaacatgcagataatattcttttctaatgctcttgccctttggttaaaatgtcatccatatcaccaaacagtatttttttttgctcttcaatattcccatttaaaccattgctctgattcctgcctgctccttatgccctctgctaagtctaaaaatgattctgatattctatatcataaaagtacttcctttgatcctgtttctcttttaagtgctagagtaagtttaaatatgagctttagagtccagcagatctagtttagagtcactacatccacatttgcaatctgtttaaatctatttaatgcccttaagatttagtttccttgtctgtaaaatgaggatgatggtagtacatttgtgagkgttaaacttgatatggtatatagaaggttaggtaaagtgcctgtcac

SEQ ID NO: 915762 - DNA, 505 bp, Homo sapiens
aggaagacactgttcttttcatctagacagaatataacaagcacatgaattaggactgtgaaaatagaggggatgggacagatattaatagggtagtactgatgtgactttgtgactcttggatattaggaaggaaaaaaagaaaaaaaaatctgggattgcctccaaagcactaacttcagagctacaaaagttattacattatcaataaatctttcatggattaataaatacaacatgtgtaatctttaaattcttattatttataaaaactgtgctgataacatttatatgctcatttttcaaaattcagagaacatttgttgagagccacacaactactgagttaaatgttgaatgtggctgaaaaatgaatgaaagaaggaagagaaagcaccatgtggattataagcatgagaggactgccctgttctyaatttttctaccccagttttcacaagagaagattagagcttgtcagattcagacttaattttggatcatg

SEQ ID NO: 915763 - DNA, 591 bp, Homo sapiens
ttagagactattattatccctattttccagattgggaacctgatgctcacaggtattaagcaactttcccagggtcatggactaacaaattaaggagatgagaatgactgtcaggctttagggcctgtgcttggaaaaacttctttgctgcctttaatgattatcagttgcactctaaagttagcacataatctgccacatgtaaaaccctcaataaatgttcaaagaattaataatgtattcgttttggcttttaatttctgctgatgtaagtgttgatacgtttattttctgtttcccactcatctacgagctctcaagaggacagaaatcttgtctgacttatagttatctctcctaaaaattctgcttggaaaaatactcaacaaccatttgttctataagtgaatgagtgagtgagtaatcttaatctcaaaaatataaaattccagagaaagtggcatcatcccctttttatattasttgcctattgctgctgtaacaaattaccagaaactgagtggcttaagaaaacaatattatcttacaattctgtatattaggagtctgacatgtatctcactgggctaa

SEQ ID NO: 915764 - DNA, 511 bp, Homo sapiens
ttacttaaaatttgatagccgtcagctgtgcctgaattttagaattaagagagggttttcaccaagatttttatttatttgatagggttttcactaattattttatcaaactggacattttatattattctaggaatttatgcatttcttttaggttttcaaatgtaaaggcacacacattttaataacagacctcttatttttgtctctgacatgtgtgtaactatttcactatttttgtattttctttatttgtatttttggcctactttttcattcttgcagtctttcaaaacttccaagttctttctatcttgctaacattttcataaaagtagcattttattttgtttttccacactttttgttttttattttgttgatttatgcctttacattttttattatttttattattttcattgtgggagttaatataattattatttttccagtattggagttgaatgtctaactattttsattcatgtcccttttttttttttaatct

SEQ ID NO: 915765 - DNA, 635 bp, Homo sapiens
gatggcctgctccttcaataggtgaatggacaaacggtgtgtatcggtcggggttctccagagaaaccggaggatctatatcctattggctgtctatctattgaaataggaagagattgaaaggaattggctcacatgactgtaggggctggcaagtcggaaatttgtagggcaggccaacaggctggaaactcaggaaggagctgatgctatagtcttgaggccaaatttcttcctctctgggaaatctcagattttgtttttaaggccgtcaactgattagatgaggctacccacatgatcaaaggtaatcacctttagttaaagtaaactgagtatagatgttaatcacatctacaaaataccttcacagagacacataaattagtgtttgattgaataactggacatacagcctagccaagttgacacataaaattaaccatcacactgtggtacaatggaatactatgcagtgataaagaggaactagctattaattcacagaaaaattatcaatgaatctgaaatgyattttgctaagcgaaagaagccagacttcagaggccatttattgtatgatttcatatatatgaaaattctggaaaaagaaaaactagagagatgaaatatat

SEQ ID NO: 915766 - DNA, 606 bp, Homo sapiens
tcagctagagcaaagaaaaaggcatctggtagaccacttggaagccagccaatgacgaagacttcaattaaaataaagaacgtgtcctcaggagagcatctccgagctcaagaagttataagtccagtgagctacttgaaagccaactactagaaaaagccattttcaaataaaacaaccaaagtgagcaggctttgaattcttccaagaaacctctttctgcatgtctgtcctaactaatgatttaataggagttagacaggccactactcaatgctggaaacaggctgttatacaagaagagaagctataggtctgcctgtaatgtttctggggaaattcaaatattagcatcaagttacagggggtgctatggtgtggcagagggtgagctggactaggaattagcagacctgggttccagttccagctttgccactttttacttgtgagccttaggcaggagacttcatccttgtgggtctcagtttcctcagctgaaaatgaggttactaaaacctgcatcatagaaataaagggagaagtacatgaaatattccatggagagatgcttaacastagtgcctggcatataaaatgcttaca

SEQ ID NO: 915767 - DNA, 579 bp, Homo sapiens
agcttgtattgccagccacccaggcaggaatgtggttgccaagcacactggctcctgcaatgatttaccacttccaaatgttacatttgacaacaaatctaagaartgcagctttctcagctagaagcttcctgagttggatcttctgtcactgctgcttggctttggtgtctccatgaaggaccagttagttttatgcatctctgcttgccaaagctcaatcccatgacttagactctgcacttcaggttgccttcatctttcgtgttccactaacagacccaatcaaaccaaaggtctgattgaattaactggttgagttaactggcagcccagttcaagaaggaggggaaggggagagcaaactaaaaaaatgcatttgttgaatacaaaagagactaaatgaaaaccacttctctgagtatatggaatgctacacaaacaggatgtctgaaaattagtatctgctatatgcaaggagaatgactgtcacatatgcccagttgaaaccaaatcataactttcaaattgagaggtaaggtaaaaatgtatatttgtgaattgtacaggatattagaa

SEQ ID NO: 915768 - DNA, 603 bp, Homo sapiens
gtatgtgtgatatttaaaaattaagccacatcatcatcctaagaaaactacgagactttagttttagtataaacttgcagtgtgttcttgagatttctaaatataaggcttaayattttttccttaatacacatcgatttggcatctcatatgtattatttatcaggaaattataaaacaaagtaaaatgatgttttactaaaatgcacatcatttttagatatgggattttaaaacttgatttataatactacttttaccatgaaatactcttttgttgtatgaccttgagtacatttcccatctgtgaatctgtgtaatcatgtacaaaaataaatgagacaaaacctaagtgcattttaacctcttcaaattgtaaaaagtgtataatattacattttcaaaagaaaacacaatccttttttatttatagcctttttgaaaaccgtgttaataataaacagaatctgcaaagttcaaatcattttttttttggttaggtggcatgagactttttttaggactacaaaccagcatctagcctagttaaatcttaatttcaaaaccaacttcctaaagaaacttaatgagataaaggaagat

SEQ ID NO: 915769 - DNA, 644 bp, Homo sapiens
ctcaggtgtgggtaagacatctcagttctctgctatttgatatgaataggggcaatcccagaagcagcaactgagctcatgggccccaaaatttccaaggaatcacsaggagaactaggctaaatgtcattattttctgaccttcgatgtaccttttccctagtcacttgccaatctcttctaaagggcctcagtccctggagtggaccctaatgatttctgtccattatttggcctagagtagaattcttgcttttctcaaggaaagaaacaaaaagaaaagatgtaaccaaatgtaatttatgtgagtttgtaaattgatatccgaagattggaactgcatacagatgtgtcaaaaatgttaatttccccaagaaatatggtagcacctaattctagcgacacttgtatactttacagatggctttgctgtgctcctggtaaagtcaatgactttctgcctttgaacatgaaaggaaaaagatgttgacaggaattctttagggaaacagaaactacatatttgcttatgctaagttatggcaaagttcagttttattctgtaaataaagcgttgtcttcataaatatcagctatatcctttagagtaaagaaagtcctctttattaaaaaaatctaattga

SEQ ID NO: 915770 - DNA, 612 bp, Homo sapiens
cattgtctgcttacatcattccttatgtacaatactttatcmatgccatttttatgatgttgtatactaggtgataataatagcattgagaatttaatgtggtacccatcaagaatacttctagcttccaagtcaatctctaaaagtcaaacctttagattgggctatcatattaatacaaattcatagattgagaatcaatttatctgaaataagtattttattatttttagcacttgcacttgcttgaactactctaaaaaagataaagttgtaacttaataagagaattgtgttgtagtaactagtagctttcaatattcacatgtcatttagcaaatgagaatgaaaaattaactcttccattgatatgctgctttactcctttataaaacaatatttgggaaatttgacagagttttgctacagttgctgtatgtattttttgtaaagatttcttcgtgtgtgtgtgtgtatgtgtaaacatcatggttactcataaagctctgggtgagaaaaacctatttgcgttatgatcacttatatgatcataatgacaatgaattcattattccatgtgtaagtctgccatgtttaattttcttcgatctt

SEQ ID NO: 915771 - DNA, 557 bp, Homo sapiens
gtgactgatggatctaggaatggaatttaccggagacatgcatttggggtttcccctagatcaagcatttctctaacattaaaagggcagagtgggaggaggggatgtggcagccgaccactttgaaggccagttttctcaggcaacttagaccatttttagtcaaattttatcttagattcacagtactggtggttttcgagtatattatgttaccttctgaaatagttcctgtcgttttgaggggcttttctttataaaatagtcaactttggctataaaatgttactttagtgtaattccaactggaccagtcttatctgtagcatgcaagaagttcaagtttctcttttatttttaaaagtggcccatgatacctgtaaatcttgggaaatgactgagtacaaaataacggagattaaattgagcttgaaatttatgggggaaatgcagctaactttgtgcttttattttgaagctaaacagttaacagaaacacarttttgtaaacagataatatctgtggtctgttgagttgctaggatttgtctttagat

SEQ ID NO: 915772 - DNA, 657 bp, Homo sapiens
actgtgaagaaataaacatttttcacagttccatgttatagtagtggtgactactgtagttaccatgttacaaacatagatattacttttcattaagcttaaaattttttcttcaattctgttacattatctttataattttaaaagaattaaatggatagtgtacctagaaaacatcaccatcctttagatgagacctgattacattgatgggttacatggctgtaagtaaattagtattaggaattagaatcaaaatgctcaggtcattctggctacagttatcaagtttccacagttgctcggagacctattaatataatttgtaggatgccaaaaggcagtcagacagccaacatcactgtagtttactgtgatttgatacagtgcatctgtaaatttgaactcagaaaaatgatagtaaagaaggtatgctaacatatacttgatagattactcttaaaggaccttagacattaggcaatagtaaacatatttaaatctcaaatattggaattctgttctttctcttgggttgcaaagacaagatatctggtaagamtatgtctcaaaaagacaatgattctttaactgtagggaaatcataaattgctaaaccatttcttgtctttgattagccacaattttttaggtccc

SEQ ID NO: 915773 - DNA, 650 bp, Homo sapiens
accaccctcaccttctgaaacttagtgtcttgtttatggaataccaggaagtggctgcatgccatgaagtggttttttattcacaaaagagttcaagacaccaacagtcacactaatttttcttttataattacttttatttttcagtaggttgagaaaacacttaactaactttgtttttctgagatgcccaaaccctacttaggaaggactacctatggaatgaaaaactgttccacaatcaccaacggactccttgacaaaataaagtgttagtttggccaagcagcaaaagtatatcacttttttgtttttgtttttgtttttgagacaagagtctcactctgtcacccaggctggagtgcagtggtgtgatctcggctcactgcaacctccgcctcccaggttcaagcgattctcctgccttcagcctcctaagtagctgggattacaggcatgcgccaacacgcccggctaatttttgtatttttagtagagttggtgtttcgccatcttggtcaggctggtctcgaactcctaacctcgtgatccacctgccttggcctcccaaagtgctgggattacaggcttgagccaccgcamccgacctgagtatatcacatatgggctaagcaagtagttttccgcct

SEQ ID NO: 915774 - DNA, 594 bp, Homo sapiens
tattattcattaattttgtttcagcctagtaaaatgggggaggaaggggtacaraatatttcttttctccttcctttctttccctttctttctttttctttctttctttcttttctttttctttcttcttttctttcctttctttctctttctttccctcccttcctttctttccttccttccttccttccttccttccttccttccttccagggtctcactctctcacccaggctagagcacaatgcatgttcacgactcactgcaaccttgaccttccatgctcaggcaatcctcaagcctgaaattatttctttcctttctttctttctttcttttgttttgttttggtggaggacagagtttcgctcttgttgcccaggctgcagtgcaatggcgcgatctgggttcactgcaacctccacctcttgggttcaagcgactctcctgcctcagccttccgggtagctgggattacaggcatccaccaccaagcctggctaatttttgtatttttagtagaaacagggtttccccatgttggccaggctggtctcaccctcctgacctcaggtgatccacccaccttggcct

SEQ ID NO: 915775 - DNA, 619 bp, Homo sapiens
gctaaggaagttgcagaaacagatggacaataccacttaggagatgaaatcttcagagttcctgrgggttatggagccccatttccatccctccctcatgccatctgggctttgatgtgggctgtgacaaaaataccaccacttgactgcagaactgcaggatgtaaaatatggcaatttcacggagctacattgataacattcctcagttggtgtcttagctgccatatctgtctgacaaccttgcctttcaattctttctgtgatacctggaaaacaaatatttatgaaacggagagaagaaagtatgaattaggaatatgcaattgacatcaatatacaccaaactccaagctagacactgccacatgtaatttaatttgatcttcatagtaatcctgaaatgctgatcagagaggtaactttaaaaaaacttagtctgtagtttgggagataaagcatacacagagaaaggttaaatgatgaaaacaacaggttgcaataatagaaaggattcattcattcgttcattcattcattcattaatcaataaacaattactgagcacctgacaggcactgtcctaggtactggacaaaccatggtaaggagctcacat

SEQ ID NO: 915776 - DNA, 658 bp, Homo sapiens
cacatatagataatttggggggagggtaaaatgatttacaaatctactctcagcaattttcaagtatacgatacattattgttaactgtagtcaccacactgttaaataaatttcccatacttatgcctcctaactgaaactatgcaccctttcacagcatcgtctcctcatatttccatcctcaacccccagctcctgataaccaccgttctactttttacttctctgagtttgaatatttccaattccacaaaaaagtgagatcatgcaatatttatctttctgtgcttggcttatctcccttagcatcgtgtcctctaggttcattcacatcgtcacaaatgagagggttttcttcttttagactgaacactattgtgtcgtgcatatatgccacatttcttttgtcttttcatctgctgatggacacttatgccatatgttggttgttatgaatgatgctgaaatgagcatgggaaatgtccccgaaagtccgtgtgtcagtaccctttttatttaaaattactccgtttccatrtgtgttttcaaaaagcaataccaaggggcacacttttcaaaatgcagcatttgctttttgtttcatttcctaaacttgaaattttttaaattatagtgtttatattttaggattttcta

SEQ ID NO: 915777 - DNA, 612 bp, Homo sapiens
ctcaaaagttgttcaggagtaagttgttcaatttccatgtgattgtgtggtttttagagagcttcttaatatttatttgtacttttatttctctgtrgtctgagagtatgcttggtatagagtttgattttttgtttaacttattgaaactttatggccaagcatgtggtcaatcttagagtatgttccaggtgcaaatgagaagaatatacgttctgtggttgttgggtggagtattctgtcgttgtgtattaggtccaattggtcaagttataatagacatttagagtttctgtgttagtgttctgcctcagtgatttgtttaacactgtaagtaggtagttgaaatccccccactattattgtgggacaatgtcttttcataggtctagaaatacttgttttatgaatctaggtgctccaatgttgggtgcatatatatttaggatagctgggtcttttagttgaattaaaccatttatcattatgtatgtccttctttgtcctgttatactgtttttggtttaaagtctgttttatctgatataataatagtgacccttgctcttttgtgttttccatttgcatcataaatcttcctctaacccttta

SEQ ID NO: 915778 - DNA, 645 bp, Homo sapiens
caacatttggcagagctcccatcccctgcttatagatcatatcatacaaccagtctttcaattatatttgctgatgtaaaaaataagtgaaacacatgcatttttctttatgttatttttcattcataagaacatttctaaggcatttattattagtatttggttcccgatgttttactaataagaaatcatgttgtatttcatgaagcttctttgattagcaattttatttctattccagggtgtctatgtcacttataagaaagctaaccagatggaatcatctggttatttgtatattaactactgtcagagttttaatagtaaaatgatttccttgcacaatgtggcggtaatagagtcaagctgtggcttaaatagccttcctaatggaggtttcaagagaactgagaggatttataaaaatttactttgtgacatgcctaatacgtgtattatgtgtgtcggtttttccactgcaacagaaagaaaggccaatacatttctaaattgtatattaaatatttrtaaacttttctaaacgtgtgacataaaaagtatctggtcagttcccttcactataaattcagcttatgttcctatttatggtgctgctggagcaccacagccccgggtctcacacta

SEQ ID NO: 915779 - DNA, 645 bp, Homo sapiens
atactgggtagacagactctcctggtgaatagaartgatacaattgaacacacttggccttgtccataaactttgggagacagggcattcattcttttaatatcaaatgtttttagatataggcttttcagggatttttaaaatcaggttgagaaactgaccttttcctaaattactgagttttttttatcaataatgaatttttctctgtctgcctcctttctgatcagactggatagagttttattagttatattgatctctcaaagaaacagcttttggtttttcttgattttatatttgtttttccttttcctattttatcagcgtgccatctgatctttattattttatctttctggcttatttggaggtatattgatctttttttctgttttctcaaggttaaacctgataatactgatttgaaatctttcttgtcttctaatgcatgtatttagtgctgaataattccctatatgtctacttcaactttatttcacaagttttgatatattgcatatacattgccattcattttaaaatgttttgtaatttcccttttgacttattatttatcccatgaaacatttagaagtatgcacttagcttccaattatatgtggattttccagagatagttct

SEQ ID NO: 915780 - DNA, 651 bp, Homo sapiens
acttaattagtttagtatatttgaccatacacttttctatcacttaatgatatacatgtcattctctctacgtatatggttccacttttatcacaatagaacggtagggccagaaattggatactgtagagtggaaaaatttcaatgatttatgaagatgagaagaaactcactgtattagttttctgtggattacaagcaagtcacacattttgaatgtactcaaggaaaactatgctaaagagactgccagtgaaccactttagctcattctagttcacattctgctctccggtcccaatgtttcacaatcaaatgcaaaatatattcacctcatccccaaattcccaaaagtcttattttatttcagcatcagtacaaggttaaaaattcaatcgtctacatctggtccagttatatatagatgatgctcctggttgtaatttattaagtacagctcacggggtacaattcctctctattgtgaacctgtgaagtaaaacagccaaattggctaccaaaacacatccagcatacaattgtggaacaagaataggatrccaactacagacattgcaggtcaaaaggtaagaaatacaaggtaaaggaagggtcactggtccatgacaggtttgaaatacagctgtgcta

SEQ ID NO: 915781 - DNA, 634 bp, Homo sapiens
aggtccacagcacatcctgaggctatagttcaagatgaaaggaaacatatattaagtttgtctcaaaagttatatcttgagattgaggagaaaggagaaagaagataaaaagtttwaaaacatggtttgaagccaagctagctgtcctgttacaaaatgacaaaaggacacataagatacaatgaatactcctttttattcaataaagggaagagacaaagggaatctccaggataatgaacaaaagaaatagtacggcagctgtgcgcaggatatgtgatattgtccattaaaataagagcaggctatatatcctgggaaatgttttattggtaagataaaatttatataatacctaagtatctcaacacagtaaataaatttgatgcagttctttggagaatttggagttgaaatggtgacaaaaacatgcaaagataaacaaatgaaacaaaataagataattattaatgccacaaaaatatgtatttttaggaaaataaatatattagtagttttctacaaggttaaaatttaaatagtatttaaacacttattgtaacataagtctggaatatttatctaccataaattttataaaacttctttgaaaaggtgattaaattgaaagaat

SEQ ID NO: 915782 - DNA, 666 bp, Homo sapiens
tcatggaaaaacattaacaaagattacttatttatgcattgatgacttaytgaactgagaatctaccatatccaaggaaataatttgttcaacattaaagtgctgattcacactgtattcaaaatttctctgataaagtaaatctaaacagagagtgaaactgtccttcctaatggccatgaacatcttgcaatggagcttagtacaaaagggcaacaccctgcaagtacccccatttaataagacatcttattaataagtatggaatattcatgtgcctgcaatatattttaaaataagctagagttaacagtaaattatttaaaattgccactttgggatgtccattctattgaaatttataggccctcttcaccattttattgcaccctataccattaccctttttgaatatgaatctattcacatttgagaagagtgagcttagaataaaagattgaagacatgtctttcagatttggagaacagaacagcaacaacaacaaatggaagagataagtaatgacttaccagcaaaatcagcactcaaggttattgaactttgctttagtttgaatgtcccctccaaaactcatatcaaaatttaacagccattgtgacaatatttagatgtgggacctttaagaggtgattagatcatgagag

SEQ ID NO: 915783 - DNA, 562 bp, Homo sapiens
accccttgtaaaaccattggatctctttagacttattcactaccacatgaacagtgtggaggaagctgccccaatgattcaattatctcccactgggtccctctgacaacatgtragaattatgggaactacaattcaagatgagatttgtgtggggacacagccaaacagtatcaaatggcctctcaacatagcagaaagagcatggcagaaagaacaatgcaatggatcgtggtggaatttgcagtaatgcaatgctaataataatgaagtctctaaagtcgcacacgccatcaattctactttgtcctactcattagtagtgagttactaagtccagcccactttctaggggagggacttaggttctacctcttgaagggagaagcatcagagttttgggggcatattttaaaaccaccacactgcctatagtccagtgtgggatcctcatatttataaatctagggcatctcaaactctgtgatagaaagttgtggggaaggtgatacaagagaagatggactctcctggcttcctatcatgtattccataatgaatt

SEQ ID NO: 915784 - DNA, 680 bp, Homo sapiens
tgagccaacagctggccttagtgagctagttggcatcattcctggtagctggatgaatgaatgcctcatttccaaagagtgatgttggaggctcaagaagtatctattgcagtacacaatatccaaaacatgaatcaaccccagcttggtacagattctctaagattcgtattctctttcatggagaaacttagaagaggaaggttaattggacagaggaaagttttacagtggtgtagcaattctgcaggcaactcttatcatgtctgcctagtttacatgacccacaccctctcttcacatctctgttagcctaagtgcattagaaggtagagtgagtcatacatgcattccagaggtgtctgggcttatccatcttctgcatgcatttctcaggatgtgactactgcacttgtccatttgaaatacaagttggacaggagagtagcaagagataccccaatgtttcacctgaatatgaaattaattcttcccggcctcccctgtataatatcacccctagttcctcccttgctaatggtgacactcttctttgatatagagagatataatcactaggtggcaaccacaaattaaagttcagtggtactyttactatgcttcctggtgaaagcatttcttctcaggaaactagaaacttttgacccatggaacctaaa

SEQ ID NO: 915785 - DNA, 595 bp, Homo sapiens
ctgcctgtcgtagtgtgctcaagctggccataacaaaatatcacygactggggtggcttaacaacagaaatgtatttcctctcggttctggagtctggaagttcaagagcaggatgccagcatagttgatttctggtggaggctctctttttgctgtgtcctcacatggtagagagaggaatctctctggtatttctctttataggggcattaatcccgttatgatagctccagccttatgacctgatctaacccttataacttcccaagagccccatcttcagataccatcacaaagtgtgtcacagcttcaacagataacatttgagggatcacaaacattcagtctctaccactgcctaatagtttaaataaaactagttaggattaatggaaataatagtgtaacctttgaagtgccatctgattccattttagtattactacttagtcattaatggatgcagaacacacacataccacacacacaaacacacatgcacacacacacacacacatatgtctgtatattagcttacaagcattattcatagagtagacttttctataggtcatcaagaagattggaactgtc

SEQ ID NO: 915786 - DNA, 620 bp, Homo sapiens
ctcaaaatggggaggggtcttctgggacataggtaggtaagagacaaatkgttgcattcttttgagtttctggttagcctttcgaaagaaggcaatcagatatgcacttatctcagtgagcggaaggatgactgagcagaatgggaagcaggtttgccctaaacagttcccagcttgactttttcctttagattagtgattttgggatcccaaggtttattttcctttcaaactaataatgacatatataattatttcaataattattaatagtttcttttgtttattgttaaattcaacaatctaatcattgtatatttattgaatatctgttttgcaatattttataaatttataatttttataaattttataatttttaaaagtaaggaaaatctagctttgttttcaaggcatctaatttcttttataatttttattgtgtataaataacatgatagagaagcaaaatattatgtggggtccaaggaaaagtatatctgtttgaggatgctcagaataacttcatgtagaaacttctgttcaaactgtgatatgaacaatgggtagcattctgaagaccatacttgggagtgaaatagtctctagagatgctttta

SEQ ID NO: 915787 - DNA, 668 bp, Homo sapiens
gtgctagtttattaatggaaagtrcaacttccaagtctccatttattcaaacactaaaatttgaaatagcagagtaattttttaaacatgtagtcaacagaatcagatgctaccttttggaaagggctgggtgtgtatgtatctgtgcataaattgactatgagcttgctttcaagttaactttatcatttaacatttactgaaaatactagtaatgaaataaacataattttgaataaagaaacattgaaattttctacagtcaagaacaaacatgttcagatgactgttgtttaatgggcccaggggcagcttatacacatgacttggtgcactctggtgcttgccaatagaaggtgacctacagtcacttgctagtcatcaaaagagagtttgcttagacctggatatagctgaacacagtgtggtctggttttgaaataaagaggaagagccctacctaattgtatattttttatgacataaacataggaataaacttgaattagagaaaaaatatcacaggcagcaaacagagctactaggacaaggattggaaaaatgccagagcactatatggagatgttgattgaattcatgtgaagcccctcttacttgctaaagggtcagttactgaacatccctccaggtaaagaaaagccaaaagc

SEQ ID NO: 915788 - DNA, 606 bp, Homo sapiens
gttctttcttctgcttgcccaattctattgttgaaactttccagtgtattttgcatttctctaagtgtgtctctcatttatataagttgtaactttttatgatatctatttctctggagccttttwcatccatattctgtttttttttttttaaattctttaagttggttttctcctttctctggtacctcttggagtagcttaataatcaagcttctgaattgcttatctggcaattcagagatttcttgtttgtttggacccattgctggagagctagtgtgatcttctggggttgttatagacccttgttttgtcatattacgagaattgtttttctggttccttctcatttaggtagactctttcagtggaaagatctgaaattcaagggctgctgttcagattttttttgtcccactggtgatcccttgaggtggtactctcccctttcctctagtgatggggcttactgacagctggactgcagtgattgttattgcccctctgggtctagccacccagttgggttatcaggctctgggctagtgctgagtaatggctgcaaagaatcctgtgatgtaatccatcttcaggtcttccagc

SEQ ID NO: 915789 - DNA, 668 bp, Homo sapiens
agccatcagcttcacagaatttacttttcttcacatcgctgttttttttttttttttttaacactgcagcccctccctgcctggcctgtgcttcccaccaacgaygacctttctgcaacttcagtgccagtggaatcccagatctgcggctgcttctgagcactgctgactgcttctaggtcccaaaaccaccaatcagaagagccaaaccatgtcactcatcaaaggtagacccatagacagcccttctggaactgcagggtgactgcattcccacagaaggagcaccctccaggtccaggcctgcatgggaaatagagtcacaattcctctctatttagacattcctgaagatgaaaagaggtgcttgtctaatctgaatagctggaacactcgttcaagagtgtgtttgggaagtgagtaactttcctgggagctgagttggctccaatccttctatctgagaagatctcagtgtgtttcactgagagctcccccagccacctatgtcaaggctgggacctctgcccaccattgggtactgcattatgcacctgctttagccacagcaggtttttaccaggggcacctcctctttgggcctgaagcctgaggtattcaaccaagtaaataaaatactaggagaaaataaagaaagaaagaaatac

SEQ ID NO: 915790 - DNA, 724 bp, Homo sapiens
aagtgtccatcagtcaatgattggataaagaaaatgtggtatatatacacggtggcatattactcagccataaatggaataaaataatgttaatttgcagcaacttggttggagctggaggtcattattctaagtgaagtaactcacgaatggaaaatcaaacaccatatgttctcacttataagtgggagccaagttatgagtatacaaaggcatatagagtgatataatggaccttggagtctccaagggagaagggtgagagggagtatatgcgataaaaaaaagaactacatattgggtgcaatgtacactactcagatgataggtgcattgaaatctcagaattcagcactatataattgacccatgtaaccaaataccactagtactcccaaaacaattgaaatctgaaaatatattaattaaaaaataatgttacctacttcaacagattataattaagattatattacataatcctgacaaacagtacagtgagtattaaaatttctcagtaaatattagctataatataattattagactatttttcattagcttagagagaagtttcgccattgatagaagtgaggttaagaacagaggctgtcaaagtgtgacctccagagcagtagcattagcatcctgggaacttgtcagaaacaaattyctgggtcccaggcagctcttactgaatcaaaaactctgcagcaatttgggt

SEQ ID NO: 915791 - DNA, 559 bp, Homo sapiens
ttcacacaatggataccacttggaaattaaaataaatgaactactgatatatgcaatatcatgaatgaatctcaaatgtgtcatgcaaagtgaaaaggagtccaattcaaaggytacatactacatcattctatttatatgacatctgggaaaagacaatgtcagagtgacggaaaacagatcattttttgccagtgactgtttgttggggaggcagatttactataaaaggtgcaaagaaattttataaagtgatgaagatgtattatatctttattttggtggttattacccaactaacacatttgtcgaaactcatagcactatgcactttaaaagggtgaattttattccatgcaaatgatacctttaaaatttttgaccttcaaaatctttataacaccctaaagatccacaagaatgaatttttatattgagaaatataaagcatttttcccagttcatcaaaacaatgttaataaaaatgttgttaaatattttctttatgcaatccacaaaaccttcttaacacactgacttaaccaactgatcagtgcag

SEQ ID NO: 915792 - DNA, 615 bp, Homo sapiens
acagaaaaatgttcactgtggtgttactactaatgataaaaatatgtaatctagatataaaatatatttgatggtttgataatcatatgaaatccattaacataaccatcagggagtaattgaaattgtacttacaataacatttaatcacttggaaaatttctaattttcttttgctaagctaaaaagcaagatacaggtttgcacacaatataacattagttttaattatgaaaatgacctagacttgggacagaaattgtcaagaaatgtattaatttacagcatcataagtgatttatgtgcataacaatttcaccatattcttttaaacacttctcattttaagagtcttaaattttcctaatgtgagggttataaaacattctatcattaaagtctacatctgtgtctacctaacagttagaaaatgtgtaaataattttatttcctataagctatttgcattagtttcctagggttgccagagcaaaatggaggccagacaaaacataaaaggccagacaaaacataacaaaaagttcacacctctagaggccagaagttcaagatcaaggtgttggcacrtttggtttcttctgagggggtctcccc

SEQ ID NO: 915793 - DNA, 684 bp, Homo sapiens
actctgacatccacgtgtgaaaaaatagtacgacaaaactatatggcattaacagacaaaagtacttaacaaaatattaccaaattaaatctcccagtatataaagtcttagcccataatgaataaatgagatttgtcctaggtctgcaaagttagtattacattggaaaaaaatcaaagtagctcatcagattaatagaataaaggagaataaacatttgataatttcagtagatacaggaaaaacatctgacaaattccaatatccattcgtggtaaaaactcttagcacactcagaattatagggaacattttcaactaatcacgaaaagctgaatgctttccccttagtgacacaacaagaatgttcactgtcaccctcattttccacattgtgctgaagatccatacagtacagtagtctcagaaaaggagtattcaatgatttgaaaggaaagagcaaaattctgttctcacagacatcacttgcataggaaatcctgacattgcttagtgagtcatcttcactatgattaagaagtgaattcagcaacattccaaaatgcaatgttagagcaatatagaaattatagaagaagttagcaaaatgcattcaagaccaaaccaccaaacattgctgagagaaattraagaagtccaaatacatggaagtttataccatt

SEQ ID NO: 915794 - DNA, 622 bp, Homo sapiens
gaggcaaaactttgtttttatattgctgggatggaattggtgggcttccgtttccctcctgctacaatcttcttggaaaaatatttcaaggctttatctatagacatatgagaaataggagataatttcttctctctgcttcccttttttttcaataacaaagtaagacagggcactgctgccctaataatatgcagaaagcctgggtatggtggcttatgcctataatcccaacactttgggaggccggggtgggaggatcacttgagaccaggagttcaataccagcttggacaacatggtgagaccctgactccacaaaaaataaaaacattagccaggcatggtggtgtgcacctgtagtcccagctacaggaggctgaggtgggaggatagcttgtgcccaggagttagaggctgcagtgagctatgattgggcaactgcactccagcctgggcaacagaatgagaccctgtctcaaaaagaaaaaaaaaawggaaaaaagaaaaacaaaagaatgtgcagaaaacttgtctggccactggacagaaagtctgacaggataaaataaccattgaggcccaggttcaaccaggcaaacatccctgaaataccagaacc

SEQ ID NO: 915795 - DNA, 622 bp, Homo sapiens
gaggcaaaactttgtttttatattgctgggatggaattggtgggcttccgtttccctcctgctacaatcttcttggaaaaatatttcaaggctttatctatagacatatgagaaataggagataatttcttctctctgcttcccttttttttcaataacaaagtaagacagggcactgctgccctaataatatgcagaaagcctgggtatggtggcttatgcctataatcccaacactttgggaggccggggtgggaggatcacttgagaccaggagttcaataccagcttggacaacatggtgagaccctgactccacaaaaaataaaaacattagccaggcatggtggtgtgcacctgtagtcccagctacaggaggctgaggtgggaggatagcttgtgcccaggagttagaggctgcagtgagctatgattgggcaactgcactccagcctgggcaacagaatgagaccctgtctcaaaaagaaaaaaaaaaagraaaaaagaaaaacaaaagaatgtgcagaaaacttgtctggccactggacagaaagtctgacaggataaaataaccattgaggcccaggttcaaccaggcaaacatccctgaaataccagaacc

SEQ ID NO: 915796 - DNA, 485 bp, Homo sapiens
ataataataaaagaatggaaaatggtagaatttcctcttgttatgacttgtcatccttgtctaggtgaaattacccaatcagtccctgtgatatggtttagctctgtgtccccacccaaatctcatcatggaatcaggaatcccatgattcctatgtgctgtgggagggacccagtgggagataaccgaatcacgggggcagtttcccccatagtgttctcatcatggtagtgaataagtctcacaagatctgatgattttataaggggttttccctttcttttggctctcattctctcttgcctgctgccatgtaagacatgccttttgccttccaccatgattgtgaggccgccccagccacgtggaactgtgagtccattaaacctctttttatttataaattacccagtctttagtatgtctttatcagcagcgtgaaaatggttkgtaaggtttggaatccagaaagaggtctccatagc

SEQ ID NO: 915797 - DNA, 683 bp, Homo sapiens
tacacatgatctcctcctcagcctccccgccccgggctgcagcggccgtaaaggggatgcctcctctcagtctgtgtcagcacatggagatcastcaggggagaccgcttataattatttgatgcagatggtcacttcattagcataaacactaagcagccagttacagggtgttgccctgcctccccagccctcttcctgagccggccttcaggctatcaggcaatatattttaagcaaaaagatagcctgctcataccactctggaggcctcttttgtgagacatgcagccatttcttttacgaaatcctaaaagagtgacaagtttctgggttcatgggacttaacggccagatgaagagactcacctattcctaaataaggtcatcagaatgcttgaaacttgtaatgagagctggcaggctcctcagctccccttccgtgggttgagcctctctgtatttgtggcaggtcctgaattagagaaatgggctctcacagtgacactgagctaaggcttggtggtccacagcctcattttgacaactcacctcccccagcacaaagaaaggaccctggggagcagggaaagcctagggatgcagggctccaaattttaaagtgaaaaagaaatgtaagagacaaacaagtccagtgggttttcaatattttttagtaggat

SEQ ID NO: 915798 - DNA, 601 bp, Homo sapiens
ctcactgcaatctctgcctcccgggttyaagtgatattcctgcctcagcccccctgagtagctgggattacaggtgcccgccaccacacccagctaattttttttgtatttttagtagagacaggtttgaccatgttggtcaggctggtctcaacctcctgacctcaagtgatccgcctgcctcagccacccaaaatgctgggattacagacgtgagacactgtgcctggccaaaaagtttacttttttaaaaaggatcttgggagttatcaagcaaactgcctattttttcccatctttggctggtattaaatattccaacacaatattaatggagcaatcactgataacactttcctggatgacaatctgactcaactaatcaaaagctattagaatgtacaaaccttgaccaagaaattcgatatctaggagcttttcctaaagaaataatcaaagatacatacaaaaatctgcaaatgatgtaggttttcacagttgtttataacagtgaaaagttgaaaaaaacttaaaaattggaaataagtggaggactagttagtataatactgagaagacagaatacaatgcagtcataaga

SEQ ID NO: 915799 - DNA, 590 bp, Homo sapiens
taagatgttctcacccctaaaaaaatttttcctggtccattttkgttggtttatcttgtcctttctctttcatgctgctggattttcttcatctgtctggtgatcatttattgtccattaattttaggatgggattatttttttcctaaggtagtaacctggttttttctgctcttgtatgtgaaggtttattttctaacaaggcctttcccttgaatagtaactgtgttgtgggtcaggcctgtaaactggtgggcttcacattaagggcagcatttgacaaatgtcaaactgatgaagacggccaggtatggtggctcacacctgtaaccctagcactttgggaagctgaggcggggagatcacttgagcccaggagttcgaaaccagcctgggcaacatggtgaaaccctgtctctactaaaaaaacacaaaaattagctgggcatggtggtgcatgcacctgtaggtcccagctacttgggaggctggggtgggaggatcacttgagcccaggaggcagaggttgcagtgagccaagattgtgccactgcactgtagcctgggtgacagagtgagactgatctaga

SEQ ID NO: 915800 - DNA, 590 bp, Homo sapiens
taagatgttctcacccctaaaaaaatttttcctggtccattttggttkgtttatcttgtcctttctctttcatgctgctggattttcttcatctgtctggtgatcatttattgtccattaattttaggatgggattatttttttcctaaggtagtaacctggttttttctgctcttgtatgtgaaggtttattttctaacaaggcctttcccttgaatagtaactgtgttgtgggtcaggcctgtaaactggtgggcttcacattaagggcagcatttgacaaatgtcaaactgatgaagacggccaggtatggtggctcacacctgtaaccctagcactttgggaagctgaggcggggagatcacttgagcccaggagttcgaaaccagcctgggcaacatggtgaaaccctgtctctactaaaaaaacacaaaaattagctgggcatggtggtgcatgcacctgtaggtcccagctacttgggaggctggggtgggaggatcacttgagcccaggaggcagaggttgcagtgagccaagattgtgccactgcactgtagcctgggtgacagagtgagactgatctaga

SEQ ID NO: 915801 - DNA, 595 bp, Homo sapiens
gactgcattgtattctgtcttctcagtattatactaactagtcctccacttatttccaatttttaagtttttttcaacttttcactgttataaacaactgtgaaaacctacatcatttgcagatttttgtakgtatctttgattatttctttaggaaaagctcctagatatcgaatttcttggtcaaggtttgtacattctaatagcttttgattagttgagtcagattgtcatccaggaaagtgttatcagtgattgctccattaatattgtgttggaatatttaataccagccaaagatgggaaaaaataggcagtttgcttgataactcccaagatcctttttaaaaaagtaaactttttggccaggcacagtgtctcacgtctgtaatcccagcattttgggtggctgaggcaggcggatcacttgaggtcaggaggttgagaccagcctgaccaacatggtcaaacctgtctctactaaaaatacaaaaaaaattagctgggtgtggtggcgggcacctgtaatcccagctactcaggggggctgaggcaggaatatcacttaaacccgggaggcagagattgcagtgag

SEQ ID NO: 915802 - DNA, 595 bp, Homo sapiens
gactgcattgtattctgtcttctcagtattatactaactagtcctccacttatttccaatttttaagtttttttcaacttttcactgttataaacaactgtgaaaacctacatcatttgcagatttttgtatgtatctttgattatttctttaggaaaagctcctagatatcgaatttcttggtcaaggtttgtacattctaatagcttttgattagttgagtcagattgtcatccaggaaagtgttatcagtgattgctccattaatattgtgttggaatatttaataccagccaaagatgggaaaaaataggcagtttgcttgataactcccaagatcctttttaaaaaagtaaactttttggccaggcacagtgtctcacgtctgtaatcccagcattttgggtggctgaggcaggcggatcacttgaggtcaggaggttgagaccagcctgaccaacatggtcaaacctgtctctactaaaaatacaaaaaaaattagctgggtgtggtggcgggcacctgtaatcccagctactcaggggggctgaggcaggaatatcacttraacccgggaggcagagattgcagtgag

SEQ ID NO: 915803 - DNA, 472 bp, Homo sapiens
aatgtggtatttcattcagagatcattctccttttttcaatatgactgcttctaaagtagagtgaaggtgtatggattttttttttttttttttaatcacaagacaaggcctcaytttgtcacccaggctggagtcgccgtgggggtaatctcggctcactgcagccttgacctcccaggttcaagtgatcctcctgcctcagtcccccaaatactggagctataggcacgtgcctccacacctggctaatgtttttctattttttgtagagacggactttcaccatgttgcccaggctggtctcaaactcgtgagcacaagcaatccgcccacgtcagcctcccaaagtgctaggattacaggtgtgagccactgcgcctggccaaggtgtatagatttttagtgaaaagtacctttttactttttatttttctacctatcaggtagatttttacctttcagaaaacctac

SEQ ID NO: 915804 - DNA, 617 bp, Homo sapiens
tatgcttattggccatgtgtatgtcktcttttgaaaagtgtctgtttgtgtcctttgcccactttttaatgaagttgtttgtttttggcttggaaatatgtttaagttctttacagattccagatattagaccttatattttctaccattctggagcttatctgtttactctcctgatagtttcttttggtgtgcagatctttagtttaattagatctcctttgtcaatttttggtttcgttgcaattgtttttggcatcttcctcataaaatctttgcccagtcttatgtctgaaatggtatttcttaggttatcctcctgagttttttatagttttaggttatacatttatgcctttaatgtgattcatcacctaaagagaactaaaaacaaaaaccacatggttaactcaaaagatgcagaaaaggcttttgataaaattcaacatcctttcatgttaaaaacctcaacaagctaggcattgaatgaacatatttcaaaataataagagccacctatgacaaatccacaatcaacatcatactgcatgggcaaaagctggaaacatttcccttgaaagccggaacaagacaaggatgccctctctcaacactcc

SEQ ID NO: 915805 - DNA, 617 bp, Homo sapiens
tatgcttattggccatgtgtatgtcttcttttgaaaagtgtctgtttgtgtcctttgcccactttttaatgaagttgtttgtttttggcttggaaatatgtttaagttctttacagattccagatattagaccttatattttctaccattctggagcttatctgtttactctcctgatagtttcttttggtgtgcagatctttagtttaattagatctcctttgtcaatttttggtttcgttgcaattgtttttggcatcttcctcataaaatctttgcccagtcttatgtctgaaatggtatttcttaggttatcctcctgagttttttatagttttaggttatacatttatgcctttaatgtgattcatcacctaaagagaactaaaaacaaaaaccacatggttaactcaaaagatgcagaaaaggcttttgataaaattcaacatcctttcatgttaaaaacctcaacaagctaggcattgaatgaacatatttcaaaataataagagccacctatgacaaatccayaatcaacatcatactgcatgggcaaaagctggaaacatttcccttgaaagccggaacaagacaaggatgccctctctcaacactcc

SEQ ID NO: 915806 - DNA, 493 bp, Homo sapiens
ataaatgttgggggattcctggggtatttataaggagtaagagatagttttgctaaaagaatctttaaagattttattgaatgtgagatatccagtaaatgataggaatcagtcttgattctcatccataatttctgcttagggagaaactttaaccaagtttttttttaaaagattaaatattacaatatttttttccagtttttttttcttttagtggctctcctttcttatcaccccatataacctaagaggcagagagagtagttctgttgctaactcttgcagaagttgtgcccatttcttttttctggtttgctgagatttttatgccaataataaggtcggcattcttctttggaaaagaaagttgtctaaattctacrtataagtggcactatagaaatatttggaaaataacaatggcatactaaaattacttggaaacaacaaatgaacagagcagtcactatgcagtgtctgcaattcagaa

SEQ ID NO: 915807 - DNA, 645 bp, Homo sapiens
gtactctgattaatttagattttcacattctatatcatatattacttgatctcctcatattttctactctttagctctttgttctacatgttayggtatttttagatcttccagttctagtttatttactttctttagtggcatctaatattttatttaacccatctgctgttttgttttactttcaaccattttttaaaaatttataaaggttctattttcttttccaaatatccctcatcagtttttaattggctctcattgtattttgtgatgtcattctttacttctttaaatgtcctatgtatattttatattccaagtcgtaaaatctagtatttgatgcccttggtgagctaaatctattatgttttttcctacctactctcatttctggtggtaagttttattgtaaatttggtgattgttgattgttaccttatatttgactttattttattctgaggaaaactaggatgcctaatttaaagatatattccatgtaagagaaggttcatgtgtttccacagggattttggagacattacaaacctagaacaaatttagccccttccagggtttcaggtataatccaagaatctcattttcagcttatcttccttgctgctaaggtaaagctaaatc

SEQ ID NO: 915808 - DNA, 634 bp, Homo sapiens
agtttatagtgttttgcagttccatttgtctgacaaaatttttcataccgtttttatttattttcttgaataaatcatctgtaatgattgtaaatgcttctcctggtaagtcagtctccaraactcctgcagtctattacatcatttgttctttcacttaattttcagtcatgttacttgtttcctgtgtgactaattacacttttttttgtttgaatgctggagattgtatataaaatattatagaaataatttaagacttaggatgattttgcagggaaattttagtgtgcttcttgaaagagactaggggctctagcagttagcgatcaggggatttaaagctgggttttggtctctgtgaggacctgtctacttctggttcacctctatgttttggtattacccttatacctgtggtcatgttcccatctcaaagtggggagggctttctaaggtctttgccctaggaattcttaggctccagtttatgttctcttggccctggctgtcaaaaatgctgctcagcttctcaacctttccattaccttttctggagccagaagatgcccacaggataaaagcaccaccaagtttacttttcacttctcaggtttatcttctgccatatctt

SEQ ID NO: 915809 - DNA, 687 bp, Homo sapiens
tacagatgaggaaattgttggttagtaaaatgaagaaacctgccgaaagataacttcaaacagcaggtttgggatttgaacacaagcactttgactccagaaaccatgtaattaccccttctttatacctttttgctgtagaattattccaatcaccgaaacattcacattactgttattgagaactgtaggaggccaagtgttgcgttatacaaagaaaatgcaggcattaaaagaaacaacctatatcctgaagacttgtagagttttagagctacatgatggttgttctttcgttcctccattggatccttcaacatttttgaacatctattattttaaaggccttgagctgggtgccagggatataaagatgaaagaacagaattcatatcttgatgagctcctaatctagtacaaggaagggagttacaatgcatggaacaaatagaatgcaggaaccagcatggccgcatctccagccccagtccaccccatggggacatggcaaacttgtctttctgaggtcagatacagcttcagaaatctttcaacacgragctccagttgatatagtgtactactacctaagctatataatatagcctattcctcctaggctataaaactgtaagcatgttaccatactaaatcccactaattaattggattcagtatttgaaatgg

SEQ ID NO: 915810 - DNA, 687 bp, Homo sapiens
tacagatgaggaaattgttggttagtaaaatgaagaaacctgccgaaagataacttcaaacagcaggtttgggatttgaacacaagcactttgactccagaaaccatgtaattaccccttctttatacctttttgctgtagaattattccaatcaccgaaacattcacattactgttattgagaactgtaggaggccaagtgttgcgttatacaaagaaaatgcaggcattaaaagaaacaacctatatcctgaagacttgtagagttttagagctacatgatggttgttctttcgttcctccattggatccttcaacatttttgaacatctattattttaaaggccttgagctgggtgccagggatataaagatgaaagaacagaattcatatcttgatgagctcctaatctagtacaaggaagggagttacaatgcatggaacaaatagaatgcaggaaccagcatggccgcatctccagccccagtccaccccatggggacatggcaaacttgtctttctgaggtcagatacagcttcagaaatctttcaacacgaagctccagttgatatagtgtactactacctaagctatataatatagcctattcctcctaggctataaaactgtaagcatgttwccatactaaatcccactaattaattggattcagtatttgaaatgg

SEQ ID NO: 915811 - DNA, 589 bp, Homo sapiens
gtagcttttgaatttgtttgctcttgcttccctagttattttgtgatgttagggtgttgatttgaggtctttccagctttccggtgtgggcatttagtgctataaatttccctcttaacaccactttagctgtgtcccagagattctggtacattgtctctctgttctcattggtttcaaagaacttatttatttctgccttcatttcgttattttcccagtagtcattcaggagcaggttaatcaatttccatgtagttgtgtgattttgagtgagtttcttaatcctgagttctaatttgattgcactgtggtctgagagactgttggttatgatttcagttcttttgcatttgctgaagagtgttttacttccaattatgtggtcaattttacaataagtatgatgtggtgctgagaagaatgtgtattctgttgatttgtggtgcagagttctgtagaggtctattaggtccccttgatccagagccgagytcaagtcttgaatatccttgttaattttttgtctcgttgatctgtctaatattgacagtggggttttaaaatctcccactattattgtgtggga

SEQ ID NO: 915812 - DNA, 574 bp, Homo sapiens
ccagagccgagttcaagtcttgaatatccttgttaattttttgtctcgttgatctgtctaatattgacagtggggttttaaaatctcccactattattgtgtgggagtctcagtctatttgtaggtctctaagaacttgctttatgaatctgggggtgctcctgtattgggtgcatatatatttaggatagttagctcttcttgttgcattgatccttttaccgttgtgtaatgcccttctttgtcttttttgatccttgttggtttaaagtctgttttatcagagactaggattgcaacccctatttttttttttcctttccatttgcttggtaaatattcctccatccctttattttgagcctatatgtgtctttgcatgtgagttgggtctcctgaatacagcacactgatgggtcttgactctttatccaatttgccattctgtgtcttttagttggggcctttagcccatttacatttaaggttaatattgttatgtgtgaatttgmttctgtcattatgatgctagctggttattttgcacactggttgatgcagtttcttcacagtg

SEQ ID NO: 915813 - DNA, 644 bp, Homo sapiens
gactattacaattagtagtaacaaaagtagactttagttacaatttccattctcatcgactacacatgtaactctctcccaccattgaactctgccacccgagttcaagcaattctcatgtctcaggctcccacgaagctggaattacagtcatgtgccaccacgcctggctaattttggtatttttagtagagatggggtttcgccatgttggccaggatgatttcaaattcccatctcaacagaaaagaaccatttttaatgttcagccaggcagagatcttatgaattcaaggacagatccaatttgtttggccttcaaggtctttgttgtgagacaggggcagaaaagaagcctcttgaaaaagaccacgaccacttcaagatttaggttcttgtgaatggtacatgttacacttccaaagagacaaaaaataacaaagctgtagagggcttgtttatttttttaatgtaatcttttttttcttttttgagacgatgtctctctctgttgccccggctggagtgtggtggcacgatctcagcttgaattgatctccgattkcttgaactctgccactggagttcaagcaattctaatgtctcagactccaatgaagctggaattacaggtatgcgccaac

SEQ ID NO: 915814 - DNA, 614 bp, Homo sapiens
tgttctagactctcctgctgttgtttgcccacacttgagactttgagaaggcttttctgttgcacatgttgttttcattaacaagacatacatatccaagttctacatatttcttttgatctatatgctgaggaaagatgctaaagtttaaaacagcaaaatccgtctgcataactgtttctgttgcactaaatcttagcaaaaaataaatatgtctttagactgttgcattacataacaaagaagcagtaaggttccttagtgcactaagattgctctaaggaaccttaactgctattgtggaatggcacaaattcttttattagctgtgtaggcttcctaccagagtagctttccccgaagttacccatcattaaggtgttctgtatctttaaacaaaatcaaggattttcagtatggccagagtgctttatgggaatggtcagctgagtttgtcatgtgaaatgtagtagagcagtttcaggttaaaacatcatttcattttgaaacgagtcaaccttatctttcacccttgcataatgttttgagtctctgtagatatagactaatragaggttacaggtcttttgctgttattttgttttttaacactg

SEQ ID NO: 915815 - DNA, 654 bp, Homo sapiens
ctttttctaaaaatgactttatctttccttcatttatgaagctttgtttcactggatgcaaaattcttggctgatawttattttgtttaaggaggctgaagataggaccccaatcccttctgacttgcaaggtttctgctgagaaatctgctgttaatctgttaggttttccttttgggttactgatgcttttgcctcacagctctttagattctttccttcatcttgactttagctaacctgatgactatgtgcctaggtaataatccttttgctatgaatttcccaggtgttctttaagctttttatatgtggatgtctagatctctagtgagatcagagaagttttccttgattattccctcaaataagttttccaaagttttagatttctcttcttcctcagggacaccaattattcttatgtttggtcatgtaaaataatccaaaatttcatggagactttgttcattttttaaaattcttttttatttgtcttttggattgggttaatttgaaagcgttgtctttgggctctgaagttctttcttctactttttcaatactattgctgaaactttcctgtgtattttgcatttctctaagtgtgtctttcatttccagaagttgtgatcatcttttctttatgatatc

SEQ ID NO: 915816 - DNA, 597 bp, Homo sapiens
acagccaaaaggctaaatccacttcacaatgcctcaaaaattgtgtctactcaaaagatgtacaaaacatttactagatatccacaaaatctagcaagttctgtaaaagctccaaagccatattttgaaacaattttcatgtacccagaaggcttaaagatatattaaaattctatatcaaaatatcattattttagcctagtaaactactgagactcacctgcttcaaatataaataagggtggtagactaatagcttttacattgttgcagaaaatgtcaagttattatctgttacagaaattctaagacttttcacctttccttgtatttttattctaattaggttttagaagattgtttattgtatctatttggaggaatgtgtttcatgctgtgtccttcattaaaaagattatgtacttgatcaatccttaacctcttagtgcatctcattagtttggtaatttattcatcaaaaatgcamtccaagatgtggtgggattgaagaactggtgttgatccaaaaaagcacgctgtgtagtgccgtgaacctcatcacttagggtaatgtgcctgcctgagaaaaaggagcag

SEQ ID NO: 915817 - DNA, 634 bp, Homo sapiens
attgcagagctaagagaaggctgactattaagagatgcaagcattttaaactggcgggagataggaagaaaagggccaagtgacctagttcaaagcttcatcttttttttaattgtgaagacmataaaatattgaagttaggttcacacacacatacaaaaaaatctgttatgtattaggcattgttccaggagctagggatatagcagtgatcaaaaattaaagtccacagccagacgcagtgtctcacacctgtggtcccagcactttgggatgtcaagacagaaggatggcttgagcccaggagtttgagaccagactgagcaacatagcgagatgctgtctttgtctttaaaaaaaaaaaaaaatagaaaataaaacaaaaaaaattaaagtctaggctgttgcagagcttttgtgctcatgagggagacagataatatacaagtgaaaaatatgtttcagagaatgataagaaaggaaagaaaacaaggcaataagatagaaaattactcaaaagcaggcatcattacatagattggaccagggaaacatcactaaagaagtgacatttgagctgaatgaagtattatctgtagaaaaggttgagggaagagcattccaagcaggagaa

SEQ ID NO: 915818 - DNA, 644 bp, Homo sapiens
accctcatacattgctggtgggaatataaaatgtcacagcccctttggaaaacagtttggcagtttttcaaaaagctaaattgaaagttaccctttgaccctctaattccactcctagatayatatccaagagaaatgaaatacatatgtccacacaaaaacttgcacatgaatgttcatagcagcattattcacagtagcccaaaagtagaaacaatacaaatgtccattaattgatgaatggataaataaaatgtggtatatccatacagtggaatattatttagccataaaaataatgaagtattgatacatactacaacatggatgaactttgaaaatatgctatgtgatgttctcactcataggtgggaattgaacaatgagaacacttggacacagagggggaacatcacacaccagggcctgtcgtggggttgagggagggggaagggatagcattaggagatatacctaatgtaaatgatgagttaacgggtgcagcaaaccaacatggcacatgtatacatatgtaacaaacctgcacgttgtgcacatgtaccctagaacttaaagtataataaaaaaaagaaaatatgctgtgtgaaagaagccagtcacaaaagaccatatagtgtatgatt

SEQ ID NO: 915819 - DNA, 591 bp, Homo sapiens
tttttgtttcctgagactttgctgaagttgcttatcagcttaygaagctttggggctgagatgatggggttttctagatataggatcatgtcatctgcaaacagagagagtttgacttcctttcttcctatttgaatacccattatttctttctcttgcctgattgccctggctagaaattccaatattatgttaaataggagtgttgagagagggcatccttgtcttctgctggttttcaaaaggaatgcttccagcttttgcccattcagtatgatattagctgtgaatttgtcatgaatggctcttattattttgagatatattccatcaatacctagtttattgagagtttttaacatgaagggatgttgaattttattgaaggccttttctgcatctattgagatgatcatgtggtttttgtcattggttctgtttacgtgatggattatatttattgatttgcatatgttgagccagccttgcatcccaggaatggagccaacttgatcatggtggattagctttttgatgtgctgctgacttcaatatgtcagcattttattggggatttttgcatgttcagca

SEQ ID NO: 915820 - DNA, 647 bp, Homo sapiens
aaatgttaagggcagccagagagaaaggtcacgttacccgcaaagggaagcccatcagactaagactaacagctgatctctcggcagaaactctacaagccagaagagagtgggggccaatattcaacattctttttttttttttttttttgagacggaatcttgctcatcgcccaggctggagtgcagtgctgcaatctcgcctcactgcaagctccgccatccaggtccatgccattctcctgcctcagcctcccaagtagctgggactacaggcacccgccaccacaccctgctaactttctgtatttttagtagagatggggtttcacctggttagccaggatggtctcgatctcctgacctcatgatccacccacctcagcctcccaaagtactaggattacaggcctgagccactacgcccggcctcgacattcttaaagaaaagaattttcaacccagaatttcatatccagccaaactaagcttcataagtgaaggagatataaaatactttacagacaagcaaatkctgagagattttgccaccaccaggcctgccctaaaagagctcctgaaggaagcactaaacatggaaaggaacaaccagtagcagccactgcaaaaacatgccaaattgtaaa

SEQ ID NO: 915821 - DNA, 642 bp, Homo sapiens
ggattgttcaaggatgcttccgttgagactgtaccctctgtccatttgggtttcctcacacattctccacaagtcctcaggctgcttcatgtgtggacgaactagactggaagatgctgaaggacagrccttccagacaatgagctcttcctcaagatccactggcatattgtgctgtgcacactggaggtgcaggagtatccctactgtatactatgttaactgcgagacccaaccttctgctcagaggatgacaacagatggatgcaagttgtcctatgattgccattttggaattgccatttgaagacagcggtgacctgtgggtctggaggaatcactgcagggtgggatatacatatcaaattctgcaagctgggtcagttgtgggggtatctacattgggacacttcacaaagaaagaagagggaaacaaaatgatgcctatataattgcctcatggaaaagattccctatcatgttacagaaacatagtccactatgtaatgaccttggtggatgatagcgtccagattcctcttcagtatggtgtgtggttggttgttagtttgtacagaatgaatgatggcctctgtttgcctgccagccaaatgtgggacactcagaaaagcaaatttttca

SEQ ID NO: 915822 - DNA, 611 bp, Homo sapiens
agaaacactctgaagggcaagccgtgaagagagcaggggatgtgctgatttcrttttttttttaaagacactttttaaagcgtagttttaggtttatagcaaagttaagaggaagatgcagagatgtctcatttacccctgcccccacaacatgcataacctccttcattgtcaacatccacagtggcacatttgttacaactgatgaacctactttgacacataatcacccaaagtccatagtttgcattacagttcacccctggtgttgtacattctatgggtttggacaaatgtgtaatgacatgaatccaccatcatagtattgtagcggggacattttacctctgcttcttagggttttttagctggtcccaagaattaaattgacataagacagatcaacaggagaaaaacatacaaatttaattcaagttttatatgacacaggagccctcctcataaggaaatgaagacccaaagaagtgacaaaacataaatgcttctacattaggttgaacaaagacaggcaattgtgaaaaagtaactaaattatgttggcggggggcacagcaaaagtaagatgtgaattatttttacaaggcctgttt

SEQ ID NO: 915823 - DNA, 621 bp, Homo sapiens
gtatttccttatatttcattgagtttctttaagatcatcattttaagttccttctctggaaattcattgactttcttatcacctgatgactttatcaccttgaacgttaggatacaagtcatttactccaagacatcaggccatctaggggtttgatgtgtaatcatgcaaaattacatggcctgcacaggaactgagttaaaaggtcagaattatgatttataaagtgtcccaagcaagtgaaacaaccaactatggctgtaaggatcatgaaaaacagggaattcccccccagtttacacagacaacaaaaactaagtgtaggtcactatctcattttacccatggattttaatttatagaggtgactgagtgatgacatagaaagaccaatgccatcgaaagaataatttattacttacaagtcctgggagaagggggcatgccatgccacacagagccacatgggaagcactaagtttggttaggaggcataagcaggagcaagaggaaagcctaggccagagcctttttgggaggttccaggagaatttcaaggcaggatggagtaaacagcttagagctagcmagtttaaataacttcagtgggctttggcctac

SEQ ID NO: 915824 - DNA, 620 bp, Homo sapiens
gctaaggaagttgcagaaacagatggacaataccacttaggagatgaaatcttcagagttcctgrgggttatggagccccatttccatccctccctcatgccatctgggctttgatgtgggctgtgacaaaaataccaccacttgactgcagaactgcaggatgtaaaatatggcaatttcacggagctacattgataacattcctcagttggtgtcttagctgccatatctgtctgacaaccttgcctttcaattctttctgtgatacctggaaaacaaatatttatgaaacggagagaagaaagtatgaattaggaatatgcaattgacatcaatatacaccaaactccaagctagacactgccacatgtaatttaatttgatcttcatagtaatcctgaaatgctgatcagagaggtaactttaaaaaaacttagtctgtagtttgggagataaagcatacacagagaaaggttaaatgatgaaaacaacaggttgcaataatagaaaggattcattcattcgttcattcattcattcattaatcaataaacaattactgagcacctgacaggcactgtcctaggtactggacaaaccatggtaaggagctcacatt

SEQ ID NO: 915825 - DNA, 663 bp, Homo sapiens
agttggcagagaggctggagcagtttctctctyagcacccttggaagaaaccacccctgctgacacctggatctcggattgccagccccaaaatgtctgttgttgatgtcatcagtttgtagtacttttttacaacagccctagcaagccaatacactcctctaagactcctgctccttcttgttctgtatccagggagccctctctagctgagcagccgtgtgtggagaggaagagctgggattccgagccacgtgcctgggtttgcgtcctagctctgacactattagctgtgtgaccttgggcaagttactaaacctcttggtgttttaatttcctcaacagtaaaacagagagaaaataatcatacttagcctatagggtttttctaagaattaaatgagttgaaatttgtaaggtgcttagactagtacccagcaacataataaacactacttaagtgacaattaaaataaagcctcagctttgaggccctggattggatcaacatgagtttggggatttgtggccacagagggaaagccaggacccagctctataatggtcctaggtactaggggtacagctcctgctttggtagtaagtcttttgggcaggaattctgggaggagatgataattcagggtgtcttaaagttgaatg

SEQ ID NO: 915826 - DNA, 624 bp, Homo sapiens
gagaccagcctggccaacatagtgaaatccagtctctactaaaaatacaaaaattagccaggtgtggtggtatgtgcctgtagtcccagatacttggaaggctgaggctggagaattgcttgaacccgggaggcrgaggttgcagtgagccaagatcgcgccactgcactccagcctgggcgacaaagcaagactctgcctcaaaataaataaataaataccagctacaatcatatgactagttgcaaaacacagactatagcagttataagtatttcctccttgatttaaaatgaatatcaaatatcaatatttttatctcatattcctctattatctaacataagatgtgttaactgtagttaaccttatatctcagtatttagactatagaatatgaaatagcaagtgtgactcagataaaagaatgaatattaccccaggatgaataaatgggcatgtgggactttgtatatttccttttgggaagaaagtcagtatgtttttgtgtgcataagtgtgacatgttatgtggaagcacaaatttgggaattaaatgtggttaaaagaggcatgggttgggtgccagactgtcaagggatggactgttgtgatttacagtgt

SEQ ID NO: 915827 - DNA, 631 bp, Homo sapiens
tttcagtgtcagagttaaaamcatgaattctttatgtactctcctattccaatccaacactaagcttattctagcctttccgcttcccatatttgtaactacctctgcaacagtgacaaatgtgaactggaaataaatataaagagccattacttcttttgtgtaagtgtcaagaaaagcattgcaggatgatatatgagcttggtcttgaaggctgagtaggattttatcagagaagttagaaagggcatttaagtcaaaagtgatagaagagggaaaacagagagctataaagtcaaatagttgtctaaccgaccaatgtgctatttgggtgtggcacagagtgaaggagggaagatgaaagtttagattggcaaagtagataagtgaactggacttccatgcaaacaaatataaattttatattcaatgcattgaagattttcaattttaagtaggacttgtaacatattcgattctacattaaaaagataattactttggcaatactgagaatgccttgaaagaaaaccagttaagaggttggttacaaaaaactatatgtacacacacatatataataatatgattcattatatattatatgaccatattatatattatatgtatg

SEQ ID NO: 915828 - DNA, 627 bp, Homo sapiens
ttcttcatctatgtactgaggattataacagcacccattacacagagttttttagagcgagaattaaatgagataaaacataacaggtgcttataacaatgcctagcaaataagttctcaataaatgtcagttgctattattattttatatgaaggtggcacctctttatagaaaggcctttgctgcattctctgcctggtgaaaggctacttacacactaaggcttagctcaaatatcatcctttctgtgttcttcacaacctccgagctctgagcactgtgttcatacggttgtttggtgcctttcatattctatcataataaatatcataccagtctacttctagctaccccttataaggtacattgagtaaggaccatgttatgtatcttttttgagtctaatatagtttttcagtaattatttagagaatttagtgcaattaaggcagtttaaaaaaaatccccaggaaatgtagcatgtatgcattgcagcaatcaaaatcttctcgcagtgtgtctgctaatggtttccccactgtgtgacactaaaggaaccttctgggaaacagagattagcattagtgccaagattyccccaaaggtgatctaagcacttcacacca

SEQ ID NO: 915829 - DNA, 578 bp, Homo sapiens
aagtcacttctcctgctttcttgttacaatatcctatcaaagtartaatggaagttgaaagatttataagtatttctgaaacattctcagaataactgtaaagggtagatggaactattgtatattagtcagcacattctatggcaaggtcaaatggggaaggtctgaacattttttcatcaatgttaatattcagaagggtacagagttttcatttggtatgatgaaaattctagaaatggatagtggtgatggttgtacaacattgcaaatgtactttaatgcccataattcttcacttaaacatgattaaaatggcaaattttatattatgtttatattttatcgcaactaaaaataatacattcaggtttgataactaaatgatattttgtctcacttagtacactaagatacttaatagttcgacttaaattcaactgtgtccatgtcatgcctggcacttgtctactgtaactgatgtgttaaaaaataaaatcccaaccaacctactttatctttttatcatctaagatggactacttcacagacttatgaagtatttactcaatcaataa

SEQ ID NO: 915830 - DNA, 634 bp, Homo sapiens
cagtggatctccacatatgggccctacaccragagtatcaccattccccagggaacttgttagaaatgtaaattctagggccccagtccagaaacactgaatttgaaactctgggggtgggacctggcaatctgtgttttaacaagccctccagatgattctgatgctaaagtttgatagccattgtcttagatgcaactaataaccaggagtgaggttgggccatggaatctagagtctggtgtctttaaaagctttgccatctcctagctgggtaactttggcctagtcacttaacttctgtggactttagtttcctttcctctaggagataaagtttttgagtcagttgatctcaaattgtagtcattttattctatggctttgtgaacacctgtaaggatagcaatggcaaattcctatttcgttaacagggcaaaacttcagggatggctaggcacattaaaagggctaagctgactggggaccaggtgcatgtctacctctggtttcctctgactttgctcagaaacaaatccatctggccagatgttggacacctggcctcctttaatcagatgctgaagttctgtgtcgagagaggcaaagcaaatgatctgtgacatgtgggttc

SEQ ID NO: 915831 - DNA, 680 bp, Homo sapiens
ctgccacactactggactttattaaacacagataaaatttgtctcatccagcaacagcccatgaaktgatgggacccaggaatggccaggcaggtgccatgtctgctcactcatgctgggctggcaaaacctgcctcattctaaaaagagcctggcaggaactggagtaaatatccagcagccctctccctggagtgatgttgttgggtagggacaatgttttcggagagtttcccgtgtgcccaactttatgtacactggtgcctttaacccccatagcagttctgcagataatatcatcctctctgtcttgtaagggaggaaagtgaggcacaaagatgtaaggaaactggcccaggtccaaagaagagtaagcagtaggtctattagatcctaaggtttgttttcttttttcaataaaccatgctgtctttcctgaggtctaacaaagtgaggtctgaccttccacctttgcttggatggatgatagacacatcagcagctctcccagacgttccattttgttcagactggtctccttcacccgctcctagacaggcccaccttgaattcctggctttccccattcccccacttccccacaaccccataatacctttcctggctttcttccaaaggtccaattcctctacctgccctacccaacttctattccctga

SEQ ID NO: 915832 - DNA, 673 bp, Homo sapiens
atagaagttgggtagggcaggtagaggaattggacctttggaagaaagccaggaaaggtattatggggttgtggggaagtgggggaatggggaaagccaggaattcaaggtgggcctgtctaggagcgggtgaaggagaccagtctgaacaaaatggaacgtctgggagagctgctgatgtgtctatcatccatccaagcaaaggtggaaggtcagacctcactttgttagacctcaggaaagacagcatggtttattgaaaaaagaaaacaaaccttaggatctaatagacctactgcttactcttctttggacctgggccagtttccttacatctttgtgcctcactttcctcccttacaagacagagaggatgatattatctgcagaactgctatgggggttaaaggcaccagtgtacataaagttgggcacacgggaaactctccgaaaacattgtccctacccaacaacatcactccagggagagggctgctggatatttactccagttcctgccaagctctttttagaatgaggcaggttttgccagcccagcatgagtgagcagacatggcacctgcctggccattcctgggtcccatcamttcatgggctgttgctggatgagacaaattttatctgtgtttaataaagtccagtagtgtggcag

SEQ ID NO: 915833 - DNA, 595 bp, Homo sapiens
ataaaaccaagggcctcttctctataattgagtgttgtcaagatcaagtcacatttttccaagttcagctgagaatgattttgaataacttttaaaagrccctggtgaagcaccatggaatattctatgagttattcagtctttgggcatgatcatgaatatatttactatctcatttttatgatctcttaaaaagtattttcaaaacatcttgtgggggtctcagaggcaacatttggtgaaaaccatcttccaaactacatttctgtggatttgtgtacagttactctgaaaggaagtgacccttagccattaaaaggagagatttacctgagcaatgccaagtagtatgttggcaccttattttcttttttttcttttttttttttttttttacaattcttcttgtttatttcttcacagttggggcaaaaaaaaaccctcaaaatttaatgcactcaattactacaaaataacaccaaaatggttatgaaaataagtatggaggtgcttatgtctttagtgtggtttttcctttcttctttcttttctcccttccttcttttcctccttcctttattgcttccttctttct

SEQ ID NO: 915834 - DNA, 579 bp, Homo sapiens
taaggctctgaaggaaagtaaaggctagagctgtggcagccaaattacaaccatggaggaaaaagcctgaggttaaagccaacattctgtggactgctgagcccttggtaatattgctacacagttgaactagtcaaccctgcaattactccgcatgttctataagataagaaattccagctaagccattttagacatttttctgttattttaagtgaaagcatccttatagaaacatatgcctatgtgcttgtatacatagatgagaaaaaattaatgtgaaaagtatgtagtatttatatataaattacatacatattatgtttatttctcatactttcaaagaaataatatctggttaggaattgtattgctctacttcaaattgcatttagagcaatttaccaatgttcaaagcaaaggaagcaaacttttatctacagatacatttgctttctaacttaaggtttcctcaaaaacatgtattttactacaaaaagaaaattagtttggcgtgatggtgtgtgcctgtartcccagctactcgggaggctgaggcaggagaatcacttgaacccg

SEQ ID NO: 915835 - DNA, 637 bp, Homo sapiens
atgggctccatctgttgacaaatagttttattttatattttcaatatttggctcactgactactgtattaagctgcgttcaaaggtttatttaaagcatcagctgggatctaatgytaggtaatcatttgtaggtattacaaatttaaaaaagtatttttatttgagtttatttccagtgcccttttttatactaatgcggctttcctctcttctagttttggacgataataagttatttgttcttgttcttcatatgtttacatattaccaaacttcattagttttaagccaggtatattttcatatattgccatgtttgaaattggattgggtcttacaatcaaaagcattgattttattgattgaaacagcaaatattttttctttcctgatgatcataaaaatcaagaaatcaaatgttaaacaataggacattttgcaattaatgacatcttagacctaaagaaatatgatatttcatgtgaggcagctctcattagccataaatatgtttcttttgccaatcttactgatgataccctgatttttacaaactccttcctaatttagtaattctttcaattctaaccatgccttctggtgccatttcatgtgtttgtgcatatttttctatg

SEQ ID NO: 915836 - DNA, 603 bp, Homo sapiens
ttaaaaatagaccattaacattcatgcaagctatttaattcctttgaatttgttgaaaatgcaraatattaggtctcggcccagatttatgatttaaaatttgcatattaacaagatcccaggtgatttgtaatcatattagagtttgaagcattaatttagatcagttgttctcaactgatctaaattagttagttagttctctagactaactaagttagttctctagactaacagcattaacattacctagaaatgtgctggaaatgcccattgttaggccctaccccagacatactgagtcagaaatcctaaaaatgggacctagttatcagtatttataaggttcttccaaatgataatgatggaagctaaagtttgaggatcactgtttaacagtggggttacattaagtcatttggaggattttgttttactttaatattaatatctaggtcttgtgctcaaatgaagtaaatgagaatgtgggtatgaggatggaaaggtgctagtcataatgtgttttataaccttctaaaatgatagtcattcacagtcaagattgagaatcactaatcttcgtaataactccatctgctgtga

SEQ ID NO: 915837 - DNA, 601 bp, Homo sapiens
cctttaatagaggcttgatggttgtaaagtctcttgctttttgtttctttgaaaatgtctcttgcaccttcattcttgaaagcctttttcattagatataaaattgtcaattgaaatttattttattttagtacattgaaaaaacatatcatataaatagatatatctttaagatttcctctttgtagttttctgaatttcactatgatttgtcagctttttatctgcttgggtttcattaggtttttgaatttgtggattgatatatgttttaattctggagaattctcagccattatctacttaaatattgcttatacattgttctttttctctctttctgaaaactccaataaaatatatgttagattttattattgtatccttaatgtatcatcaaatcctttccccaacagttttatatttttgtctttctgagctttattcttgatgttcttgatattttttttcttaackattttgcatttcacaaagtttcttcaattggatccaatttgttctcaaatccatccagtttcttattttggttaccatgcttttcagttctatacattctatttggttccttttcaaatacgct

SEQ ID NO: 915838 - DNA, 668 bp, Homo sapiens
aaaccctcaggacctagggctcaacacagagttcttagacttgacacctaaagcgtgatacatacctaaaataatgatcaattactcctcatcaaaactaatcactttttctctgcccatgcttttgtgaaacagataaaaagacaagttacaaactgtatgaaaatatttgtagatcaaatattgacaaggactagtttagaaattatataaagaattatcaaaagtcaacagcttaaaaaaaagcccaattgaaaaatatccaaaagacacgaatacacatttcaccaaaggtgataagtagaagaaatagtcaatataatcatccatcagggcaatgaatactaaaaccactgaagcatcactgtatgcctgtcagaatgcgtaagaatttttaaaataatgacaccaccaaattctgaaaaaaatcggaaaaattagatcacttatattttaattgggataatgtaaagtggtacagtcactccaaaaaaatgttaaattttttcaaagctaaatgtgcaattagtttctgtcccagcaataacactcctgggaatttatgacagataaatgaagacatattcacacaaaaacttatacactatattcaagcagctttatttgtcatagccaaaacctwaaaacatcccagatgctcttcaaca

SEQ ID NO: 915839 - DNA, 597 bp, Homo sapiens
gtggtgatgaattctgtcagtttttgcttgtctcagacatgtcaggcatttagcttcaggacctgattctagttcctgcyctgtggtgacaaatagaaacagatccctggtaccctgcttaggtactaagccagctagatgagagcagatgaaaaaatcaaatctttctattttgccagggattaattcattcccaggattgtaaatattacatttcacttttcatctcacagaactgtgaggttagaaagtgagctgggcagcctgcccagaaagacattatgatgtatacaacacagtgaactactaaggaggtgtctttaaaggcatttacagcacatagcttttagttttccttttaattttgctgctctttatttgtagtagtagataaggaattaagaaagcaaaaataagtgctttgactaggtcttttgcctttgaaaatagcattagtaaaatcctctcttcttttttattcttgtaaacttcacctaattcactctgccccccagcccatctgtgttcacttgctgttcttgctgctgtcagtttttaaaagcttactctaaaattacatgaaagcaaccccatttt

SEQ ID NO: 915840 - DNA, 597 bp, Homo sapiens
gtggtgatgaattctgtcagtttttgcttgtctcagacatgtcaggcatttagcttcaggacctgattctagttcctgccctgtggtgacaaatagaaacagatccctggtaccctgcttaggtactaagccagctagatgagagcagatgaaaaaatcaaatctttctattttgccagggattaattcattcccaggattgtaaatattacatttcacttttcatctcacagaactgtgaggttagaaagtgagctgggcagcctgcccagaaagacattatgatgtatacaacacagtgaactactaaggaggtgtctttaaaggcatttacagcacatagcttttagttttccttttaattttgctgctctttatttgtagtagtagataaggaattaagaaagcaaaaataagtgctttgactaggtcttttgcctttgaaaatagcattagtaaaatccyctcttcttttttattcttgtaaacttcacctaattcactctgccccccagcccatctgtgttcacttgctgttcttgctgctgtcagtttttaaaagcttactctaaaattacatgaaagcaaccccatttt

SEQ ID NO: 915841 - DNA, 597 bp, Homo sapiens
gtggtgatgaattctgtcagtttttgcttgtctcagacatgtcaggcatttagcttcaggacctgattctagttcctgccctgtggtgacaaatagaaacagatccctggtaccctgcttaggtactaagccagctagatgagagcagatgaaaaaatcaaatctttctattttgccagggattaattcattcccaggattgtaaatattacatttcacttttcatctcacagaactgtgaggttagaaagtgagctgggcagcctgcccagaaagacattatgatgtatacaacacagtgaactactaaggaggtgtctttaaaggcatttacagcacatagcttttagttttccttttaattttgctgctctttatttgtagtagtagataaggaattaagaaagcaaaaataagtgctttgactaggtcttttgcctttgaaaatagcattagtaaaatcctctcttcttttttattcttgtaaacttcacctaattcactctgccccccagcccatctgtgttcacttgctgttcttgctgctgtcagwttttaaaagcttactctaaaattacatgaaagcaaccccatttt

SEQ ID NO: 915842 - DNA, 638 bp, Homo sapiens
caaaatctcattaagctaataagcaatgtcagcaaagtctcagaatacaaaatcaatgtgcaaaaatcacaagcatttctatacaccaataatagacaaatagagagccaaatcacgagtgaactcccattcacagttgctacaaagagaataaaatacctaggaatacaacttacaagggatgtgacggacctcttcaaggagaactacaaaccactgctgaacaaaataagagaggacacaaacaaatggaaaagcattctgtgctcatggatagaatcaatactgtgaaaatggccatactgcccaaagtaatttatagattcaacgctgtctccatcaagctaccattgactttcttcacagaactggaaaaaactactttaaatttcatatgaaaccaaaaaagagcctgtatagccaagacaatcctaagcaaaaagaacaaggctggaggtatcatactaccttactttaaactatactacaaggctacagtaaccaaaacagcatggtactggcaccaaaacagatacatagaccmatggaacagaacagaggcctcagaaataatgtcacatctacaaccatctgatctttgaaaacctgacaaaaacaggaaatggggaaaggattcc

SEQ ID NO: 915843 - DNA, 667 bp, Homo sapiens
ctgtccatttaaaaatggtgaaggtggcaaattttatgttatgcatattttaccacaatttttttttaaaagaagcaggataacagagtcagggaggccccttcctctgtgctaatggtcccctgtctggaacacagggttctagactagtaggtaccttcttgggaagggaccacaaaaagagaggtcaaggatcctggggttgtgttcctgagaggacggaaccctgtcttctggcagctgaagggctgatgcctagatagacactgtgttgtgtcggaaacactggaacagacaagcagaagcctcagggagactagggggtttaattccaggaaggcttgactcaaatcaaagctggagaagcaactgatgggggttatgtagaaggggttcttgtgacagcaggaggttgtcccaactaacccccacaatccccacaatcacaggctctgacctcttaggtgccagactaattgcccttggtcatgtcctacgcaaggggcaggcagaaagcaattgaactgagaataaggagacccacagtctagtcctagctccatcagctattggccatttgaccttggatggatccccacrtccctgggcctctgtgcacccatctctgtaatcaacaccctgcctccccttcctctcagatcaaggc

SEQ ID NO: 915844 - DNA, 635 bp, Homo sapiens
gccaatatgtcatccagtgccatagmatgtcactcctgaattagttctactttaaaaattctaaaacttatgactcagagaggtgaaggaacttcttgagaatcagatgtttcacagctaactctctggctcctaacttctttatgctggggttagagtaaatctgtttcatacatctctgtgcacaaaaataaatgtagccattaccaacaaaggactaaggatttgtttaaaataaattgaagtcttaacaggatgtgaaaattttaactttcatgttttcctcccccaagttagttgaacattacggtaaatgtacttttcttaagacatttagaatggattagttcaaaacatattttgtgtggataataattacctttaacatctagatatattcaaaatatctacctgaatttatgttttccagaatactttgcttcacacacatacacagataagaataatcttcaagtgattagctcattaaaatcacccctttaatatgatctaaaaccaaaaatactttaaagggtttcagaaagatcaatgaaaattaatatatctcttttctactaacactgctccttactgccaacacatcctagcattaaatattattttaaaaatggaca

SEQ ID NO: 915845 - DNA, 567 bp, Homo sapiens
tgcaagaataaatggagttaagcaatgaaaaatgagatgaaaaccacagatatcttttctaaataatgaagttatcaacattccagtataagcctactgtagttctctctctttcacacagtttgtgctaagagttttcacttcttgtttcagtataccatagaaattcaagaaaatactctaaattcaaatttgctcgagattagagtaattgatttggatgaagagttctcagctaactggatggcagtaattttctttatctctggaaatgaaggaaattggtttgagatagaaatgaatgaaagaacaaatgtgggaattttaaaggttgttaaggtatggtataattatcctaaatattttgttttcttaatcttttttcaaaatgttaaacttaaaataaaatgatgctaacatttcacaaacttggcttagtgaaagaataaaaattactgtgttttaaatatatatataacatagagctttttaatatagtctttctgcttataatcattttagaaaaacaggtattgaattttaactggaracagtttgtcaatacag

SEQ ID NO: 915846 - DNA, 585 bp, Homo sapiens
tgcttgagcctggccctatgttgtggcagatggcccctggaggcccctccaccttcaatactgtgccctgacaatgtcttcattctggaaccacctaggtyacagagatggcaaaatctttaagagtgctatatatttttcaaattcaagaaagagatacactggtgaaattctctctttgaggaaagagatacattccttgcacacacggattccccagtccgctggagataaaatgatcctgaccttggaggaaccacggtcatagggatatgctgtctgtgtgcctgaagagtttgtgtgtcacttaatctagatcacgctcagggtagtcagcaggtcaggctcagatccagataagcaggatgttgtctggctttctgtcgtttgtttattcaacacatttattgtggacccacagttttcctagtgctgtattaattgttgagaatacagaggagttaatacatgtaaaatgtttagagtagtgcttgctgcttataaacccagtaaatatttactatccttcttattaggtaatacatacagttctcagtttctgctttatctttgtagatatgcagg

SEQ ID NO: 915847 - DNA, 632 bp, Homo sapiens
ttcttggtgccctgaggctgagtcaggcaggatctgtctcagtggaaacgtttcacttattgctcttgccctgtgccaaatgcctcattttgccccttgttaatcatcagatattagcgtccataagagtcatatttaccaggagagaggttttcttcttcttctttttaaatgtctttgaataattcatgtccaatttagaaggattaaatatggtgtgttctcccactccagcaagagctggaggtgaaaatctggtttctcagactgcagagagccaggctgctgggaaccctcccggattcagcctctcttcactgctgagaactgttcgactcaaggcctgctggcctatttttccctgttgtctcacttgcctgtactggctctccagtttttctaactcttcaagacccactcctgccaccttctacagaacccttagcaagccatcctcccacacctgcagagacagggagcctaggccatgggaaggcagactggatcttctttgggaagtgcagggtctggagctgggagggctgcccattccctgggcgaggagactgctgccacatatrttctgctgtgggcccagaaggagctaagggacaatgcagagcaggctcctc

SEQ ID NO: 915848 - DNA, 636 bp, Homo sapiens
acccatgagacttcatccctgcgttggtctggctggctttccctgtgagatacaggttcctcctgaagagctgaagctccattccagctctagacttctccttgctttcagacttcaagatgagaagcatttttccagtccacaagtgttagaggacactgccgatgatgtgtgttttgcccaggctggactcagcttctttgtctcggtaaaggttaagttttcttcaatataagaggaatctagagaaactgagaccattaagcaaatttttagaagtagatgagaaggaaagttggaaaacaaagtacccttgcttacagagaaactaggagatcaccttaattaagaaagcaccttaatttggggcagagaggggtttatagaaagttggttggagagagtggagcttgacgtagagctaatttcctgaattcttgggttaaagactccccatggcatccctcccaaaagcagacagcagtaaaaggagcaggtttgagccaggraagctgatggtctggctgcatagtgggcaaagtaccctggggcctggacagcctgctgcatggccctttgctgatgggcctggaggagggagaaagcaacagccctaggtgcccaggcccgactccc

SEQ ID NO: 915849 - DNA, 505 bp, Homo sapiens
tcccaggtttaagcaattctcccgcctcagcttcccgagtagctgggactacaggtgyctgccaccatgcctggctaatttttgtatttttagtacaggtggggtttcaccatgttggccaggctggtcttgaaatcacattttctttaaccattcatttattcatgggcacttagattgattctatgtcttggctattgtgactattcctgcagtaaacatgggagtgcaggtatatccaaaagaatccaattgattaatatattgatttcctttcttttggatatatacccagtagtacattgatagatcatatgccagttctatttttagttttttttgaggaaacttcatacagttcccgtagtggctgtactgatttacatccctaccaacagtgtacaggggttcccttttctccacatcctcaccaacatctgttatttcctctttttgataaaaagtcactttaaccagggtaagatgatgcctcattgtggttttg

SEQ ID NO: 915850 - DNA, 596 bp, Homo sapiens
tctctttactggtttgaaacattgcatcaaacttccacagcagctattccctgtgggcctttacagatacataacaaatgtgaggtttgaaatttctgctattttgagtaattttaaatacttttggttattttgtatgtatgtgtaagcctgcatgcatgaacacacagacacatgcatacacacacacatgcacacatactctggaaagagcagggaacattcagtcagaagccaacactggctccacatctcaacctgactcattggtgaagcaccttgccttcatgaatgggtgtctccttatcgttgtaactgggacactgaaaaagatgatgtctacattattttctggttttagatctgtgagttatatgcaaatgcacaccatttaaacaactgcctaatgtcgaacacgtaaacattttttaaaaagtatacctagtaaactctctggtagaacccttaggtcccatggatggcccttacccatgagactgtaaaaacagcaggaggaatgtccactccataaccacacaggaagtctgatgtctamtctagatcagaattcagaggatgctatctctggccctaaa

SEQ ID NO: 915851 - DNA, 630 bp, Homo sapiens
gcatattttgtgttctccgtagttctggtgacagaattctctccttgttccagtctgctgagrtgaccatgggtccatctcttcttggccttgtcactgccccatggtaacatcttctgaggtggtctcatgctcatctgaatcttaactagccagtccattcctcttgattgcagggtcctccattataaccaagagaaccctcttgtttcacccaggttgggtgtctcatttctgtcacttatggtcacttgaagaagatatttggctgcttcctgagccctgatggggtattcagcctactcagggaaacagtgttagatgcatctacccaaccatcctacacaggtgactctactgcacccttctctgccatggggaaatagagaactctttaggggtatgtatgccataaatgcttcaagtgggaagcagaataaaaacaccctctactctcaaccttataaacataaatggagcatttctgccagtaagatcccaccactcttttcagtcttagagatactaaccaggatctcactgacccttctttcccaccccttccagcttcccgttcaaagaggatgcgttggggaggggggctggtacgggtgattgctgggtagcctg

SEQ ID NO: 915852 - DNA, 632 bp, Homo sapiens
acatggctttgtttttctcactgtcctggtcatcttgtgtgaaacaatgtttaatctcttaggtttcatacaggaatttaatgctcaaaaatgacacaattcttcagctgtattctaatayattttgtactataggctgtattttatcaataccacctattgctttaccttcttttcagaagcgcccccagacttttaattcagacagagctttgggtcaacaaatttcttagatagcttctatatcaactgctgtcaagacaagattctcttgattatacttgtcctattgatttttttaactctaagtttttagacttatctctgctacatttcatctttttatttttttaattgacacagagtttgcatttgtcgcccaggctggagtgcaatggcacaatcccggctcactgcaacctccgcctcccaggctcaagcaattcttgtgcctcagcctcctgagtagctgggattacgggcatgcaccgctatgcccagctattttttgcatttttagtagagacaaggtttcaccatgttggccaggctggtctcaaactcctgacctcaagtgatccacctgcctctgctacctttcaacttcttgccattgttttaatctactaaga

SEQ ID NO: 915853 - DNA, 594 bp, Homo sapiens
caatattggtctaatttcaattgttgtattacaggcaatagaaggccaaggagaaagagagagccagggaaacaggctgctcagtggaacagtcagaatacaaacatcatttatctattagttttgttgtcttacacgggctttgtttgtggcaacccaaaacaattacaatagtaacatcaaagatcactgatcacaaatcaccataacagatataataataatgaaaaagtttgaaatactgtgagaattactgaaacgtggcagaaagatacaatgtgagcacaagctggaaaaatggtgccaattgacttgttcactatagggttgccacaaaccttcaatttgtaaagaatgcagtatctgcaaagtgcaataaagcaagacatgataaaatgagagagttatgcctgtaatggccttttgtgtgtattaaaagctgaagaatttatttaaatattcaaaaataaataaataaatattcaaaaaactaagtacaaatgtctacttctaatgtatgactatagcaaatcttcctyagaactataaatgtaattttctccaggactgcttcaagttcacttagttttcagc

SEQ ID NO: 915854 - DNA, 605 bp, Homo sapiens
gataatgattaatagttggtaaataggtgcttcagaaaatcaagggaaacycacctcaactcagagtaaaaatatacttattagcaattctccaaaggatccaaactgatcatgcactcagcaaaattaccttcttaagaagaaagcccttagagtgaccaaaattggaaatgaggaaaacaattgcaaagtattagttcaagaaaattaatctgaactcctttgataacaaatggcagaaacccaatttacattggcttatatggagaggggaagaggcggcagtgatgatatttattggcttatgtaagttaaagattcaagacttgagaatagctggatctagcagctgagtagttctcattacacctctctcccatttcttttccctgcaattctctgtgatgggtatactgagggtttctcaatctcagcactgccaacactttgggatagctgatttcctattgtgatgagttgtttggtataggatgcccagcagcacctctgacttctacccaccagataccagtggcaccctctcccaaactgtaacaacccaaaatgccttcaacactgccaaacatcccacagggggcaaaact

SEQ ID NO: 915855 - DNA, 587 bp, Homo sapiens
cggtgcaacccattacctccaaaactgggaagacagagaggtgaatatagagaatcacaacttaccagagcagaaacctccawgagaacaagtgctggggtaggaaaatctaaactataatttatgtattgctggaggctcagtatggacgactctgagtgggtacaaactccagaggaatacagtcaagaaaggagaaaggaagtctcgcttttgcaaattctcccacctggagctctaccacattctcattggaagtatcacaaaaaatccccttgcacttcctgggagaggggagaaggaccaattttcaaataaaccagatcattctgttctccttaacaaggtcttccctcagatgaaactatttaaccagagctgcacctgctggattttatcaaggtctaactgatctgggaaaaagcaaatatccagctccagttccctttagacttctccatgggagaagggacatactcaactccagtcccccaccgccagccatcctgtcccatttgtaaaattcacagttcagagggtcaccagctaactaaaagactgaaacctaatcccagaactatagaatg

SEQ ID NO: 915856 - DNA, 396 bp, Homo sapiens
acagtgtgatcttttcatggctagcccctgtattgaacacaagtgacatattagtggaggatagaggaaaggcactgccagctagctgacaggcattcgtttaaatccttgctctgatcaatcgacttaggttatctgagtcttagtttcatcatctgttaaatgacaataataattcttactggacagggttcttatagggattaaatgggataaagcaagttaaatcctctgcttacagacttctgctttcctttccagagaaagttattctctgatcagtagaattatgagggaaaytctcaggcaggtgttggggctggaggctgacttcagtccctctgctctgtcccacagtttctgacccatgtgagaaacaggaaatacacacagaag

SEQ ID NO: 915857 - DNA, 602 bp, Homo sapiens
tctcccttgggtctcaggatattttttttcaagcccagaacaattttccatataacattcagctcagttgaatgattgatacatgaaaagaaaggcattgaactttgtggaatactttgtaaaaaacccactaagtctcaactgcttgcagagttctcatttcaatgacccatcctatgaagcaatttctccattgtgtaagttttaaagacagaaatcaaaaatgttgtgggtataatctgaatcttgacatgaattctaaaaataatggagttgacatagtttgctttactttttatttactctgaaatgttgatcttttatgtatttattaggaggaaaatttcttccatatgtgactaattgtcaattgtgttttattcatcaaactatatttgagagaatcttgaggttctaattcaaatagcttttgaaatagactttgtaagttgtttttcaataagctactaaaatattgtttttgaaaaagaggaagtcattattctaagcccatagtaacaaaagacccagcagactcaagttatattttaaatattaaacmccaaatgctcagtaatttttacgtctaataaaacaaattt

SEQ ID NO: 915858 - DNA, 588 bp, Homo sapiens
agctccatcatttcacaaataaagaagctgaaattcagataaattggttacataatcagttaatgaaagctaaaaggtataaccaacagagacttagagcccagaatttttttttttttctccataagtgccatctcctcagagtcagagagtgaaaacatagactgggcatggtggcttacatctgtgatctcagcactttgggaggctgaggcaggaggattgcttgagccccggagttcgagatcagtctgagcaacagagtgagatcctgcctctacaaaatatttttcaaaaattagccaggtgtggtggtgcacacccatagtccgaggggctcgggaggctgaggtaggaggattgcttgagcccaggaggtcgaggctgcagtgagtcgtgatcatgccactgcactccatcctgggcaacagagtgagacatgtccttaaaacaaaaacaccctagcagcaggacccatattactgatcttgtatttgtcatgttgctgcctctttttcttcctcttcttttttttttcttgattmctagtgtgttcaatttttcctcagaactaaactttcagggttt

SEQ ID NO: 915859 - DNA, 636 bp, Homo sapiens
tgacattaaccttggtcgtctagttaagggcgtgtttgtcctatttctccatgttttttgcctcctttcccttactgtactcatcggaagaaagtcactaaatgcagccaacatttaaggactggggattgatacttcctgtcctgggtggcagagtatctacataaattgtttggaattattctgcatgggatatttgctaattctttcccattggtagtttactcaataatgtatgcatatcattatggactcatgaatattttctttgtcctttgggttacaattcagtgccactttgcttattttggtgcccaaagtgtctcaggttaggctactgggaactctttcaggaggcttctggttcctttgacatacccctgtaagtgtatatgttatttttcttttgagccctttcttactttctggcactatcaggtactctaagttcatcttgtgtatttcttgtctctgtcctggaatcagataactcttcaaggatcccygatttattttactgaagaatgggatcttagaggctaatatttgggaaattggtgtgcttgtgactacggttatcattatttatagggctgcctagatgacagagcaagtaactaaatgtgtgtataataa

SEQ ID NO: 915860 - DNA, 635 bp, Homo sapiens
aagagtgctggagggatcctatagagatgaagggcctagtacatttgtgaagatttggggaatccaggcaactacaacatgcacaggcatctagaacatgcacaggcatccgctgcaggaaaataataaagtatttcatactatatgactaagaaaaatgcttcattttagttcttttcggtagcatatatttaagtagcataacctttgagaatactgctacaacttattatcaggtgccttcaaatgctgtcaatattgagtaaggcttggaacaaaaaagggctctgttccgaactgtggctgtggtacaaataacactgccacttggaacatattgtctgcacaatctcatggtgctgaaagtatatgaagtagataattttgtgtgctgaacatggcaaaccctaacggaaaagtcacagataagcttcttagggctcaagagtaaggacctcttcagcaaagggttgctgaaaaccattcagaaacaccactctggcatgtttctggattctggaggtgattgaacaggtgtctatgagcctcttatgagctggatgccgccaggcccaccaactcataagtttgggcaggcakagcagctatccattccaccacggaaacaatacatg

SEQ ID NO: 915861 - DNA, 403 bp, Homo sapiens
ggagactaacagacctgaattcagatccttgaaagtaactgggtatggtggtatgttcctgtagtcccagttacgcaggaggctgaggcaggaggatctcttgagaccaagcgttcaaggccagcctgrgtgacataacaagacccccatctctaaaaaataaaaataaaaacaagtccttgaaagccttccctttccttctactcccattcaatcacagtcctatggtttcatcttcttactccctctcaagtttttcattttttccattttcaccactacccccaaaccactactatgttcttctgggcttttaaaatagctggctgtgtggtcactcatctccaatcttgcctctcttcaatgtgttctccacacagcactcagtgtgatcttcttaaac

SEQ ID NO: 915862 - DNA, 607 bp, Homo sapiens
cacaggtctgtgcagaattctgctcactrttgtatccagcactggtctggcatacagcaggtgctcaaagaatgtttgttaaataaatcaatatatgacacccgccatgtctagttgtatgaacttggcacttaatgtctccgttcctcagtttcatcatctgaaaatggatgcgatgacagtgtctacctcccagggttcttgtgaatattaagtgagaagatgctggtgaagtgtgcttaataaatgttagccatcatcatcactgtcaccatcactaagggttctcactaaccaggtgtgagcaagatggttgaacagagagtaagagcaccatttgaaaagacaaggagactttcttctcctgatctctcagggttacaggggataaaaccatggccccctgcacatgccacagggaggcagaggaggcacgtgactgacacacatgtttatgtacctgtaactgatatgagattcttatcagccataaaggccccataagaagggtagatattagagagacaataaaatctaacggggaaaagtcaattaagttcattcaggattaagttcagctgagtgtaactgttttctgttgtcagaa

SEQ ID NO: 915863 - DNA, 555 bp, Homo sapiens
gggaaaaagctgagcaattcccagaactgagagttcctccccttcttagaccatataggttaacttcctgacattgccatcgcagcactgtggaagtgttttttaacatgctaatgcattacagttaacatataatgagcagggaggacgaccagaggtcactttccttgtcatcttgatttggtgggttttggctgtcttctttaccacaacctattttatcagcaaggtctttgtgacttgtatctggtgctgacctcctatcatcctataacttacaatgcttcgcctcctgggaatgcagcccagcaggtctcagcctcattttacctagcaactagtcaagatggagttgctctggttcaaacgcctctgacatttacaaaagggcagcttttcagagctaccactgtgtctgcagtttctcaaaataacctgctcaaaatatacaaaagaaatattttttgaggtrgtatactctgatctcttatagtcatattttgatgtgtgttctgagccccagcagctcctagctccaccacatattatttatat

SEQ ID NO: 915864 - DNA, 626 bp, Homo sapiens
tttggaaatcctttcaatagtcttgcaggcataagtagttattcctttcactgaaggagagatgatcatgttgtagcccaggagtgaatggacacatgaagcagaaatacaacatagccacaggacagtgtctaggaatggttgtctcctccaaagtaacagagactcctccaagagttggtaggaatacaaaacagatacccaccactgctgggcctcatcccaagagtaataccacttaggataatcttgtataataactgttctttctagagtggaaatattcaacaagcagctaccttctaaaatatgttaatagataacaccatctggcgccctttctggtgatattgtaagttattagatagtgccctttcagaatactgtggtgaaatgccactctatgaaacagagattttgcaagaaaagggagaggcaaagaattacacttggggaggtgttcctatcacaaaaaaaaaaaagcatatagaagttcaaagctttcaatttttcatgatactccatagctatggtttgaatgtgtcccctccaaaattcaggtattgccaatatgacaatattgagaggtgaggcctttaaraaggccacatgatctcctacttcat

SEQ ID NO: 915865 - DNA, 647 bp, Homo sapiens
ccacattaagaagtgggcaaaggatatgaacagacactgctcaaaagaagacataccaacaaacatatgaaaaaatgctcaacatcactaatcatcagagaaatgcaaatcaaaaacacaatgagatgctatctcatgccagtcagaatggctattattaaaaagtcataaaaaaaaaaacagatgctggtgagactgtggagaaaagggaatgcttatacagtgctggtgtgaatgccaattagatcagtaactgtagaaagcagtttggagatttctcaaagaacttaaaacaattagcattcaaccagcaatctcattactgagaatatatcccaacacaaataaattattctaccaaaaagacatatgtccatcacatatgatgactcacatgttcattgcagcactattcacaatagcaaagacatagaatcaacctaggtgctcatcagcggtggactggataaagaaaatgtggcacatatacaccatagaatcctacacagcaataaaagagaatgaaatcctgtcctttgcagcaayatgaatgcagcttgaggccattaaactaactaaactagtgcaggaacagaaaaccaaatatcttatgttctcacttataagtgtgagctagacactggata

SEQ ID NO: 915866 - DNA, 603 bp, Homo sapiens
tttattaatcaagtacattagaaaggccctttctaaaactttcccawgtattttggacccagaaaggagcattttactagggcgctaaggtagtctgcctaccataaattcttggcaatttgaagggcactctttcaatctctaaattcagttctttaaagagcccatctagtctctgactttgggggaaaaagagattgtctgctgagagtttgcctgcatgctggaacagatgaaaagttttttccatccccactccatttctaaaacagcatgagcaagttttcatctgtatggcttctttatcttaatagaaatgaaactctttcattaaatcctgcagaggtgtgaaacctgagttctaccatacatgatgtcattaatactgggcagaattatttgggaaatgttgaaagggagagaagaaaccccaaccttcccccttttcccccttaatttaataaagttgctcagccttctgagcccagtgtggttttcttgaattgcacagctgttgcacagctgggaataacctagatcaatgctgatctttggctaaaatgaaacaaaggactcggtagaatgaaaagttaagtgcccagc

SEQ ID NO: 915867 - DNA, 675 bp, Homo sapiens
aaataaaaaatcaacatsaagtaacagtgataagactgacatctaacttctcatcagcaacaatggaagccaggagaaagttaaatgttagaggaaaagaaaataactgccaaaagttttcaaaacccagtgaaggccagggaaaggggaagggaaaaggggaaaaaaataaaaataaataaagaaaaaagaaaacagtgaaaatgtctgaaaaaaaaaaaaaacaagcacaaccaacataggaaatatggatgatcattttgcttgtgtttcattccttgttcacatcccctgccttcgtccaataggtaaactccttctaaatttttacttagctttaaatatttttaaaccttatataattaatttcatactaattttcacttaatgttatgattataagatttattcaatgtgattgttttcagtgccaacagtattccaaattatgtgtatgttacaatttttcatcccttgggttgttttgaattttgtatgattacaagagatactgctgtaaacaatcttatctttagaggtctgtagctttatcttaatatgtcttggtgtatatttcttattactcaaccttcttgataaatattctggttcctacatcagtgaattcaagtctttcatcaattatagaaaaatctcagccattacttttttgaa

SEQ ID NO: 915868 - DNA, 592 bp, Homo sapiens
cataatcttatttgccatatacatcttcagataagtgaatctcgtcattttcacagataaacccagagttgggattattgtccacattatatagctaatatgtagagaaataaaataytatagattgtattctacatggtgatgagcttctggatcttcacaaagagaaagatgaatacagtggttagtattcatttactgagacctctctgtgtctcagtaagtcatgaagccttgactagagctcctttcatgcctctgcatgtaactctgagacactgtgtcattggttatcccagaagcaacagctgttattgctggcctctgttcctaagtctagtagagtttggaataatgaggtttctagtcatctttaaaatgagatgttgcctttaggtcctagggaagtaaaatgtcaataacactttccagttccctgagaaatctttgaatgacctgaaagctggttccagccatcagttacaatctgtgggaaaacagtattattcaggagcaatgaggaaagaatatgtttacatctttttgctgagacaagtctttggtcatctaaggattctggttatcttgaaag

SEQ ID NO: 915869 - DNA, 673 bp, Homo sapiens
atcattatcccattctacagatgagaaaaccgatactagaaagagtaagtaacttggataagatygcatagtattttaggtcaagattctgtggcctttccctcaactatgtaacctctgatcattccctggtcatagctaacagttcaaagcccggtattgtcacagccccagaggcagagaacaaatagctatcacctggaaatacctacctacctacctacatataggtaggtagggtgaataatgtcctcccaaagacgtccacatcccaatcctcagagcctgtgaacatgttactttacatggcaaaagggacgttgcagatgtgattctgtcaataaccttgagaaggggagattatccgggattacccaagtgggcccagtgtaatcacaaagctccttacaagagcatggcaggagagttagtgtcagagagagacggatggggtgggaaaagagagtgagagagagagagagaacagagacagaagtcagagtgatggggccatgagccaaggagtgcaagtagcctctagaagctggaaaaggcaagggaaagggtcctccctgagaaaccccagaaggaatgctggccctactgacaccttcatcttaggacttctgacctccagaactggcagaagcaaaatttttgttgctttaatcca

SEQ ID NO: 915870 - DNA, 626 bp, Homo sapiens
tctgctgcctgaggaaaccctgtgagtacgggcatggagtgctgggtttaaggaaaaaccagcctgaagggcactgtctgggaaggatgggaaataatacctaagggtggctggggaactctaatcttggaagttatatcaaaagaggacaacaaccatctgccttggaagttttaggtgcaggttttcttccagttggggaagggattggggtgtgggggcactttccctctggtggttttgtagtaaacctttccaaatggacccaactacttagatgtatggacctattaacaagaaggcatagatactcttcggctcataaccagtggaaaggcatggttcctgtattggaagcatctactactggagtgaaattaactcctagtctgttagttttccagagctgctgtaacaagtctccacaactggatggtacaaaataatggaaatttattctcttacagctctggaggttagaagtccaaaattaaggtgtcagcagggtgggtcccgttttggaggtgctgagggagaatccattccctgcctctctcccagcctctgatggttgcttcaatccttggmattccctggtttgtcagtgctgatgcattcaatctcta

SEQ ID NO: 915871 - DNA, 670 bp, Homo sapiens
ctatgattgtatccttggatggctcaattgcagtctgttgaaattaaagaaaaagattctacgaaaaactataaaatggacaggtctggaagaacctctttttctaaggctatgtgtcataaaacgtacgtatttactttataaaatacatttcttgattgaatttaaaatatgttttcgttgttagaactttgatttccttgcaggttttcagaagcacattacttcaaatcctacgagcccactgtaggtgatgagaatataagcagtgaacaaaacataaaaccctggctttacagactcatagcctagtgggggagagagaaatgcacagataaataagaacaatagatagtatgtttggtgatgagtactacagagaaaggaaaagcaaagatgggggtgaggagctccaggtagtggggtggttgtcaggtaaatgaggtgggcagggaaggctcctctgagaaccttttatctgagtaatgacttcgaggaagtgaaggagacatgcagacatctgggagaagagggaatagcagatgcacaggtctcaaggcaggaggattgtcaaagaggcccccatggttgggatggagygagtgaactgggggtagtaggagatgaggtcaggtcagtgacggggagcagggcagattgaatagcaagc

SEQ ID NO: 915872 - DNA, 531 bp, Homo sapiens
gtagtagtaacatcttcacttaacagatggagaaactgaggcttagagaggttaaacaatattcccagagttacacaatagagagcagaggcagggctggaatctagatccatttgatttcaatatccataattgtaccacgttcttaggcccagggtttttgaaaagcccatcttgggctctgagaggagaataagtaatgccatagtttgtgtgatgaatccattagggaacctgctctccatgagttttcctgggactcccagaagcaaggtggcccaaggatggtccagggcatcacctattggctgggctagaactcatacaaacagactcaaccagaactagagggtggtgagttttgtgtgatagaggcgtagaatgcagcagacactgagcattggaaacttctggctgctggcctgtgtgatgcatgyttactttgctttttttttttttttttaatgacaaaggaacatgcttttgtttgttttaggagaagagggattgaaggaaccaagggtagctgtg

SEQ ID NO: 915873 - DNA, 684 bp, Homo sapiens
atttggctgccaacagggaattctaaacaactaaaaactccagatgatgaatgcacaacataatgatggttaaattaaaaaaaaaaaagagcacggtaataaaatttccatgaaatattttgtgtaagcgcagataatcagtcattttctttatagaattcttattcgtaaataatttagaatactttgttctttataatatatgatgggcaactatagtatgattcttctgagtgactcagttcttttttttttttcacatttaatgactttgtttctcctaagtgaatgcacagatagtatattaatcagggttctctggaaaaaccagaaccaatttattatcaggtactggttcatgtgattgtggaggctgagaagccccatgatctgctctctgcaagctggagacccaggaaagctgatgaaagtcaaaggcctaagagctggagggccgatggtatagattgcagcccaggtctaaaggcctgagaaccagaagcacagagggcagaagatcaatattccagctcaatcaggcaaagagaaaaagtcctcccttcctctccrtttttcttctattctgaccctggatggactggatgaggcccagccacattgaggagagccatctgctttaatcagtccaccaactcagatcctgatctcttccagaaacacctt

SEQ ID NO: 915874 - DNA, 571 bp, Homo sapiens
actaatgtttgcctaagaatgcttaaacgatggccagattttactctgagtgatactaccccctggaagtggggggaaaaaaagaaggagggaaaaaagttaagttttcattctaaacatcttcaaagcttgattggctttaataaggtatcattaattaattcaacagctaagaagggactgcaagtgttaaaaatcacggctgtcaaatgttatggcatctgggagccctagtggttggttacttaacatgatattttaggacaattctactctgcttaagcataataaaccggaaagacatgaacaaatgtcccaactgcttccctttctactcccaccccctgctctggaaagaagccctaacacctctaataccacaccactctaaaataaacccaaatgttgcacttattttactgctatgcattgagcattattatttggagatgctctatgctgcttcattaaagatctttcatayggggtggggaaactgagccacaggggatgattaaaagaaggaagaagtcagatgacttcggattctgttggctcctgactagagaac

SEQ ID NO: 915875 - DNA, 570 bp, Homo sapiens
cacctgccttgtcctcccaaagtgctggggttacaggcatgagccaccacacccggccactttttatatgttttaacagtcattctgaaatgtttctaacttgtgatttcttctttaacctgtcattagaattttgttacataatttcaaaatatttgaggattttctagatgtcttattgagttctagtttagtagcagtttggtcacagaacgtgattttagtcctttaaaatcgagacttgttttatggcctagcatctaatgtgtctttgtgaatgttttatgtgtgcttgataagaattgtattttgtgtttgtttggcgtagtggtctccagctatcaatgtagatcaaattgtttgatatttttcttcatatcttttatatctttgtgtgtatttgtgtatattctgtcagtaattgagagaagagtcttcattgataagtttggatttgtcttagactccctttgtaacattgctttatggtttttgaagctttgttaataggtatatgcatgtttgatattgttaygacttattgataaattgacccttttatcatcctga

SEQ ID NO: 915876 - DNA, 604 bp, Homo sapiens
aacagattcttcacaaaaagaagatatatgaatggccaataaacatatgaatacattattctacatgattcgttgtagaaatgcaaattaaaaccacaatgagatgtcacgataaayccatgaacagaaaataaaaagactagcccaattgttaatgggtacatggagcaaacggaactctcgtatactgctaaacagaatacaaaatagcacaaccactaaggaagactgacaatttcttaaaaagttaaacacacatattgtaagactcagacattccattcttaagcactacccaagtgaaaagagaacatctgtccactcaaggacttggttgggcagtcatcccttggcatctgaaggggattggttccaggatctccttcagataccaaaatccaaggatactcaaattccttatatcaaattgtataacatttgcatataacctacatctattctcttatataccatctctagattatttataatcataatacaatgtaaatgctatgtaaatagttgtttactatatttgattttgaaacctattatttttattgttgtattctagtttgtattgttttgctatttatatttttga

SEQ ID NO: 915877 - DNA, 660 bp, Homo sapiens
aagaaatgcacctcttccctgctctagaagaagacattcctttcccattatggtatttgcttagccattgatgtggctagccatttgctagcatgtggacacctagggtgatgggagaagaatctctatccagttctagttaaacatagagatgttctagtaaccagatggtttttgcttggcagtttaacaagcaaagtgtttattggctttggaaacccattcatagcattgtgttttgggtattcatggttctgtctgtttttttttttttcttccagagtgtggccatggtttatgttcccatcaattttattgtgtggtaattatatgttaattctttgctcagcctactgatagaatatccttacctaattatgtatttcattgtagatttctatgtaaaataagtgtgtggtatatttaattagtcatgagtttaatttaaatgaaatgtttggtatgttgaccacatgattagcattttgtagcatctatagaagttgcctcacatcttatatattttataatttgctgtatctttstaaggaccaataaactcggacattgggtacgactctaaggtctgttctcaacttttaaatttccttatgcattgagaaacatttatgcaatctttttcataatgacagagcacat

SEQ ID NO: 915878 - DNA, 639 bp, Homo sapiens
ttcttggtatttttggagttgatatttttgtagtcatttggtttcctctttccaaaaaactaaatagattttatacatatttctttgtcttagttttttgggttcctggagcctttaaaaagtcataggttttgatgggtttataaccttatctactttgggctaaaaacattttgttttaaccgagatataggttataacccactgagtttgaaagccagaataatacatacagaaattgaatctgtcctaattaaaaaatgactttggagctattaagaatactggtcatctctactgaaaagttctctttaacttttccacagttctttgggtttaatttctttgtgttcctaacatatgtagtaactgcaacattgcccactattattatactttttttgtagccttgtttttctgtgaaactaaaatatgttcattatttaaaaacttcagaaaaaacctgaaaattataaatctaatgtcacccccagaggaaatcatggttacattttggtgactgctttctaggcctatttctttacctgtgcatatttacagatatgggaayatgatcctatcttcatagagataaatatgtcatatacacattttgtgttgaagcaactttttcactta

SEQ ID NO: 915879 - DNA, 576 bp, Homo sapiens
tggttccctccttaactcaccagagtgatgtcagaggagtcctgctataatacaagatttcaataagatccagaatcttatartaacaccaaaaatgcttaggtttcagtaaaaaattacctgtcataccaacagaaagagctaaaactgaatgactaaagacaaatatcaacactgatatgacccagattttataattatataaggaacctaatgcagcctgaaacaaatgaagaaaagtgctaacaaacaaatagtaagcctcagcaaaaaatcagcacttatggagaagaactggaaaaaaattcagaactaaaaattttaataactgaaataaaaaactcaatcgatgggctgaacagcagggtgggtaagacagagcaaagaaacagtgaacttgttgatagaacaatagaaattatataatctggacactagagagaaaatagacttaaaaaaatgaacagagccttgggaacatgtggggttgtaacaaaagatcaaacatttatgacacagaatatcaggaggagaagaaaaagaagatgaggctgaagaaagtattcaagggaataa

SEQ ID NO: 915880 - DNA, 603 bp, Homo sapiens
tccccgtgtgtatgcctgtgtgagaatatgtgtgtgtgggtttgccatcgaaggaaaacctttattttggctgctaacatttggaaacatttagagaacaaacaatatcttttaaaaaacatcaaaggttcaaaaaaacaagacaagaaacaaactgttgtaaaatttcaactcctctaaatttgtcttaaattgaacttagaactaatctaataaaaatagtatgaagtttcaatggtgtgttgttgttgtctagtattttttggcattgttttttaaaaaccagtcaaaatttattcagctaaatattacattatttgtacagatttataataatagcttacagaagtgaactttattgttttccatgtttctattcatgtccaattttgatgacagtttaaatcatagtggacctgttatttaaatcaaaatataatacttatgcatataattttagagggtccaatgattttgaaataatgtattcataagagctattttaaatraatgtatatttaaaaatacaattttagaaattatagtactataaaacttcagaaagagaaattgcacatcaattaaataacagtagcttaacta

SEQ ID NO: 915881 - DNA, 608 bp, Homo sapiens
ggggaaccacttagcccagcctcatccgacatgggcatgaaatatctgacatgtttaagaaaaagggagaaatttggtgtggctgcagtrgaggatttcagagagagcacagcaacatacgaggatggggatgaaagctgggctcagatcaacaaggtccttgagtcttgctaacaaggttggattttcatttttagagatttcagagtaattgaaaatttctaagaaatttttaaaaatcttaaataacaccaatcacagaaaacttggtgatgaaaataaaaggctttattgggaatccaaatacccacattgggattcttattcaaccatttactggacgtaaacgtcaacctctctggaatttgttttatatttttctgtgggtaattaaatgaaatgttaggggaatagaaaagtaaatgagataatggatgtgaaagcactttgccaacaataacatactgcaaaaaaagaatgcatccacacactcgattttgcattgcaaactctgctaaaatggaataagaacaaaatctgttatcacaggggcagcctcctccttaagacacaaaagtccaatttataattttattttaagaaacttt

SEQ ID NO: 915882 - DNA, 607 bp, Homo sapiens
ttccagaaatgcctctcaggctctatccaatgcatacatttttttcatattccttggaatctgggaaccttcgctttctctagattttagatttctatcccagtgtttctggttgtgggatccacgccaatgaagcctcatttatctcctccacttcttgttagttggagttctgcagagaacttggacaatcaaaaaactatgggcttggcatggatgtgaacttcaagtctaaggaggtcaaaaccatctgaggcaggagcgcactttctgagtggggtgagatggagaaggtcattccacacctgaaagccatagctgggatgtggacaggaagggaaagtgtttgttcagcatgtgggaacttgaaaatataggtttgttctcagcatcacttacaaatgtgtctgaagcctatggagggatcttaggtgttggcagtgaagagggtacactgccatctgcggatggaggttacagtcagggtcacgcaggactcaggccctaacatgggcctggaatgcacagccctgcytgatggcatcctcacagctgtgctaacatgaaggaaattttaaaataataatggtctgagttcccatgaagt

SEQ ID NO: 915883 - DNA, 611 bp, Homo sapiens
caggagtttttattctaaatgtgtgcacttttgcaattctgatgccaccagtatctcattaaacaagaatcttcatctgaccagtgtgtcttttatttacaacacacaaaaaagcgaaacgtggtaagtgaaagaagcttcacaaagctgggtatgatcatttttgccccttcttgatatgattttcttttcttcttaattcttcagagaaggaagtattaacatcgtatattaaatgcagcatctagctttgtgttcacgtttttctaatttaacacattgcaattttagtccttcaaaactataaaaaaaatcttggattaacctcaaaggaaaaatgtatgtaggcaaatgaagtccatctaaagagagtatttctccaatatggtatcacttcagtgtcaaataatttcaccactcacaacactagtccagtgctaagaaatgagacccagaactagtgtccagatacatttgcacatacagatatacaaacacatacacatgcttacatatgtacacatatacatgtgtgcatgcatgcaaatacatacatgygcaaatacatatatacatacacacacatatatacagatacgcacatgcatata

SEQ ID NO: 915884 - DNA, 523 bp, Homo sapiens
aaccttcacccgacaagctctgtccaaccgttataaacattaaagagacagaatccttccccmctccttgtagactaaacaaccagatttgaaattccacgtaaacggcctctttctgcagatgtgcaccaacaacaacgtttagggggaaaaggtgggcaatggctctgttcataactctggtaacttttggccttggtgtgagtgggctgaggttattagcgtaaaaattaactggaggtatttccaataaaatcaccaggtttaggggactggacatagttgctttcatgcagaaacccatgtgtcctataggaacacaacttgatgcttgagagattcttttttcttttctttctttcctttttttttttttttttttttttgagacagagtctcactctgtcgcccaggctggattgcactggtgcgctcatggctcactgcaaccttgacctccccaggctcaggtaatcctcctacctccacctcccaagtagctgggaccgcaggcgaaggccac

SEQ ID NO: 915885 - DNA, 633 bp, Homo sapiens
tctcgtaaagatacccgcagtgccatattcattgcagcattactcacaatagccaagatatgaaaggaaccaaagtgtccatcaatggatgaatacataaaataaattgtggtggatatatacaacggaatatcatttagccttttttttttttgagatggaatctcagtctgttgcccaggctggagtgcagtggcatgatctcgactgactgcaacctctgcctcccaggttcaagtgattctcctgtcttagcctcccacatagctaggattacaggcacccacgaccacaccccactaattattaaatttttagtagagacgggctttcaccatgttggccaggctggtctcgaactcctggcctcaagtgatccacctaccgtggcctcacaaagtgttgggattacaagcgtagccaccatgcccggcccatttagctttcaaaaagagattctgccaattgccacattatggatgaatctggaggacgttatgctaagtgaaataagccacacacagaaagacaartactgcatgatctcacttatatgtaaaatctataacaaacaaacaaacaaagactcaatggggaaatggggagatgtaggtcaaagaatataaagtagca

SEQ ID NO: 915886 - DNA, 604 bp, Homo sapiens
gtatttttatcctaaacagctacattttattcttctatctctccaaatactttcactaaaattaaaaagaaaactaactcaacaaaagtgttttgatgatttttcaacttaactgccaatttcccccttactggtattaccaaagttaataattttgtaaaactccagagtgaatcaattatcttttggtacttaaatgccaattattgaagataaaatgaagaaacaagaaatgccatctcaataagctataaatccaaattcactgaatttaaacatcttaattccaccaaacttaaagttctaatacaatgaacttagaaaaaccaacctcactttgaaaagtattgtcagtttaaagctggtagcaataagtaactgccttttcccctcactttcttctttcctcctactctgcctatttctggtccatttccatttccatattacttacatatcatttgataaaggaagaactggtgaaaaagagaagagcttcaccttatctkcctgcctttccataaagagcatttatcttgttttcattaaggtttacatggtcaacattaaacccttgagaacagcaacattttctacctgtgaa

SEQ ID NO: 915887 - DNA, 669 bp, Homo sapiens
gttcttggactgctataaagaaatgcctgagactgggtactttataaagaaaagagttttaaggkgctcacggttctgcaggctgcacaggaagaatgatgctggcatttgcggcctctggggaggcctcaggaaacttacaatcatgtcggaaggaagaggtgagaagcaggcacgtcacatgacaagagcaggaggaagagacagagggggaggtgccacacacctttaaacaacccgatctcgtaagaactcactcactatggcgaggatagtgcatggatggtgttaaacaacttatgagaaattcgtctccataatcctatcacctccttccaggccccaactccattattaggattacaactcaacatgagatctgggcagggacagagacctaaactgtatcacccatgctaactgctgaggcttctgaagcccttcgtagggtgccagaagccacctgtctggtcatcgtgcacacacctgtttccacctgagatgaccaggctgatgtggggctgactgcttctcacctgcctggcatggggttcggctgtgtctttgctagtggtgcctggaacattacgggcacggaacatgcattttcttgtgggccgtgaaggtgcagaggccacttttcttgggtctccaggtgaaccttgggac

SEQ ID NO: 915888 - DNA, 582 bp, Homo sapiens
atgaggtggttccctccttaactcaccagagtgatgtcagaggagtcctgctataatacaagatttcaataagatccagaatcttatartaacaccaaaaatgcttaggtttcagtaaaaaattacctgtcataccaacagaaagagctaaaactgaatgactaaagacaaatatcaacactgatatgacccagattttataattatataaggaacctaatgcagcctgaaacaaatgaagaaaagtgctaacaaacaaatagtaagcctcagcaaaaaatcagcacttatggagaagaactggaaaaaaattcagaactaaaaattttaataactgaaataaaaaactcaatcgatgggctgaacagcagggtgggtaagacagagcaaagaaacagtgaacttgttgatagaacaatagaaattatataatctggacactagagagaaaatagacttaaaaaaatgaacagagccttgggaacatgtggggttgtaacaaaagatcaaacatttatgacacagaatatcaggaggagaagaaaaagaagatgaggctgaagaaagtattcaagggaataa

SEQ ID NO: 915889 - DNA, 601 bp, Homo sapiens
tgcagcggttagaaaaagtacacatactgaggtttctttcaagattatatatagtattattcaaaagtcttattgtatatgaaaagtgacaagatttttgcaatrtgaaacaacagtagctagctaatactctagttacctttacagattgtctagttggtcacattataccttaatttttcaggatccaaccaaggcctggttaactcttactggcaatgtttgaaagggatgaaagaggtcctatgcatattactctaaattaatcttagtgcaggaagacaagtcatatttgaataactttattttgtatccctagctactgtcatcctagtatttgaaaagctccttttctcccaatgttcagaaagtcattttccaaacttgcaaatattaaaacctattcatgtctaatacttttctacttggtctatttccatgtcctgtcaatgacctatcaattaccctattcaattacccatgtcacttgagatttctcccaccagaatttaggttgcatattttcacagggcaatttattttaaaatcagaatggtccataaaactaatagctttgtgtgcacagacctaaaagatttgt

SEQ ID NO: 915890 - DNA, 598 bp, Homo sapiens
aaaaaaaaaaggaaagaaactaggtcctatttttcatgactaagaagttgacaatggtctttccaaattaagactcggcatctttgatttttgtaaacatatcctggagatcgaatgtgaacatttgatggctgatgggaagaattgaggaggattaggggagcacttgactttgccatgattctcaagttaaatccttggacctcttaaagatgttgttgatgaagctgctaaaatggtcaccagatgaatataaacaagtaggacccgcagtaatttccaggctaattttgtgcacgtgcgtttaggggcgagtcaaattaaatgaatgaggagctgatgttcatgtgaaagtaattactctcctccagtagaaatcctaatcctacaagtaactgcagaaataattaatcataactaagaagcaaaccactctcagggagaaaagctgtatctgaacttccacgtgctcttggaggatacgggtgattcacggcataagagtcatctaccaagtcatctgcaagagcgrgtgcagcttccaagagggtctgagtcagaacagataaaaggaagttcttcttaactcagaagattt

SEQ ID NO: 915891 - DNA, 683 bp, Homo sapiens
agttcctgtatccagagtcaaacctaaactcaacagtgggtattccaggcatatgtcaccgtttgagccctttgcccatcacagggtctcacttgttccacacaaggctcctcatggctccccacttgcaccccctgttttcctgccactctgattttttttttttttttttgagacggagtgtcgctctgtcgtccaggctggagtgcagtggcaggatcttggctcactgtaacctccacctcccaggttcaagtgattcttgtgcctcagcctcccaagtagctgggattacaggcatgcgccaccacgcccatgcctagctaaattttcagattccacccgcctcaatctcccaaaatgctggtattacaggcatgagctaccactcccggtactgccactctgaatttgatgctctcctctgccaaaatagtcttagaattgcaaacccacatgccacagatgtctctgcgaggcccttcatgaacccgttcctgaccttccttcatgcttagaatcatgggtatcttaccgtgtgatgctttgtagctggttattagcatacatgtgcrtctctgtccattagattgtaaaatgctggactgaggcactgtgtccaactccttccatctgaattcttcacagtgcctgggacattttgggccgcggtaacaggaaca

SEQ ID NO: 915892 - DNA, 622 bp, Homo sapiens
acataggtaaatgtgtgccatggtggtttgctgcatctatcaacccatcacctaggtactaagcccagcaagcattaactgtttttcttgatgctctccctccccatccccatccctgacaggcctgagtgtgtgttgttcccctcgctctgtccatgtgttctcattgttcagcttccacttataagtgagaacatgtggtgcttggttttctgttcctgtgttggtttgctaaggataatggcttccattattccagcttcatccatgtccctgcaaaggacatgatctcattcctttttatggctgtatagtattccatggtgtatatgtaccacatttgctttatccagtctatcattgtgggcatttgggttgattctatgtctttgttatgtgaatagtgctgcaatgaacatatgcatgcatgtatctttgtaatagaatgatttatattcctttaggtatatacccagtaatgcgattgctgggtcatatgatatttctggttctaggtctttgaggaatcgtcasactgtcttccacaatgattaactaatttacattcccaccaacagtgtaaaaacattcctatttctccacatcctcgccagcatctgtt

SEQ ID NO: 915893 - DNA, 618 bp, Homo sapiens
ttttgtttttggaccttaggtacaaagaattaagaattaactcctcggccaggcgtggtggctcacacctgttaccccagcactttgggaggctgaggaggcaggatggcttgagtctaggaatttgaaaccagcctggttgacacagaaaaacctcatctctacaaaaaatacaaaaagttacccaggcgtggtggcatgcgcttgtagtctcggctacccaggagactgaggtggggaggattgcttgagcctgggaggtggaagctgctgtgaactgtaatcttgccactgcactccagcctgggcaacggagtgagaccctatctcaaaaaaaaaaaaaaggaaaaaaaaaagaattaacttcttatttcatagcatactaccattgtcagtttatagaaggcctttttcttgttttaattaattttgtttctttgtaatctgttttagataacgaattaccttaaaaataagaataaacaaggccgggtgcmgtggctctcacctgtaatcccagcactttgggaggtcgaggtgggcagatcaattgaggccaggggttcgaggtcagcctggccaatgtggtgaaaccttttctctactaaaaatacaaaa

SEQ ID NO: 915894 - DNA, 557 bp, Homo sapiens
tttctgtgtctggcttatttcacttagcttaaggccataagtaccaggggcctggatttcaacctcacccctattgtttattgctacttgggtcaaattatgtagcctccctgtattaatctgatctcacgctgctaatgaagacatatccaagactcagtaatttataaaagaaacaggttgaactgactcacagttcagcatggctggggaggcctcaggaaccttacaattagggtagacggggaggcaaacacgtccttcttcacatggtggcaggaagaagaagtgccaagcaaaaggggggaaaagtcccttataaagtgatcagttctcgtgagaactaactcactattaccagaacaggatgggggaaaccgcctctatgattcagttatctccacctggtccctcccactacacatggggattatgsggactacaattcaagatgagatccaggtggggatggagccaaaccacatcactcactgaacctcattttgtttatacttcattttgagatagtatttgctctgcctttctgataaagctat

SEQ ID NO: 915895 - DNA, 557 bp, Homo sapiens
tttctgtgtctggcttatttcacttagcttaaggccataagtaccaggggcctggatttcaacctcacccctattgtttattgctacttgggtcaaattatgtagcctccctgtattaatctgatctcacgctgctaatgaagacatatccaagactcagtaatttataaaagaaacaggttgaactgactcacagttcagcatggctggggaggcctcaggaaccttacaattagggtagacggggaggcaaacacgtccttcttcacatggtggcaggaagaagaagtgccaagcaaaaggggggaaaagtcccttataaagtgatcagttctcgtgagaactaactcactattaccagaacaggatgggggaaaccgcctctatgattcagttatctccacctggtccctcccactacacatggggattatggggactacaattcaagatgagatccaggtggggatggagccaaaccacatcactcacygaacctcattttgtttatacttcattttgagatagtatttgctctgcctttctgataaagctat

SEQ ID NO: 915896 - DNA, 609 bp, Homo sapiens
aactcccagtgtgactgtatttggagctagagcttttaggaggtaattaaggttgaatgaggtcttaagagtagactcctaatccagtaagaatatggcctcctaaagaaaggaagagagagaaagagatctttctctgtatttccataagcactcaccaaggaaaggccatgtgaggacatactgagaaggctgccatctgcaagccaggaagagagccctcagcagaaattgaatcagctcacacagcttctaaaactgtgagatagaaatctctggtatttaagccacccaatttatgatattttgttatggcagtccaagcagactaacagtctcaaatccaaaattatcaaagaaaagatcgttgttccaggtgaagtaacatccttcttcttggatcaattaactgtgtttcagggtggtagaatcacatgtgaaccatgtgtgtagtggggagttcctacacaaggggtattgttaggcaggaaacccaatagatgcctatctcactatctatttctacatgtcataggattggtttagagaactatgacactcctaatatgatttttaacaarttatactaaataaagaatagagtctttc

SEQ ID NO: 915897 - DNA, 493 bp, Homo sapiens
acttttttactattgcaaggacagcaccaagccatgggggactcaacctcatgaccaaaacacctccmaccaggccccatctccaacactggggattaaaactcaacatgaaatttgggtggggacaaatatctaaactatatcactctcccagacagcctaatcaaaagctcagtgtcggccgggtgcggtggctcaagcctgtaatcccagcacttagggaggctgaggcaggcggatcacgaggtcaggagatcgagaccatcctggctaacacggtgaaaccccgtctctactaaaaaataccaaaaaattagccgggcatggtggcaggtgcctgtagtcccagctactcgggaggctggggcaggagaatggcgtgaacccgggaggcggagcttgccgtgagctaagatcacgccactgcaccccagattggcgacagagcaagactccatctcaaaaaaaaaaaaaaaaaaaaagctcagtgtca

SEQ ID NO: 915898 - DNA, 577 bp, Homo sapiens
acttataagtgagaacacgtggtatttggttttctgttccttgcattaatttgcttaggattatttataatagccacaaagaaaatgaaatacctaggaatactggtaacagaggaggtgaaaaatatctacaaggaaaacactgctgaaataaatcaaagataacagaaataaatggaaaaacatcacatgctcatggattagaagaattaataataaaatggccattctccccaaagcaatttacgtattcaacattatttctatcaaaactaccaatgtcattcttccatgaattagaaaaaactaatataaaattcatgtggaacaaaaaaggagcctgagtagccaatgaaatcataagcaaaaagaacaaagctggaggcatctcactactggaattcaaactacaccataaggctacagtaacaaaaagagcatggtacaagttcaaaaacaatggaacagaatagaaaactcagaaataaagctgcacacctacaatgatctgccctttgaccagggcaacaaaaccaagcaatgggaaaatgaytccctattcaataaatggtgctgg

SEQ ID NO: 915899 - DNA, 674 bp, Homo sapiens
tctcctcctcagcctccccgccccgggctgcagcggccgtaaaggggatgcctcctctcagtctgtgtcagcacatggagatcastcaggggagaccgcttataattatttgatgcagatggtcacttcattagcataaacactaagcagccagttacagggtgttgccctgcctccccagccctcttcctgagccggccttcaggctatcaggcaatatattttaagcaaaaagatagcctgctcataccactctggaggcctcttttgtgagacatgcagccatttcttttacgaaatcctaaaagagtgacaagtttctgggttcatgggacttaacggccagatgaagagactcacctattcctaaataaggtcatcagaatgcttgaaacttgtaatgagagctggcaggctcctcagctccccttccgtgggttgagcctctctgtatttgtggcaggtcctgaattagagaaatgggctctcacagtgacactgagctaaggcttggtggtccacagcctcattttgacaactcacctcccccagcacaaagaaaggaccctggggagcagggaaagcctagggatgcagggctccaaattttaaagtgaaaaagaaatgtaagagacaaacaagtccagtgggttttcaatattttttagtaggat

SEQ ID NO: 915900 - DNA, 647 bp, Homo sapiens
ttattgtctctgctttcatttcttgatgaaacctctggactaagcacacatcttccttgtttatctctctcaaaggagtgtggagtgcttcatctggacatccacgggaagaaggaagacatgaggtaggtggtgtccttgtgttcaagtcaataaggaagaaaatgttgtgaacaaacagtgctatgaagtaaaggaaggaaactccctggcaggcatgcagccatacctctctcaggacacttgcacttgggagtagacacaggctgttggttcagagaggaagagttgatctttttacagttaacatgtccctgaaatgaatccatcttctctaaggatcgccattcctgccatggttttggaattcgtaagctcttccttaggcagatgttctcaaactctagtctcagagcctcttcactcagcgattatcgagaaccccaaagagcttttatttatgtagattattagtgatgatattagaaattaaaatggttcacacctgtaattccagcactttgggaagccgaggcaggcggataacttgaggtcaggagtttgagatcagcctggccaacatggtgaaaccctstctctactaaaaatacaaaaattagccaagcatggtggctggcggctgtaat

SEQ ID NO: 915901 - DNA, 410 bp, Homo sapiens
agacagggactctttgttcctctctgtatcttggcaatttgcacagtgccctgcccagagcaggagctcaggaaatgaatggctgaatgcgcaggacagggacccacagggcagtgccataagaaagtgctggaggccaggagcagtggctcacacctgtaatcccagcactttgggaggccgaggcgggaggatcacctgaggtcagaagttcgagaccagcctggccaatgtggtgaaaccctgtgtctaataaaaatacaaaaattagcccaagtgcggtggcaggtgcctgyaatcccagctactcaggaggctgaggcaggagaatcgcttgagcctgggaggtggaggttgcagtgagctgagaccatgccactgcactccagcctggccaacagagcaagact

SEQ ID NO: 915902 - DNA, 597 bp, Homo sapiens
ctaccattgactttcttcacagaattagaaaaaacgacttcaaatttcatatggaaccaaaaaaagggcccatatagccaagacaatcctragcaaaaagaacaaagctggaggcatcatgctacctgacttcaaactatactataaggctacagtaactaaaagaacatgggactggtaccaaaactgatatatagaccaatagaacagaagagaggcttcagaaataacaccacatgtctacaaccatctgatctttgacaaacctgacacacacaagcaatggggaaaggattccctaattaataaatggtgttgggaaaactggctagccatatgcagaaaactgaaactggaccccttccttacaccttatacaaaattacctgaataaagacttaaacagaaaacctaaaaccgtaaaaactctagaaaaaaacctaggcaataccattcaggacataggcatgggcaaaaaagatttcatgactaaaacaccaaaagcaatggcaacaaaagccaaaattgacaaatgggatctaattaaaccaaagagcttctgcgcagcaaaagaaacttgtcatcagagtgaacagg

SEQ ID NO: 915903 - DNA, 648 bp, Homo sapiens
cttaaatagacatgcattagtcccttttcatgctgctgataaagacatacccaaaactgggaagaaaaaaaagaggtttaattggactcacagttccacatggctggggaggctgcagaatcatgayaggaggcaaaaggcacttcttacatggtgacggcaaaagaaaatgagaaagaagcaaaagaagaaaccccaataaacccatcaggtcttgtgagacttattcaccatcatgagaacagcgtgggaaagactggcccccatgattcaattacccgcctgggtccttaccacaacatgggggaattctgggagatacaattcaagttgagatttgggtggggacacagctaaaccacatcattccaccccggcccctccaaatctcatgtcctcacatttcaaaaccatgatgatccaggatcatcccctcatctcaatatccttagtcacatctgcaaagaggtagtcccagtagggattctgtgtgggagcttcgaccccacatttcccttccacactgccctagcagaggttctccatgaggcctccactcttgcagcaaacttttgcctggacatccaggcatttccacacatcttctgaaatctaggcagaggttcccaaacctcacttcctgacttc

SEQ ID NO: 915904 - DNA, 642 bp, Homo sapiens
gcttactgcagcctcaaactcctgcactcaagcaatcctcccatcttggcctcccaaaatgttgggattacaggtgtgagccactgcacccaacctggtttttgtttttttgttttgttttgttttctctgcttttcaaatatttttggttctcagttggttgaatctgcaaatacagaaccctcgggtatggagggccaaatgtatagcacattttttcatggggttttgttgaaatggatgacaaagtaatgaagcgattgctggacagaaatgtggagttaaaggtttgtttattagaagatggggaaagtaatacatttgtctgctgaagggaatgatcctatagaaaggggtacagagggtagaatggctagatatttactcccgattaagtgagagcagacagaacctatcggacaagtggaagggttgacctgagataggaacatttaaggttcatccccaacaacaggagggacaccagatggaggtgagtaggtggtagatttgggaatgagagcagaagaaagttaaataatgtcttcacctgagcttgtagagaagcaggtgtgggaggcttgaggaaagtgagaacaggtgtctaggagagctagayagtgaattaactagcgaaatgta

SEQ ID NO: 915905 - DNA, 522 bp, Homo sapiens
ggcattatgagccttattagtatctaaattaagtaaagaccctccccccaaagaaaagattatagaaaagcaaaaatgaacmaatatttgttaaaaattacaacaaaagaggttaaacatagttcactgttacttcaagttctagtaaaactcttgagataattaaaaccaattaaaatgaagaggaaccataaaatattgcctgtaaaacgtattgaaaattaattttatttacttttttttttttttttgagacagagtctcactctgttgctcaggctagatagagtgcagtggtgtgatcttggcttacggcagtctctgcctccctggttcaagtgattcttctgcctcagcctcctgagtagtttggattacaggggcccaccatcacgcctggctaatttttgtatttttagtagagatggggtttcaccatgttggtcaggctggtcttgaactcctgacctcaggcgatccacctgccttggcctcccaaagtgctgggattacaggcatgag

SEQ ID NO: 915906 - DNA, 640 bp, Homo sapiens
acagatctccagggcagtgtcactgtgcagccaygttctttgctacagcaaaacaaaaggcaccttggctcctgtttgcagtaagttcctcattttcatctcacagcctctcaatctgatccttactgtctattttcctgtgagccttctgatcacaagtattcaacaattctttacaaagatccaaacttaccctcatctccctgtctttgaagtcctccaaactctccagaactccatctgctacccccttctgaacctgcttctacattatcagctatctttgtcataccctggcaatgtggtaaaggaagacaagcccattttccggggaaaaattcaaggaggtttcagatacttgaataaaaagaagctgagtgctgattgccaagacattagagagaaggccttgaagacatttaatagatccactttgcagtaataattttctccatgatcataaagaaaagaggtttaataggttaatgattctgcaggctgtaaggaagcatagtggcttctgcatctgacaggactcaggaagcctcccaatcataccagaacgtcaaggggcaaggagatgtctcatttggcagaagtaggagcaagacagagaaaggaaacaggtgtcatgccccat

SEQ ID NO: 915907 - DNA, 607 bp, Homo sapiens
acagactacaaaatattgatgaaaaaattaaagatgtaaataaatacaatgaaatgttcatgaattagaataatcattattgttaaaatattcatactacccaaagtgatctacaggttcaatacaattcctattaaaatctctatggcacctttttcttagaatagaaatcctaaaattcacatagaattccaaggaccccaaatacccaatacaatcttgagaaagaaaaacaaagctagagatctcatactttctggtttcaaaacatatcataaatctacagtaacaaaaacatggtactgctataaagactcaaatatagaccaatggaacagaatagagagccccaaaataaacccacacatatatggtcaattgatctttgaaaaggatgccagggttacacaatgtgaaaaggagagtctctttttcaaatggtatcagaaaactgggtgtctacatatgaaagaatgaagttgaacccttaccttatataatgtaccaaarttaactcaaaatggattaaaaacctaaacataagacttgaaactataaaactcctagaataaaatttaggaaaaaactttattacgttggacttggc

SEQ ID NO: 915908 - DNA, 654 bp, Homo sapiens
taccaaaacttatagagtacagctaaaatagtccttagtgaaaaatgtaaatctgcaaacgcctaaacttaaaaaataatatgtcatatatgaaagctaacttccatcttaagaaattgttaaaaagagagaaaaatgtaacataagcagaagaaggaaataataaatattgagtggtaattaataaaatagacaattaaaaggttatggagaaaattaatgaaatcaaaatttggttccttggtcaacaaaatttacaatcctttagctagactgacaaagaaaaaaggagaggcaattcaaaatactagcactgaaagaaggaacactgcagtcattatgaaaattaaaataattaaaaaggaatactatgaccaactatatgtcaacaaattagataatttagatgaaatacacaagtttcagaaaagacacaaactactaaaactaactcaaggaaatctgaacagagcagtaataactgatgagatggaatttgtaattgtgaaacttcccactaaggaaagcctaatgctagcttacttaattggtaaattatattagttaagaaaacattaatactaatcctcataacctcgtccaaaacacagaaaacaaaggaacayttcctaactcatttgatgagggtagtat

SEQ ID NO: 915909 - DNA, 612 bp, Homo sapiens
tgtctcaaaaaaaaaaaaaaaaaaagtatctgtttatgacctttgcccactttttaatggggttgtttggctgttttcttgtaaatttgttgaagttccttatagatggtggatattagacttttgtcagatgcatagtttgcaaggattttctgccattctgtaggttgtctgtttactctgttgataatttcttttgctgtgcagaagctctttagtttaattagatcccatttgtcagtttttgctttgttgcaattgctttgcccattcctatgtccaggatggtattgcctagattgtcttccatggtttttatagtttagggttttactcttaagtctttcatccatcttgagttgatttttgtatatggtgtaaggaaggggtccagcttcaatcttccgcatgtggctagccagttatctcagcaccatttgttgaataggggatcctttccccattacttgtttttgccagctttgtcaaagatcagatggttgtaggtatgcggccttatttctgggctctcaattctgttccrttggtcaatatgtctgtttttgtaccaataccatgctgttttgtttttttactctagccctgtagtat

SEQ ID NO: 915910 - DNA, 665 bp, Homo sapiens
acctgttcaactcacacctttcccaagagtctttggtggccaggaacaagtcctcgtrtgctgtaatcccatgcatggttctcaactttctctctgctcagcccagcatttgtgctttccctccatttgctctaaatgctctccttccaaggatctctgcagaatgcattagtcttcttggtctcccagtccctcggtggcagatgttcctcctagctggtctagtcggccatcttgcctccatctctccagttccctttttggaagtcaaatttatttggtataatatagtcattccagtcttccagtacttactttgcacagtttaattttcaatcatatgtacttttttattgtgttgttttggttaaagcatgtctcttgcaaacagcatatagttgatattgctttttcatttattatgaaaatattttaattagagtgtttaatttgataaaatttaaagtagctaacaatgcagttaatttagttccaccattttataattgatttcctttaggcttcttgttttctgtttctccttctgtgttttctttgagagtaactgaatatttaaaattctatttaatttatctttggaatgtttagctctgtatatttgtattatatcatgatggttactctacaggttaacatatatatcc

SEQ ID NO: 915911 - DNA, 611 bp, Homo sapiens
gctctctgcctgcgatgggcactatgctacttctctttcctcttgctggaagaagtcaaaccctactctccaacccatgcagccctccaccccagcagatgcggctctaatagraagtgtccccagttgtagcaaacagctaactttctatatgcactcaaatgtggtggcatgctcactcgcgaagtgttcctggcatctcagctgagaaaccctgtaaactagacttgcagttccccccagcgttcaaacgctgggatttccagaggtggggggaagatgaacggatcaccccttgaggctgggaggactgctgaaggcttagaggagcaagtgggcaccagggttcagctagaaacattcaccctcctggagacagggggacagtgccaaccattctcagtcttttttttttttgagatagggtctcactctgtcacccaggctggagtgcagtggcacgatctcactacagtctctgcctctggggtttaagcaattcttgtgcctcagcctcctgaatagctgggaccacaggtgtgagccaccacgctccactaatttttgtatttttggggttttgccatgttgccaaggctggtctggaactc

SEQ ID NO: 915912 - DNA, 564 bp, Homo sapiens
tgttcaacccctcgttcaacatgggacaggagttttacgtcttttagtctccctgtacccattgtcaggcacctgtcggctctgatctggagcatctgacctgagaatcattaggttctattgaaacatgaagttgttaaaagaaaagccccagaaagaaacaaccaagcatgttttttgactctatgtgaatttaaaatttttaaattttattttagtttcaggggtacatgtgtgggtttgttataaaggcaaattgtgtgttgtgggtgtttgaagtacagattgttttgtcactcaggtaataagcatggtacccaacaggtagtttttccatcttcaccctcctcccaccctccaaccctcaagtaggccctggtgtctgtggccttctttgtgtccacaagtactcaacatttagctcccacttataagtgagaacatgagaacatgcrgtacttggttttctgttcctgtgttagtttgcttaggataatgacctccagctccatccttaatgtgaattttaaaatccctttattctggagagaagctacactgtac

SEQ ID NO: 915913 - DNA, 595 bp, Homo sapiens
ttaatactgagtgtcaacttgattggactgaaggatgcaaaggattgtycccgggtgtgtccatgagggtgttgccaaaggagattccccttttgcctcagtgtggccgtggagaggcagacccaccctcattctgggtaggccccatctaaatcagctgccagcacagttagaataaaacaggcagaagaaggtgggagaagccaactcgctgagtcttctgggcctcatctttctttccctgctgggttcttcctgccctccaaattcttcagcttttggactctccgacttacagcagtggtttgccaggagctctcagaccttcagccacagactgaatactgcaccataggcttccctacttttgagattttgggacccggactggcttccttgcacctcagcttgcagagagcctattgcgggacttgtgatcatgtgagtcaattctcctaataaactccccttcatatttacatcctactagttctgtccctctagagaaccctgactaatacagtcatgatatcaaaaagtcacctgcatgcattggtttattgcagcacaattcacagttgcaaagatttggatc

SEQ ID NO: 915914 - DNA, 528 bp, Homo sapiens
tttttctaatgggtacaggaagggactgggtttggggaggaagcccccagaggcgaagtgccactgtcactccactgtattgggcacaccctgtcacctgactcacmgtgaggctgagctggcccctgctgggttgagaccccccctccatgctgtccgctttgggaggaagtcgctctgcagccctggcctcggggtgggggttgtgctctacctcctggaagacacagcagtgacagagactgtttggaatcctgctgggaaaggagctttgtctcttctccccgtgtatgtgtcgctcatgcgccggtgttggtctggacagatggatgtttagtttacacacagcgttacttgattttggtgccgaaactgttccagcattggccgctgggagttcttgcagttgcccccagctccctttggccccattgacgtgggggtcgtatttttagctctttcccactgccgagcaccaacaggtaacccaggcgcatcttggacatctcctgccagtcctgctgtttc

SEQ ID NO: 915915 - DNA, 602 bp, Homo sapiens
gtttttctaatgggtacaggaagggactgggtttggggaggaagcccccagaggcgaagtgccactgtcactccactgtattgggcacaccctgtcacctgactcaccgtgaggctgagctggcccctgctgggttgagaccccccctccatgctgtccgctttgggaggaagtcgctctgcagccctggcctcggggtgggggttgtgctctacctcctggaagacacagcagtgacagagactgtttggaatcctgctgggaaaggagctttgtctcttctccccgtgtatgtgtcgctcatgcgccggtgttggtctggacagatggatgtttagtttacacacagcgttacttgattttggtgccgaaactgttccagcattggccgctgggagttcttgcagttgcccccagctccctttggccccattgacgtgggggtcgtatttttagctctttcccactgccgagcaccaacaggtaacccaggcgcatcttggacatctcctgccagtcctgctgtttctctagggagccctggcccytgtattgcaggaggtgtgagaccctgagatctggggctcggtgcgcctgtccca

SEQ ID NO: 915916 - DNA, 602 bp, Homo sapiens
gtttttctaatgggtacaggaagggactgggtttggggaggaagcccccagaggcgaagtgccactgtcactccactgtattgggcacaccctgtcacctgactcaccgtgaggctgagctggcccctgctgggttgagaccccccctccatgctgtccgctttgggaggaagtcgctctgcagccctggcctcggggtgggggttgtgctctacctcctggaagacacagcagtgacagagactgtttggaatcctgctgggaaaggagctttgtctcttctccccgtgtatgtgtcgctcatgcgccggtgttggtctggacagatggatgtttagtttacacacagcgttacttgattttggtgccgaaactgttccagcattggccgctgggagttcttgcagttgcccccagctccctttggccccattgacgtgggggtcgtatttttagctctttcccactgccgagcaccaacaggtaacccaggcgcatcttggacatctcctgccagtcctgctgtttctctagggagccctggcccckgtattgcaggaggtgtgagaccctgagatctggggctcggtgcgcctgtccca

SEQ ID NO: 915917 - DNA, 664 bp, Homo sapiens
gggatgattttgacaatagcagaggagcaagagttaggatagaaagagaattctagaagtgacagcatgaacaaaagcatgcagaaaaataaaatccagcacataaaataaggaagacttttttgtattcaagaaatttgtttttacagcagcatctcagtgcctcaaagattatctttaaaaacagctgttacccaacaactacttaaagcttgaaataaaggaaaacattcccacgccaactctgcactctaaatagaagctgaaaagatagatacaaaaataccaaggccactatggcagcctgatttgaagctttttataaaacaaaaagttctgtggtctcctgaaaggctcactcctcttgtttgcacaattgttcagtctctcctgagcccccactgtcgggatagcagggagggaactgaggaaaagcagccgtcttgaaccagagccagcctccaatccctctgcacccatgcaagtgtgccttctcagggacaaggactatgataaaataagaacattatcactatcatgcattgggtgtttaacatggctagaactatccaaagcatcacacagkttatgtcatttccaaccaccccaacaagtgactggtactgtaatctccatttcacagatgaagaaattgagccagaga

SEQ ID NO: 915918 - DNA, 611 bp, Homo sapiens
acacattagataacctggatgaaatttacaaattcctagaaactcacagattaagaatactgactcaagaagaaatggaaaaatctcaatcaaccaatagcaagtatagattgaatcagttattaaaaaccttcccctaaagaaaagcccaagactagctagcttcgctgatgaattctaacaaacatttaaataaaacaacacaaattctaccaaactcttccaaaatatagaagaggaaggaacacttcctaacacattctttgaggccaccatcacttgagaccaaagtcagacaaatatagcacaaaaaataaaattacagaccaaatcaattaatgtaatatatcctgttaataaaatggagggagaaaaccacacatgattatctcaatatatgcagagaatgcacttggcaaaatttaacactttttcatgattaaaaaaacactcagcaaactagaaatagaagccaacttccttaacgtcataaaggacatttgtgaaaaacccacaactaaaatcatcaacaatggtgaaagactgaaaactttaccctaagaatcagaaagaaggcaagkatactcagtttcattacttctgtttaacat

SEQ ID NO: 915919 - DNA, 502 bp, Homo sapiens
aaactataatgtatcagaattccattttgcccataattctttatcttcacttattgacataaactggtaaaaggaaacaggaatcatttagagaggaattagagcacaggaagcctggagtctcctacaatgaccttatcagaaacccaaggaaaaatatgtgtcacatataaaaaataacttgactgtagctcacgttggcaagctaaaatgggaaatgaggaatgatcagagatggttgagagaagggataagatcatctttaaaggaaatcaagagatgcacaaactatggcaggttaaaacagtaaaacaaagttgtactgggtaaataaagagttatgctctatatttaattgacagactagtataaataagtcatcagggattctggtgaaacttttggctagaatgtgcaagctgtcatgctaagctgacttgtggtagcaaagactaatggttttcagtrcacagtgtccattgggaggaaactggaagcaaac

SEQ ID NO: 915920 - DNA, 460 bp, Homo sapiens
atccttatcttaccacttctccttgcaagccaactgtgtcagttgccagctctactaaactcagagcaaaatgggcattctgagctgccagagagggtggcaagctacagaatggtaaatgtctgttagtacaatggcttcttatgctgttaaaactgcagcataaggattgggcagatgagcatgtggcttacagtgtcccaagtgagaccatatctgttacaccagttgctcttcatcacaattaaggatggagaagggccaagtttggtggctcatacctgtaatcccagcactttgggaggccgaggtgggaggatcacctgaggtcgggagttcaagaccaacmatgatcaacatggagaaaccccgtctctactaaaaatacaaaaaaaaaaaaaaaaaaaaaattagccgggcatggtggcacattcctgtaatccagctacttgggaggctg

SEQ ID NO: 915921 - DNA, 627 bp, Homo sapiens
agatatagtatattatttcaggtagtattagagaaattttgcagracaattgaggtgatagaggacagtggatagaaaaatgccatattttaaaaggaataattaaagcatacagttttgtaagtttgacaaaaagtactgactaaattcttgtgcagattattaaaattttttgattatttagaataattttaattgctaagcattggcaaggctcatgttaaaaatagggcaatgtctctattctctgttgggtgagtatctttagagtagaacattactgatattcatatttgtaacttttctttgtgcttcagaagtgccaaactctatgcatagcacattacacataaaacccttataataccttctcacaacaattctgtaattttggaactctgttatttctattttacatataaggaactaaggcctagagtgagtaactactttgcttatattcaggcatcggaaaagcagtaaatttgttttcaaagcacaataatctgactcataaacctgtaatccaacttctaaattataatatacaaaagatatttcacagacttctgcttctagttatgtcaaagtaaccagaaatatgtatcatactcatgttgctgatta

SEQ ID NO: 915922 - DNA, 611 bp, Homo sapiens
gggacttgctcccagcagaaatgagttcataacatcttgtcatataagatagcaaggaaggcataatactagaaactactaacaccatgtcaaagacaccggagacaaactgaagagaattctacaggccaaagatagaaaaatgtgatcaacaaaaataactgcaataagttaacttcgttatccgttacacttattttacacataaaatgtgtttacagtggtgagtttataataaagaaaaataactggtcacctttggagtataacaggatatcaagttattgttttgaaacttagaaaacgcaggtgatgtgtttttacattatctgtggtatcagatacacaagactatgtgtttgataaaatttcgtagaactaaatacatgcacagatgagtgtaagtaaaactggggaagtctgaataaaatccgtgaattgtatcaatgtcaataatcctgggtatgatattgtacaatcattttgcaagatgttaccactgaaggaaaatggcataaaatagacagcaaagaatcwttcttcattatttcctgcaataacatatgaaactacaattatctcaaaataaaaagtttaatttaaaaatcttc

SEQ ID NO: 915923 - DNA, 599 bp, Homo sapiens
gtccagggactaccctttgagaaayactgccccaggatgctttagaaaaatgtgcatggtaaaagatccagaccttggcctgctttcctcccatcttcatgatccctgaaacactcacgctggtcttcctgcaaagaagaccagcaaatagcaggacgaggggaggagggcggggaggatgcatcagcagagagcccaggatgtttcactagcaccaaaggctcaagactagccgtccaagattagccttttaatggggttcttgtctcccatgcatccctgcaggcctcccacccagaggagaatggctgcaggaaatcactctacagtgacagagttcattctcaagggtttaacgaagagagcagacctccagctccccctctttctcctcttcctcgggatctacttggtcaccatcgtggggaacctgggcatgatcactctaatttgtctgaactctcagctgcacacccccatgtactactttctcagcaatctgtcactcatggatctctgctactcctccgtcattacccctaagatgctggtgaactttgtgtcagagaaaaacatcatctcctacgcagggtgcatgt

SEQ ID NO: 915924 - DNA, 587 bp, Homo sapiens
gtggcgcgggccgccgtttccgcaaacagaatcgcgtttggctgtgctggtgagtgtgacggctggaactccggcccttcctttctttgtgtttgtccctcggccgccgtggaggggtggaactggcactcccacccctgacatgggctcacttcgcattagccctgtgcttcactacccaacgcgtgggtctattgccttgtgtcctcagtcccaaggaaaatgggaactccttggggtgggcgggcgctgttcctcctccagactgggcgagcccgggtgggagaagcagctcgaagagctgctccagctcgcgccccagggccgtgctggggaggggcgtggggtccgcaggtttgtcttcagcggcgcttcggaaacctgaaccagaggttgagtaacaggccgcgctaatgacggagggggtgaacttggctggagaagtcccttctcgcctctgtgcgtcctctcgggccccgtggtagagggtcaagcgggcgggtcgggacttasagcttatcccgcttgggctttatcccggcggccctggcggcctgctcgctcgtaccctgaggagctgaaatgac

SEQ ID NO: 915925 - DNA, 500 bp, Homo sapiens
ccagcagaaaccaaatctgtggacctagaggaattaaaaggatttttcttcatttactttgggtggttttgtctggctgggtgtgcctcatactgacaggaagtgtgtgtcaccagaaaagaatttaattctttgcagcaaaaagatggttagtggaaagagagaaaaacactcatgagtgcttctcacagattcggcttcattgtgtcaaactggctccccttcccagttggacccacccagagaagaggtgcccccactcagaatccacactgttccaacagaccaggaatgtgtaggggcctcccagtccaccaagaggccagcttgtttgacccccggtgtataaacctggctttgcctcttgaaagagtaaccacccctctctgtgcctcagtttctcaactgtaaaacttatacgtctgccacccccamtaaaaagtgagtccctgtgagcacaaggacagagctttatacctttctgtatccgtacagcttag

SEQ ID NO: 915926 - DNA, 602 bp, Homo sapiens
tgcatcttcctgcccgctgtttttctgtgttctggccatactgggtatgtttctactccttgactgtgaagcactttacctgctcaggggcttttgtacgtgaggtccctttttytggtcaaccgttttttttttttttttttgagacggagtctcgctctgtcgcccaggctggagtgcagtggcgcgatctcggctcactgcaagctccgcctcccaggttcacaccattctcctgcctcagcctccccagcagctaggactacaggcgcccgccaccacgcccggctaatttttgtatttttagtagagacggggtttcactgtgtttgctaggatggtctcgatctcctgaccttgtgatccgcccgcctcggcctcccaaagtgctgggattacagacgtgagccgccgcgcccggccctggtcagccattcttcatccactttcctctttgcttatttattcttccagtctcagtttaaaagcagcttcatcagggaatttccctaggccctgtagactaagttagatcccctgttacatgttcctgtggggccctgggcttccccttcctaacattcactgcactgttgtcattt

SEQ ID NO: 915927 - DNA, 551 bp, Homo sapiens
aatgtcagaattcgaatattcckggctcggtttgttggctttggaacgcgacaacctggactgcagtccaggatctcacttccttgacagtgggaccttggccctcagccactccaagccatagttcctcctctgtaaaatggggaacatagtatatgcactcaaaattgatgtgacatatatataaggtcatgttggcaaataatttagtacatcccctggccataggaagcacctataatattagtagttatcattactatttttttgcctgtgtgcgaaagtcattaggaaaatcatgcctatctacggcccattctgggtcttcagaaatgttgacacagacatccacttttgccgttgtgtgctaatggcaggagcttgcctggcttcctgctgtgccacatgctgctcttgaggaatgatgataacaggtaccaatagcattgagctgggctctcttgctccctttggccaccttcaccccaaagcaattctggagctcattccgcaatgattaatattatcctggttgaatagagcactgtttt

SEQ ID NO: 915928 - DNA, 686 bp, Homo sapiens
atttcatacattgtgatggttagtttttgtgtgtcaacttgcctaggctatggtatccacttctgttaaacactaatctaaatacaccagtctggatgttgctgtctgatgaggttaacaytgatgatcagtagaccttaaatgaaacagatatcctccataacgtgggtgagtctcacccaatctgttgaagatcttaagagtaaggattaaggaagaaatgggatcctcaaaatttgaatgggtcatctgaaaatactataaatgaagaaaagggaattgtactcttaaattttactgaattttagaagtgtccctttcaccatcatttagagattaaacctgcattgactgaggaaactgtaatgccccgtccccaggtagtttccttgcaagatgctgttaatcctcctcagcgcccccctcccacgactcttttattctagacttgtacctagactcaagttctagcagaaagctgaggtcgaagtgtaccccatgagtagatatgccagaagccaaaagaactacataattttttcaatttatacacacagaaaccctgggaatatgtgagaaataagtattaaggttgtgggatagtaggaacataacgttggatctggctaaatttattgatacaggccagctaagcagagatccttcatttaatagtgcagcatgag

SEQ ID NO: 915929 - DNA, 581 bp, Homo sapiens
tgtaaattggtacagccattatggaaaacagtaggcaggttcttaaagatattaaaaatataactattatataatcctacttctagatatatactcaaaggaaatgaaataattatcttgatatttgcaatctcatgttcactactgcattattcacaatagcgaagatatgaaaacgtgttgacagatgaatgaataaagaaaatgccacacacacacacacacacacacacacacacagaggaatatttttcagacttaaaaaagaaaatcctgccatttgcaactctgtgtatgaacctgtagcatgttaggctaagtgaaatcagatgcagaaatacaaatactgcatgatctctctaattgtggaatctaaaaaagttgaactcacacaaacagagagtagaatgggggttgccagaggctgtggggtaggaaaaacagggagctgttgatcaaagggtacaaagtttcagttacttaggatgaataagttctggaaagmtaatgtagaacatggctactatagttgataatatagtattgcatgcctcaagtttgataagggaaaagatattaag

SEQ ID NO: 915930 - DNA, 599 bp, Homo sapiens
taagtaaagaatagtgatatggtttggctgtgtgccaatccaaatctcatctggaattcccacgtgttatgtgggggacccggtgggaggtaattgaatcatgggaacagttctttcctgttttgttctcatgatagtttgtctcgggagatctgatggttttacaagggagagttgccctgctcaaattccttcttctgttgtctgccaccatgtgagacatgcttttcatctactgccataattgtgaggccttcccagccacgtggaactgtaagtctaataaacctctttcttttgtaaattgcccagtctcaggtatgtctttatcagcagcatgaaaatggattaataaagtcacccttgattttgccattattaaaataaagaatatatattagtttgctcataaaataaaatactatatgagagttaaatgtatttatatgtccaacataagtaacatttaaaaatgtagtattggatgatgwaagcaagtcttaaaatatatatattgtaatgataagatacaattggccattgaacaccacacgtttgaatagcacaggttcacttttttgcagactttattctgcttc

SEQ ID NO: 915931 - DNA, 663 bp, Homo sapiens
tttcaagaatgtattacatgtatccaaacatcacacagtaataaataaatatgtataattattacatgtcaattagaaataaaatgctacttaaaaaataaaaaawttaaatctaaagcaaaatattgacaagaagaatctaacaatcattctcaaaattatttggccaagtagagatattcttcagtaatatgaagctgattttataccaacatatttatgaatataatatgtaagtaaagtagaaaatcaaatgattatattcattgatgctaaaagacatttaataaaatatagaagccactttcaaaaaaattataaatagaagaaaactttaaatgaatacacaataatttggtaaaaccaatagcagtgtttattctaaatggtaaacctcaaaatttatttttataaattcctaaagaaagaatctttttgtctgatgtcaacttaactattctacacctttgaggtcaaaggaaatatagagaaaaataaaatacttttcaatattttgtaatacaaaaaggaataaaattgtctcatgttgtcatgtaattacacacctacatggaagaaattctagtaaatgtctacaacacggaagagaccctagtaaattaataatgaaattattaataatgaataatgaaatgtatgctt

SEQ ID NO: 915932 - DNA, 575 bp, Homo sapiens
cccaagaccacgggaacctaactgtttcatcagcgtgacctggatgtaagatatggaatcaaaagagatcattttggagctttaagatttgactgccccaytggatttcagactttcatagggcctgcagccccttggttttggccaatttgtctctcctttggaacagctgtatttacccaatgcctgtacccccactgtatctaggaagtaactaacttgcttttgattttacaggcttataggcagaagggacttgccttgtctcagatgagactttggaccgtgttcttttgggttaatgctgaaatgagttaagactttccatgactgttgagaaggcatgattggttttgaaatttgaggacatgagatttgggaggtgccagaggcagaatgatgtggtttggttgtgtcctaacccaaatcccatcttgaattttaatccccatgtgtcattggagggacctggtaggaggtaattgaatcatgggagtagtttccccagtgctgttctcgtgatagtgagtgagttatcatgagatctgatggttttataagcatccagcatttcc

SEQ ID NO: 915933 - DNA, 643 bp, Homo sapiens
aactcacatatgcctgtgtattttaactttataccttgaatgtactctatttacaatttaggcaatataatatgactagcataatattacatgaaattatattttcaaaatggaaattatttctcagggattttttttaaaagaaggtttcaaaaagtattttcagttttaaagaaaaccaatgtttttccttttttctgagatagtacgtgtatagctatcacttgcaaggaataaaaccacagaaattaataggacatgtgcctgaaaaaaaatatttggaagatatagggcagtgccatcaaatatacataaaatgttatccacatatggaattttaagtcatctagcagtcacatcaaaaataagaagaacccggtaaaattatttttataattgcggtaccataaaaacgtatttggtcttctcttctggtttctggcacagcactccactggaagctgagtctccagaaagaccaaccctttgttagaagtttggaactttcagctgcaccccctcaacctcagagaagggagaaaggctggattgarttcaagcaccagtggccaatgatttaatcaatcatgtctacatagtggaagctcataaaaatccctaaatgatggggattggagagttt

SEQ ID NO: 915934 - DNA, 632 bp, Homo sapiens
gctgctctttgaaaaacaaaaaacaaaagacctcaatctgtacttgtgaaattactaaggattgttaaagaaaacgagggacagccttcttagactaagagaatagactacttcatctggcaagakatgctcactgcaggtggtgggttccatgatcggtgcatctttttgttatttttagacacacatattccattattctctgtttcctgaatcaatagccttgatttacaagagatttgaggaagctgtgaattcagctgatgctaaaacctgacattctaaaagctggtttggttttcagctcgtctaagcctaagtagaatgaaaactatgagcacatttatggactgcccctgttttcaccttggagcacagctccgaggtacttgtcatattaggagcaaatatctcacaccagggaacttgaatttcttaacctctttgtctttctcaagattccctaaaaaacagatcctgaagcaaagcttatgtgttaaaactttattagggagcataatcctaggaagaaagcaatgtaagaaagtaaggagggaaaatatggctgggagtgttactgtgcccactgaagattgacagcaagcataactgcttgctctgagtgggatgag

SEQ ID NO: 915935 - DNA, 597 bp, Homo sapiens
tgtaaatgggttcatactgttgatttgactttcagcctggacattattggtggatagaaatgctactcagttttgtacattgattttgtattctgaaactttgctaaaggtgtttgtcagttctaggagccttttggtggactcttcagtgtttgagatacagagtcatctcatcagcaaagaaaatttgatttcttcttttcatatttagatgccttttattttttctcttgcttgatttctctgactaggacatttagtactatgttaaatagttgtgagaatggtcatccttgtcttgttccagttcttaggggtaatgattccagcctttgcttgttcagtgtaatgttggctatggatttgttataaatggctcttattattttgagatatgttcctttgatatttaatgtgttgagagtttttattataaaggggtgttggattttatcaaaagctttttctgtgtctactgagacaattctatgttttttgctwttaatcctgtttatgaggttaattacatgtattgatttatgtgtgttgagccaaccttgaatttcaggaataacacctacttgatcatggtgagtt

SEQ ID NO: 915936 - DNA, 470 bp, Homo sapiens
ccatatgtagttttgaaagatcttcttgatattgatttctgtttttattgcactgtggtccaagagtttgattggtacrattacaaaatttgaatttattgacacttgctttatgattgggcatgtggtcagtctcagaatttgttccatatgcaaacaaaaataattcaaactctatagttgttgggtggaatgttctgtagatgtgtattagaaagtgccaagtttaagtccagagcttctttgttacttttctgcctcaatgatatgtctaatgctgtaagtggagtgttgaagtttcccactattgttgttggctgtctaagccttttcatacatcaaaaaaattgctttatgtatctgagtgctccaatattcggtgtgtatagatttaggatagttaagtattcttgttaattgtacactttatcattttgtaatatccttccttttccttctaaagtgttatt

SEQ ID NO: 915937 - DNA, 577 bp, Homo sapiens
gggcagttcccccatgctgttctcaaggtagtgaataagtctcacaagatctgatggtttttataaggggaaacccctttcacttggctctctttactcccaccaccatataggaagagcctttyaccttctgccatgattgtgaggcctcccccaccacatggaactgtgagtccattaaacctctttttctttacaaattaccagtcttgggtttgtctttatcagcaagatgaaaacggactaatacagtaagtttggagggctcagaagaagacaagaaaatgtagcaaagtttaaaacttactagagacttgttgaatggctttgaccaaaatgctgataattatatggacaatgaaattcaagctgaggtggtctcagatgaagaggagaaacttgttgggaactggagtaaaggtgactcttgctatgttttagcaaatagacaagtgacattttgcccctgcactagagatttgtggaactttgaactcgagggagatgatttagggcatctggtggaagaaatttctaaggagcaaagcattcaagacgtgacttggatgctgttaaa

SEQ ID NO: 915938 - DNA, 635 bp, Homo sapiens
tatgcctgtgtattttaactttataccttgaatgtactctatttacaatttaggcaatataatatgactagcataatattacatgaaattatattttcaaaatggaaattatttctcagggattttttttaaaagaaggtttcaaaaagtattttcagttttaaagaaaaccaatgtttttccttttttctgagatagtacgtgtatagctatcacttgcaaggaataaaaccacagaaattaataggacatgtgcctgaaaaaaaatatttggaagatatagggcagtgccatcaaatatacataaaatgttatccacatatggaattttaagtcatctagcagtcacatcaaaaataagaagaacccggtaaaattatttttataattgcggtaccataaaaacgtatttggtcttctcttctggtttctggcacagcactccactggaagctgagtctccagaaagaccaaccctttgttagaagtttggaactttcagctgcaccccctcaacctcagagaagggagaaaggctggattgarttcaagcaccagtggccaatgatttaatcaatcatgtctacatagtggaagctcataaaaatccctaaatgatggggattggagagttt

SEQ ID NO: 915939 - DNA, 612 bp, Homo sapiens
atatcacacttgattaatttgaaagtgggcactggccaaattacctgagtcagagttcttgcctgaggtttttcaaatgctaccctagaagaaaagcaatttctttatggtgacgaaagttatragtcataaaaacactggcatgttcactggttatgtttcctgctatttagagaaaacagctttaaagtgaaagacagtaaagccagcatattgaaagaaaaataaattagtaccaagagagttctgattgcatttttgtccctggtccagttgttcataaatttgttccatctctgccatctgtattttggttgttacattttcattgaattctctgaagaaatgttcttcatttttctccccaaattagtttgagttaggtttatgtcagttggcatttaagaatcttaagtaatttgaaaaagttgaatgcccgtttatactcactaatgactctttattgaattttctcagagtaaagttgacaagtattgccatagcagctgaagttcacttcagattaaacacaatgtctttgactgtgccaagaatataattttatgttttgtcaattattaggtaataagtaattctgggattctgaggttg

SEQ ID NO: 915940 - DNA, 551 bp, Homo sapiens
ccgggtctgtccatatttattgatgcaattttatgcacaaataactttcagccrtttggacttaaaaagtaaaactaggctttgtgaaagccttgtttccagggatagaaaaatacttaactcctatggttagaattgccttgagctacaagtattaattaatcataatcaacagtgtttcagtgatgatgtatcaccagttatttctaaaaataacaaaaaaatacaccaataatatttaccagatgggaactaactttaatgattgactggattgggggtccaagctcaagagcaataagtagtatagtcagtcatacataaccattttgttcaaacttcctgcttacccttgcaatgataatttacctaatataattataaaagttgatgactgatggctgtaataaaaaatcaatctttgaagtagagaataatgacaaagtttccaagttctgtgatgaaagtacttagaaagaatgtacagtgactccatacattctgttatccattaatagctccttgttttgaccttaaacatgtctctcttt

SEQ ID NO: 915941 - DNA, 551 bp, Homo sapiens
ccgggtctgtccatatttattgatgcaattttatgcacaaataactttcagccatttggacttaaaaagtaaaactaggctttgtgaaagccttgtttccakggatagaaaaatacttaactcctatggttagaattgccttgagctacaagtattaattaatcataatcaacagtgtttcagtgatgatgtatcaccagttatttctaaaaataacaaaaaaatacaccaataatatttaccagatgggaactaactttaatgattgactggattgggggtccaagctcaagagcaataagtagtatagtcagtcatacataaccattttgttcaaacttcctgcttacccttgcaatgataatttacctaatataattataaaagttgatgactgatggctgtaataaaaaatcaatctttgaagtagagaataatgacaaagtttccaagttctgtgatgaaagtacttagaaagaatgtacagtgactccatacattctgttatccattaatagctccttgttttgaccttaaacatgtctctcttt

SEQ ID NO: 915942 - DNA, 596 bp, Homo sapiens
gactgtagcccctttgttttggccaatttctcccatttggaatggctgtgtttatccaatgcctgtacctccattgtatctaggaagtaactaacttgcttttgattttacaggctcataggtggaagcggcttgtcttgtctcagatgagactttgcacttttgagttaatgctgaaataagttgagacttttggggactgttgggaaggcacaattggttttgaaatgtgaagatatgagatttggaaagggttaggagcagaatgatatggtttggctctgtgtccccaaccaaatctcatcttgtagcacccatacttcccacatgctgtgagagggacccagtgggagatgattgaatcatgggggcgggtctttcctgtgctgctctcatgatagtgaatgtgtctcatgaatccagtggtttttacaaaggggttttctctgcacaggctttctgtttttcctgccgctatccaagtcagatgcaacttgctcctccttcccttctgccatrattgtgaggcttccccagccatgtggaactgtgagttctccattaaacctctttcctttttaaattgcccagtctca

SEQ ID NO: 915943 - DNA, 613 bp, Homo sapiens
cctaaatctgagcataggttgttagaagctgccaggccacattttgaatgcttttctgcttagaaatttcctccaccaggtaccctaaatcatccccatgaagttcaaacttccaaagatcctcarggcatgaacagaatgcatccagggtttttactaaggtataacacacatgacttttgctccagctctcaataagttatttctatctgagacctcagcagcctggaattcggtctccgtatcactataagtattttgatcacaaccatttaaccagtctctaagacatttctaacttttcctcatcttcctgtcttcttcaaagctctccaaactctttcaaacatagctcattacccagttccaaagctgcttccacattttcagatatctttatagcaaaggctcgatcctcaataccaattttctttactagactgctcttgtatttctatgaagaaatatctgagagagggtaatttataaagaaaagaggtttaattggctcccagtactgcaggatttacagaaataatgatactggcatctgcctggcttcttgggaggtctcaggcaacttacaatcacggtagaaggtgaagagagagca

SEQ ID NO: 915944 - DNA, 607 bp, Homo sapiens
agttaaatcacagtaggaacagataaagtatcaaaaatatttgcctttggggaggtgttggcatgagaaagggcacatacttatctttggttatagccttttaacattgtttgattttttcaaactttgagttcataacattgataagcactaaaaacatattattgtaaaaggccactttgaatgcaatgatgcattttacagccatttctgccatctaaagttgtatgatctaagctttttgctgcccccacagaagcaaccatctgaacaaactgaagcttgaacgccccatagttcaacagaattaatggtagattcctttcaactttgctctctttttccatattacagtcaccttcactagcaggttgcaaatagtcatgcaataatgtctattttatttcatttcaaagagctctgtttaatgcatttgttgtacttttgaatatgactaaatcccaattcattcttccacaggcaggagatgtgaaggcagattgtctgaatatcaagatgctgtcytaaattatatgaggtatagatgcatagtggcatgcaaattattttacatctctgtactttagtttctttcttcattgttaaa

SEQ ID NO: 915945 - DNA, 623 bp, Homo sapiens
ttatctcatagttatggatcaggaggactacaggaagagcttaactgtgacctctgctcagggayctacaagactacaatcaagctattagccaggcttcattgttattcacagacttgaatagggaagaatctgcttcaagcctactcaggttgttggcagaattgcaagtgagtctgtcatgagagagttttatatgatataacttagtcaagggagcaatatttcataatatttttatgttctattggttaggagcaattcacaggttctgttcactcaaggggagaggatcacacaaagacctgaatatccagaagaagggagcatgggaccacctcagtctgtctaccccaagaaagtagcttagggtgataggaagagaatcagtgagactccaaaatatgaaatattatttagagaaacctagaatagatcttgatgacaacatgacccagaatgcctggggaaaagcgaggtgtatgtgcattcccatgaatgcccattaggtgccagctaccattccgagaaggagaattcaaagacaagaacattcttctctcaggatgacattgtctagacaggaaaataaataagtaaacacaataaatagcgaagcagga

SEQ ID NO: 915946 - DNA, 572 bp, Homo sapiens; identical to SEQ ID NO: 905787

SEQ ID NO: 915947 - DNA, 460 bp, Homo sapiens
ttattaattgataggttcaaagatacactacttgactttgggggctggaagaaagtggtggtagaagctgtagtttttaccagaacctgtctttaggaaccaagttatgagtggttctctagtcctgggaacagctatgtaatagattgtatttatatatttccagaaatttatctctagcaaaaattcctaaattaaaggaatgtggagatgccttcattcatttcttcatctagcatttactgagcacaaattttattctaaacgctgtcttaaactctaagaacacaagaatgaattagcttcagttctcctcttaaacgactctcagctgaagagtctgagattcctacatagcaattgatattcctatgtrtcaaatgtaggtgtttgcgtgcatgggctcatgcatgtatatgcgtttcagttgtctcatttaggtatgagttttcttgtagga

SEQ ID NO: 915948 - DNA, 601 bp, Homo sapiens
gtggctgggcacttaacttttcattctaccgagtcctttgtttcattttagccaaagatcagcattgatctaggttattcccagctgtgcaacagctgtgcaattcaagaaaaccacactgggctcagaaggctgagcaactttattaaattaagggggaaaagggggaaggttggggtttcttctctccctttcaacatttcccaaataattctgcccagtattaatgacatcatgtatggtagaactcaggtttcacacctctgcaggatttaatgaaagagtttcatttctattaagataaagaagccatacagatgaaaacttgctcatgctgttttagaaatggagtggggatggaaaaaacttttcatctgttccagcatgcaggcaaactctcagcagacaatctctttttcccccaaagtcagagactagatgggctctttaaagaactgaatttagagattgaaagagtgcccttcaaattgccaagaatttatggtaggcagactaccttagcgccctagtaaaatgctcctttctgggtccaaaatacwtgggaaagttttagaaagggcctttctaatgtacttgatta

SEQ ID NO: 915949 - DNA, 633 bp, Homo sapiens
tttcaagtatatgaaaaaaccctattctataaggcaaggctgaatgcctcagaaagtcatggttgtctttgtcctttacagatggccatcacagcagtgacccttggagctcctccagtgggatgaatcagcctggctatgcaggaatgttgggcaactcttctcatattccacagtccagcagctactgtagcctgcatccacatgaacgtttggtaaggcagacatacacggtaacgggaatgtcacagctagttgattaaacctcgtcctctgtctttccatgcatatacacaaggactctgcaaataagtgcaaaaatggcacacacccattattcttaagttgtattgtttctgtgatcaaagacataacaggttcaaatcacctttgtaaattcttccagattctctctggcattgttcttttgtttattgtgttttgctctgtgccttctttatcacaatgtcagcttccttgggtacataaaatagatacctattwaagttgtagaatcttaacatggtggttcctggttttttttttttttttttttttctatctgtagtttcaaaagatgtactgcagagggcagagtgacagtcggtagattatatgcatcacccaggagca

SEQ ID NO: 915950 - DNA, 618 bp, Homo sapiens
actctgtatctcataaacatatacaattgtatggcaactaaaaagaaaaacgaaacaataaataaacagatagaagcatggagcctggagttcaggctgtggactggcccgccttgccaccctgtggattcargctgaggtgtagacaaccaaactcctctgggtgtttcagatatgttgctgacaaatctcatcccccatcctgtctcaatgccttctgattctagaaacagtagttcccacatattcctattcagtttcatctcatgtcctacccataactccagtctattgaaatagctttgtatcatgtttatttcatagcaaggggttacgagtataggttctggagccagatggcctgaggttgaatcttagttctgcaactggttatctcagtttcctcatctgtaagatgagaataacaatgtgaagtacctcattgggctgctacaaaaattaaatgccaacacgtgatgtgtttaagaaaagtgccaagcatgtggtaagtgctgtagtatgttagctgttagctattttttaaaaagtattactactatactggtatttattaccccttgtagctttaggtcattcacagattttattagtatatcc

SEQ ID NO: 915951 - DNA, 640 bp, Homo sapiens
ttaattacttcgtgtattactgtagtttaattgctattgagaaaactgagcacacatttataaaacctttctattttcacttaattttaaaaagcaatcacatttattgcatgaaygctgattcattttactttttctcttgaatttctaaaccaaattaataaattaaaaaattaaaaacccttaatattgtacataggaaatttccattattttgaaacttcttaaaacgacaatcttcaacactaatatgtaaaatgaaaaagacttaaatgtaagacctaaaaccataaaaaccctagaaaaaaacctgggcaataccattcaggacataggcatgggcaaggatttcatgtctaaaacatcaaaagcaacgacaacaaaagtcaaaattgacaaatggggtctaattaaactaaagagtttctgcacagcaaaagaaactatcatcagagtgaacaggcaacctacagaatgggagaaaaaatttgcaatttttccatctgacaaagggctaatatccataacctacaaagaacttaaacgaatttacaagaaaataaacaccaccatcaaaaagtggtaaaaggatatgaatagacacttctcaaaagaagacacttattcagccaacaaacct

SEQ ID NO: 915952 - DNA, 607 bp, Homo sapiens
aaacatgagcctattgcaggtgggattaagaacataaagagggggttagctttagaataataatgaatayggtgataggtgttttgattacataactatgacagttatttaacttatatgtggtccgtgtttcatattttaatcccaagagtgtatctattggaacccagccttagaacatgtgtgtatccttaattcaatcagaaaactaaaaaaagatcaatgtatatatgcatcctcttggatgagtaccttcatctttatttataattgttgactcattgagtggtaatgtattaaatttttgttactgaatatttatttctataataattatatttgaaacgtatgactcaaattccaaataagggcacttttctgagtaactgaagttagaatttcaacatatcttttttgggagtatatattctatccacaacacattctaagtacacagttttctcagaaacatagcctataatataggctgtaagatacaagataatttttccaccaaatggaaagtacagttgacccttgaacagcagggttttgaactgtgtgggttcacttatactgaattgttttcaataaacacacacagacc

SEQ ID NO: 915953 - DNA, 598 bp, Homo sapiens
ccaggtatattctgtagtttcaaagaaagtttcctatgagtatttgacataaaataataagactttactcttttttagatgttttgcagagaaagattttagtataccacacattcacagggttcmcaggtgtgccagggaaaagacatcctgaacatagggtcaagcagtatgttgatggtccattctgcctggaaggtaagttagtatgcagtcaaaaattatgatgacaaccaggaagatcataaagggtgagtggtgtggaagagagttagaaagagtagagagaggaacagggcctggcaaacagtagacgcctgcctctaaggggtggtgcaatcactcggtcccatggctattgaagagttaagggataacccagtcctgaaagatttacagtcagttcacaatgaaaggcattttttcccctaaatgcttggggaaaagtaacttcccaatgacaacaagtggtcattccagccagcccctgttggttggtctgtgaattttatagatcataaggtggtatcttatcttattatttcatactttttacagtatccttataataaatatgtaacagtaaagataaaatgag

SEQ ID NO: 915954 - DNA, 598 bp, Homo sapiens
ccaggtatattctgtagtttcaaagaaagtttcctatgagtatttgacataaaataataagactttactcttttttagatgttttgcagagaaagattttagtataccacacattcacagggttcccaggtgtgccagggaaaagacatcctgaacatagggtcaagcagtatgttgatggtccattctgcctggaaggtaagttagtatgcagtcaaaaattatgatgacaaccaggaagatcataaagggtgagtggtgtggaagagagttagaaagagtagagagaggaacagggcctggcaaacagtagacgcctgcctctaaggggtggtgcaatcactcggtcccatggctattgaagagttaagggataacccagtcctgaaagatttacagtcagttcacaatgaaaggcattttttcccctaaatgcttggggaaaagtaacttcccaatgacaacaagtggtcattccagccagcccctgttggttgrtctgtgaattttatagatcataaggtggtatcttatcttattatttcatactttttacagtatccttataataaatatgtaacagtaaagataaaatgag

SEQ ID NO: 915955 - DNA, 630 bp, Homo sapiens
gcaagggtgtggaagagactgggtgggtgagaataggctgggccagactctgagcctcagccctggctctgcctccgagttgcaggtgcccagcttgctgactgtgctctggagggccctgggccaacccctggatcttcttggggagaggagagggtggcctgggcagggtggggcaagggctgggcagaggccagcgggcagaatgccagggctagggaggagcagctggaggggtggagctgagggggattaggaaggattgtaggggttaaagcgcagccctggcagggctcaatgggaacagcttgtccttccatagaccccgggaacaggagaagtggggcagagtagggagatgacagggttgggactggggctcctgggtctctgcagggctgagccacctgagctggcttggagtccccacttgggttagtgaacactttttttccaccatcactgttcctcctctctgcattttaagcagaaggtgaagkctcaggggaggccctcattatacaagtgctgagctgcgcccctctggcctggcattttgttggtgcttacacaagcatggggaggggataattctgaatttatgtggcgccccctgccacccgcccctgc

SEQ ID NO: 915956 - DNA, 638 bp, Homo sapiens
tcatttctattaaatattcagctacacccactgctattaccatcttcatattttaataatagatagtgctgtactgactcatatctatttggctcttatttggacaccactgatatttgatattctttgagcacttcagtccagtagcaaacaagtagaccctagttacaaactatgtgttactaatgtttgtgcattaatgtgagctctttcaggcctgtgtaaattgtctccctgtattttctgacacaatttgccctatacctccctgctgatcaaataagatacactcttcacgtagagcagaaaaccaaggtatggcagctaaaactgtaagttgcatttacaagcctcaaagaatacacccagaaattgactgaaagattagaatatgcggagattctgaagcagtcctcccttcaaggaccacaattatgtatgtataatcttttttggattcaatgagcctaagattccctctgaatgaaatgtcagcataagtcataagatggaaaatcarttcttctgaatggaatgcttttcatgaatttctttttattttaggcaagaaattcttcagcatgtcgatgtaataaaaaatttttctttgaccaagaatagtgttcggattggacaac

SEQ ID NO: 915957 - DNA, 646 bp, Homo sapiens
acttaaatagacatgcattagtcccttttcatgctgctgataaagacatacccaaaactgggaagaaaaaaaagaggtttaattggactcacagttccacatggctggggaggctgcagaatcatgayaggaggcaaaaggcacttcttacatggtgacggcaaaagaaaatgagaaagaagcaaaagaagaaaccccaataaacccatcaggtcttgtgagacttattcaccatcatgagaacagcgtgggaaagactggcccccatgattcaattacccgcctgggtccttaccacaacatgggggaattctgggagatacaattcaagttgagatttgggtggggacacagctaaaccacatcattccaccccagcccctccaaatctcatgtcctcacatttcaaaaccatgatgatccaggatcatcccctcatctcaatatccttagtcacatctgcaaagaggtagtcccagtagggattctgtgtgggagcttcgaccccacatttcccttccacactgccctagcagaggttctccatgaggcctccactcttgcagcaaacttttgcctggacatccaggcatttccacacatcttctgaaatctaggcagaggttcccaaacctcacttcctgac

SEQ ID NO: 915958 - DNA, 631 bp, Homo sapiens
ttctatggacactgagtaattggtagagctgagaactcaattatatatacccaccactgaagccctaaatcattttcaaattccatctgcctctcaaaacttttatatgtgagattggcatataccaattatttttaacaatgtatcattcagtaaatgagtcaagacagaaattaaaatgaccaggcaaatctgctctatacttatatggttccttaaggtaggaattaatacagaaatccttttataagaaaatacatattaaaattgataaacatgttgtctaccagtttaaactgaacataacatcatggatctattgatactctcagtccatggcatattcagaaattatcatctttgcaataataaagagttaataaaaagccatttaaaaattacgctacacagatagctagatcttaataggcaggtcaataaagagcaaaataaaaggaagaaataatgttactgaagaggttaatggggagattggcaaagtgaaattcgtggcacactctgatggggaaagaatggcaaaatataaccttgaagtacaagtgatgagtgtttgacattgttcattagaataacataggktaaggctgaacacgcagtttctttggcgggt

SEQ ID NO: 915959 - DNA, 601 bp, Homo sapiens
ttaaagagatcattcaccttaatcaagtgggattcatcctcaggatacaaggatggtttaacaatcaataaacatgatacattacatcaacaaaatcaaggactaaaactaaaactagatcrttttaatagatgctatagaagcacttgataaagttctacattgcttcattatgaaaaccctcaaagaattgggtatagagggaacatatctcaaccaaataagggctattttttacaaacccacagctagtatcatactgaatggggaaaaattgaaagcctttccactaagaactggaacaaaacaagaatgcccacttttaccacttttattcaacatagtaccagaagccctagtcagagcaattacgcaaaagaaagaaagggcatccaaattgtaaaagaagtcaaattatccttgtttgaagttgttatgatctcatatttagaaaaatctagagactccactaaaaaactcttagaggtggtacataaatttactaaagttgcaggatacaaaatcaatataccatatattaattatgcttagcaatactaggacttattgccaacatcttttctataaactgtatctgaat

SEQ ID NO: 915960 - DNA, 638 bp, Homo sapiens
ttaaaaactgctgatgtctgatcctaccaccagtattttgtgatttataacccttgttgctagtataatttctccagatacagcaatgcaaatctgtgcaaattcttcagaatgtsgtttttaaaaaaatctttggaataaaagtgaagtattcagggacaaggaaaaatacagagtaaacatttggtaagtcacacttccattatttctgtagtaagcatttactgagctcttaatttgtgctagatgttaggtataaaaaagtaattaagactctgtccctgctttcaaagagttcacaatgtagtaaaactgatagaaaataaatgcaacttattacctcataggtataaaaaagtaattaagactctgtcgctgctttcagagagtagtaaaactgatagaaaataaatgcaacttattacctcatttatccatcacttttattgagtgcctacaatgcacctggggacattttaggtgttggagatacagatgtgaacgaaaaaactccctaaatgactatactcagtggcttagattttggtggggggaattaaagaaagatgtttttatgacagaagtaaacacagggtagtttggcaatttagttcaaaaaggcaaactcccacctaggg

SEQ ID NO: 915961 - DNA, 658 bp, Homo sapiens
gtctacaaaaatagtaataaaaataaaaatcagctgagcatagtggcttgtgcctgtagtcccagctacttgggaggyagaggtgggaggatcacttgagcccaagagttagaagatgccttgagctatgatcacatcattactgcattccagcctggaagacagagactgttaaaataataataataataataacaataaaaacaggtatttctgttggcttcaagctgttctgcagctctacctttccaaaaacatgtgagtgtgtgaagttcctggacggccccagcgatgcctcctgcagggtgtggcccagaccattgctcactgtgactctaagaaggacaaacacttctggggcatcattgggctgaagtccacaacccacttccactcctctgtgtgtatcctgggggccagcagcactgtgacaaggccaaggttgtggagtcccccgtatggacctggaggcactggagaaactcgacaagaacaagaggctggccaagaggtatggtaccatttggccttggagtctcagatcaagcagatcccatggatccttggcccaggcctaaataaggctggcaagttcccttccctgctgacacacaacgggaatatgttggccaaagttgatgaggtgggagcccacaat

SEQ ID NO: 915962 - DNA, 551 bp, Homo sapiens
ggttaaataactgtttgcaagcttcattgtttcatttgtttgtgcacatacagtaaacaagcactcgygctgaaaaagataaactatcactgtacaatgtgggatgacaaaaccatgttttccagaacaaagaggaaaaaaatgttcaaatctgaattcatatcacaaatgagggaaggtaaagtttatgtattctgagctgctgtttacagtttaatggttggatattttttaaaatgtgatattaaaaacaaagaaaaaaggacaatcttgtcagctttaaaaaaaagcatatacattttcaaagatacagtagattagtactacttaggggctatttgatctgttttaagagttttactgacattacaatcactttttacttctagatcttcgaagttaacctcagtagctttcctgcaaccttctttaaattgataaaattggtcagtctcttaataatcctaattataatgaaaatgagctttttctgttttgactttttttctgtttagactttttttctgtttaatactatgtatttttaaaat

SEQ ID NO: 915963 - DNA, 604 bp, Homo sapiens
cagtgcagaagggaaatgtggggtcagagcctccactggggcactgcctagtggagctgtgagaagagagccaccrttcttcagaccttagaatagtatgtccactgacagcttgcactgtgtgcctgaaaaagccacaggcactcaacaccagcctgtgaaggaagctgacagggtggctgtaccctgcaaagctacagatgtggagctgtccaaggccatgggagcccacctcttgcatcagcatgacctggatgtgagacatggagtcaagggagattattttggagctttaaaatttaattactgccttgttagatttcagacttgcatggggcctgtaaccactttgttttggccaatttctcccatttggaatgggtgcatttacccaattcctgtacctctattgtatctaggaagtaataacttgcttttgattttacaggctcataggtggaaggaacttgccttgtctcagatgagactttggacttggacttttgggttaatgctagaatgaattgagacttttgggtactgttggaaaggaataattgtgttttgaattgtgaggacatgagatttgggaagggccaggggc

SEQ ID NO: 915964 - DNA, 602 bp, Homo sapiens
agtagaagaattccattgtgtggtataccacaagtttatccattcmccaaatgatgaagatttgggttgtttatagtatttagctactaggaataaagctgctacaaacattcatgaacaggcctttgtgtggacatatgttttcctttctcttgggtaaattactaggagtgggattattgtatcatatggaaagcatagcaagtatatgttaaacactatttttaaaaatcccccaaactgtttccaaaatgactgtgccattttacattccaatcagcaatatatgaaagtttcagttgttccacagctcctctagcacttggtattatcattgtttgtaattttagcaatttgagcgtataacattatctcatcgtagctttaattttcatttccctaatgacattgaacaccttttcatgtcctactttgccatctgcgtatcttctttgataaagtgtctgttcaaatcattcacccatttaaaaattatttgtcttaatgatatgtagctaattagaatatattctggatacaaactctttattaaatatgtgctttgcaaatactttttctcagtctctagtttgtttctttaa

SEQ ID NO: 915965 - DNA, 385 bp, Homo sapiens
gcaatttaacattaacttttttgtgggcaaattatattactatgtaagtaatatatagctgttgctgatatttggcaagtgccttcagaatatttaatttttataatttccactacttttcagtcacagcactcaggagaacagaaccattttaatttttacagaattccttaacccaaggatgatttgtaagtagttattttcatttggaagcctttttctccaaacgtgcctcatgccataatggttttcatttgggagrctttttctccaaacatgcctcgtgccattatggttgagagcagtgcacacaaaatagaccaggctaccaagcccccaaaccggaagcgaatcatgtgactgaggcactcacttgtgtcaagtg

SEQ ID NO: 915966 - DNA, 645 bp, Homo sapiens
caacttaatcctgattgccaacaacataccaataatttgctcttcatgtgatctgaaattttccaaggtttgttgaatgtacacagttggagaacgtacaacagcacaattacgtttcaagccattactatttaacttattttgatgaatgccatttgtggggggaaaaaaaagcaaagcagataagtacatattaagatgcctttagggagctccactttccctactaaaagcatttttctaagtaatatagcttcagaacatcttgactgaaatagctttagaatatttacagcaaaagcatctcttttaggaaagttgaggtggctgaaagtgaatgtgtcttaatgcatgaagagcttacaggtccacaagattgtaggacatacgtgttcatgaagccaatgaaaactcagtaggttacaggacctacattctggttctttccaggagagttgacgtagagctggagtggcttcatctgcctctatttacaatgagagattatgagtacataattgcagtgttagcagaaggcatcacacgtgtgcctccgcattttagggaaagccaacttgccttccatttgtcatgtgtctatgaatacgcgaatacatayaagagttctctgtcttcacggagttg

SEQ ID NO: 915967 - DNA, 608 bp, Homo sapiens
ggtagatccaccccgcccagttccatagacaggcttcagcstgacggcaactacagctagtgccacttgtcctcaggctgagacgcttctacgtgtaatataaaattctattatattttataagtctgtcttcaatatctctgaatacagcatttctcctcaagtttacacccattctaaatgtaaacgcagattgaatcatgattttaagtgtagcgtttgatctccaggcaacatctgtgtttaatgactagagtgtagtgtatttggaaccatcaagaagggactagtacagcagtaatacagcaaataacagctccaacccctgtctttgtccagggtagaaactggtggatgcaaagtaagtgtgtaaaaagaacacactttgcatgcagttcctttctttctctacacattatttgtgagattgcaatacaaaagaaaatacgccaggaactcagatcactgagaatgtttgtacgtattctgggataatgagtcagtacaatatctgactcattatcaaactgagaatggatttcctgtttttgataaggtaaccaagttcctcttcctagatgtgtgacctttggcaagatccttaacct

SEQ ID NO: 915968 - DNA, 600 bp, Homo sapiens
aggtttcttaatcaattttctagactcacagtcatgtcaatagtcttggaagtcttgacaaaggtctaatatctagactstacagggaacttaaacagatttccaaaacagtaacaaacaaccccattataaagtgggcaaaggatacgaacagacacttctcaaaacaagacatttttgtatgcagccaacaaacatgaaaaaaaagctcatcatcactggtcattagagaaatgcaaatcaaaatcacaatgagataccatctcacgccagttagaatggtgatcattaaaaagtcaggaaacaactgatgctggagaggatgtggagaaataggaatgcttttacattattggtgggagtataaattagttcaaccattgtggaagacagtgtagtgattcttcaaggatctagaactagaaataccatttgacccagaaatcccattactgagtatatacccaaaggattataaatcattctattataaagacacatgcacacgtatgtttattgaagcactatttacaatagcaaagacttgaaaccaacccaaatgcccaccaataatagactggataaagaaaatgtggcaca

SEQ ID NO: 915969 - DNA, 611 bp, Homo sapiens
ataggccacttattgtgtgccagacacttttattagtctgtttatttgwttgtttcttcttttataaccacaagtacacaaggttgaggtcatcacatgctctggttcttggcataagccatgactggattagaaggccattctcttctttacttatggcctttgacccagttcatttcctttcttctccaccaccatagacaccacttataatttgtttaaagcatattcttttatgtatatgtgctcctgtaaaacattgatttctttatcttacgcatttttaaattttcataaatgaagttatgttagataatacttaacatcagctttgggaggcggaggcaggtggatcccttgagcccaggagtttgaagccagcctgggcaacgtggcgaaaaccccgtctctacaaaaaaattaaaaacatagccagtcacagtggcacacacttgcagtctcagctactcaggaggctaaggtgggaggattgcttcagcccaggaggtcaaggctgctgtgagcagtgactgcaccactgtactccaggctgggagacagagtaagaccctgtctcaaaacaaaacaaagaaaaacaaaaaaatacaagt

SEQ ID NO: 915970 - DNA, 600 bp, Homo sapiens
gggtggtctgtattttatctgacaaccttacctctttggcattttcttgagagattgtgataaatacttacatttgcttacattttttttatccaaacacaagaattaagaaaagtctataaggcagctcaacgttaagctctatgctaaatttgtatgaggaagggaagaaaatggaccacaggttcctgctgttataggtaagaaatgggacaattgatggagaaaagcttcccaaagagactaagggagcaagaacaatgcaggttgaagaaccaactttccccaaaatgaaagacaactctttccaaacataagagtagagaagtttggatacatatttaaatacatttttatataggagatttcaaagttttgcctggattgtcaatttctcatggacaagtatcgtgctttttgctaagtttcgggcatttagtaagcacttaattatcattggctaaactgaactgagcatctttttatgaggttaggagttgtgttttaggttgggatgaggcaagagatgaagatttagaatggcaattgggaaaattcaaaaggaactgatcaakaacagacaaaaggtttcctcactga

SEQ ID NO: 915971 - DNA, 563 bp, Homo sapiens
gggataaattccccataccttataccataggcgggggagctggatttaagagaaagaaaacacacatagagagggaggtacttgccactaggagaaatcgacatctcccgggcaactggatgtctgctgggatgcagaaaccttgagccttgtgaaataaggagttcagggccgggcacggtggctcacacctgtaatcccagcactttagaagggcaaggtgggcagatcgcttgaggtcatgggctcaagaccagcctggccaacatggagaaaccccgtctctactaaaaatacacaaattagctgggcatggtggtcagtgcctataatcccagctattcgggaggctgaggtacgagaatcccttgaacccaggaggcaaagattgcagtgatctgagatcatgccactgcactccagcctgggtgacagcaagactccatctcaaaaaaaaaaaagaaaamaaaaagacagagagagaaaagaaagagacaagcactaagtcaacaatgacctcccagcacaaaggctagaggagtactatcacacacaaaagctga

SEQ ID NO: 915972 - DNA, 563 bp, Homo sapiens
gggataaattccccataccttataccataggcgggggagctggatttaagagaaagaaaacacacatagagagggaggtacttgccactaggagaaatcgacatctcccgggcaactggatgtctgctgggatgcagaaaccttgagccttgtgaaataaggagttcagggccgggcacggtggctcacacctgtaatcccagcactttagaagggcaaggtgggcagatcgcttgaggtcatgggctcaagaccagcctggccaacatggagaaaccccgtctctactaaaaatacacaaattagctgggcatggtggtcagtgcctataatcccagctattcgggaggctgaggtacgagaatcccttgaacccaggaggcaaagattgcagtgatctgagatcatgccactgcactccagcctgggtgacagcaagactccatctcaaaaaaaaaaaagaaaaaaaaaasacagagagagaaaagaaagagacaagcactaagtcaacaatgacctcccagcacaaaggctagaggagtactatcacacacaaaagctga

SEQ ID NO: 915973 - DNA, 510 bp, Homo sapiens
gactttagagactcagaagggtgaaggaaaggggagggtagagatttttaaaaaaaactacacattaggtacaatgtacactactggagttataggtgcactagaatctcagaattcaccactatataattcttccatgtaacaaaaaaaacaactgcaccccaaaactattgaaataaaattttttaatgtaccctgagtgttccttacgtgactagaaccttgttacacatttcaggtttataaaaaatagtctctgtcctcaatctatttaaaatttaagaatagttatctttggactctggaattatgttgatttttatttttccttttggactacattttccagctatgttaacacaaattcatatgaggaatagatgaaattgatacaccggttttttaatgaaaattagttatttcattcatatgwttattttaagcgatgtctatttttatggaacctttacaatacagttgtgtctgaaaacaatacactacttattcaac

SEQ ID NO: 915974 - DNA, 623 bp, Homo sapiens
tgttgaaacaacaggcagcaggtttttaacaaccagggtaaagagggtcatggtgtttgctaattggcttgataacttggaamaaggtgctcactgagactgggacatgggaaaccactcttgattgcatttaaaaaaaaatggcccccaaattttcaagaaagacatccctaggttgtaaaactagcaaaagctttaaataaattacatctcagaggattagagaaaggatttaaaattacaagttttctaaagtaaatgctctaagaaaagggagtagagtcaggaagaaatctgtctaaagttttgtctggctgaggggtaccctatggctgtctagatccccggccacagatgaaattataaactcagctgtattaaaaaaacagtaacttggctgggcacggtggctcacacttgtaatcccagcagattgggaggccgaggtgggcagatgacgaggtcaagagatcgagaccatcctggccaacacagtgaaactctgtctctactaaaaatacaaaaattagccgggcatggtggtggccgcctgtggtcccagctactcgggaggctgaggcaggagaatggctggaacccgggaggcggagtttgcagagagc

SEQ ID NO: 915975 - DNA, 592 bp, Homo sapiens
aggaccatactgggaagctatttctgacagtcttgatgtctccaaaggaagactgatttgtgtctcataattgcctatgtcctttaattcattagtaaatgaattaaatttttttcattatggtctaggatttctatgagtttgatgtgacaattcgaacctttgtgccattgtggtgatttaatgtgaatctgtaaaatagaacatgtacagttaatacatttttaaattacttccctctcctttatggtgaaaaaatgcaacattcaaacaagtggatcaaaaatcggcaccattacatgtcagtttagtcagaaaattgcaagagaatatgtgccttctctacataaatttcagtcttttgtctggataagtgtgtcagttggggttgcatttggctacaggtagcatggtgttgttgtaaacaattaataagacttgatagagttttgtgaatcacacttgagaggaaatcagaaggcagacctttcatatctgctccaaattttactaggatgccaccaaggtcactgcctctcatgtctttcatacytaaataacccttagatggtggctttactctcctggtcac

SEQ ID NO: 915976 - DNA, 565 bp, Homo sapiens
ttttataccctggaatttcttttttcataaatcattattagtacatatattatacatttttcatcactttaactataattttattttattttgattttatcggagacgatgttttagagatcagagaagatacagagaacaaaaacatcgtgttctaatgtttgaactctacccttgaaagagcattttaaggataatgttaacattatttttaaaatgtatataggaggttctaaaattacttttctcttttgtttcgagttgaagaaaaaatagcaaaataactcaaacttagcatagagtcctaaaatacatcactgtattctatttgataacatccttctcatcttaagtttatttccccacaacactttcccaaaaagtctttcaaaatcagccatcagggaaacagaacaaaacaaaacttaaagatgaagtgccaatagctcatcccattttgaaaatattacaaagcccttctcatcaccaagtggatttataagacataaataayatttttgggagccatcacagccaaagaaatgacaatatttgcagactgact

SEQ ID NO: 915977 - DNA, 599 bp, Homo sapiens
gaaaatattggttccaagattttttctcttctgcatttatcgccgtttcctttgaattycttcttttcttcttcctcttttttttttttgtcttattgttattattttggagggcggtggggaggcaagggaggagttttttcttcccttttctttttctgttttgtcacctaggctggagtgcagtggtgcaatcatggctcgctgcagccttgaattgctgggcaagcaatcctcccatctcagccttctcagtagctgggagtacaggcacatgtcaccacacctggctaattttattttattttattataatttttttttctttatgcagataaggtcttgccaggttgcccaggctggtcttaactccgggcctcaagcgatgcttctgcctcggcctgcagcactaagagttccagtgtgagctgctgcttccaaccatgaaggcttttttcctttctgttgcattagtccctatccttcaggtttcctccggtgactgagatcgttggctgctaatgctaaagagcgactggcatctctctttaagtgggtagacggtggaggagatcaggtgggaaccaggccctgttagt

SEQ ID NO: 915978 - DNA, 666 bp, Homo sapiens
tgtccatttaaaaatggtgaaggtggcaaattttatgttatgcatattttaccacaatttttttttaaaagaagcaggataacagagtcagggaggccccttcctctgtgctaatggtcccctgtctggaacacagggttctagactagtaggtaccttcttgggaagggaccacaaaaagagaggtcaaggatcctggggttgtgttcctgagaggacggaaccctgtcttctggcagctgaagggctgatgcctagatagacactgtgttgtgtcggaaacactggaacagacaagcagaagcctcagggagactagggggtttaattccaggaaggcttgactcaaatcaaagctggagaagcaactgatgggggttatgtagaaggggttcttgtgacagcaggaggttgtcccaactaacccccacaatccccacaatcacaggctctgacctcttaggtgccagactaattgcccttggtcatgtcctacgcaaggggcaggcagaaagcaattgaactgagaataaggagacccacagtctagtcctagctccatcagctattggccatttgaccttggatggatccccacrtccctgggcctctgtgcacccatctctgtaatcaacaccctgcctccccttcctctcagatcaaggc

SEQ ID NO: 915979 - DNA, 610 bp, Homo sapiens
ttggccaggctggtctcaaactcctgacctcaagtgatccacccacctcggcctcccaaagtgctgggattacaggcgtgagccactatgcccaaccccaaacctatgtatttcttcaatgtatttgattgaggtctcttgcctctctaaaatgtataaaaccaggctgcaccccaaccaccttgcacatgtgttctcaggacctcctgagggctgtcatgggccgtggtcactcatatttggctcagaataaatctcttcaaatattttagagttcgactcttttcgtcaacaggtgggaatagatgatgccctgccagtgtcaggggtcaccctaggccgttggccccctgaggtcaccagcactttcctggatttctctcacaagttctccctcattctggctcaggaagagagactgcttctctcacccctaaacactcacagacactgaggccctttcttatcctggagcaagcagaagctcttgacaagcccaataaagtcaaaaagcagttacctaaaaagagaaaggaaatgcaccatcctcttcctgcwgctgcctccccggaacaggcctcatcagccctacctctggctgtggcaatag

SEQ ID NO: 915980 - DNA, 670 bp, Homo sapiens
agaaagtacatttgtgtgtctaagccacccagtctgttgtattttgttatggcagtctaagaagactaacacaactacagaaaaggtagatgctgtatgcgttacagaacaatcactaaaaatagaacaactgytaaaaagattctttggtcttttttatcaaaagtgagcaacaatgaagacttatattatcaacattgcttacatattggtagcacaaataatcttagatttctaggagtgtaaaaaattcccatttacaatagcagtggatcaaaaataattgctcatttacataataggtcttgtgtagttcttagatccttataaatttgatgtcctttcatcttatttttgttcgctatcatccctttatttaataattactaagtgtaaggtatgatatatattttaggtcttatatttataaatgacctatatcaatttaatagtaaatatatcattaactgtgatgaaattgtattcttttttaaatcaattctcagatatgctctatgaattcaatttactacaaacaagcatgtatatcttcacacaccatcaattcagatttgtttggaaatggaagaaaacatatacttcaaaattgatatggcttttttccttttattttttgcataggctttaattttattttttacggaacaat

SEQ ID NO: 915981 - DNA, 639 bp, Homo sapiens
acgtaattctttatcaccacaacatagaatttctagagaactcatttatttagtacatacaaaatgtaaggcattatcatgagtgatcaaacaaattactgtatagaaaagtgtgtgatcacaatcaacactaacttctctctcccaccacttgttttcaacatttaatcacccaaagtagatcttctgtctacaattattcttttacaatgtagtaaatatatagttccttcccccagttatctaagtttaccttcacatactgaaatgatcagagaactttgacaatactacagaaactattgcattcacaacacacatccttctacgtagcattctcttatattccttacccaacttaattttttccaagtcacttccttcctcctttttattctgtctaccctcttgggggcaaggacctcgaaaatatttgtgaaatgaaggagtggccctttcttggttgtacccctaagaatctaggtttctttgtgtatgaaaataagctaatttccacagaaatttggctttaattttaaaytgctaatcaatttaatatgtaagtatctatgattaattattcttagaataattagtctgcatattttcacatttctatgggagtttcttaggtactct

SEQ ID NO: 915982 - DNA, 593 bp, Homo sapiens
gagccacctgaaactgcaagaggcaaggaagagctcttttctagagggagtgcagccctgggcgtattgccctagtagcaccttgattttggacttctggtctctaaaattgtgacagaataaatttctgttgctttcaggtactaagtttttggtaataagttgcagcagccttcggaaactaatacatatatcaaataggcggaggaccagtatgccaaagaaaggaaatgatttgttggctcttcatgctgagtagggaggaagaaaacaagctatccagtatgttcatctccactgctctcctctaaaaggagataagtctctaccagtctctactatcaagatataaaatctttaattgttaattttttattgagatataacatctatcatataaagtaccaaaatctcaggtgatactttttgcatatatatttatgtattaatatgttcaagtttcyacacacacatacaattgtgtaacagtaaccaccactcagatggacacagaacatttccagcataaaagaaagttccctagagtccatatcctgtcaaaacctacctatccacaatagcctctgaaaaca

SEQ ID NO: 915983 - DNA, 548 bp, Homo sapiens
tgccattgaaagctgactatggagatttttagggtaggcaggaagaacaacacaatctagaagtttgggatcttgctatatttccccttcactaagacttttctaastaaatagttaattaatatcccaggatctcaatttccatatctgtaaagtgaaagatttgaatggataaactataaggtctctttcaaataaaaaattttatccttgtatggcactctccataattacacacatgtataatctaaccctatggaactacacattaatttcccaagtgtgatatttatgatctcttctgatggttgcatgccatttgttaacgtgactttgacctttcctggtctgtgtggcagctgagctactactgctatatcctgaaccagggctttggctaagcagggatgtccaagtgcattccttttgacccagagaggctcataattccatacaggaacattcatgggaccttgaagaatttatgtttgtgttggtaaatttctcttcatggcctccttgagagcaatgaaagaagtgtattttct

SEQ ID NO: 915984 - DNA, 526 bp, Homo sapiens
gcctaagcttccaagggccatcctagcagtgtatgagcattgtttcccagggtctgtgccagagtgtcaaatctgtattctgagagagagcttctgtgctaataaactctccctcatccaactttacaattccctcctctcccctttgtctagcactctctcaggattcatttttggggtcataatctccaagtaccagctagtctccatcaaccagagtctgtagcacctttggtgctttcacttttccctcgaattggtccttaatcactcttagccagtcattatctcttttaatgaatcaatggcactcaacagccacccaattccatccttatatttgcctttcccctcaaatatctcaaaagccagacatactgtaccagttagtgctcctccttccactggcatcacatcccagtgtacaaccagtgaaaggcttaataattgcaccactgaagcatrcctggtgctatctatactctacctgccactagtggtggggcctctttgtcagccagctggc

SEQ ID NO: 915985 - DNA, 696 bp, Homo sapiens
ctaagaaatataatttgctcttttactatttgaaattcaagttattaaactaccatggactagtgaagtatgacycatatccatatgacccaccttagaaggagtcatacacactgcctcgtacaatgatatcctaataatgtaaaactaataattaatttttgggggaccaatcaatttagaatcaaagcccctctgttatgttgcaaaatacctacagaatgcacattcttttctacattgaaagacaggtgaccacttcccttcagcagactcttattgtaagatcaatatgtgtaaatattgatcttatgccctctattgaattaaagtttgaactgtatgtcttattcaggtgacatatgtcatttgtatcatatgtttttatttggtttgaaatttcaagaagctaaatttgatgtcagctttccaagatttctaccttttacatttgctaagttcttgaaaaagagtgaggaacacatctcttcatatattcacttactacagatgaagtacctagtcagtatttttctaggagctgtggatacaacaatgatctagaaggtgtcatatttggcctctctcagggagaaagacagacaacaaaaataacatcttatttgaaggccctatagccatttttctttgttggcattcttctcatagcattcttgctagctgatttgcttttta

SEQ ID NO: 915986 - DNA, 600 bp, Homo sapiens
gtgtgtgtgagacagagagcaagagacagggaaagagcrtgtaaattaaattaactaaataaagggatatagtataaaaggactcaaagacagattttcttaaggttttcctagatcctagtaattgcattattatcatttggttttctttagtgtgtctcccagtgattgacagattgggcaattctgatcataaggattctggtctctaagtgtccagaatgtatagagcattataaaaacagcttagcttactaattgcagcttccttccctctttgcagcttcttttcctaactctgcactgcaggcccagtatattttgtaacccccccaaatctcatttgcggccagaattgtgacatcaactcttttttttctggtgtggtttggaattaaatcatggtgagaactaatttcagaaccctcgggcgagtcatggctgtttgagcaactcttaactttgcagctttcataagtgctcattgtctaaatgtatgcccatttcttggaactgagcttctattttgaatctaactttgtattgtcaataccctctaggcaaataccaccaggaacacacctataatcaaacaaattg

SEQ ID NO: 915987 - DNA, 600 bp, Homo sapiens
gtgtgtgtgagacagagagcaagagacagggaaagagcatgtaaattaaattaactaaataaagggatatagtataaaaggactcaaagayagattttcttaaggttttcctagatcctagtaattgcattattatcatttggttttctttagtgtgtctcccagtgattgacagattgggcaattctgatcataaggattctggtctctaagtgtccagaatgtatagagcattataaaaacagcttagcttactaattgcagcttccttccctctttgcagcttcttttcctaactctgcactgcaggcccagtatattttgtaacccccccaaatctcatttgcggccagaattgtgacatcaactcttttttttctggtgtggtttggaattaaatcatggtgagaactaatttcagaaccctcgggcgagtcatggctgtttgagcaactcttaactttgcagctttcataagtgctcattgtctaaatgtatgcccatttcttggaactgagcttctattttgaatctaactttgtattgtcaataccctctaggcaaataccaccaggaacacacctataatcaaacaaattg

SEQ ID NO: 915988 - DNA, 636 bp, Homo sapiens
tttttagaagattcctattcattctttaaaactcagctcaaacctcaaaagctcctagataatgatcactttcgccgcagtctcattcagaggctcttccacgtgratgggaataatacctttggtgtacccccatccacatagtgctacattgaagctttctcggattgttctattagtgttttttggcttcactgtatccccttgccctacaatctagtgccataaactccataggtacaagaacttcatctgtgtcttcacctcttcagatgcctgacatgcatgcaatgtggataagctgaggatacaacaggttgttcagcaaaccacaattgtctcatgtgtctggtgaagagaaggcatgtgagggtggttaagtagatgaaaccaaaggtaggcagaagccagtttatgaagttcatggaagctacaatgaggaatctgaacatattttgggtgctctaaaaagtaattttaggattataatcaacaaagtaaaataattaatagaagggtttctttatttattgaagatttatttattttaaaaacaaatggcaatgttttaggagttacttatatagcatctcatttaattcttctaacaaacctttaagaaaaatattattaggt

SEQ ID NO: 915989 - DNA, 642 bp, Homo sapiens
gctactttctgttgcacctactctatgtgggtactgtcccaagctatactctacatggagatcactagtgccctaggttgtccatttttagtttctatctcaatctccacatgaacactgtttagtcctcatcttgtcctgtcactatgtttgagtctgttgataacttttaccatgttgaaatattttctcctgttgcattcttgcaccccacattccccaggttttcctgcttctccactgccatttgttattggaccattttgctgctacttctcctctttcagatccataaaaatgttgttaaagacccaggcctcagtctttggtcctcctgtcttctaatccacactcatagtttgagtgctctcatccagtcctgtggctctacaaattattacggtggtgtttcccaaatttttatttctagtctcaagctctccctgaactctagactcacatatttaactatttgacatctccattgagatgcctagtgggcatctcaaacttactatgtttctaaactaaatgctggtttcttcttctcttcaattttccatattttaataaatgaaaccaccacttatcagagtgctcaggctcaaccttgatgrtatttttcttttatacccaagacac

SEQ ID NO: 915990 - DNA, 623 bp, Homo sapiens
tgagattgcaataaaaataccgttaggatttaggcatttatttatttcaaaagtcaccaagctgaatttaaagtccattaggaaaggcaaaggtccaaggataggcaagacaatcttgaaaagaaaaaaatctgaaagacatttactctcttcacagattattatagagctagagtaatcaagacagtgtgatattggtacaaaaataaacaaatagattaatgaaatagaatatagtgtaccaaaataaaccagcatatatattgccacattatttgtaataggaaacatagcaattcaataatagaaaaagggtgttgttaataaatagtcctaggccatttggatattcacatggaaaaaaattatcttgatccctaactcctcacacacccccccacacacacagtttccatttcatttgcaatctaattgttaaaagtaaaataataaagatattagaggaaaatgtgattatcgtcatgattttgatgtaaataagacaaaaagcactaaccacaaaagaaactgtttttcaaaatacatatcaagtcttctgttataattayggtagaataactaaagaggtttcctccagttagaatactggacaaagtcacaat

SEQ ID NO: 915991 - DNA, 635 bp, Homo sapiens
tgggaataaaagataaagaagaaagaacaactcattggatgagcttaaaaacagaatagacattgaagaagtttatcaattaacttgaaagtatagtaattgaaactatagaaacgtaggcccaaaaagaaaagagaaaggctaaaatgaaaattaaatcaagagcctcatgacttatatcacaatatcatatgtcatatataaaaccctgtaccaatttactaacgaataatactatcctggtttaatttgcatttctttgactacttgatttaccatttctttcacatggcttttgttaatattttttcttagtaaatttccaggagaaaaacagtcgtttatgttatcacaggcaaactgggatcacgttgattaaatcagaatcttttatgataaacagccatttcagcaatcagaatataggccatcggttagatgaaagtaggaatggacccacagttttttttcttacctattagaataactttaattctaacttgaatccttgatgagaaggtgagtgtgccgttacaggttttcattttagtctttaaaaagacaatcatgatcaaagagctaccacaaaatgaaaaayaacaatgagaaagtttgcttgatatgcttttgcttta

SEQ ID NO: 915992 - DNA, 617 bp, Homo sapiens
aacctcttacttgtaaaatagaagctattccatgttaagattatgacaaccatttgaattattttataaatatgataatttcaaaagtatttaaaataattaackgtttcaaaagaaataatgaatgaattctaatgccgaataaggatttcaggaacacatctttcttccaccttggtatcctgctataatattcagaaaatccaaattccaatcttaggtcaaccaggtattagctaagtgactttgtgaacactgtgtaagcctctttacctctttaacttttgggtaaaagcttttttaagttgtataataatttctgctgttacttcagggttttaggtgtcaaaggaaataaggaaggtgcaagcatttaaacatttgagaaccctacttgggagcacatgatgtgtcctccaaacactatggtcttgttaattgtcaacacctgactcagagcaggcacaagctatgttaagcacttataatgaattagaaaataaagttgaccccaaaggtgaaaaggatctgggcctttttttcttcccaatatgcaagtgtgttcacaacatgagtgatcagaagtcaggggatgctgggctatcccacgtaactct

SEQ ID NO: 915993 - DNA, 623 bp, Homo sapiens
aaatccaaacctatcaaatagagaagggataatgctacggcagcaaacagcagggaatcaaatccagatatagtgggtaagaaaaggttctctccaaaatatagcgtttaggtcttcawaaggatagcaatgaatcattttcactcatggcatcttgaaaccttcttcagatcttcaagagccagtgaggagtagcagaaacaggccaagtatgtctcattttaaatgccagccctttacatagcagctatacgaaatgacttattctgagcctcatcctcctcatctgaacagacaggaataatacataggtcacaaggactattctgaaggttaattaacttatatgttttacacatcggtgacagagaacgcattaaataaatggtagttctctttcttccaacaattcctgctgccaccaaaaacactttcttttataatatccaactgtgatgtctatctaattaaggcagctcctaaacctagattatatgaacagatatgaggtaatctgatttggaaacaatccaagtcaataaaaatgggcgctcacatagactgctttgttatggtaacatattcaattcagaatgaactgaaatatcacaaatcctacattt

SEQ ID NO: 915994 - DNA, 584 bp, Homo sapiens
ctatacacatttttttaaccatccattttakaaaaattcctgggaaatttgtcagaatctgtgtaatcatcattaatttagcaattctcaaaggtaacccagagttcatccagctgcagcttattccattgatcacaataatccaccccacccagaactttcctcatgaaaggaatcttcttggagtggccatctggatcgtgttatcctaatcagagtgtagagagcatacaaggtgcagacactctttccactgaagagtcaggctcactcattcttggatgtgcttccccctttcctttcacttccctctttctttcttttatctccactggagaggtattggatgatttactgacattaaaaaataagactataataaattttattttctctgagtaatgcgcacttctgaaaactgccacccccatttctacacattaggcctggagtggaggtgaggggtggcctaaactaaaaacaaaaaccttcccacttgcagataattgtttaatgggcaaaagcttcagctcattcttggattttccatattgcaaaccggtggccccaaatttagtttatag

SEQ ID NO: 915995 - DNA, 683 bp, Homo sapiens
accggattaagaacttgtcttccygcttggcatgctttcctctgactgatcaccacccttagcctattttacatatacctaccctttcctaattgtttttctacactgtcgtgcccacctttgagtggtgtttttgcttcaaacttttttgcatactcacaaaccaatcagcatgcactccccattttgagtccataaaagctccaggctcactcatattgggggactttcctgcttttaggtaggggaagcaccccccgcccttctttctctttgctgagagctttcctttcatttaatacattctactccactcactctctggtgtctgtgtgcctaattcttcctggtcatgagacaagaacccgtacctagctgagctaaggagcagaaaaaaatcctgcatcaaccccaataactggattgtaatcttgttcattctgcttataggcctaacatggtagcctttctaataatccactctagattgagattattccttgttttcgtgtgtacattcattttctattactaccataacaaatgccaatcattcagcatctttaccaaacctatttataatatcacagttcatagatatctaagctcagcagagctcagctgggcctctgctctgggtttacaaggctggaaccaaggtatcagcagtgctgcattccttt

SEQ ID NO: 915996 - DNA, 622 bp, Homo sapiens
ttaatccatgtgcggccatttatatttggcatgcataaatgtcatgaagaacagggaaaaaatataattcatgagcaaaatgcattttatgctactgtycccttgccaaattaagtattatagttggaaatttagggtggaggctcactttgggaaaaaagaatcaaattgtctggggattttgctttcatcaccaaagggattttatgtgtttggaaggatcatcaattcctgacttggtggtagacaatactcttacttcacgcaggtcctgcagaattctaatatggcttggttgaaatttcttcttttgactagaaacttttttcacattttttttcagtattccctttgatgcagtcaaaataggtggacaaatacgttgtctacactgaaacaaagcttgcttgaattcacctatatgatgatgtcttcatgagcttgctttgcctttccaaatctatctttaaaagattcactaatctccagattttaaaacatagaggaatgttccaacagtacatttttcaagtgatgtaaaaagttcttggaattaatttgtcatcagccttgctctaaggacggtgttgtttcagccatggccatttaggaactgatcatt

SEQ ID NO: 915997 - DNA, 622 bp, Homo sapiens
gcagtataatttatcaacttttcctttcaggcttagtattttctgaactttgttttaggatttttgcctaattccaagttacaaagattctttcccttttttatttagatgtttataattttacttcttacatgtagagcaataatccatttcaaattaatatttgggcatgggaagtgaagtagagatcaaattttattttatttttatatagatacataattgtttcagtactgttctagtgatcaatttctgccaaaaaccaaccaagcaaaaacaaacaaaactatcccaaaacttagaagtttaaaataaataaagtgagtaaataaaataaaatgggtaaaacactcattttatttttttccatgattctttgggtcaggaattatggaaaggctcagcaaggtggttcatctctgctctatattatctgctaggatgcctggctttgaaggatctacttccacaatggcttcttccctgttatgtctggtgcccgggcttcttggyccctctctatttcttaatctccacatggtgtctcatccactagggcttctcaatgtggcttgggattttcacagaacagtgacccagagtagttgaactttttacatag

SEQ ID NO: 915998 - DNA, 622 bp, Homo sapiens; identical to SEQ ID NO: 915997

SEQ ID NO: 915999 - DNA, 595 bp, Homo sapiens
acactgtcctcaaacactggaccatgactgcctgtacttaccagacacaaacctgggatgtcattgagaaggggattctgggaaacgtagttccagacctcttctctgggatatgtagggagacatagaagcaggtgggggtaatgaagcattgtagcacactcaggaaaattaaacaaaacatcttaaattccaacaggaaatgtgtggccacacatcccttatgagaccaatgttctataactgcaagttcaatattatttttattatgctggtgtttcttaggctttattgcaattataataacaccttaccttgctatttatatccttttaaatttttgacattattttttgcttagaagcttttttttaaaaaaaaaaaatcagtgcatgagaaagtaaaagacagcgccaacttaggaaggaccatggtcccagacagaaatagcagtacccagaactagaagagagaatctaggaatacyaaggcaggacagagagatgtatccctggtcccatgggaatgagaaaattagcaatttggattagagagtgaacagttgaaaagcagacacacacagggttcctgatat

SEQ ID NO: 916000 - DNA, 595 bp, Homo sapiens
acactgtcctcaaacactggaccatgactgcctgtacttaccagacacaaacctgggatgtcattgagaaggggattctgggaaacgtagttccagacctcttctctgggatatgtagggagacatagaagcaggtgggggtaatgaagcattgtagcacactcaggaaaattaaacaaaacatcttaaattccaacaggaaatgtgtggccacacatcccttatgagaccaatgttctataactgcaagttcaatattatttttattatgctggtgtttcttaggctttattgcaattataataacaccttaccttgctatttatatccttttaaatttttgacattattttttgcttagaagcttttttttaaaaaaaaaaaatcagtgcatgagaaagtaaaagacagcgccaacttaggaaggaccatggtcccagacagaaatagcagtacccagaactagaagagagaatctaggaatactraggcaggacagagagatgtatccctggtcccatgggaatgagaaaattagcaatttggattagagagtgaacagttgaaaagcagacacacacagggttcctgatat

SEQ ID NO: 916001 - DNA, 705 bp, Homo sapiens
caaaatcgggcaaagacaaaacaaaaaagagaaaggcacaggccagtagtccctgattaacatagatgaaaaatcttcaagaaaatactagctgactaaatcctgcagcacatcaaaagttaattcattgtgatgaagtaggcttgattcctcagagctggttcaatatgtgcaaataaataaatgtgattcaccacacaaacagaattttaaaaaaatattatcatgtaaatagatgtaagaaaacttttgataaaatccaataccactttatgataaaaaccctcaacaaattaggcatcataggaacatacctcaaaatagtaagagcttgtataacattccacaaccaacatcatagtgaaagggcaaaagatggaagaattttatgtaagaattggaacaagtcaaagatacttgctctttccagtcatattcaacagagtactggaagtccttgccagatcgttcaggcaaaagatagaaaaaaaggtaccctgatagaaaaagtagaagtcaaaagatctctcttcactgatgacataattctatatctagaaaatcccaaatactccrctaaaagacctctagaactgataaatgacttcagtagggttttaggatccaaagtaaatgcagaaaaatcagtagcatttctatacaccaataatgctcaaccttagagccaaatcgataacacaattt

SEQ ID NO: 916002 - DNA, 548 bp, Homo sapiens
ggtctgtggattcagctaacactggatggaaaatatttggaaaagagaaaattccaaaaaccaaaacttggatttgccttgtatcaaatactatatatatttatatttatataktatatatatttatatttatatattatatatatttatatttatatattttatatatatatatatatatatattttttttttttttttttttttctgagatggtgtctcactctgtcacccaggctggagtacagtggtgtgatctcagctcaccgcaacctccgcctcctggaatcaagcgattttcccacctcagcctcccgagtagctgggattacaggcacatgccaccacgcctggctaatttttgtatttttagtagagacagggtttcgccatgttgggcaggctggtctcgaactcctgacttcaggagatccaattggcctacctcggcttctcaaagtgctgaaattacagatgtgagccaccatgcccagcctcaaatactgctttgaatccatatgaagaaagtaatatgtaggcattgtgtta

SEQ ID NO: 916003 - DNA, 618 bp, Homo sapiens
gcaaacaaagcaaagtccataatatcatgatgcttactttctggtgtggacatggagatgggaggcaaacacagaaatgcatgaataaaataccttgtccaagacggtaagagtaacagagaaaagtgaaaaggggaaaggagagaagagaactgaagtgcagtgtggctgcattttatatgagtaatcagcaagcttaagtgataaggtagcattgaataaaggccagaggaaaggaaggagtgacccatgaggatctctgaagaacattctggtagagggaatggtttatggaaacaaacaaacaaaactacaataaacaaaaacttgtttttctctaatcatggtatatatatatatatatatatatgtagattagcatgctttagaaatttacttttctttaaataatatataactggatataaaacaaagtgaagattttactaacattaggtttggttaatcatacctatagtaaccctcaaagtaaarcacacactctattgccctccttatcccagcatgatacttacaagaacagaaaatagtccaatgcatgttaacatttgaaactaaaacctaaaaaagaatgataaatgatataatactcttccc

SEQ ID NO: 916004 - DNA, 618 bp, Homo sapiens
gcaaacaaagcaaagtccataatatcatgatgcttactttctggtgtggacatggagatgggaggcaaacacagaaatgcatgaataaaataccttgtccaagacggtaagagtaacagagaaaagtgaaaaggggaaaggagagaagagaactgaagtgcagtgtggctgcattttatatgagtaatcagcaagcttaagtgataaggtagcattgaataaaggccagaggaaaggaaggagtgacccatgaggatctctgaagaacattctggtagagggaatggtttatggaaacaaacaaacaaaactacaataaacaaaaacttgtttttctctaatcatggtatatatatatatatatatatatgtagattagcatgctttagaaatttacttttctttaaataatatataactggatataaaacaaagtgaagattttactaacattaggtttggttaatcatacctatagtaaccctcaaagtaaaacacacactctattgccctccttatcccagcatgatacttacaagaacagaaaatagtccaatgcaygttaacatttgaaactaaaacctaaaaaagaatgataaatgatataatactcttccc

SEQ ID NO: 916005 - DNA, 573 bp, Homo sapiens
tattctcaagcctcatcagaataaagagaaattgatgaccctgtcacttcagtatttccatcatccagcagttaattttagttcaatgctttaaacattcttcacgcctggtgtgctttcagttgtgtatattcacggtgagtactcatacaaccattctgtttttcactttcagtacagtattcaactaatttaatgagatattcaacaccttattacaaaataggctttgtatgtagattttgcccaactgccgcctatgtaaatgttctgatcacatttaaaggtaggctaggctaagctataatgttctgtaggttacgtgtattaaacatatttttgacttacaatattttcaacttgatgacaagtttattgggatgtaacaccatcgtaagtagatgagcatctgaattctatagggtgctagaaactgtgctatacacttcatgatattgkctcttttattatattttagaattttatatagggatatatggatttttataatcccaaaggtcagatgaagaaacagaggctaccagagtaacctgcccaaattcacgtagtaaa

SEQ ID NO: 916006 - DNA, 586 bp, Homo sapiens
gttgccttgagcaagtctcatgtttctttctcccgcttacgcagtcaagcacatacatagataygtaataaatattgattaaggttctgtattaggctgtgtttttatcagtaaggattaataggcataaatgagagacatgatccctaccctggagcctaaatggcatgtgttataaagacgctttcaggctgaccagttcttctagtgcagctgagaagacagccatgcctcctcattagcccactttatagggaagaaatggagactcaaagtatctaaatcacttgtctgagataaaacagagaacccagagacagagctgggactccactcagatctttgactactgaagccaaagacgcctaatcaataaaacactgaattattctcagtgatgctattggataattatttacgtttaggttttatatttgtgtttttctgcttaggaggtaagaaacgtgtcaggaacattaatgccatacttaagaactgacatttaactactgaattctgttttactgcggcaatattgtgaattatgcaattacactgtaccttggattagaagttatttaactcc

SEQ ID NO: 916007 - DNA, 586 bp, Homo sapiens
gttgccttgagcaagtctcatgtttctttctcccgcttacgcagtcaagcacatacatagatacgtaataaatattgattaaggttctgtattaggctgtgtttttatcagtaaggattaataggcataaatgagagacatgatccctaccctggagcctaaatggcatgtgttataaagacgctttcaggctgaccagttcttctagtgcagctgagaagacagccatgcctcctcattagcccactttatagggaagaaatggagactcaaagtatctaaatcacttgtctgagataaaacagagaacccagagacagagctgggactccactcagatctttgactactgaagccaaagacgcctaatcaataaaacactgaattattctcagtgatgctattggataattatttacgtttaggttttatatttgtgtttttctgcttaggaggtaagaaacgtgtcaggaacattaatgccatacttaagaactgacatttaactactgaattctgttttactgsggcaatattgtgaattatgcaattacactgtaccttggattagaagttatttaactcc

SEQ ID NO: 916008 - DNA, 289 bp, Homo sapiens
aagcaaaacataagtacatgtggatataaataacatctactatctaaactctacccaatatattccccaaaataattccctgaaataggcactattatccctatgtttcagatatgaaaactggagctcagagagtttaaataattagaccagtgtgacataggtataaagtaatttagcaaaaattgrgctcatttaggactagatgttggaattagacagaaaaaagttagacacaaaaaattgtgtctaattccaacatctagtcctaaatgtactaagccaattt

SEQ ID NO: 916009 - DNA, 564 bp, Homo sapiens
attctcaagcctcatcagaataaagagaaattgatgaccctgtcacttcagtatttccatcatccagcagttaattttagttcaatgctttaaacattcttcacgcctggtgtgctttcagttgtgtatattcatggtgagtactcatacaaccattctgtttttcactttcagtacagtattcaactaatttaatgagatattcaacaccttattacaaaataggctttgtatgtagattttgcccaactgccgcctatgtaaatgttctgatcacatttaaaggtaggctaggctaagctataatgttctgtaggttacgtgtattaaacatatttttgacttacaatattttcaacttgatgacaagtttattgggatgtaacaccatcgtaagtagatgagcatctgaattctatagggtgctagaaactgtgctatacacttcatgatattgkctcttttattatattttagaattttatatagggatatatggatttttataatcccaaaggtcagatgaagaaacagaggctaccagaataacctgcccaaattcac

SEQ ID NO: 916010 - DNA, 642 bp, Homo sapiens
tcactaattgtgatggttgccttgaaggaggtaaccatggagatgatggggagttactagatttggtggtgggtgatggaggcagtgtattagacaggaaggtcagagaaggtctctctcagatattattctgcttagatttaaaaatctgataaaaaccagttgcatttaaagtcaggggtgaacaaggctcaacctgttgcaagaaatgtgtccagagaatggtctacatgtgatcaaattatatgagataggatgaaaaagtggggaggatcctacttataaaaatgtcttaaagccattgtaagatgtttggattttgccctaagaacggtgatacgctattgcaaaatcagtggtttgacagttctaaaataatgttttgacctaacagtgtaaagtcaggtgtatttctttgttgacaatgcattgtcttgatcaaattagtggtcctaccatgaatgaaatttcaggcaacatgcaaagctatgtctcacactgaagttatagtgagtctgttaaaaatgtttctttaaatctcattaagtaggcacgtggttattttgcctaaatgrggggtggtcccttgatagtttttcctcccaaacactatattttgagaaacatttaagaaatctggaa

SEQ ID NO: 916011 - DNA, 600 bp, Homo sapiens
tctttgtgaatgttctgtggtgggtmttaaaatgtcatacatagatctttatactttgttcccattactgtaagttcatctgcgtgtcccagttcttccaatctttttccttcaagctctatcaaaccaatcaaaccattagcttctgtaaatgtgtctgtacatactcctaccatggactttctatttccatgtaaagtggatgacaacttataccaccctaagatctgcctattgggataaatgtataatcaccagtcgttttgcaacatctatgagtgggactattgtataacaataactgattttcagtttgaacccgcttacaaaggtgaggcccttgggaaacaaactcaacctttttcctcctctgtcagatggctgtaaaaaatttcccccataccaaaagagagatgctgggtgcaacaaggaagaatgaaatggtctgggcgacccgctgtgtagattaatctcaccctccaagattctttgtgcctgatcccatatatattgctttcttcttaaaatgcattgttgctaggccttcttgactttggagcttgtgaaaataacatatatacagtgcaagatgggcagttg

SEQ ID NO: 916012 - DNA, 654 bp, Homo sapiens
caattattagtgattgagtcctctgagttctatcttcaaaaatatttataatgtagccaaacaattctgatctcttatgtggaagataaaatagtagagcctgtcaactagtctcagtatgttcactctcaacacaatctgtctagtcaattccctgttaagtcttttcccttcagtagatacaacaatcaaaggagcttgaatatcaggtcttgttagaatccttcctaaaattctgcaatgactgttcaaggtactttggctaaatctaggggcatttttttttctatagcccaaattataaacttctgccttccttttaaaatatttctcctgttctcaaaatccttctttcagtttctgggaatggccagctctctcctatcacagggcctttgcacagacccctgttcctagaacacttttcaccttacctgccttttgctcagatataaaatatcagcttacattcaattattttttaccatttgctttagatatcaacttacacttcacctcttgtgaaacattttctctcactccatgatttacactaggttccatctcaaaacacatcyttattatttgtttcttcataggtttataacattttggaattatttattgccggttcacttttatattcctttctct

SEQ ID NO: 916013 - DNA, 639 bp, Homo sapiens
cttagctatgaggacgcaaaggtataagaataatataatggactctggggactttgggggaagggtgggagtgggatgaaggataaaayactacacactgggttcaatgtaaactgcttgggtgatgggtgcatcaaaatctcagaaatcaccactaaaaaactgatcagtttaaccaaacaccacctgttcccccaaaaactgaaacagtaataataatgataaataaaaatttaaaaaaacaaaaattaaaataagagctctttttcaaacatatacacctacacaagaaaataatgtacaattcataggattgtgttgcttaaatattttatcaaatatttattttatttttagtgttgaatggcatatcaaataaatcattccatgatattaccaataatatatgattataaaatgatcaagtggctgggcacggtggcttatgcctgtaatcccagcactttgggaggccaaggtgggcggatcacctgaggtgaggagttcaagaccagcctgcccaacatggtgaaacctcgtctctactaaaaatacaaaaactgagccaggcgtgttggcaggtgcaagtaattccagctactgaggaggctcaggcagtagaattgcttgaacctggga

SEQ ID NO: 916014 - DNA, 632 bp, Homo sapiens
aaaagatataaataaaagtgttcaaaaccacwttctctgtataagagtatttaattgaaaagcctacagaagcagatgctcaacatttcacatatgaatattgatgctatgtgtcttattgtaaaacagcactttgggttgctaactaaagaaaatgtatacaattgctgagacagtgaagtatggtatcaaagatacttgtttggaaatgcaatgtgaatctgtattacaaagtcaatcaaataccactttgcagtaacactgtatactcaggagctgagtgatgatctagaagaccaactcactgaacaagtaaaactagtaaagtgtttttcattgtgattagactaatgcactgatactgctaacatggcaactcttttagtgtagtccattttcaacattatattgatattatggaacttttttcttcatcgctcatgtaaactgactagatctgaaccctatgatatgaactgtcaactggtgtagtttagagattacgtttcacatgcatgtttctgtggcataatatctattacagaaaacattcttgaatggttacccagatatggtgcttttgttaaaatgcaaatcaacacagttttctttatcaaaaacatcttgcatgg

SEQ ID NO: 916015 - DNA, 687 bp, Homo sapiens
taattctgggacataggaacaaaatattaacataggaagagagaaaagaaasaatttggtataaataagcagtcactctaagtttcttaggacttactatttgatgactaggggctaagatgatatgtacacttatttacttaatttaattttcctttcttccaccacttgttgacctattataaatatagaattcctagcacattaaggtactatgtgatatttttgtgttttttctttgtctgtattagtcacaattctccagagagatcgaacataggatatatataaatagatatatgaaaggagatttattagggagaaattgaatcacacaattacagagactgagaatttactcatataattatggaagctaagaaattccataataggcagtctgcaagctgtagtaccagggaagccgttagtatggcttagtccaagatggaaggcttgagaactcttagtttgaaagcaatggcccaagagccccggggaccactggtgccaggcctggggtccaaaagtcagagaacttgaagttctgatttctaaaggcagaagagtgttcaggctctggagagaaataatttctccttcccctgcattttttgttttttaacatccatgccccttaccaattggatggtgccacctacattgagggtgaatcttccccattaa

SEQ ID NO: 916016 - DNA, 603 bp, Homo sapiens
tggaaaaactctagaaatatgtattttaagatcagagcataaagaatttctataatttaaaatattacaaataaatagcatctgtagctttgctggatatgactaaacatttcaataactctgtttttgtatgattctataaaaaataattaggctgagtgccatagctcatacctgtaatcctagcactttgggaggccaaggtgggaagattgcttgggcttaggggttaaagcccactctgggcaacatagcaagaccttgtctctacaaaaaattaaaaaattagccaggcatggtggctaatacctgtagtcccagccacttgggaggctgaggtagggggattacttgagcccaggagtttaaggctccagtgagctaccatcatatcactgcactccagcctgggtgacagaataatagaataattgtattttatcatttttaatatgtttgctgtcccattttgaatacatttcattttaattcatttcttgttagggatgttttagtgggcatatrttatttgaaccacttagcatctattcccacttcaaatggaaatgctctgattgacctctcaggctccatgacttggca

SEQ ID NO: 916017 - DNA, 631 bp, Homo sapiens
atctttatatctatgtgtagtcaatgtttacctaccatttataagtgagaacacgtggtgtttagttttctgttcctgagttaatttgtttatgataatggcctccagctgcatccattttgctacaaagaacatgatttcattcttttttatggccatgtaatagtccatggtgtatatgtaccacatttcctttttctgatccaccactgatgggcccctaggttgatttcatgtcttttgtactgcgaatagtgctgtgatgaatgtgagtgcttgtgtcttttaggtagaacaatttgttttcttttggacatatatccagtaatgagattgctgggtcaaatggtagttctactttaagctctttgagaaatctctaaactgcttttcacagtggctgagctaatttacattctcaccaacagcatatgcctctcctgttctctgcagacttgccagcatctgtcggttttttatgttaataacagccattctgactggagygaaatggtatcacattgtggttttgattggattttccatgatgattagtgatgtggagcattttttaaagtttattggccatttgtatatcttcttttgagaagtgtcttttcatgttctttgc

SEQ ID NO: 916018 - DNA, 672 bp, Homo sapiens
attcacccattttgtagtaacaattcatcaatcacccttcagagaatcagtagttttccaatcttcccatgttgttcaaattaggttgatttcttttctgctccaagcatcaacctatrttccagatttagtcaatcacatgaatcagttctgatcaatgagagacaaataagtggtttttgcaaaagatatttaaaaaaaagaaaacattactggggtggacaaggtgaaaataatataagcatggattttaaagggcacatgcatgcacacacacatacgaggacacatatagagacacagggcccagtgtagagggacaaagacaaaattgttacaaaacaatttgaacctcatcttctaatgtcttcctcacattatcacatttttgtcacctttgagatgttgccatgtagttggatttctctttaccaggaatgctctgtgatcttggtctttgcctagctgtttccttctcaaacttcaggactcagtttaaatactaactcaagagagattttgctcaactatcactcaaaatggcaccatcaacattctctataaaggctagaagatgtggctgctatatcactgtgtagtggtttcattcatttgtttatttttattatctgtcttttcccttgaaattcaagctccgagtcagtaggcacc

SEQ ID NO: 916019 - DNA, 632 bp, Homo sapiens
agtaaataggaacccacagaattggagaaaatattcaaaactatgcacctgcaaatgtctaatatccagaatctacaagcaactaaaaaaaaawcaagcaaaaaacaaataactttattaaacaataggcaaaggatatgaatagacacttctcaaaagatgacatacaagtggccactaacatatgaaaaaatgccccacatctctattcatcagggaaatgcaaatcaaaaccacaatgagatgccatgtcaaccagtcagaatagttattattaaaaactaaaatatgacaaatgctagttaggttgtagagaaaaatgaacatttatacattgttggtggaaatgtaagctaattcagccactgtggaaagcagtttggagatttcttaaagaacttaaaacatccatttgactcagcaatgtcattactcagtatataccaaagaaaagtagatcattctaccaaaaagacacttgcattgacatgctcatcaaagcactattcacaatagcaaagatatggaatcaacttaggtgcgcatcaatggtgtattggataaggacaatgtggtgcatatacagcatggagtactaggtcattatatgaaagaaaggaatcatcatttac

SEQ ID NO: 916020 - DNA, 584 bp, Homo sapiens
ctgctagtagtcagcgactgagggatatttgttttcagggtaactgtasaacttgagacagggtgatgagaataggcagcttaaaataccacaaagcttacagctcttaccataatttagcctttctcttttgtttttttgtttattaaataaattattttcagattcctcaaagtatttggctaatttccagagttttaaaagagctgattctgattatttttgcacatttttaattgtttatatggaggagataatttgcatatgccctcacatcatcatttgtattgctatcactcttctttttcatattacggtcaaatgtaatatcactagaagtaaaaatattttcatgatcacttgctaataagataaaaataagatatctattacgtatataatttaaatccaatttaagatcaagattcagccttaaacttgaccttttcagaaatgctttttaatattcagaaggtagtggttccttcctaaataacacaatgtagctgtaaacaattggatccgtttcctttccttacccatttcattgaacaaatgtcttttccctcaactcccttatattt

SEQ ID NO: 916021 - DNA, 581 bp, Homo sapiens
cttatttttatgaaaaataaatcctgataggactgatgtgcttgcaaaataagttctagtcttattacacttggccagattatttgcatgaatcacagcaagaataatcattttccagaaagtgacattttttacttatgtcaggaaccctgtacagggactgtgtagacaaggtgtgaggccagttttcccaaggggttttattgtctctataagtcaaatttggttccttaaagaaatgcacattatttcagtcaaagccttgataaaataaccagtgtctctaattgtgtcctgttgcaaaagaaaatagattcatattgcatttatgcaaataactgtattgccatgagttaagaatattcacaaatagttttcaaattcaggagaaatcaggtaggaagaaaaaacattatgcttcaaattatgttgatagtagtataatttatttactcaattctttaaaagctgtaaataaygcaaaagaaaattttcttgtcttttaaaaacgaaggattaacaacattttaagcaaaaactcataaaagaattattttagtcttctactagtttagtccatg

SEQ ID NO: 916022 - DNA, 624 bp, Homo sapiens
aagttctgggatacatgtgcagaatgtgcaggattgttatataggcatacacrtacaatggtggtttgctgcacccatcaacttatcatctacattaggtatttctcttaatgttgtccctcccctagccctctaccccctgacaggccccactatgtaatactcccctccctgtgtccatgtgttctcattgttcaactcccacttatgagtgagaacatgtggtgtttggttttctgttcttgcgttagtttgctgagaatgatggttcccagcatcatccgtgttcctgcaaaggacatgaactcatctttttatgtcttcatagtattccatggtgtatatgtgccacattttcttcattcagtctatcattgataggcatttgggttagttccaagtctttgctattgtgacagtgctgcaataaacatacatgtgcatgtgtctttatagtagaataattgataatcctttgggtatacaaccagtaatgggattgttgggtcaaatggtatttctggttctagatcccagaggaatcaccagactgtatttcacaatgattggactaatttgcactcccaccaacagtgtaaaagcattcctatttctccacatcct

SEQ ID NO: 916023 - DNA, 580 bp, Homo sapiens
ggctaacattcaaattcacgaaatccaaagaaccccagtaagatactccatgagaagatcaaccccaagagacataatcttcagattctccaaggtcgaaatgaaagaaaaggtattacaggcagccagagagaaagaacaggtcacctataaagggaagctcatcagactaacagcggacctctcagcagaaaccctatgagccagaagagaatgggggccaatattcaacattctttaaaaaaaaaatgtccaaatcagaattcatatccagccaacctaagatgcataaatgaagaaaaaaataagatcctttacaggcaagcaaatactgagggaacttgtcaccatcaagcctgccttgtaagagctcctgaaggaagcacaaaatatggaaaggaaaaaccattaccagccactaaaaaacacactgaagcacacagaccactgacactatgaagcaaccacataaacaagtctgcaaaataaccagctagcatcatgatgacaagatcaaactcacacataacaatattmaccttaaatgggctgaatgctccaatttaaagacactgaatgg

SEQ ID NO: 916024 - DNA, 577 bp, Homo sapiens
aatggccaggctggtctcaaactcctgacctcaggtgatccacctgcctcagcctcccaaagtgctgccattacaggtgtgagccaccgtgtctggcctgatttttttgtttttttgtttgtttttttgtttgtttgtttgttttaagtatatctataacctttgttttctctggagttaattaatgccttactttttattaataacatttgcttatttttttcccgtgtttatattactaattgagacttaaactctgccagaagtataactctttcctctacaaacacatcagttaatgctcgatttcttttcctttttgggccattcttcctggagcccttgctgctgctccaatctggaccagttatctatccttgaactagggaacgtctcttgtcctacaatctccttcgacagcaacctgggcattccctttgctcctttccctcaaaggatcctctattgtatcctacacgcagaggacatgtgccatcttttctggccatccagcactgtgaaacatccttgtgatgtttcgccaacttytgagccccacctttcccaaaacactcct

SEQ ID NO: 916025 - DNA, 621 bp, Homo sapiens
ggtgcccttgccccgggactccagcttcaggggagctgggggaaggccttaaaggctgtaacacacagtagccacatggacaggtttctgtggcttgccttccagaacccaaggctatgcggctgtcagacttttttagcatctagtgtcagaaacacaactcaagcaagtttaggcataaaggaaatttaacaacctctggaatcaaaaaaaaaaaaaaatgggtggggattgttcagccagatataagaaggccagagatgcagctgccttcaaggatagctgggtcaggccttgaccccacgaggatctcctctctgcacgtcagctccctccacgcggtgcagctggcttccttggtgggccaggaacaaggctgcacagtggcctcacagcctgcgtgtcagggatgggctcctctttggctctgcttcagaaagtcccaggagaggccatcccggacctgccagctatgggctgggaggtgggatgcaggggaagcccagcagtctcaccaaggccacgtgcatagaatcaggagtggcaggggagtgaggacagtccyaaaacaagtggcacaaaaggaacatatcgtgggcccccaaaatcactgagctaaag

SEQ ID NO: 916026 - DNA, 599 bp, Homo sapiens
ctttcaagataaccagaatccttagatgaccaaagacttgtctcagcaaaaagatgtaaacatattctttcctcattgctcctgaataatactgttttcccacagattgtaactgatggctggaaccagctttcaggtcattcaaagatttctcagggaactggaaagtgttattgacattttacttccctaggacctaaaggcaacatctcattttaaagatgactagaaacctcattattccaaactctactagacttaggaacagaggccagcaataacagctgttgcttctgggataaccaatgacacagtgtctcagagttacatgcagaggcatgaaaggagctctagtcaaggcttcatgacttactgagacacagagaggtctcagtaaatgaatactaaccactgtattcatctttctctttgtgaagatccagaagctcatcaccatgtagaatacaatctatartattttatttctctacatattagctatataatgtggacaataatcccaactctgggtttatctgtgaaaatgacgagattcacttatctgaagatgtatatggcaaataagattatgccacata

SEQ ID NO: 916027 - DNA, 656 bp, Homo sapiens
ttctgaagaactaagacctcaagggaaaactagaaatagaascaaggagaggtctgggaatgctgtgacggtaagtaaaacaataaaaggtccacctgcatttaaacattttattcctcttgctttattcacaagtgcctaacatagggtagacacagaatattaagtatatggaagcagtttttatcaaatgatttcctaaagtgtgtataaaatagtataagtccctgtgatgtccccaagcaaagattttcagagtaaatcaataatttttaaaaattcaatgtctttttcttattttcaatgttcttttaacatatcaaaatatcttaaaaattgcatcttttccacaacaactttctgacaccaaagggatgtcctacaattcagtttaacctgaagttagtatagaccctacaagttaaagacaaagtcctttaattctgatatgaagtatccagggttagtggagaccctaccggttaagggctcagtcccacaaaactgctcccacttcagacttcagttgcaagttttcggtatctccaagttaccttcactttttttccaaaagactgcaaatttggggttcccaaaacatttcaccctaaagttcaataattcactagcacaattcacagaacttgggaaagtgc

SEQ ID NO: 916028 - DNA, 554 bp, Homo sapiens
attttcagaagaggaaggcaatgtttttatttaaaaatacaattaaaaatagtatccacatgtgaatacacacattgtggattgtctgtgacaaatatatcatctctagctatcttttttccatgacacttcatatttaggtaagccataattctattagcatatttattgatatggcttagatctgtgtcctcactcacatttcatgttgaattataatccccaatgttggcagcagggcctggtaggatatgattgggtcatgggggtggatctccctcttggtgctgttttcatgatagtgagttcttgtgagatatggttgtttaaaagtttgtggcacctacccaactctcttccttctgctccagccatgtaaaacatgcctgcttccccattgccttccaccacgattgtaaatttcctgaggcctccaccraagcagaagttggtatacttcatgtacagtctgcagaacaatgagccaattaaacctcttttctttataaattacccagtctcaggtggttctttatagaaatgtgagaaaaaac

SEQ ID NO: 916029 - DNA, 667 bp, Homo sapiens
ccataaatagtaggccatatcatagaaaaggaaagcccattttctggggaggaattcaagccagctgcagaaattcacataagtaaagaggagccagatggtcatagccaaaacaatggggaaaaggacatgaaggcatttcaaagaacttcctggcagcccctcctatcacaggccaagaagcctgggagggaagaatggctttgtgggccacacccagggccctgctgcactgcagagcctggagacactgtatcccagctgcatctctccatccctgctgctccagttccagctgtggctcaaagaggtccaggtacatctcaggaagctgcttcagagggtgcaagccataagccctgggggtttctgtatggtcttaagcctgcgggtttgcagagtgcaagagttgaggcttggaagcctccacctagatttcaaaggatttatggaaaaacctggatgtccaggcagaagcctgctacaggaatggaaccatcatggagaacttctactagggcagtgcagaggataaatgtggggttggtgaccccacacagagtccccacttaggyactgcctaatggagctgtgagaagaggcccatcatcctccagaccctagaatggtagctttactgacagcttgcaccctcagcctggaaaag

SEQ ID NO: 916030 - DNA, 429 bp, Homo sapiens
aactacccagtctggagccataatcttatggtgagtcaaacattacttgtgtcaacttgttggtgaagaaactgacagtggcacaggtcagtggtgggctttggtggtgggacagcaacctggagatcagtgggggatgggggtaaaggaaaattgagaaatgtaagaaaggaagcactggaagtgtagacctaagaatcagtccttggactttatatcttatctttacaacatattgcaggccctgcaaagaagagtattgaccagaatgatcacttagaatatagcaaggcagggaaggcctggatggtacacrctagtgctgtcctcagatgcaagtgacccagtgacccaaggcaggatgatcagaaaaaattcagcaaggtatcaagggcccactctgcagccatcaggttcataaagtcagca

SEQ ID NO: 916031 - DNA, 603 bp, Homo sapiens; identical to SEQ ID NO: 904013

SEQ ID NO: 916032 - DNA, 527 bp, Homo sapiens
tacttgaggattgtggatggaaatattcctgagagctggtcagaattccaccaaatttcaagctccaagaggagtatttgttcagcttaaaaatatcccagttgtgtgcttggtgattagtttttgaggataaaagtgcagtgtgtgttcttgcctaacgcttttccataacccctgtgtacctccaagtcaacaggacaactgtagggtttttatttcccctcttcctcatgaatcaagtcccttgtatgaaacaaatcgttacaacaacaaagagtgacagcctgacagcctagtcggttattaatgggagtgacagccagcaaatcagaagtcatggcaatgtatctgtatgaacagcaatctgtgcttagttgaataaccgggagactcaggaaatcctggagaaagagaaggaacaaaatcaaacagatacatttctatccaccccaygctaccctaaagtaattgacaagtggaaggacagcagtattcagaacttctctaggacttactttaattccaca

SEQ ID NO: 916033 - DNA, 632 bp, Homo sapiens
tgaatgaccagtgagccaatgaagtaataaaaaaggaagtggaaaattttcttgaaacaaatgatagtggaaacacaacagaccmaaacctgtgggatacagcaaaagcagtactataagggatatttacagctataagtgcccacatcaaaaaagaagaaaaactgcaaataaacaacctaacaatacaccttaaataactagaaaagcaagagcaaaccaaacacaaaattagtagaagaaaagaaataataaagatcagagaagaaataagtgaaattgaaatgaagaaaacaatacaaaataatcaatcaaacaaaaatggttttcttgaaaagttaagcaaaatttacaaagcattggccagactaagaagagggaaggtcaaaataaataaaatcagagatgaaaaaggagacattataactgatactgaagaaattcaaaggatcattagtggttactatgaccaattctatgtcgttacattgggaaatctagaaaaaatgggcatatcctagacatatacaacacaccaagattaaaccatgaagaaatccaaaacctgaacagaccaataacaagtaatgacatcaaagctataataagaagtctcccagtaaagaaaagcc

SEQ ID NO: 916034 - DNA, 611 bp, Homo sapiens
atcatgtggtttttgtctttggttttgtttatgtgatagactatgtttattgatttgtgtctgtcaaaccagccttgcatcccagggatgaagcccacttgatcgtggtagataagctttttgatgtgctgctggattcagtttgccagtattttattgaggattttcacattgatgttcatcaggaatattggtctaaaattttttttttgttgtgtctctgccaggctttggtatcaggatgatgctggcttcataaaatgagttagggaggattccctctttttctattgattggaatagtttcaaaaggaatggtaccagctcctctttgtacctctggtagaattctgctgtgaatccatctggtcctggactttttagttggtaagctgttaattattgcctcaatttcaaaacctgttattggtctattcagagattcaacttcttcctggtttagtctcgggagggtgtatgtgtccaggaatttatccatttcttctagattttctagattmtttgcataaagatgtttatagtattctctgatggtagtttgtatttctgtgggatcagtggtgatatctcctttatctttttttattgca

SEQ ID NO: 916035 - DNA, 516 bp, Homo sapiens
atcttagaacaccttggcactcgttgccaattaaacttagaaatcctatcatttatcactttgtaatgtgtcttcaataggtttggatagtctttggcttatcagtagagagtatttctccctcattagataggacgttctcaaataatgaattgtgtcttggcaaaattacaatctctcttggaaattcgaagttttgtttcttctaaggttgagcctgagaaattggaatcatttttagagacttcactgtcctatgagcaaagtaagagctcatctacccgttacatcagagttgaactaaaagggatatttagctgtgttaagttttcattggggagctgagaaaaataggaaggaattttggtgaagcccaggccatgatgttccaggtatattattttccccaggaggaagccaaagggataataactgttctgatctagaggtacatggaaaaaacagaggaaaggatgactacaragcaacaagatgcttttagctggagttgctacc

SEQ ID NO: 916036 - DNA, 583 bp, Homo sapiens
tgtttactggtaaccccttccttccctacaacacttatgcatattyaaagactatatcccctgcttcccacctccagcctggattgtaagttcctcaatagcatggctgtgttttttaacatcaagtctccatgtgagaatagttcctggcatataataaatgctcaatcaacatttgtaagtgaagaaagctattcagtggtgtctgctttaatattaagaggtggcttgcccaagattgaaaagcaccttcattgtctaaaatggaactagattctgtgggtagcaggtccattggtgccactcacaggtggccacaaaggaaccgaccttcaccagaaatgtgtgggtgcctttatttacctccagcacagagaggtaaaatggaatattcttatgacgcagatatttcgtgaatctcatgttcacctatgttatgttgcctctccttcggtattttttcatgctgtaggccattcctacttcacaagaagagtccatggttatccatgagaccagggccccctgtggacccaggatacaggctgctggcatggctcctatgcagcgcttgatgtaagga

SEQ ID NO: 916037 - DNA, 688 bp, Homo sapiens
aaaatggtataaacttccatgtatttggacttcttyaatttctctcagcaatgtttggtggtttggtcttgaatgcattttgctaacttcttctataatttctatattgctctaacattgcattttgaaatgttgctgaattcacttcttaatcatagtgaagatgactcactaagcaatgtcaggatttcctatgcaagtgatgtctgtgagaacagaattttgctctttcctttcaaatcattgaatactccttttctgagactactgtactgtatggatcttcagcacaatgtggaaaatgagggtgacagtgaacattcttgttgtgtcactaaggggaaagcattcagcttttcgtgattagttgaaaatgttccctataattctgagtgtgctaagagtttttaccatgaatggatattggaatttgtcagatgtttttcctgtatctactgaaattatcaaatgtttattctcctttattctattaatctgatgagctactttgatttttttccaatgtaatactaactttgcagacctaggacaaatctcatttattcattatgggctaagactttatatactgggagatttaatttggtaatattttgttaagtacttttgtctgttaatgccatatagttttgtcgtactattttttcacacgtggatgtcagagtaa

SEQ ID NO: 916038 - DNA, 688 bp, Homo sapiens
aaaatggtataaacttccatgtatttggacttcttcaatttctctcagcaatgtttggtggtttggtcttgaatgcattttgctaacttcttctataatttctatattgctctaacattgcattttgraatgttgctgaattcacttcttaatcatagtgaagatgactcactaagcaatgtcaggatttcctatgcaagtgatgtctgtgagaacagaattttgctctttcctttcaaatcattgaatactccttttctgagactactgtactgtatggatcttcagcacaatgtggaaaatgagggtgacagtgaacattcttgttgtgtcactaaggggaaagcattcagcttttcgtgattagttgaaaatgttccctataattctgagtgtgctaagagtttttaccatgaatggatattggaatttgtcagatgtttttcctgtatctactgaaattatcaaatgtttattctcctttattctattaatctgatgagctactttgatttttttccaatgtaatactaactttgcagacctaggacaaatctcatttattcattatgggctaagactttatatactgggagatttaatttggtaatattttgttaagtacttttgtctgttaatgccatatagttttgtcgtactattttttcacacgtggatgtcagagtaa

SEQ ID NO: 916039 - DNA, 593 bp, Homo sapiens
acagagcccaggaatgaagacrtaagtttgagaagcagatgcctgaaggaagcagcgggagaaatgagagcaggaagtgcaattccaggtgaaacacttagctagggaaacggggcttaaaaaagaaaaactaaactaaaaggaggaagagtctagccagactagccagactgtcagatgaatagttgcattttgaatcagccagaccaagctaaccttcccttgtatctatgtaaacacaggagatctcaaatatttacatgcaaatggaatacacaaagtccccatgagcattcatgatggaaaaagcaggatactagataagcatttcacaaagggtgcaagtaactaagttcctaagttgcttggtccaacagtgcagaattcgtattctgcatcacagaacagtttgtgaaatgccacatggatggactttgtgttgctttggtgattctgtgggttccatcttcattacttcatgaagggctcatattactcacactatagactataaattcttgaacacccttgaactacttggctttttacatttgacactagacaggtgtctctgatggaggcagaagggacag

SEQ ID NO: 916040 - DNA, 599 bp, Homo sapiens
ctgtcccttctgcctccatcagagacacctgtctagtgtcaaatgtaaaaagccaagtagttcaagggtgttcaagaatttatagtctatagtgtgagtaatatgagcccttcatgaagtaatgaagatggaacccacagaatcaccaaagcaacacaaagtccatccatgtggcatttcacaaactgttctgtgatgcagaatacgaattctgcactgttggaccaagcaacttaggaacttagttacttgcaccctttgtgaaatgcttatctagtatcctgctttttccatcatgaatgctcatggggactttgtgtattccatttgcatgtaaatatttgagatctcctgtgtttacatagatacaagggaaggttagcttggtctggctgattcaaaatgcaactattcatctgacagtctggctagtctggctagactcttcctccttttagtttagtttttcttttttaagccccgtttccctagctaagtgtttcacctggaattgcacttcctgctctcatttctcccgctgcttccttcaggcatctgcttctcaaacttaygtcttcattcctgggctctgttccacg

SEQ ID NO: 916041 - DNA, 621 bp, Homo sapiens
gaggctgtgagctccttgggaggctgaagctggaggattgcttgagctccagagttcaagatcagcctgggcaacatagggacaacccatttctacaaaaataattttaaaaaaaatagtcaggcatggtggtgcatgcctgtggtcccagctacttgggaggctgaggtgggaggatcacttgggcccaagaagtcaaggctgtagtgaactgtgatcatgccagtatacttcagcctggatgatagaatgagattctgtcaaaaaaacaaaacaaaaacaaaactctgtaaggataacaacaaattactgatgagagaaatcatagatgacacaaacaaatggaaaatggcccgtgctcgtggattggaaaaatcagtatcattaaaatgaccatactgcccaaagcaatctatagattcaatacaatttctattggattaccaaagtcatttttatagaattagaaaaaaaatctaaaattcgtatggaatcagaagagagcccaaataaccaaagcaatcmtaagcaaaaagaacaaagttggaggcatcatattacctaacttcaaattatactacaaggctagagtagccaaaacagcatggtactggtataaaa

SEQ ID NO: 916042 - DNA, 661 bp, Homo sapiens
caggacctagggctcaacacagagttcttagacttgacacctaaagcgtgatacatacctaaaataatgatcaattactcctcatcaaaactaatcactttttctctgcccatgcttttgtgaaacagataaaaagacaagttacaaactgtatgaaaatatttgtagatcaaatattgacaaggactagtttagaaattatataaagaattatcaaaagtcaacagcttaaaaaaaagcccaattgaaaaatatccaaaagacacgaatacacatttcaccaaaggtgataagtagaagaaatagtcaatataatcatccatcagggcaatgaatactaaaaccactgaagcatcactgtatgcctgtcagaatgcgtaagaatttttaaaataatgacaccaccaaattctgaaaaaaatcggaaaaattagatcacttatattttaattgggataatgtaaagtggtacagtcactccaaaaaaatgttaaattttttcaaagctaaatgtgcaattagtttctgtcccagcaataacactcctgggaatttatgacagataaatgaagacatattcacacaaaaacttatacactatattcaagcagctttatttgtcatagccaaaacctwaaaacatcccagatgctcttcaaca

SEQ ID NO: 916043 - DNA, 602 bp, Homo sapiens
cctttaatagaggcttgatggttgtaaagtctcttgctttttgtttctttgaaaatgtctcttgcaccttcattcttgaaagcctttttcattagatataaaattgtcaattgaaatttattttattttagtacattgaaaaaacatatcatataaatagatatatctttaagatttcctctttgtagttttctgaatttcactatgatttgtcagctttttatctgcttgggtttcattaggtttttgaatttgtggattgatatatgttttaattctggagaattctcagccattatctacttaaatattgcttatacattgttctttttctctctttctgaaaactccaataaaatatatgttagattttattattgtatccttaatgtatcatcaaatcctttccccaacagttttatatttttgtctttctgagctttattcttgatgttcttgatattttttttcttaackattttgcatttcacaaagtttcttcaattggatccaatttgttctcaaatccatccagtttcttattttggttaccatgcttttcagttctatacattctatttggttccttttcaaatacgctg

SEQ ID NO: 916044 - DNA, 667 bp, Homo sapiens
aaaaccaaggtactgtgaaatctctctactggagcattttaaagtaaagtataggcactaacagaattaattacagatttttgtttattttcccctatgttctactaggactacaaaaaccataaaactcaccagaatcttacattattttattcaacaaatgtagaagtattgcttgatcaagtaatgtggtgcttgatttttaacaatttactgtagactttgttatcaatatttaactagtttacttcaatattaaacagatcaataaccatttgttatttaaacaaatgtttaaccacaaacatacctatatgtatatggatgtgtgtgtttgtgtatgtatgtataattgagctgcttatatatcatgtagttttttaaacaaaaaaatagataatagcatcttaaaattaaatcttgagacattgggttataagtttcaattttgcttttctttctgcgtattcatggtctgtagaggagactagacttccctaatgttttagtttccaaatattttgccaagtatgaatgaactaggtcaacgaaggaaaacattctttctgaagcctacattaatattctactgtttgaaaaactggrctaacccttcaatcattttgttaatatttgtagcttctcacagagttgtaaaacctcataa

SEQ ID NO: 916045 - DNA, 500 bp, Homo sapiens
gatgtcttgaattggaactggtgaggaggcattcagggtgaaatatgtagctgtgagatagaaatcctggaccagaactctgtggagagttggagtggaagctgagattagggtagtatctatgttaagttaataataagattggcagggagataatattttaagaagcaacatatataaaaagaaggactacgtcgagaagtcatagcattattaaccatggggaagagaagctattaaagaactcagaagcagaattgatagggtccaaccagagtcagtgatagcctgtcagcatgcaagatgaagtccaagaactccactaacaacagggtggaactctcaactatgtgagtagagaggaaagatttttctatttttytgatcatgaaattgcttatgaggtacaggccccaggtgttatgaagaatatgacttggttcgtttggggcactgaaggtactgggggaggcgctacttttagagcgctcaaatatgcc

SEQ ID NO: 916046 - DNA, 546 bp, Homo sapiens
agagatagctttcctaaacatctttaaaagtaccccatgaactgtgaaacacctttcctgctttttcttcatagtacttatcacttcctgatattatgttagacaacargcaaataagtatatgctgttcccactaaaatataagctccatttgaacaggagccttgattattcctgagtatacccctagtgcccagaacctagtagggctttaataaatattagattcatttgttgaatgaaaaaatgaatgaataattgaataaagatatccaggtagagtgtccgggcagcccaacctatgtgaagccagtacaagaatgtttctgtgacatagtgagcgcaattattcctctaaatgatgaacttgcatgagtacacaaggataaaattaagcacgtagtttagatttctgcaagtctcttcctcagattgaggaaaaacaaagaaattgagcttattctcacctcattcttacatgaactaaatccagaataaagcatcatttaaataccaagcacatccctacctcagccactcatggaa

SEQ ID NO: 916047 - DNA, 626 bp, Homo sapiens
cagtcactgaaaaaaggactacaacattgctraggctacttacaactgtttcttaataaataaatacatgcttcatataaaaatattatttttaaaactgtaatgtaaaaatttcagatgtatggtaaatatgcaaatgcaacaatattagaaaaaactggtctatattctcagtttactgtttacagttgtgagaactgagtgagagtccttattctcccagtgtaataattattacacattatgcttcctgccaaaactagctgactgccttagtcctttgagttgtgaatatcagtatcaattcaaaaacaactatttaataacaactttcttaaagaaaggaagaaaatataattttatgaaatgaccacttttattattcttgagtgtctcagaaaatttagtgtaaagtgtcctttgctatccaggatataacagctggttccagataacatggtatgtctcattagagagatactagatctaattatgcaacatataagcaagatcattatagaaacattatctcgatgaggtaagtaaagtacatgtgaaatctaactctgctgtttgaaagaatttttgaaagcaaatgtaaggaattaataattacttaagtgtat

SEQ ID NO: 916048 - DNA, 478 bp, Homo sapiens
taaatttatcaaaaagtagctactgggtcaaagtcttgatattgaaaaactggattatgatctgttttccaagttgattttaactaagcgatttgactaactcttgtctccatcttcacagcaaaacagagcgtgacactcccaatcatctgcatgctggaaatgaggaaatggttattgaatgatacaagtgcttttcgatcatttagaaagttctgtttcccaagatctttttttttttttttttttttgagacggtgtcttgctctgtcacccaggctggagtgcagtggcgcgatctcggctcaccacaacctccacctcctgggttcaagcgattctcctgcctcagcctcccgcgtggctgagactacaggcatgtgccaccatgccyggctaatttttgtatttttagtagagacagggtttcactatgttggccaggctggtctcaaactcctgacctcgtgatccgccc

SEQ ID NO: 916049 - DNA, 611 bp, Homo sapiens
ctgttatttattaacagttatttaaggacttgtaccctataaacagaaactrtacatttttcaagcatctatgatttaccaaaatagactagtattagttaagaacaagataataataataaataacagaaatttcaggaattacataaggtcacaacttaataatacaaaaaaaataatcttttcataaaaacattccccaaaaatattaaaaacaaacaacaaatcaataacaacattaaaataagcaaaccatttgcctaaataactgttgtgacaaaaggcaaactaaaccataactgtaggccatttaagaacctactaaattacagcaccacgtttcaacactgatgtattaccaaagctcttcttagagacaaattcataggctttaacagtctattaaaaagaagtataaaagaatcatgtctttatcacaggaacttaactggactacaataaagcaaagatgaaacttagaaagaacacaaatttaattgcattagagaaattggaaaatcaacaagtaaatcacagaactaatatttttaaagaaaaaaattcgttactattttaaaaggaataagcagcaggaaaaaaatgagaaagaa

SEQ ID NO: 916050 - DNA, 610 bp, Homo sapiens
atatggtcatttgattattattacaaagttcccaaaacaatacagcataaaatatagtctttccaaataatgatgtaggataaattaaacaataatttaagtatggggaaaatataaatcttacttgtatgttataataaaatattagtttcagtcagagtgtaattctgaatgtgaaaaacaatgcaataaatcttccaggacaattttgttctgaatttgggattcctaatggttataaatcaagaatcataaactggacttagttaaaatgaaaaacttctacctatcagaagctactgagggcaaaaaaaaaaaagttagctgctgtataagcaagcatgtttgcaataattttatttgaccaaggacttctgcttaaaatagatgaaaaaattctacaagtgaatgaggaaaacataattcagttttaataaatgacttgaagtctttagcatttcacaagaaaaacatggaaaggacaaagaaaggtgctttaacatcttcactaataagagaatgtaaaacagtagatgctgacragaccagatatcaagtgttagtgaggatgaaaaataactagaactttcacacaataatactgggagtc

SEQ ID NO: 916051 - DNA, 650 bp, Homo sapiens
catttgcaaaatccctttggcatataacacatcatcagtgaagtgatatctaatcatattcacagtttccacccacacatatgggtaagagattacacaaaggagagggtcattaaagtcattttgaaattctggctgccacaaccctcctaactgagctttccacttccttcaacctctaatctgctgccaaatagtttttttttcctaaatgcaattatgaagaagttattcaataccaccatcactatcatctgtaccattaatgtttaaagtattttgttggttttcacttgttcattcttatgatagcacatttgggtattgtttcttcaaatattttctgcctctcaaatcttcatacacagtgctctaactccatttacctagttttagtaccttttgaagacctatttcccctccagactcccttatccttagagtttgtatttctccaaacctactgcctgtctctcaacttccgcttgtttctttaggttcattaagattcagcttggaaatcatatctttcaaggacattttctagtacctttccccatccttagccccttcattttagagagatgcctygtctctgcaatctcagataacttgcatgattctcctaacttcactctgtattttaattg

SEQ ID NO: 916052 - DNA, 612 bp, Homo sapiens
acagatcattggtgtttcaaaaaacccatccatccatgtcttcatttatttgcaaaacaagggcaggaaaaactagaattaaatcgttaattctctctcggtctctcagggcaatatgttgggcagttacttgagtgagatattttttatcaaaccaaatatgctgaggcaggaataacatcaaaggtgtttgtgatgtactgttgctctcattagttacctgcagatcaaacaggtatctgttctaacacttcgattttgaaacttaatgctgtgtttgttaaatttacttaattaggacctcttaacacctcagatagtcgcttaaaacaacaacaacaaaaacaacagtaatacccagctgttagccctgcggatgaaacaataaatgcaaagttaacactttttaaaggtgaatatgtacattttgatgcctcgacagcattcagtaaaaatcaagtgtgcttagagataatctactaarttgctgattgtttctggacctgtaactcttaataaatattgcaaatatctaaaagatatggatcattatttaggggaaatgtatgtgtatgcataaatgcaatcttttataatctaaaaatacttttc

SEQ ID NO: 916053 - DNA, 597 bp, Homo sapiens
gaaaagagaattcataggcccttgaatattttctacatatggaaacaaatgacacatattgtctggctaaccaaaasccaaaagttaaaaacaaaatatacatctttaagggttagagaaaaggaaacagataggaatagccttaggaattcaaaattggaggaacaatgtagatcattgtgaggtggcttcttttttagcagttaatttggatacattaatcataatcaactctctttaatcagaaattgggatttcctgaggacttttcattaattgcaaaccagagcagtaggcaaattattcttcactgcagatcagagtattcctttgtgggttatgttcgtatcccacagaatgaagttcaaatagaatttttactgaattttgctatcatattaccacacatcccccattaattcattactgctaatagaatacatgtgtgttcctcaaatggtagaccatgaaatgactgagctaatgagtaaaactgagcttctacaggtatagctgggagcatgcaggggaatggtataagggctgttgttctattcagcacagaagcagttaagtcagcttcatattctcctctat

SEQ ID NO: 916054 - DNA, 649 bp, Homo sapiens
ttaaacaggttgttaatgcttgcaagatttgccttaaaaatcatcccytcagctgaccacttctgcacccaggaactcaaaggacagcaggctgagggaaaactagcaaatggatttcacccatatgtcaaaggtaaggggcatccagtaccttctagaatgaacagataccttcactaactgggtagagccatttccatgtgggacaaagaaagcctccaaggtggtaaaagtactgattaatgagataattccttgccctggcctgcctaagcaacttcagagagataatggcctctcattcaaggcagctgtgacccagggggggtcacaaaggcactaggaatacactaccatcttcattgtgcttggagaccacgatgctcaggaaagatagaaaagacaaatgatattataaaaaaggcacctcagaaaactatctccctcagactaatcttccctagactaaccttctcaccatagctctactacatatttaaaacagccctttaaagctaggtttgagtccttttgaaatgatgtatggacagccttttctcaccaatgatttcttgctagacaaataaatctctgatttgctagacaaataaatctctgatctttggcccatttccaacaggaactggag

SEQ ID NO: 916055 - DNA, 379 bp, Homo sapiens
aatcctaaaattcacatggaaccaaaaaagagytcacatactcaaagagtaagcaaaaagaacaagtccggaggcatcacattacatgacttcaaactataatgtaatgccatagtcaccaaaacagcaaggtactggtataaaagtaggcacaaagaccaatggaacaggatagagaggacagaaataaagcaaaatacatatagccaaccaatctttgacaaagcaaacaaaaacataaagtggggaaaggacaccctattcaacaaatggtgctgggataattggcaagccacatgtagagaatgaaactggatcctcatctctcaccttatgcaaaatcaactcaagatggatcaaacacttaaatctaagacct

SEQ ID NO: 916056 - DNA, 601 bp, Homo sapiens
gttttcaattactaaattaagatcattataacatagtccaaaaaatgacaatttagttttaataggaaagaaataaactgtcaactaggcatgtctggagatatgatcaattacgttmagtgatttgaccaatatggctgcatgggaagaacatttctgaccctttttggtcaggccaagtatttttttgtcaatagttgtcagtagttgatctaaacacttaagaaaagtgacattttactctgaagataatcagcaaaatacagaacaaattatggagataaatgtaagtatatgtgtgcaggaatacatcctgaatataccaaaacagggcacatatttgcctttttataactttttttaaaaaaaggaaagttggggattaagatggcagataggaggcaggactagcttgcagcttccgcttggacagacagagcagcatgtggagattcacatcatgaacttctccaaaaactacggcaggagcataaccaggaaagccaagagaatccacagaccctttgaaggaactgaatcaccaatgcaggctccctgagatgctgaaaaactgtgagtccacttgctttctcaatgggga

SEQ ID NO: 916057 - DNA, 666 bp, Homo sapiens
accattcttttacagattccatgattaacctttgaaaaaattaagcccaacctccaaacacagrctatataaaaattatttataatttgcaggtattagtggcttaatacagcatatatttgctatcagcttttgcattttaaaagaaaaattaaagacaaaaatcttaatacaaagtaataaactactaatcataaaattctctcctatattcttttagaacacaatgaaaggaaattatttgctttttatgagaaactgatatactttctctccatagatgatgaaaataactttctttgactaccaagaaatatataatcaaatttgtagaccacttttaattttttaaaaaaatcctggatctgtattttttaccttcctgacctcttactataatttatcttttctctggtcctgaatctctgtaagctgacttgctttcaggggaatgacactgtgcacataatacagcatcacctgggtcttccaagatttggtctccaccatcacctcaccaccaccctgtcccacctgtccacaaacagtttggaagtttcctcttttcagctttcctctttccaaacttaagcttccgtatgtacaatgtagctctctcctacttaaagaaaaataaattcagagtgatcctcctaaagttgtgaa

SEQ ID NO: 916058 - DNA, 674 bp, Homo sapiens
taggttaagtcacaaaacaaatcttaaaacatttgaaataatatcaaacatcttctctaaccacaatgaaataaaattagaaaataataggaatgcttttacactgttggtggaaatgtaagttagttcaaccattatgaaagactgtgcagggattcctcaaagatctagaaccagaaataccatttgacccaccaatcccattactgggtatgtaaccccaaattataaatcattctattacaaagatacatgcacacgtatattgattgcagcactattcacaatagcagggacatggaataacccaaatgcccaacaatgctagactggatttaaaaaatatggtacatatacaccatggagtattatgcagccataaaaggaatgagatcatgttctctgcaagggcatggatgaagctggaagccattatcctcagcaaagtaacacaggaaaagaaaatcaaatgccacatattcccactcataagtgggagctgaaagatgagaacacatggacacagggaggggaataacacacacttggggggcctgtcatgtggtggggtggggggaaggagagcattagaaaaaattgttaatgcatgctgggcttaatacctaggtgaygggttgacagatgcagcaagccaccatggcacacatttacct

SEQ ID NO: 916059 - DNA, 544 bp, Homo sapiens
cttattctagagaagcttattatctaccacaggagacaaatataagcagagaattccaaactaatatgccaagaactacataaaaagtgaggatatgcatttagtccaatcttcctagaggagatgatgctgaggaaattttaaaatataggtaggatttggtcagaaagctagaaggacatttcaggcagagggaactgcatgagaaaaggccaggagactggcaagagcatttagctaagttactgaatccaagaaatactttgcactatatattcatactgtttataagatggagaaaagcctagaagaaggaacatcataaattattgttcaggacatcttcacttctctgcttcttccctccgggaatatagtatatttcactgtcccactgattttaggattagccatatgattaactgtgacctayggaatgttagcagaaggagtgtgaaaacatgaattgtgcttgcctgatggctacttgctctctttcccctctgccagtgcacgaagatcatgctctgactagcccactgcc

SEQ ID NO: 916060 - DNA, 630 bp, Homo sapiens; identical to SEQ ID NO: 909829

SEQ ID NO: 916061 - DNA, 638 bp, Homo sapiens
accaatctaaacaccctccagtgatagactggataaagaacacaccatggaatactatgcagccataaaaagaaacaagatcatgtcctttgcagggacatgggtggagctggaagccattatcctcaggaaactaatgcaggaacacaaaaccaaatatgtgttctcatttataagttggagctgaataatgagaacacatggacacatgggagagagagacaaagcacactgggccctgttggagggtcggaggttggaggagggagagcatccggaagaatagctaatggatgctgggcttaatacctaggtaatgggatgatctgtgaggcaaactgccatggcacatctttatctatgtaatgaacctgcacatcctacacaggtacccctgaacttaaaagtggggaaaaaaagaaccatactttgagcagccagattttaaattttcccagagctctttcaacattacctatagtgtcttaggatgggtgaagatttttgcatgtaatagttctagtttttcttctgtttttatttkgcctgctttgtaaatgtcattttaggtgcttgcttcataacagaatagcagaattgatgcaactacattaaaacagaaagggagacacagtgtc

SEQ ID NO: 916062 - DNA, 573 bp, Homo sapiens
atgagcacaagtgagggtcagatctgttcaycaggtccctaattataattcagagagccaggggaaagagaaaaaagtaaaaaaaaaaaaaaaaaaaaaaagaagaatgcctgacgtttgggaacactaaacagagacagaagatttttctgtctttcacgtcaaacatccagccacgtgctcactttttttccttgaaaggcatttaacgttgtgggattatatttttcttcctgactcctagaaaaatataaatgtcatcgacgtttgatctcatctaggtagtttgaaggctcttcgtttgtgggtaggaaagttaatgccacaaaatgtactaaaattcaaaaacattccaactttaatgattcacagcaaagtcagaatgcaggtcagatgctgtatttctgatatttaaaaaatacaaaaagaattctttgaaagtatgtttccaaaagacagtagacatttgtactatttatcattcagcaagagctaaatagcataggaacatggttattctaagttacattttgaaaaaagagaaacaaaacaattatttctgaaaacagcaaa

SEQ ID NO: 916063 - DNA, 610 bp, Homo sapiens; identical to SEQ ID NO: 915645

SEQ ID NO: 916064 - DNA, 614 bp, Homo sapiens; identical to SEQ ID NO: 915646

SEQ ID NO: 916065 - DNA, 688 bp, Homo sapiens
ttaattgccactcctgtttgtgtctcttgttctagtaagtcacttttcttcccccacctatacttttaccatgacattgtttaaataatggaaacacattagttcttcgtctcttgtgaactttaaaaacttccttgggtcataagaaaaaaggcttacctgattttccaaaaagtgtttctccttgttccatgcaggaagggcttctttagcatccccacactggtaataaattattaaaggggtctcatatggacctgctgacagcactgtgataaatactcatattaattataaaaaataacagtggtcaaaaattcaaagttcaacatgactttcagaacagctttttctttttctttttttttcctgagataggtttcaaatttcaacactgaactttccgaaaaacagactgcaacttgatcctaaagattagtttagcacactctactttttacctttgtttttaaggagaaaaaaatggaagaagctcatcataatcatgatcatctagtgtgagatatactcagagtccaggataggccaggtaggaaaccagggactatttcaaacactgggcatgggccatcctatgtaacatgggatgtgggtgtggaaccacagracttgaggccagagaccacagaacaactgcagggttaagatagggcagggtcaaaaaaga

SEQ ID NO: 916066 - DNA, 613 bp, Homo sapiens
actcaaagaagagaaaacactcttggataccagtggggttaagtatacagtgatttcagcatagtttttttttttaaattatacttttagttctggaacacatgtgcagaaygtacaggtttgttacataggtatacacgtgccatggtggtttgctgcacccatcgacctcatcatctacattagctatttctcctaatgctatccctcccctagctccccaccctctgacaggccctggtgtgtgatgttcccctccctgtgtctatgtgttctcattgttcaactcccacttaggagtgagaacatgcagtgtttggttttctgttcctgtgttagtttgctgagaatggtggtttccagcttcatcaatgtccctgcaaaggacatgaactcatccttttatacagctgcatagtattcacatatacacatagtgtatatgtgccacattttctttatccagtctattattgatgggcatttgggttggttccaagtccttgctattgtgaatagtgccgcagtaaacatacgtgtgcatgtgtctttatagtagaatgatttataatcctttcagtatatacccagtaatgggattcctgggtcaaat

SEQ ID NO: 916067 - DNA, 594 bp, Homo sapiens
tactctgtccaaattctaatgcatcacagtcaytggtgtgaagctaataatgaaagaagcaagaggaggctttcatttctatggagacaaattgacatagaagccagattagtcttttcttcctgaactaagaactgcttttgttagaaaacaaaataatgtattgtatttacctgaatactgctttaaaaagttattaattcttcttttacaagaggtattagaaattaaaacaactcagatttctaatccaaaatatatttatctttggaaagcaaggtaaccgttgtgaaaacattgtattaagagaataaaatgcagtgacctgaaatatgggtgaacatattcacacatgataatgtaaataaatatacagaaccactcaaatacacatttataaagagaatggcaaagtacctaaaatagcattttcacatataaaatttttatattaaaatattgctcataataaataagaggtgatatgaattccatttccctcttaaaaattatctctagtagtttacactaaggagttaatctgttgttttgacaggtgaattaaaatgtttaataaaatgacactgtaacagt

SEQ ID NO: 916068 - DNA, 555 bp, Homo sapiens
gggttccctccagccccacatggagtgatcttgcctccccacaagtccagatcacctcatttagcctctccagagtaaatgcaatccagaagagctgggccagaggcatgcaggctcgtcaccagtcagtgccatctgcagggatctgtgatatgtggctgtagtgatagtagaaattaataacctgtttctattgtctcaggtacgaggcaacctttgctatgattactctgtcgagaaagcaaagcaagggaacagatgcgtagtgcaaaagctgaggttgatatacttttcataggttttcatggtagtagccacttagtctctcaaagtattgtcctccttgaccattgcattttatgtggccacaggtgatactttcataaatggtactatcaccaattattgaaattagtgatttttkttttaacccaagcaagtcagataaccaatccaaacttcctcccagttccccaagtcattgttgctcacaatcactctggtaaagaaataaagtttcctaaattttcaaaaattgaattctgaagaattaca

SEQ ID NO: 916069 - DNA, 592 bp, Homo sapiens
atgggttcatactgttgatttgactttcagcctggacattattggtggatagaaatgctactcagttttgtacattgattttgtattctgaaactttgctaaaggtgtttgtcagttctaggagccttttggtggactcttcagtgtttgagatacagagtcatctcatcagcaaagaaaatttgatttcttcttttcatatttagatgccttttattttttctcttgcttgatttctctgactaggacatttagtactatgttaaatagttgtgagaatggtcatccttgtcttgttccagttcttaggggtaatgattccagcctttgcttgttcagtgtaatgttggctatggatttgttataaatggctcttattattttgagatatgttcctttgatatttaatgtgttgagagtttttattataaaggggtgttggattttatcaaaagctttttctgtgtctactgagacaattctatgttttttgctwttaatcctgtttatgaggttaattacatgtattgatttatgtgtgttgagccaaccttgaatttcaggaataacacctacttgatcatggtgagtt

SEQ ID NO: 916070 - DNA, 487 bp, Homo sapiens
ccatatgtagttttgaaagatcttcttgatattgatttctgtttttattgcactgtggtccaagagtttgattggtacrattacaaaatttgaatttattgacacttgctttatgattgggcatgtggtcagtctcagaatttgttccatatgcaaacaaaaataattcaaactctatagttgttgggtggaatgttctgtagatgtgtattagaaagtgccaagtttaagtccagagcttctttgttacttttctgcctcaatgatatgtctaatgctgtaagtggagtgttgaagtttcccactattgttgttggctgtctaagccttttcatacatcaaaaaaattgctttatgtatctgagtgctccaatattcggtgtgtatagatttaggatagttaagtattcttgttaattgtacactttatcattttgtaatatccttccttttccttctaaagtgttattcatttttagtctgttta

SEQ ID NO: 916071 - DNA, 623 bp, Homo sapiens
ttcaactttctcctgaatctccattaaattttttgccctccagattctgtattctgtctgccattttagactacttacagaccattgatgatgttctggtaaacttggattaagggaacactctggccttttgaaccgcctaagttcttgtgctaattctttctcatcttggagggttgttgttcctttaattgtggtgtaatttaattacagtcagttggctttgtttatggatgtttctagagggctaaagctctgtatgtggtctttatttatggctgaattcttacccttggtttcatgggtcagtatattagcaaaatatttttggtgttgtagtttgggcaactatccagcagatggctatctagggtaactgccaatagttaagttcttactcaaccatgtggctcctttgtaattcctgggtttgcagctgttctctgcagtgaggtgggggagagaggttacactctcaccaggtatgctcctgggcattggggaagtmccctcggatcactggcactgtgcttgggaatttattttgctccaaaagtggatattctggggtgtatttccttgagcagaggctggggcaggaagataggccacaccatttctgg

SEQ ID NO: 916072 - DNA, 618 bp, Homo sapiens
gagtggtttgaactctaccaagacatagtttctgcacactttttctgctcaggagttacrtggccagaggtcaaagatgggcatagattttgtaatttattacctttcatggggtatgtggccagaggtcaaagatgtgtgcctttcccatttgttcctatagataacatcactattgaggaacctaacatgagtttatttgagatgattttcaggctaacctcagcatgacttgtgactcatgactcaactgatcctgtggtcccaaccagaagtggacccaggacacaaggaccattttccatacccctgtgatttcatccccaatcaatcagcagtacacattccctagccccatgcccaccaaactgtccataaaaccctaacttccaagcagtctgagaaaataatttgagtgataactccagttcttggacatataccaggacttaagtgaattaaactctttctctactgcaatgccatggtgaggtaatacgggaaagaaagaaaaagtacaatcattatatcatcatactcttcctttggcaggaattgcatagttataccagcattcttctcacctcttccctactccctcttccccttatcaactca

SEQ ID NO: 916073 - DNA, 618 bp, Homo sapiens
gagtggtttgaactctaccaagacatagtttctgcacactttttctgctcaggagttacatggccagaggtcaaagatgggcatagattttgtaatttattacctttcatggggtatgtggccagaggtcaaagatgtgtgcctttcccatttgttcctatagataacatcactattgaggaacctaacatgagtttatttgagatgattttcaggctaacctcagcatgacttgtgactcatgactcaactgatcctgtggtcccaaccagaagtggacccaggacacaaggaccattttccatacccctgtgatttcatccccaatcaatcagcagtacacattccctagccccatgcccaccaaactgtccataaaaccctaacttccaagcagtctgagaaaataatttgagtgataactccagttcttggacatataccaggacttaagtgaattaaactctttctctactgcaatgccatggtgaggtaataygggaaagaaagaaaaagtacaatcattatatcatcatactcttcctttggcaggaattgcatagttataccagcattcttctcacctcttccctactccctcttccccttatcaactca

SEQ ID NO: 916074 - DNA, 604 bp, Homo sapiens
atggggaatgtggctgaagtgaagggaaggaatttgtgggagggaagcgccagtgggaagtcaaagaagtgggagatgactgtgtaagctgaatcttgggcatttaagtaacacactatttttaaggaaatgactggtacaggcaataaagacccaatacattaaataaatagggggaaaagtggccttattcaaagtctctgagtggatatgaaaaacaaaatacatcaagcctgtagtcccagcactttgggagactgagacgggtagatcacctgaggtcaggagttcaagaccagcatgggcaacatggcaaaattctgtctctactaaaaatacaaaattagccaggtgtggtggccggtgcctgtaatccagctgcttgggagactgaggcaggagaatcgttgaaccacagaggcagaggttgcagtgagccaagatcacactactgcactccagcctagaggacaagagagaaactccatctgaaaaaaaaataaagatgtttgaaaagatcagttttaggggaaaaacaaaacaaaamcaaaaaacaaaaaaaacgcacacagaaaatagaatgaaaacctgaaaacagttttat

SEQ ID NO: 916075 - DNA, 636 bp, Homo sapiens
agagattaatgttatcactaagacaaggaacaggaatacctttgattttcttttgtccactacacatgtgtttttccccactctcagactcaygatgaaatatgaaaggagatttagattctgcccaactagaactcatattcaaactaaaagtagaaactgatcaaagagtttgttgtttgggagcaagattaagaaggaggtaggtatggtgagaaagggaatttcttaaagtcatcttataatatttagtttctttcctacacaagtattaacatgaatttttttttttgaaacggagcctcactccgtcgcccaggatggagtgcagtggcgcaatctcagctcactgcaacctctgcctcctgggtacaagcgattctcttgcctcagcctcctgagtatctgggactacaggtgtgtgccaccacacccggctaattttgtatttttagtaaaggcagagtttcactatgttgaccaggctgttctcgaactcctgacctcgtgatcctcctgcctcggcctcctgaaaattttcatataaaataaaagaacaaaggaaaagtctttctgtttcattcaaccatgactttatttaacatcattgtaattaaatacatattaaatttttag

SEQ ID NO: 916076 - DNA, 617 bp, Homo sapiens
atatcacacttgattaatttgaaagtgggcactggccaaattacctgagtcagagttcttgcctgaggtttttcaaatgctaccctagaagaaaagcaatttctttatggtgacgaaagttatragtcataaaaacactggcatgttcactggttatgtttcctgctatttagagaaaacagctttaaagtgaaagacagtaaagccagcatattgaaagaaaaataaattagtaccaagagagttctgattgcatttttgtccctggtccagttgttcataaatttgttccatctctgccatctgtattttggttgttacattttcattgaattctctgaagaaatgttcttcatttttctccccaaattagtttgagttaggtttatgtcagttggcatttaagaatcttaagtaatttgaaaaagttgaatgcccgtttatactcactaatgactctttattgaattttctcagagtaaagttgacaagtattgccatagcagctgaagttcacttcagattaaacacaatgtctttgactgtgccaagaatataattttatgttttgtcaattattaggtaataagtaattctgggattctgaggttggctta

SEQ ID NO: 916077 - DNA, 570 bp, Homo sapiens
ggggcagttcccccatgctgttctcaaggtagtgaataagtctcacaagatctgatggtttttataaggggaaacccctttcacttggctctctttactcccaccaccatataggaagagcctttyaccttctgccatgattgtgaggcctcccccaccacatggaactgtgagtccattaaacctctttttctttacaaattaccagtcttgggtttgtctttatcagcaagatgaaaacggactaatacagtaagtttggagggctcagaagaagacaagaaaatgtagcaaagtttaaaacttactagagacttgttgaatggctttgaccaaaatgctgataattatatggacaatgaaattcaagctgaggtggtctcagatgaagaggagaaacttgttgggaactggagtaaaggtgactcttgctatgttttagcaaatagacaagtgacattttgcccctgcactagagatttgtggaactttgaactcgagggagatgatttagggcatctggtggaagaaatttctaaggagcaaagcattcaagacgtgacttggatg

SEQ ID NO: 916078 - DNA, 602 bp, Homo sapiens
acctgcagttccattcatgctgttgcaaatgacaggatcccattctttttataaccaaatagtattccattgtgtataatgataatattttctttatctatttatctgtttctgatatggtttggctctgttcccacccaaatttcaccttgaattgtagctcccataattcccacgttgtgggagggactcagggggagataattgaatcatgggggcagttcccccatgctgttctcaaggtagtgaataagtctcacaagatctgatggtttttataaggggaaacccctttcacttggctctctttactcccaccaccatataggaagagcctttcaccttctgccatgattgtgaggcctcccccaccacatggaactgtgagtccattaaacctctttttctttacaaattaccagtcttgggtttgtctttatcagcaagatgaaaacggactaatacagtaagtttggagggctcagaagaagayaagaaaatgtagcaaagtttaaaacttactagagacttgttgaatggctttgaccaaaatgctgataattatatggacaatgaaattcaagctgaggtggtctcagatg

SEQ ID NO: 916079 - DNA, 601 bp, Homo sapiens
gactgtagcccctttgttttggccaatttctcccatttggaatggctgtgtttatccaatgcctgtacctccattgtatctaggaagtaactaacttgcttttgattttacaggctcataggtggaagcggcttgtcttgtctcagatgagactttgcacttttgagttaatgctgaaataagttgagacttttggggactgttgggaaggcacaattggttttgaaatgtgaagatatgagatttggaaagggttaggagcagaatgatatggtttggctctgtgtccccaaccaaatctcatcttgtagcacccatacttcccacatgctgtgagagggacccagtgggagatgattgaatcatgggggcgggtctttcctgtgctgctctcatgatagtgaatgtgtctcatgaatccagtggtttttacaaaggggttttctctgcacaggctttctgtttttcctgccgctatccaagtcagatgcaacttgctcctccttcccttctgccatrattgtgaggcttccccagccatgtggaactgtgagttctccattaaacctctttcctttttaaattgcccagtctcaggtat

SEQ ID NO: 916080 - DNA, 618 bp, Homo sapiens
cctaaatctgagcataggttgttagaagctgccaggccacattttgaatgcttttctgcttagaaatttcctccaccaggtaccctaaatcatccccatgaagttcaaacttccaaagatcctcarggcatgaacagaatgcatccagggtttttactaaggtataacacacatgacttttgctccagctctcaataagttatttctatctgagacctcagcagcctggaattcggtctccgtatcactataagtattttgatcacaaccatttaaccagtctctaagacatttctaacttttcctcatcttcctgtcttcttcaaagctctccaaactctttcaaacatagctcattacccagttccaaagctgcttccacattttcagatatctttatagcaaaggctcgatcctcaataccaattttctttactagactgctcttgtatttctatgaagaaatatctgagagagggtaatttataaagaaaagaggtttaattggctcccagtactgcaggatttacagaaataatgatactggcatctgcctggcttcttgggaggtctcaggcaacttacaatcacggtagaaggtgaagagagagcaggcat

SEQ ID NO: 916081 - DNA, 614 bp, Homo sapiens
caattgaagttaaatcacagtaggaacagataaagtatcaaaaatatttgcctttggggaggtgttggcatgagaaagggcacatacttatctttggttatagccttttaacattgtttgattttttcaaactttgagttcataacattgataagcactaaaaacatattattgtaaaaggccactttgaatgcaatgatgcattttacagccatttctgccatctaaagttgtatgatctaagctttttgctgcccccacagaagcaaccatctgaacaaactgaagcttgaacgccccatagttcaacagaattaatggtagattcctttcaactttgctctctttttccatattacagtcaccttcactagcaggttgcaaatagtcatgcaataatgtctattttatttcatttcaaagagctctgtttaatgcatttgttgtacttttgaatatgactaaatcccaattcattcttccacaggcaggagatgtgaaggcagattgtctgaatatcaagatgctgtcytaaattatatgaggtatagatgcatagtggcatgcaaattattttacatctctgtactttagtttctttcttcattgttaaa

SEQ ID NO: 916082 - DNA, 579 bp, Homo sapiens
attcaagtgtcctctcgtttttcaagtcttgggcatctgtatccacagagccataaaaatgtaattacctctgtattagtcagggttctccagagggacagarctaagaggatacacacacacacacacacacacacacacacacacacatatatgagtttattaaggaatattaacacacatgatcatgaggtgaggtctcacaataggccatctgcaagctgaagaacaaggaagccagtctgagtcctaaagctgaagaacttggaggctgatgtttgagggcaggaagcatccagcattggagaaagatgtggatgtaggctggaaagctaagccagtctaatctttcatgttcctctgcctgtttttttctggccatactggcagctgattagatagattgtgcatacccagattgggagtgagtctgcctttcccagtccactgactcaaatgttaatcttctttggcaacaccctcatagacacacccaggaacaatactttgcatccttcaatccaatcgagtcaaccttcaatgcatcacaccctccattccccaaagttccccagaata

SEQ ID NO: 916083 - DNA, 622 bp, Homo sapiens
tggttatttcttggaaaaaaaaatgctccccaaagtcaatacttcctgttgtaaaacaccaaagcagaaacttgattttatctgaacaaaggcagtttawgaggaaagtactattttttagcttgccaagaggccaggctatgccagatgatgaaagtccacttaaaataaaactcaatttccatcaagaagtcaaatttttcactaatacaattactgttggcggtatgtgtgggagtatcttttcacactgtctcttctctcagagtgacatttgtgatattgctgctttctgcaaaatttcaaaattcatagtgtggacagctccgataagaggttttattgcaggaacttttgtttttcttccagcaccctcaaaatcttttaatcccttttctatttgagcccgtatttatggctacctcattactgtattgacggtgggctctgtatagtgacataacttcccttatctgtttttatctagagcattcagttataggacacagtggctgctttttctatagagttgttcagggtctgtaaaaactgcttccaaggaaaggtttttctcttctcctaacatttgtttcagctggagaatcagccccagaaaattctt

SEQ ID NO: 916084 - DNA, 608 bp, Homo sapiens
acctggatgtccagacagaagtttgctgcagggttggagctttcatgaagaatctctgctcaggcagtatggaagggaaatgtggggttgaagcccctacacggagtccctactgggatgctacctagtggagctgtgagaagagggtcctccagacccgagaatggtagatccaccaacagcttgcgctttgcacctggaaaagccgcagacactcaacaccagcccatgaaagcggccaggagggaggctgtaccttgcaaaaccacagggacagagcttcccaagaccatgggaacccaccacttgtatcagcgtgacccgaatgtgagacatggagccaaaggagatcattttggagttttaagatgtgacatccttgctggatttccgacttgcatgggccccgtagcccctttgtttcggccagtttctcccatttgaaacattgtatttaaccaatgtctgtacttccattttaactaggagataactascttgcttttgattgtacagcctcataggagaaaaagacttgccttatctcagatgagactttggactgtggacttttgagttgattctgaaatgagttaagagtttggggt

SEQ ID NO: 916085 - DNA, 537 bp, Homo sapiens
gctaactactttcctgagtcatgaccattcctgcagggtataatcaagttctaccctctaactttaaatccacatactctttttgtctctaactctggttcttcaggtggctgtgaagcactytgaaagactttcttttcccggatttccaatcaagggggtagatttatcctcctttacactagaatgttcatgtttgcccaggggtctgtgtgtcactgccacagtaacagaagattaagagtcattcatccctttctcagttctttcccctcttactgggcttttccgccggcccgaaaatatttgtaagtgctttcccagccttttagaatgctgagtcttgttttgtgctttatggtaccactttgcaatttgagtttgccaggtgttggttattgcctttcccaattctcgagccattataaaaatgtctttccatttggtcctaggttgcaatacaataagaattaccactgttatggtttggctgtgtccccacccaaatctcaccttgaattgtaataatccccatgt

SEQ ID NO: 916086 - DNA, 603 bp, Homo sapiens
ggaagaaaccataaataaaatatgacaaaggtatagatgtaagaaagcatagggcctatttaaatgagaacaaacagagtatgtagattttcctggaaataaatgttataaagggggacagaaagaaataagccaggacacaatggcattaataacttcaattcattaagcataatgaagaaccatggacacaaagtttcagtgggtgcacccagaaaataaacaaatacaaaaatatataacctatcagttggtggcaaacgttgtagaaaactaaagcctggaaggaaagattgagtatgtaaggaaggtatatttcagataacatattttaaggacatatctgaaaaaaatgtgaaagatggatctatgctgatctctgagggaataatcttctaagagaagaaagagaatacgcaatgatctgctgtaggatgggccaagagcaagtttaatttattttagaaacagaaagaaggcccctatatcagtatcagaaagagtatgtgtggggaagaagagtggtagcagatgtagttataaagggatttacagcctcactggagagggccttgactgaaagwgtgaagaattctgactaga

SEQ ID NO: 916087 - DNA, 561 bp, Homo sapiens
tctccctcaacccgcttccttcacatccccaamaggacttgatttcaagaacataccctaaaaaatttttgcttgttaacctccatctcagactcttcttccaaggagacccaacctgcaataacaaataagaactttaatttctgatttagcttcttagtagctgaattaccctgattatttcaactagcatttctgagcatcaggtttgtcattaataaaatgaaaataataataatcttattacaatattatttaatgagatgatatgttatgcaacaatgacttaataagccatagtactagacttctatcatctaactgaagtattttggtttagaaaaggaaaggaataaaacctttaatatttaaaggtaataaagagtaggtttactacaatagcatatgtagtaaattcacatcgaaagacattgtaattcttaagaatattaacattttgcttcctttaaattaggtaataattttttttaattcctgtaaatttatttggatttctctggcaattccttgttttccactttttgttctagaatgaaagct

SEQ ID NO: 916088 - DNA, 642 bp, Homo sapiens
cattctgcaagcgtagcaaggcaggagccaactcaagttttttatattctatcagagaacaagcaaatcactgaaagaaattctgaatgtgatgtgcatcccaaccaagcaggggacataagacaggttttccttctaggtcagaaaaccaggaggagagagagcctcatgcaacttagataccagagcccaagaatcagacagacagaaagacctccttacattaggatatggggtgtggcggtgtcacggtgggatcagttacagaacagttgcttcataatgctgccaagtgctgagaaaagttatgccagacaatgagtcatcaggcacagaaaattattggactatgtcaaaatgctttctcctaaacagcaaagtcttctgacaacttgggaaacatgacttctgctcttgtctggtacagagaagagggctggggggagcttccagaaaactgaatagcacatacatctctgaaagacaagaaataacaacacaaataaaaaggcaagatgatatttttaaaagaaaagaattgaaacaaaaacatttgttgaatgtttattgattagtaattatgtagtgaaactcttctacacactggggatacatcargttccaacttctcacactcaggtg

SEQ ID NO: 916089 - DNA, 631 bp, Homo sapiens
caaacagaattgtctcaacaaatttgcctaaaatctgaaaggaagaaaacacatctaagtctttgtattaaatatgggttaagtgctaagggaatgtattaacttaaaaaaaaaaaaagtcaagcttttaaaaattttaaaaccgtatatagaaattgtcagatcagaacaattactacatagtacaaaaataaaataatgtccatgcatacaaacaagtttaaattttaattttcttgcataaatacattaaattataatatttagtctgctggtactttaagaacgtggaagggatcattgtgctaactattcaagccacttatctcttttacccatgctgagtataaaaccagcttagacaacaatcttagacaacactcttcattagcggtaaagcatattcgttaatgcaactggatgttttcctgcataaaagaaggttaagatgttttcttgttgtaggacatttagattgacaacagatttgctattatattaaattaagtggctaatttatccaagtgaaytatctgcatagatagccactggagcttaagtagtaaattcagacacagttataacagtcaccaggtgagatcattggatgtggtgttaactacttattttt

SEQ ID NO: 916090 - DNA, 599 bp, Homo sapiens
gttgaaaaatatagataggtaggtaggtaaatagattagatagatagatagatagatagatagatagatagatagagtatakgcaactttaatccacgttatactgtgatctgatttgttccttttaaaacatcgttatatttatcagggtacacagcctttccttacttgagtgttctctttactggaacaacctagacttacatacagaaatgtttcagtgctcaataaaaatattaattatctccaataccatcctagcacacagagtattttggtaaactgttgaaaggaatctgtttcagtgttcagagaatagccaaaaatatggggaattctctctatccctgatgacatcatgaactacctttgcaaaaattatgacagtgagagaagtctgacatagctggctccatcttgcctctaacctccaagctgtccttgttcattcctgagcataggccaagctagctatgggagaaatttagtttataggttaactttaaagcaaagatgataaaagattctgtccaagactgaccctctccttgcctggagaccaaaactgcctttgtaaaactaacaaattagccacaagg

SEQ ID NO: 916091 - DNA, 599 bp, Homo sapiens
gttgaaaaatatagataggtaggtaggtaaatagattagatagatagatagatagatagatagatagatagatagagtatatgcaactttaatccacrttatactgtgatctgatttgttccttttaaaacatcgttatatttatcagggtacacagcctttccttacttgagtgttctctttactggaacaacctagacttacatacagaaatgtttcagtgctcaataaaaatattaattatctccaataccatcctagcacacagagtattttggtaaactgttgaaaggaatctgtttcagtgttcagagaatagccaaaaatatggggaattctctctatccctgatgacatcatgaactacctttgcaaaaattatgacagtgagagaagtctgacatagctggctccatcttgcctctaacctccaagctgtccttgttcattcctgagcataggccaagctagctatgggagaaatttagtttataggttaactttaaagcaaagatgataaaagattctgtccaagactgaccctctccttgcctggagaccaaaactgcctttgtaaaactaacaaattagccacaagg

SEQ ID NO: 916092 - DNA, 615 bp, Homo sapiens
taatcagtgcatatgtgtgaagaaactatcagaagctaagaaaatagccattagaaaaaattaaacagtagatcatacttacccacggtgagaaacaatgtctgttcccaataaccagagtgacaaacctcatatattatgagtaatcaggcagagtagtcagaaatattttgccttaatactggcaagatagccctaaactacacactactctgatcctatgtagcaaattttaaaagctatatccaaatgggcaaaactggctacaaaaaaattagctgtatccaaagttcaaatagtaatataaaaatacctggaatgggaacattttacaaaatcttgcatccagtaaaaaattagcagtcatgaaaagaggctgaaaaatgcaacttatattaataaggaaaatcaagcaactgaagctaataaaaaactgacaagttaaaagtagaagaaaattattaaaatcagagccgggtctgatttgctactgagagttctctcttcctcttcttcttttctttcttttacatacctactgatttttcctttttyccctccatctagcaatgctactttcatttcttattttactctcttccttgtgatttactt

SEQ ID NO: 916093 - DNA, 590 bp, Homo sapiens
aaaataatatatccactttggaaagcaatttagtagttctttaaaaaaaggcaaatatacgaatgcaacatgatacagacatttcactcctaggtgagaaatgaaagcacatgtttattcaagacatgtacattttatttctaatgtctcaaaacataaggaacacaagtgtctattttcagaatgattaaacacatttttgtgtattgatacaattgatacaatgcactcaataataataagaaagtaaactattgacatacgcaaataaacagatgggtctaaatataattatgttgagtaaaaaaacagattaaaaaagaatacacattgtatgattacacttctgtaacactagataatgcaatgtaatatcttcctcggaaaacagatcagtggctgcctaatgaggtccaggagatgagaataagaaaaaaggaatgcaagggacatgaggaaactcatgwgagtcatgcatatgttcaacatcttagtttttggtggcttcgtatgtcaaaatgtacacgttatatattttaaatgcgcacagtgttattctaattaaatctcaacacagctataacaaagaa

SEQ ID NO: 916094 - DNA, 551 bp, Homo sapiens
gtaccacaaattttcctgctacctttgatgctgctggttttgaatcacctggggtgcgggagacttttaacctttaactgtatttctcacaaaagaaattgattcatgcattgttgttgagtctttgtctccatgggggaaaggagagactctatccttctattctgccatcttgctgacatcaacgatctgaaattatttttgactatacagtgaagagatagctaatgagagtgtttggaaatatacattaagggagtatgtttcacataaatataacaaaattattaatggagttacaaattgagctgtcattttcatttacaactaatctaatatttatttcatttaaacatacaactataaagtgatgaataatatcttattactttattgtgatccaagtttgaaataatggaccacagagcttagagactgaatatacaaataagcaatgaccagactgcatatcacaataagcrcaagaatgcaaaccacaacctctgcatcaactggcccagaattgtcaggacttggtcgtgacagcgtat

SEQ ID NO: 916095 - DNA, 621 bp, Homo sapiens
agaaaaatctcaattattttctcacattttggtagaagttgccttttttgtgatgaacaaaatwtatattttctagataaattgtgatgacatctttattaagtctagaaaagttcatgaagattgaaataccaatgaaaataattactgatatttcatatgtacataacttaaaatgtaaatgacaatatagtatttatttgattgctaaaattatgtttgaattaaaaaattatgcttaattaaagtgatacatttttatcaacaggtccttatttaggggcaaatatatttccagtgcttcatgggagcctaatgtatgctgtcataacttgattgtgaataaaattatgtggcatttgattcaggaaaggcaaagtgaattagccaaaataatttgaaaaactagtgaggggaaaatgtaacacttgaaccaaggaaggcttattaatgcacttttggtgtgaaagttgaagactctatgagctgagtctatatatttgaacccagcaactaactgttataaagattctatcctatttttgctgctacaatattaaccacaacgtggagaatgtttatagcatgtcctgtgcacacttgtctcttatcactcaatca

SEQ ID NO: 916096 - DNA, 608 bp, Homo sapiens
taatgaatctaactcatttattgaaagaaaaagaaatctaatcataagatagatcaattgatcatttaatagatcaattcaaaaggaaatgaactattcaaatactagaagaaaacaaaggtaaattcctctctaacttatggtttggaaaatatttttacatatgactcaaattctgcattcaagaaaatgtagatatctctgactttaaaagattttaaaaaactttgttttccaaactaccataaaaaaccaacaagtgacaaaagcaaataacaaaaacttagaagaaacttgtaataacagagataaaggattaatgtatattttaagaatatgaaacactcttaaaattgaaggaatcaagaccaaaaccatacaggaaaataaacaaaacatgaatagggatgtcccaaaattatataatgacctttaaaacatgatatatttacattcacttataatagatgcatrcatctcaaaaccatgctgagttaccacttcttgtctgtcagattatcaaaaattaaaatcttggtaacttattccattggtgaggctattacaaaacagtctcacagattcatactttataaaagaaaatttgg

SEQ ID NO: 916097 - DNA, 608 bp, Homo sapiens
taatgaatctaactcatttattgaaagaaaaagaaatctaatcataagatagatcaattgatcatttaatagatcaattcaaaaggaaatgaactattcaaatactagaagaaaacaaaggtaaattcctctctaacttatggtttggaaaatatttttacatatgactcaaattctgcattcaagaaaatgtagatatctctgactttaaaagattttaaaaaactttgttttccaaactaccataaaaaaccaacaagtgacaaaagcaaataacaaaaacttagaagaaacttgtaataacagagataaaggattaatgtatattttaagaatatgaaacactcttaaaattgaaggaatcaagaccaaaaccatacaggaaaataaacaaaacatgaatagggatgtcccaaaattatataatgacctttaaaacatgatatatttacattcacttataatagatgcatgcatctcaaaaccatgctgagwtaccacttcttgtctgtcagattatcaaaaattaaaatcttggtaacttattccattggtgaggctattacaaaacagtctcacagattcatactttataaaagaaaatttgg

SEQ ID NO: 916098 - DNA, 587 bp, Homo sapiens
tatatatatgtaacttttcctaaaatttctagatagttgcaaactttacagttttaatagtttgttttttaaaaagcataatttacaaagcatacatgtatgcccttccttccttccctttcttccttcctttccttccttctttccttccttcctccctccctgctcgcttgctttctctcttttcttttcattttctttccttccttccttccctccccctccctcccttcattccttccttctctctctctctctctctctctctctccttttatttattttttttttgtgagacagggtctcattctgtcacccaggctagagtgccatggtgccatcttggctcactgtaacctccacctcccaggctcaagcaatcctcacacctcagcctcctgagtagcctcctgagtagccggaactagaggagtgtgtcatcacgctggctaattcttgtaatttcggctkgtctcgaactcctgggctcaagcaatccacctgcctctgcctcccaaagtgctgggataacatgtgtgaaccatcgtgcccagcccagcacgtattctttttaaatacagcccagg

SEQ ID NO: 916099 - DNA, 556 bp, Homo sapiens
ttcacacaatggataccacttggaaattaaaataaatgaactactgatatatgcaatatcatgaatgaatctcaaatgtgtcatgcaaagtgaaaaggagtccaattcaaaggytacatactacatcattctatttatatgacatctgggaaaagacaatgtcagagtgacggaaaacagatcattttttgccagtgactgtttgttggggaggcagatttactataaaaggtgcaaagaaattttataaagtgatgaagatgtattatatctttattttggtggttattacccaactaacacatttgtcgaaactcatagcactatgcactttaaaagggtgaattttattccatgcaaatgatacctttaaaatttttgaccttcaaaatctttataacaccctaaagatccacaagaatgaatttttatattgagaaatataaagcatttttcccagttcatcaaaacaatgttaataaaaatgttgttaaatattttctttatgcaatccacaaaaccttcttaacacactgacttaaccaactgatcagtg

SEQ ID NO: 916100 - DNA, 611 bp, Homo sapiens
gtggtgttactactaatgataaaaatatgtaatctagatataaaatatatttgatggtttgataatcatatgaaatccattaacataaccatcagggagtaattgaaattgtacttacaataacatttaatcacttggaaaatttctaattttcttttgctaagctaaaaagcaagatacaggtttgcacacaatataacattagttttaattatgaaaatgacctagacttgggacagaaattgtcaagaaatgtattaatttacagcatcataagtgatttatgtgcataacaatttcaccatattcttttaaacacttctcattttaagagtcttaaattttcctaatgtgagggttataaaacattctatcattaaagtctacatctgtgtctacctaacagttagaaaatgtgtaaataattttatttcctataagctatttgcattagtttcctagggttgccagagcaaaatggaggccagacaaaacataaaaggccagacaaaacataacaaaaagttcacacctctagaggccagaagttcaagatcaaggtgttggcacrtttggtttcttctgagggggtctccccttgactttcagat

SEQ ID NO: 916101 - DNA, 568 bp, Homo sapiens
gcacaagtggtaagcattggtgacatctacatggtgctaactctgcagstatgctgagtacaagagctgtgggaacaagcttcctccacctaaacttcaaaggaggccaaggggacccttggggtccaggcagggatccgctgtagaagcagggtcaccaccaagtccccatgggataatgcctagtagagccatggaggcaggaccactaccgtgagccataactgtagatccatcaatatgcaatggcatcctggaagagctacaggcacctgactccaacctgtgagagctgcagcatgggctgtgcccagcaaagccaggggagtagggtcccttggaaccttggggattcaacacccatcccagtgtgtctagaaggtggggcatgtaactaaagattgttctcaagccttaaaatttaatgtttgccctaatccattttggacacagttggatctgttatcgctttcttcttgcctgttctcatttggaatggaaatgtttatcttatgcctcttctaatattacatgttaggagcacataattggtttgctttctcaagct

SEQ ID NO: 916102 - DNA, 555 bp, Homo sapiens
ctctctgtttccaagtattctcattgttcaaattccacttatgagtgagaacatgcagtgtttggttttctgttcctgtgtgagtttgctgaggatgatggcttccagtctcatcctgcaaaagacatgatctcattcatttttatggctgcatagtatttcatggtgtatatgtaccacattttctttatccagtctatcattgatgggcatttgggttggttccatgtctttgctattgtaaatagtgctacaataagcatacatgtacatgtctctttatagcagaatgatttatattcctttgggtatatactcagtaatgggattgaggagtcaaatggtatttctggttctagatccttgaggaattgccatagtgtcttcctcactggttgaattaatttatattcccaccaaaagtgtaaaggcgttcctctttcttcacagccttgccagcatctrttgtttcttgactttttaataattgccattctgactagcatgagatggtatctcattgtggttttggtttgcatttctgtaatgatcagt

SEQ ID NO: 916103 - DNA, 596 bp, Homo sapiens
ctgcctgtcgtagtgtgctcaagctggccataacaaaatatcacygactggggtggcttaacaacagaaatgtatttcctctcggttctggagtctggaagttcaagagcaggatgccagcatagttgatttctggtggaggctctctttttgctgtgtcctcacatggtagagagaggaatctctctggtatttctctttataggggcattaatcccgttatgatagctccagccttatgacctgatctaacccttataacttcccaagagccccatcttcagataccatcacaaagtgtgtcacagcttcaacagataacatttgagggatcacaaacattcagtctctaccactgcctaatagtttaaataaaactagttaggattaatggaaataatagtgtaacctttgaagtgccatctgattccattttagtattactacttagtcattaatggatgcagaacacacacataccacacacacaaacacacatgcacacacacacacacacatatgtctgtatattagcttacaagcattattcatagagtagacttttctataggtcatcaagaagattggaactgtcc

SEQ ID NO: 916104 - DNA, 667 bp, Homo sapiens
tcatggaaaaacattaacaaagattacttatttatgcattgatgacttaytgaactgagaatctaccatatccaaggaaataatttgttcaacattaaagtgctgattcacactgtattcaaaatttctctgataaagtaaatctaaacagagagtgaaactgtccttcctaatggccatgaacatcttgcaatggagcttagtacaaaagggcaacaccctgcaagtacccccatttaataagacatcttattaataagtatggaatattcatgtgcctgcaatatattttaaaataagctagagttaacagtaaattatttaaaattgccactttgggatgtccattctattgaaatttataggccctcttcaccattttattgcaccctataccattaccctttttgaatatgaatctattcacatttgagaagagtgagcttagaataaaagattgaagacatgtctttcagatttggagaacagaacagcaacaacaacaaatggaagagataagtaatgacttaccagcaaaatcagcactcaaggttattgaactttgctttagtttgaatgtcccctccaaaactcatatcaaaatttaacagccattgtgacaatatttagatgtgggacctttaagaggtgattagatcatgagagg

SEQ ID NO: 916105 - DNA, 549 bp, Homo sapiens
ccattggatctctttagacttattcactaccacatgaacagtgtggaggaagctgccccaatgattcaattatctcccactgggtccctctgacaacatgtragaattatgggaactacaattcaagatgagatttgtgtggggacacagccaaacagtatcaaatggcctctcaacatagcagaaagagcatggcagaaagaacaatgcaatggatcgtggtggaatttgcagtaatgcaatgctaataataatgaagtctctaaagtcgcacacgccatcaattctactttgtcctactcattagtagtgagttactaagtccagcccactttctaggggagggacttaggttctacctcttgaagggagaagcatcagagttttgggggcatattttaaaaccaccacactgcctatagtccagtgtgggatcctcatatttataaatctagggcatctcaaactctgtgatagaaagttgtggggaaggtgatacaagagaagatggactctcctggcttcctatcatgtattccataatgaatt

SEQ ID NO: 916106 - DNA, 681 bp, Homo sapiens
tgagccaacagctggccttagtgagctagttggcatcattcctggtagctggatgaatgaatgcctcatttccaaagagtgatgttggaggctcaagaagtatctattgcagtacacaatatccaaaacatgaatcaaccccagcttggtacagattctctaagattcgtattctctttcatggagaaacttagaagaggaaggttaattggacagaggaaagttttacagtggtgtagcaattctgcaggcaactcttatcatgtctgcctagtttacatgacccacaccctctcttcacatctctgttagcctaagtgcattagaaggtagagtgagtcatacatgcattccagaggtgtctgggcttatccatcttctgcatgcatttctcaggatgtgactactgcacttgtccatttgaaatacaagttggacaggagagtagcaagagataccccaatgtttcacctgaatatgaaattaattcttcccggcctcccctgtataatatcacccctagttcctcccttgctaatggtgacactcttctttgatatagagagatataatcactaggtggcaaccacaaattaaagttcagtggtactyttactatgcttcctggtgaaagcatttcttctcaggaaactagaaacttttgacccatggaacctaaag

SEQ ID NO: 916107 - DNA, 602 bp, Homo sapiens
gttctttcttctgcttgcccaattctattgttgaaactttccagtgtattttgcatttctctaagtgtgtctctcatttatataagttgtaactttttatgatatctatttctctggagccttttwcatccatattctgtttttttttttttaaattctttaagttggttttctcctttctctggtacctcttggagtagcttaataatcaagcttctgaattgcttatctggcaattcagagatttcttgtttgtttggacccattgctggagagctagtgtgatcttctggggttgttatagacccttgttttgtcatattacgagaattgtttttctggttccttctcatttaggtagactctttcagtggaaagatctgaaattcaagggctgctgttcagattttttttgtcccactggtgatcccttgaggtggtactctcccctttcctctagtgatggggcttactgacagctggactgcagtgattgttattgcccctctgggtctagccacccagttgggttatcaggctctgggctagtgctgagtaatggctgcaaagaatcctgtgatgtaatccatcttcaggtcttc

SEQ ID NO: 916108 - DNA, 776 bp, Homo sapiens
tattaagccagtatcaccctgacaccaaaactaggaaaggacctaaccaaaaaggaaaactatagactaatattcctgatgaacatagatgcaaaatcctcaacaaagtactaactwaccaaatccaataacacatcaagaagatatatacaatgatcaagtgggtttcatctcagggatacagggatagtttaatatatgcaagtcaatcaatgtgatatattatataaacagaatgaaaaacagaaaccgtatgatcatctcaatagatgcagaaaaaacatttgataagatccaggatcgctttaagataaaaatgctcaacaaactgggcctagaagggacttacctcaaattattgaaagacatatatgacaaacccacagccaacattattactggatagataaaagttgaaagcattctccctgagaactggaagaagacagggatgcccactttcaccacttctttttttttctttttttttaaattatactttaagctctagggtatatatgcacaatgtgcaggtttgttaaataggtatacatgtgccatgttggtgtgctgcacccattaactcgtcatttacatttggtatatctcctaatgctatccctcccccatcccctcaccccacaacagaccccgatgtgggatggtccccttcctgtgtccaagtgtctcattgttcagttaccgcctatgagtgagaacatgcggtgtttggttttttgtccttgcgatagtttgctgagaatggtagtttccag

SEQ ID NO: 916109 - DNA, 728 bp, Homo sapiens
gccgaagtgtccatcagtcaatgattggataaagaaaatgtggtatatatacacggtggcatattactcagccataaatggaataaaataatgttaatttgcagcaacttggttggagctggaggtcattattctaagtgaagtaactcacgaatggaaaatcaaacaccatatgttctcacttataagtgggagccaagttatgagtatacaaaggcatatagagtgatataatggaccttggagtctccaagggagaagggtgagagggagtatatgcgataaaaaaaagaactacatattgggtgcaatgtacactactcagatgataggtgcattgaaatctcagaattcagcactatataattgacccatgtaaccaaataccactagtactcccaaaacaattgaaatctgaaaatatattaattaaaaaataatgttacctacttcaacagattataattaagattatattacataatcctgacaaacagtacagtgagtattaaaatttctcagtaaatattagctataatataattattagactatttttcattagcttagagagaagtttcgccattgatagaagtgaggttaagaacagaggctgtcaaagtgtgacctccagagcagtagcattagcatcctgggaacttgtcagaaacaaattyctgggtcccaggcagctcttactgaatcaaaaactctgcagcaatttgggt

SEQ ID NO: 916110 - DNA, 604 bp, Homo sapiens
ttgaggttataaactgctggtttttcacagagtccagaaactgcccrcatcccttggcttatggctcctttttctccgaagccagcaaaggtaggctgagtttctctcatgcttagaatctctcttgcctcttttctgggcatctctctgactcaagctctggaatgttctttggtttttaagagtttttgtgattacattggaatccactgtgtaaccagggataatcacttcgtttcaagatccctaatcacatctgcagagttccttttgccatataacacattcacaggtgtcagggattaaggaattgacatcctaaggttgatgagttcattatttggcctaccagagctgctgcttcttatttgtttattaataagtaaacagactttatttttcagagtagttttgtatttatgaaaaattgaggagaaagtccagagttcccatacatccttctccaatctaccttcctcctccccagtttttcctgttactaatattttgcgttagtatggtacatttgttagcattgatgaacaaatattgatatattattattaactgaaacccatagtttaacttagagtacactctttgt

SEQ ID NO: 916111 - DNA, 604 bp, Homo sapiens
ttgaggttataaactgctggtttttcacagagtccagaaactgcccacatccyttggcttatggctcctttttctccgaagccagcaaaggtaggctgagtttctctcatgcttagaatctctcttgcctcttttctgggcatctctctgactcaagctctggaatgttctttggtttttaagagtttttgtgattacattggaatccactgtgtaaccagggataatcacttcgtttcaagatccctaatcacatctgcagagttccttttgccatataacacattcacaggtgtcagggattaaggaattgacatcctaaggttgatgagttcattatttggcctaccagagctgctgcttcttatttgtttattaataagtaaacagactttatttttcagagtagttttgtatttatgaaaaattgaggagaaagtccagagttcccatacatccttctccaatctaccttcctcctccccagtttttcctgttactaatattttgcgttagtatggtacatttgttagcattgatgaacaaatattgatatattattattaactgaaacccatagtttaacttagagtacactctttgt

SEQ ID NO: 916112 - DNA, 729 bp, Homo sapiens
taaatttatattatgtttacaaccagaaaatatagatatattcagggtaaaattatgcttatttaacatacttgatataaatactagaagaaatttacaaaaaggggagaaaaatatttttcttgtatttgaaaaatgtttcagaatatttattttgtcctttttttcttttgctacttaaaaaagaatgtcttaaccctaatcttctaagcaataggaataagctattgaaatataggaagacaactattttgataaatcaagcaccttgtatttaaaacaaaattaaataaagataaaaacttttatattatatatttaagtagattttattttatatttaagtagttatacaaagttaaattttcaaaattggtgtctgacagatatctattttttcagaataatcatataattgacgtatatttgataatcacctaaatgttctatgactgaaaatttgaagacacagaaaaatagaatttaaggcccaataattgtattttgaaaggtatagaaaaacatagatctaaaaatcttcttttatttaaaaatattcttaataaatattttatgccttagcctaaaattagtcgatttctcagctcagatgacctacacaacytttttggtctatccccgcatgtgtgtctctttcactgtttacactatactgtattgcattcttttgcaacttacatacaaattttactatgaatatggccatag

SEQ ID NO: 916113 - DNA, 638 bp, Homo sapiens
tggcagagctcccatcccctgcttatagatcatatcatacaaccagtctttcaattatatttgctgatgtaaaaaataagtgaaacacatgcatttttctttatgttatttttcattcataagaacatttctaaggcatttattattagtatttggttcccgatgttttactaataagaaatcatgttgtatttcatgaagcttctttgattagcaattttatttctattccagggtgtctatgtcacttataagaaagctaaccagatggaatcatctggttatttgtatattaactactgtcagagttttaatagtaaaatgatttccttgcacaatgtggcggtaatagagtcaagctgtggcttaaatagccttcctaatggaggtttcaagagaactgagaggatttataaaaatttactttgtgacatgcctaatacgtgtattatgtgtgtcggtttttccactgcaacagaaagaaaggccaatacatttctaaattgtatattaaatatttrtaaacttttctaaacgtgtgacataaaaagtatctggtcagttcccttcactataaattcagcttatgttcctatttatggtgctgctggagcaccacagccccgggtctcacacta

SEQ ID NO: 916114 - DNA, 686 bp, Homo sapiens
aattgcttaatttttacatatttgtagatatcccacattttctctctgttattgatttctgatttgatttcattgtggttggggaagatactttgtatgatttcagtcctcttaattttastgggacttattttatgacttactatatgtcctatcatggagaataatccatgtgtaccagagaaacaaatattttgaaataagtagggtttctagggtaagcagtttcatacgaagactcagagacaaagcctaaaataccaactctcaagagaccagaggacaggagtgctgtgtcactcaacaaagccacatccactgaagaccaaggaccaggagtacagggctccatggggaagggcaacttagaaagttttggatttgctgcagatttgttgacttttcaagagggcactgatgtattcggtccctctctctgacagagaagacaccccctctcctacttgataactgaatgatgccatagttactacctgatgtgcagttccttcaaatagagaggaagtacactggccacaatctctgaacaacagacatagaggactggcttacaggggaagctaaatttttcactttatcatggagcactaaacctctgctattgtatttggcaacagaaatgaggatcaagattaaacaatgagtgctgagtctcaatccatttg

SEQ ID NO: 916115 - DNA, 706 bp, Homo sapiens
aagcttcatgaataaaactgactattccttgcttttcccttccagtgtattaggactgcaattacttttgcaccaacctaatacatgagcatttttakatgtttctctcagatagactatgaaacccccaaaacaatgactacttgggctctgtatccccagaagtttccaagtgtttgatgtatactaaagacaaaaaatatatataataataaactggttatgagtgacttaggtatatactgcaataaacatgttcaaattgttcttagctgagttacttattttctaagatggcaagagagaatggaggattattctctgttcttacactaaccataaaatgatcatgagtagtttagaccagtaacaacggttcattacatatttgtgcaaatactgtattctacttctaccacattcccacagtgtgatcttgtaaaacctttatgaacttcaaggactttgacattgcaatgagtgtagtaactcctacctaaaaatgtagttttaaagaataaataagataacgaatgcaaagtcttaatgtggtatctggctactgttagtataccacagcaatttttttttccttactatccatggcccaaaaagagctgcctcatgtggtgagtttcctccaaagtattagaagatagtatagctaccaatatcgctttattgatcaaatcttggatttgagatt

SEQ ID NO: 916116 - DNA, 581 bp, Homo sapiens
tatctgctcaatttagcacctgtaaagactgcttatctccctggcaagattatatttcacttcaaagatggagactgtatcttgcttttctatctactataatatctaccctaatatgaagaatataggaagttatcaataaatccatttttgaaaaaaggtgtttacattgttcattctattacatatcatttatcttcctctctatttttataaaacctagactgttaataagccaacttgaatacagtttaaattaaaagctgacactaaacaaagtctttctagttcacttgctctctctcaagcatgtgtgtctgaatttccatggagtcaataaaacagagttatagagttcactatatctttaatcttttccctcttgtctactaattgcaaagaaagcagactgagtctagatactgttaggctgtttataattatccacctttgcttgactatgyatcctttctagtacagaaaaccaatcaacaaacaaacaaaaaaaacaaccaattgtcactgtgtgatttatttcctaaactaaaccaccatcaaacagatagctacacaaatataag

SEQ ID NO: 916117 - DNA, 627 bp, Homo sapiens
aatgctagagagaaaaggtagactatagtgaattgttccatcattcttactgtagagagctattgaggcttccaatgaaatgactatgagatcttagagcagctaataacataaaaaaggggtacaagtataccttgttttattgtgcttttcagatgttcctttttttgttttttacaaattgaagatttgaggcaacatctgtccaacaagtatatcagcaccatttttccaacagtatgtgctcacttcataaccctgtgtcacgtttttgtaattcttacaatatttcaatctttattattattattattatatgtaatttttgaagttactattgtaatcgttttggagcacaacaaactacacccatataagatggcaaacttaatcaataaatatgtatgttctcactgctccagctgctgttcatcttccagtctgtctctctctctgtgggcttctctattccccaaaacataaaaatattgaatttagacaaattaayaatcctacaatagcttctaaattttcaagtgaaaggaagagttgtgcctatctcacattaagtcaaacactagaaataattaagcttagtgagaaaggtgtgtcaaaagcagagacaaa

SEQ ID NO: 916118 - DNA, 662 bp, Homo sapiens
gagtctaagtgtttttctctctccttgtttgcagagaagagactacgcaaggacatagtgagagggcagccatctgcgagccacaaacagaggcctcaccagaaaccaaccctgcaggcaccttgatcttggacttccagcttgcagactgtgagaatatacatttctgttgggtaagccatccagtctgtagtactttattatgacagcccttatcagactactacatagagtattcgggcatttgtaggcacttacctgccatgctggctagtttcaattgcgagtgcttgggagaaacatgagctttacttttcttttcttttttttttttttcactccatctgcctctgtgtttagaattctctgtttttctaattatggagctaacctctcaactccttgaatgaagaggctgaatgccacacagtccccgggcttttaaaatgccatatgctatgtgtatattcttggataattgtgaaccactttagacttcccctatgccccacttatgggttgactgatgtgtggtaacttgaatgrgctcaatataaaatctctctggcttgtacaaggaaaaaacagagaaaacagagaaccttttaataaaagatgaaagaatgttgaagagggcttaaaagggaaggattcaatcagaa

SEQ ID NO: 916119 - DNA, 606 bp, Homo sapiens
tgcattagtttactaagaataatagcctccagctctrttcatgttccttcaaaagacatgatctcattcttttttatggctgcatagtattccatggtgtatatatattttttctttatccaatctgttttctttatccaatctgtcattgattggcatataggttgattccatgtctttgctattgtgcatagtgttgcagttaacattcatgcacatgtgtctttgtggtagaataatttatattcctcagggcatatactcagtaatgggattgctggattgaatggtagttttgttttcagcgatttgaggaatcaccatactgttttccacaatggttgaactactttatcctctcaccagcaatgtttaagtcttcccttttctctgaaaccttgccagcatctgttatttttcactctttaatagtagctgttctactggtgcaagatggtatctttatgtggctttgatttgcatttctctaataataagtgatgttgagcttttcttcatattcttgttggctgcatgcatgtcttctttagaaaagtgactgttcattttctttgtgcactttttaatggggttgtttttcttgta

SEQ ID NO: 916120 - DNA, 454 bp, Homo sapiens
acaaattcacatagctgaatttaaaatttttacatgattctaaatacattggaagggaaaattcaaaactgaagtgtttaatcctttttttaaaaaatcacattatgtctaatrtctaattcactgtctgtgactattaggtatcttctggcactgtaatattccaggttgttccctcccactgaaaatctgttctcatattatttttcccagatagcaatgatatttcatttttcaaagttcaagcttgtttttctcacagttttttaaaataaaagttactcgtcttacaaaactacttaacagtttacctctatcctcatagttcacattttatgttgtctgtcttataactaattaattaaaatgtgataaaaatgcccccaaaataaaactattcaaatacgtgacttgaagtaacaagaaagaggacaaacatttaaattttcttcaa

SEQ ID NO: 916121 - DNA, 620 bp, Homo sapiens
tttcaaatacaataaaattgtaacaattatttggtgtataaatgaatgaatgatccactcttcctctctctttgctcctgggaagtacttgctccttatccagtatcttacatctcagtaaaggccaccacaatttaatcaattgcttgggacatttacctgggattttgtttttaactcctttccttcacaacacacattaatccatgagaaaatcctattagtttttttcttcatattatgtcatgaatttaacaacttttcacatgctcaactattgcctgaactattacaatttcttactgactgatgtcctcaggttacacttgacagttcccgtagaggagtgttatcttttaatataaatgtaaatctgatcacattgctgtgttcctcaacatggtttttttggttccacatctgtctatgatgtagaaaactgaaaagagcatcattcccacttaaacaattaaaggccagatacactacaaaattaacgctttctttgaacccataagtcaatttctactattccacatatartatttaacattcaataacaaaataagcaataattaaaacacaaaaaaaggaagaaaaaaggattactaatagacaaa

SEQ ID NO: 916122 - DNA, 656 bp, Homo sapiens
tgtctgcttattcaaatgttaatctcatccagaaacagcctcacagaaacatccagatgtttaaccaaatatctcggcagcctacaacccaatcgagtcaacacacaaaattaagtatcacagttacccgtatraaaatacttgcatttgtctgaaagaacattgaatattaaaattaaacttgtcagggggagcctgtcagcctgacagttgactaagtggtgtttgtgaagtaaagcaccttgttgtccctgtagtggataaattgagacccagcattatttatcatgagatatagtatgatgttgccaccttttgtacagtttaactctgcagttgtaatagaattccaaaagttacattccctgtgttctcctcacatctgggagatgaaggaataaaagcattaaatataagtataaggcttctacttatactttaagtataataaaagccttaagcataaggcttttatttgaaggaactgtctgaaacatacatagaatccataataattattactactcacaggcacattgttcagtaaatatttagtgagtgtctattatgttccaaccacaattctagggtctagacatagggtagcccagaatagaaaatggctttgaggagattggagttttgccacacatttt

SEQ ID NO: 916123 - DNA, 646 bp, Homo sapiens
ctggaatattaattgggctatcattgaaactgcttatcaaagcaygcaaaaatgacatgtttatatcattgagttttcccatccctccatttttttgtcatctaattttacccagatatttttaaatttttatttatttttttctttttttaatgttagggagggactaagcagaagtcaaaaacaggtgcttagtcagaaagtaagacttgggcataagagaaataaaaacctcaattgaagatctgatcttcagcttctacagaacaaactccctttagaaatttcaataattagagaagtttctcctatttgtatgttaaagaataagacactgtctgatacaatgacttcagggggttgccatgaccttctaagggttattttctgtttgcatgcaaggactacttcccttcctttctaatttcttagtcagcttgcttagtttcctttgcttttttctttctttatctttcacttttaaagtaagctaacccaaatttcccctgagatctactaaaaatttgatccctgctaccaaattccaccccaccaaccatcaaaaagccttttagtacatagtatgcctgtaaaatttcgtaagaaattcaccctgactccaaaccacccaccagcagggctgccc

SEQ ID NO: 916124 - DNA, 639 bp, Homo sapiens
ttttgtattaaagattcctttaatcttggttgatttttattaaaaatgtcttcatgtctgcccttaacaattttcattgtyctatgcactttttttgagttttcaaatttgatattttaatgaatctcaactgttcttaaaatagtctcattacttaactttttttgcttttatatttacttatatgctgctgctcttttgaatttagtctatttcctaggtagcattcataactcatggccacatacttgcttctgaatgaaatgttttcatttttactttacttccaaaatgaaatgttttcatttttactttatttcttgcaacccacatgctcttttctccttttggcttattcaccttattatttttctatgagttgccatgtggttgtgataaagttcaatttctttactttttaattttgctggtaatttaccacttaattcaaacatatcttgagcagttatggtctcatatacctaaatttgctttatattttttcttctggtatctgagcaatttaaaaacaactaagattttcttatttccatgagaaataaacatttaggaaatgtgtataattatcaccatattagtttgcatgccaaagaagtgagagctttgggtatgaaaact

SEQ ID NO: 916125 - DNA, 577 bp, Homo sapiens
acaaaaacacacagcgtaaaacacacaatataatctgcatgcaatttgacagagaagagaaaggatggatgagaaaaacaggacaccagaccccccccataaaagcgcattcacacacacacacaaaaatgaaactctgtggaaaccgctaatataaaagtaaatataaaaatatttgtttttcttatgttcaatgactctaaaacagaggtcctcaagcaggaaaaattttgcccctcagagcgcatttggaaatctctgtaaacactttttatttttaagttggagagtagggggtgctactagaatctagtgggtagagacaagagatgttgctaaactatatatagtactataacacaggacagctcccaacaacaaagaattacctgatccaaaatgtaagtaatattggtactgagaaaccctgttaaaatatagttgatgttctaaaggaaaatgataktgttttatgtggctttataacatagttaaaattaaaatgtgtgaatataatggcacaaaattgggataaatggattggaaatagaaatctgtgaagttttacaataaaggt

SEQ ID NO: 916126 - DNA, 577 bp, Homo sapiens
acaaaaacacacagcgtaaaacacacaatataatctgcatgcaatttgacagagaagagaaaggatggatgagaaaaacaggacaccagaccccccccataaaagcgcattcacacacacacacaaaaatgaaactctgtggaaaccgctaatataaaagtaaatataaaaatatttgtttttcttatgttcaatgactctaaaacagaggtcctcaagcaggaaaaattttgcccctcagagcgcatttggaaatctctgtaaacactttttatttttaagttggagagtagggggtgctactagaatctagtgggtagagacaagagatgttgctaaactatatatagtactataacacaggacagctcccaacaacaaagaattacctgatccaaaatgtaagtaatattggtactgagaaaccctgttaaaatatagttgatgttctaaaggaaaatgatattgtwttatgtggctttataacatagttaaaattaaaatgtgtgaatataatggcacaaaattgggataaatggattggaaatagaaatctgtgaagttttacaataaaggt

SEQ ID NO: 916127 - DNA, 660 bp, Homo sapiens
tatacttcaaattgtaaggtacatgtgcacaacgtgcatgtttgttacaacatgtgccatgttggtgtgctgcacctcatttaatgtgtgtttgaaaagactattcagtagttgttggttgtagtgtattattaatggttattaggtaaagtttgctaataggctaattcacatcttctaaattctgacctagtttagtctacctgttttactttctcagagtggaatggtatagcctctacctataattgttgattgattcctgttaattctgtcaggatttcctttcagttcttcaggtatttggaagcgctggtagtggcatacacgtacaggatttttatgtctttcttgtgaaatgattcttattatttgaaatgacctccgttatatctaatcatgttgtaataaacttgggtcctgatactaatagagacttcccagccatcatatgattagtgtttgcatgatgtgtttttacatgcttatgtttttaaatctgtttccattcttttcttgtttgcattattyctgatgcactgtcaccattgttcttatttgttcttttgtgcattaagtgacttttttctctagctgctctcaagattttaattcttgatttttagaaatattgttatgatatacctcattataatttct

SEQ ID NO: 916128 - DNA, 667 bp, Homo sapiens
aggctatttcatgaaaatttaccttggtgcaagtgatatgagctattaaatccatctttcggccagatattccattctgccttagaaagcccaatactaatccaagaaagacatggaaacatgaaattcacacttatttctaagagttgtaattgctgtgagttttcagcatatcttagcccatttggaagaatggggttttcttgaggctttcttgaacccggagagctttcggaatagtactttccaaggagtctgagatatttctttattttattttaggatagctttggtgctttctctgagggtggcttagggtaaatggcattgaacaagatggccttaaaattccccttagcttgtctgaactttatacaggcttctttttgtctctaggtaactgacctccctctcactctggaccaggtgggctaaccacagaggatcctgaccttccttccccctatcccttacagaacccaggttacacaatcacagagcaaaacattccaagcaagaggccctaatcacaaacttaatatataacttaatgtacttgacacaccccattgatcaatctccctgcaacatcctttgttacttttccactaactcaccacarctcttaaaaaccctaccattctttgttacagaagaggtaagttca

SEQ ID NO: 916129 - DNA, 659 bp, Homo sapiens
cactttcgcttattatactgggtagacagactctcctggtgaatagaartgatacaattgaacacacttggccttgtccataaactttgggagacagggcattcattcttttaatatcaaatgtttttagatataggcttttcagggatttttaaaatcaggttgagaaactgaccttttcctaaattactgagttttttttatcaataatgaatttttctctgtctgcctcctttctgatcagactggatagagttttattagttatattgatctctcaaagaaacagcttttggtttttcttgattttatatttgtttttccttttcctattttatcagcgtgccatctgatctttattattttatctttctggcttatttggaggtatattgatctttttttctgttttctcaaggttaaacctgataatactgatttgaaatctttcttgtcttctaatgcatgtatttagtgctgaataattccctatatgtctacttcaactttatttcacaagttttgatatattgcatatacattgccattcattttaaaatgttttgtaatttcccttttgacttattatttatcccatgaaacatttagaagtatgcacttagcttccaattatatgtggattttccagagatagttct

SEQ ID NO: 916130 - DNA, 513 bp, Homo sapiens; identical to SEQ ID NO: 902436

SEQ ID NO: 916131 - DNA, 632 bp, Homo sapiens
aatattccaaattcggacttgtgtggctcagacctgggtagagatgaaaaacctcatgactgagcttggagaaaaagcagctgaagcttagcatccaggcccaagggagcaagacatggaggcatgctcctgtctagggtcttcctccaattctgatgacctgtctaaagagcgtcttcctgtgaaaatgactaaccttgagagtagtgatctcattcagactatagtcccaatcaactttgaatgattttacttcatgacctcagtaaagaacacaaaaataataaagtaagattaatatctacgtaagaaatacacattaccactgcatagattatgtccagtataataggataggcctatgtcagtttgtaaaaactttattaatggaagttttgttgtcctgttctataatcgtatggcattcttatacttatgaatgtgagctatttatgtcacatctcgtgtcttctgtttgtcaaaatggttcaccattagaggctgggcctttaactactactaattattaatacaatggcttacacactctcataagtggccactaaagagagaattcacatgcttttaattatattgctgtgcatrttaacgcaagataatttttgccactc

SEQ ID NO: 916132 - DNA, 642 bp, Homo sapiens
tttcagttgttttcactttttgacattattaataatgctgtyattagcatttatgtacaagtttttgtgtggacatatatcttcatttctctttggaatgtaattacaattctctgtttaacatttggaggaactgtcaaacattttatacaaaacatctgcaccattttacattcccactcacagggcatgagggtgccaatttcttcacatcctggccaacatggtttactatctgactttttcatggtagccactccaatgaatgctaagtggtatcatgattttgatttaaatgtccttgatggctagtgagtttcagcatcttctcatgatcttattggtctttcttttgcttgggtacttcttattgtagtcttgtttatttctctaactctttcatatcttaccccttcaacctcatatttaatttgatagttccagtgagcccctttaaactctttcaacacagctttttttttcctcaagttcaagcccacacagttaccatttttttcctacttttcttacttttttattggtgagggctgactttgtaggggtacaactcatgcaactgcacagattctgcactctttaacgaccccaagtttgagctaatatgctgcagtcatcgtcatc

SEQ ID NO: 916133 - DNA, 620 bp, Homo sapiens
agaatggtaccagctcctctttgtaactctggtagaatttggctgtgaatctgtctggtcctgggctttttttttggttggtaggctattaattattgcctcaatttcagaactkgttattgttctattcagagatgtgacttcttcctggtttggtcatgggagggtgtatgtgtccaggaatttatccatttcttctagattttctagtttctttgcatagaggtgtttatagtattctctgatggtagtttgaatttctgtgggatcagtggtgacattccctttatcttttttattgtgtctacttgattcttctctcttttcttctttattagactagttagtggtctatctattttgttaatttttcaaaaaaccagctcctggattcattgattttttggagtgtttttggtgtcactgtccccttcaattcttctctgatcttagttatttcttgtcttctgctagctttgtggttagtttgctcttgcttctctagctcttttaagtgtgatgttagggtgtcgatttgagatctttctagctttctgatgtagacaattagtgttgtaaatttccctcttaacattgctttagctgtgtcctagagattc

SEQ ID NO: 916134 - DNA, 643 bp, Homo sapiens
tatatatataatatgtatatacatacatakaacataactttcaaaagacaaaacttataaacttattatttttcaattttaattttttttcagagaatagtacatttgtatatttgtggggtacatgacaacttttgatacaggcatacaatgtgtaataatcaaattagggaaaatggtgtatccatcacctcaagcatttatctttcgtgttacaaataatccaattatacttttagttatttttaaatgtataattattattgactatagtcatcctgttgtgctattaaatacctgatcttattctatttttaacacaaacctatttgaagttcacttctatcctctgcaatgacaaaaagatacttattttttcataaaaataacttcaagcaacctacgattgtaataagtttataaagttaattttctatatatagaaaaaagtactagctattagtattttagcaattcttcaccataataaaatagggctcctatatggttaaaaaagagtaggatcttaatctgatgggatcaatggccttaaaagaaaaggaaaagagagttctctctgagtctctatcccacaagtgatcacacagtgagaaggaagctgtctgcaaagccaggaaaagag

SEQ ID NO: 916135 - DNA, 605 bp, Homo sapiens
ggagtctgagatgagccagggtaacacagcaagacctcgtctctatttaaaaaataartaaaaaaaataaattccagacttgattttagcaagttttagaaagtaccataattgaaagttaagcaagattgacattttcaaaagtgatctgaaacctgattatttttatattgctcttaaatcctcacccactagaaatcataaagtgatgaatttgttggatatgtttatagaagggtctttctgaaattaatttctttggggaaaattgccagtaatttactccattctgatgcaaaggcaaggatgtgagtttatgctctagtcttttctggtcagcctttaactagtctacatagaaatcccagtatgtgtctcttaatgtcagagcaatgccgtcaagtggtgtctgcctagttactcagaaacttgccatgatagatgggcaaggtggttctatttgtatttgtaatggaacaaaggagagcagctgctaagttgcgatcattcttaatttctgcattatatccaagagaagaatgcatatgtgtttacattgaccaaatttggactatgcagaagagatgcattcactggggaagaag

SEQ ID NO: 916136 - DNA, 608 bp, Homo sapiens
ctaaaagccataggagaaatggactggcaaatctgaatttctgtattcataatttggccaggttaatggcaagctctatgatcctggccaagattgttcctcattatgtttatacaccttcatagtgagcctattggcgaacatgacgcctgtgttatatttgggcttccaaattctatgttaatgacagaatcctgctctctaaagcaaaccttgcttacagtccattgcagtcctgctttcatgtggagtgttcacttctgcaacatcaagaggaagtctcccatttctaactcttgatttaacggatgagtcaaatttgaccaatacaacaaagcagacagggttgcaatgttttacatgaaaaacatctgagcgtgctatggttacaggcaacagttcattttgataatttttaaaaggaaaatataaataaagaaatgacagagaataggatgattttacaaaggtgaattaaccatggaatcacagaaaaaaagataactaaagtacctaaatayacaattattctgggtttcctgggaactttaacaattttgttttcagatctactttatttcatttttttcctcatctgttttccatgt

SEQ ID NO: 916137 - DNA, 677 bp, Homo sapiens
tcagcattctaagagtgcctttgtttctttaacttttattttaagtttagaggtacctgtgtgtatttgttatataggtagacttgtgtcatggggatttgttgtacagattatttcatcacccaggtattaagtctagtaccaattagttatttttcctgatcttctccctcttcctacccttcaccctccaatagatcccagtgtctgctgttcccttcttctacgtgtccatgtgtaatcatcatttagctcctacttataggtcaaaacatgtggtatttggttttctgttcatgtgagtttgctaagggtaagaaccttcggttccttccatattcctgcaaaagacattatctcattcatttttatggctgcatagtattccatggtctatatgtaccacattttctttatcccctctacctttgatgggcatttaggttgattccatgtctttgctattgtgaatagtgttgcaacaaacatatgtgtgcatgtgtgtttatgataaaatgatttatattcttttgggtttatacccagtgatgagattgctgggttggatggtacttcgatttttaggtctttgaggaatggccacactgtcttccacaatggttgaactaatttaccctcccaacaacagygtataagtgtttctttttctccacaac

SEQ ID NO: 916138 - DNA, 695 bp, Homo sapiens
atctacttcttcctgatatctcatcagtggttgatcttaaaatctcattcacatagactctgctttatagtcctgccatgctaccctagtggatattctgaagcaagattcctatcaaaatgaccttggtcgtaaatagctggattgagttccagaactcacccctaggttttatgtttctgttagtatttacagttgttagaaggaaatacagttatttatcaagtcagcaacaacatttctcatccccaaccctattctttttcttctctcttctctatccaccatcctgccaaagacattttgcataacaaaatcagtcatggttaagcacatgactgcatgaaacctttttccaactccccaagggacctcctggaaagccccctcatcaggcttgagattagaatttaccttcatccttcatttattgattaacagttgatttgggatttgcaggaaaatcagagtatgaaaataatttttcccagagatatatcttcagggcccaaagtttaaatccccttcttgatctttttgtgtcctgatgcaagtgaggattttcaaaagttttakaaaaaacaaaaatacttaactgtttccttggaaatttacattttggcctgttacccaactcacttttgaatctgttatttatttcacctcagacatcaataagacattttccaaattaa

SEQ ID NO: 916139 - DNA, 695 bp, Homo sapiens
atctacttcttcctgatatctcatcagtggttgatcttaaaatctcattcacatagactctgctttatagtcctgccatgctaccctagtggatattctgaagcaagattcctatcaaaatgaccttggtcgtaaatagctggattgagttccagaactcacccctaggttttatgtttctgttagtatttacagttgttagaaggaaatacagttatttatcaagtcagcaacaacatttctcatccccaaccctattctttttcttctctcttctctatccaccatcctgccaaagacattttgcataacaaaatcagtcatggttaagcacatgactgcatgaaacctttttccaactccccaagggacctcctggaaagccccctcatcaggcttgagattagaatttaccttcatccttcatttattgattaacagttgatttgggatttgcaggaaaatcagagtatgaaaataatttttcccagagatatatcttcagggcccaaagtttaaatccccttcttgatctttttgtgtcctgatgcaagtgaggattttcaaaagttttagaaaaaacaaaaatacttaactgtttccttggaaatttacattttggcctgttaccyaactcacttttgaatctgttatttatttcacctcagacatcaataagacattttccaaattaa

SEQ ID NO: 916140 - DNA, 625 bp, Homo sapiens
aagatgattatattttttgaaaaatcactgccaaagggcaagcagttgagacctaagcagcttgcatggttgatagaaggtgagcaaaagagacctatgctrtgcctgagcagtagggtaaaaagtaattgcaggcataccccattctattgcacttaaatttattgtgcttcatagagaatgcatttttttaacaaattgaggatttgtgacaattatgcatcttttggcactattttcccaaaagtatgtgctcattttgtgtctctgtgtcagcaattttgttgtagcaataatctattttaaaattaaggtatgtacatgtttgtttgtagtgctattgtacacatagactactgtatagcaaagagaaccgttacataaactaagaatccaacacatttgtgtgactgaatttattgtgatatttgctttattgcagtggtctggaactgagcccacaatatctttcagatatgcctttgtgtgattctcttgttgctctttgcttttgccaatgataaaggcatgttttgaatgtgggctgcttttcaaacatgaattttatcttgaagaagacacatggaacattacaacttatgtgtctcagccacgatagataaaa

SEQ ID NO: 916141 - DNA, 588 bp, Homo sapiens
atactactgcagtcaaaggtagatattgaaatataggaagtgattctatagtaaattattaaacgaatgggaaaattctttctgcatggaagttttttcacattatagttaaaaataaagtgatttatagtaataattaaattaatatatagtaataaataatagaatatatacatactaatgattagttagttttagtacctataggtagtctaacagagtataaagttacttattatattacctttgaactggaagctcatggggctctttgttttgtttttcttttcttttcttttttttttttttttgaggcggagttactgctgttgcccaggctggagtgcaacggcacaatcttggctcactgagacctgcacctcctgggttcaagcaattctcctgcctcagcctcctgagtagctgggattacagaggcgtgctaccacagccagaaaaattttgtrtttttaatagaggcagggtttcgccatgttggccaagctgttctcaaactcttgacctcacatcatccacccaccttggctaggtaatcccaaagtgctagtattacaggcgtgagccacc

SEQ ID NO: 916142 - DNA, 617 bp, Homo sapiens
ggtttggaatatacttttggaagcccatggactcaaaaccacattaattataatattatgacattatttgctctttctagtcttttcctcatgagcatacagtgaatattttcaaaggctttatagacatgtggtatcacaatagattacataaaaaagcagatatgataatccccatcttttcttgaatttggacattacattaatttgtaaaaatgtaaaacaatataatcatttacattttattttgttttgaaaatatagctatttttataaaattgtgcaatttttgttaacatgcaatgaatttatttctgctattttaaataataaatagttcttgaatttcacagttttaatttataatatagtatatattgatatttataactcaaatttcaaaaaaaatttggagaagccgaaaattttttatatataaaatctgtatatctataaatcctgagaaaataaaattgctgaactggagaataacatatgcaattataaattaatttattcaaaaaawttttacctgcaatgattattctaatatgtcacagacaaacaaatatgcacaaactgagagacattttacttattggagtttctcacgtagt

SEQ ID NO: 916143 - DNA, 617 bp, Homo sapiens
ggtttggaatatacttttggaagcccatggactcaaaaccacattaattataatattatgacattatttgctctttctagtcttttcctcatgagcatacagtgaatattttcaaaggctttatagacatgtggtatcacaatagattacataaaaaagcagatatgataatccccatcttttcttgaatttggacattacattaatttgtaaaaatgtaaaacaatataatcatttacattttattttgttttgaaaatatagctatttttataaaattgtgcaatttttgttaacatgcaatgaatttatttctgctattttaaataataaatagttcttgaatttcacagttttaatttataatatagtatatattgatatttataactcaaatttcaaaaaaaatttggagaagccgaaaattttttatatataaaatctgtatatctataaatcctgagaaaataaaattgctgaactggagaataacatatgcaattataaattaatttattcaaaaaatttttacctgcaatgattattctaatatgtcacagacaaacaaatatgcacaaactgagagacrttttacttattggagtttctcacgtagt

SEQ ID NO: 916144 - DNA, 630 bp, Homo sapiens
gggttatcttctagaagttttgtagttttgcattttcgttaggtctgtaatccagttttatgtaacttttctgaggggtgtaagatctatctacrtttatatttttgtatgtagatgtccagttgttccagcaccactcgttgaaaaaattattgttgcttctttctattgcctttgctcttttttcaaagacaagtggactatatttatgtggacctatttctgagctctctattctgatctattgatctgttttttttaattctttgccaatggcacactatattactgtagctttatagcaagacttgagattgagcagtgtcagtcctctgactttgttattctccttcaacattttgctgttttggatcttttgcctctccgtataaactttagaatctttagaaactttaatgatatccataaaataacttgctagaattttaaatgggatttcattgagtccatagatcaattgcaaagaactgatatgttgacaatattatctttctatccataaacatggataatttagttatttgatttttttaatctgaatcttgtggtttttcttcatatagagtctgtaaaaattttgttagatttatatctaatatttcatttttg

SEQ ID NO: 916145 - DNA, 555 bp, Homo sapiens
acctataaataatgtgctgataccagaaacccaaaatgatggtaactgagagtggttctaaggccctaagttttggtacactctcatctaagtgagaacctgaccaaaaagggggaatttttttttttttttattttctgaggtggagtcttgctctggtgcccaggctgaagtgcagtggcatgatcttggatcactgcaacctctgtctcccgggttcaggtttaagcaattctcctacctcagcctcctgagtagctgggactataggtgcgtgccaccatacccatctaattttttgtatttttagtagagacgggttttcaccatgttagccaggatggtctcaatctcctgaccttgtgatctgcctgctttggcttcccaaagtgctgggattacaggtgtgagccaccgtgcccagccaggcagaatattttaaacaaaattctgggaggccgttgttttggactaagttcatgyactaggtctcaacaaaccaagccaaaccaaaccaaaccaaaatggagttgcttgtgctaggactttaaggaa

SEQ ID NO: 916146 - DNA, 611 bp, Homo sapiens
taaagtcatttaaaatttaagttcaatacaggactagaaagaaarccaatgtgcttggatggcttaacgagctgtgatttagtgaatcataaacaggaaactcggagatgatttcagagatgaagtcttgggtcaagatttggtaggccttgtgaagggaaaatatcttgggcccccaaaatcactaaggaaaactcaaggtggaaactgcttaagaaaaatcctgtctcctattctattcaaagctctccctctgctcactgagatagatgcatatatgattgcctcctttggaaaggctaatcagaaactcaaaacaatgcaaccctttgtgtcttacctatctgtgacctggaagctccttcccgctttgagtcttcctgcctttgcttcaagttgtcccacctttccagaccaaaccaatgtactttttacatatattgattgatgtctcatgtctccctaaaatgtataaaatcaagctgtgccatgaccatcttgggcacatgtcaggatttcctgaggctgtgtcacggacccttccctcaccttgtcaaaataaactttctaaattaactgagatctgtctcagattttctggtttcacaggc

SEQ ID NO: 916147 - DNA, 618 bp, Homo sapiens
cttaatgaattaaggttgaattccagtgattgccagccattcagtccctgatgaaacccacccagctccagatgcagaacacaacagcactagacataatagtgttgactttttctcagcacgtcctctagagcacctagaaacaatggcccttgattctggactgctaacatccacagtgtctagtaggagaaaaggaaaatctgtggagtaagaaaatgacatcttaggtatcaaattacttacataagtaattattttaatacaacatggtgagcataatctaagacaaacagcaaataagaagataaaactatgtaagtcataatgagcagaacaagttaaagacagaaatataccctcaaaattttagttaaaaaattatcaggtgctgtctgtatgatacattattatagtttatcagctattgcttggaaaacctaaacttttctcttttttatcggtacatttgttttggagagaattttattttctyctaccaagtcttgggataatcaaccaatttaagaagagctcaaattttatgaataaaagtaaatgatacccaaatcatttataataacactgcagaaaatcaaagacagatacatcgtttta

SEQ ID NO: 916148 - DNA, 628 bp, Homo sapiens
gcaataaataataatgaagtgctacaaactgtttacaaagataaatctcaccagtataatttaatcaaagaattcaggcatgaagaagcacaagttttatgctttctttgaggtaacatttaccagcatgcaaaagcaaactgtaaaccagttttcatgaacacctgttcagtattgccttaatattttttggtgggagtgagaaatactgaattcactttctctttattgacctatagtttcacatatgtttatgaatactaaaagcaaaatgataattgaaaataatcatgtactgtttaactgaggacaaacacagttttgaattctttttaacttcgtgatttataggtttattaatccattaattgttctctaattaattaaatatttatcaaacacctaatagtatgtttaaggtaaatttgttccaaaaagcccttaacaggcaaccagtctaataggctagagagaaaagccaatgtttacaaaataatgcatactttaattaaataattcattckttcataccaaaaatattttttgaattactacaaaatgcatcacatgtatgtagttggaaagcaatggattttataaagtgggggcaaacagagaaaatactaaa

SEQ ID NO: 916149 - DNA, 641 bp, Homo sapiens
ttcccatctttctgttcatgtattcattgtttagctcctgcctataagggagaacatgtggtwtttgcttgtctgttcttgcattaatttacttaagcaaataccacatgttcttgcttataagcaggagctaaacactgagtggaagatggcctccagctgcatccatgttgctgcaaaggacatgatttcattcttttttatggctgtgtagtattccatggtgtatatgtacagcatttttattatcattttattttattttattttttgagatagagttatgctcttgttgcccaggatggagtacagcggcgctatcttggctcactgcaacctccgcctcccaggttcaagtgattctccttcctcagcctctcaagtagctgggaatacaggcatgcaccaacacacccccggctaatttttttgtatttttagtagagatagtgtttcaccatgttggttaggctggtctcaaactcttgacctcagatgatccaccggtctcagcctcccaaagtgctgggattacaagcatgagccactgtacccggcctcacatttcattatctaatccaccactgatgggcacctaagttaattccatatccttgctattgtgaatagccctgtgatga

SEQ ID NO: 916150 - DNA, 622 bp, Homo sapiens
acagaaacgttttaggggatttaaaatacaaayatattgaattaaaacatctgacatgactataaattggaagggtagaaatggagttaaagtcttttaaattacttgctcttttgaaaaggaaggtcaagataagacaaaaaaactttattaagtcagaggttcatgttttaatttcttgagtgaagaaggttcaaaaaaaatgtaaacatcttagttgatggaacaaggaaagcttcacttgagattttttaaaaagaaaatggtgtcttccctccttacttctattcaacctgacaccagatgacctaatcagatcaggacagtgagaatatgaaatacactacaataatgaactgggaaaacaaaaaagaaatacactgctactagtgctgataccaagtttgctgcttaaattttccaatcttagtaatcagactgtgttcaatagtgtacatgttcttagcagtttttttttaaatatctggatgttgcaggctagtagttatggggatagctagggtgagggctgatgtctgtgtccactggagggttaaattttagaatttggcttatttccattggtttctgtcttaaataggatggatattcttttgtgaag

SEQ ID NO: 916151 - DNA, 650 bp, Homo sapiens
atacaaaaattaactcaagatggattaaagacttaaatgtaatacctaaaaccataaaaaccctagaagaaaacctaggcaataccattcargacataggcatgggcaaaggcttcatgactaaaacaccaaaagcaaacacaacaaaagccaaaatagacaaatgagatctaattaaactacagagcttctgcagagcaaaagaaactatcatcagagtgaacaggcaacctacagaatgggagaaaagttttgcaatctatccatctgacaaagggctaatatccacaatctacaaagaactcaaacaaatttaaaagaaaaaaaaagtactccatcaaaaagtgggcaaaggagatgaacagacacttctcaaaagaagacatttatgcagccaataaacatatgaaaaaagtttaagttcgttgtagataaatgccaatcaaaaccacaatgaaataccatctcacgccagttagaatggtgatcattaaaaagacaggaaacaacagatgctggaaagaatgtggagaaatagaaatgcttttacactgttggtgggagtgtaaattagttcaatcattgtggaagacagtttggcgattcctcaaggacgtagaactagaaataccatttctcccagcaatcct

SEQ ID NO: 916152 - DNA, 657 bp, Homo sapiens
ttctgctcttcaaatactggagcacagaataaagatgtctctgcatgaatcaagaattattttgttgttkttgttgcttgttgtttgtcttttaatctaactttttcaagcaatcattgtatttagccgaccactaaatctaaagcctacatttgtgacttgtgtttagaaagatgatttgaataatgattttctagaaaataacaaggtgagaaaaatgttaaggctatagaaactattggaaacatcttttctttctttctattctaagactaaatatttaccatcaagaaaaaataagatggaagaagaaatctttggtatggtgtaaaccaaagtatgaatccatatgaggaaatcaagaccaatgtaaatgacttcctctttccagtgttcatgaataaaatttcatctaccttctatacatgatggttctatctggctagtgtccaaggacaaagaccatcatttttactactgatgtttgtatagtggcaggaagataaatgagtaaagttatctgtttcttgtgaaatgatgaagtattgtgaacaatatgcatgcccaaattaacaaaaacatgttacataaaaataaatgaaatgaatggaaatccagacaagagcatggactcaagaaaagggtagggttatattt

SEQ ID NO: 916153 - DNA, 603 bp, Homo sapiens
ctgccttattcctgtccaattctgtatctttatagtctattagtgttcacattttataattattcagacccataggaacgtgctactttcttaacctttctaccatatcttagaaaccctaaataattcatggtctgtttttaccttaaagtgattttcacagtcatagacaagtcagtttaaagtaatgtgacacagagtaacaaaatgaacaaaaaagcattttgctaagctctttatacacactgccatgttgttctttatgacaaatttatgaggtaggttccttagccccatttcacaggctgagaacctgagactgtcaacactaagctgattttactgtgattacatcttagtgagtgacagatctagcaatcatggaattgagaaggccccacctatgttatgttataacataacataacataacataacataacatagcatagcatagcatagcatagcatagcatagcatagcatagcatagcatagcatrgcaacataacataacacagggggccttctcaattatgttataacataacataggggaggccttataattttcttcattcttatcttgatgtgaaataaggac

SEQ ID NO: 916154 - DNA, 596 bp, Homo sapiens
aaatggcttgtgaaatagaaaacaattaacaaactgacattggtaagcccttgcctgtttatcagtagttactttaaaataaatgaaacaaattttccaatcaaaagacataggttggctgaattgatttaaaaaacaaacaaaagtaagatcaaactctatgctgtctacaagggattcactttagttttaaggatacacataggctgaaagtgaagggactgaaaaagatactttgtgcaaacagtaaccaaaagagaagaggtaagattatacctctatcagacaaaacagactttaagttaaaaactgtccaaagtaacaaaaaggtcattatgtaaagataaaatggtcagtttcttaagaggatatcgtaatgttacgatgtatgtagcccacactggaactactaaatatataaagcaaatattaacagaaatgtaagcagaaaccagaagcaatawaataatagtggagaactttagcattcaacaatagataaatcatccagacagaaaatcaataaggaaacagtgaacaccaataactctgtagtccatataactctatagtccaaaagtatacaaaacattaca

SEQ ID NO: 916155 - DNA, 596 bp, Homo sapiens
aaatggcttgtgaaatagaaaacaattaacaaactgacattggtaagcccttgcctgtttatcagtagttactttaaaataaatgaaacaaattttccaatcaaaagacataggttggctgaattgatttaaaaaacaaacaaaagtaagatcaaactctatgctgtctacaagggattcactttagttttaaggatacacataggctgaaagtgaagggactgaaaaagatactttgtgcaaacagtaaccaaaagagaagaggtaagattatacctctatcagacaaaacagactttaagttaaaaactgtccaaagtaacaaaaaggtcattatgtaaagataaaatggtcagtttcttaagaggatatcgtaatgttacgatgtatgtagcccacactggaactactaaatatataaagcaaatattaacagaaatgtaagcagaaaccagaagcaataaaataatagtggagaactttagcattcaacaatagataratcatccagacagaaaatcaataaggaaacagtgaacaccaataactctgtagtccatataactctatagtccaaaagtatacaaaacattaca

SEQ ID NO: 916156 - DNA, 584 bp, Homo sapiens
ttactcatgtaaccaaacaccacctgtatcttaatarcctatcaaaatataaaaaaaattcagatttatcacattgcctacaaatgtcatttagaaaatggagaaacattttaatattaaaataaaacataacaattaaaaaaaagacttcctcggacaaataaaagctgaaggatttcatcaataccaggcctttcctacaaaaaaaatgctaaagagagtaattgaaacagaaagaaaatgacattagtgagcaatatataatcaccagaaggtataaaactcactggtaatggtcagtacagagaaacgcacagaataatataacaccgtaactatggtgtgtaaactacttttatcctaagtaaaaagactacaaaatgaactaaacaaaaataattaacaactacaacttttcaagactgactatgtctttatgtctttttgtactgactatagtacaaaaagatataaagaaaaaatgaaaagctaaaaagcaggcagatgaagttaagcacagagtttttattagttttccacaagaaaactgtaggtgcatataaacaaattcaatgaagttgcag

SEQ ID NO: 916157 - DNA, 597 bp, Homo sapiens
caaatttagtggtactgtatgatgtgtcacctctcttctagttcccactgtcatttcccttaatctcctttaagctttcactgacagatttctccaggccttgcaggcttcattaagactattcctagctccctttaggctgtcattaacagaaaccttaaggctcaaagaaatgttgtatattttaggtttgggttatggcagatcctacaagcggttccattatcagctccaattatttacaaacgcatattcaactactccaaatgttcagtttaaaacaatcattttattatgcttacaggtactctggggcaggaattcagaagataagcaaaaagaattttcatctgctcatgagagcagaagcttcactggagaggcttcaatttctgtgcaaaggaatcaagtggtgtcaagtggtggcatgctcactcacacatctgttggcagatgctggcagaaggcaagatttctattggctttgtcctccagascagtacttcacataccctgtccttcctcggagcatagaaaccttggacttcttacattaatattcatggcttcaaagatctcaactcttccttaaatgaa

SEQ ID NO: 916158 - DNA, 597 bp, Homo sapiens
caaatttagtggtactgtatgatgtgtcacctctcttctagttcccactgtcatttcccttaatctcctttaagctttcactgacagatttctccaggccttgcaggcttcattaagactattcctagctccctttaggctgtcattaacagaaaccttaaggctcaaagaaatgttgtatattttaggtttgggttatggcagatcctacaagcggttccattatcagctccaattatttacaaacgcatattcaactactccaaatgttcagtttaaaacaatcattttattatgcttacaggtactctggggcaggaattcagaagataagcaaaaagaattttcatctgctcatgagagcagaagcttcactggagaggcttcaatttctgtgcaaaggaatcaagtggtgtcaagtggtggcatgctcactcacacatctgttggcagatgctggcagaaggcaagatttctattggctttgtcctccagaccagtacttcacataycctgtccttcctcggagcatagaaaccttggacttcttacattaatattcatggcttcaaagatctcaactcttccttaaatgaa

SEQ ID NO: 916159 - DNA, 645 bp, Homo sapiens
aactgaaagcagagaccagtctgtccacgtggtcccagtctgcctctccctgagatgtcaagagccttaagaatcactaggattctagtatcctgttaagcctgtgtatataaaaawgtttgttttgtttttcatatgtttattttatttttcttctattctgaccctgtagtatatcatttgtggtgtttgtgcttacgtttgattgacatctttttttttctataacacgtagtaaaattatttcaaatggtgtaagcaatgttaagcaaagaagacaaatcatataggcatttaatacctgatataaaaatatagaattcttttaaaagcaagaaatcaaaaaacggtgttaaattgtttttaatactatatattctataataaacgtacagtgattctgtatgtctacatgcataattaaatattgagagatacataacagaaaaagagccgtttgtgatataactatgttcacttttatcattttaagttaattatgtcttactagtgatataatagttgatatagtaatatagtgaatttgtgacataagtaactaatctgcctccttgtacgcttcatgctaaaggctatgaaaataggaaaagactaaaatttcaatgtcacgacaattatttgtta

SEQ ID NO: 916160 - DNA, 680 bp, Homo sapiens
cactagacatttgtttaaaaagtcatttatctaaaacagcttaagtactttgatcaaaagtgtttaataaagccaaaaaaaaagtcaccaaaaaatgtttgtattgtttttggttggtttgtcattataagtatcgtaatatgtcagtcagtagggtatgtttaaatttactgccaaatttccacagcctgctcattttgtgggtaataaatattacactgtcaataaaatccttaaaaataggagaatttcagtcaacattttttgattccccagatttttaattttgttattgagtcagagaaaataattatgatatatgggaaccaaagtttcagcattcgagagatgccatatcttatgaaagaattagtatctttgtctatgtaaaaataaaaatctactcatactctgaagtctttattttgggagaatacataattttagccaattcggatagcaggttttatgccattactagattgcttgcatgtcttgcagtatctcgacctaggcctcttttcttgcctattggaagtcatattcatgtcagtrtttgtttggacgacatagtctacagctttaagagcttgaatccccacctgaggaattgatcaagtcacttaaccactctgtgcttctgtacacacacacacacacacacacacacacacacacac

SEQ ID NO: 916161 - DNA, 618 bp, Homo sapiens
caaaatggggaggggtcttctgggacataggtaggtaagagacaaatkgttgcattcttttgagtttctggttagcctttcgaaagaaggcaatcagatatgcacttatctcagtgagcggaaggatgactgagcagaatgggaagcaggtttgccctaaacagttcccagcttgactttttcctttagattagtgattttgggatcccaaggtttattttcctttcaaactaataatgacatatataattatttcaataattattaatagtttcttttgtttattgttaaattcaacaatctaatcattgtatatttattgaatatctgttttgcaatattttataaatttataatttttataaattttataatttttaaaagtaaggaaaatctagctttgttttcaaggcatctaatttcttttataatttttattgtgtataaataacatgatagagaagcaaaatattatgtggggtccaaggaaaagtatatctgtttgaggatgctcagaataacttcatgtagaaacttctgttcaaactgtgatatgaacaatgggtagcattctgaagaccatacttgggagtgaaatagtctctagagatgctttta

SEQ ID NO: 916162 - DNA, 670 bp, Homo sapiens
gtgctagtttattaatggaaagtrcaacttccaagtctccatttattcaaacactaaaatttgaaatagcagagtaattttttaaacatgtagtcaacagaatcagatgctaccttttggaaagggctgggtgtgtatgtatctgtgcataaattgactatgagcttgctttcaagttaactttatcatttaacatttactgaaaatactagtaatgaaataaacataattttgaataaagaaacattgaaattttctacagtcaagaacaaacatgttcagatgactgttgtttaatgggcccaggggcagcttatacacatgacttggtgcactctggtgcttgccaatagaaggtgacctacagtcacttgctagtcatcaaaagagagtttgcttagacctggatatagctgaacacagtgtggtctggttttgaaataaagaggaagagccctacctaattgtatattttttatgacataaacataggaataaacttgaattagagaaaaaatatcacaggcagcaaacagagctactaggacaaggattggaaaaatgccagagcactatatggagatgttgattgaattcatgtgaagcccctcttacttgctaaagggtcagttactgaacatccctccaggtaaagaaaagccaaaagccg

SEQ ID NO: 916163 - DNA, 668 bp, Homo sapiens
catggttgtaagaaaaatttctccaggtcaaayaaaaaaatgtattagtgtaagaaaaagagcctgttctttaatgtttactagctcaatattggcttactttctcaatcactggaactttctactttaggaactggtggtatggtcaagaacattactctttactgttaggggtttaaaaaattctccttacagtttctctgctcaaatatttctctttggaaaactttttaaattattgtcacttttatatttttttaaccagattggaacttacagtctattatcattatctgctcatacaattttctaaaattcacttgaggtgcaggttttcattcatttaattgtgaaattctgatcagcctcaaactagagtctaataaatcaaaataaccaatatattggcttatcaaaaagaaaatggactgccataaatttctcttctctttgtatgtatgaaccaccctacttcactcatctagagattaagttcaaacctctaccacactgaatcagtgctgcactgaccaaaaacatatagcagcagtgacacaaaacctgtccttcaagacggtttctgttactatgtcttatcatagaggcttaaactttcacattagaggtttgtactggaaagaaatgacataggcaggagtgtggaagca

SEQ ID NO: 916164 - DNA, 660 bp, Homo sapiens
cactaccaccaaaacatttcaagaatcttaccacaatttcttacttgcattatcaccctgctccaagcaatcatctaatctcacctgtattattacagtygccgataactgatcacttggatgcatcctgtgcttgctattgctagtgaatacagtcagagtaatattgttaaactcagtctgaaatcatcaacctctagagaatatttaaagccatgaaagaagcctgagggctcacaggaaactatataatgccagttaggaagatcaagaattattttcaggcactccaatgtttagaggacaggaggatgctgagaaggcagaaaggagttcagagataaataagtagtaaagtttagagtaggctcaatccagtaggtaggtgggagcaccgagacattatattcatgatattcatggttattttatattgtgttcattaatggatgttaattagctttatttatgattttacaatatgtatcaaaatatcacatcacatatcataaatacattccatttatatttttaaatttaaaagataaatttataatttttttaaaaagcaataaaaaatgcaatgccattctctcattggaatctaagatggtctctaagaaacattgcctaatatatatatacacacacttacatata

SEQ ID NO: 916165 - DNA, 569 bp, Homo sapiens
gctccactgctatggctttgaaggtatagctcccctcctggctgctttcacaggctggtactgagtgtgcagcttttccaagagcacagtgcaagctgtcagtggatctacaattctgcagtctggaggacaatggccctcttctcacagttccactaggcagtgccccagtggggaccctgtgtgggggttccaaccccacacttcccttccacattgccctagcagaagttcttcatgaggggtccacccctggaacacacctctgcctggacatacaggtccctccacacatcctttgaaatttagggtttcattaaacctcttgagttttctgaattttctaagaatgcaccagaattttaattattcaaaatgtccattgaaactttgctaagcactattttcaaaggtctatacaagcgaaggatttggatcagttgatgttggaggggaatacatttgtgtaggtaggtagatagatagatagatagatagatagrtctgatttattaagaatcattcaccaggtattagtgttacattttagaaagggagaaagagaataa

SEQ ID NO: 916166 - DNA, 607 bp, Homo sapiens
aatgtgaaatgcctatagaactattacatgataatatctaatagccatttacgtatactgatttgtaactcaggggacaaataatagtggaaatatagtttgaggttcatattttgtcaccaagagcacrctttattctgtgataaacattagagttttagcatttgtccatggaaaaagtgggaagcaaatgattatggaagacaaacaaaagaagaatttcaagaaggaagaggtattcagatttgttataaacacggcaaaagtcaggtaagatcaatacattactttgctaggattgttgtaaagaagtatgacaaactgaattgcttaaacaatagaaacttagcatttcacagttctggaggctcaatgtccaagatcaaggcattgtcaaaagggttggttccttttaagggggtcaaagaaagctcagtgtcaggtctatctcctgggcttactgatatccatcttcttccttgcctcttcacatcctcctccatccatgggtatttgggttcaaattttctctttctataagaacaccagtcatgctggactaggcacccaacctactctggtatgaactcatctcaaatcattacat

SEQ ID NO: 916167 - DNA, 659 bp, Homo sapiens
gtaatttgaaaagtaagtctattttgttataatgagtcagccacaaataatgagttagcttagcactaaaaaatgggataatcttgattacattccttccatagtgtagtgtatgcatctgtatgtatattgttcgttttcttcatactttttgtgtcataagcacaagggacaataggaatttgatgacttcatgacctgatctaagccattatgattatattgagccatgccttgcaaaaattaatgttgaaaaatgagatcatttatgagatgaaactacgatgtagctttgaaaatataaagcaattttataagttcagtatagtttttaaaaagtaatcttacactcaagagatctgaatctttctaattgtaaagtgagtaaaggagcaaaaataaaacatgttcacattcttttgaagaaacctccacaatagaccactgtatgtaatgattccttagccaaaggcaaatttcttcgaatttcttcctttggcctctacaatatacataacacatacacattgccagattttaaaaaaattagaaaggattaaaggaattaaataattaagttatttaaatatataaatatagcaacaaaggctatcatatcattawaaactgaatattataaaatgaatattaaaagttaa

SEQ ID NO: 916168 - DNA, 630 bp, Homo sapiens
tggctgtggccagcctcttcattaacccagcattcattgtttcaggccccaataattttacagagaccatataaataaaatcacatgttacaaargatttgggtatcacttatttatgcattatgatgttgtgtatatcaatagtttgtactttttgtcatttagtagtattctattgtaagcaaataccattttttgtttgtttgtttgtttttatttctcagttgaggtacatttgttttgcttccagtattggtatattaaaaataaatatggtataaatattctgatataggtttcttagtaagcttagtattttgtttcacttggagaggtatctaggagtgggattatagagtcatatcgcaagtgtatgcttgatgctctaagaagacttccaaattacttttcaaaataactgtaacattctgcatattcagtaatagtgcatgagaatttctgaactttgtgttcctatcaacacttctcattgtgaatttgtttgtttagacgttttaataggggtcttttgatacatttgtccagtttttcttttgggataccttatgacaaatgatgttgaacatctattcttgtacttatttgccatctgcatatcttatctgatga

SEQ ID NO: 916169 - DNA, 571 bp, Homo sapiens
gtttaattgactaacagttccacaaagctggggaggccttacaattaagacagaaagcgattgaggagcaaagtcacgtcttacatgrtggcaggcaagagagcttgtggaggggaactctcctttatgaaaccatcagatttcgtaaggcttattcactatcaggagaacagcacaggaaagacccatcaccatgattcagttacctcccgtgtggtccctccatgacacgtgggaattacaggagctacaattcaagatgagatttgggttggggacacagccaaaccatatcactgcagagagccaatttctattttttccatgtattctatttttctcatatggttgggtttggaatagtaataaaaacaatatatatatctagatcataaaacatgctctatgtaaaattatttacagactcataagacatgcaaaacttttaactcacatacaaaagacacaaatatggtgattcagtgaccactataaatatatttatgtaagcatggttatgatagatacgtagacaaaataataaaaggtaaattggagtatacaaatcatt

SEQ ID NO: 916170 - DNA, 629 bp, Homo sapiens
agcattttaatctacattttcgcataattttattttcacataaaaatgtagattgctattgacattttcacatagcattatgttaattcatatggaaattgaaatctgggagttttaacttcttttttctgtttttcattatatttcaacatattcaaaattttggttcattggtgctttgccactttcattaataatttcctctggtacaagaaaaaaaacttagtaggtaaaggtgagataaacagcaataaaaatacaggttaagaataattaagagttacctaagttcatctagtaactaagtagcttgccaggtttctgaaactagacaagcaggcttacatgctaacacacataaattctacatcatattgttgctagcaaaataaaaactgagtagacacaatttttattttattttagggtatatctgccataatgcatatattaaaatgttatagttgataggtcaaaaattgatctattcataatacgtgtgtgtgtgtgtgtgtgtgtgtgtgtgtgtgtrtatctcataggaaaaccggtgaatgaaactgtggctctcaaagttacggagagtgagaatgtataagtcccccaaatcccttgcctttctggtaaaa

SEQ ID NO: 916171 - DNA, 666 bp, Homo sapiens
accgctgttcaatgtggattgcattcaaaagtataaatcccagtgacctaaatgataccattaaagctttytaccacaacgtaaagacccttcataaacaagcattggaacaaagattcggcatcatctcttgcaactctgcttccttgtatggtcccaaagtcttgaattagtcacaacttcttagaatcattatgatgtgtaggtttattccagtttgtctttaatatcttaacactgaacataagataatttatagattccaattaagataatttggtataattaatatatttaaactaacgtaatttatagacttagataatctttcaagataatattctatgccagtggttttcaaacttgaacctgcctcagaattacttgaaaggtttgtttaaacacagacagttcgaccaaaatccccatactgcttaatttagtatatctgtgattaggcctgagaatttgcaggtgatgttagcactaagattccaggaaccacagttacaacaggagaagtgtctctggcctggtttctggatttgagtatgtatttattatagacagactcatctttcacataatcatatattgtagtataattgtctggttttttgctctcacttaagacagtagaaaaatgtgaaagatattttgggcaag

SEQ ID NO: 916172 - DNA, 610 bp, Homo sapiens
gaatataggcttcacatataaaatgtaatgaatctttaattatgtaaatgtgataaaatatatgtcacttaaatcatatttataartgaatgtgcatgcattttactaaaataatataataaggttatataaatgaataccaatatgagttggtattttcagtcaagcaaatttaaatcttgcattgattcatcagatttttttttacttctaaaattctgtgttatttattcatatataacactatgtggttaacattagtggatatgtaggatatcgtaatcttattctagcagggcacagtcctgctaaagatgaattcagtttacattgtttaaatactacacatctgaatcttcaaaactaaaattctgtgagaacagggatttcaattttcttttgacatcacaatagaaacaacaaaataatgactttatgcatagagttgaataaatttaccaagtagaaccgttttcttctctaaccaagcaccagttggtcaacatctcagatcctgcaaccttggactggctggtctgcaatggtgttttgggttgttttgtttatttatttatttttctgttttccttttgtgtaagataaagcactg

SEQ ID NO: 916173 - DNA, 689 bp, Homo sapiens
taaattatattttagtggtataaacagtctgttagtggaaatcttggttgtatarcatttaaataaggttattttaatgaagtccaaagataagtaaatttaaaaatgtccaaatttctttttcattctaatgagctgtctggaatctgtcaacattctgaactgtaaatgtatgtagaagttcaatactgaaaaaagagcttaaagcataaatctataatttataaaatgtatggaggagaaaacctccctttaaaaaaaatgaatgattctctctaatcattaatgacatggcagcattgccaatgcaagaattatattttctgttttctatttaatttaactaattcttctaacatttggaaactactgtggtatttaatataaatataatattcaaaacacttttttaaagtttcaaaaataagaattatcatctgtcaggtatagcctacaattcaactgaacgctttttactttgctggcaatgatgagttcccttgtgttagcttatgaaagaaaaagtagcttttattggaactttctcgatattctcttcttgaccactaaatttttttttttaatttgcctctaaaagttagctactagaaagggccaagtgccttttgacaaattaagaatataggaagatattaaatcttaatcctgtaaaaaaatgatgcagttag

SEQ ID NO: 916174 - DNA, 656 bp, Homo sapiens
ttgtttacatcttgctggaagcaatatggctgaacatatcttgcctttcagtaaatagaatttaatttgtgggtatgtgatttagaactagaataaaaggtacatacaatgtttaattaagtacattttagaagagataaactaatgtaggttaaactaactacaatagaaacatagaagttaatcttatccatattttcacattctagaaagttatgcatctttttttctcaattaaaaagattatcatgggttaaaaatttgtcataaaattctttaaagggtaggataaaaatgaaaaaaactctcactggaaatctgtatttgcataattactgtaaaataccaattttacacacaaacaaacagaagccaaaaatgcttcgaaatctcatttgaataatgcatgcatatgtattggttctgcatggctaagccaacagttgcatcagtgaaaatatttaccttttaatgtcaacactagaaataacaattatcaatatgaaagagaaggccctagtataaaatacatactatcatcaaacaaatctaatttcttattttgttatgaagtaaaataatacatttgttatgcatttctaaarcaaaaaattacataagtatcaggggtctattaatttttaaaagtacacata

SEQ ID NO: 916175 - DNA, 639 bp, Homo sapiens
aggtccacagcacatcctgaggctatagttcaagatgaaaggaaacatatattaagtttgtctcaaaagttatatcttgagattgaggagaaaggagaaagaagataaaaagtttwaaaacatggtttgaagccaagctagctgtcctgttacaaaatgacaaaaggacacataagatacaatgaatactcctttttattcaataaagggaagagacaaagggaatctccaggataatgaacaaaagaaatagtacggcagctgtgcgcaggatatgtgatattgtccattaaaataagagcaggctatatatcctgggaaatgttttattggtaagataaaatttatataatacctaagtatctcaacacagtaaataaatttgatgcagttctttggagaatttggagttgaaatggtgacaaaaacatgcaaagataaacaaatgaaacaaaataagataattattaatgccacaaaaatatgtatttttaggaaaataaatatattagtagttttctacaaggttaaaatttaaatagtatttaaacacttattgtaacataagtctggaatatttatctaccataaattttataaaacttctttgaaaaggtgattaaattgaaagaatgtctt

SEQ ID NO: 916176 - DNA, 613 bp, Homo sapiens
gtgtatatgtatatatacgtatatatatgtatacacacacacacacacacacacacacayatatatacacacagagacactttttttgttttttttttgagacagagtctaactccattgcccaggctggagtgcagtggcacgatctcggctcactgcaacctctacctcccgggttcaagtgactctcctgcctcagcctcctgagtagctgggactacaggcacatgccaccacgcccggctaatttttgtattttcattagagatggggtttcaccatgttggtcaggctggtctcgaacttctgacctcgtgatctgcctgcctcagcctcccaaagtgctacgattacaggcatgagccaccatgccaggctgaataaagttacatttctgtgagaaaattgttttactttacaactttcatcaaaattatatgaataatcttgttcataaaatctatattacaatttgattttcaaaatgtgtttgggccatgaagtatttatttttgcttttgtgacttgatggtttatcacatctttctagtcatatcaagttactttttctatatgtttgttagcattcttaccatagaaagcacattaattg

SEQ ID NO: 916177 - DNA, 656 bp, Homo sapiens
acttaattagtttagtatatttgaccatacacttttctatcacttaatgatatacatgtcattctctctacgtatatggttccacttttatcacaatagaacggtagggccagaaattggatactgtagagtggaaaaatttcaatgatttatgaagatgagaagaaactcactgtattagttttctgtggattacaagcaagtcacacattttgaatgtactcaaggaaaactatgctaaagagactgccagtgaaccactttagctcattctagttcacattctgctctccggtcccaatgtttcacaatcaaatgcaaaatatattcacctcatccccaaattcccaaaagtcttattttatttcagcatcagtacaaggttaaaaattcaatcgtctacatctggtccagttatatatagatgatgctcctggttgtaatttattaagtacagctcacggggtacaattcctctctattgtgaacctgtgaagtaaaacagccaaattggctaccaaaacacatccagcatacaattgtggaacaagaataggatrccaactacagacattgcaggtcaaaaggtaagaaatacaaggtaaaggaagggtcactggtccatgacaggtttgaaatacagctgtgctaactct

SEQ ID NO: 916178 - DNA, 572 bp, Homo sapiens
tcatcgccaccctctcacccctgctgtggtttacctctttggcattttattattgaaaaatgcctacccaccatatgaaattatttatccaggactatagccgaagaacaataattttaaaagctacaaaacattataatactaaaaacacacgaaatagattgtcctcctttttaatctcatagtgttatcaaaaaagtattaattttcactgagactcaggcaaaaaatattttttacttttgcaagagcatattgtatttattgtccatataatactgtcttaaacacgttagatttgtttactatttattcccgtaaaagcagggaattggaaaccaaaggaaatcagacctttaaatcctctcacctaatgtgagccatttttttttctgagctgagggaaagaaccatcatataataaatcgaatcagctgaaagatctctcttcagcaagtaagctgtatatagttggagtgtraaagacaagtggccacagaacagtccctacgcctggaaacttaattaacttatattttaccatcataagaaacaaggttagggtctctacc

SEQ ID NO: 916179 - DNA, 714 bp, Homo sapiens
aagagtgcaatctaaattcccctcaacaatacttgctctttcattatttttaagacaaattgcaacattcagtttactgaaacttcatcattttgttcataatttaattcaggaaacatttataagcagtaagtagtttcaccagacactttgctaggacctcaggacacagagtttatgcactgttcatttttatcaacgttataaagctggtcttaggttgctctatgtgatgacactcccattgcagtgaatctgtcatcttctgccaaaatcagtttttgctgaaagactcactgtatagtatagtagccaagtagaagatttatacatatatttcatttatcaaaaagtagtgaatatattcaatatatgtagacacagtctaggagaaaaaaagtctgtagtgtatatgtcttccttttttattttatttccaagtaagtagtatattcataaagatgccaatttgacattccaaatttgacatttactacagacttcacatagcttttctcttttctgcatgattccagtatatatcagatctatcagaatgaacatttctaaactcagagcacagyatcatcagtattttcccagttctcaggtgcacagctggataaatcactcatttttctgtttcaaaaatcacttcttttaacctggttgtttcaatgtatcaacatcagtcatccttaatcccccaaagat

SEQ ID NO: 916180 - DNA, 421 bp, Homo sapiens
cggggagacgctagacaatttcaaaccatcctatctcatgagaactcactcamtatcatgagaactgcatgcaggaaactacccccatgattcaatcacctcccaccaggtccctcgtccaacatataaagattacaatttgacatgagatttgggcagaaacacagagacaaactatattaataacttttcacaaagactaccaaaactttacaccaaaaatacttctgtgaggacatctgcccagtaactgcctgttcaaccttgtactcacaccacccttgttactgatccttgttgccaaactttccttcctttatctccctaaatatgcccatagcttactatggcatcatattccacattgcaatgttcactcccaaagaaacatattatctttggagaatctctgtacatctgt

SEQ ID NO: 916181 - DNA, 599 bp, Homo sapiens
ttttacaaaggggcatttccctgtacagactctcttgtctcttgctgtcaccatctaagaggtgactttcgccttctgccatgattgtgagsccccctcagccacatggaactatgagtccaataacctcttttttttttttttaattgcccagtctcagctatgtctttaccagcagcatgaaggtagactaatatggtatatgacaatttgtttagcattcacctgttgaaggacatttgggctgtttctagctactggatattaattaataaagctgctatcaacattcctgtacaagtttttgtgtgaaaatacattttgatttcattaggacaaaagtctaaggagggaaactgctagatcatgtggcaagagtatgcttagttttatatgaaattgccaagctattttctggaatggctgtgtaattaagcattcccattagcaatgaatgagtgattcagtttattttcaaactcagaaaaaaagatcgtggtgatttcactattttttaaaaattataactgttgtgataagtgtagtaatatatcattattggtttaatttatatttcctagtgacaaacaatgttgaac

SEQ ID NO: 916182 - DNA, 635 bp, Homo sapiens
gcccttcataggactccaagccatcaaagaagaygatacgatgctcacagagccatgaatttataagttagcaatatgtgtctagattatttgcaaagcatttctaattagactattcattccttttatttttttaagtaatgtttgaattcctcgtcagcccagatttcaccattatgcagtatatgcatgtaacaaaacggcacttgtactccttaaatgtatacaaataaaaataataacaatttatctttaaattctaccataaaactacataaattgaagaaatatatttaacattaatacttgttaacaaaatatcattacataatttgctgtgcatagtaaggaaaacattcttatataaattatctcatctcaaagaaatggcctccaaacaaaaacaaacaaacagaaaaagaattctggcaatttctcaaacacctttcatactgccagaatagtctgctgtgaacaatttgtcccagcagcactccatcagaaagcactgtattgcatcagtaacacttctttctgtagtttatcaggaaagaccatgaaagagagtacttttaattattttttcgattcaaccgacctgctttctaagaccatgtccataaatcattgtattt

SEQ ID NO: 916183 - DNA, 602 bp, Homo sapiens
atggtttccagttgcatccatgtccctgcaaaggacatgaactcatccttttttatggctgcacagtattccatggtgtatatgkgccacgttttcttaatccactttcttactagtcaccgctttcacgatagtgttatctgtgagctacaatttctatgggggactgttttttaagactactgttcattttaggaataagattttagttaaaactagaaaactccactttcataggcaaactgtagtccctagacttacattgaaaacaaatgaaaaatgcaagcaactctgtggaaccttatgattttgagaaaatcttgagtgttccccaggacatgttcaatatcctaatcaatatctccctactgcacaggggaccagatcagttcttatattttatattcattagcattattcattccttaagtttaaaataaattaactattttaaaaataagtaattacaaatgtcacagttttctaccacaatggatagtcttgcatatacctgagtatgtcatcctcatattaagaaaccagcaattttaactctctcgaaagaactcttagacatcttatcctagtataaatttgggtca

SEQ ID NO: 916184 - DNA, 390 bp, Homo sapiens; identical to SEQ ID NO: 915288

SEQ ID NO: 916185 - DNA, 697 bp, Homo sapiens; identical to SEQ ID NO: 915289

SEQ ID NO: 916186 - DNA, 606 bp, Homo sapiens; identical to SEQ ID NO: 915287

SEQ ID NO: 916187 - DNA, 646 bp, Homo sapiens
tcagtacagatgatctctagcacattatagagtattaaaactcatttttcttttcactgctccatatctgtgttaaattttatgatgaataacctaacttacattaagatgtgcaaatattttcttccatcgtgtagctatacttctggcccttggactttttatctgcaggattaaagactagagactagaaaatgctgcataaaacagaaggtttctcttttcttttattgtgagccatataaccttaaatggaatgtgaagaactctaaggtgtttcataaaagcaaatatattttataagagatatggaaaatatgatatacagaaagttctaagaatcgggacagttttgtctagaggaaaaagggcttacactgatttaattgcaatcttcagcatatgaaaatatgttcttattagaatagattctagatttctttacgtagtagaaattttcaaaaatggattttgaaagtttcaactagcaatcactgtctccttttaaatatgggtttttaagaaaatcattatattttatttttttcatcaaattttaagagaataatattagtatatattagacataatacawaactggaaaaaatgcggtatagttctgattttatatctaactagaaatgaa

SEQ ID NO: 916188 - DNA, 557 bp, Homo sapiens
tatcaactagagaacagtacatatgtattacaaactaaaattcatttccaaagttgcgtaagatggcaacttttccctccactcccttcactgaggttgtttaatacatttgaagtgcagttatattctcttgtcacaatctgcattccttccaagatcccatgtttttccaattatttttaaatgttgcatagattattgtttactctttttgctatagttttgtaagttttgacaaatacaaaacttcttatatgcaatattaaagaattatacagattattttaactgctttcaaaatctcttgcacgtcatctattcagccttcctccctttctcctgaatgtatgccaaccactgttacttctaccgtttctgtatttttttccttttctagaacactatataattggaggtgtatagtgtgtagcatttacacactggytttcttctcatagcaaatatccgttggtttcactcattcttttcttggtttaatagctcatttattttttccctgaaaaaccttccattgaatgaatggattgaccacagtt

SEQ ID NO: 916189 - DNA, 481 bp, Homo sapiens
ttgattcatcaagccaacagggaagggtctccttacataatgggcattataatattatataatgtaatcatgtacatataatctccacrtctcattatttttgccttattgtattagttagaagtaagtcatgggttctgccatgaaagaagaggatattatgcaaaggagtaaatactaggagagaccatgaaggggacaacttaagagtgttttcatggcagagaaattttggaaagcaagagtaggagtggagagaaacatgtgtttggagggggagagagaaggagaggtgagagagaggtccatgttgttgtgggtgggtgaagaactaatggcatttaagttgaattcaagtatgtgtaaactgatagtacttctttattttatggtaaaatgcttggtcttttattctgtattttttcaagtaattattggtttctcttgctagcacttccactgattaggaatcatagtttca

SEQ ID NO: 916190 - DNA, 660 bp, Homo sapiens
atctgtacaatacagccccactacatgaatttacctatgtaacaaayctgaacttgtacccctgaacttaaaagttaaaaaaaagaaccgtgaccttgccatcatcaataactgtaacttctttataatctccatttcatagataggactttctgtctatcagataaattgaaaggcataggtttgctatctactcaatctctctagtttcctgatttcaacaatctttgacccagaaaaacatctaatccattggttccatcatcttttgactgtcctgttccctctgaatattttctcaccatctgtttctcaatttgtttcatggtcaaacactataattaatctgttgcttacaactgcaaatcattttgcagtattaattctacaaaatcattatcaaaagccagttaaatctatcttatttctagtttatgtatacccctccccacaagaagctgaatgagaatggagcatgcactctaccctggcatttcaaatttttcttaacctattttcctttctttttttaaaaaaaattgtaatgcttacttttcactttataatattgtacataatatattctgtatattgctgatgacctatttattatgtatatttcaagaatgcaatatctcatggggtaagaatctttgtttt

SEQ ID NO: 916191 - DNA, 619 bp, Homo sapiens
gcatgtttggttgggtgcagatagtttttgaaactaggtggtgacccaacttacaaatatgtcaccagtggtgacctaggaaaacagactgatataagggaaagctcttctcagtgagrtgatttagacatttgaaagggcaagggcaatgaatggggtatgcatgttaggataatgaaattaacttctaaagcctaaggtgtattgagataccacaaagaaatgataaaaaaaaaaaaaactggtgccattgcacaaataatatttaacagtgaaagttggcctcttatacagcttataaggagtgtaagaaaggatacagctgagatgcaagtacaagtcttagtagagtcacagagctccaaatatgttgaaatgattagctaaattagatctgtcatgctgtaaacaggtcctaattgagaaaatctgaaactctaaaatatggcatgctatatctatgccagcttgcaacagtgactcacccttttaaaaaaaattgttggctgggcgtggtggctcatgtctgaaatcccagcactttgggaggctaaggcgggtggatcacttgaggtcaggagttcgagaccagcctggccaacatggtgaaaccttgtct

SEQ ID NO: 916192 - DNA, 590 bp, Homo sapiens
tcagtactcatttatcttttcaaaatacaaacatattgcctaattgtyctccagtttgtttatcctggtttacatatatatcatttgtatttgagaagcataactttctaaaaatttaccaatatttcatattaagaatgtttaatttttcataataagtaaatctgtagaaatagatcacatttccaaaaacattgcataaaatgtatggtggtaactattgaaaataacaatgtcataggtattctcaggacttctttagaaccaatataaacaccgattaaaagaaaagagcagggaagagaaatagctcactaatatccccgtaaaatcttttgttatacttaactaaaaaaataaattatattacattgtgttttctgctgttttgaaaatactgaaatgttgatccttctcaccaagtagaacatttatagaagagcaattatttttgtaggggtggtgagatagaaagtctgtaaattataacctaagtatcaaaataatccagctgtacagagtgatgttatttcaatctggggcaatacatattgtctagaccactctcaagatattaagaaactcaatga

SEQ ID NO: 916193 - DNA, 603 bp, Homo sapiens
actgagatataatatctgtttgcctctaccttagaattattaatgtcttgagggctgggactatgtctgtttccctcatacacagcactaatcctggatggtcagtctagatgcttaagaaatatctgttgaattgactgacctgaacaatggtaataaaaagtggcagaaagtttactgttagaatttaagtacaagactggtggtaacaaaatcaaaaacaaaaaccaacaaacaaaagctcaacaacagcagtagctaactcaacagaaacaattggacaaaagctgcaccactagttgtgataaaagaatcaagactgttagtgataatggcagattatcaccgcactgtgatactgttggctgcactgtgtattaaaacatccatagtaatttaatgtcagtggagtgagtggcaccagatgtgatcagtgcaaatggaggcattggccacagtacagttgcattaaaaataatctaaacaggaccagcatcaagggtcatataacagtgaagcacwagactagaagagagggtattaaagactcaagtgatgttggattggagacatcctagatgtcatggtttaaaggcacaaggc

SEQ ID NO: 916194 - DNA, 581 bp, Homo sapiens
atcacatcaaatagagtgtttgtcagctggaaaaaaaatagttccttcttaagcttctaaaaaaagatgccaccttaaaaagtattcaaataagagcratatgtgggaaacctcattctttggcaacttatcacaacaactgattatgtatttaagcatgcataaatatactttctatacacatttaacctaaactgataacttttaacccataaaccaattaaattaaatcattccaaagtgatcttacattgctagtgttataataagcaggtttttcctagcataactatttttcaaaattttgattgtgtagagactcaaagtaaataacaagataatctatgataaaacatatctaaaacataaagtccaaagtttaattgctctgtgtttgttgattttcatgtatacattgcactccttgttgttgacgatggtgtggcattattcagaaacaaatagtttcacttaacggattcactgataaataccagtgatttcattagagatttatgctattgaaattactcagatatttatcagtgaatacactagtaattggataattattggatcat

SEQ ID NO: 916195 - DNA, 670 bp, Homo sapiens
atcgagaagatttgaaagtttactatgaatgaaagaatattagagccaaataggtgccataaaaatagcttgagtgacagatctatactgcatagaaacatgaagtatagtttataagggaaaatagtccagataattaggtctatgatgaaacaagggggttggatgttgaaggacaactaaagctaagatgtttggtaggcagcaagtgtggacactgaggttagcttgagtaatggcagcagttttagtgaagagggttttaagtcaagtgtctagttgtccatggaagagagagtttggccagaagttagagaggggacaacaaacagaagattgtaggatggaagagaggttttgttaagttttataaaaagaagagtactagtatagaaattgcaatgtagaaagatggaagtatgctaccacttacgtgcttctgtgattgggagaaaaagagaatctttttttagagaaaccttcaaaaggagagttatttctggaactcttagattatagaataaactttataagtatgtggcatggaaaatgttactcatattarcacccactcctctttgtgtctgccttcctgctacactcacggtagggcaagaaataggggtaggctccaaggtggtttctagtcatttctctgtcctttaaatta

SEQ ID NO: 916196 - DNA, 643 bp, Homo sapiens
atcattaacattattaaggtagttatgagagtaagtagaatattatcttagatgtttagggagtatttcctaggttcagctagaactcattgatgtaatacatttaaactactactaaaaatatatgccaaatgatttcatatatttgcatgagataaaatgaaatgacttctttacagctctcaagaacataataataacattttccatttcctgattctcagtgtaaacctgttaactggaattaaaaatgcattgtggtctgagaattttcttaaagaagacatactgagttcaataagtttccttagagtaactgcaatagagagttttatagctgtatttctcatgatgtgcttgaaataaatcagtggcacaatggtaaagggtgtgtaagattgagataaatctagaaaggcccctaaaagtggaagtatataactatctcatcgactcaatagagacactcaaaccatcgggatgtatgctatactccacttgtgaacatgttttygtttttttttttaatttgatggcacacaaatataatttcacataaatatttatattctcagctttctacaaaaaaaattggaagatatggcaacatttagcctacactgatgcacaacgaccacatcca

SEQ ID NO: 916197 - DNA, 643 bp, Homo sapiens
atcattaacattattaaggtagttatgagagtaagtagaatattatcttagatgtttagggagtatttcctaggttcagctagaactcattgatgtaatacatttaaactactactaaaaatatatgccaaatgatttcatatatttgcatgagataaaatgaaatgacttctttacagctctcaagaacataataataacattttccatttcctgattctcagtgtaaacctgttaactggaattaaaaatgcattgtggtctgagaattttcttaaagaagacatactgagttcaataagtttccttagagtaactgcaatagagagttttatagctgtatttctcatgatgtgcttgaaataaatcagtggcacaatggtaaagggtgtgtaagattgagataaatctagaaaggcccctaaaagtggaagtatataactatctcatcgactcaatagagacactcaaaccatcgggatgtatgctatactccacttgtgaacatgtttttgtttttttttttaatttgatggcacacaaatataatttcacataaatatttatattctcagctttctacaaaaaaaattggaagatatggcaacatttagcctacaytgatgcacaacgaccacatcca

SEQ ID NO: 916198 - DNA, 602 bp, Homo sapiens
taacccagaagagaaccctcaccaaaacatgaccactctgacaccttgatcttggtcttccagcctccagaaytatgaataataaatttctgttgtttataagccaccagtctatgctattctgttatagcagcccaaactaagatatgtgatgcaaagattactctggcaaaactgattgaggtttaactaatgaattattcattagtaaaggagtactaataatgcccagatagatgaacatttaaataacattgaaagtaatgctgaaatgtaacataaaatcttagtattcaagtgtctacataaaatttaaccttagctaaaagtagaaatatactaagaaaaagatgaagtaaaaattaaaattaaaatatctattattttctcttagtagagattttgctcattcattttaattattgctcaattcaaattatttttaaaatacttatatgtaaaatagtaaagagaataacaatatgttcaaaactaaaagcaacacactgtgggtgaattaagcagcaaaaccatccacatatgaaaggtagtctttgatatatccctggactccatgtactgtttatggtttgtacattttt

SEQ ID NO: 916199 - DNA, 417 bp, Homo sapiens
ctgtgttgcccaggctggagtgcaatgacgcwatctcagctcactgcaaccttcacctcccgggttcaagtgattctcctgtctcagcctcctaagtacctgggattacaggcatgcaccaccatgcccagctaatttttgtacttttagtagagacggggttttaccatgttggccaggctggtctcgaactcctgacctcaggtgatcctcccatctcggcctcccaaagtgctgggattacaggtgtgagccaccatgcccggccaacatatgtgattcagccttaaaaacgaagacaaattctgacacacgtgataacatggatgaacgttgatgacatgccaagtgaaataaacctgttagaaaaggacaaacagtgcatgattccacttgtgtgaggttccttgaatagtc

SEQ ID NO: 916200 - DNA, 612 bp, Homo sapiens
tgtaatgttatttattttgaatatagttggatatgcaaatttagagtcattccatttctatyattgcaaaattctatattggaatataagtagaaatcattgaaaacatggatctatcagtctaatacatggatttctctttcaaatctatctaagatcaagactgagaggctaaggcccagcttgaagagatttaacaaagtatgtacacaccacaagtgacatgatgtagagagaagatcatcagtagtttccaattaagaaatctcaaagggtttcagccaactagtaacctctatgtgacctggtggatctacttactgctttctgctgaattcaacgcaatctccataatcagtgtcttgaaatcagaatcaaggctactgtgagaaaattggtaaatatttatctactggtggaaaatcaaaaagaaaataatccccaactcatatttattttgattttgtattatgcatcagatttacacagcaactagaaactgggtatatggcaagaaattaggaaactgccacacacacactcaggagaattttgtttttagcacataggaataaaattagaaaacatcttttttaattggagggcttggtg

SEQ ID NO: 916201 - DNA, 632 bp, Homo sapiens
agcttgcagatggcctattgtgggacttcaccttcttatcatgtgagtcaatactccttaatatattccctttctatctgtctatctctcccatttatcctattasttctgtccctctagggaaccctgactaataaatacaacaggaaagacggattacacgttagaaaccagcaccctgcaaatatatcatgtgttttctcacattactcaggcctttttcacttagaaggccaagtgaatagttatgagttaaagtgacatgtgttactttgagaagcctagagtaatcagcacttatttcttaaacagttttttcctcaccttcacaattaaaaactgcatgtattccaggttatgctactacaaaataatggcatatttatcagcctgagtataagagattttgtttctattgctgtgcaacaaatttccacaaacttcatggcttatagcaacacatgtattttggttatttactcttttgtttgtgtatatgttaatttgttttatttttatcatagcatccatgggggaaaagcttgcataggtcttacctgagtcctctactcagtatatcactctgactatgttgaattttatcacacactttttcatcctctattgaaata

SEQ ID NO: 916202 - DNA, 642 bp, Homo sapiens
tactttgagaagcctagagtaatcagcacttatttcttaaacagttttttcctcaccttcacaattaaaaactgcatgtattccaggttatgctactacaaaataatggcatatttatcagcctgagtataagagattttgtttctattgctgtgcaacaaatttccacaaacttcatggcttatagcaacacatgtattttggttatttactcttttgtttgtgtatatgttaatttgttttatttttatcatagcatccatgggggaaaagcttgcataggtcttacctgagtcctctactcagtatatcactctgactatgttgaattttatcacacactttttcatcctctattgaaataatcatgtaattttgttctttattctgctaaatatgttatatcacattaattgatttttgcatgttgaaccatccttgcatcacaggaatgaatcccaaggtaaacaaatggccatggtatatgatccttttaatgtgctgctggattttgttttctaaggttttgtggaggatattcacatctatatacgtcagggttattggccaatagttttcttttcttgtggtaccttgggctttartatcaaggaaatgctgacctcataaaataagtttgga

SEQ ID NO: 916203 - DNA, 582 bp, Homo sapiens
ggttaaattcagaatattttaatatttttataattattctgttttttactacatgtaaaatacattgtatacaattgtataaaacataatctaagaaactgaacatccaacagatttcccttcttcttattttacaggttttgttttgttaacgttggttcctgcaaaatctatattttgaaatgctttatttaatactttgggttcttgggccaaactaaaactgaaatagcttcttttaaaatacattttattgcaatataatattatattgaaaatatgatcacatagaaatatggagagcttcccaatttatttaatgggctagtataagtccaatattaaaaaacagctggctcaaaaatgaaaagtaagaaggatataactttcttattgtatatttgcaaatagaatttatcactgtgttaaaaagattactgtgccattagggtttctaatgtaaaatggtaatttcacattagaaaacttattatctaactcagtagattttaaggaaaaatctattaatcttttggggttacaaaagccwatagaagcaacaaaaaaataaagtttgatgca

SEQ ID NO: 916204 - DNA, 524 bp, Homo sapiens
tcaagcataaaatatctcagattatttatagattctaaaattcccttcctgttttatatgctcaataaactamatgtttttgttgtccatatgggagccttatgaaaacaaactgaagaacagacttaagatgttatcgactgtaatgaataacaattacatatggactcatttgtagagtactccaaaaaataaaggttaccaagaaatatactaagtgtttacatttttctaagaaatataccaataactaattttctatgttctgtcaaatttttaaagaggtaaatgaaaaataaaaaagaataaaagtaagtgaataaaatgacagaaaggaaatatttgggggaaaagatgaaataagaaaaacaatgagttgataactattgaagctgaatgatgggcccagaggatcattgtaccattttgtctgtttttgactggttgaaactttccacaataaaaaatttaaaatacaatagtaaattgcaaattattaaagtcaagatgtatgagagagagaa

SEQ ID NO: 916205 - DNA, 524 bp, Homo sapiens
attaggtcccacttgtcaatttttggttctgttgtcattgctcttgaggacagtcattacgacttttccaaggccaatrttctcaatgatatttcctacactttcttctgggatttttatagtttgagatttttcatttaaatctttatatctttaacgcattttgagttatttatttaatgtgctgaaaggtaaagatctagtttcactcttctgcttgctagttattccagcaccatttattgaactggggttcttttcctattgcttatttttgtcatctttttcaaaaaccagatggttctgggtgtctggctttatttctgaattctctattctatttcattggtctatgtgtctgtttctgtaacagtagtatgctgttttgattactgtagctttatagtatagtttgaagtaggctaatgtgatgcctctgtctttgttctttttacttaggattgctttggcaatctgggctcttctaattctgtgaaaaattacgttggtaatttgatagaaac

SEQ ID NO: 916206 - DNA, 634 bp, Homo sapiens
ggtacatgtatttttatttttaataagatagaagtttacctgtctcacacagaatataaatctattagtttatgcatatccccatattccatctactgttatttgatacttagtacttcacaacactgtcttagatggctccaaccatctcattcacattagcagcgggaaaggggaagaggtgaataaagatgtggcctatcttttatttttatgtcagcctttttataacaaagataagtgatgtacagaaaagtgcacacatttacgtgtacaacttgatgatttcttacaaaaaatgcacgtaactatttcccagattattaaaatattaatagcaactgtctttttccagtgctataacagaatatcacaggttgggtaatttataaacaacagaagtgtgtttctcaccgttctgaagactgggaagtccaagatcaaggcatcggctttccagctggtgaaggtcttcttgcttcattctcacatggcagaaagtagagaggcaagaaggtctaaacggctccygcacactcattttataaagatattaattccattcaacaggacagcgctctcatggtctaatctcttccccaaatatcccacctcttaagactaccataatgag

SEQ ID NO: 916207 - DNA, 596 bp, Homo sapiens
cacattaattacagcaatattcacagtaacagatacatggaatcaacctaagtgcctgtcaacaaatgaatagataaataaactgtgygtgtgtgtgtgtgtgtgtgtgtgtgtgtgtatgaatactattcaagtctaaaaaataaatcatgttttttgcagcaacatgaatatagctggagtttatcatattaagtgaaactcagaaacagaaaaacaaatactacatgttctcacttataaatgagagctaaacaatatgtttacatggacatagagtctggaataatagacaatggagactcaaaagggtggaagtgtgagagggaagtggataataataaattacttaatgggtacaatgtttattatagatatactgaaagcccagattttgccactatcaaacatataaatgtcacaacattacagttgtactccttgactttatagaaataataataaaaaaaacctgaggtaatggtgcatttgaatcggaaagtttactgcagtcagtataatttccaaagatgaaaaggttaatggagtgtgtttctttattgtagtgcagtagttctgttcttttttttttaatt

SEQ ID NO: 916208 - DNA, 658 bp, Homo sapiens
ttgaaacttttgagtgggtgagatctagatgaaattttgcacctttagttgatgttgtaataggttgagacttttgaatatgtttggataggtaaatakagtttgcatgtggaatgaatgtgaatatttggaggtcagaaggctatgtgtgaaaaaaaagtgccccttgtcccccaaaagatctccctgttgtaacccttgacattttttaatacattaacttacatggcaaaatggactttgcagatatgaataagaaagtatcttgagatgggaagattatcctggattatctgggtgtgcatggtataatagaaaacctagtgtaaaccaaagagggtggcagaaaatgagagtcaataggagatgcgaagatggaagcagagatcagaatgatgaaagaaaaaatacaggagactaggaatgcaagtgacttttaaaatctagaaaaagcaagtacactaattcttccctacatattgtagaaggaataaaactttgcttactcattttaaacttctgaccttcagaactgtaagatgataaatattaatatgtttagtttcactataaagagtttataatttactatagctgcaataggacactaatacaacttacacttcattacttatacctcatggttttgatgatcacc

SEQ ID NO: 916209 - DNA, 431 bp, Homo sapiens
ataacatgctgattattttagcagatctgtatgccagggttcattccatcaacttacaatctaatttcatttatttgcagatataaatatacgtacacrtaaaaagaaggatacagtaaaaagtcatggcaaacacttcagtccttctccacagatacaatcattattgataaatttctgtgtacattttggaaacctgctatgcatataaactcaacactcacttttgtaagtgatcatgaaactacatcagggtgaaacattcttattcttaagatgaaggcagaaataaactagcagcatgcctttgactccaggatacactcaccaacctgacatctgtaacagtagccatttcctctcaattataattagcaatattcattgcttcactgaacagagttcccaactaatcatgactgactacattt

SEQ ID NO: 916210 - DNA, 621 bp, Homo sapiens
actcatttatttataaaaccattctctcaaagtatctaggattcttgaaagaccttgttttgctttctttgtttgaagtgaagagctgaaaataaaatcaataggattactcctcctcaaattattcttggaagaggcaaataagttctgcctactcttcagccttaatgaagaattgaaagcatcaaaactagtcaaaatttgaggcattaatctctaaggaatgttctgacacagttcatattcacaagttcctattatacggttttattttaaaatggtgaaaattattgaaactcagatgattaaacagtcttcaaagcttgagtaccttatacactttatataactgctatgaatattctcttgaatgctagtggaggaagggttatccacagctattgtagaagttttagggaatcacattctaaggattgcacaaaagaaaattaataaagcaactgctagaaataaacccacatcttaagaacaatttgrcagaaaggagagtctcccaacaattgatgtagaatatctaaaaagggaataaaaatataggacatagatcttgggaaaacagtatttctcaattagcgagatccagggaatgtgcaacttcat

SEQ ID NO: 916211 - DNA, 633 bp, Homo sapiens
ccatcaatcagtgggtgaataaaggcattgttttatatatatacaccatggaatactaytcagccattaaaaaaatgaaataatgcatttgtagcaacctggatggaattggagaccattattttaagtgaagtaactcaggaacggaaaaccaaacattgtatgttctcactcataagtgggagctaagctatgaggatgcaaagacgtaagaatgatacaatggactttgggcacttggggggaaagggtgagaggggaatgagtgacaaaagactacaaattaggtacagtatatactgtttgggtgatgggtgcaccacagtctcacaaaccaccagtaaaaaacttatgtaaccaaacaccacctgttccaaaaacctatggaaattaaaggaaaaattgcttgttgaatgaataaatgagtgatttttttgtttgttttctaaaggtataggctggaggtcaggaaccaattatattttctgggtatttttctgtgcatctaacatgatgctaagtatatggaaaacactactgtagattattagaataaataaatgtatgaattctgtttctatgggtgaatgaatgtgtctgtgtgtgtgagaaagacaaagacagataaaggca

SEQ ID NO: 916212 - DNA, 574 bp, Homo sapiens
ataaaaccaagggcctcttctctataattgagtgttgtcaagatcaagtcacatttttccaagttcagctgagaatgattttgaataacttttaaaagrccctggtgaagcaccatggaatattctatgagttattcagtctttgggcatgatcatgaatatatttactatctcatttttatgatctcttaaaaagtattttcaaaacatcttgtgggggtctcagaggcaacatttggtgaaaaccatcttccaaactacatttctgtggatttgtgtacagttactctgaaaggaagtgacccttagccattaaaaggagagatttacctgagcaatgccaagtagtatgttggcaccttattttcttttttttcttttttttttttttttttacaattcttcttgtttatttcttcacagttggggcaaaaaaaaaccctcaaaatttaatgcactcaattactacaaaataacaccaaaatggttatgaaaataagtatggaggtgcttatgtctttagtgtggtttttcctttcttctttcttttctcccttccttcttttcctccttc

SEQ ID NO: 916213 - DNA, 582 bp, Homo sapiens
taaggctctgaaggaaagtaaaggctagagctgtggcagccaaattacaaccatggaggaaaaagcctgaggttaaagccaacattctgtggactgctgagcccttggtaatattgctacacagttgaactagtcaaccctgcaattactccgcatgttctataagataagaaattccagctaagccattttagacatttttctgttattttaagtgaaagcatccttatagaaacatatgcctatgtgcttgtatacatagatgagaaaaaattaatgtgaaaagtatgtagtatttatatataaattacatacatattatgtttatttctcatactttcaaagaaataatatctggttaggaattgtattgctctacttcaaattgcatttagagcaatttaccaatgttcaaagcaaaggaagcaaacttttatctacagatacatttgctttctaacttaaggtttcctcaaaaacatgtattttactacaaaaagaaaattagtttggcgtgatggtgtgtgcctgtartcccagctactcgggaggctgaggcaggagaatcacttgaacccgaga

SEQ ID NO: 916214 - DNA, 656 bp, Homo sapiens
aaaaaagatgcagaatagccaacacaatactgaaaaaaaggaaaaaacttataatactaaactcctggagtttataaattacataaaggtacattagtcragacagtgtgatacaggcaaaaggctagaagaatggaagaacaggtcaatggaaaacaatacagagctcagaaacagacccaaacaaataccattaactaatctttgagaaaggaacaaaggcaattccattgagaaaggataatcttttcaacaaatggtgctgcaacaactggacatgaccagagcaaagagattattacagacctaattaaggactttggacctccagacaaacgcaatctttgctgagaatggaactgcctgtaagtaagttctaaagatgtgttctgcagcctagtgtctacagttaacaatacagtgctgggcacgtcaaaatttgttaagaaggctcatctcatgttaagtgttctcgccacaaaaacaaaaacataggggcacaagaaagctttgggaggtgacggttacatctgtaacctcaaatgtactgatgctatcacaggtgtttgcatatactgaaactcaccaaattgtccacattaaatatgtgtagttatttgtatatcaattacacctcattaaagctgttaacaaaa

SEQ ID NO: 916215 - DNA, 643 bp, Homo sapiens
atgggttggagctgagtgcctgcagctttttcaggctcaagatacaagctgctggtggctctaccaatctcaggtctggagggttgcagccctgttcccacagatccaccaggcagtgccccaatggggactccatgtgcaggctccaatctcacatttcctttggcactgacctagtagaggttccctgtgggggcttcacccctgtagcaggcttctgcctgggcacctagcctttcccatacatcctctgaaatctaggtgaaagttgccaagcctccttcactcttgcattctgtgaacctgtatatttaacaccacattgaagccatcaaggcttatggcctgcactctccaaagcagcattctgagctgtacctgtggccctttgagctgagcctggagccagagttgcctgaaggcagagagtagcatcctgaggctgagcagggcacctataccttgggcctggcccctgaaaccattctttcctcctaaaactctgggtctgcgatgggaggrgctgtcctgaagacttctgaaatggcttcaaagccttttccaattgttttggatattggcacttggctttagtcatgcaagtctctctagcaagtggttgctctacaggatccctcccctg

SEQ ID NO: 916216 - DNA, 643 bp, Homo sapiens
atgggttggagctgagtgcctgcagctttttcaggctcaagatacaagctgctggtggctctaccaatctcaggtctggagggttgcagccctgttcccacagatccaccaggcagtgccccaatggggactccatgtgcaggctccaatctcacatttcctttggcactgacctagtagaggttccctgtgggggcttcacccctgtagcaggcttctgcctgggcacctagcctttcccatacatcctctgaaatctaggtgaaagttgccaagcctccttcactcttgcattctgtgaacctgtatatttaacaccacattgaagccatcaaggcttatggcctgcactctccaaagcagcattctgagctgtacctgtggccctttgagctgagcctggagccagagttgcctgaaggcagagagtagcatcctgaggctgagcagggcacctataccttgggcctggcccctgaaaccattctttcctcctaaaactctgggtctgcgatgggaggggctgtcctgaagacttctgaaatggcttcaaagccttttccaattgttttggayattggcacttggctttagtcatgcaagtctctctagcaagtggttgctctacaggatccctcccctg

SEQ ID NO: 916217 - DNA, 581 bp, Homo sapiens
aagttattcctacagaacaatccatttttacctttaaagatgagtttgtgtacttcagaagatgtgacgccagttggccaccatctcaatcagtagtaagtcacaccatcaatcccttgttaatgatggaactcatgtgaagtcaagaggaaacataatactctttacctcattccctggtagcagagaagttgactcatctttaatgtcagttattgagatgtaacacagaatcatattctacagaaaatatgtgataaactttacacaaatgaatacactttagaaaggcagtcatttggattttctttttgtcagagaacattgcaagtcttcctgaagaatttctgagaaattaaacactttatatgacattttacagcatgtagagaggttgaaactcagagaactaaaactcagatgatagtctaaatacttaatttgttgctgctttatgctggacatgaaaagtgtgagcttaaattataaataaaaaactrttgagctatcaaactatttggggtacatccttatctttcctctaaattactctttattcccattaaaatccacctatcccg

SEQ ID NO: 916218 - DNA, 643 bp, Homo sapiens
aacgtactatcaaaacattttgatcaaaaataaaatatagaagttcttattcccttcatttccacacaaaatcacacatggggcacagttgtctcctttaagatatacataaatacttttaccccaatcacattcaccccatgcacattcccactcacacatttaccacatgtacatctaaatgtcaacaaaaatacaacacagagagagccaagtggaaagcagatgatagattaagttaggctatacaatgaagaggggagaaagaaaaaggcggcaaaaaaaagctgatcatctgaggccatggcaatccctttacaccaaaatcctttcttgagacctgcacggtgactcctcccaccacatcacagccctagctaaaaggagcaagcaaattccagctacttgggaggctgaagcaggaggagagcttgaggtcagaagttcaagaccagcctgggcaccacagccaccctctctctcaaaaataaaaataaattagccaggtgtgatggtgggcacctgtagtcccagctacttsgtaggctgaggctaggagtttcagtgagctatgatagtaccactacactccagcctgggagcagggccagaccctcatctctaaaattaaattaaattaaag

SEQ ID NO: 916219 - DNA, 639 bp, Homo sapiens; identical to SEQ ID NO: 915981

SEQ ID NO: 916220 - DNA, 540 bp, Homo sapiens
aaagctgactatggagatttttagggtaggcaggaagaacaacacaatctagaagtttgggatcttgctatatttccccttcactaagacttttctaastaaatagttaattaatatcccaggatctcaatttccatatctgtaaagtgaaagatttgaatggataaactataaggtctctttcaaataaaaaattttatccttgtatggcactctccataattacacacatgtataatctaaccctatggaactacacattaatttcccaagtgtgatatttatgatctcttctgatggttgcatgccatttgttaacgtgactttgacctttcctggtctgtgtggcagctgagctactactgctatatcctgaaccagggctttggctaagcagggatgtccaagtgcattccttatgacccagagaggctcataattccatacaggaacattcatgggaccttgaagaatttatgtttgtgttggtaaatttctcttcatggcctccttgagagcaatgaaagaagtgtattttct

SEQ ID NO: 916221 - DNA, 607 bp, Homo sapiens
aacatgtgtgtgtgtgagacagagagcaagagacagggaaagagcrtgtaaattaaattaactaaataaagggatatagtataaaaggactcaaagacagattttcttaaggttttcctagatcctagtaattgcattattatcatttggttttctttagtgtgtctcccagtgattgacagattgggcaattctgatcataaggattctggtctctaagtgtccagaatgtatagagcattataaaaacagcttagcttactaattgcagcttccttccctctttgcagcttcttttcctaactctgcactgcaggcccagtatattttgtaacccccccaaatctcatttgcggccagaattgtgacatcaactcttttttttctggtgtggtttggaattaaatcatggtgagaactaatttcagaaccctcgggcgagtcatggctgtttgagcaactcttaactttgcagctttcataagtgctcattgtctaaatgtatgcccatttcttggaactgagcttctattttgaatctaactttgtattgtcaataccctctaggcaaataccaccaggaacacacctataatcaaacaaattg

SEQ ID NO: 916222 - DNA, 607 bp, Homo sapiens
aacatgtgtgtgtgtgagacagagagcaagagacagggaaagagcatgtaaattaaattaactaaataaagggatatagtataaaaggactcaaagayagattttcttaaggttttcctagatcctagtaattgcattattatcatttggttttctttagtgtgtctcccagtgattgacagattgggcaattctgatcataaggattctggtctctaagtgtccagaatgtatagagcattataaaaacagcttagcttactaattgcagcttccttccctctttgcagcttcttttcctaactctgcactgcaggcccagtatattttgtaacccccccaaatctcatttgcggccagaattgtgacatcaactcttttttttctggtgtggtttggaattaaatcatggtgagaactaatttcagaaccctcgggcgagtcatggctgtttgagcaactcttaactttgcagctttcataagtgctcattgtctaaatgtatgcccatttcttggaactgagcttctattttgaatctaactttgtattgtcaataccctctaggcaaataccaccaggaacacacctataatcaaacaaattg

SEQ ID NO: 916223 - DNA, 538 bp, Homo sapiens
acctgttgctttgcctaagcttccaagggccatcctagcagtgtatgagcattgtttcccagggtctgtgccagagtgtcaaatctgtattctgagagagagcttctgtgctaataaactctccctcatccaactttacaattccctcctctcccctttgtctagcactctctcaggattcatttttggggtcataatctccaagtaccagctagtctccatcaaccagagtctgtagcacctttggtgctttcacttttccctcgaattggtccttaatcactcttagccagtcattatctcttttaatgaatcaatggcactcaacagccacccaattccatccttatatttgcctttcccctcaaatatctcaaaagccagacatactgtaccagttagtgctcctccttccactggcatcacatcccagtgtacaaccagtgaaaggcttaataattgcaccactgaagcatrcctggtgctatctatactctacctgccactagtggtggggcctctttgtcagccagctggc

SEQ ID NO: 916224 - DNA, 647 bp, Homo sapiens
gctactttctgttgcacctactctatgtgggtactgtcccaagctatactctacatggagatcactagtgccctaggttgtccatttttagtttctatctcaatctccacatgaacactgtttagtcctcatcttgtcctgtcactatgtttgagtctgttgataacttttaccatgttgaaatattttctcctgttgcattcttgcaccccacattccccaggttttcctgcttctccactgccatttgttattggaccattttgctgctacttctcctctttcagatccataaaaatgttgttaaagacccaggcctcagtctttggtcctcctgtcttctaatccacactcatagtttgagtgctctcatccagtcctgtggctctacaaattattacggtggtgtttcccaaatttttatttctagtctcaagctctccctgaactctagactcacatatttaactatttgacatctccattgagatgcctagtgggcatctcaaacttactatgtttctaaactaaatgctggtttcttcttctcttcaattttccatattttaataaatgaaaccaccacttatcagagtgctcaggctcaaccttgatgrtatttttcttttatacccaagacacattca

SEQ ID NO: 916225 - DNA, 618 bp, Homo sapiens
aaatccaaacctatcaaatagagaagggataatgctacggcagcaaacagcagggaatcaaatccagatatagtgggtaagaaaaggttctctccaaaatatagcgtttaggtcttcawaaggatagcaatgaatcattttcactcatggcatcttgaaaccttcttcagatcttcaagagccagtgaggagtagcagaaacaggccaagtatgtctcattttaaatgccagccctttacatagcagctatacgaaatgacttattctgagcctcatcctcctcatctgaacagacaggaataatacataggtcacaaggactattctgaaggttaattaacttatatgttttacacatcggtgacagagaacgcattaaataaatggtagttctctttcttccaacaattcctgctgccaccaaaaacactttcttttataatatccaactgtgatgtctatctaattaaggcagctcctaaacctagattatatgaacagatatgaggtaatctgatttggaaacaatccaagtcaataaaaatgggcgctcacatagactgctttgttatggtaacatattcaattcagaatgaactgaaatatcacaaatccta

SEQ ID NO: 916226 - DNA, 618 bp, Homo sapiens
attcaatcaaaatacatcaagtggctaaatggattaaccaaaaaaaagactcagtgatatgctgccaacaagagactcatttcatctctaagaacatacatagaccaaaaatgaagggatggaaaaagttattccatggaaatagaaatcaaaatagagcagggatagctatacttatatcacacaaaatagaccttaagtcaaaaactataaaaagaggtgaagaaggtcattatatgacgataaagtggtcaattcatcaagaagatatgacagttgtagatatgcatccatccaaagttggaacacctaaattggtaaagcagatattaatagatccaaggaatgagatagactgtaatataataatagtaggataactaaatactacacttttaacattggacagatcatctagacagaaaatattggacttgaagtatgctttatttatttatttattttgagacagggtctcactcttttgcccaagctggaatgtagtggcaagaccatggcttactgyaacctctacctcccctggctcaagtgatacccccacctcagcttcttgagtggctggaactacaggcatgcaccaccattcccagctaattt

SEQ ID NO: 916227 - DNA, 614 bp, Homo sapiens
ttaatccatgtgcggccatttatatttggcatgcataaatgtcatgaagaacagggaaaaaatataattcatgagcaaaatgcattttatgctactgtycccttgccaaattaagtattatagttggaaatttagggtggaggctcactttgggaaaaaagaatcaaattgtctggggattttgctttcatcaccaaagggattttatgtgtttggaaggatcatcaattcctgacttggtggtagacaatactcttacttcacgcaggtcctgcagaattctaatatggcttggttgaaatttcttcttttgactagaaacttttttcacattttttttcagtattccctttgatgcagtcaaaataggtggacaaatacgttgtctacactgaaacaaagcttgcttgaattcacctatatgatgatgtcttcatgagcttgctttgcctttccaaatctatctttaaaagattcactaatctccagattttaaaacatagaggaatgttccaacagtacatttttcaagtgatgtaaaaagttcttggaattaatttgtcatcagccttgctctaaggacggtgttgtttcagccatggccatttaggaac

SEQ ID NO: 916228 - DNA, 618 bp, Homo sapiens
tataatttatcaacttttcctttcaggcttagtattttctgaactttgttttaggatttttgcctaattccaagttacaaagattctttcccttttttatttagatgtttataattttacttcttacatgtagagcaataatccatttcaaattaatatttgggcatgggaagtgaagtagagatcaaattttattttatttttatatagatacataattgtttcagtactgttctagtgatcaatttctgccaaaaaccaaccaagcaaaaacaaacaaaactatcccaaaacttagaagtttaaaataaataaagtgagtaaataaaataaaatgggtaaaacactcattttatttttttccatgattctttgggtcaggaattatggaaaggctcagcaaggtggttcatctctgctctatattatctgctaggatgcctggctttgaaggatctacttccacaatggcttcttccctgttatgtctggtgcccgggcttcttggyccctctctatttcttaatctccacatggtgtctcatccactagggcttctcaatgtggcttgggattttcacagaacagtgacccagagtagttgaactttttacatag

SEQ ID NO: 916229 - DNA, 618 bp, Homo sapiens
gagattgcaataaaaataccgttaggatttaggcatttatttatttcaaaagtcaccaagctgaatttaaagtccattaggaaaggcaaaggtccaaggataggcaagacaatcttgaaaagaaaaaaatctgaaagacatttactctcttcacagattattatagagctagagtaatcaagacagtgtgatattggtacaaaaataaacaaatagattaatgaaatagaatatagtgtaccaaaataaaccagcatatatattgccacattatttgtaataggaaacatagcaattcaataatagaaaaagggtgttgttaataaatagtcctaggccatttggatattcacatggaaaaaaattatcttgatccctaactcctcacacacccccccacacacacagtttccatttcatttgcaatctaattgttaaaagtaaaataataaagatattagaggaaaatgtgattatcgtcatgattttgatgtaaataagacaaaaagcactaaccacaaaagaaactgtttttcaaaatacatatcaagtcttctgttataattayggtagaataactaaagaggtttcctccagttagaatactggacaaagtca

SEQ ID NO: 916230 - DNA, 552 bp, Homo sapiens
ggtctgtggattcagctaacactggatggaaaatatttggaaaagagaaaattccaaaaaccaaaacttggatttgccttgtatcaaatactatatatatttatatttatataktatatatatttatatttatatattatatatatttatatttatatattttatatatatatatatatatatattttttttttttttttttttttctgagatggtgtctcactctgtcacccaggctggagtacagtggtgtgatctcagctcaccgcaacctccgcctcctggaatcaagcgattttcccacctcagcctcccgagtagctgggattacaggcacatgccaccacgcctggctaatttttgtatttttagtagagacagggtttcgccatgttgggcaggctggtctcgaactcctgacttcaggagatccaattggcctacctcggcttctcaaagtgctgaaattacagatgtgagccaccatgcccagcctcaaatactgctttgaatccatatgaagaaagtaatatgtaggcattgtgttaggta

SEQ ID NO: 916231 - DNA, 618 bp, Homo sapiens
ctttttttgagatggagtctcgctctttcgcccaggctggagtgcagtgacgcgatctcggttcactgcaagctccgccccccgggttcacgccattctcctgtctcagcctccmgagtagctgggactacaggcgccctccactacacccaactaattttttgtatttttagtagagacggggtttcaccgtgttagccaggatggtcctgatctcgacctcgtgatccacctgcctcggcctcccaaagtgctgggattacaggcatgagccactgcgcccagccaagaattacttgattttaactatcaatagtgccaaggtggagaaacccttatttagaatattttaataaaaacaaatccgtctgtggatccttggacaacattattgttagcaaatctgggaaggtgcaaggttgactggtaaactctggaggaattaagctccatctagttctgtgttgcacatttggcatggcattcctgctaatgggaggatgtatttttataactgagtcaaggtatcataaagttgaacctaatggatgccagaggagactcatttgacttggcagctataaatagctcaccagcagcacctgtgtaactcttata

SEQ ID NO: 916232 - DNA, 573 bp, Homo sapiens
tattctcaagcctcatcagaataaagagaaattgatgaccctgtcacttcagtatttccatcatccagcagttaattttagttcaatgctttaaacattcttcacgcctggtgtgctttcagttgtgtatattcatggtgagtactcatacaaccattctgtttttcactttcagtacagtattcaactaatttaatgagatattcaacaccttattacaaaataggctttgtatgtagattttgcccaactgccgcctatgtaaatgttctgatcacatttaaaggtaggctaggctaagctataatgttctgtaggttacgtgtattaaacatatttttgacttacaatattttcaacttgatgacaagtttattgggatgtaacaccatcgtaagtagatgagcatctgaattctatagggtgctagaaactgtgctatacacttcatgatattgkctcttttattatattttagaattttatatagggatatatggatttttataatcccaaaggtcagatgaagaaacagaggctaccagaataacctgcccaaattcacgtagtaaa

SEQ ID NO: 916233 - DNA, 625 bp, Homo sapiens
caattattagtgattgagtcctctgagttctatcttcaaaaatatttataatgtagccaaacaattctgatctcttatgtggaagataaaatagtagagcctgtcaactagtctcagtatgttcactctcaacacaatctgtctagtcaattccctgttaagtcttttcccttcagtagatacaacaatcaaaggagcttgaatatcaggtcttgttagaatccttcctaaaattctgcaatgactgttcaaggtactttggctaaatctaggggcatttttttttctatagcccaaattataaacttctgccttccttttaaaatatttctcctgttctcaaaatccttctttcagtttctgggaatggccagctctctcctatcacagggcctttgcacagacccctgttcctagaacacttttcaccttacctgccttttgctcagatataaaatatcagcttacattcaattattttttaccatttgctttagatatcaacttacacttcacctcttgtgaaacattttctctcactccatgatttacactaggttccatctcaaaacacatcyttattatttgtttcttcataggtttataacattttggaattatttat

SEQ ID NO: 916234 - DNA, 281 bp, Homo sapiens
aagcaaaacataagtacatgtggatataaataacatctactatctaaactctacccaatatattccccaaaataattccctgaaataggcactattatccctatgtttcagatatgaaaactggagctcagagagtttaaataattagaccagtgtgacataggtataaagtaatttagcaaaaattgrgctcatttaggactagatgttggaattagacagaaaaaagttagacacaaaaaattgtgtctaattccaacatctagtcctaaatgtactaa

SEQ ID NO: 916235 - DNA, 689 bp, Homo sapiens
taattctgggacataggaacaaaatattaacataggaagagagaaaagaaasaatttggtataaataagcagtcactctaagtttcttaggacttactatttgatgactaggggctaagatgatatgtacacttatttacttaatttaattttcctttcttccaccacttgttgacctattataaatatagaattcctagcacattaaggtactatgtgatatttttgtgttttttctttgtctgtattagtcacaattctccagagagatcgaacataggatatatataaatagatatatgaaaggagatttattagggagaaattgaatcacacaattacagagactgagaatttactcatataattatggaagctaagaaattccataataggcagtctgcaagctgtagtaccagggaagccgttagtatggcttagtccaagatggaaggcttgagaactcttagtttgaaagcaatggcccaagagccccggggaccactggtgccaggcctggggtccaaaagtcagagaacttgaagttctgatttctaaaggcagaagagtgttcaggctctggagagaaataatttctccttcccctgcattttttgttttttaacatccatgccccttaccaattggatggtgccacctacattgagggtgaatcttccccattaagt

SEQ ID NO: 916236 - DNA, 603 bp, Homo sapiens; identical to SEQ ID NO: 916016

SEQ ID NO: 916237 - DNA, 623 bp, Homo sapiens
atctatgtgtagtcaatgtttacctaccatttataagtgagaacacgtggtgtttagttttctgttcctgagttaatttgtttatgataatggcctccagctgcatccattttgctacaaagaacatgatttcattcttttttatggccatgtaatagtccatggtgtatatgtaccacatttcctttttctgatccaccactgatgggcccctaggttgatttcatgtcttttgtactgcgaatagtgctgtgatgaatgtgagtgcttgtgtcttttaggtagaacaatttgttttcttttggacatatatccagtaatgagattgctgggtcaaatggtagttctactttaagctctttgagaaatctctaaactgcttttcacagtggctgagctaatttacattctcaccaacagcatatgcctctcctgttctctgcagacttgccagcatctgtcggttttttatgttaataacagccattctgactggagygaaatggtatcacattgtggttttgattggattttccatgatgattagtgatgtggagcattttttaaagtttattggccatttgtatatcttcttttgagaagtgtcttttcatgttctttgc

SEQ ID NO: 916238 - DNA, 644 bp, Homo sapiens
ggaagcttagctatgaggacgcaaaggtataagaataatataatggactctggggactttgggggaagggtgggagtgggatgaaggataaaayactacacactgggttcaatgtaaactgcttgggtgatgggtgcatcaaaatctcagaaatcaccactaaaaaactgatcagtttaaccaaacaccacctgttcccccaaaaactgaaacagtaataataatgataaataaaaatttaaaaaaacaaaaattaaaataagagctctttttcaaacatatacacctacacaagaaaataatgtacaattcataggattgtgttgcttaaatattttatcaaatatttattttatttttagtgttgaatggcatatcaaataaatcattccatgatattaccaataatatatgattataaaatgatcaagtggctgggcacggtggcttatgcctgtaatcccagcactttgggaggccaaggtgggcggatcacctgaggtgaggagttcaagaccagcctgcccaacatggtgaaacctcgtctctactaaaaatacaaaaactgagccaggcgtgttggcaggtgcaagtaattccagctactgaggaggctcaggcagtagaattgcttgaacctggga

SEQ ID NO: 916239 - DNA, 639 bp, Homo sapiens
aaaagatataaataaaagtgttcaaaaccacwttctctgtataagagtatttaattgaaaagcctacagaagcagatgctcaacatttcacatatgaatattgatgctatgtgtcttattgtaaaacagcactttgggttgctaactaaagaaaatgtatacaattgctgagacagtgaagtatggtatcaaagatacttgtttggaaatgcaatgtgaatctgtattacaaagtcaatcaaataccactttgcagtaacactgtatactcaggagctgagtgatgatctagaagaccaactcactgaacaagtaaaactagtaaagtgtttttcattgtgattagactaatgcactgatactgctaacatggcaactcttttagtgtagtccattttcaacattatattgatattatggaacttttttcttcatcgctcatgtaaactgactagatctgaaccctatgatatgaactgtcaactggtgtagtttagagattacgtttcacatgcatgtttctgtggcataatatctattacagaaaacattcttgaatggttacccagatatggtgcttttgttaaaatgcaaatcaacacagttttctttatcaaaaacatcttgcatggcattaaa

SEQ ID NO: 916240 - DNA, 617 bp, Homo sapiens
aagttctgggatacatgtgcagaatgtgcaggattgttatataggcatacacrtacaatggtggtttgctgcacccatcaacttatcatctacattaggtatttctcttaatgttgtccctcccctagccctctaccccctgacaggccccactatgtaatactcccctccctgtgtccatgtgttctcattgttcaactcccacttatgagtgagaacatgtggtgtttggttttctgttcttgcgttagtttgctgagaatgatggttcccagcatcatccgtgttcctgcaaaggacatgaactcatctttttatgtcttcatagtattccatggtgtatatgtgccacattttcttcattcagtctatcattgataggcatttgggttagttccaagtctttgctattgtgacagtgctgcaataaacatacatgtgcatgtgtctttatagtagaataattgataatcctttgggtatacaaccagtaatgggattgttgggtcaaatggtatttctggttctagatcccagaggaatcaccagactgtatttcacaatgattggactaatttgcactcccaccaacagtgtaaaagcattcctatttctcc

SEQ ID NO: 916241 - DNA, 615 bp, Homo sapiens
aattcatcaatcacccttcagagaatcagtagttttccaatcttcccatgttgttcaaattaggttgatttcttttctgctccaagcatcaacctatrttccagatttagtcaatcacatgaatcagttctgatcaatgagagacaaataagtggtttttgcaaaagatatttaaaaaaaagaaaacattactggggtggacaaggtgaaaataatataagcatggattttaaagggcacatgcatgcacacacacatacgaggacacatatagagacacagggcccagtgtagagggacaaagacaaaattgttacaaaacaatttgaacctcatcttctaatgtcttcctcacattatcacatttttgtcacctttgagatgttgccatgtagttggatttctctttaccaggaatgctctgtgatcttggtctttgcctagctgtttccttctcaaacttcaggactcagtttaaatactaactcaagagagattttgctcaactatcactcaaaatggcaccatcaacattctctataaaggctagaagatgtggctgctatatcactgtgtagtggtttcattcatttgtttatttttattatctgtctt

SEQ ID NO: 916242 - DNA, 575 bp, Homo sapiens
acattcaaattcacgaaatccaaagaaccccagtaagatactccatgagaagatcaaccccaagagacataatcttcagattctccaaggtcgaaatgaaagaaaaggtattacaggcagccagagagaaagaacaggtcacctataaagggaagctcatcagactaacagcggacctctcagcagaaaccctatgagccagaagagaatgggggccaatattcaacattctttaaaaaaaaaatgtccaaatcagaattcatatccagccaacctaagatgcataaatgaagaaaaaaataagatcctttacaggcaagcaaatactgagggaacttgtcaccatcaagcctgccttgtaagagctcctgaaggaagcacaaaatatggaaaggaaaaaccattaccagccactaaaaaacacactgaagcacacagaccactgacactatgaagcaaccacataaacaagtctgcaaaataaccagctagcatcatgatgacaagatcaaactcacacataacaatattmaccttaaatgggctgaatgctccaatttaaagacactgaatgg

SEQ ID NO: 916243 - DNA, 632 bp, Homo sapiens
agtaaataggaacccacagaattggagaaaatattcaaaactatgcacctgcaaatgtctaatatccagaatctacaagcaactaaaaaaaaawcaagcaaaaaacaaataactttattaaacaataggcaaaggatatgaatagacacttctcaaaagatgacatacaagtggccactaacatatgaaaaaatgccccacatctctattcatcagggaaatgcaaatcaaaaccacaatgagatgccatgtcaaccagtcagaatagttattattaaaaactaaaatatgacaaatgctagttaggttgtagagaaaaatgaacatttatacattgttggtggaaatgtaagctaattcagccactgtggaaagcagtttggagatttcttaaagaacttaaaacatccatttgactcagcaatgtcattactcagtatataccaaagaaaagtagatcattctaccaaaaagacacttgcactgacatgctcatcaaagcactattcacaatagcaaagatatggaatcaacttaggtgcgcatcaatggtgtattggataaggacaatgtggtgcatatacagcatggagtactaggtcattatatgaaagaaaggaatcatcatttac

SEQ ID NO: 916244 - DNA, 602 bp, Homo sapiens
ccttttccctagtggaaatcaaggtagaccaagaccagtagattaaaacagaaatcagagatgtgctatggtttggccctstgtcgccacccaaatctcgtctagaattgtaatccccaactgttgagagaggaacctggtgggaggtgattgtatcgtgggagccatttcccctgtgctgttcttgttatggtgaatgagttctcatgagatctgatgtttttaaagtagcagtttcccctgtgcacacacacactctctctcctgccaccttgtaaagaaggtacttggttctccttcaccttccaccataattgtaagttccctgaggccttcccagccatgcagaacagtgagtcaattaaacatctttcctttataaattacacagtctcaggcagttctttataacagtgtgaaaacgaattaatacaaaacttcaatttaacaattaaatcatgtgataaatacagtcctctcatcgtgttgcttaaaattagggatcagaatctcaacgagaggaatagaaatattgcctgatttcagacgaacacccccttgtattaatttccagaagtcagaaactatagtctataagccaa

SEQ ID NO: 916245 - DNA, 576 bp, Homo sapiens
ttttatgaaaaataaatcctgataggactgatgtgcttgcaaaataagttctagtcttattacacttggccagattatttgcatgaatcacagcaagaataatcattttccagaaagtgacattttttacttatgtcaggaaccctgtacagggactgtgtagacaaggtgtgaggccagttttcccaaggggttttattgtctctataagtcaaatttggttccttaaagaaatgcacattatttcagtcaaagccttgataaaataaccagtgtctctaattgtgtcctgttgcaaaagaaaatagattcatattgcatttatgcaaataactgtattgccatgagttaagaatattcacaaatagttttcaaattcaggagaaatcaggtaggaagaaaaaacattatgcttcaaattatgttgatagtagtataatttatttactcaattctttaaaagctgtaaataaygcaaaagaaaattttcttgtcttttaaaaacgaaggattaacaacattttaagcaaaaactcataaaagaattattttagtcttctactagtttagtccatg

SEQ ID NO: 916246 - DNA, 567 bp, Homo sapiens
taacccttggctattggattccctggggagtcttttctaagcacttttgtcctctcaccccacatgctttcctctaaggtctcatgcattcccatgctgtatggtttctacaactttatccttaacccaggcctctctctggagtaccaggctagaatatccaattgtctatttcacatttccatttagaatgtttccagataactcaaatttaacccatcccaaacttgattcattttcttctcttctcctttccccttcaaaaactgctctttttccagttactcttgtttcagggattggtaatcaccatcctcccacttgtcaatcatctgggttgtcacccttgaccattccctctctttctcttgcagccaaacaccactgttgttggctttgccttctagacagctctgccatacatccacttgtttttgttcccactgccacaatcttactccatrctaccactgcttctctcccagatgacttgcaatggcctaataattagactcctggtgaccattttaacccactcccttctgtaaaggagaccatgcagaagta

SEQ ID NO: 916247 - DNA, 576 bp, Homo sapiens
ttacaactctttaaatatggttcacggtggaggaatgtaataaactattttatgtttttgcgcagccctgtgttttttaaggcaggtaatacttttactcatttgtttagtttrgtacagatagctaccacacattcttccccttcagtcacctacagaattacatacttcttctcaataaggccaagcacattaaataatttattagttcggttttttcccttggagtcctcatgtttacatcccttcatcctcctgttccaataggaattcgttgttgtctaggtctgccatatcgtgaaacctccctttaatcattattttggagattctctggccactctctgttatttggatcctccctcattccagtgaagtatatttaacagatttttttttttttccaagacaagatgccttggaggtatattgtgaagactgtgtttgtgatcaggtcttaattttgccttcatgcttgattgataaccaggcttattagaaatgtttagttaaatatcattttctgtcaaaatttcaaagacataatttcattattttttacttttcttggccaca

SEQ ID NO: 916248 - DNA, 576 bp, Homo sapiens
ttacaactctttaaatatggttcacggtggaggaatgtaataaactattttatgtttttgcgcagccctgtgttttttaaggcaggtaatacttttactcatttgtttagtttagtacagatagctaycacacattcttccccttcagtcacctacagaattacatacttcttctcaataaggccaagcacattaaataatttattagttcggttttttcccttggagtcctcatgtttacatcccttcatcctcctgttccaataggaattcgttgttgtctaggtctgccatatcgtgaaacctccctttaatcattattttggagattctctggccactctctgttatttggatcctccctcattccagtgaagtatatttaacagatttttttttttttccaagacaagatgccttggaggtatattgtgaagactgtgtttgtgatcaggtcttaattttgccttcatgcttgattgataaccaggcttattagaaatgtttagttaaatatcattttctgtcaaaatttcaaagacataatttcattattttttacttttcttggccaca

SEQ ID NO: 916249 - DNA, 661 bp, Homo sapiens
aaggtatatttaccttttatttgtcagcataaaacttcctacactgtcattagaaaaatctttaccaactcatttcatgtttctttgaatcagaatgatttcatttttctgccaaggaaatgttgccaacttcagatgtgcattaagaaaaatggtctggcaagatagcaaattccaatttcctatgatcagagaatcttattacattcatcctctctcttccttcctgttcacataggaagttaaaagatgtttttaggtttgaatttgcttagctctacattctcataaatggaaggtaatgttctgggaactggccaaacactaactacatctaagaaatgaaattctaaagcccaagtttatttctggttgctattgaactttcccatttgttgttaaatgtgcagattgccaagtagcatattgtctgtgacaactttacacaatggtggagatctgcagatggagtgtcttttcacatatgataaatgcctaatttaatgctgatttgtggcaatcaggacaatgctgcaggctctttctgctcagggatgtcttgatagtagacccaggagcagggcatgagctcaggcccaaccatrggtttatgactacagcagtgttgcccactgtccctcttaaaacacttaagctggaa

SEQ ID NO: 916250 - DNA, 674 bp, Homo sapiens
tctcagaaagaagcaatcttagaaaaaaattatgatctatattggaagcaacctaaatgaacttttcatttttctttactttcaactaattttcttaattcttgtatggcaaaaggtayacttacttaaatgatcatttaaaaataaatgaaaacagttacttcgcttaaaaatgactaaagttcaaacttacagcttttgctgttgtattcctcggcccttttacacttcattttctttattgggtcatgcatttgtatgcttctaaataagttactttttttagcagacttttgagataagatacagacagaattgcagaacctgttttatttcctcaggaagaatctcagatgggagtggtgcataagaccagactgcagaacataaaatggttttctcaagtctacactagctagaaagcaatcacccttcttctttctttttatttgacccgaaaggacttgtgtactgatttacacaattctatgccatttgtgtgtgtttatgtgtatgtgtatgtgttatgcaaaaatgagtctttccacagggaattttgctgtatttccttttgactgagtatgaattatgctgtagatagatttatgaaatataatgctaatttggatggtctcatattgacttgtagggtgatactgtcctccttcaaaagg

SEQ ID NO: 916251 - DNA, 616 bp, Homo sapiens
gtacaatttatttttgttcattactgcttacctacttattgacatttttaaaattaaagtatatatttaaatagttactaaaatgaatatgctagcaattcagaaaatttggaarcacagaaaagaacagagggaaattacccaaaaccctgccaggtaagaataaccactgttgatattttcttctagtctttctccaggtcagacatatttcaagacgatggtcgccctgttcaaaatattttgtagcacacttttctacttagaaatttatccagaacacttttcatatcaaatattattccactgagtgatttaatggccacatggcatcatcccatatgggtgtaacagtgtatattaatgtcccaccagttcacatttgtttctagtttattattgtttttattattaatattcttttaaattgataactcataattatatatatttatggggtaccatgtgatgtgttgatttatgcatataatttgaaataattaaactgagcaaattaacatatccatcacctcatttgcttatcatttttatggtgagacaatcaaaatgtacttagttattttgaaatatacaatacattatgattgactccagt

SEQ ID NO: 916252 - DNA, 635 bp, Homo sapiens
aagcttttttatatatatgtactactttatatataattttatctagaaaaaatatttatctagtatttttatctggtatttttatctagaaaaaatacttttatctagatgaaatttttttccttagtgatagtrtactttacaaatttttctatcttcagctatcacccacccaagacttgaggaatcattctctgagtcaattgtaaaagcaattgataaggcaagatcctaaaacttctgggattttccatcaataaagtaacttttcagccttacagagcagagcttgttcctttatcttcatcagtttctacatttctttgtaaaaaatataactctgtaaaattagggctaaattccttgagaagaatttaaaacatataggtttcaaatattcaactaagcttcaaagaaagaagaaagaaacatgggctcacagagatgattttttttttctccagccagcatggtcatcatcccctgccaggcatctcagctttaaaagctctgcagcatgtctctatcctctttgacaacagcttctgtacaatataaaaatcccattatgcatattaagcaatgagactcactgtttcccaaggggatcagtttgaattaagctttctaattga

SEQ ID NO: 916253 - DNA, 608 bp, Homo sapiens
ggtggagaaagcactggatgtatgactctggcaatatcattttatatcttgcaaagtgtgagaattagatatggtgatgtctgtgattgctttcaaatgcaactttgtgttcccaactttattttattttattttattattttttggggacagagtctcactctgttgcccaggctggagtacagtggcataatcttggctcgctgcaacctccacctcccaggttcaagtgattctcctgcctcagcctcccatgtagctgggattacaggtgcccaccaccacacctggctaatttttttgtatttttagtagagacagggtttcaccatgttggccaggctggtctcgaactcctgacctcaagtgatcctcccaccttaacctcccaactccaactttaaatagaatttttttttttttttttactctaatcatccagcacataatagaaacatttggtcaacttttttgactgctgatgttcagtgcaagtaaaaactcaattctgaactcaayggctgcatggaggtgctctgcaagtgtgagatggagcaccagagagtcaggccagatgattatttgaagagagctcttcctagtgattc

SEQ ID NO: 916254 - DNA, 617 bp, Homo sapiens; identical to SEQ ID NO: 909719

SEQ ID NO: 916255 - DNA, 561 bp, Homo sapiens
actgtagatagatagcttggggactcgctgagtcctgtcaatcagattaaactcacagacagaaagaacaagaaccatgggcataatgagtagttgaagacaggaaacattttattagatcagctctgagacaacacctatgcacatctgatcaagaattcagtttgcttctgattctaattctgcagtaatctagaaaccatgattccagccagcactgatataagtggaaattttagcatggacagtacagtattgggggttatggatagagttccatgatcttggaatattctctcataatgttgggagtggcagtatggttaattgaactgtcatgtgaaacctctgctcattaagggcctcctggtaagtggaaacccttttcctttagtgaatcgcatgtagcacactaactgtatgatgagaaatttgataggcagcttgtggtgaactcaaagaaaaaaaaattaagaaactcaatggaggcagggcacrgtgactcgggcctgtaatccaagcaccttaggaggctgaggaaggcggatcacttcaggtcag

SEQ ID NO: 916256 - DNA, 644 bp, Homo sapiens
agccatatttgctaatcttttattttacaagtattgtttatttgtttgtttgtacttacttgaaaaaaatctttcctatctaaggtctttaaggtaatgtcttatattttcccttttttattttaggckttcttttttctacttaaatttaactacacctcttttcaaatttgcctgtcacctcacacatttttttccattgagtactcataccctagttacctcaccattcagatgtcacttccatgccatttcttcccctgagtgttcttttgttcttcaggttaggagcaatcttcttgcctgccagagagtcttgcaaaaaaaaaaaaaaaaaaggtgattttcttttcttctccggaagtttttatattgtacttaaactagtcaagacagtattatgcttgtttcagtatattattcttccaaatagttcttgagaacaagatctataaatcttgatatccccaaagagtcctactcagtgtctcaaagaataagtttaccattaacttttgtaaagagaaaaaaaaatgtatgtttagtttggacaactgaatgctcatctgggacacacagtaattatttccaaatacttgaacacctatcctaggttaaaggaattgaagtggtcctatatggtc

SEQ ID NO: 916257 - DNA, 647 bp, Homo sapiens
tactacttccttgaggggtttcatttgaagggactacttagattatggcacctctgaaaayctgcttttggtagtacacattgcggtgggaaaatagtagatcttatctagaacagcattcctcctcctagttctcagtgtgagagtcatctttttcaatggtgaaggaacaagagctgacatttatggttcaagcaaatgtagccagaactcatgatttggagtgccaaatctagttataaagctctcaacataaatttcctatgtttcatttttcttgactataaagtgaaataaaatgggcacattaaacaccatttcaccagtatctttaatgatttaattttttaaatgtatatgaaaggctctgagcattatccacttagcataccctggatgaagcggcttatgcaaattagtctgactgagacatgaggcacagcgtattagtcagggttctctagagggacagaactaataggatagatgtatatatgaaagggagtttagtaaggagaattgactcacaggattgcaaggtgaagtcccacgataggccgtctgcaagctgaggagcaaagaagccaaatagtggctcagtccgagtcccaaaacctcaaaagtagggaagccgacagtacagcctt

SEQ ID NO: 916258 - DNA, 551 bp, Homo sapiens
agcagaaacttggttaggtttgcaattagaaagaacattctggtggaagtgtgttcatggggtagagagataagagacatcactcctaatttttccttttcmaaacagctttcccaaggactttttgggtctctcaagtacatagggtcagaagtctaaaaagcagcttaaggaataaaccatcaaacaatccctctactgtcaggtaagaatatatggttgagtatcacttgtccagctcagtcatcttgcaagcaattgacgttggttatttctgtgttgaaattaagtcatgaaacacaaagcgctgaaccagattcttaatttggacttaatcgcatttattatagtgcaaaacaaatacattcttcccagaccagagcaacattgaatagcattgtaaactaatttttttgatgtcaaggaaagatgaaaacaagataaaacatgcgagagaagcagcttgcattagatcaggcacagtaaaactaagaaacatcagttgctactagcaaagaagcaaaagtccatggagtttgaatttttgttgt

SEQ ID NO: 916259 - DNA, 602 bp, Homo sapiens
attttcctttataatgaaccttcttcagatatttttcatctttattctgtgctttttttattgactgcagacagatgatcagttcctatgtttatcgcattaggacaccgttcttagcatagtttcatactcatggcacagagccaaccagcacaatttctataacatattctataatatatttggctcagctaatgacaataaaatagaagtatagtcttagtgcactaactagactccctttctaaggtctgaagaagcccaagaacattcagcaattctcagtaattcttatgcaaacacttccttgaaagactgaggatattataaatttaaaagggcacatctgaatactttcagctttataggctgcacactcatcttgtatacaatacctttgtaacacacgcaagtcatttataattttgaataaccacacttgtatgtttaaagatctcagtgtgccctccacatgaaccctacagccacccatttaattcttacgcatatatgtatttattattgcacggaggcttcgttattgcacagagrcttcattatagcttgtgactttcttgcttaaagataccaaatggcttctc

SEQ ID NO: 916260 - DNA, 632 bp, Homo sapiens
aatgttcattgctttctccttatgtagtacttttatatactttacttttgtttgtaccgttgttctctttttaaatgttgaracgttagactctatccaagcctgttcttaccttccttctcccagaagtggcctgctgttctgtgagagtggtgcttgcattatggtaaccatttttctctttgtaccatgggaactcatctgtgtttcctatgacttgagtacaaacttcattaagtcagaaagtcagcttgtggcagattttgtttttaacgtaatacagcatccagcccaattttttttttattacatagtaggtactccattaatgtttattgcattctacttaatataattagagagggttacctatataaacaatgtttcaagtaatgatttctacaatattgctctcctttctaactttatggccattaacaaatatggaattacttgttacatgacacaataatcattgtatgtgtaaccttctatttctttaagaaatagtgaatgggttctaatgggattagtgactgacattatatttggggtacatgcttagtacatgttcaatgaaatgtgaattattgcatcaataaataaatattgaaacttacaggtaatcataa

SEQ ID NO: 916261 - DNA, 617 bp, Homo sapiens
ttatgaaagttacaaattgaatactggagtgaaggtcaagtaaatgttaaaaagttagtgcacaaacacaatcaccatgctaagtgagctgcaggtaaaactgactttctaatttggaggattagtacaatcaaaagggtcaaataagttgtacatgatgccataatcttgatgttcatcgcttaaatctttattgagattaggttgccatttctttcaagtcttttgtcattaatatggatttttttttgccaaagactgaaccttttataaagcaagaaaagtattaaagaaaattaataaataaatgagtatttctctacatcgtataaaatcaatttgtttgatcatttgcttggattaatttattttcaatgatacagacttagttttaaaatagcattccatgctgctcctgagtattagatacacatttgctttacttgttttaaatattatggtcttttaatattttctaccactaagaataagaaaaaaaaaactgtccataccaacaaaatactccyataaagaacctgactatgatatgctcctcaaatgaaaaaaatccatcagaagaataatgtcctttcaataactccgtcacatcacatctc

SEQ ID NO: 916262 - DNA, 481 bp, Homo sapiens
ataattcctttcattgctcccagtagcgatgtcttaggcatttgaattaagcttggctaatcaactgtctcaactggtcttggatttttagcaaagtgacacaaagacaaaaarcggtattcagaatgtatctagagcagaggtatccagaagcagaaaaaaatggcaagaggaatgtcagtagtagcagtgccccactctagtggtggctaaaaagaaaaatggcagtaatgacaaaaataatatcctaacaagactattgctgtgtcattgatttgggtgctatattagctatattgacaaccctgggtcgcatcccacttctcaacccagtctcccagatttcccacagttcgtcaaactacccatagtctcagtaaagtttttgcatgcttattaaatagtctgcctggtagacagggcttgtgtttcagtctcttcatacagtacagactgttgacataaaagttctaataaatta

SEQ ID NO: 916263 - DNA, 530 bp, Homo sapiens
gaatacttttattcagattaccaaattgctcaggtatcctgaatttttattctatacacatatccaatacaatattgattcaattgatctttcatagtaatagagcatttttaattgattaaagagtttttatattgatttgcattattagaggtttctgtgaccaatctgagtgcagtagtaagatgtgaccatgattattatgtctgaaaaaactttttcggtggaagaaagaaattttactttttgtatccatgtttcaagaaattattcattctccaattttatcctttaacattaatcttggatcctaaattatgcaatcactatgcacaagcatgactaggtacacatgacactattataccttcctcaaaattagaatttatagttttcatcakgaaattccccctctacttgcattcataagaattgtatgttctgtagtatattttaaattttgaaggtgagttctacagtatatcttactgatatactgtaatagaaatcaacagaaattcagttctccc

SEQ ID NO: 916264 - DNA, 606 bp, Homo sapiens
ataaatagtaggggtccaaatttgaatttaagtggattcagacatgcctagtcatgtcagacaaactggtgaaacaggcttctcttgctactttgaaagttgactgagaaacattgcagaggacrgttctatctgtgtttactgttggtgttccaagatgcctggccacgggtgatgaacttgtaaaacaagcctgaaaggaacggaagaattttttgggtgagaaaaaattcctagagaaaagagagccaggctccttgaacttgactgagaaatgaagccagagttgacagcccagaaggtttcttatcagtaaagcctcctgtgtattattctcatgtgactttgtgtcatcatccattcacgacaagccatatagactgttaagagcctctaatagggtgcaacaaaaaaatcagaaagcatccctccggcttatcccaatttttctttcttttaattttttttaatttttttacttttgtggggacatagtaggtacatatatttatgagttacatgagatattttggtagaggctttcaaagtgtaataatcacatcatgggaaatggggtagccctgtcctcaagcatttatcctttgt

SEQ ID NO: 916265 - DNA, 599 bp, Homo sapiens
atacctggttcttctgttacagagtttactattattaaaatcagtaggaaataaagtatgtgtgttataattcaatattgtcaaagttgtggtagaatctaaaaatctaaatatttaagagagctgaaggtggagcagctagggtgcccagccatcctggttttgctgggactgtgccagtttgagcaccggctatatcaagtgctggaaagattttcagcccaagtaaactgggatgattagtcacccaagaagtaactcatacatgaggcagtcaacccagaaaacttcctatgaacccaattatgaatgcattagatctttcaggaagaatgaataagaatgtaacaggttgggggtaaaaaaggaaaaatgacctttcataataagagaaaaagtaagtgtcatactgtggagccatgaaagtatgtagaatagagttaaataatgatagaatacagagtgtgtgagaaattagcataagatgaggcaaaaaaaaaggtcasatttttaaaaatttgtatgtccattaattttttctaattttatcatctaggtttgaagtcagcaaactatagccagagagtcaaatcctgcca

SEQ ID NO: 916266 - DNA, 608 bp, Homo sapiens
attcgtatacattgcggatgggaatgcraattggtaaagtccagctggagcgggtgatagggagaataatggccccgttgaatgtccagatgtcagacctcatcatttccaagtttgtgagcttacatagccaaagagactttgaggatgtgattatggttatgaaacttcagatggggaaatttttctagttctccaggcaggcctggtcttatcacagacagagtctttcaaagcaggggaactttctctgatgtggagaaccgtaaagatggcagcatgagaaggacttcatataccattgctgctttgaagggtgccgtgggccacaaaatgtgggcagtctcaaagcaggaaaaggcatgggaatagaaagagatgcagccataccaactctgtgctgggcatctgacctacacaactgtgagataataaatatgcgctatttaagctaccaggggtatggtaatatattacagccagagtagaacactaatacataagagaagctggaaatcactactaacacataaacttgcaaatcaacaatgcttctttgggaatttactctgaagttacacctttagcaatacacatatatgaatgta

SEQ ID NO: 916267 - DNA, 607 bp, Homo sapiens
agtttcatacagaaccattgcataacaatggaggaatactagaaaaagcatgaagagatgtggctttcagccttggatccatcaactcactgcataaatttggacaagtcactctacctctctggatatctttcaagataatgagtttagatgagaagctctctaaggtcctgtcacatcctataattttcggtcagaatcttaataacgtagaattaacattacatgacatctcgtcaaatctgtctattgaatgaaatcttcacttacatttaagaccatctgatctttattaagattacatataaaattttaacaggacagaccaaagactgaagtcagtacattattagttcccacagatgctagtcaatatccacaactgtaaaattagtaatcttatggtatttaatcttatagtattaatcttatattaattcttcttatagtattaatcttatagtatttgacagcaactcttgagaataaataaaagtatatctctgcagtcaagtacacgttagtctatcccaaaagaggcttttttgagggaaaygaataacttttgttaaacataacattctatgaaataagtcaagtaccatat

SEQ ID NO: 916268 - DNA, 613 bp, Homo sapiens
gaaatggcattcacaatggttatcgaaaagagagcctcttaactacctgaaaattaacttccttcattccaaagcacactgtttcagagcacttagttactttgttttatgattatctctcccatgcagaatccaaagtgtggcatgcatcacatgaagtgcccttgtgcaatacttaaaccatcactctgattcactgaagtaaaataagctgtgctttatgaatggacacctattaaattcaccaaaaagtatgcaccacccccaacacatgggattccttataatggcagcttttaacacctttaaaatgagaaatatttttcttttcttactacaggttgattctgctcaaaaaaaagaaaacaaaaaacttactaatatccaaaagttcttgcctttctagaccagctccctatgtctgggaataaacactaaaataacttgggagtaagtcagttccaattaacagtccctccacccattcytaattgggttaacactttttattaggagttatttgtgcactttgtacaaatgctaatgaacaactcccaaatgctaataaatgtgtccatctgaaaggcagaaaaagcagaacaaaactagagta

SEQ ID NO: 916269 - DNA, 590 bp, Homo sapiens
tgttcatgcaactgtgggggctgacaaccctaaaatctgcaaattaggccagcaggctagagattcaggtaagagttagtaagagttgatgaygcagtcttgagtctgaattcacagtgctgtaagcgggaaactcaggcagtttctatgttgcagtcttgagaatcccttctttctcaggaaacctcagtctttattcttagggccttcaacaaatatgaggaggtatacccctattatttatgaagggctatctgctttcctcaaagtttactattttaaatgttagtcatatgtaaaaaatgcctttacaacaacatctacactggcatttgacaaactactggctaccatagccttgccaagctgacacgctaaaggtaactattgtgagtggttattcattaaggctttaatcagtgtcatcaaatcaggcattaaagtattagcaaacagttatttcatcagaaagatgattatttgtcattctagtatttactctttttgctgatttatcatgtcttcattttgtttcaataatgttaataatgtagaacttgtacattaaaatatgtagatattttaatatc

SEQ ID NO: 916270 - DNA, 596 bp, Homo sapiens
ataaagttatgaaaaaatttatgagattctagaaaggcaacatgctgctctttagacctgtgtccacaaattgattgggaataargtgaactgacttctcctggaggagcaattatgagtgtgacagaaacccagcccataatctgggtcaagggaggtccctcatccacagaggctgaaaactgcagagtccacagccccatgctcaaagccctgtcctctggacaggctgatgaaagggtgtccataagagggcacaggatggctgctaggttctttgctggccaggagaaacatggtagacattgggtgaaggaggtccctgtggccactcaatacctgggatgggaggaactcactttgacagatggcgggtatattagtctgcttgggctgccattacaaagtaccacaaattgagtgacttagtaggaatgtgttgtcttacagtcctggaggctggaaggctgagatgaaggtattggcaggtgagtccttctgaggggtgtgaggaaagcatctgttctaggcctctttctaggatacttctccccagatggccatctccctaaatggtcctgaatggttttctccct

SEQ ID NO: 916271 - DNA, 589 bp, Homo sapiens
cagtgatttgatcacagttccttgcagccttgaattctgggctcaggtgatcctcctacctcagcctcctgggtaaatgggacaataggcacatgccaccatgcctggtgatatggtttggctgtgtccccacccaaatctcatcttgaattgtagctcccataattcctacatgttgtgggacgggcccagtaggagataatcgaatcatgggggcagtttcccccctactgttctcgtggtagtaaatgagtctcatgagatctgacggttttataaggggaaacccctttcacttggttctcattctcttctgtctgccgccatgtaagatgtgccttttgccttccaccatgattgtgaggcctccccagccacatggaactgtgagtccattaaacctctttttctttataaattacccagtcttgggtatgtctttgtcagcagtatgwaaatgtattaatacaactggcaaattttctgtttatttatttttattatttatttttattttttatttttatttttttgtagagacagggttttgccatgttgcccagactggtctcaaactcctgggctaaaa

SEQ ID NO: 916272 - DNA, 674 bp, Homo sapiens
agaaaatgtcacagctggatagatccaataaaataaattgggtggaataaagtagttctactcacagctctacaatarcttgctgagtaacattttaaaattctatctaacgctactgtttccatttccacctctgtagaataagaatattgaagtcgatgaactctacagctctctttatatttcatattttatcacattcgcagtaaaagaggaagagaacatgatgagatgactgttatgtacttataagactaagttttttgtgaagtgtctaataatctgcattatatttctaatttcagagaatgttagaagatcttataaaataaagaataggaaaatacttgaacattgcttgttttatataaatattatgtctgccattaccatcgtattgtcttagtaccttactttttataacacttggatgtaagagagcagaacagcataagtacagtctatccaattttatttcaagatacgacaaaaaacaatcatttttgatgatagtaaaggcttcagagttttcaattagattcagtttatattttggcaaagaacccaggtacaactaacacctgctgagcctacttccttcccatcaaagtttgttgcctgcctttttaaacaaatggagatcatttgagcagattgaaaacagtaattggggt

SEQ ID NO: 916273 - DNA, 676 bp, Homo sapiens
cccttgctgttctcgtgctagtgagttagctctcatgagatctggttgtttaaaaatgtgtagcacttcccccttcactctttctactgcttcccttgtaggactgcctgcttctccttcattttctgccatgattgtaagttccctgaagcctccccagccgtgcttcgtgtacagcctgcagaactgtgagtcaattaaacctcttctctttataaattacccagtcacaggtagtagtttatagcagtgtgagaatagactaatacaaaaagtaaaccaattttttgaaggatagcaaaaaatttaaactgaacattttatcttgagtatgccaatcagggtaaacaaaaaaaaaattatttcagttgttcaatgatttagagaaacaataaacaaacttttgagtttagttttggagcttatgttcagactgtctccaggtaatatctgctaaaactcattttttcagccatctccaccttagttagactagatctacaccattctcctattatttcacgtgtgagttgatgtcttttatcaagattggtaaattcccaactgtactctcttcaaatattgyttctgccccatcctctcatctttcttttgcttagattccaattataagcaaggtacactttttaactacattacatatggcttatactct

SEQ ID NO: 916274 - DNA, 676 bp, Homo sapiens
cccttgctgttctcgtgctagtgagttagctctcatgagatctggttgtttaaaaatgtgtagcacttcccccttcactctttctactgcttcccttgtaggactgcctgcttctccttcattttctgccatgattgtaagttccctgaagcctccccagccgtgcttcgtgtacagcctgcagaactgtgagtcaattaaacctcttctctttataaattacccagtcacaggtagtagtttatagcagtgtgagaatagactaatacaaaaagtaaaccaattttttgaaggatagcaaaaaatttaaactgaacattttatcttgagtatgccaatcagggtaaacaaaaaaaaaattatttcagttgttcaatgatttagagaaacaataaacaaacttttgagtttagttttggagcttatgttcagactgtctccaggtaatatctgctaaaactcattttttcagccatctccaccttagttagactagatctacaccattctcctattatttcacgtgtgagttgatgtcttttatcaagattggtaaattcccaactgtactctcttcaaatattgcttctgccccatcctstcatctttcttttgcttagattccaattataagcaaggtacactttttaactacattacatatggcttatactct

SEQ ID NO: 916275 - DNA, 426 bp, Homo sapiens
gggctacctgtactacccaggctcctaccccagcagcctggtctacagcactgccctctgctctcccagcacctgccagctgcgttcctctctctacagggactgtcagaagacctgctgggagcccrccagctgccagaaatcctgctaccgccccaggacctccatcctctgctgtccctgtcagacgacttgctctggatctctaggctttcggtccagcagctgtcgctcccagggctatggatctaggtgctgctactcgctgggaaatggatccagtggcttcagattcctgaaatatggaggctgtggttttccttccctgagttacggatccagattctgctacccaaactacttggcttctggagcctggcagtcttcttgttacagaccaatctgtggatctcgcttctatcaatt

SEQ ID NO: 916276 - DNA, 611 bp, Homo sapiens
catttgacagttctaatataaaactgaattcatttaatccctagtgatttgtttttcctgctactggaggggcatgtcattaactattggttcaattattttctgtacatgcacaagaatatgtataatttaacacgagtgaaaatgacttaaaacagttatttgacctaaatgaaaatgtctgtatcagggtgatgtattgacacactttttgcaactgttaatagtaaataatcatcttaggacttggtcttcttaaacatttttctgtcttttgaagtagatactgatgtatcttcagtaaaactatgtctttcacttttcatgtggtcaatgatatcacctactctcatgttgaataataaatatcatcaaattgttgtacaagttcatgcagtcaccatcaaccggatttagtggtagaaattcagaacccaacttttgtttttttcattaaaaaatgagcttttatttttggcttattttccttttcttctatctacaaaatttaaagaagaaaagtgttaccgrataataaaaaatagttgtagatttaaaaaatacaagacatggccaaatcactgtagcaagagcatttagattatccttta

SEQ ID NO: 916277 - DNA, 636 bp, Homo sapiens
ggcctagcattgaagaataacatgtgttccgaaccttaaaaatacttctgacatttgatttagtatsctggctctaactggagtctaaaataagcaaataatcaaagatggggttactgattacttagtaaatgttcattaaaatattactttaaatgataaagaattgaaagcatcctaaatatataaaaattgagttaatattaataaaacatgctgcatttatacagaataatatggtgcagtcattttgaaataatatataattacataggggagtattcaaaataatcacattacaaagaatacaaaaattagtttttctatattttataattattattttactaaagaaataatactagttactcctaagtagtgaataatgtgtatgttttttctaactttgttttccatactgtttgcaatgagcaattatggatagaaaaaaacaatgaatgtttttatttttctaccaaagtaactcagagtccaaattcctgtaatcttttcttatggagctaaatttctttttttaaatagtttctaatgtttttctctagaatattccttaattttctatattcttaataaaattcagatgataaaatagaatcaatattctcataagagttt

SEQ ID NO: 916278 - DNA, 582 bp, Homo sapiens
accttctagtttcgatctgatgctctaatttctgaaaaatcccacttttctttttctgttctattttaacctgcatgtttaattaattcacaattctcagcatgaaytaacatatggctgctagaaagttgcaaactggagattttgttggctgtaaccttgtctactatcgctaaaaaggaaaacaatcaattatttcccgattttttaaaaaagatatacattagataaagtatggtggagaaaatactctcttctgaaatgacctcgccaaatagtctttatgtttttaactacgaagtgaaccatatgcaatataatcacttgcacatattcaataaaaaagcagggttaagccaaattttgttaccaccaagaatatttgtactatacataagatgttttcaatagaaggattgagactttttttatctggcttataaaaggaaattgctcccttccctaaaggaacacagagaaaagctgatacatcttcagaaatattcattacagctcatatcttttaagtgaaactcgctatctggtgttgattctataaagattaagaaacttgtcatggtt

SEQ ID NO: 916279 - DNA, 599 bp, Homo sapiens
gattggaaagggaagaaaaagaaacaggacacagcagtgcaaataccgttatcaargataatgtcagaagcctcagaggcaagtcactaaaaaggaattgaagtctgagaaataacagcttattttcagagacaacaatgcttaacatgtttagttttatagaatacccaaagagttccctgcctagcaagctttagaatctggaaatatgtccctttatctaatagaaggctctcctgctacaattttaagtgcttttcctctatcctcaatggaaatgaaaaacataatctggtttttctgtaaatagcaataaaaaaatgaacaaaagtataggaaaaataataagaaagagaaaattttcttttcttgataaaaatgtcaatactatttcatcaattattttaagaatcaacagtgagaattatctccctttctacttcctttgggataagagtcaacagaactgggccagtcctgaaactttatgtgcacacaaatcacctgagaatcttgttaaagtgtagagtctaatttaatagaggagaggcctgagattctgaattttgaacaagcacaaggtgatgccaatgtgtcct

SEQ ID NO: 916280 - DNA, 613 bp, Homo sapiens
attgagatatcttgctgtttctcctattgtaaggtctctgttgtggcaacaagttaataaacccaactttgtttatctgtaggagtattcctggtggtcctggttggcaggcttcaacagtgcagtgtgagaatatgatataagagtaaacagagatgggacttctaaactggaacaaagaaaacttcttattcaagcttcacctttctcacctattgaacatttgcccacttaggcaaattacttagtctccatcaatttcctcatgatattgatttcccaagatagttgtcagaattaaataaaattctagggaagtattttttaactcactatgtaaacataggaggtataattattaatggcataagaggtattctgcagggatatttctagggaacagctctataatttggaaagtgatgtacagtttgttttaaagtggaggaatggattgggagtcagaccctccttacttatatattagtgttttacttcacagatgaatgatacwgcctgaaacaaattatttaacttctgaattttggcttcttcaataataggtggataataaaatctacctctaaaaattattatgcaagtagtgaaattg

SEQ ID NO: 916281 - DNA, 669 bp, Homo sapiens; identical to SEQ ID NO: 915152

SEQ ID NO: 916282 - DNA, 654 bp, Homo sapiens
ctttcttggagttgaaacatccattatcttaggtttcctatggctgtctaaacatttacagtcaattgctagtgtgtgctcacccatttcctattgcaatctatgttacataaaaaaaagaatatcactttttaaaatctttctcctgtctggaggtgagaagtttgtctctgtcacagatgtaaggtggtgtgaaatcaaaatgagactttttaggtttttattctatgagctaagtagcatttctacaggattttaccttagagacctcaatctcaaactttttataaaagtgtactttttccaacacagagattgtttccaagtttgatgcttgacccaaaagccacgctggtataggaaaattgagtccgattagtgttcagcctctaatgcctggaattgttgtgtgtggactagcagcagtgtcatttcctggaatttggggtcccagaccagaatttctcaatcaaatctgtactttaacaagatccccaggtgatctgaatacatattaaatgtgggaaacactgttctagaatttccatctgatatggtttgggtctgtgtccccgccmaaatttcacgttgaattgtaatccccaatgttggaagtggtgcttggtgggaggtgattggatcatgagggccgac

SEQ ID NO: 916283 - DNA, 623 bp, Homo sapiens
tctcgtccctgaggtcagaaagaacccctcccccgctgccctaggactcacagatttcttcacaaaagacacaaaytctgcatggtcaaagcacatcacacatgttctattttcaagtttctctgttttattgtgtttgattttttttctttttttttcctgaaacaggatctcaccgtgttgcccagactgcagtgcagtggcacaatctcagctcactgcaaccttcacctcccggttcaagcaattctcctgcctcagcctcccgagtagccgggattacatgtgcacgccaccatgcccagctaatttttgtatttttagtagagacagggtttcaccatgttggccaagctggtctcaaactcctgacctcataatcccccacctcgacctcaaaaagtgctgggattacaggtgtgaaccactgcacccatcctatcgtgttttatttttgtttgtttttttgtttctctttttttggtggggcaggaagcagagtggaccgttttctatttgttatcaagataaataaatcaggcaaaccaccactttattctaaagatctgttttgagagagccatagtcagtttccccagtgtaaggaggaaatcattcctata

SEQ ID NO: 916284 - DNA, 341 bp, Homo sapiens
ttctggggaacactgtctagggaaacgctaatagtgatcaagtaagtttaggccaatcagttttaaattaaatatatgatttttaaattctgattttcttgcgaaggtgatcacttctaatctctttccctagctttcctcttaagcaacagagatatatctgtacatctttattgaacatctgtatatctttacatccctactgtatatctatacatccgtatrtctctactgtacatccatacatctatacatctctattgtacgtctatacatctgtctctactgtacatctatacatctgcatgtctctactatatgtctgtacagctatacatgct

SEQ ID NO: 916285 - DNA, 437 bp, Homo sapiens; identical to SEQ ID NO: 915156

SEQ ID NO: 916286 - DNA, 520 bp, Homo sapiens
tagcaggtgttaggttgtttggggggtggttgcatcaagttagaaagttaaatatatgttaaaaaggtatatatggtgccaagttaacaatgggttgactacgtagttttatgcatgccaactgrtctactagcactatgattcccagaattatcttctgggaaacctgagcaagatttggaaggcagaagtgaacggcagccattgactcttcaaagaccatcattgttagtgcaacaagggatagaagcagaagtgctggcagattccagccctcattcatgttttccctcctctgtatctagctcttcttcctgactgcaagctttgctgactgtgataggtaattttatgtgtcaactcagagggcattttgagatgaaattaacatttaaatcagtgaactattaggtaaagtagattgccttccacaatgtgggtgggcctcatccaatacgttaaaggcctgaactgaacaaaaagatcagcctccctgagcaagaggaacttctccaacaga

SEQ ID NO: 916287 - DNA, 633 bp, Homo sapiens
catctttggagaagggggcattatttattacctaaaaaaaatagggcttaattcattaactccaatttgtaatcatctgaaatcttcaggctgctttcaccagaattcccatcaaaactagatcttcacattgactttgtgttggtttctaacagacctttcaacctatttagcaagtctagaagtgattttctgctatttgatgtagctccagctattccaatcagcttgtaaatttcatgaactcatttggtatgctttcctccaagtcaatgttttctaaaaattaaaataggacctatttgaaagatgaccttaactgatattccttgggtatttataaccagtcagctaaaatccacttagcaatactgtcatcctgcccatatttttctaattcattcataatgcaatcatatacaatacctttctgaaatatttggtatatagttttcactagacataacatactttacaaatggtagtctgttataaattgttagtgaatctgttctggctcttagtgactagcaatttctaaaattaataaaaactggcagacaaaagtaaactggcccagagtctacaatttctaaagtatgctttttyctactttttgaaataaagttgccg

SEQ ID NO: 916288 - DNA, 646 bp, Homo sapiens
tgagagagtctctttctgttgcctaggctggagggcaggggcacaatctcggctcactgcaacctccactttctgggttccagagattctcrggcctcagcctcctgagtaactaggactacaggtgtgtaccactgcgcccagcttatttttgtatttttagtaaagatggagatttgccatgtttcccaggctggtatcaaactcctgacctcaagcaatccacccacgttggcctcccaaagtgctgagattacaggcatgagccatcatgcccagcaaaatattgtattttaatttaaatggagggtccgctgttacttaaactatcattgaataacaatgtttagaacaacaaagaccatttctgtacgctagggacagctattagacatttgttcaagtaatttcatatttactacaatacactttttttttttgaggcagagtcttgctctgttgtccaggctggagtgcagtggcgcgatctctgctcactgcaagctccgcctcccgggttcatgccattctcctgcctcagcctcccaagtagctgcgactacaggcgcccgccaccatgcctggctaattttttgtatttttttagtagagacggggtttcaccatgttagccaggatggtctca

SEQ ID NO: 916289 - DNA, 646 bp, Homo sapiens
tgagagagtctctttctgttgcctaggctggagggcaggggcacaatctcggctcactgcaacctccactttctgggttccagagattctcgggcctcagcctcctgagtaactaggactacaggtgtgtaccactgcgcccagcttatttttgtatttttagtaaagatggagatttgccatgtttcccaggctggtatcaaactcctgacctcaagcaatccacccacgttggcctcccaaagtgctgagattacaggcatgagccatcatgcccagcaaaatattgtattttaatttaaatggagggtccgctgttacttaaactatcattgaataacaatgtttagaacaacaaagaccatttctgtacgctagggacagctattagacatttgttcaagtaatttcatatttactacaatacactttttttttttgaggcagagtcttgctctgttgtccaggctggagtgcagtggcgcgatctctgctcactgcaagctccgcctcccgggttcaygccattctcctgcctcagcctcccaagtagctgcgactacaggcgcccgccaccatgcctggctaattttttgtatttttttagtagagacggggtttcaccatgttagccaggatggtctca

SEQ ID NO: 916290 - DNA, 571 bp, Homo sapiens
gacttatgatctgtaacaaaaaaagaaaatgctttaaattgtgagtcaaactgccactttttttttggaatacaattttyccttaaaagaactaatgacagacggtggttattcagatttaggttatgtggcatttttttcaactaagcctgtctctttaagaaaaacaaccaagagcatttgttttcaatggaaaaacttgcgttttcaggcaaaaattagtattctggaaaacttgtatctgctaccatgatccttacagcttcccaacaattattttctgatgcagttaccaatgctggtaattaaccaatatgatgctttgatattatataatgaaatgtgttaaaatttggaagtgctacataacttagggaacccaagtgaccaatacatgatgttacaaaatcacgcaaaggtaaaagatgaattttagataatagagcagaaaaagttcatcaatatggtttcagattccattttgcaactaacctttaggacactaccatttggtatagtgtcttatccacacactacaccaagataatacttctctgttatctatactaca

SEQ ID NO: 916291 - DNA, 681 bp, Homo sapiens
tcaataaataattgttaaatgaatgaatgttcaatacattttgaatcctcaatctctcccgtttttttttttttttggtctacaacccatcttttccctttctaaaccacattctatcctggttaaattctcagcatagaaccttaaaagcacctcaacctaaaaatctgtacttcattggtagctaaccggtaacaggaaaaggacatcaaaactactttcaccttttaccacatgatcttattttattatgatattctcttatgataccaagatatagcagtcttatgaggaaatgagagtgaaaaaggcgagtgatgtcttagtattcttgtaaagataattttgacctgtggaactgctgatttagataagtatatccccattgtttccaggggcagatatgcagatttctcaccacctagctgtttgctttgattgcttgtatagaggtgtctgggtggtaatgaaagcagattacttgtctggcctgttggtatggttaattcaaagctgactgtacctagataaaaataattctctataattatggtttatcattgctcttaaaaattgaagtcactgcttgttaccaatgcgaacatagygtctataatccattctatatcaacacacaagttctataataattacacggcttaaaatattcagcaagacaat

SEQ ID NO: 916292 - DNA, 576 bp, Homo sapiens
ggcatgcacctggtaccgcagccatttgggaggctgaggcactagaatccttgaaccaggagttggaggtggcaatgagctgagatccaccactgaactgcagcctgggcaatagagcaaggctctgtcaaaaaaaacaaaaaacaaaaaacaaaacaaaaaaaacccaccaaaacacaaaaatcaaaatggcagtcactgaaatagtgcagtactgacatgaacagagacagactgtaaccacaggtggcggtgcacacctgtagtctcagctatttgggataatcactggagcccaagagctcgaggccagcctgaacaacacagtgagaccctgtgtctgaaaaatgttgttttgaattgatatataaaagaagaaaatatatattactgaggagattaaggattactcagcaataatttggaatcactggctatgaatttggaggaaaatgcaaatatagattgtcactatatatggaatgaagtctrtatgggattaataaattcttaaaaataaaatcataggaaaatgaggtaaaaattaattgaatagtaaataaacttttaagataa

SEQ ID NO: 916293 - DNA, 623 bp, Homo sapiens
acctgaacatagctgaggctcaattaacaagaatgacagagggagtggattttgggtaacctaacagtaccaactgctatggcccaaatgtttgtgtctccctataaaattgtatgttgaaatgctaatccccaagggatagtattaagaaatggggcctttgggaagtgtttagaccatgagggcagggccctcttgaatgggattagtgcccttataagaagggcctgagggagcttggttgctccttccatcaagtgaggatgcaggaagaaggaactttttgtgaagaatgggccctcaccagatactgaatatgccagcactttgaggttggacttcccatgctccagaactgttagaactaaagtcctgctctgttgcccaggctggagtgcagtggcgcgatctcagttcacggcaacctctgcctcccaggctcaagtgatcctcccacctcagcctcccaagtagctgggattacagacacaccaccaagcccagctaatttttgtatttttagtagagaccgggttccaccatgttggcctggctggtctcgaactcctgacctcaagwgacctcgacctcccaaagtgctgggattacaggtgtgagccacc

SEQ ID NO: 916294 - DNA, 608 bp, Homo sapiens
tctagcctcaatgcggagagatggactgaggaaatgtacgtgaaacaagcatgggagagtttatagagtattagagaaatactaagcctagtagtttaatacaactgaggcctaaagatagccatgttagctcttgcttattaattttttttgttttccaaaaacaatcttgaggcatgtaaaaaaaaaaaatcctgaaatatccatatatagggagcccttagagtgaaattcgttgagcttttactatgtcccaggcactgttctacatgctttccccatattatcaaatttgacactcataataaattgtaaggaagacactgttacagatgaggaaaccgagacatagacgttaagtagctcactcagaatggcattagtttaataagtgaggaaatcagaattctaactcaggcaacctcaatccagagcctgcactcttaaacagaaagctaattttcaattttgtattctccagagtttaaggatcgtatgtcttcgtggaaaactatatatcctaagagaaatgatacagcatagtgcctgatacatagtaatcckgcaagatatgctggcattaatatgataacaaaaatcacattatt

SEQ ID NO: 916295 - DNA, 674 bp, Homo sapiens
acaattcacaatacaaaaaattcaacaaaaaaattaaaacatgatgaaaaacaaccaaacaaatcctacagttgaagaattcaatgaattacatttaaaaaatacaataaagagcttcartaacagacttggtaaagcagaagaaagaatctctgaacttgaagatataccatttgatattacttaattgtagaaaaaacaagtgaaaccctacaagacttatgggacatcattaaaggaacaaacgttcatactatgtaagttacagaaagaggagaaaaggtaagaggcatatacaaactatttaatgaaataatagctgaaaacttcccaagtctggagagagatacagacatccagatccagaaagctcaatgattcccaaatagatttaacccaaaaaggttctctccaaagcacattattatctgttgtcaaaagtcaaagacagagaaagaattctaaaaatagcaagagaaaggcatcaagtcacatttaagaaaatccccattcagctaacagcagatttcttcacagaaaccttacagtgcagaagaggatgggatgatatactcaaacagccaagaatgctatgcccagcaaaactatccttcaggaatgagggagaaatacagtttttcccagacaagcaaaaactgagggaattcatcact

SEQ ID NO: 916296 - DNA, 609 bp, Homo sapiens
ctacccgtgcataaactgggcaggctgtagacagcaggcttgccaagtaaatactacagccttcctcccaatattgagccctgtcccattgatcctgcaggggagatgtgtagggcatttgttcacggggaggccacaagtttgggcctctcatcactgtgacctcacacccctgttgagtgtgtcgtaaacagaggagccgttcttcaagccccctgccctgagtgcacccctctcattcttttgttattattagcaaattcccccagttcctgatcattctttcttaagcctttagtgactgggtaaggttcttgtggctgactccaagctttcttctaaaaggaatagattctaggggtgagtagaggagacaggaatgtcggagtcagagctcaggaatctgggttccagccccaggtcaatcctagataaactagagggctccttaacttacttccctaggttgactctgggtttttttatcacgctcgacaggactccttatgcatttcttcgaaagagcatccagtcttaacatcatcatttggcctcatttggtttaagaagcagaattagggyaaaagcaatgatggataagcctcattt

SEQ ID NO: 916297 - DNA, 606 bp, Homo sapiens; identical to SEQ ID NO: 913244

SEQ ID NO: 916298 - DNA, 581 bp, Homo sapiens
acttaaataactctatacaactgagaaacagggtcatttcagtatctcagagttttgcagacagcagcaccagaatatagtccttcctaagtaactttaattttgggggaaaataattagcaagacagaagttacttggaatactaaaaatcaagagatgatttgagaggtcagggacccctcttggccatatggaacactcaaagtgaggcacgcatactcataaaagtggattagatgttgactgggtttggatgataagcacttggtcccaatgaacttcaaaagtaggaaggcaatggccccaataaagtaaacagagtggctggtaagccttctccctgctcatataccccctctttcactcttatttagagattcattattctgagttttcttttctcccaaactttataaacaaatgcacatgtaccaaaggagacagtttattaaggtgcccaccacacagcctggccccaaaattcttcttattatcaacatctaattataatagaacatgttcaatayaagaatgccaagtgagtggatagcccaacactttttccatccctcctttggtg

SEQ ID NO: 916299 - DNA, 555 bp, Homo sapiens
aatgactcctgtaagattgcagactgttgatagccaggtagaaatcatccctttaggaatgttctagcatgtgcatgggcrtagatgtgagaagaatcacagcctcctcatgtgaaacaagggctggccaggggtcttttttagaggttcctcggggctggagttaggacaagtatttccagctcaatgcactatgggaaactgaagctaaaggaagagacagagcaaataaggtctttaacgccaaggccacctagcatgtgactgtgaggacagtcaccctccaaggcaggtcacatgaacttagagcccacctttttaagggcaagactgtttggcttcttgctctggtggaggaatgaagccaagtctttaatttgcatttcccaattgagtggaatcaatctcttttgtatcctgaaatactgtgattgccttgattgggtagtatctttacatgctgaattccaaaccgccagctacagacacacattctttatttgcaccttgtctttatatagcctgggacacactcagaggagggtgagccacatt

SEQ ID NO: 916300 - DNA, 629 bp, Homo sapiens
cctgtaattccagctattcgggaggctgaggcaggacaatcacctgagcccaggaggtggaggttgcagtgagccaagattgagccactgaactccagcctgggcgacagagcaagactgtctcaaaaaaaataaaaaataaaaaataattgtaaaagtgaaattcaacaaaaggattaacatcaagattaacatgaactgatcctgtgatttccctacaaggggaggaaaagctacgtttgaggctctttggatttttgcggggctttctttccccattttatttagaataaggcaatggaagtgcagctcttgcttctatactaagcgcattttgaaagactcattgacaccaaacatcaatgaggaatgaaacattacaaagatgctcccctttaaacaaacataaagtcagcgcttttaaatattatgtgcttcttggacaggtattctaattcaagacagcatctcacacaaactggagctggcgatcagtcgaataacctggctgacatcactgataaggccaaggactcccagcaccttctgacaaacctctgtttcytgcttcttgtctgaagtacactgtttgcttggcaaaagccaggagacgtgagaacctcccacag

SEQ ID NO: 916301 - DNA, 616 bp, Homo sapiens
gtctgcataattttcccaaaaacatttcaacttggtgcatttgggccctcttaaagcaatatagtctctgtaaatattccattaaaakaatcgaaatgattaagataatttaaaaattgtttaaatgtaaaaataacatttaaaattaaataaatacataaaaataatccacatgattgattgtgttcaattgttccctggttgtccccactcaactctggcctcctatcatcaagaggaactttttttttctatattaattgcctttgttccttctacagccacttggctctgatcatatcactcccaatccctctggttatcccactaagaaacctggaagtcattcttaatgctttctttccctctcccttacctccatatttaagcaatagcaagccctgatagttactctgggtaaaccccaaactatcccctcttcacctgtgctgccacatccagtccagacaatcagcatctcccacctgctctattgaagcattctcctaattttgcatccactctctcttcctgctgagctcttctctgctcagcagccagaatgaccttctgaaaaagcaaatctatcatgaaccttgacttgatccttttactt

SEQ ID NO: 916302 - DNA, 689 bp, Homo sapiens
cttcttaggaatgctttaaaccaactcaacctttttagattaagcatagatgagcgaaatacaatatggaaatattagttttacttaaaattctgaaaaagcaacaaaatattatattcatgtagartcaattgtgaaaaaaactgattcctgaagccacaaagtctacacctttattgtatcaactttatgttcaattaatatttttaagaatatttctatgattaaaaattaattataaatcctatcaagaatcaaacttactaaatgttaactttaaaagccagtaagatctacaacacagatgaaccttgaaacatactaagagaggctggttgtggtcgctcatgtctgtaatcccaggactttgggaggctgaggtgggcagatcactggagcccaggagtttgaaaccagcctggctaacatggtgcaaccttgtgtctacaaaaaaatacaaaaaatgagcagggcatggtggtgcacccctgtagtcccacgtacacagaagactgaggtaggaggatcacttgagcccagggaggtcaagactgcagtgagctatgattgcaccactgggctccagcctgagcaacagagcgagaccttgtctcaaaaaagaaaaaaaaaaaaaaaacccactacgtgaaagtcagtcacaaagggccacatcttactgtttcatttat

SEQ ID NO: 916303 - DNA, 610 bp, Homo sapiens
tttaacagaaggactctttggtgtttacgaaactgttaaaaagactgggtagagactctcgactggcttcccaggaatggatcacacgcggaactggccagccaaggcagctgttagcactgccacagccaataatagcatcaggaagctgccactgtgactggtgaatccagcaacggccttgttagctgtgattgagggatctgaaaaccaccactggaactgccggcttcagagccttgccactggcacctctgctaatgctgccaggcacacacatatccagaaaaagcattcactgattgtgcttacagcagaaaccacaatggcagccaaagtgtggcggccactttacttctcgaataaatgcatccaattggtcacacctaattgatatcaagaaccttagctgcaagggaggccggaaaatacaattatatatagaaaggtatttaccaaaccatgttagaagcttttaaactattttaaaatagctacataacttttcattaaatatacatacatagakatatatatatgcatttaattaatcaacccccccacctatttaggatactttgtttccagagttttatattatgaatattaa

SEQ ID NO: 916304 - DNA, 663 bp, Homo sapiens
ccagatgcttcttgggccctctggaagccatggggatgtttccagaccgaaaggagggctttgctggggagcagatgtgctgcctctccccgacccaggattttgaggccatgtttccgttaakctggaccgagagccctctgggagagggaggcaggtcgtagggggcgggggtgagggggagcgagatgaggtcgtcgctggacgctgggctcccttgtcgttgtccttttccccagaatccatggtcaggcctagggagccacccctgggtgctcgagatgagtccccaccctcactgaaggtcggtcactggatgtttgtgtgcatcgtaaggggcccaccgaagtcccgaagccttctcagggaccagcgagaaagaggagcaggcttgggagacagggaaggaaaatgcaggggaaagggctcacccctcgaccccaggtaaaattagaaggaacgtgtggcaacccaggtgcagctttggtcgctcgctcaaggactttgctagtcactaccattaattaattaatcactatcattaactaccaaggacaccgtttttattcccctaaaagcgtcaccttgaggggaatggagaattgggcagcagctatgcaaatcctgggacaggagacactgcctgaggaccctctctcactc

SEQ ID NO: 916305 - DNA, 470 bp, Homo sapiens
gtggtctgagaactgatggtttagaaaactgtacagacagttctaacatgcagccagcttgagaactactgggtttagacaagaatggatttttttgttttttgagatagagtctcactctttcgcccaggctggagtgcagtggcacaatcttggctcactgcaacctctgcctcctaggttcaagagattctcctgcctcagcctcccaagtagctgagatgacaggtgtgcaccaccattccgggctaatttttgtatttttagtagagacagggtttcaccatattggccaggctggtcttgagctcctgacctcaagtgatccacctgccttgccctcccaaagtgttagkattacaggcatgagccactatgcccagctaatatggtttggttctgtccccatccaaatctcatcttgaattcccatgcgttgtgggagggacctagtgggaggtaattgaatc

SEQ ID NO: 916306 - DNA, 682 bp, Homo sapiens
agttcctgtatccagagtcaaacctaaactcaacagtgggtattccaggcatatgtcaccgtttgagccctttgcccatcacagggtctcacttgttccacacaaggctcctcatggctccccacttgcaccccctgttttcctgccactctgatttttttttttttttttttgagacggagtgtcgctctgtcgtccaggctggagtgcagtggcaggatcttggctcactgtaacctccacctcccaggttcaagtgattcttgtgcctcagcctcccaagtagctgggattacaggcatgcgccaccacgcccatgcctagctaaattttcagattccacccgcctcaatctcccaaaatgctggtattacaggcatgagctaccactcccggtactgccactctgaatttgatgctctcctctgccaaaatagtcttagaattgcaaacccacatgccacagatgtctctgcgaggcccttcatgaacccgttcctgaccttccttcatgcttagaatcatgggtatcttaccgtgtgatgctttgtagctggttattagcatacatgtgcrtctctgtccattagattgtaaaatgctggactgaggcactgtgtccaactccttccatctgaattcttcacagtgcctgggacattttgggccgcggtaacaggaa

SEQ ID NO: 916307 - DNA, 604 bp, Homo sapiens
acataggtaaatgtgtgccatggtggtttgctgcatctatcaacccatcacctaggtactaagcccagcaagcattaactgtttttcttgatgctctccctccccatccccatccctgacaggcctgagtgtgtgttgttcccctcgctctgtccatgtgttctcattgttcagcttccacttataagtgagaacatgtggtgcttggttttctgttcctgtgttggtttgctaaggataatggcttccattattccagcttcatccatgtccctgcaaaggacatgatctcattcctttttatggctgtatagtattccatggtgtatatgtaccacatttgctttatccagtctatcattgtgggcatttgggttgattctatgtctttgttatgtgaatagtgctgcaatgaacatatgcatgcatgtatctttgtaatagaatgatttatattcctttaggtatatacccagtaatgcgatwgctgggtcatatgatatttctggttctaggtctttgaggaatcgtcagactgtcttccacaatgattaactaatttacattcccaccaacagtgtaaaaacattcctatttctccaca

SEQ ID NO: 916308 - DNA, 604 bp, Homo sapiens
acataggtaaatgtgtgccatggtggtttgctgcatctatcaacccatcacctaggtactaagcccagcaagcattaactgtttttcttgatgctctccctccccatccccatccctgacaggcctgagtgtgtgttgttcccctcgctctgtccatgtgttctcattgttcagcttccacttataagtgagaacatgtggtgcttggttttctgttcctgtgttggtttgctaaggataatggcttccattattccagcttcatccatgtccctgcaaaggacatgatctcattcctttttatggctgtatagtattccatggtgtatatgtaccacatttgctttatccagtctatcattgtgggcatttgggttgattctatgtctttgttatgtgaatagtgctgcaatgaacatatgcatgcatgtatctttgtaatagaatgatttatattcctttaggtatatacccagtaatgcgattgctgggtcatatgatatttctggttctaggtctttgaggaatcgtcasactgtcttccacaatgattaactaatttacattcccaccaacagtgtaaaaacattcctatttctccaca

SEQ ID NO: 916309 - DNA, 677 bp, Homo sapiens
gtctatcattatcccattctacagatgagaaaaccgatactagaaagagtaagtaacttggataagatygcatagtattttaggtcaagattctgtggcctttccctcaactatgtaacctctgatcattccctggtcatagctaacagttcaaagcccggtattgtcacagccccagaggcagagaacaaatagctatcacctggaaatacctacctacctacctacatataggtaggtagggtgaataatgtcctcccaaagacgtccacatcccaatcctcagagcctgtgaacatgttactttacatggcaaaagggacgttgcagatgtgattctgtcaataaccttgagaaggggagattatccgggattacccaagtgggcccagtgtaatcacaaagctccttacaagagcatggcaggagagttagtgtcagagagagacggatggggtgggaaaagagagtgagagagagagagagaacagagacagaagtcagagtgatggggccatgagccaaggagtgcaagtagcctctagaagctggaaaaggcaagggaaagggtcctccctgagaaaccccagaaggaatgctggccctactgacaccttcatcttaggacttctgacctccagaactggcagaagcaaaatttttgttgctttaatcca

SEQ ID NO: 916310 - DNA, 579 bp, Homo sapiens
ctcgtgacccacctgccttgtcctcccaaagtgctggggttacaggcatgagccaccacacccggccactttttatatgttttaacagtcattctgaaatgtttctaacttgtgatttcttctttaacctgtcattagaattttgttacataatttcaaaatatttgaggattttctagatgtcttattgagttctagtttagtagcagtttggtcacagaacgtgattttagtcctttaaaatcgagacttgttttatggcctagcatctaatgtgtctttgtgaatgttttatgtgtgcttgataagaattgtattttgtgtttgtttggcgtagtggtctccagctatcaatgtagatcaaattgtttgatatttttcttcatatcttttatatctttgtgtgtatttgtgtatattctgtcagtaattgagagaagagtcttcattgataagtttggatttgtcttagactccctttgtaacattgctttatggtttttgaagctttgttaataggtatatgcatgtttgatattgttaygacttattgataaattgacccttttatcatcctga

SEQ ID NO: 916311 - DNA, 611 bp, Homo sapiens
tcaaaatgtatttttatcctaaacagctacattttattcttctatctctccaaatactttcactaaaattaaaaagaaaactaactcaacaaaagtgttttgatgatttttcaacttaactgccaatttcccccttactggtattaccaaagttaataattttgtaaaactccagagtgaatcaattatcttttggtacttaaatgccaattattgaagataaaatgaagaaacaagaaatgccatctcaataagctataaatccaaattcactgaatttaaacatcttaattccaccaaacttaaagttctaatacaatgaacttagaaaaaccaacctcactttgaaaagtattgtcagtttaaagctggtagcaataagtaactgccttttcccctcactttcttctttcctcctactctgcctatttctggtccatttccatttccatattacttacatatcatttgataaaggaagaactggtgaaaaagagaagagcttcaccttatctkcctgcctttccataaagagcatttatcttgttttcattaaggtttacatggtcaacattaaacccttgagaacagcaacattttctacctgtgaa

SEQ ID NO: 916312 - DNA, 528 bp, Homo sapiens
agtagtaacatcttcacttaacagatggagaaactgaggcttagagaggttaaacaatattcccagagttacacaatagagagcagaggcagggctggaatctagatccatttgatttcaatatccataattgtaccacgttcttaggcccagggtttttgaaaagcccatcttgggctctgagaggagaataagtaatgccatagtttgtgtgatgaatccattagggaacctgctctccatgagttttcctgggactcccagaagcaaggtggcccaaggatggtccagggcatcacctattggctgggctagaactcatacaaacagactcaaccagaactagagggtggtgagttttgtgtgatagaggcgtagaatgcagcagacactgagcattggaaacttctggctgctggcctgtgtgatgcatgyttactttgctttttttttttttttttaatgacaaaggaacatgcttttgtttgttttaggagaagagggattgaaggaaccaagggtagctgt

SEQ ID NO: 916313 - DNA, 617 bp, Homo sapiens
tctgctgcctgaggaaaccctgtgagtacgggcatggagtgctgggtttaaggaaaaaccagcctgaagggcactgtctgggaaggatgggaaataatacctaagggtggctggggaactctaatcttggaagttatatcaaaagaggacaacaaccatctgccttggaagttttaggtgcaggttttcttccagttggggaagggattggggtgtgggggcactttccctctggtggttttgtagtaaacctttccaaatggacccaactacttagatgtatggacctattaacaagaaggcatagatactcttcggctcataaccagtggaaaggcatggttcctgtattggaagcatctactactggagtgaaattaactcctagtctgttagttttccagagctgctgtaacaagtctccacaactggatggtacaaaataatggaaatttattctcttacagctctggaggttagaagtccaaaattaaggtgtcagcagggtgggtcccgttttggaggtgctgagggagaatccattccctgcctctctcccagcctctgatggttgcttcaatccttggmattccctggtttgtcagtgctgatgcatt

SEQ ID NO: 916314 - DNA, 661 bp, Homo sapiens
ctatgattgtatccttggatggctcaattgcagtctgttgaaattaaagaaaaagattctacgaaaaactataaaatggacaggtctggaagaacctctttttctaaggctatgtgtcataaaacgtacgtatttactttataaaatacatttcttgattgaatttaaaatatgttttcgttgttagaactttgatttccttgcaggttttcagaagcacattacttcaaatcctacgagcccactgtaggtgatgagaatataagcagtgaacaaaacataaaaccctggctttacagactcatagcctagtgggggagagagaaatgcacagataaataagaacaatagatagtatgtttggtgatgagtactacagagaaaggaaaagcaaagatgggggtgaggagctccaggtagtggggtggttgtcaggtaaatgaggtgggcagggaaggctcctctgagaaccttttatctgagtaatgacttcgaggaagtgaaggagacatgcagacatctgggagaagagggaatagcagatgcacaggtctcaaggcaggaggattgtcaaagaggcccccatggttgggatggagygagtgaactgggggtagtaggagatgaggtcaggtcagtgacggggagcagggcagattga

SEQ ID NO: 916315 - DNA, 622 bp, Homo sapiens
ttgcttgtcttcatcatgtatttcagcctcctgtgtcttttcctcctctttcttctttattttcccatcaattctccttgtctgcctgattttaccaccagaagctaatcatgatgcactttcctttatgataaagatgctcaccccattcactgagcatgggatccgactctttggatcttcttggtggtattcatttgctgcccattgcctgggagcacctggtaattgcagaagatattttcctctaagtgcttaaatgctggcagtccttaggggaatctgaggcttccataaaactggacttcagatgacaaagccatgctacattaatagctctagagatctgcagttgggatggcttatctttcagatgccatcattttggcttttaatttgtttgcgaacaatatcctttggggagctgcatccttcaacgtctgcctgcattatcacatgggcttcttccctgtgtgtctccagatctccctctcataattcatcggatttaggrctcaccctaatttagtttgacctcattttgattatatctgcaaaagccatgtcttttacctgagggtaacagatagtaagaacttgtgggcatcacctaagagcaggg

SEQ ID NO: 916316 - DNA, 582 bp, Homo sapiens
aaaataaaacccctgtcatttgcagccacatggatggaactgggggccattatgttatgtgagataagccaggcacagaaagacaaatatcacatgttcttatctgtgggagctaaaaagtggatctcatgaagatagagaatagattggcggttaccagaggctgggcatgggaggagtacaaaggggtaaagtgggaaaaaatcattaaatgtctttaaactgtacacttaaaaatggtaaagatgggctgggcttggtggctcatgcctgtaatcccagcatattgggaggccaaggtcaggagttcgagaccagcctggccaatatgttgagaccccattctctactaaaaatacaaaaaattagctggacatggtggtcacgtgcctgtagtcccagctactcaggaggctgaggcaggggaatcacttgaacctgggaggcggaggttgcagtgagccragatcgcaccactgcactcctgcctgggcgacagagtgatgagactctgtctcaaaaaaaaaaaaaaagaaaagaaaatgtaaagatggtaaattatatatgtatattttacctaaa

SEQ ID NO: 916317 - DNA, 572 bp, Homo sapiens
tgattgctgtcttggtactaagccagtacaaagacaggaatgaagatttacaaagttttcaaagattataatgggcccttgggtgtgatattttaaataggagctgactttaagtcaaaagctttcaaatcaaccagtaagtacttaacagaagtcctttcttcatgacaaggatgaaacacagagtggattacgcaaggtgaatctggtcagcccgggcctgaggtcacgtctgactcccagcaatggtgttttgcttggagacttctactgccctcttggcccctctgtttgacctggcatggtccatctgtagtcactctcataacatgtcatacattcctacacattctcattttctgtgctccttcaactttttttttttttttgagacagagtcttgctctgtcgcccaggctggaatgcagtggtatgatctcrgctcactgcaatctccgcctcccgggttcaagcaattctcctgactcagcttcctgagtagctgggactacaggtgcatgccaccaagccgggctaattcttgtatttttagtagagatggggtttcacca

SEQ ID NO: 916318 - DNA, 570 bp, Homo sapiens
ctaatgtttgcctaagaatgcttaaacgatggccagattttactctgagtgatactaccccctggaagtggggggaaaaaaagaaggagggaaaaaagttaagttttcattctaaacatcttcaaagcttgattggctttaataaggtatcattaattaattcaacagctaagaagggactgcaagtgttaaaaatcacggctgtcaaatgttatggcatctgggagccctagtggttggttacttaacatgatattttaggacaattctactctgcttaagcataataaaccggaaagacatgaacaaatgtcccaactgcttccctttctactcccaccccctgctctggaaagaagccctaacacctctaataccacaccactctaaaataaacccaaatgttgcacttattttactgctatgcattgagcattattatttggagatgctctatgctgcttcattaaagatctttcatayggggtggggaaactgagccacaggggatgattaaaagaaggaagaagtcagatgacttcggattctgttggctcctgactagagaac

SEQ ID NO: 916319 - DNA, 669 bp, Homo sapiens
aagaaatgcacctcttccctgctctagaagaagacattcctttcccattatggtatttgcttagccattgatgtggctagccatttgctagcatgtggacacctagggtgatgggagaagaatctctatccagttctagttaaacatagagatgttctagtaaccagatggtttttgcttggcagtttaacaagcaaagtgtttattggctttggaaacccattcatagcattgtgttttgggtattcatggttctgtctgtttttttttttttcttccagagtgtggccatggtttatgttcccatcaattttattgtgtggtaattatatgttaattctttgctcagcctactgatagaatatccttacctaattatgtatttcattgtagatttctatgtaaaataagtgtgtggtatatttaattagtcatgagtttaatttaaatgaaatgtttggtatgttgaccacatgattagcattttgtagcatctatagaagttgcctcacatcttatatattttataatttgctgtatctttstaaggaccaataaactcggacattgggtacgactctaaggtctgttctcaacttttaaatttccttatgcattgagaaacatttatgcaatctttttcataatgacagagcacattagaagaat

SEQ ID NO: 916320 - DNA, 642 bp, Homo sapiens
gctttcttggtatttttggagttgatatttttgtagtcatttggtttcctctttccaaaaaactaaatagattttatacatatttctttgtcttagttttttgggttcctggagcctttaaaaagtcataggttttgatgggtttataaccttatctactttgggctaaaaacattttgttttaaccgagatataggttataacccactgagtttgaaagccagaataatacatacagaaattgaatctgtcctaattaaaaaatgactttggagctattaagaatactggtcatctctactgaaaagttctctttaacttttccacagttctttgggtttaatttctttgtgttcctaacatatgtagtaactgcaacattgcccactattattatactttttttgtagccttgtttttctgtgaaactaaaatatgttcattatttaaaaacttcagaaaaaacctgaaaattataaatctaatgtcacccccagaggaaatcatggttacattttggtgactgctttctaggcctatttctttacctgtgcatatttacagatatgggaayatgatcctatcttcatagagataaatatgtcatatacacattttgtgttgaagcaactttttcactta

SEQ ID NO: 916321 - DNA, 579 bp, Homo sapiens
aggtggttccctccttaactcaccagagtgatgtcagaggagtcctgctataatacaagatttcaataagatccagaatcttatartaacaccaaaaatgcttaggtttcagtaaaaaattacctgtcataccaacagaaagagctaaaactgaatgactaaagacaaatatcaacactgatatgacccagattttataattatataaggaacctaatgcagcctgaaacaaatgaagaaaagtgctaacaaacaaatagtaagcctcagcaaaaaatcagcacttatggagaagaactggaaaaaaattcagaactaaaaattttaataactgaaataaaaaactcaatcgatgggctgaacagcagggtgggtaagacagagcaaagaaacagtgaacttgttgatagaacaatagaaattatataatctggacactagagagaaaatagacttaaaaaaatgaacagagccttgggaacatgtggggttgtaacaaaagatcaaacatttatgacacagaatatcaggaggagaagaaaaagaagatgaggctgaagaaagtattcaagggaataa

SEQ ID NO: 916322 - DNA, 660 bp, Homo sapiens
gttcttggactgctataaagaaatgcctgagactgggtactttataaagaaaagagttttaaggkgctcacggttctgcaggctgcacaggaagaatgatgctggcatttgcggcctctggggaggcctcaggaaacttacaatcatgtcggaaggaagaggtgagaagcaggcacgtcacatgacaagagcaggaggaagagacagagggggaggtgccacacacctttaaacaacccgatctcgtaagaactcactcactatggcgaggatagtgcatggatggtgttaaacaacttatgagaaattcgtctccataatcctatcacctccttccaggccccaactccattattaggattacaactcaacatgagatctgggcagggacagagacctaaactgtatcacccatgctaactgctgaggcttctgaagcccttcgtagggtgccagaagccacctgtctggtcatcgtgcacacacctgtttccacctgagatgaccaggctgatgtggggctgactgcttctcacctgcctggcatggggttcggctgtgtctttgctagtggtgcctggaacattacgggcacggaacatgcattttcttgtgggccgtgaaggtgcagaggccacttttcttgggtctccaggtgaa

SEQ ID NO: 916323 - DNA, 605 bp, Homo sapiens
taaatgcagcggttagaaaaagtacacatactgaggtttctttcaagattatatatagtattattcaaaagtcttattgtatatgaaaagtgacaagatttttgcaatrtgaaacaacagtagctagctaatactctagttacctttacagattgtctagttggtcacattataccttaatttttcaggatccaaccaaggcctggttaactcttactggcaatgtttgaaagggatgaaagaggtcctatgcatattactctaaattaatcttagtgcaggaagacaagtcatatttgaataactttattttgtatccctagctactgtcatcctagtatttgaaaagctccttttctcccaatgttcagaaagtcattttccaaacttgcaaatattaaaacctattcatgtctaatacttttctacttggtctatttccatgtcctgtcaatgacctatcaattaccctattcaattacccatgtcacttgagatttctcccaccagaatttaggttgcatattttcacagggcaatttattttaaaatcagaatggtccataaaactaatagctttgtgtgcacagacctaaaagatttgt

SEQ ID NO: 916324 - DNA, 594 bp, Homo sapiens
aaaaaaaaaaggaaagaaactaggtcctatttttcatgactaagaagttgacaatggtctttccaaattaagactcggcatctttgatttttgtaaacatatcctggagatcgaatgtgaacatttgatggctgatgggaagaattgaggaggattaggggagcacttgactttgccatgattctcaagttaaatccttggacctcttaaagatgttgttgatgaagctgctaaaatggtcaccagatgaatataaacaagtaggacccgcagtaatttccaggctaattttgtgcacgtgcgtttaggggcgagtcaaattaaatgaatgaggagctgatgttcatgtgaaagtaattactctcctccagtagaaatcctaatcctacaagtaactgcagaaataattaatcataactaagaagcaaaccactctcagggagaaaagctgtatctgaacttccacgtgctcttggaggatacgggtgattcacggcataagagtcatctaccaagtcatctgcaagagcgrgtgcagcttccaagagggtctgagtcagaacagataaaaggaagttcttcttaactcagaag

SEQ ID NO: 916325 - DNA, 605 bp, Homo sapiens
aacagattcttcacaaaaagaagatatatgaatggccaataaacatatgaatacattattctacatgattcgttgtagaaatgcaaattaaaaccacaatgagatgtcacgataaayccatgaacagaaaataaaaagactagcccaattgttaatgggtacatggagcaaacggaactctcgtatactgctaaacagaatacaaaatagcacaaccactaaggaagactgacaatttcttaaaaagttaaacacacatattgtaagactcagacattccattcttaagcactacccaagtgaaaagagaacatctgtccactcaaggacttggttgggcagtcatcccttggcatctgaaggggattggttccaggatctccttcagataccaaaatccaaggatactcaaattccttatatcaaattgtataacatttgcatataacctacatctattctcttatataccatctctagattatttataatcataatacaatgtaaatgctatgtaaatagttgtttactatatttgattttgaaacctattatttttattgttgtattctagtttgtattgttttgctatttatatttttgat

SEQ ID NO: 916326 - DNA, 529 bp, Homo sapiens
ttctagtttgtattgttttgctatttatatttttgatccatggttggttgaacccacagacacagagggccaactgtacaatattgttcatggaagccttcttcataatagccaaaatatctgtaaaccacctaaatatttatctattggtggccgggcacggtggctcatgcctgtaatcccagaactttgggaggccaaggtgggcagatcatgaggtaaggagttcaagaacagcctgaccaacacggtgaaaccccatctctactaaaaatacaaaaaaaacagccgggcatagtggcgagcatctgtaatcccagctactggggaggctgaggcaggaaaaatgcttgaatccgggaagcagaggttgcggtgagccgagatcgcgccactgcactccaacctgggggacacagcaagactctgtctcaaaaaaaaaaaaaaaaaaaaaaawatatatatatatatatatatatacacacacacatacatctatcaatcggtaaatggataaaaaaatatggtc

SEQ ID NO: 916327 - DNA, 596 bp, Homo sapiens
caggagtttttattctaaatgtgtgcacttttgcaattctgatgccaccagtatctcattaaacaagaatcttcatctgaccagtgtgtcttttatttacaacacacaaaaaagcgaaacgtggtaagtgaaagaagcttcacaaagctgggtatgatcatttttgccccttcttgatatgattttcttttcttcttaattcttcagagaaggaagtattaacatcgtatattaaatgcagcatctagctttgtgttcacgtttttctaatttaacacattgcaattttagtccttcaaaactataaaaaaaatcttggattaacctcaaaggaaaaatgtatgtaggcaaatgaagtccatctaaagagagtatttctccaatatggtatcacttcagtgtcaaataatttcaccactcacaacactagtccagtgctaagaaatgagacccagaactagtgtccagatacatttgcacatacagatatacaaacacatacacatgcttacatatgtacacatatacatgtgtgcatgcatgcaaatacatacatgygcaaatacatatatacatacacacacatatatacagat

SEQ ID NO: 916328 - DNA, 611 bp, Homo sapiens
ccccgtgtgtatgcctgtgtgagaatatgtgtgtgtgggtttgccatcgaaggaaaacctttattttggctgctaacatttggaaacatttagagaacaaacaatatcttttaaaaaacatcaaaggttcaaaaaaacaagacaagaaacaaactgttgtaaaatttcaactcctctaaatttgtcttaaattgaacttagaactaatctaataaaaatagtatgaagtttcaatggtgtgttgttgttgtctagtattttttggcattgttttttaaaaaccagtcaaaatttattcagctaaatattacattatttgtacagatttataataatagcttacagaagtgaactttattgttttccatgtttctattcatgtccaattttgatgacagtttaaatcatagtggacctgttatttaaatcaaaatataatacttatgcatataattttagagggtccaatgattttgaaataatgtattcataagagctattttaaatraatgtatatttaaaaatacaattttagaaattatagtactataaaacttcagaaagagaaattgcacatcaattaaataacagtagcttaactagaagataaa

SEQ ID NO: 916329 - DNA, 676 bp, Homo sapiens
ctctataaacaaggctgtaaaatcatctcattactttacccaggaaatctaacagaaacatgtcttaaaggaagtcacctataaagagggcctattttaacagaagattaaaaaaaaattcacctgtagtcattctaagggttcacttgggtacatacaataaacacataatgcaatgtaataaaatgttaaatcaagcatagtaccttagacaagtgtaaactattatttccaaaaaagtgttcagaaaatcacaaaatattcaaactttcaaaatagcttcatgtattcataaatgtatacttcaaattaaacagtataacacatttggatgttttgcaaaatgtacctaccttctaaaggatggtctgttatttcaatgtcctttttaatgcactgagttttttgggaaaaaaaaccacataagatcgtacccaagctattcaagatttacacagaatatttgatttaacatgcatatgaataaggatgaaaataagaacaaaaaaataacattttgggtcacaaaatcaagtaatttctattcatgtagctayaagtagggcacattaactctcaattttataattcctgtctataggagccatatttcagcagattccaatccttgaagccaaagaaagaaaagtataaggtgaaagttcttggtacacag

SEQ ID NO: 916330 - DNA, 538 bp, Homo sapiens
cctcccacaacacatgaggattatgggagctacagttcaagatgagatttgggtgaggacacagccaaaccatatcactgagattcagctgtatcaaagaacttgctccaaacccctagagacagtaggtagcaggaccaggacatctagtgctgcctcccaggctgaaaagcccctggggaaaaacagagtgattctgaatgtgcattcaggagtaggaccgcctggttcatatccagccccaccactaagagctgtatgactcagggaaagatggttgccagcccaccatctgtggtaggttcttaatgagcatttgagtgagagagttcatggttggtgcttagaccatgccaggtgcaatatacgtgctcaatacatgttttcagtggttgttttcttttcagcactccactctgcccctccagctactccagagcctcactgtgaagacacccccttctttggcacctcactgactagtcttcagayaggctccaagatggcggatcctctatggtaaagaggatgttgagaa

SEQ ID NO: 916331 - DNA, 603 bp, Homo sapiens
gctctcctggatgatgtcacagtttttatcctcttaaaatagcctgccttcagaaaatatatagtttccttcatgcactaatcatggggagttacgatgtaaatagagccattttttttcttatacaaggaacaagtgctctcaccctcctcccttctctccctccccatacacagaagcacacttcacttcacttatactaaacacttcacttatacttacactgcaacaaagagttgcaaatacatgcaaataaagcctttataactcccctctctcctgctggacagctccttgactcaagtatttccgaagacagacactctgataagggtctgctctgagcttcattctcagcatacagtcctgggattatttacctaccaatattcacctctgcatgaaccagtaagtcattactgacaagaaaaaaacaatttgtgattttttttaatgtcacaatttttctttttaargtttgggagagaaagttgttttgaatgtttcatcagtttctattgccaaatgaacacctgtttcagagtccctgaaagtcacacatcagaagcttctgacttcaacatatagtctgctttgaagaat

SEQ ID NO: 916332 - DNA, 636 bp, Homo sapiens
ctatctcgtaaagatacccgcagtgccatattcattgcagcattactcacaatagccaagatatgaaaggaaccaaagtgtccatcaatggatgaatacataaaataaattgtggtggatatatacaacggaatatcatttagccttttttttttttgagatggaatctcagtctgttgcccaggctggagtgcagtggcatgatctcgactgactgcaacctctgcctcccaggttcaagtgattctcctgtcttagcctcccacatagctaggattacaggcacccacgaccacaccccactaattattaaatttttagtagagacgggctttcaccatgttggccaggctggtctcgaactcctggcctcaagtgatccacctaccgtggcctcacaaagtgttgggattacaagcgtagccaccatgcccggcccatttagctttcaaaaagagattctgccaattgccacattatggatgaatctggaggacgttatgctaagtgaaataagccacacacagaaagacaartactgcatgatctcacttatatgtaaaatctataacaaacaaacaaacaaagactcaatggggaaatggggagatgtaggtcaaagaatataaagtagca

SEQ ID NO: 916333 - DNA, 652 bp, Homo sapiens
ggaaaaataaaaagaattatcaattgatgtgatcaaagaaaaatgtttatctcatggggtgttggaaaaggaacatcataaaaattaataggtagaataatcatcaaaaacaatctgcacaacaaatatkacatagctgaggggaactatcattaaaatataatgtatacaaattgctgagaaactcactacaccttctaaatcatgtcaaaagagttgtttgcatataagctgtctgcacttcttctctctctctctttttttttgttcatattcactgcaaggtggcttttgtccacccatgcaaatcactcatatgaaggtcacaatgatgtccaggtggccaaagcctgtggctaatcctcagtcctcatctcaccgagacagcagtttcttagcccttctcctacctccactggcttctcttctcagctcctctgtagttccccctcctctttccaacctgtatgcattggaggggcccaaagctcaaccctaatgctcttctgcatcttggtccctaggtgatctcacctagtcacccagcctcagatagccttaggcttaggaatcacaaatatatctctcacatgacctctagactcatatcaacctctcaacatcacaatttggatatccaacaggcatctcc

SEQ ID NO: 916334 - DNA, 572 bp, Homo sapiens
ccaggctggtctcaaactcctgacctcaggtgatccacctgcctcagcctcccaaagtgctgccattacaggtgtgagccaccgtgtctggcctgatttttttgtttttttgtttgtttttttgtttgtttgtttgttttaagtatatctataacctttgttttctctggagttaattaatgccttactttttattaataacatttgcttatttttttcccgtgtttatattactaattgagacttaaactctgccagaagtataactctttcctctacaaacacatcagttaatgctcgatttcttttcctttttgggccattcttcctggagcccttgctgctgctccaatctggaccagttatctatccttgaactagggaacgtctcttgtcctacaatctccttcgacagcaacctgggcattccctttgctcctttccctcaaaggatcctctattgtatcctacacgcagaggacatgtgccatcttttctggccatccagcactgtgaaacatccttgtgatgtttcgccaacttytgagccccacctttcccaaaacactcct

SEQ ID NO: 916335 - DNA, 397 bp, Homo sapiens
gctatcatgagaacagcacagaaaagacttgcccccatgattcaactacctcccaccagctccctcccataacatgtgggaattcaagatgagatttgggtggggacacagccaaccatatcattgtgcccctgccccctcccaaatctcataatcatgtttcaaaaccaatcatgccttcccaacagtcccccaaagtcttaactcatttcagcattaacttaaaagtccacagtccaaagtctcatctgagataaggcaagtcccttccaygtatgagcctgtaaaatcaaaagcgggttagttacttcctaaatacagtgggggtacaggcattgggtaaatacagccatttcaaataggagaaattggccaaaacaaagaggctacaggctcc

SEQ ID NO: 916336 - DNA, 364 bp, Homo sapiens
caagatagaaataagggaaggatgcatactttcaccacttcyattcaacattgcgttggaagttcaagccagagcaattagacaagaaaaagaaataaaacttataaattgggaaggaagaagtagaattatttgttcacagatgatatgattttcgtatttgtccattttcacactgctataaagaaatgcccaagactgggtaatttataaaggaaagaggttaaattgactcacagttcagcatgccttggaaggcctcaggaaacttacaatcatggtggaagatgaaggggaagaaaggcactgtcttcacaaggtgacaggaagaagaggtgccaaatgaagaaggaagagccccttc

SEQ ID NO: 916337 - DNA, 588 bp, Homo sapiens
ctgggggattaaagacatttttaccatggaattaatgacagcggggatctcaccacccagcttaaccagatgtcattaattccataaccaaaggtttttttttttttttttwaatttattctgtttttttggaaccatttgaaattcagtgctgtagccacatggcggcacctcccccgggtctctctgcaggtgcctcctgggagtgagggctttctcccgcctgcccacagcgagtgcagctgaagatggccaacttctatatatatatagttatcaaaagaagcagaacatcatgcaacagtcgtatccaaatttcccaaaaagctccccaaattggaatcagataggtctgtgcactgccctggtgaccctgaggttctcgtctcatttaacccaggagcgtcctcccgggaccagaccctgagcattctggacactgctgggaggtcttcatcaaggaaaacacgcccatgagacaactacttcaggcggggccgccagggacgccaaagccactgtcaggaggtgcttgagcaacagggtgtccccacagtgccacatcccccagcggaggccacacagaga

SEQ ID NO: 916338 - DNA, 588 bp, Homo sapiens
ctgggggattaaagacatttttaccatggaattaatgacagcggggatctcaccacccagcttaaccagatgtcattaattccataaccaaaggttttttttttttttttttaatttattctgtttttttggaaccatttgaaattcagtgctgtagccacatggcggcacctcccccgggtctctctgcaggtgcctcctgggagtgagggctttctcccgcctgcccacagcgagtgcagctgaagatggccaacttctatatatatatagttatcaaaagaagcagaacatcatgcaacagtcgtatccaaatttcccaaaaagctccccaaattggaatcagataggtctgtgcactgccctggtgaccctgaggttctcgtctcatttaacccaggagcgtcctcccgggaccagaccctgagcattctggacactgctgggaggtcttcatcaaggaaaacaygcccatgagacaactacttcaggcggggccgccagggacgccaaagccactgtcaggaggtgcttgagcaacagggtgtccccacagtgccacatcccccagcggaggccacacagaga

SEQ ID NO: 916339 - DNA, 651 bp, Homo sapiens
acctcctaagtcaatttttaagtattttattatttttgatactatagtaaatagaattgttttcttaatttcctttggattgttcattgttagtgaatagaaatacaastgatttttatgtgtttactatgtattctgctattttgctgaatttgtttattagttgtaacagtttttgtggaatttttagggttttctacatacaagatcatatcatcagtgatcagagataatttacttatttctttccaatttgaatgcctttaatttctttttcttgcccaattgctctggccagaacttccagtacagtgttaaatagaagtagtgaaagcaggcatccttcctttatttctgaccttagaggaaaagctttcagtctttcaccactgagtatgatgttcactgtggctttttcgtataatatggcttttattatgttaaggttgtttccttctattcctaatttgttgagtgtttttatcatgaaagggtattgaattttgtcatatggtttctctgcatcaactgcaatgatcatgtgtgagttttttttcctccttcattctgttaatgtgtattacattgattgatttttttttttttgtatgttgaactatccttgcactccagaaataaatcctacttggt

SEQ ID NO: 916340 - DNA, 563 bp, Homo sapiens
ggccagaacttccagtacagtgttaaatagaagtagtgaaagcaggcatccttcctttatttctgaccttagaggaaaagctttcagtctttcaccactgagtatgatgttcactgtggctttttcgtataatatggcttttattatgttaaggttgtttccttctattcctaatttgttgagtgtttttatcatgaaagggtattgaattttgtcatatggtttctctgcatcaactgcaatgatcatgtgtgagttttttttcctccttcattctgttaatgtgtattacattgattgatttttttttttttgtatgttgaactatccttgcactccagaaataaatcctacttggtcaattcattaaattccatttaattgcatcaaattataccaaatttagtttactattaatagtattttgtttaggatttttgcatcaatgttcataaggaagactggattgtagttttcttytcttgcaatatctttgtctggtattggtatcagagtaatgctggcctcataagaatgagttaaatagtgttcccttctcttca

SEQ ID NO: 916341 - DNA, 648 bp, Homo sapiens; identical to SEQ ID NO: 915197

SEQ ID NO: 916342 - DNA, 597 bp, Homo sapiens
gtcccagctacatgggaggctgagttgggaggactgattgagcccaggaggtcgtggctgcagtgagctgtgatcacaccactgtactccagcatgggcaacagagcgagaccctgtctctttaaaaaaaaaaaaaaaaaaaaaaaaaaagaatccagataggtaaagagaagtataattactgggctccttcgtagattctagtaagcaattacaggtgacaggactctggctgaatctcctatgtgtgtctttaaagtctgaactgcttcaaagttccatccattttataaaacatactgacagggcagtttacctctatctgacaccaaacgctacttccaaaaagaactgtcccttaaaatattaagtctcaagataaaatgaatttataaagttttattatacatgaggttagttgttataaagttttattatacatgaggttagtctacaaaaaaccaaaacagaagaaaaattattaaagtaactcaaaacaatgtaattgccttatgmatcacttgtcatatgctcaaaggtctaaaggacagctgtcatgttatattttactattcatctagtgttttactatcagtg

SEQ ID NO: 916343 - DNA, 522 bp, Homo sapiens
aggaagacactgttcttttcatctagacagaatataacaagcacatgaattaggactgtgaaaatagaggggatgggacagataataatagggtagtactgatgtgactttgtgactcttggatattaggaaggaaaaaaagaaaaaaaaatctgggattgcctccaaagcactaacttcagagctacaaaagttattacattatcaataaatctttcatggattaataaatacaacatgtgtaatctttaaattcttattatttataaaaactgtgctgataacatttatatgctcatttttcaaaattcagagaacatttgttgagagccacacaactactgagttaaatgttgaatgtggctgaaaaatgaatgaaagaaggaagagaaagcaccatgtggattataagcatgagaggactgccctgttctyaatttttctaccccagttttcacaagagaagattagagcttgtcagattcagacttaattttggatcatgaaacatggacactatgg

SEQ ID NO: 916344 - DNA, 639 bp, Homo sapiens
aaaatttaaaagtaacaaaatatttgaaagtttctaaatgtaaagtttcatgcaaattagtatgaaccattcctcacagatattagctttcatactttatgtatatttgtacattgcatatatttaaacttttgtaagactgatttgttaataacaaaatcttcctatatttatctctgattttaaatctcatgtatgacttatacacagcattaaaaatatatttaattatagcactaaaagaaagaagcagcagcatcctaggtttattttgttataatttgtttttgtaattttattgaagccctcatttctgaattggaatagaaacacaagtgaacacttcaaagctcttgatataaacaactgacttcaaaaagctaaacgtgtgtaagctctgctataaacctgctccttaattatgttccattttgtgtttaaaaccatacatgcgtcattttatttcatttttcccgttctgtcaggagtgttattctttagtttattttcagtcttgctttgaccgataatattttttgatcaatgaaaaggctggtgtttccaaaagtaatggtatgtaataaaactgttctactctcacaattaagagcattttattrtgtaataaaatcagtttct

SEQ ID NO: 916345 - DNA, 637 bp, Homo sapiens
cacacagcatttggctgaataattgtacaaattttacaatggaaaatgtaatgccagcaaagtcattctcctgagctataaaatgttgctttgcattcatccctaaggtatacagtatttttaaagtatacatttctgtatctgtattcatctaaatatatgtaatatatctatgtatattaaaacctttgtcttgcttttttataatgaccatggagacgtgacatgacataaatgttcttagctctcttcaatcaaaaatcttgcatcctgtaaatggtcgcttataaaaaagacaaaaagattcttaaatacttaaaattaggacctattttaggtaccatttaatccaatgattttcagttttgtatttctatattcctagtaattctttagttaaagtattctaaaatctattttcaaattttctaaaaacaattataaaaattatatatttaccttggctaaggtccataaggtagaaaaaaacaccaaggcaaagttaacttagagcagtaatgtgtaaaaaatatatggtacaactgatataaatttaaataaccactaattagtaaattcattcttatggaaacagtcttccaaaatacrggattgaaagagcagtaaaaaattgata

SEQ ID NO: 916346 - DNA, 593 bp, Homo sapiens
caatgaccctaactaattatctatatatatcctaaaaacctagaaaaacactgtttttaagtgtcttctatcttagacattatccttktatacagctgtcattcaactctagcctaaatgttttgtaaaactaatgcttcaggaagattattttttattcttaaagaactacagagagaacatttcactaatgtttgactcctctttcatttccttttcatatcgcttacctctcattttttccctctactgcctcataagttcattcatcttccttagtattttcatcctaaagattcatgtgaatttgtaccatacctgccataattaagtccatttttgtttatttgttcctgtaatcttccctgctaaatatttcccaaatacactttatttttatttatttatttatttatttttgaaacagaatctcactctgtctcacccaggctggagtgcagtggcgcaacctcagctcactgcagcctctgcctcacgggttcaagcaattctcctgcctcagcctcccaagtagctggcactacagacaagtgccaccataccctgctaattttgtatttttcaccatgtta

SEQ ID NO: 916347 - DNA, 669 bp, Homo sapiens
gaacagttaagcatagagtacagttcatataaaaaatactacttgaaagaaagaaaaaggtaaatgcatcccatagcatagaaatggaatgatactgagatttcttagaatgaatgtgttcttttcatttygattgggcagttttgtgacagaagggctttcaacctctttagtccatgtgttgtgctaaattagacctctcctgagaatattttcaccattaatttgtgtctgcaggaattcacagagagccttcatggttcaaaagactctaataagcctcctttcaactataagttagtcttatccctctgatacctaaccactagcattcattcagtagcttctgacaatactaaccaagaattacctaccatatcgattttttttttttagacagggtctcactctattgctcaggctgaagtgcagtggtgcaatctcggcttactgcaacctctgcctcccacgctcaagtgattctggtgcgtcagcctcccaagtagctgggactacaggcatgtgccaccatgcctggctaactttttgtattttaagtagagacagggtttcaccatgttgcccaggctggtcttgaattactgagctcaggcaatccgcccacctaggcctcccaaagtactaagattacaggcgtaagccaccgtg

SEQ ID NO: 916348 - DNA, 585 bp, Homo sapiens
taaacagccagcatggggtaacagtgtaagcactgtgaacatttcttctctgttcttacccatcttcaaacagaaacaaccaggagcagtttaacagtgatacttgagttatgaacttcatacatattgcttaattgtaatggcaaattaatgtgttaacatttatagaatggtactgtcattgaagtttgaatttaaatgtgggttttaacccagttctataataattgctgtgctctgggaaacactgaatcttttcaaggaggacagctatttaactataagtagagtcatttgaaatgcagaagaccagaatatttattcaaagagtggtagcaaagaagtgagatgagaactgaggtggagtgttctttccatcctagtggagagaacacagagctgtgagtcagggtatctggaatctaagcatgtctccaggcttaagtttctattgtgagtttagctaaggcattcctgttgwtaatactattgctctaataccaaaaagtgtccactagaaaatagagtaacctttgtgcctttgtaatgatagtgttcttttggtataatactctactaccacaa

SEQ ID NO: 916349 - DNA, 592 bp, Homo sapiens
gctcactaatgttcagcaaactaaagtaataggctttgttgcttcttttagtctaattttgcttttcttaaaatatgttctgttggcacttagcctctttgtcccataagctggtcctttaaaaatgagttttacagaaaaataagttttgcaagcactgaatgctacaggccactcctgaagatttgtaatacatgtggcatattatagatttgaaaagttaggtagcaaaagaacctgtttaaatttattgaatctaatgtttcccaaatgtatttgaccacataatttttctttttttccccccccaacaacatctactggaacacattttggaaaatgctagtctcataactttctgtcctccttaagggtcataaaaggctagaaacaatatggccttaaggacatgtaacaaataaagaaaagcacaaattacattatgaaagcaaataaacagtcaagattctaataatttctgataaagaatcagagtcagctaaataaactatcctttgttattattctccttgtttatatttaggtatartgtctcctgtataaatcattaccagcggcggctaagagaaca

SEQ ID NO: 916350 - DNA, 603 bp, Homo sapiens
gtgataaacatctaatttcactcttcagcatgtgagtatctggtttcccaatgtcaattattgaaaaacctgtcctttccccrttgtatgtccttggcacatttgctgaaatcaactggctataaatgtgcaaatttatttctgggtctctgtgctgttccatttgtttatgtatctgtttttaatgccagtactatgctatattgcttactaatagagttgtagtatattttcaagtcggctagggtgatacctccaacttcttcttttggctcaggattactttcacaatttgtgtacattttgtaattccatatgaattttagaatttttttatttatgtgaagaatgccattggtattttaatataaattacatttaatccatatgtcactttgggtagtatagacattttaataatgttaattttattttaattccttattaaacttaaatacatcagtcaagttaggcacacacaaaacaaacaaattaaatgaataaataaaacaaaaaggaaatctgctagggatttgattagaattacataggatctacagattggtttggaaaaactgacactatcaatctcccaattctttt

SEQ ID NO: 916351 - DNA, 545 bp, Homo sapiens
gtagataatttcaaaacaaggtggttactgttactgaaattgtaaattatgtaggggctgtctgttttatgtctgatgtatttgttaatatttagaattcctatttctgaaaaatatgtcaagcttcttattacaatacagaattgtattgtaatgtatatattacattatgtatacataaatatatgtatacatatatacaaatgtataaatttataatgtatataaaaatgtatacagaacatttttaatcaaaataaactaaaaactagtggatggtagcagtgagcttgatattagtaattcggtaggacatttggattgaaatgttctagtttcttaacattcaaggagagattccaaatctgcttatcttttattttattttattttatttttttttttttgagacagagtctcactctgtcgcccaggctggagtgccgtggcgcaatcttggcccactgcaagctctgcttcccaggttcaygccattcttctgtctcagcctcccgagtagctgggactacaggcacctgccacca

SEQ ID NO: 916352 - DNA, 757 bp, Homo sapiens
attcatgatggaaagagatgttttctgtttcagatctgggttatctaaagtatgccatagcccttcccatattataccctcctcagaacttttctcaagaaatctgaacaggtccagatccgtctctctctgctgccactttggagagctgcaacacagcagggtctaaccgagtctagcaagcaacagaggcacttaatgcattgaccttatgtggggctattggaaacctctgactcagcacaccagctccccaagggacggaaggaggcattgctaggtgcgacaatctacctgcacagcaagatattttcttagcaaggggttttatccgatgacttgtggctaagaaacaccataactcagttgtttattctattcccttctcttcttccccgccttattcttttgtcccatcctcctgccttcttgcaaacagcagtggcctaatcaataaagttctcttagttttacaaggaaatttgacaggattattagaaaccactaagaccccagacaacactgtcaattcaggctccacttttgaggtttttcagaaacatcatttgcagattactcacttgaatagaggctagttgaggactacgagttgagatgatctgatctataccagagttaccaaaaggcatcaaacagcaataaattggtagastaaaacaagatggctcttgccaactgtctatgtttttctcacgtagaggtaaatgcaactctgatttgcaatccatgctgagga

SEQ ID NO: 916353 - DNA, 614 bp, Homo sapiens
tttttaataaagagaaaataagaaataaacaagaaaaaataagcttatccmaggaccatttctctttaatccttcatttttcaccaagaaacatatagttggtgctaagaagttttttttttttttttaaccaaccacaaaaagtttccaatgagtttcttaagaacttgattttattacagggcaagtaattatcacaaacatttaacagtaatttaaatgattttcctacttcattgtaaactcctgaaggatacgtttatttgttggagtctgagactgacattttaaaatgtatgatcctaaatttgtatttcccccagcatccccaaactctgcctttcctctaaaactttactcactgctctgacatgttttgttgactgaaaacattctctacataaacttcatggagttagtgttgaatttctgcagtgaatgcatttttcatgattaaaagtcacagcatgcttcttgtctgcggaacaccgttctaggagagcagtcattcttccttatgagttcctaagtcacaaccagttttaaactttgattcatttcaagatacgtagatttagcaacaaaattgtggctctgtgaatttgggacaaagt

SEQ ID NO: 916354 - DNA, 614 bp, Homo sapiens
tttttaataaagagaaaataagaaataaacaagaaaaaataagcttatcccagraccatttctctttaatccttcatttttcaccaagaaacatatagttggtgctaagaagttttttttttttttttaaccaaccacaaaaagtttccaatgagtttcttaagaacttgattttattacagggcaagtaattatcacaaacatttaacagtaatttaaatgattttcctacttcattgtaaactcctgaaggatacgtttatttgttggagtctgagactgacattttaaaatgtatgatcctaaatttgtatttcccccagcatccccaaactctgcctttcctctaaaactttactcactgctctgacatgttttgttgactgaaaacattctctacataaacttcatggagttagtgttgaatttctgcagtgaatgcatttttcatgattaaaagtcacagcatgcttcttgtctgcggaacaccgttctaggagagcagtcattcttccttatgagttcctaagtcacaaccagttttaaactttgattcatttcaagatacgtagatttagcaacaaaattgtggctctgtgaatttgggacaaagt

SEQ ID NO: 916355 - DNA, 636 bp, Homo sapiens
cttttgatgatagatacaggtaggtaggtaagtaggtagacaaattctaaactttattatttttgtttggttggctggtttggtttcgttgttgttgttgttttgttgagacgctgttgagacagggtcatgctctgtcacccaggctggagtgcaatggcacgatcatagctcactgtaccctctacctcctgggctcaagggatcctcccagcagagcttcccaaatagctgggactacagatgcctacacttaaaaagatcaaaattttccacaactgagtgcagtcaaaaggatgtgctacagagtcagaaaacaagcctaaaagacacgtttaacagggctgtgaagcacaacagcattgctggaataacggtgcttaggaacaacatttattcagataaataatttctcttgtttatgttctacaaggaaagaaacacatatttcactagattagtataagttctaaataagataacatatgtaacaactagtacataataggagatcaaaatggtatcgtttgctttgagaaagttatatatatattatatacataatattttatatatataatctttatatatatatatataaattttttttragatggagtttagctcttgttgtcc

SEQ ID NO: 916356 - DNA, 546 bp, Homo sapiens
aagactcattatcttagttcatatattcgctcaacaaatatttgttaaatgccaagttctgtgttaagcaccagagatacascggtaaaacaatctgatacggtccctacccacaccagtatacttcattaccacttgctgtggttctcaaacttggctcacattagaaccacctggggagctctacttgactttatttaattagctggcctggagcctaagtccctatgttttataaactttgtgatggattctaatatgcagcctgtgctgagaaccacctctttagtactttgtgccaaacaaaaccaatatcataatcatccgggaaagtttttaaaatccagaatcctgtcctgcccctacctcctcctactttcctgaccaaatgaccccatagccactgagattaggacccaggaatctgtatttttaaaagctccctttgtgattctggtgcagctggccagcagacccacatttcaggagtattagaacagttgccaacatataaaacaaaggtttttagaagaaagagcttacaaa

SEQ ID NO: 916357 - DNA, 666 bp, Homo sapiens
gtttggtgcacctattgacgcgtcctctaagttccctcccctcactcttcaccctgcaacaggccctggtgtgtattgytcccctttctgtgtccatgtgttctcaatgttgaattcccacttatgagtgagaacatgcattgtttggttttctgttcctgtgttagtttgctgagaatgatggcttccagcttcatccatgtccctgcaaagaacatgatctcattcctttttatagccgaatagcattccatggtgtacatgtaccacattttctttatccagtgtattattgatgggcatttgggtcggttgcatgtcttcactattgtaaatagtgctgcaataaacatacatgtgcacgtgtctttatattagaatgatttatattcctttgggtatataaccagtaatgggattgctgagtcaaatggtatctctggttctaaatcctcgaggaatcaccatactgttttccacaatagttgaactaatttacattcctaccaacagtgcaaaagtgctcctatttctccacagccttgccagcatctattgtttgctttttaataattgccattctgactggtgtgagatggtatctcattgtggttttaatttacatttctctgatgctcaatgatgttgagcttttttttttcatgt

SEQ ID NO: 916358 - DNA, 583 bp, Homo sapiens
aaggatgcccactttagccacttctattcaacatagtactggaaatcctggaaagagcaatcaaacaagagaaagaaataaaggacaayaaattggtaaagaagaagtcaaaccgttgctgttcaccaatgatataattgtatatctagaaaaccctaagactcatctgaaaaattcctagatctaataatgaattcagtgaagtttcaggatacaaaatcaatgtacacaaattagtagcactgctatacaccaacaatgaccaagctgagaatcaaatcaagaacttaaccccttctacaacagctgcaaaaaaaaaaaaaaaagaatatacctaaccagggagtacaaaacactgctgaaagaaatcacagatgacacaaacaaatggaaacacatcccgtgctcatgaatgggtagaatcaatattgtgaaaatgatcatactgccaaaagcaatccataaattcaatgcaattcccatcaaaataccaccatcattcttcacaaaattagaaaacacaatcctaaaattcatatggaaccaaaaaagagcccacacagccaaagcaagactaagcaaa

SEQ ID NO: 916359 - DNA, 650 bp, Homo sapiens
aacagaagtgtttctcatcaggtccccagggacaggattgctctcagatcacagctgagaggaggtgaagccaagttacagggctgcttcaggatctacagccaggaatgaggtcasggtgtctgtttcccttggcacaggtgggtgcgacttttcccagagcctttgccacatgattctagtgataagaccaaggcctaacaaggatatagctgagtctacaggggaacaaggccatagctagtgatagtcagaaccacagttggccagccctcctctgtcttgggctccatggaggttttacaatctcctatctgactttcaaagttcccacaatggcacttttatctgtggatgattgccaaattatagttgctatgaggagataagagagggggatccccctggtttagataaagtcttccctgctccacctgtgtccatcttctagattcagtacactgttttcatgtgtctgtcatagcattgaacacactgtttggttggttggttaggtggttggttggtaagcttctccagtaatgtaaattgtagaaggtaaaaatgttttcttaacttccatatgccatcattagcgcaaggcatgacacacagttttgatatcattgcaaaataaacagaatcacaca

SEQ ID NO: 916360 - DNA, 656 bp, Homo sapiens
ggattattggatggtatgagagtgctatttttaatttcttgaggaacctccatactgtttttcaaaatmgctgtacttatttacattcccaccagcagtgtgtaagggttcccttttctccacatccatgccaacgctagctatcttttgatttttcaatcattgccagtctgactagagcgaggtaatatctccttgtggttttgatttgcatttccccaatgatgagtgataggagcacctttcaaatctctgttggccatttttatatcttctttcaagaaatgtctgtgcaggtcttttgtccattttttaattggctcttttgttgttgttgagttatatgagtttcttatatattttggacactaaccccttatcaaatacatagtttgcaagtatattctcccattctgtaagttgtctgtttgctctgttgattgtttcctttgctgtgcagaagtttttagtttgatataatctcatttgtctacatttgctttcactgctctagattctgaggtttcattcaaaaaatcctcgcctagactcacgttatggagcttttccactattttttcttctagtagttctgaatcttacgtttaagaatgtaaccatttttggctgggcgtggtggctcacgcctgtaatcc

SEQ ID NO: 916361 - DNA, 615 bp, Homo sapiens
tctggtactatgtaactcgtgtgtgaccccttaaaagtgctcagcaattatttcttgaattgtaatcatagattcagatagcctctgtcttcgcatacaytggttcaggttttattttgaaactagaggcaagtgagccaattgttcccatccaaagacagatgaaatagtaaaagctactctaaaccaaatgctactttatttaaaagaggattcacaccagtcatggcatgaaataacctctattctgaacaaagaaatcacacaaaatatcaataaccattaggatgccactgggagatattcaggttttaattttaatgaaagagaggagcagaaaagaagagaaattatagactcctcttgtgaggaaaactatttaccctgctgttcagaagacagggctattatttaatggttccaaatagccctgaatgttgcttggtgatttttttgccaagccagtttgctatacaggtgactactatagagctctcctatcattgtgaccaaggcagttgtaaaatataaacattcgtcaaaaagattgttggtaggaatgtgtctatgaagcttgttcatgtactaattcattcaacaaatatttatagagct

SEQ ID NO: 916362 - DNA, 652 bp, Homo sapiens
agatttaattagacaaatctcttaaaatatgtgtgtatattttcctttccctctttctctttctggaaatacgttttcctgtttctcaggcagcagccactctgttaagacaggggaacttcagcacagacaggttgcgggggacacagctaattagtgactgagccagagctggggcttcagggctttgtgactcactcaaaaaatgtccactaagtccttcctctgtagggggccctatgctaagctcaatggtaaatcaaaaccccacccaggattctgccctcgaaagatagagccttgtcagggacagaggcatctactaaagaatgatgtaaaaaagtaaagctgtaactgtgcaaagtattacaaggaaagctatgtccacagacaggatttttagagtctgacttttagagacttcaaaggactgaaaatatcatggccccctccataatctattttaaatgaaaacaaacaatttaaagataggtgtaaagaaatccccaaaagccttatttttcccataatgacatctttgaaagtattttatgctaaaaggaatcaaatagcatgttatgaaaaattgggagtgaccctgtttctytaatgcctgaaagagatgtttagccagcctgttggggaatccaag

SEQ ID NO: 916363 - DNA, 659 bp, Homo sapiens
tggctcaatttcttcatctgtgaaatggagattacagtaccagtcacttgttggggtggttggaaatgacataamctgtgtgatgctttggatagttctagccatgttaaacacccaatgcatgatagtgataatgttcttattttatcatagtccttgtccctgagaaggcacacttgcatgggtgcagagggattggaggctggctctggttcaagacggctgcttttcctcagttccctccctgctatcccgacagtgggggctcaggagagactgaacaattgtgcaaacaagaggagtgagcctttcaggagaccacagaactttttgttttataaaaagcttcaaatcaggctgccatagtggccttggtatttttgtatctatcttttcagcttctatttagagtgcagagttggcgtgggaatgttttcctttatttcaagctttaagtagttgttgggtaacagctgtttttaaagataatctttgaggcactgagatgctgctgtaaaaacaaatttcttgaatacaaaaaagtcttccttattttatgtgctggattttatttttctgcatgcttttgttcatgctgtcacttctagaattctctttctatcctaactcttgctcctctgctattgtcaaaatcatcc

SEQ ID NO: 916364 - DNA, 591 bp, Homo sapiens
attgcactactaagggacatatatgtgtgtcctaagaaccaacttctgggtgtatctctcaatgagatgctaacagaaatgtccacagcaaacatgaatgagcatattcattaagttgttacctgtggaaacagaaaaggagatggggtatttgttagagggtacataaaatgtattagatgtgtactatggagtgctacacggaatttagagagaaataataagtgttgatggatctcaaaacacagttctgggtagaaaaatttaaaacaaatagatacataaaacaacataatttacagaaattaaatgtaaataaggaagagggctattaaaaacagaaaacagagttttaaaacataaagaaggatatcagaagcccatctgactaatagaactgctgaatgagagataataaaatcaagagaattgccaaaaaaaaaatttcaggaatatttccagaatgaattttttttaaagtttccacattaaaatggcycaatatgtacactgtacaatgaatgagaaaataaacaaaaggcatgtcatcataaaatgtttaaaaaacatggataaaatgaaaacctaaaa

SEQ ID NO: 916365 - DNA, 540 bp, Homo sapiens
aagaacaattaaaattcacatagaaccaaaacagagcccaaagagccaaggcaatcctaagcaaaaatatcaaagctgtgagtatcacattcttggacttcaaactgtactacagggctatagtaaccaaaacagcctaatactggtagaaaaacagacacaaagaccaagggaacagaacagagagcccagcaataatgctgcacaccgacgattatctgatcttcaataaagtggaaaaaaaccggcaatggggaaaggactccctagtcaataaatggtgctgggacaactggctagtcacatacagaagattgaaactgaaccccttccttataccacgtacaaaaaaatcaactcaagatggattaaagacttaaatacaaaacctaaaactataaacacccagaamgataacttaggaaatactattctggaaagaacctggtaaagatttcatgatgaagatgtcaaacacaattctgacaaaaacaaaatttgacaaacgggacctaattaaacttaagagcttctacacaa

SEQ ID NO: 916366 - DNA, 549 bp, Homo sapiens
attgcaccccagcctggctaacagagactctatctcaaaaaaaaaaaaaaaaaaaaaaaaaaagaggccgggsgcggtggctcacgcctgtaatcccagcactttggaaggccaaggctgacggatcgcgaggtcaggagatcgagaccatcctggctaacaagatgaaaccccgtccctactaaaaatacaaaaaattagccgggcgtggtggcgggcgcctgttagtcccagctgctccggaggctgaggcaggagaatggcgtaaacccgggaggcggagcttgcagtgagccgagattgcgccactgcactccagcctgggcgacagagtgagactctgtctcaaaataaaaaaaaaaaagaaaagcaaagaaaaaagaaaaaggttacttcctttatgatgcactccagagagctctacagatgaagccacagttgtctgatatcgggtattattgagttaagtgcccatcatgggggttgtggcccgttgacagtgacccatgtgtggtagtggcatctggcctgcaacttcaagggtgtcac

SEQ ID NO: 916367 - DNA, 570 bp, Homo sapiens
cctgagaagaccaccaaacacggactggttrtggccagtttacagaggctgtacacttgagtgccttttttgtcctgaaaatatcttttgacacatagggtctaactgtaatacatttgaatgttaattctccactcaaagttgaacacagaatgcatgtaacatgtagcttgcttaacattcaggcacattacccccttttcatgaatcttcacagctcttcctatatcctgttgaatatgtatactaggccaaaccattcagcttaaattcctattacccctcccttccttgaagtgcttgctttctgtatttagccagaggctgtgtttcctgcctaaaggttgtaatccttcttaagaaataaagccctccttttaaaatttttgagttgatacatttccagatttttaaattttgttttgttttgtgtgacagggtctcactctgtcacccaggctggagcgtaaaggctgcatcatagctcaccacagccttgaggtcctgggctcaagcaatcctcctcctccctcagcgagtagctatgactacaggcacgccctaccatgc

SEQ ID NO: 916368 - DNA, 591 bp, Homo sapiens
gttccttcagtctttgaatttgctgtccttggggtgaggtttttttttttctttttaaattctagttgatgaacttcaggatctgattgtgttataaggtggctttgctcaacaggtttcattactggaagattttagggggccaagcttcagctcaggattcctgaattgtatggacagcatgctctaactctgggggactggtatagggcaccagctttgttctcaggctcctctaggttagaaacctgatgtattggagaggctgaattgctcccagactgctggtcacaacactccagtggatggtgtgagccaaagcactttgtagggcagcggcaatgggatctgtctttatttactggtgcaagcagcagtggctagtggcagcgtggcagggtgtgcacttgtcggctatggcagtatgctaacaggtgccagggtgctgactttcatgcaggtgttcacagcaacaacagtggcagtatggcttgagatggggccctcactggcaactatgcatgtggttgcacyagtggtggtgttaacacaggggtgggcccctggtagatgaagaactgtgtgcaacct

SEQ ID NO: 916369 - DNA, 638 bp, Homo sapiens
gtgagagagtcatagaaacccccacatttatagccaggcttgtcaaaagtttggatggtccctgaggattgtggctgacatctgaattgagggtgatattgtgcaacagagccctttgtcttgtggagtctaacactaactccaggtagcgttagagcagaattgaactgtaggtaacctggttggtattatgaatttggtattagataattaatggtgttggactatgaaaataagtaatgaatgtacccaataccctctttattcagtggcctctagatctgagctttacttcatagtcttgggactatatttcctccactcattgcctctgattctggaagccaccctggaatactcaagtccagacagttccacgtgctccatgttgttttcacagaaacattacataatccattcctcttgtcacagggacattctcatcctctttgcaccatagaacctctttagccactaaaacattaatatagttttatgtaaatacagtcatccctcattacaagggaaattggtttcagaatttccacatataycatgcatatttaagtcccaaagttggcccatggaatggcatgtaggaaaagtcagccttctgcatatgtaagttttatatccta

SEQ ID NO: 916370 - DNA, 648 bp, Homo sapiens
gatgagatggactaggttcataagagatttattggctctgtaaatagggtgcttttggaccagggaccattctgctgggtgctcccaccagacatttttatatgcctccccattgacttgttaatgacatatgcaatagtccaataactgtttggtgtgggctgagacaatgtttgagtaagttggaacgaagaatttccctcccattttcccaagctttgtttattctgtattaccatcggggaaaacataagcaccaggacaagaagtagcaaggtcagttccttatattcagcaaggacaaaagagatatttaccaggggagggggctaagcaaagtgataaaacagcagcagcaaaataaccagtatgataaaagaagctatcagactgaggcccagctaccatattacttatctctttgtgagatggccctgttgaacaggtacttacgaccctccactgtctcacaggaataagatgggcttttcaagcatgcctgaaaatgttcagcagaaaagagctttaatctggaaagttgtgcccacctaggcattccttgtcaattgactgtagttggagtggccaggatcactcrgtaaagacctttccatttaagtaatagttggtccttcagggagcccacct

SEQ ID NO: 916371 - DNA, 531 bp, Homo sapiens
gatggtctcgatctcttgacctcgtgatctgcctgcctcggcctccccaagtgctgggattacaggcatgagccactgcacccagccaagaagtattactactttttaggctggctgggaaagmaaaaaaaaatacatttgtaagaattgtgtgtaagagggagaaaaagtgagcactggcatgtatataaatgaaatgtctattttgactttctagaaaattgccttccttatgtaacgctttttagatactataatgttttggatatgagaacattctagagagatgagctctgtctagataagttgttcctgagccacacacatatattttgtgataataatctaaaaattgtgatcaaatgagaatacagagaagacagatatttaaaaatattaagtacaaggcaatgttcaagaatttctacctctaaagttatgtttgccaaataattttcttaaaaaactataattaaaaaaattaaaaagagataaacaaaagacaaggtgaataagaacctcatcttagag

SEQ ID NO: 916372 - DNA, 584 bp, Homo sapiens
attcctttgaattcaacttctttctgcctttccttctcttaagtaaaccccaratctaaaggcaaacaggtatttggttcagtgcatggggcttcttctggccaacaggagggacaggcttgaacaaaacagcctggggaatggagattcagtgagcccttccttccaacagccattttcttttcacagtagaatggaggtgatgctcgttgccatggtgaccggctcgcaggcagagctgctgcaggtcttggtctatgcttatttgatggagagactacagttgtcctcagccgactgcagggattagagggcctgcttggggctgggaagggggtgcggccttcctaaccatgccagcaacagacaaggcaggtcacggagaaagccagcagaggcttcagagagaaagaggtgatgtggtggagacagggatggaaaagggaaggaggagggcataaggggagaaatggggccctgggcagaggcagggggaagatgctgacgctgtcatctgtgaaaatcagaggggaaaacccagacttccaaaaactggtttggaagaaatagagtaatctagggca

SEQ ID NO: 916373 - DNA, 639 bp, Homo sapiens
gatttctatagtccatttctctgattcaacctgttacaagaaagagaaataattttatatgcaataaattcataattaagtgcttcttaatttcacatctgaatttaacttttatttaagttaagtagtacracagtcttaaattctactcctggtgtcctacttactctctgtgaaccatttcggtgatactgaactatttacggaatctcactaggttcctcagtttccttctgatcaaaagaggattttcttacagaattagaactttagacctagaagtaaactctggagactacttaatgtaatcttctaactgtgtcaggttacctttctaaaaacatctgccttctaaccaaggatattttaagaaacacatcatagaaaaaggaattatgaaagcaatgaattcaggctgatacctgtcatcacaccagattaagagtaaatagatattggcccagcacagtagctcatacctgtagtcccagcactttgggaagctgagatgggtggatcccctaaggtcaggaggtcaagaccagcctggctaacaaggagaaaccccatctctactaaaaatacaaaaagaattagataatgtaatgccctttccaattcacttccaattctatagca

SEQ ID NO: 916374 - DNA, 646 bp, Homo sapiens
aaataaaaggaaagtggactgaaggtttctatgcagcaaygaacagctataaatttggacagcatctctgcgagacaaagagagtccacatacactgtataaaaaatttcaaatgttaagtctgaaaacatatatttggccttaaacttcatatagattttaacattaggcataggagtttgaattttttttctgtaaataatgaggagtctatcaaggtatttcagaaaacagatgaaatttatttacacaatagatgccacaggacattaatcttattgttgtttactgatgtgtcacattcttctaagtggtttgaaagaactaactcaatcaaatggcaaaggaacccaaaaaagaggatgaataggatatgaacagacacttctcaaaagaagacatttatgcagccaaaaaacacatgaaaaaatgctcatcatcactggccatcagagaaatgcaaatcaaaaccacaatgagataccgtctcacaccagttagaatggcaatcattaaaaagtcgggaaacaacaggtgctggagaggatgtggagaaataggaacacttttacactgttggtgggactgtaaactagttcaaccattgtggaagtcggtgtggccattcctcagggatctagaacta

SEQ ID NO: 916375 - DNA, 646 bp, Homo sapiens
aaataaaaggaaagtggactgaaggtttctatgcagcaatgaacagctataaatttggacagcatctctgcgagacaaagagagtccacatmcactgtataaaaaatttcaaatgttaagtctgaaaacatatatttggccttaaacttcatatagattttaacattaggcataggagtttgaattttttttctgtaaataatgaggagtctatcaaggtatttcagaaaacagatgaaatttatttacacaatagatgccacaggacattaatcttattgttgtttactgatgtgtcacattcttctaagtggtttgaaagaactaactcaatcaaatggcaaaggaacccaaaaaagaggatgaataggatatgaacagacacttctcaaaagaagacatttatgcagccaaaaaacacatgaaaaaatgctcatcatcactggccatcagagaaatgcaaatcaaaaccacaatgagataccgtctcacaccagttagaatggcaatcattaaaaagtcgggaaacaacaggtgctggagaggatgtggagaaataggaacacttttacactgttggtgggactgtaaactagttcaaccattgtggaagtcggtgtggccattcctcagggatctagaacta

SEQ ID NO: 916376 - DNA, 558 bp, Homo sapiens
ttgtgatttctacagttttattcggcaagagagccccagactgtggagagtgtttttaattgtgttacttgaaaggcgattaattgggcaagactgtggagggcaaactggaatgggggaagractggaggcagagagaacagtcagaggtttgtgcaatggattaaggtgagaggtgatgaggacctgaaaaagaatgggggtggtaggaatggagaggagaggtgcttgacatctggtcttttcactccaaccacaggcatcattccttaactctgttgtggagcttccaataagtaatatttctttttctttttcttttttgtttttgagacagagtgtcactctgtcacccagactggagtgcagtagcgcaatctcggctcactgcaacttctgtctccttggttcaagcaattctcctgcctcagcctcccgagtagctggaactacagatgtgcatcaccatgtccagctaattttttttgtgtttttagtagagatagggtttcaccatgttggccaggctggtctcaaacttctgacctcaagtgatcc

SEQ ID NO: 916377 - DNA, 558 bp, Homo sapiens
ttgtgatttctacagttttattcggcaagagagccccagactgtggagagtgtttttaattgtgttacttgaaaggcgattaattgggcaagactgtggagggcaaactggaatgggggaagaacyggaggcagagagaacagtcagaggtttgtgcaatggattaaggtgagaggtgatgaggacctgaaaaagaatgggggtggtaggaatggagaggagaggtgcttgacatctggtcttttcactccaaccacaggcatcattccttaactctgttgtggagcttccaataagtaatatttctttttctttttcttttttgtttttgagacagagtgtcactctgtcacccagactggagtgcagtagcgcaatctcggctcactgcaacttctgtctccttggttcaagcaattctcctgcctcagcctcccgagtagctggaactacagatgtgcatcaccatgtccagctaattttttttgtgtttttagtagagatagggtttcaccatgttggccaggctggtctcaaacttctgacctcaagtgatcc

SEQ ID NO: 916378 - DNA, 288 bp, Homo sapiens
aaataacttaacggcctagaggtcagagaaagtcttcttgaaatattagcattcaagtacasatctaaagtaggaggatttaaccaggtgaagtgcttaaatgtcagaaatatctatgactcaaacagcttggcagtgaaaaacggtagattcatattttgggaaagctgttttgtatggatgtatcaatatacagatgcgtcaaagtttcctccagttctaccgatgattacagagaatttaaataacatatatatggagtctttaagttgaattcacaaaagtaat

SEQ ID NO: 916379 - DNA, 590 bp, Homo sapiens
ctgtaaagttttaattaataaaaaagaatttgtgaggttggtcttaagctgtaaccaatctggtgtgctttgtgtgtctttctgtagcgttctgtcaaaagaaagggtaccttaggttaggatgcaggcccaggaccccataagcctgactttgtctgggtcctagactccacacctggtatataattaaaatcacttactaaccaggttttttacctaaagtaaaagttgctgagagttaacagtgcaacatgtatttgagatctctaaagttttatatgcaaggcttataaaaacagtgaaatgtgttttttagtaaaagattataagaaagcatgaaaatataaattttgcccaggataagagattatcttaaatttaataagacagagctaaaggtttaagcaagttacaggaagacaaaaattaatcttgcaaaaatgtataaacattaactaaattcaaaagggtattatatggkcttttcctaaattgagcattgaaagaaaaacacggcaaggctgtcttaagacactaatctgccgtttaacaaaaggggttgtaaagggtttgtaaagacttcaccccat

SEQ ID NO: 916380 - DNA, 555 bp, Homo sapiens
tgaaagtaaatgttaagaaggtttttcacactgaaaattaataaaatattatttatgaaaagtaaatagcaaaaaaactctttagtacataattcaagatataaagataaatatatactgtttaaaatatttgtgcatattatattaacattttatgagcttaagtcatagttacttgcacattttaatcagacatgagtttctttaacaagtctatcacagagaaaaaaatggaagtatatttaaactccaaatattaaattaagtaggattaaagaaacaaaaagcacctgttttggtaagaacctacatagcattctttcggcacccgtgagtgatgaaacagaccagagcacagaatgaattttcagcaatcagacttgattgttatagctttaattaatgtacaggcttttttgataamtatgagaaatcacgattttgttgcccgactccagaaaatatgaggttaacagtaaaggtgtaatttttgttatcaaggatttttctgttgtggttgctgttatttctggcaggatttccaaaacagttgag

SEQ ID NO: 916381 - DNA, 644 bp, Homo sapiens
aatggaaacactcaatatttttatttattaaaagtgtgaatattgacttctggttccatctctgacaagaaatcagcttggaagtcatcattcccaaatttataaaaagacaatagcttaaaaattgaagatcagcgacttcctggatcccatcagagaagtgaatgtgcaaggcaaaccaccatcccaaaaatctggagaggcaggcaaatatatagaaacacagatgagatcagattagctacagcagaaatcactggacccacacactgatgggaaaacttaaatagtaatttgatgaattattggaaaccctgcaggctgtagtcttggaaaagagcacaattgcttgggttttatctccaccaggttattacagtgagaatctgaaaaaaaaaaatcactttttatctttggcagagtgtggggaagtatctagcttgaaatattctcagtgtgttgtttgtaacatagggctaccctcaggtaaaacaaacaaacaaataaacaacaaaaacaatgacaaaagggsacgcaaaaacaaggacactagaggaaattgaaagctctgtagccatgagttacaccaagccttatcatattcaaactgcagaacacagaagaccaaggaaaaaacctagaaa

SEQ ID NO: 916382 - DNA, 624 bp, Homo sapiens
aacagaataaataacaaaaaccatattagcattttaattgatgctgaaaaggcatttcataaaattcaacatcccttcataataaaacactcaagaaactggatataagatgaacatacctcaacgtaaataaagccagtatcctactgaatggggaaaaactgaaagcctttcttctaatatctggaacatgacaaggatgcccacttttaccactgttattcaacatagtactggaaatcctagctagataaatctgacaagagaaagaaataaacggcatccaaattggaaagcagtaagtcaaattatctttgtttgcagattatatgatgttatatttggaaaacactaaaaactccatcaaaaaactgttagaactgataaattcagtaaacttgcaagatcaccaacatttctatatggctaacaacaaacacactgaaaaagaattcaagaaagtaattccatttacaagagtacaaataaaataaagcatctaggaatccaccaaaaaagaaagatatctacaataaaaagctataaaatattgatgcaagaaatcaaagagaacactaataatggaaagatattctagatmataggttggaagaatgcatatta

SEQ ID NO: 916383 - DNA, 268 bp, Homo sapiens
tcttacgtttcttttaatctacaggatctcctcattctatcactctcctcttgcaatgtatttgtttaaaaatatgctttttttaaataaaaaaaaattctcctgtagtgcttctgacagtataatttttttctgatcatattatcttatgttatggttccytatatctcccatgaattggaagttaaatctagatttgatcaaactgaggagcaatattttacgcaagactcctcatgagttgttaggtatacttccattagaagtc

SEQ ID NO: 916384 - DNA, 683 bp, Homo sapiens
attttgattttaggttatccaccttgccctcctttccagcaccttgccttctcatcagtgtcttcaaactsagatattcagtgatcttccttatttaaacaatggtgtttacataatatttacagttattcttcacttaaatttgagaatttcaatactataccaaagagaagcaaggtgaaattctgggaacctacctacttcaacaggtacacattttagaccatttcttcctatgccttccatttgaaaaaagtttttatttgtaaaactgttttgattgaaatgtatatagctaatacagtcatggtcataggcttgctaagaagtatatgttatatgttctcactcataggtgggaattgaacaatgagaacacatggacacaggaaggggaacatcacacactggggcctgttgtggggtggggagaggcgggagggatagcattaggagatatacctaatgttaaatgacgagttaatgggtgcagcacaccaacatggcacatgtatacatctgtaacaaacctgcacgttgtgcacatgtaccctaaaactgaaagtgtaataaaaaaaagtatatgctttatggacactgggtataaattaatcatttgagagccctgtttatggtacactgtaaataaaatattactgatttttaacaacaaaaataaaatc

SEQ ID NO: 916385 - DNA, 440 bp, Homo sapiens
tcaccactagactggcgaagatcttaagtaaccaataacattgcaccacaaggaactaagraaaaagggcaaaccaaacacaaaattagtaaaaagaaggaaataatgatcagagcataaataaatgaaagactaaaagaaatagaaaaatcaacaaaaagagcagttgggtttttgaaaagataaagaaagtaaacagcttttaggtagactaagtaaaataggagactcaaaatcagatgaaaaaggaaacaatatggctgagtgcagtggctcacacctgtaatgccagtactttgggaggccgaggtgggcagatcacctgaggtcaggagttcaagaccagtcgggccaatatggtgaaactccgtctctacaaaaatgcaaaaataagattagccaggcatgatggtgggtgcctgtaatgccagctactcggg

SEQ ID NO: 916386 - DNA, 641 bp, Homo sapiens
gggggcctcttctgttctgggtgccttgctagatgctagggctgccactactttcctcacacagctcctaaaacctcacttggcacagtgttggtattaagttggtgcctcctgcagcatattaaccaaaatgaagaatttcccattccaggggaagtgaaaggaatcataactttttaaaaaatgagctcatttttatattctatgttattaactcaagtgctttataaaaataaaattcattacacaagtgtctatatgccttgcccaatatctttgccaatgataaataatatcttgcatatttttactgcttcgttgtttctaaaatgctctcatatggcttacgtcatttgatcctagacaggctggttttattatccccatttataggaggaaatatctaggcttagatgggtcaatgacatgtcaagggtgtgtggctagtaaatgccatacaacaacatttgagaataatggctatttcaattgttttgctattgaaagattagtttttgcgaagttgttggataagaaccagcgtggaagagattccatttmttttcaagagaaatttcatatctgctcctgaaatacttggtgactttaggattttgtccatcccgaccgaacaagggaac

SEQ ID NO: 916387 - DNA, 677 bp, Homo sapiens
ggggttgcaatcctagtctctgataaaacagactttaaacctagaaagatcaaaaaagaccaaaaagggcattacataatggtaaagggaattgaggcaacaagaagagctaactatcctaaatatatatgcacccaatacaggagcacccagattcataaaacaagttcttacagacctacaaagagacttagactcccacacaagaacagcgggagactttaacaccctactgtcagcattagacagatcaatgagacataaaattaacaaggatattccgaacttgaactcagctctggaccaagtggagctaatagacatctacagaactctccaccccaaatcaacagaatatacattcttctcagcaccacatcacacttattctaaaatcaaccacataattggaagtaaaacactcctcagcaaatgcaaaagaatggaaatcataacaaacagtctctcagaccacagtgcaatcaaatcagaactcaggattaagaagctcactcaaaactgcacaactacatgtaaactgaacaaactactcctgaatgactactgggtaaataatgaaataaaggcagaaataaataagttctttgaaatcaatgaraacaaagacacaacgtaccagaatctctgggacacagctaaagcggtgtttagaggga

SEQ ID NO: 916388 - DNA, 557 bp, Homo sapiens
gcacttcctctctgagtgggttgatgggaactgcacttcagaggcaaagccaatgaaataaatgcttcctcatggaaagcawggacccaagagtccctcagatctataaaccgtcagctaactggatgcaaatgtgtttacagcctgccttctttgaagctacaatattatgaaatgtttacagtgttagaccccattataaaaatttgttcttttgaagaggaagtgaattaaagaaaaccactatagttatactacactgagtaagttacacaggatcaaagacttggaaaactcatggtgtaaaaccaaagatcttctacaattgtgcaagaactataagacttctagtctcccagggatttttcattctggaaaattgttttcatcattggactttctatgatgtctgtagcatcatggatagagtcataccctgtgacaaatgaccttgtccagatgataccaaaaaatgtcaaaaaatgagagctggcttacaatggtatttttgttcctgatgctattaaaacttcacctctttttttaaaaaaaaactt

SEQ ID NO: 916389 - DNA, 680 bp, Homo sapiens
ataatgaatcagggaaatgcaaattaaaactgaaatgagatacaaacacatacatagaatagcaaaaagtgttgtcatgtgtattagtccattctcatgctcctaataaagacatacctgagactgggtaatttataaagaaaaaaggtttaattgactcacttttcagcagggttgggtaggccccaggaaacttacaattatggcagaaggggaaacaaacatgtccttcttcacagggcagcaggaaggagaagaatgagagctgagcgaagggggaagccccttataaaaccatcagatctcatgagaacttactcactataacgagaatagtatgtgggaaatagctcccatgatttaactgcctctcacaggttccctcccatgacacatggggatgatgggaactacaattcaagatgagattgggtggggacacagccagaccatatcagcaaggatgtggagtagctgaaattctcattcatagttgttgggagtgtaaaatggtataaacactttggagaaactttggccaatattataacatatgaactagcaattcaactcataggcaatttagaaaaatgaaaacgtactttcacaagaagatktgtagatgcatgtttcatagcagttttaattgtgatagtcaaacaagagtcttgaaacaatgt

SEQ ID NO: 916390 - DNA, 573 bp, Homo sapiens
agagataaaaatgagtaaattttcttcataacactgttcttcattaaaaggtagctttattttatatctcagtgataaaaagccaccaaatcarttctagttttgtcaactctgttggtatgaggaatctcaagattgaaaatcagattccctttaaactcagcccctataatatttagtcactttgtttttgacagttctctgtctctgctgtaaactgcactattcctaagggtaaacatctcaatcagtaccatcctatcacaaaggaactttgaaaacatcatttcatggctcctttactccatcatatggattatgatatttttacatatttatgttgtttctacttttgtattataaacaatgctgtgataaacatctttgttcacattttaggtagttttcttaggattatagctaacagttattatgcatatcttatattttagcattttgttaagcaagcattatcttatttagtcctcataagatattggtacaattactggtgatagatatacagcattgattcatttattaaacaataacattgaactcctagcatatgcc

SEQ ID NO: 916391 - DNA, 624 bp, Homo sapiens
ggcccccgctctcttctggcttatagtctgatgggcttccctttgtgggtaacccgacctttctctctggctgctcttaaaattttttttccttcatttcaactttgatgaatctgatgattatgtgtcttggggttgcttttctcgaggagtatctttgtggtgttctctgtattttttgaattttgaatgttggcctatcttgctaggttggggaagttctggataacatcctgaagtgtgttttccaactttgttccattctccctgtcactttcaggtacaccaatcaagcataggtttggtctttttacatagtcccatatttcttggaggctttgttcattccttttcattcctttttctctaatcttgtcttcatactttatttcatttagttgatctttgatctctgatatactttcttctgcttgatcaattcagctattgatacttgtatatgcttcacaaagttcttgtgctgtgtttttcagctccatcaggtcgtttatgttcttctctaaactgcttattctagttagcagttcctgtaaccttatatcaaggttcttagcttccttgcrttggattagaacatgctcctttagctctgagaagtttgtt

SEQ ID NO: 916392 - DNA, 584 bp, Homo sapiens
tacattctgtgaaaccttttaactagatgraaaatattaaaaaaggatcaactttgagaacacagtgaatcaaataatcaatttagcttcaactaaatcgtggatgttctgtctaccaaagtgaattcagatctgtttaaatagctaatgtgattcaaataccttttttctccctgaagttcttccagagccagattggagtctgagaaactgacaaaaaaaaaaagttttacttcaatctaaatctttgctctttgaagtctgattctcagacaagcagtatagcttccccctgaaagcttgttgggaatgcagattctcagaccctaccccagaatgtctcaatccaaatctgcatttaacaagatccccagttattttttatgcaccttaaagtatgtgaggcacttctctagctgatactttcaactatctggtgcacagtaagcagtggaaccaaaataaagagtttcctctccctctcctcctagctaaatcagggtcttctgtttgtttattgttggtttttttatcctataatggagtccattcaaatgtacagccttttgaaaactaattatcag

SEQ ID NO: 916393 - DNA, 584 bp, Homo sapiens
tacattctgtgaaaccttttaactagatggaaaatattaaaaaagratcaactttgagaacacagtgaatcaaataatcaatttagcttcaactaaatcgtggatgttctgtctaccaaagtgaattcagatctgtttaaatagctaatgtgattcaaataccttttttctccctgaagttcttccagagccagattggagtctgagaaactgacaaaaaaaaaaagttttacttcaatctaaatctttgctctttgaagtctgattctcagacaagcagtatagcttccccctgaaagcttgttgggaatgcagattctcagaccctaccccagaatgtctcaatccaaatctgcatttaacaagatccccagttattttttatgcaccttaaagtatgtgaggcacttctctagctgatactttcaactatctggtgcacagtaagcagtggaaccaaaataaagagtttcctctccctctcctcctagctaaatcagggtcttctgtttgtttattgttggtttttttatcctataatggagtccattcaaatgtacagccttttgaaaactaattatcag

SEQ ID NO: 916394 - DNA, 602 bp, Homo sapiens
tcactgaggagtctgctgtcagtctaacggtcgcttctttgaaggaaatctttttgttctgactgctttcatattcttctctttgtggtgattctgaagcctcacaataatgttcctagatgtagatttctttttatgcatcccacatgggtttctgtgagctttttgaatattgattgtcaatcaccagttctaaaaaaaaaactcagccatgaggccggcacatgttgcctctgcttcattctcatttcttctaggacttcaattaaagatctatcaatgaaatgtatgtcccttacctatttttttttctttttggtctctctgtgctgcattctggattgtttcttctgagatattttccagttgattaattctctctggtctaatctgccataagcctcattcactcttctttttttttttttttttttgagacagggtcttgctctgtcacccaggctggagtgcagtggcccaatcatgactcactccagccttgacctcccaagctcgagtgatyttcccatctcagcctcctgaatagctaggactacaggcatatgccactatgcctggctaaatttttttttttttttaat

SEQ ID NO: 916395 - DNA, 483 bp, Homo sapiens
ctgtcttctctttctgtttgtttttctttttcttattgtgtgtttcagtttggttaatttctattgacctaccttcagatttacttactcccccctcagtgctatccaattggcggaataacccatcaaagagattcatcttggatatcatgtattttgtttctagcattttcatgtgactgttatctctgtgctgaaattctccagggtctgtgcattttgtctactttttctactagatcccttaacatatcaattattaaaattatcatctgagagttccaatatctccgagtctgattttttttatctgtgtgtgtgtgtgtgttctaatcttttatccagtaccaaattttatgtgtagtgtatcagtagagactgaggcaaatagtatttatgcccaggaaaaggcatgagtgtatgtctttcagtcaagttgaggtttatgcctgtgcgtgyatgtgcatgtatgcatgcatgcat

SEQ ID NO: 916396 - DNA, 587 bp, Homo sapiens
gtttttgttatgtttttgttttttttttttttttttttttttttagcactttgaaggattctgatttctctcagactgtctttggtataatgctgcatcactattggtttgtctaggtatagatttctttttattgatccacaagagacacatgtgctctcctaaatctgaggatttttgttttttatcaattctgaaaatattactaggccttattacttggtacatttttaaaaattttctacaagaacactgattagaaatgattagttagttccatatcctctgcatcaattaacatcttatatattcccacctttctacctctgtgccatagtttgggtgatttctccacctctatattccagttcactaattctctctccaattgggtctaatgcactgtttaacatatctgctgagtttcaaatttcaagtattacatgattttggcttaatgtaaacttgtattgtttttaaaatacatctgttatttgggtattttcttatttctttgccrtaccttttaccaataccctccatagttttaaaaattaatagacttcatcctgtagaacagttttagg

SEQ ID NO: 916397 - DNA, 605 bp, Homo sapiens
ggatagttaccgctcttttattattatactttaagttctagggtacatgtgcacaatgtgcaggtttgttacatatgtatacatgtgccatgttggtttgctgcacccatcaactcrtcatttacattaggtatttctcctaatgctatccctcccccatacccccaccccacgacaggctgtggtgtgtgatgttccctgccctgtatgcaagtgttctcattgttcaattccctcctatgagtgagaacatgcggtgtttggttttctgtccttgtgatggtttgctcagaatgacggtttccagcttcatccatgtccctacaaaggacatgaactcatccttttttgtggctgcataatattccatggtgtatatgtgctacattttcttaatccagtctatcactgatggacatttgggttggttccaagtctttgctattgtgaatagtgccgcaataaacaatacgtgtgcatgtgtctttatggtaacatgatttataatcctttgggtatatacccagtaatgggatcactgggtcaaatggtatttctagttctagatcctcgaggaatcgccacactgtcttccacaatggttg

SEQ ID NO: 916398 - DNA, 393 bp, Homo sapiens
tttctcaccttgaggcacaaatatgatggccagaaggcaggttgccagtaggaacatgagaagcatctggcttagtcgacggctcatgtgattcagtgcccaaggtgcaacacaattggccaggagggtgactgcaccaaagagagtctgcaacaggaaaacattgtttcccagatgctggaggtgcaaagtaaggccccaaaaagggatggtacttgcaaatctgcagggaacacagaaaaaggcacatattataatctgtggaasctaaatcctacaaatgagaataatattggcccaggtagccaaggactctttaaagtaaaaaggcagagtgtgttttgtggaatattttcttgcaagttgatattttaaagttatcataaaataatg

SEQ ID NO: 916399 - DNA, 620 bp, Homo sapiens
tcctcatcttcaaggctctcgtctcctttgcaaaacttcttgaaccaccactgcactgtatgttcattagcagtttctgggtcaaatgcrttgttgatgttgcaagttgtctccactgctttacagcccattttgaactcaaataagaaaatcactcggttttgctttttgtctaacatcatttccatagtcaaaaataaacataaaataaacagcaagtaataagtcattagcaaaaaaataaagcgagaaatgtccattgcaatgactgataacataaccacattatttaagaatgtattccaatatcaaatggcaaattccaacaatgcaaaaaccacaattacatttgcaccaacctaatattaagcgaattaattaaacaaactaaacataaacctgttactatgtcatttaatctagggagaaagacctataatttgtaaagtatttggaatgctgttaggcaaatgttatgctaggtcgccccagttttgagtgattctcaatacttaaaaaactgatacccagagtaagtaaatcagaacctctgggcacaggatctaggcatcggtatttttaaagctgttcaggtgattcaatctgtggacaaagatgag

SEQ ID NO: 916400 - DNA, 508 bp, Homo sapiens
atcttattttttcaaacaaccagcttttggtttcaattatcttacatatggtttttctcatctccattccatccaattccactcggattttggttattattttcttaagtagaagaatatttatatacctggactttttgtttcttctagtaaatatatgtctgtctataagtaattaatatgcactgaattccatttgtgtatgtaaagaagggtataagccaaatagcctggaaagagtaggaggcatatgaagaacaggagggactaaccagcatcaattgtaaatcaagtaatttattcaacagtgaatcagcatagatggtcaaacaaaatggccaagtgcgagtggtaggtgtcaacagtgtattgcaaagtgattcatcagttatataaaaaaaagaayagaactaactccccaaacttcatcacgcatctcctaggagatgaaacttccacatggcactactaaatataaaaagatgctaataaggcaaacaaaagtttt

SEQ ID NO: 916401 - DNA, 666 bp, Homo sapiens
ctatcacaagaatagcatgggaaagacctgcctccatgattcaattacttcctaccgggtccctcccattatacttgggaatttaagatgagattttsgtggggacacagcaaaaccatatcactatctatagagatgttttggtcagaatgaaatttggtttccttgaagattatgggtgctgagagaacaggtaacacacgtgcttcattatgctaactgcgcatttgggagcatagctttcagagaggaaatccattgcactcactcactcttcttccagcctcttgctttcaatgatttgtcagttacttttagattcctaggatgggtgaaaatatggcaggatatccaaaaggatcactgactttcatgtatatgaacacgaagctttcatagagtctaataaattctgatcactgtaagaatctaagttaataataatggtgaataacatctaataagagcaactatttgccagggacaatgcttaacgtattttgtaactaccccatgagaacggtctagtctaatattttatagaaaaaaagtgagtttcatagacactattattattattattatttgcttaaagtcatacagacggtaattagaaagagccaggatatgaacctggcagttgggctctctagagtctccactctt

SEQ ID NO: 916402 - DNA, 666 bp, Homo sapiens
ctatcacaagaatagcatgggaaagacctgcctccatgattcaattacttcctaccgggtccctcccattatacttgggaatttaagatgagattttggtgggkacacagcaaaaccatatcactatctatagagatgttttggtcagaatgaaatttggtttccttgaagattatgggtgctgagagaacaggtaacacacgtgcttcattatgctaactgcgcatttgggagcatagctttcagagaggaaatccattgcactcactcactcttcttccagcctcttgctttcaatgatttgtcagttacttttagattcctaggatgggtgaaaatatggcaggatatccaaaaggatcactgactttcatgtatatgaacacgaagctttcatagagtctaataaattctgatcactgtaagaatctaagttaataataatggtgaataacatctaataagagcaactatttgccagggacaatgcttaacgtattttgtaactaccccatgagaacggtctagtctaatattttatagaaaaaaagtgagtttcatagacactattattattattattatttgcttaaagtcatacagacggtaattagaaagagccaggatatgaacctggcagttgggctctctagagtctccactctt

SEQ ID NO: 916403 - DNA, 499 bp, Homo sapiens
gcaggagaaacagcacaggtttgtttttckgttggttcttttttttttttttttgagataaggtctcactactgaggctggagtgcagtgggtgggatcttggctcactgcaacctctgcgtcctgggcttaagctatcctctagcctcagctcctgagtagctgggaccacaggcgtattggccaggcccggctattttttatttttattttttttgtagagatggggttttgccatgttgcccaagctggtcttgaactcctgagctcaaagcagtccgcccaccccggcctcccaaagtactgagattacaggtgtgtgccatcacgcctggtagttttttgttttttgttttgagacacagtcttgctctgttgcccaggctagagtacagtggcgcaatcatggctcacagcagcctccacctcctgagttcaagcaatcctcccacctcagcctccttagtagctgggacaaaaggtgtgcactagagacagg

SEQ ID NO: 916404 - DNA, 499 bp, Homo sapiens
gcaggagaaacagcacaggtttgtttttcggttggttcttttttttttttttttgagataaggtctcactrctgaggctggagtgcagtgggtgggatcttggctcactgcaacctctgcgtcctgggcttaagctatcctctagcctcagctcctgagtagctgggaccacaggcgtattggccaggcccggctattttttatttttattttttttgtagagatggggttttgccatgttgcccaagctggtcttgaactcctgagctcaaagcagtccgcccaccccggcctcccaaagtactgagattacaggtgtgtgccatcacgcctggtagttttttgttttttgttttgagacacagtcttgctctgttgcccaggctagagtacagtggcgcaatcatggctcacagcagcctccacctcctgagttcaagcaatcctcccacctcagcctccttagtagctgggacaaaaggtgtgcactagagacagg

SEQ ID NO: 916405 - DNA, 635 bp, Homo sapiens
ctgctataaagacacatgcacacgtatgtttattgcagcactattcacaatagcgaagacttggaaccaacccaaatgtccaacaatgatagactggattaagaaaatgtggcacatatacaccatggaatactatgcagccataaaatatgatgagttcatgtcctttgtagggacatggatgaaattggaaatcatcattctcagtaaactatcgcaagaacaaaaaaccaaacaccgcatattctcactcataggtgggaattgaacaatgagatcacatggacacaggaaggggaatatcacactctggggactgtggtggggaagggggagggatagcattgggagatatacctaatgctagatgacgagttagtgggtgcagcgcaccagcatggcacatgtatacatatgtaactaacctgcacaatgtgcacatgtaccctaaaacgtaaagtataataataaataaataaataaataaataaataaataaataaawaatataaataaataaaaaattaaaaaaaggaaaaatattttttctacatttgaaaactcaaacgccaataaatagctgtagaggttaaaacaaacaaacaaacaacaacaaaaaaaaggttttttcttct

SEQ ID NO: 916406 - DNA, 627 bp, Homo sapiens
taaagtaaaaattaaaaaaaatctttctcctaatgtacctttttgtcatatgtttwaaaaaaaattgctgcaatattgcattaaacttgtacataatgtcatattgacaatggcatgtttacggggatgtgtgattgtgggccttgcaaaggagtccttggagttcacctaggccagtcacatgtaggacacatttatgtgttgttttcatctttcatgtttttcagtcagacatgtagagttttgttcattattttatccctgacatttagccattgtctttgcatacagcaagtgtttaggaaatgtttgctaagcgagcgatctaaggattttgtaatttattctgttttgttgttaaggccaaactaggagaatacatgtgatagcattttaaagggcactgcttatgtaaggtattatattcgatacaattattcatccattaattagtgattacatttaaatgttcactgttaacataaaataatctgattacttaaacaatatttctccaatatacttgtcattataatctgcctggcataaattgcaaagaaaaccctaatgaaatcatttcctagtgggtccccagttttggctattagtccaatttcagtcattgcc

SEQ ID NO: 916407 - DNA, 489 bp, Homo sapiens
atgttgggggattcctggggtatttataaggagtaagagatagttttgctaaaagaatctttaaagattttattgaatgtgagatatccagtaaatgataggaatcagtcttgattctcatccataatttctgcttagggagaaactttaaccaagtttttttttaaaagattaaatattacaatatttttttccagtttttttttcttttagtggctctcctttcttatcaccccatataacctaagaggcagagagagtagttctgttgctaactcttgcagaagttgtgcccatttcttttttctggtttgctgagatttttatgccaataataaggtcggcattcttctttggaaaagaaagttgtctaaattctacrtataagtggcactatagaaatatttggaaaataacaatggcatactaaaattacttggaaacaacaaatgaacagagcagtcactatgcagtgtctgcaattcagaa

SEQ ID NO: 916408 - DNA, 679 bp, Homo sapiens
acaaactctgagtatatattgtcatctaaatagcaaaggagactgccaagggcagggaagatgatagaaagtgataaagamatttctgtgaagtgttattacctctcttgtaatttaccatcaagccacagaatggtcacaaaaaataaaattgtctacaactgcttgcaagccttcttgtaagaatagtagcaacatagcagctcataattcccagctaataatataaagataacatagctgatgtggaacattttcttagaaggtaagaagtatttttccaatccagctcctaaacctttcattaaatcacaacctgtggctaaataaaggacattggaataaccagaattatactctgcttcactaaacagaaagccatcaaatttctcatagctatcatagtctaacctaaagttatttataagtaaccaaatttatttgacagcagccacaaagccagagctactgataataatgttttacaaaaaaatttataaaacaatatatagatgtctgatacctattcctcacttacctccaccttttctgaacaaagctgcggctaattatccacaaagcagcaaaatatatataggacttggcctgtatctcatccaaaatggagataagtaacatactgaaagtgtttatcataagaagttttcactgttttcct

SEQ ID NO: 916409 - DNA, 516 bp, Homo sapiens
gaaaagctatgaaagcaaataattggagaaacacttgctggttttctgcccactgcaatacacattagcccagccactacgctttcccaggaaaatcctaaaatgaacagtagaattcaaaattgtagaacagcagttatgaagctgagaattttatgaatgcaggagcctcatttggccctgaggttgccatctctcaatcagtaatgattacaaggctattagtagcagattcctgagaatgaaggcacatggagttgtgtgatctactttgttcgtaaggtgcccagtgcttccctgtgttcctgacatctctcagtgtataaagtccattccctgagcctaaactttcttgcattaagagctttccattaagtcagtttcttgcaaagggctttgtcctaatgmgtcagagtctgtgaggttagaacattcacaaatgagaagctaatacagattataggaatattctctgggaatattctaagtccagactaacacatcatctcttgagta

SEQ ID NO: 916410 - DNA, 635 bp, Homo sapiens
aaccatcagatctcatgagacttattcactattamaagaacagcatgggaaagacctgccctcatgtttcaattacctcccaccaggtccctcttacaacctgtggtaattcaagatgagatttgggtggggacacagccaaaccatatcagtgcctgtttccagacaggcacacaataggcagaggggaaaatacttaaggggcaaatagtgggctcaaagacatggatggaaacatgcatttgggagaatagaggcatatgtttcaataggcagggagaggccaattttggagctatctttaaaccaaacctaggtggaaaagtttatagccaatatcactaagtgtttgggaacagaaagcattaagtgagctttttagtagaatatgaaaatatcatggctacaatagacactagaggcaaattagaatagttgccaagcacagaataaaattctaagaatcaaataatagaaagttgtgatataatctctcacaacctcattcttctaaagaggcattttctgaacttacttgataataaaattctcctggtgttcctgttaagcatgcagacacacacctacaatatcagtcctccagaaaagagtttctgtaatctgtgctactatca

SEQ ID NO: 916411 - DNA, 630 bp, Homo sapiens
attgtttccgtggtggaatggatagctgctmtgcctgcccaaacttatgagttggtgggcctggcggcatccagctcataagaggctcatagacacctgttcaatcacctccagaatccagaaacatgccagagtggtgtttctgaatggttttcagcaaccctttgctgaagaggtccttactcttgagccctaagaagcttatctgtgacttttccgttagggtttgccatgttcagcacacaaaattatctacttcatatactttcagcaccatgagattgtgcagacaatatgttccaagtggcagtgttatttgtaccacagccacagttcggaacagagcccttttttgttccaagccttactcaatattgacagcatttgaaggcacctgataataagttgtagcagtattctcaaaggttatgctacttaaatatatgctaccgaaaagaactaaaatgaagcatttttcttagtcatatagtatgaaatactttattattttcctgcagcggatgcctgtgcatgttctagatgcctgtgcatgttgtagttgcctggattccccaaatcttcacaaatgtactaggcccttcatctctataggatccctccagcactctt

SEQ ID NO: 916412 - DNA, 659 bp, Homo sapiens
tgacataaagagctccatcaacaccaaaaatgtcacagtatcagtgttctcaatagttcctgtcacatgtttagtatttggaaatactcttcaagtacacttgtgaacacaatatggaaaagacgaggtcaacacacaggaggacaactagtatgggaaattgaagtgaagctctataatgttgtgtttaagagatatttcaatgatctaagcctgtattagtttagaagcttgttgtaatgttgcccttggaatgtaaagcacataattttgccagcatcctttcttttccctcctgtcaaacatttcaaagattagggtcgtgttggcagcttaaaagcctctgccaaagttaacagaatctctgttttttcttcaaaattgttcaagcaaaagatgcagatccttgataagtgtctttatctaatcccagcttgccttatcactattgactctctactttgtggaggagtacatcaatttcaagacgaccttaaatatactgcacaaaaagtacttcattgctttctatttttgatcagtgttacacaaaagattgatggactcattgwgggggtaagttttgatgattatttcttagctcctgtgcttacagaacattctgatcacagctccccacagattaggtgagggtgaga

SEQ ID NO: 916413 - DNA, 689 bp, Homo sapiens
ccaccaggccccctctctaaaactggagattacaatttgacatgagatttgagtggggacacaaatccaaaccatatcagtacacaaatatgtataaataatatataaacatacatgcaaacacaaacgtgtgtgtgtatatatgtatgtatgtgagtatatatgtattatgtatgtgtgtgtgtaagaacaataaattaatgtcttaaaagttctcagcacaagtgatataaagtataaacatgggcaagagaataggatataaggataataaagtggatattgtccacacttccttacttgctctctttatgtaagtgtgtatatgtgtgtgtctataacaggtttttttcctaacagttgtatgtgtgtttggaagtttttaaaatagatttttcaaggctattttatgtacactttttttggttagtattttggtgatttttagttaaagaaaaacaatgttttccaagggcaaaaaaatgaactgaagttcggaaggaagctggatgtggacttcttacaagctcttgctccaaaacctggaaacgaggaaagagggccctcccgggaaacctgagaaacattggcacagcmgagggaatcctttggtggggtgggcggagatgccagcccacttgtgtgactgtattgttttgagtgggctctaaggcaatttctgcgtgcca

SEQ ID NO: 916414 - DNA, 640 bp, Homo sapiens
agttcgtctgtgttatagcaaatattaacacttcattccattttattgctrtataacttcctatgtatggatataccacattttgatttctttatactttcttgactagtatgaatactgctgctatgaacattcttgtacaagcttttgtgtagacatatgttttcctttctcttgggcatatacatattgaagtgcaattgctgggttataaagataactacatgtttaatatttggaggaattgttaaactgttttccaaagtcatggccctgttttacaatcccgtcagcaatgtgctgatccaatttctccacatctttgccaagacttgttactgtcttttcattgtagtcatcctagcaagtagaaagcgctgtttgtggcatagatttgcatctacctaatgactaattgacttgagcaacttttcagtacttattgttgaattgtatatctccttgaagaaatgatcattcaaatcttttgctcattttaaaaattgggttgtctttttgtaactgagttgtgatagttctttatgcattttggatttcagtcccttattagatatgtcatttgcacatattttctgacattctgtgagttaccttttgactttcttgctggtgttctttg

SEQ ID NO: 916415 - DNA, 623 bp, Homo sapiens
aagacaagtttcagtttgtgctttctttagctcccattacaacccatctctttaattaaagtttgctgacacatcccagaatttggcataatcctttccagtcttggctcaaataaaataatctgtgaagattttaagtgactgagctgctgggatcagtgcaggatctactgacatgggttctccagggctttgccatgcttgatgtttttgcaaagactgccattgcagaggcaggattgggaacactaactagaattcagcaggtctggagtccaagagggtctccaaaatagtcactacctaagccaatgcaaactcctcctgcctccaaccaccgtgacaactgaacactgggtaacctacataaagtctccttctctgttaagagggatgcctatgtgttcttatagcccttcattcattgcctgaattgtcactcatatgcatgctacataattgtataaataattctaaatgagttgaaaaatagaatatgaattktatttaatttgccaaatgcttgatgaaattaagcagaaatgcaactttgatggtgttttctttactcctttacaaaatggaaggaagaaaatcttattttcaggtgatctgacaccaat

SEQ ID NO: 916416 - DNA, 607 bp, Homo sapiens; identical to SEQ ID NO: 901073

SEQ ID NO: 916417 - DNA, 639 bp, Homo sapiens
agtctgatccttaacaataggaagagggactcttttcaagatgtttcttccttgggtatccttcctcagccgttgcatattatatagaattctattgtatttcataattactgttttattatagtgtaataattctttacatttaatgttctttgtttaaatcattatgtggtttcgctacactgataaaacccagactgatacttgtggatgccttgtttttgatataacattcaatggactctctgataaccactgggctgcttcaccttcaccacaggcttttaatgttatatacaaaagtgaccacaaagaacacaaattattccaagttatgttttagcttaactcttgaggtttattttcttctctcccctgaattgttcaatcagctctaattccatacctttcccagatattaggaatctcaatatcaatttcctaatatttctaaccctgtatattgtgttcaggatccctgggggagacacaaagctgtccagtgagggctcttgtaggagtagggcttctactactttctggcagggtggcatttcagtattttcataacctatttgaataggtcataacattttagaatgttgaatataagycctgattattatccgtactgtccct

SEQ ID NO: 916418 - DNA, 442 bp, Homo sapiens
tttcataaagagctttcccccacttcactctgtacttcttcctgccaccatgtgaataaggacgtgtttgcttcctcttctgtcatgattgtaagtttcctgaggyctccccagccctgaagaactgtgagtcaattaaatctctttcctttataaattacccagtttcaggtatttcttcgtaacagcatgagaacagactaatacagtaaattggtaccaagtagtggggcactgctgtaaagatacctgaaaatgtggaagccactttggaactgggtaacaggcagaggttggaacagtttggagggctctgaagaaaacagaaagatgtgggaaagtttggaactccctagagacttgttgaatggctttgaccaaaatgctgatagtgaagtagacaatgaagtccaggctgaagtggtctcagatggagatgagg

SEQ ID NO: 916419 - DNA, 544 bp, Homo sapiens
agcctccagctacatgactcctaaaccataatttctaatgttgtggmtaatttgttaatcttacaaaggcactctagtctcaaggcaaggcttgttttggcaaagggctatcttttttttaaactataaactgagttcctcccaaagttaattcaccctatgccaaggaatgaacaagaacagtttggaggttataagcaagatggccgggtgcagtggctcacacctgtaatcccaacactttgggaggccaaggcgggtggatcacctgaggtcaggagttcaagaccagcctggccaacatggtgaaacccccctctactaataatacacaaattagctgggcgtggtgtcacgtgcctgtaatcccagctactcagtaggctgaggcaagagaatcgctggaacctgggaggcggaggttgcagtgagccgagattgagccactgcactccagcccgggcgacagagcgagactctgtctaaaaagaataaataaataaaataaaacagaagcaagatggagttggttagatcagatctc

SEQ ID NO: 916420 - DNA, 635 bp, Homo sapiens
tgatagtagcacagattacagaaactcttttctggaggactgatattgtaggtgtgtgtctgcatgcttaacaggaacaccaggagaattttattatcaagtaagttcagaaaatgcctctttagaagaatgaggttgtgagagattatatcacaactttctattatttgattcttagaattttattctgtgcttggcaactattctaatttgcctctagtgtctattgtagccatgatattttcatattctactaaaaagctcacttaatgctttctgttcccaaacacttagtgatattggctataaacttttccacctaggtttggtttaaagatagctccaaaattggcctctccctgcctattgaaacatatgcctctattctcccaaatgcatgtttccatccatgtctttgagcccactatttgccccttaagtattttcccctctgcctattgtgtgcctgtctggaaacaggcactgatatggtttggctgtgtccccacccaaatctcatcttgaattaccacaggttgtaagagggacctggtgggaggtaattgaaacatgagggcaggtctttcccatgctgttcttktaatagtgaataagtctcatgagatctgatggtt

SEQ ID NO: 916421 - DNA, 673 bp, Homo sapiens
caactgcaaactctgccaagagaaaagagaaacctaaacmacagatggattaatccctactctaggagcactgaaccattgtccctgctctcagagaaccgcctggagcaatgctggggcagtgggtgagttcagaggatcgaggctgcactgctgagacagaaacaccagtcaaggtgcagtgccctatgctgtggtcctctggctgcctgcctttcagggctataggtgctggagcttttgaatagggatgatggcagaccctgctgcttgggcagcatagcacccatcctctacctcctttccctttacttctttccattagagaggctgcagtagctaaatattcactctcccaatatacctgtatcatggagtggtcatgtgatacagttctggccaaggagatgtaatcaaaagtttggtaggagagttctgggaaagcttcagctttgctaataagagacagatggggcgggcactgatcttggtattgatcctagacttgaatgcagatgtgtcatatagagttgaagcagccttttcatgaccatgaggagacatgcatgaaggaaaggcccagaaaatctccaaggcaccagccctaacattgcttttctcttatgtgagaaaaagaaaccactcttgtttcaagctactgtgggtaggcttt

SEQ ID NO: 916422 - DNA, 607 bp, Homo sapiens
tttggcttaataatcaaattaaggcatmtttttaaaagatattctttcctagcatcataaaattgcaatctcagtttctcctgtatcctaattggaaagcagttgtatcctttgtggccttgatccttcatcaaaaacatgtttattgctttactaccttctgacagatgccaagtagtatgtagaggtatctagtgtccttggataccaacaagtcagtctaatgtaggcgaaacaggtgtaagggtgggagagccagggtctagcgagagatgggcaggatgtttacatgtggtaggatggggagagattagtgggagaggttgagctgaacaggctatgggcaatgccctggaggaggagcagaagaagtcctccaggcaggtgagagagtgaagacaactatttttggcctatagttgaactatgtgcaaagcacacaggagaatacttggccaggtttccttgaagatgaggagtaacagcacatgtgaaattaactctttagctcaagccatagttatagtatgacaagaggaaggccttaccaaacatacacatgcagtttagcaaaatttgtatcttattttctcctaggaaaagagaa

SEQ ID NO: 916423 - DNA, 600 bp, Homo sapiens
aggactcccgtgtttggagaaccttagagtagttgctaccttcccacttctagtgcaatctgaatataaaatgataccatgaggcccaaggaagggcagaaggactgagaatgtgggtgtctctgcacaatagatgtatgaaaacaagtgtctccacagacttacctgcattttcacttagctcttggtcagtttcttcaaatctagctttctctctggatatcttttacacagaatgaaatatgaatgaacatatatgtgtgtatatacacacacatacgtattcttagaatatgaatatatatgtgggtgtgtatatacatgtgatatacatacatccatcttctggaattcttctggtttactcaaatactcataaccttcattaactaaaatccctcctctgagaaattacttctcagaaatgtgacgtatctgttcctttctcagacttccatttaacttttaagcattcattttcactaattatttaacayccagattgtgccatctttaatatcagggattatgtatattacttctatatttatataattacaatttgcattcaagtatttttgatgctttgattatatctca

SEQ ID NO: 916424 - DNA, 609 bp, Homo sapiens
ttctatcttgtagggtttttttttttccccacagcaaataagktttatggattgcaatgaggagtctgtcgcattaaaataagtctttttacagtattttcccatttaagcctcacatggacagcatgctggattgggcccggaaaggcagactcactagtttttcaatttagtttgttaatagcctgcctttcataaaagcatcaggcacaatcacaccaatccctaaatcaataggatgatgcagcaatgcctcacaggaatgatatttttgaaataaatatataccattcagccaggcccgtttgacatcaaatttatatactcaataagaaagcacaattaatggtcccgaactgtgttttccttcacctatttcacatttcaagaagcacaggatttcttaagaaaaaaaataataaggaaagaaaaagagaaaaaaacattccattcataaatgggatgaaaaagcaatgctagcttgttggtgcctccccagaacctgtttatcttgcctccaacctcatttctctcttcatcctggtctttgctctgatgttactctttacagaggaattccctgacattccatgcaaaacagcaccccat

SEQ ID NO: 916425 - DNA, 336 bp, Homo sapiens
atttttcgttcaaaatgtcaagaacctgggcaccyttcaccagtaacaagctgactgaatggacctccttttggccaagtggaccccagagaaacctgaaaaactgaattcctggacacgacaggaagagtggtcagatgtatgtagttataccgccttcctgttaaagtttaggcacaactgaccagcattaacattaaaatggagtacgtaagaccaacaaaagagactttgcagcaataaggtagaaaattccaaagtggtataacatcacatgacaatgaacaaaccctgaaggaaataaaaaatattttacctgaaaatatgtttatttga

SEQ ID NO: 916426 - DNA, 633 bp, Homo sapiens
tgtattgtttccgtggtggaatggatagctgctmtgcctgcccaaacttatgagttggtgggcctggcggcatccagctcataagaggctcatagacacctgttcaatcacctccagaatccagaaacatgccagagtggtgtttctgaatggttttcagcaaccctttgctgaagaggtccttactcttgagccctaagaagcttatctgtgacttttccgttagggtttgccatgttcagcacacaaaattatctacttcatatactttcagcaccatgagattgtgcagacaatatgttccaagtggcagtgttatttgtaccacagccacagttcggaacagagcccttttttgttccaagccttactcaatattgacagcatttgaaggcacctgataataagttgtagcagtattctcaaaggttatgctacttaaatatatgctaccgaaaagaactaaaatgaagcatttttcttagtcatatagtatgaaatactttattattttcctgcagcggatgcctgtgcatgttctagatgcctgtgcatgttgtagttgcctggattccccaaatcttcacaaatgtactaggcccttcatctctataggatccctccagcactctt

SEQ ID NO: 916427 - DNA, 591 bp, Homo sapiens
gaaggtacctagcaaggaggcttactaaatgaaaaagaacaaatggccaagcattggtctttggggaatggttttatttaacgttcagacaragaagaatggacaggatgagaaggcatgaccaacagtggtagaagctgcaaaaaatggtttaggagatcaggagaggacactggttttaactcctaagacatcattggagatctgtaagaaagcaagttcactggaatgggagggaccatgctgcaagacttgttaaaatgaagattccagggttttgccatagaccttataaaccacaatgtccaagactgaggcctcgggaagctgcatttttgtcaccctccccaagtgattcttatgtacatgaaagtttgagaacctttggaatagagaaaaatgtcatagtgcccggcacagccctaagcagacattggttatttacaattgttttccttaacctataaaatccctttaaaagccaaatgtagctaggctgtgtcttaccattataaaggcatgtggaaaatagtatccttaaaaccttcacctgggtctcagttatactcagagcagagatccactttaaag

SEQ ID NO: 916428 - DNA, 597 bp, Homo sapiens
catcatcatagtaataacaataataagcaaatagcttcacaccataccctaaggataaactaagtcaaacagaaatatttaagtttgttttattggttaaagcagaatagtaaaatcattttaatgattttaacatgtcaagtttaacaaagtgcatgataaatataaaaattagttgtttaaaaatcatcttcaaaatatgtatttcaaatcaataaggtcctctatattaatttgaaagtcactatgttttgatctgtttttaaatatttttctgtatggaacttttgaatgacatgtgaagaacatgtactgctaaaggatgtataaattaattcatcttgtaataaacagcaatcttattatttaaaacattaatgttaaaatgcattgctagctctgatatatttatttccacatatcaaattcattatttttacctatccaaataccacattctagtatctaaaytggtaactcttatacccagatatgtgttgcacttaaaatatcttattgcttataaatatgtttcttcctttgcctgggttttttttgtttgtttgtttgtttgtgttttttttttttgggattctc

SEQ ID NO: 916429 - DNA, 705 bp, Homo sapiens
caattattatccccatcttacagatgaggaaattgttggttagtaaaatgaagaaacctgccgaaagataacttcaaacagcaggtttgggatttgaacacaagcactttgactccagaaaccatgtaattaccccttctttatacctttttgctgtagaattattccaatcaccgaaacattcacattactgttattgagaactgtaggaggccaagtgttgcgttatacaaagaaaatgcaggcattaaaagaaacaacctatatcctgaagacttgtagagttttagagctacatgatggttgttctttcgttcctccattggatccttcaacatttttgaacatctattattttaaaggccttgagctgggtgccagggatataaagatgaaagaacagaattcatatcttgatgagctcctaatctagtacaaggaagggagttacaatgcatggaacaaatagaatgcaggaaccagcatggccgcatctccagccccagtccaccccatggggacatggcaaacttgtctttctgaggtcagatacagcttcagaaatctttcaacacgragctccagttgatatagtgtactactacctaagctatataatatagcctattcctcctaggctataaaactgtaagcatgttaccatactaaatcccactaattaattggattcagtatttgaaatgg

SEQ ID NO: 916430 - DNA, 705 bp, Homo sapiens
caattattatccccatcttacagatgaggaaattgttggttagtaaaatgaagaaacctgccgaaagataacttcaaacagcaggtttgggatttgaacacaagcactttgactccagaaaccatgtaattaccccttctttatacctttttgctgtagaattattccaatcaccgaaacattcacattactgttattgagaactgtaggaggccaagtgttgcgttatacaaagaaaatgcaggcattaaaagaaacaacctatatcctgaagacttgtagagttttagagctacatgatggttgttctttcgttcctccattggatccttcaacatttttgaacatctattattttaaaggccttgagctgggtgccagggatataaagatgaaagaacagaattcatatcttgatgagctcctaatctagtacaaggaagggagttacaatgcatggaacaaatagaatgcaggaaccagcatggccgcatctccagccccagtccaccccatggggacatggcaaacttgtctttctgaggtcagatacagcttcagaaatctttcaacacgaagctccagttgatatagtgtactactacctaagctatataatatagcctattcctcctaggctataaaactgtaagcatgttwccatactaaatcccactaattaattggattcagtatttgaaatgg

SEQ ID NO: 916431 - DNA, 640 bp, Homo sapiens
ctccttcaggtcaacatctccatttytccaataattgtgcaaacacaatggaaacatcaaatatattaaatacataaataaaattttatgtattaagtacataaacaaatgaatagacatacatttatgtacttaatgatgtttatttgtacaaatgaatatttattcatttgcttatgtacttattcaagatgtttatactgaacacttactttgtgccagacgttatattaagtgctttattttcatggttatctctttcaaatcttacaaaacaataaaaaatcaggccaatgaacttgatactagtatctatattagtttcctaggactgctgtagaaaagcaccataaactgagtggcttaaccaacagaaatctattggctcacagttctgaaggttcaaagtcctggatgaaggtatctgcagggtcgcttccttctgagggttggaagcatctgctccttgcctctcccttagcttctggtggtttgctggcaatctttggtgttccttggcttgtaaaagcatcaccccctcctctgcctttaccatcacatggtgttctcccttccatgtctttatctaaatctcccccttttacaagaacaccggacatgttggaataggggctcatcc

SEQ ID NO: 916432 - DNA, 616 bp, Homo sapiens
cttttttataataaaacacttgatataggtctactctcttaataattgtcaagtgtacaatacaatattattaactgtaagtgctatgttttacagcagatctctggaatatgcttatattgyacaactgaaactttataccatttaaccaactccccatttcccctccctcactctagaccctgataattaccattctattctctgattctatgagtttcaccttcttaggtaactcatgtaagtagaatcatgctgtattcatccttctgtgactgatttatttcactaagcataacatactctaggcttatccaggttgtcacaaatggcagaatttccttcttttaggctgagtaatattacattgtatgtatttaccatattttaactccattcttctgtctatggtcatttaggttgtttccatatcttggctgttgtaaataatgctgcgattaatcttaatcttaggttaaacatcacttgaccattaaattcttcccccacctttgccatacacttctaaaacatcctgtggttcttgcccactgattatacttgcagttactggtctgtatgtagcaacacagatagggaaagaacttcagagtag

SEQ ID NO: 916433 - DNA, 685 bp, Homo sapiens
gagctccttaacttcttggaatttcccgggtgataaaaatatcttttgttctaatgaggcaacacttggtagggtcctggacagcttcaagttgggggctggttgccaggaagaccaagccatgattagaaacttgaaactttcagcctcagagacgctgggaattgagttagtaatcaatcatgcctatgtgatgaagcctccataacaatccctcaactacaggttcagagaacttctgggcattgaatatattgatgtgcttggagagtgtcacatcacaactccttgggcacagaagctcctgtgctcaggaaccctcagtccccattctatgtacatacctcttcatctggctgttcatctgtattctttctaatatcctttacaatacagtggtaaatttaagtaaatatttgcttgagttttgtgagctgttttagcaaattatttgacatgaggagggtgagaagttctgatttataactggttggtcagaagtataggtgacaacctggatcttgtgattggcatttgaagaggtaaacagacttgtgggactgagcccttaatctcttggatctgcactaactccaagtagttgcagaattaaactgtaggacatcaagttggtatctgtacagttggtgagtcagttggtgygggaaaacttgataaacatttg

SEQ ID NO: 916434 - DNA, 654 bp, Homo sapiens
atactaccctcatcaaatgagttaggaartgttcctttgttttctgtgttttggacgaggttatgaggattagtattaatgttttcttaactaatataatttaccaattaagtaagctagcattaggctttccttagtgggaagtttcacaattacaaattccatctcatcagttattactgctctgttcagatttccttgagttagttttagtagtttgtgtcttttctgaaacttgtgtatttcatctaaattatctaatttgttgacatatagttggtcatagtattcctttttaattattttaattttcataatgactgcagtgttccttctttcagtgctagtattttgaattgcctctccttttttctttgtcagtctagctaaaggattgtaaattttgttgaccaaggaaccaaattttgatttcattaattttctccataaccttttaattgtctattttattaattaccactcaatatttattatttccttcttctgcttatgttacatttttctctctttttaacaatttcttaagatggaagttagctttcatatatgacatattattttttaagtttaggcgtttgcagatttacatttttcactaaggactattttagctgtactctataagttttggta

SEQ ID NO: 916435 - DNA, 571 bp, Homo sapiens
ggtaccagctcttctttgtatgtctgatagaattcatctctgaatttttctggttctgtgctttttttggatgctaagctttttattactaattgagttttggagtttgttattggtctgttcaggaattcaattttttcctggctcagtcttggaagagtaaaatatactgtttcataagcatgttattgatcagcatttaataatcaatatttatattctgggaggagataaattacctctctcatttttttttctgcagcacatagaagaatacctcagacatataaggttttccatttcattttaatacataaatcagtataatactcattacactaatctcacatgtatacttatatgtgtattttagataattctgtacagattaatgaaaagaaaacatttatttattcatccacttgtgactaaggtatccatctgttcaacaaatgtttattgaaactatattgttccagacattataatagtaatgaatgcaggaatggacawtgtcttccttgtgtttttagtataaccacagatataccattaagcaactattaaaaca

SEQ ID NO: 916436 - DNA, 636 bp, Homo sapiens
cagatttgttacacaggtatacacatgccatagtggtttgctgcatccatcagcctgtcttatttctcctattgctatccctcccctagcccccaactcccsagtaggccccggtgtatgatgatgttccccttcctgtgtccatatgttctcattgttcacctcccacttatgagtgagaacatgtggtgtttggttttctgttcctgtgttagtttgctgagaatgatggtttccaacttcatccatgtccctgcaaaggctggttcaacatacgcaaatcaataaatgtaatccatcacataaacagaaccaatgacaaaaaccacatgaagaacagaactgtttgtgtcccttttcggtgagtactttgttctaccttgtatcctacctacctctgtgtgtgcctgtcaccttcactggaggaaaagcccctgcagggcagaaactcatctaaatcttttattcatctatttgtaatcgttggtaaaggctcagtaactattgtactatcttcaatgaaatacttggtcttatttggtccttataatatctcaatgattttattaggcattgatagtccttcctgaaaactgataacacaagttttgagagaccatatgtttgtctatggct

SEQ ID NO: 916437 - DNA, 551 bp, Homo sapiens
tttctaaaacaattggtgcccaattgtttcatttttatgggtttgctagaaacaggcaatattgcccctgctttggagtcttctgggtctgtccatgtgtctggaatccatttattattgtccttcagagatgtggctccaacagtaatccataaccaaaacttaagttttaaataatttccagaagtctgatggtgttgtcttgtgtcttgatgtgaatgtgcacatcccttctaaggacagtttagtcctcggtatgtccaggtgcatcaaaataggaaacctgttttgtaacacggcattactttttatttggaggactgtatgtgctttaggccgcatccctcaagatggatgagatcaaaaaggtctggaaaaagagtggtgaaaattgttagagatggggaatagaatggaatttaaaaagtgaggatcctggtaaaatagcaacatttactagaataaatagatgtgttaaaaaaaagaatcacttgtgacacaaaaatytgcttataatattctggtttataatgttttcttccgccctgcat

SEQ ID NO: 916438 - DNA, 603 bp, Homo sapiens
cccacatatctggagtatawaactcccaaagctcaacaataagaaatcaaacaactgtccctcaaatgggcaaaatatttgaacagaactttaccaaaaaaaatatgaatggcaagtaagcccatgaaaaatgttctgtgtcattagttataagggacatgaaaatcaaaaccacaatgatatatccctccacaacaattagaatagtgaaaataagaagactgcaaatacgaaatgtcgaggacaatacagaccaactagaactctcctatatcactgataggaatggaaaatggcacaactattttggtaagtagtttggcagtttcttaacaagttaaagatatactaccacacagtccaatcattcccttcctaggtttgtatccaagagaaatgaaaacatatccacacagactcatacatgaatgttcatagaaactttatttgtaatagcccaaaactggaaacagcccaaatgtctatcaacaggcaaatggataaacaaccatggaatactgctcagcaataaaaatgaatgaactactgatacatgcaacaacttgtattaatctcaaaataactatgctgagtgagagaaac

SEQ ID NO: 916439 - DNA, 630 bp, Homo sapiens
gtaacaggagattatgactaaatgaaaatacaactccacccccaaaaatataactttaataatctctaaatctctaactgcttttaaccctactatttatataggcacaatttatataattggtaccataaagtttatatgaaagcaatttttgctgaagacggaaattggaaacataggtgcattctccctagttttaaaggcactgctcatatgtgctataataaacagtcagatacttccattgcaataggatgccagtgaaaaaaataccagggaaagaaagatctactctccaataatcaatggcacagggtacaaactctcttaggagcccctcatcctcctcacacagaactaacctgccaaatttagagtccccgcagctggataaagagtcctctgtctcctcttccccatccaataacatgctagaaaataagcctattcattgccagccttgggctgtcttatatttctataagttatcattgtatgtaagtgctaatctggggatctggatccacaacctttaaaaaatcctttagctcaactttaatactctttagagaaaagttatctgcttaaccagcmcatccttccatcacttttggtgaaacaaaaaatgaa

SEQ ID NO: 916440 - DNA, 642 bp, Homo sapiens
ctcaagaggtggaagttgcagcgagccgagatggtgccactgcactccagcctggccgacagcaagactgtatcaaaaaaaaaaaaaaaaaagatatcttcaaaataagaaaaaataacaaagacaagaatgggcccatggccaacatgctgtggctgaatagacctatgggtgacctggagaagtgtgaaaaaagctttcccaaggtagtggcacctaagtgggaacttgaacaatggagagtctgcaaggcgagaaggagcaggagcttcagaggaagccatgggaaccaaaggatggaggtgtcaaagaacacagtggagctggctgtggatggagggtggatgcccagggctggaggagacaagtttgagtaacaaaggctggaggaagaccctaaagagaggcagtgtgcgtagtacatgtgtatctgggctctggagtcagacagcacagcttcaaatcctgactttgctacttgccgatcacgtgtctttgggcaagctgcttaacagatgggtcaaatgtctygtctacatgctggagggtgagtgtactcactgcacaaggctgttacaaagatagcatgggattataaacataaaacatgctgtctaccacattctaagattaccttcattt

SEQ ID NO: 916441 - DNA, 623 bp, Homo sapiens
caagttgcaaaaattagacttcygtagttttattatgtttattttcaactgagggtaattgtctgtagctttctctgcgactagtctatgcacctcccctgtctttgccccttgaaaaactgaatgttggttacacgtgtagagagagcagataagacaatgaagatctggtacacaaatgctcctggacattgtataaacattcaaaatatcgcacacaaacattgcacttccaagggcataaccacactattttttattctttttaattgaggtataatttacatataataaaatacataaatcagtctgggcgcagtggctcatgcctgtaatcctagcacttgagcccaggagtttgagaccagcctgtgcagcatggtgaaactccatctctacaaaacaaaaaaaaaattagccaggtgtggtggtgcatgcctgttgtcccagctactcaagaggctgaggcaggaggattacttgagcccaggaggttgaagctgtggtaagccatgatcaagccattgccctccaacctgggcgacagagtgaaaccccatctcaataaaaacaaaaacgtggatcttaagtgcaagctcaatgaattttgacctatatatgtg

SEQ ID NO: 916442 - DNA, 686 bp, Homo sapiens
cttggagtatttgagaagttgaagaagaccagtgtgactagaacctagtgagcaaagtagcgagataaagagccttatagaccaagatgaggaagaaaagagtgggtgtcttacagacccaggtaaaaactcaattttattctaaatgtagtaggaagccactgaacagcttaaggggggatattagtgatctcgtttgtgttttgagttatttaaaggaatgttctggcttctttaagaatgatgtaaggggtgtaagagatgaagcagttaccaggaaggattctgggaaagaggacggtggcttctgaatggtggtcatggggaggtcattgccatgacttgctgatgaagtggatgcaggtgaagaggcagaagtagtaatcccacataactgctgggttctagtttgaataattgggtatatggtgataccattccctgagaaacttagatttgagaatgatgtggggatgcggaagggtttagagatcacttctaatgtggtgagtttaaggtaatcatgagatatccaagtcagtctatcaagtaggtggttgactgcataaatctagtgctcagaggagaagactaggtaggctgtaaaaatttagaaattgctggccactagatatttaagtctakgaagagaatatacaaggaagagcaaggcctgactacaagtc

SEQ ID NO: 916443 - DNA, 618 bp, Homo sapiens
aacttcattctttctgcatgttgatatccaattttccaagtaccatgtattgaagagactatactttccccattgcatattcttgtcacccttgttgaagattagttgaccataaatgtgatatttctgggccctctattctgttccattgagctatatgtctgtttcatgtcagtgccatgctgtcttaattactgtagctttgtaatattaaaatcaggaagtgtggtgcttgtagttttcagtgtataaatccttcagtttcttagtttggtttatttcattccttctgatgctattgtaaataggattgttttcataattccctttttggttagctttttggtagtgtattgaaatacaaccgatttttgtacgttgattttgtatgctgcaactttactggatttgtttattggttctaacaatttttgtggagtctttaagggttttctatatttaaaatccagtcattggcaaacagggaccattttacttcttatttttcattttagacacttttatttctttttcttgcctaatwgttctagctaggacttccagccccatgttcagtagaagtggaaagagcaggcatctatgtgatcacccttctag

SEQ ID NO: 916444 - DNA, 458 bp, Homo sapiens
aaagacacctctgtggtttctytttaaactctgtacttccaccataccttgcagctataccactcagaacaacctgcatacagtattctatttatcttcagaatcatgagtcacagactagttattgaagttgggtcatatgttctgaaaaggaaagatgtatcttgagaagaaagggaggagaaaagtgagtcaagaggctttgaataattcgttcaaaggtcacaagtacaaggccaacctttacccatgtattccttcaccaaatacttattaagcccttatgcaatactaagcactggagaaacaaagtcaggtatgccttgcttcctgtcctggaggaggggaagagaaagggttctcaatttattgcttgcttgttttgggttgagcactgggctaggagttagttggggtgacaggccaaaattgttaccaaatggaatgacagcttctgg

SEQ ID NO: 916445 - DNA, 663 bp, Homo sapiens
aatatcacagtagttaaatggtcataattaattaacaagatgatcaataagtggaagtacattggaggccttggtaagaaacatgcactgtataggatgggagataaatcctataaagattcaaagatgtamcagatcaatgaaatgtttaagggaccattgaggagcttaggacaagtctgtcaaagtaaaacacaaattattcctcttggattcctattatgaaaaaacaaccacaaaacctggttttttgaatcctggaggtagcctatgccccatttggtaatggtactctgatgatttactgcataacctgtaaggataccagctttcagtgtggcccagatgaaggatatgttctatagcaggtccaaactgtgtgtaaacagccttgccacttgggccatatgacccagcagaccctatggtatctctggtgggaaaagacactgtgtggagtttctagcaagcaccaataggagaatcataagtagatctgagggttcttgcacaaagccataccatctatagcacaaaattatatagtgctcaataaacagctccaaatgtgctgctgagcccttgagagtatctgatcttgaaacatcaaatgacaatgagggtagaacagtttttcattctatcagacccaccatgtcacaa

SEQ ID NO: 916446 - DNA, 663 bp, Homo sapiens
aatatcacagtagttaaatggtcataattaattaacaagatgatcaataagtggaagtacattggaggccttggtaagaaacatgcactgtataggatgggagataaatcctataaagattcaaagatgtaccagatcaatgaaatgtttaagggaccattgaggagcttaggacaagtctgtcaaagtaaaacacaaattattcctcttggattcctattatgaaaaaacaaccacaaaacctggttttttgaatcctggaggtagcctatgccccatttggtaatggtactctgatgatttactgcataacctgtaaggataccagctttcagtgtggcccagatgaaggatatgttctatagcaggtccaaactgtgtgtaaacagccttgccacttgggccatatgacccagcagaccctatggtatctctggtgggaaaagacactgtgtggagtttctagcaagcaccaataggagaatcataagtagatctgagggttcttgcacaaagccataccatctatagcacaaaattatatastgctcaataaacagctccaaatgtgctgctgagcccttgagagtatctgatcttgaaacatcaaatgacaatgagggtagaacagtttttcattctatcagacccaccatgtcacaa

SEQ ID NO: 916447 - DNA, 618 bp, Homo sapiens
aaagattatgagaattaaatgagagaatgaatgcaatgggctttgaagttatacaatttgggttagaatcctgcctcacacaatcctggcaagtgatttactgtctcaaaacctcagattcctcatttcyaaaagcaggaataataatagtgcccatctcctgggttttttgtgaagactacatgagataataaaggacttagtccattgctgaggacacagtaggcattcgtgaaatgaccattgcctttttccctttcccttcagttcccaaatgcgatcttgtgattattcttactaaacatcaatttaactatcaaactctccactattaaaattaaggaacctagagaaaaattcattttaaatttcattctgaagagtgaaacttacataatatgcccatttgtaactgcttttgtttactaaacaagtttgtaaagactttttaaaaaatctttcactaacactttttagaaacaaaaaaagttaagtacaataagaaaatgaaaataagagatttccatacccagcattaattactgttaacatcttagcagattaacttttatttttctttcttcactctaaagaaaaataactctattcttttaaaaa

SEQ ID NO: 916448 - DNA, 614 bp, Homo sapiens
gtgccacagtcttttgctgcacccatcaacccgtcatctacattaggtattcctcctaatgctatccctcccctagcccccaacccccgacaggccctggtgtgtgatattcccctccctgtgtccatgtgytctcattgttcaactcccacttatcagtgagaacatacggtgtttggttttctgttcttgtgttagtttgctgagaatgatggtttccagcttcatccatgtccctgcaaaggacatgaactcatttatgtctgcatagtattccgtggtatatatgtgccacatttcctttatccagtctatcactgatggacatgtgggttggttccaagtctttgctattgtgaacagtgctacaataaacatatatgtgcatatgtctttgtagtagaatgatttataatcctttgggtatatacccagtaatgggattactgggtcaaatggtatttctggttctagatccttgaggaatcgccacactgtctcccacaatgactgaactaatttacactcccaccaacagtgtaaaagcattccttggccaggtgcagttgctcacacctgtaatcccagcactttgggaggctgaggcaggtgga

SEQ ID NO: 916449 - DNA, 582 bp, Homo sapiens
aggaagagaccctgtttatgcaaagtttctctctctaaagtagcaaattaagctcctagtagtaggcaagaatcaagagcaaattgcaaaagtgtgatgctttgcttatgtaatgattttaagtaaacagaaaacaattgaaagccataattatgggtatcttaggtaaagaacttctactgttttcatagttaggactcaccattcttttgtatgatttggttcttgcttccacgcatccagttaatattagtgaaatttattagagaaagcattatatatgctgtactgaagacaaactatcacattaacgttgcgtttatgtctatgcgtgagaattgtatttctgtgcctaagaactttggggtaggattcattattcctgctctgatattgacactctctctttcaacagaaatggaccttttacaatattgaatggatctcagagaagacaatgagggaggctatagttctctaggactgagagaacagcttagcacatgggataggattggattgaacatcacaggcatgagttctcagcccaacmctgcctcaactggctacaaggctttggac

SEQ ID NO: 916450 - DNA, 630 bp, Homo sapiens
tggtgggtgcctgtaatcccagctactcaggaggctgaggcagtagaattgcttgaaccagggagtcggaggttgtagtgagccgagatcgtgccacttcactccagcctggcaacagagggagactccatctcaaaaaaaaaaagaaaaagaaaaaaaaaaaagagaaggaaatgcagccaataagagtacctcagaaggctgtagtaagaattaaatgagatggtatgtgtaaaatacatgtaataatgctcgagtaaactgcttaatagtcattcctacaactagtcacaattttacagtggttttgtgaccaactatcttgccctccagcctactcctgccttccttcactttggccatttctctgatcctgccctttgtctactttccctgaccttataacagttgtgctttttgctctgccagggtgggcagcagttctgggacctcagaacaggtgctactgtccattttgctgcttgattcaccttccaggtgacagaggrgaactgcagcagggctgcgttcagcatggacaaacacctgtcctctctgtcaccacagctaggcagacactggcgctgagtcatgctgctgctcacaactgaggagctttgagagactcac

SEQ ID NO: 916451 - DNA, 694 bp, Homo sapiens
gaaggctcacaatcatggtggaaggcaaggaggagcaagtcacgtcttacatggatggcagcaggcaaagaaagagcttgtgcaaggaaactttcccttatagaaccattagatcttgtgagacttattcactattacaagaagagcatgggaaagacctgcccccatgattcaattacctcccaccaggtctgtcccacaacatgttggaattcaagaatgagatttgagtggagacacagctaaaccatatcacataccaatactaaccttgaatataaatgggctaaatgtcccaattcaaagacacagagtggcaagctggataacaaactaagacccattggaatgctgtcttcaagagacccatctaacatgcagtgacacacatatagcttcaaataaaagatggtgaaaagcccaccaagcaaatgggaaacagaaaaaaaagtaagggttgtaatcctagtttcagacaaaacagactttaaaacaacaaagatcaaaaaagacaaagaagggcaatacagaagggtaaagagctcaattcaacaagaaggtctaactgtcctaaatatatatgcacccaacacagraatacccagattcataaagcaagttcttagaaaccttcaaaaagactttaactcccatacaataatagtggaagactttaacacccccctgatagtat

SEQ ID NO: 916452 - DNA, 609 bp, Homo sapiens
  misc_feature 580, 581, 582, 583, 584, 585, 586, 587, 588, 589, 590, 591,592, 593, 594, 595, 596, 597, 598, 599, 600, 601, 602, 603,604, 605, 606, 607, 608, 609: n = A,T,C or G
tgtagggtttttttttttccccacagcaaataagktttatggattgcaatgaggagtctgtcgcattaaaataagtctttttacagtatttccccatttaagcctcacatggacagcatgctggattgggcccggaaaggcagactcactagtttttcaatttagtttgttaatagcctgcctttcataaaagcatcaggcacaatcacaccaatccctaaatcaataggatgatgcagcaatgcctcacaggaatgatatttttgaaataaatatataccattcagccaggcccgtttgacatcaaatttatatactcaataagaaagcacaattaatggtcccgaactgtgttttccttcacctatttcacatttcaagaagcacaggatttcttaagaaaaaaaataataaggaaagaaaaagagaaaaaaacattccattcataaatgggatgaaggtattaaaaagcaatgccagcttgttggtgcctccccagaacctgtttatcttgcctccaacctcatttctctcttcatcctggtctttgctctgatgttactctttacagaggaattcnnnnnnnnnnnnnnnnnnnnnnnnnnnnnn

SEQ ID NO: 916453 - DNA, 615 bp, Homo sapiens
catggatgggagagaaaccagagggaaattgttgctggaacgtgagaattctatcttgtagggtttttttttttccccacagcaaataaggtttatggattgcaatgaggagtctgtcgcattaaaataagtctttttacagtatttccccatttaagcctcacatggacagcatgctggattgggcccggaaaggcagactcactagtttttcaatttagtttgttaatagcctgcctttcataaaagcatcaggcacaatcacaccaatccctaaatcaataggatgatgcagcaatgcctcacaggaatgatatttttgaaataaatatataccattcagccaggcccgtttgacatcaaatttatatactcaataagaaagcacaattaatggtcccgaactgtgttttccttcacctatttcacatttcaagaagcacaggatttcttaagaaaaaaaataataaggaaagaaaaagagaaaaaaacattccattcataaatgggatgaaggtattaaaaagcaatgcyagcttgttggtgcctccccagaacctgtttatcttgcctccaacctcatttctctcttcatcctggtctttgctctgatgt

SEQ ID NO: 916454 - DNA, 623 bp, Homo sapiens
gagttccagaccagccttggcaacatggcaaaaccccaaaaatacaaaaattagtggagcgtggtggctcacacctgtggtcccagctattcaggaggctgaggcacaagaattgcttaaaccccagaggcagagactgtagtgagatcgtgccactgcactccagcctgggtgacagagtgagaccctatctcaaaaaaaaaaaagactgagaatggttggcactgtccccctgtctccaggagggtgaatgtttctagctgaaccctggtgcccacttgctcctctaagccttcagcagtcctcccagcctcaaggggtgatccgttcatcttccccccacctctggaaatcccagcgtttgaacgctggggggaactgcaagtctagtttacagggtttctcagctgagatgccaggaacacttcgcgagtgagcatgccaccacatttgagtgcatatagaaagttagctgtttgctacaactggggacacttyctattagagccgcatctgctggggtggagggctgcatgggttggagagtagggtttgacttcttccagcaagaggaaagagaagtagcatagtgcccatcgcaggcagagagcacatgtttgact

SEQ ID NO: 916455 - DNA, 628 bp, Homo sapiens
acccaaaaccataaaaactttagaagaacacctaggcaataccactcaggacataggcatgagcaaagacttcatgactgaaacaccaacaaccattgcaacaaaagccaaaattgacaaatgggatctaatcaaactaaagagtttctgcacagcaaaagaaactatcaccagagtgaacaggcaacctacagaataggagaacatttttgcaagctacccatctgacaaagggctaatatccagaatatacaaggattggatcactttttgatccaatcccatcaaaaagtggatgaaggatatgaacttctcaaaagaagacatttatgtggccaagaaacacaatacaaagctcatcaccactggtcattagagacatacaaatcaaaaccacaatgagataccgtctcgtgccagttagaatggcgattattaaaaagccagaaaacaacagatgctggtaaggttgtggagaaataggaacgcttttacactgtkggtgggagtgtaaataatttcaaccattgtggaagacagtgtggcaattcctcaaggatctagaaccagaaataccatttgacccagcaatcctattactgggtatatacccaaagaattataaatt

SEQ ID NO: 916456 - DNA, 669 bp, Homo sapiens
ccttcaccttaagaagctagaataagaagagtaaaaaaaagccaaggtaggtaaacaaaaggacataaatttcagatcagaaaccaataaaatgtaaaacataaaatagagaaaattaaaatggcccaaaattggtccttttataatgaaactgataaactgttaacaagaatgttcaagagaaaacaaagataaattcaaattgccagtatcataaattataaaacaaataatcattccacagagcctttagactttaaaaggttagaaaagtatgattgtgaaatacattatttcagtaaagttgacagctaagatgcattaggcaaaatgcagggaaaggacaaccttcctgaaatgtacaaagaaaaactaaaacactcctatatctttcgaattaatgagctaccctttcttgtaggtaacatgatagtgtttcagaaaaccctaaagaatctacagacataactatggttagaataagaaacttagcaagtttacaggacccaactgtcaaataaaaaattcagtttttttatatgtaccagcaacaatgactattggaatttttaacaattaaaaacctgtgatgaaatccaaaaatacaaamagaaatagatgcggaagatcccttcactaacaaaaactacaaaacttcaaaaataaaca

SEQ ID NO: 916457 - DNA, 588 bp, Homo sapiens
ttggaggatgtgtgctttgtaagcaggggcatactgtggcagattgtatttctgcaactgtatgtcttgttgcatatggtcttccaaagcattgccatttccccatcaggaagtggactctatcctctttgcttgcatgtgggagagagtttatggtgtcttgactaatggaatatggcagaatctttctacgtgactttcaaggttaggtcaaagaaacaccaccgcttccacctggctcactctcttgggacacatggtttttagagctctgagctaccatgtgaaatgcctgcagtatcctcaatccagcatgcttgagaggccatatggggaaattacatacacaaaggggaagatgcccaagaagcaccaactattttagccctcactgttcaagactttcaggcctacataccagacatgtgactgaagaaacgttttatatgacttaagcaccagccaatttctgactgcaacctcgagataccytgagctagaagtatctagctgagctgctgcttgcaagttcctgactcacagaactatctgacataattaagtgatgatcagtgttttaaaccacta

SEQ ID NO: 916458 - DNA, 659 bp, Homo sapiens
cccttgagtaatgagtgagttctcgctctattaattctcataagatctgatggttaaaaacggcctggagcctccttccactctctctcccctcctcctctctctccgtgtgatgcctgctgccatttgccctccaccatgaatggaagctccccgaggcttttccagaagcagatgctggtgccaagcttcctgtgtagcatgtagaaccctgagctaaatggacctctttcctttatgaattacccagccccaggtgttcccttgtagcaaactaagtaactaacacagaagaattgttactgagaagtggggtataaggatatctgaaaatgtgaaattgactttggaactgggtaaaaggcagaggttggaagagtttggaggactcagaagaagacaggaagataaggagaagtttggagtttcttagaaaattccacttgaacccacttctggttaagtggatgaccaaaatgctgatagaaatatggacagtgacaaccagaacgacaaggtctcagatggaaattaggaatttggggggaactagagcagaggtcacccttgttatgttgtagtgaagaactckgctatgtcatgtgcataccctaggactctgtggaagcctgaatgtgagagtgatgacctataacacc

SEQ ID NO: 916459 - DNA, 650 bp, Homo sapiens
agggttgaattattacaaaaagaaakgaaagtgaaagcattagcatcaactttacagaaataaaaagtactataaaagaatacagtgaacaattgtgtgccaaaaaaatcagataacctagtgaaaatggataaatgtttagaaggacacaaactacacaaactaactcagaaagaaatagaaaataggaaaagatctctaacaagtaaatagaggccaggcactgtggctcacacctgtaatcccaacactttaggaggtggaggcaggaagatctaaggctaggagttcaaggagagcctggacaacaaagtgagactcccatctttacaaaaaataaaaataaaacaaatagaagagtatggcagtgtgcacctgtagtcccagttactcaagaggctgaggcaggaggatcacttgagcccaggagttggaggctgcagtgagctactgttgtaccactgcactccagtctaagtgacagagtaaaacctgtgtcaaaaataaataaacaaacaaataaatatactgacttagtagtttttttttaagtttccacaaagaaaagttaggacaagatggcttcactggtacattgtaccaaacacataaagaagaattaacaccaattcttcacaatgtcttccaaa

SEQ ID NO: 916460 - DNA, 433 bp, Homo sapiens
aggtaagtgtatttgtcttttcccctagagagctctttattgtgtcacctttatttaaactgattttccaaagttgtagtagaatctcagcattgaacagtccattacaamattgtctgatccagtcagtcatgtttcctatgagttcaggagtaactaaaccctacagctgctgaaagattgcatctgaaagaagattctgtgttaattcactcaacaattttttattgagtggctgtatgggccagatgctatcttgtgtgccgagatacagcagtgtacaaaatagacacaggccttggattagatggtctgaaatctaattatattactcttcactcttgcaaattttctgttccgtgtgtgcacactaacccattgttaactgcatacctggaaataggtatgactgttgccacatgcctttgtgctc

SEQ ID NO: 916461 - DNA, 433 bp, Homo sapiens
aggtaagtgtatttgtcttttcccctagagagctctttattgtgtcacctttatttaaactgattttccaaagttgtagtagaatctcagcattgaacagtccattacaaaaktgtctgatccagtcagtcatgtttcctatgagttcaggagtaactaaaccctacagctgctgaaagattgcatctgaaagaagattctgtgttaattcactcaacaattttttattgagtggctgtatgggccagatgctatcttgtgtgccgagatacagcagtgtacaaaatagacacaggccttggattagatggtctgaaatctaattatattactcttcactcttgcaaattttctgttccgtgtgtgcacactaacccattgttaactgcatacctggaaataggtatgactgttgccacatgcctttgtgctc

SEQ ID NO: 916462 - DNA, 428 bp, Homo sapiens
gatcccagcagtttacacagaatgctcatgaccattagctcatttgaacytcaccacagctctgggaggggaacagggcagaagttttccatctatgccacctattttggcatctggtaaggtcccctcttacggatgctgggtcttataaaggacaatatgatgatgtcttcgtccctttgggctgctatagcagaataccatagacttggtagcctataaacaactgaaatgtattgctcgtggttctggaagctgagaagtccaagatcaaggtgcagacagagtcagtgtctggtgaggacccactatctgcttcagggactgccacctttttgctgtgttctcacatggcataagggatgcggggtctccctgagatctcttttacgagggtcctaatcccgtcatgagggctccacccttat

SEQ ID NO: 916463 - DNA, 697 bp, Homo sapiens
agagtcctctcttgtgtcaggagggcctgtggggcctgggcaggcagaaggcccatgcctaggtttatgtgccttccagaattctccagcttagctcctgtctgtggctccaggctccaactccgaggagcaccagagctccctctcctcctgctgttggggctcagccatcctcacttccagtggtctcttcttctttgaaggtctctgtattcctgatggagatgccatgggctgtgcacaccagctgaactccccactagagatcctctctttgctccccatcacccttagaacacagttgagggtcattaacccagcccctcaaggccctcacacctggccctgtcttcacttccagcctcgccccaagtccctcccctcctaccctctgggcttcagccagaggaaattcttctgttcccaaaaggcaccaggtggtgtcaagccttcatgctactcacctcacagtgctctcctgctctagaaatgagtgatattacagatcccagcagtttacacagaatgctcatgaccattagctcatttgaacctcaccacagctctgggaggggaacagggcagaagttttccatctatgccacctattttggcatctggtaaggtcccctcttacrgatgctgggtcttataaaggacaatatgatgatgtcttcgtccctttgggctgctatag

SEQ ID NO: 916464 - DNA, 668 bp, Homo sapiens
ccattgccacatcaccaggaaacatgtggagtgttagaggactgagcccccacacactgcagaccctgaaaacagtagaaaactcwtctccctgtgcctgctcccctgactgcacggtcctcggagtggacatcagctccttcctcctctctgctctctctccttcctccctctacctccaggtcctctctgtgtcttttaaatttttttttaatttttttatttttaaataattacagattcatagaagtttgcttataagttcaactcaattccaatcaaaatctcacgaaggtttttttctatagattagattattctaaaatttatacagaaaggtaaggaaactaggctaaaactatctagaaaaagaacaataaagtgggaggaatcacctgtttgattgaaagactttggtcatcaaaactgtgtgttactgaaggaaccatagacagaggtcaatgaaaccacagagagaggctgcaaatagactgtcgcaagttatggctatttgattcttttaagacaactctttattttgaaacaatgatagattcacgggaagttgtgaaggtagtatagaaaagtcctgtgtacccgtcacccaatttccaccaacagtgacatcttaaattattatagtgcaatattgaaaccaggatattgac

SEQ ID NO: 916465 - DNA, 656 bp, Homo sapiens
tccccaaaacagcctcatgtaaacttgttatataacagaggtggcattttataccagtggacgaaaggaagaactaacagaccatgttgggaaaacagyttctctataaggagaaaaagttattatagatccctactgtacatcatacatactaactccaaatggataaaatatctaaatagaaaggtaagcatagaataaggaaaattagataaatgctatctttaaaaagcacacagtaggtggactgataggacatatattaaatacactagcatggacaccaactggtagggaaaggaatggtaatggtaatagtgggtgaagaaggaaaaataataaagcaaaataagggccttgctagtggcaatgatgacaaaaagccatggactaaggagttactgtacttctgttcacctaaggtcaacaaaatacagataggtgtcaatcctcagaactgaaggatatccaaggaacataagaatatgtgtaaattatgccatatacagaaatttcagtgtttttttctaaaccctgtacatatttaatagtgatagaaaccttatctttaaaacattccatgtctccacttttacactttccctttctttattcctttgtgctgaactctggaaacacctcagctctattttcct

SEQ ID NO: 916466 - DNA, 698 bp, Homo sapiens
ccccaccacagacttggtgtgcagcctgtgtatggtagttttctggagagaagtacagtcaagaatccaggtaccctgggaaggccatgctcatactcatatctgcatttgaaccaaagtgcctctactaagacttatttaaggaggaggggtggggagggatccttggctgaggcatttttctccactttggctaagtacctttccacttctagcctttccccctctccttccctctggcccatgagttcctacagtggtagatgtcttttgttcaggtctccctgcataactctgttttttttggccatccaaggaggggtgtgaaattgccaacaactgtgttgctcctctgtcagtgaaactggcaaagcagaacagtgcatcatgagaattagacaggaggtctcctggatttctagagtagatcctaatgggatacaggacatctttccttggattagtaattgttaaggaccgtgactatgattcagccaggaagggctaatcatcctgcttgtggtgactttgatatggacctggtttgctattgccttagattaactggctatgatcacagcccttcaatgttcagttcatgatggggtagcctattctctctcaggcttcttgcttacattattgtagyaggtgaataaaagccagactagtactttcagtttggctcattgtcctaa

SEQ ID NO: 916467 - DNA, 625 bp, Homo sapiens
cttgggtgcagacttcaacagacagaataagaatattaaatggaacctcagaaaatcagcakttaaacataaaaaatacttgaagcctatgaaatgaaggttgtactaatggatttctatgattctatgataatgataaatatatttttgctaaaacatagagtcaaacatattttacatctttcgccttgaagttgccaaaacctttgggccatcagaatttgatctgtaggtactctaaaattctaaaataagagatatgtttgaactttgtgaattttccctagttaagcccttattaaattgtatcaggcagtctcattgcctgatatttctcgatgagtcaattttggggattaaaacactggagatgagtgttaacattttaaagatattatgcatttattctcatttaatttgacaaaggtttattggatgtttactctatgactctggtttcaattgttctctagtctatgtggcctgacacttttccatactcaactagagagcagaacacagctccattaactgggattttctataagaaatttatcccgttgatacttatgtttgcggaagtttagactaaaattgaaggctcttaagaaggctcacatttcac

SEQ ID NO: 916468 - DNA, 671 bp, Homo sapiens
aagagtggagactctagagagcccaactgccaggttcatatcctggctctttctaattaccgtctgtatgactttaagcaaataataataataataatagtgtctatgaaactcactttttttctataaaatattagactagaccgttctcatggggtagttacaaaatacgttaagcattgtccctggcaaatagttgctcttattagatgttattcaccattattattaacttagattcttacagtgatcagaatttattagactctatgaaagcttcgtgttcatatacatgaaagtcagtgatccttttggatatcctgccatattttcacccatcctaggaatctaaaagtaactgacaaatcattgaaagcaagaggctggaagaagagtgagtgagtgcaatggatttcctctctgaaagctatgctcccaaatgcgcagttagcataatgaagcacgtgtgttacctgttctctcagcacccataatcttcaaggaaaccaaatttcattctgaccaaaacatctctatagatagtgatatggttttgctgtgtmcccaccaaaatctcatcttaaattcccaagtataatgggagggacccggtaggaggtaattgaatcatggaggcaggtctttcccatgctattcttgtgatagtgaat

SEQ ID NO: 916469 - DNA, 671 bp, Homo sapiens
aagagtggagactctagagagcccaactgccaggttcatatcctggctctttctaattaccgtctgtatgactttaagcaaataataataataataatagtgtctatgaaactcactttttttctataaaatattagactagaccgttctcatggggtagttacaaaatacgttaagcattgtccctggcaaatagttgctcttattagatgttattcaccattattattaacttagattcttacagtgatcagaatttattagactctatgaaagcttcgtgttcatatacatgaaagtcagtgatccttttggatatcctgccatattttcacccatcctaggaatctaaaagtaactgacaaatcattgaaagcaagaggctggaagaagagtgagtgagtgcaatggatttcctctctgaaagctatgctcccaaatgcgcagttagcataatgaagcacgtgtgttacctgttctctcagcacccataatcttcaaggaaaccaaatttcattctgaccaaaacatctctatagatagtgatatggttttgctgtgtccccacsaaaatctcatcttaaattcccaagtataatgggagggacccggtaggaggtaattgaatcatggaggcaggtctttcccatgctattcttgtgatagtgaat

SEQ ID NO: 916470 - DNA, 569 bp, Homo sapiens
ggtaccagctcttctttgtatgtctgatagaattcatctctgaatttttctggttctgtgctttttttggatgctaagctttttattactaattgagttttggagtttgttattggtctgttcaggaattcaattttttcctggctcagtcttggaagagtaaaatatactgtttcataagcatgttattgatcagcatttaataatcaatatttatattctgggaggagataaattacctctctcatttttttttctgcagcacatagaagaatacctcagacatataaggttttccatttcattttaatacataaatcagtataatactcattacactaatctcacatgtatacttatatgtgtattttagataattctgtacagattaatgaaaagaaaacatttatttattcatccacttgtgactaaggtatccatctgttcaacaaatgtttattgaaactatattgttccagacattataatagtaatgaatgcaggaatggacawtgtcttccttgtgtttttagtataaccacagatataccattaagcaactattaaaa

SEQ ID NO: 916471 - DNA, 578 bp, Homo sapiens
gtccaaagccttgtagccagttgaggcagkgttgggctgagaactcatgcctgtgatgttcaatccaatcctatcccatgtgctaagctgttctctcagtcctagagaactatagcctccctcattgtcttctctgagatccattcaatattgtaaaaggtccatttctgttgaaagagagagtgtcaatatcagagcaggaataatgaatcctaccccaaagttcttaggcacagaaatacaattctcacgcatagacataaacgcaacgttaatgtgatagtttgtcttcagtacagcatatataatgctttctctaataaatttcactaatattaactggatgcgtggaagcaagaaccaaatcatacaaaagaatggtgagtcctaactatgaaaacagtagaagttctttacctaagatacccataattatggctttcaattgttttctgtttacttaaaatcattacataagcaaagcatcacacttttgcaatttgctcttgattcttgcctactactaggagcttaatttgctactttagagagagaaactttgcataaacagggtctct

SEQ ID NO: 916472 - DNA, 702 bp, Homo sapiens
cagtgttcagatttatagactgaatgactttattggygattaaatgcttgcctaatatataatctgatacacggcattaaataatgcttgttggttgatcattctctcagcagagtaagaagtattgtgttctaggctgggcatggagaactaatcgctgtaaaaatctgaagctgtttggtctttacatgtacaatttagtggactaaaaaaagaaaaatcaaccatatataatagttgctagataaaaaatgcaacataatatttggatatgacagaagactgagtgatttttcaagaacctttacacagagggttttattaatagtgtcccttgcagtttgcaaggttggtttaaaaacatttcttccagccagcagaggtgacactgtacccctgaaccccatgctgctgatggacactgctagtcaatcacagtgttctgatttgggttcagagattgcctcataattcttgtagcacagtacttgagatgaccattataattaattgttccaaattggtactcaggaagaaaccaattccacaatgtgctagggtttggctcagaggcagccatccatgagcatatgatccctgtgtaatcctttagagcctctcaggaggctctgagcaaatgtgtaggggaaaaaatataatcaactatatatttttattgtgataaaaagtagtcaatatact

SEQ ID NO: 916473 - DNA, 647 bp, Homo sapiens
tcgtttccgtgaaggttcatgaaaaaaactccaagcttaggatttcaatttgcattataaaacaatctataattaaactttgagtttcattttcaaaaactcagcaacatagccacaagagatatgcaygcatatacacacaacagacacacacacacacacacacacacacacacacacaccgttttctagccctagtgaagctgttaactgcagtaagccctcagagggccaattttaggtcaaaggaccatagcagtttgtgggaaagtgagggagaataccatttattttcgttctaaggactccatgatcaattagtgaagtccaaatgtgtctgaaaatcagactattctggtaactattttggcttctttgtgctttacagtaacaataactcgattgcctctgctgattaaatgccacacttagtccctgccacctagaaccccattgtctcattgaacaagggagttcattctgatggcagcagttactactgtcatttttggcctatagagaatagaccacggagctcttccacggtgatgctgaggggtccttcatgaaaggatttctcacaaccttggtaaagtcagtgtcctctggactgtctgaacataattaggggatgggtaagtatgtct

SEQ ID NO: 916474 - DNA, 592 bp, Homo sapiens
aagaccatatccaaatagaaagagtggggatgcaagataggaacctggagacacaccttaaggaaatataaggggttagttggccacagtagatgttccaatcagagcaaactaaaaaaaactcatgcaytgcattggggaaaacagtttcaatagaacaaggagatggaaatcaaacaagttgagtgaaatgtggttagtgaaaaagtggaaacgagtataaattacgctttctaaaagtttaatagaacaactgaaatatttaagagatggtggaatactaggggactattaaaagaaataatgtagataatgaaaacacactgccagggaaagatagtaaaaatgtcattaaatttcttaaaacacatggaacacagaatacttgcatgcacgtaatatcaagcttcaagatatgtaaagtaaaaaaaagtactctcagaaattaacaaactcataataatgatgtatttttgtttctttttatttttagttattatttaaaataattttattgttatttattcatttttatttttaattttaatatgtacagaaagaattgtacatatttgtgaagtacctatgatac

SEQ ID NO: 916475 - DNA, 643 bp, Homo sapiens
agtctttgtgtatatttctaggtaaagtgtgttttttgtaggcaataggtcattgggtcttgtttttttcatccattcagccactctatgtcttttcattggagagtttggtccactcacattcaatgttattattgataagtaaggggttccttcactattttgttatttgttttctggtctttctttccttcttttttgtcttccttttagttaaggtgttttttttctagtggtatgctttaattttttgctttttatttttaatgtaccactgtgtgttttttaattcaaagttaccatgagacttgcaaatactatcatcttataacccccttttttttttgaggcagattcttgctctgtcactcagactggagtgcagtggtgtgatctcggctcactgcaacttctgccacctgggttcaagtgattctcctgcctcagcctcctgaatagctgggattactggtgtgtgccaccatgtccggctaatttttgtatttttagtagagacggggtttcagcatcttggccaggctggtcttgaactcctgacctcacaatccacctttctcagcctcccaaagwgctggaattacaggcgtgatccaccacacccagccttataacccattatttt

SEQ ID NO: 916476 - DNA, 738 bp, Homo sapiens
ctgtttgagacctccatgaggtagatgttgtagataaaatttgcatgaattcatacttgacctctatccttgcccaaccctcagaagcaacaagagtagtaatcatcacacccatgtttacccaaagcttgccaagctctgtcagagaagtttgttatatggtcaaaagagcacaagttttgcaattagtttatatcctggcactaccccaggaggtttgaccagttatttatttgctttcacaacattggtcttcatctaaaaatggtaaaaataatacctggcttacagggatctgaataatgcacatttgagaaagcactttgaaaactgtaaaataaggaaattttgtggcctacttgaaataaatagcagctttatgatgaaataaaaatagccacaatgaaatcaactaggtaaacaaaatccaaaagattttaaaaaattgattaatatagtacaatggcatactaaattggtgatatggttagactttgtgtccccacccaaatctcatcttgaattataatccctataatccctacatgtcaagggagagaccaggtggaggtaattgaatcatggggcagtttccctcatgctgttctcatgatagtgagtgagttttcacaagatctgatggttttgtaaggggctcttccygctttgctcgacacttctccttcctgcagcctgtgaagaaggtgccttgcttcctctttgccttccaccatgatt

SEQ ID NO: 916477 - DNA, 672 bp, Homo sapiens
tcgcagagatatttccattattgactattaataaagttatagacaattaaatttaccttgtgcatrtctaataacttgggtattttgtggcttctcaaattttgggtcttaccatggtttcaagatgcccaataacttcaaaggtgtatcccacgttgttgcctgtcatttctgacagcacctcactgatgggtttggtagagtccttgggactgatacactcagtggcacctacagccatggccttctcaaatttgtctttgttgaggtcaatcccaatgatcctagatgcaccagctgacttacagcccatgatgactgacaggccaactcctcccaggccaaagacgacgcaagtggaaccaggtttgacctgtggagaggaatgttcttgaacatgttaggtgttagggtcaaaaagtgaaacctgaaaagggcctccagttaaaaacacaaatcatgagtgaactcccattcacaattgctacaaagagaataaaatatctaggaatacaacttacaagggatgtgaaggacctcttcaaggagaattacaaaccactgctcaaggaaataagagaggacacaaacaaatggaaaaattccatgctcatgcataggaagaatcaatatcgtgaaaatggccatactgcccaaagtaatttatagatt

SEQ ID NO: 916478 - DNA, 580 bp, Homo sapiens
tactgttattaccattttatacaaaatggtataatacatacaaaatatgtattttgtatgtcttcgtcagccttaaagccacttttgaattttttagcatattttcccagaacatgtcaattttatttccatttaaattgcttgagatatgagatgatgacatagtccctgaaaattttattcccagctgtgtatctccctggagtctttgacttacttccatgtgggcaggaggtgctttgcatcaggccacacctgccatcctggagcctcctaaccctcatcctggggaatcccttccctcttctcagggtgagagcatcagcttctcagataccacatctttctttgaattaatttatcagttttggggcacttcattagtaatcttctggagaaaaagttacaccaaggggtgaatttattgagatcttttctttctattggatttctactgtgctgtgatgagttttaattctcaagagttttttatgkcaacatattcttttttcatgtatgtaatatctttttacaaatattaataacagcttttaaaaaaattttgaatttttttatttca

SEQ ID NO: 916479 - DNA, 577 bp, Homo sapiens
agcctcccaaatagctgggactacagttgcataccactatgcctggctaatttttgtgtttttctgtagagacaggtgccgagaccagcttggtcagggwgaccctaaccgagcgggcctgagcgttagaggaattaaagacacacacacagaaatatagaggtgtggagtgggaaatcaggggtctcacagcctccagagctgacagcctcaaacagagatttacccatgtatttattaacagcaagccagtgataggcattgttttgatagattatagattaactaaaagtattccttatgggaaacaaggggatgagctgaaataaagagatgggtttggctagttatctgcagcaggagcatgtccttaaggcacagattgctcatgctattgtttgtggtttaagaaagcctttaagcggtttgctgccctggatgggccaggtgttccttgccctcattccagtaaacccacagccttccagcatgggcatcatggccatcatgaacatgtcacagtgctgcagagattttgtttatggccagttttggggccagtttatggccagatttt

SEQ ID NO: 916480 - DNA, 621 bp, Homo sapiens
tgagttttatagtataatataacagacagtcacagaaacatcaaaggacaagaagtgggtggtatatcttgagcaactggacatcaggggctgtctctcctcattgcttctctctttttctttttctctttctgagtacactctggccctgactcttctatcttttagctagagtctctcgatcacacagttgagtcaggggtccaacctgggtctgatgtctggccatgaagcaatcagtgaaaaccagagggttgaggttatgcaggtgtagaaagccacatcattttcaaaggtgtcacaaagctagtaaatggcagaggcagaatgccaagtcacatctgtctgatgcccatattctttccactaaaaaaaaaggagtggggctggaaagagtttgagtaagactttcggctatctaccctgaatgatagctccacactgcacaaggcttgaggaaaaacactgtaactggcaaggagctcagaarcaatactcttcaaattcctcattttattggccaaatgacttggcaagacaatgtggttaatatttatttaaatatatttggataaggaaaatacaggattgttctcacagttccatagtctaacatctttc

SEQ ID NO: 916481 - DNA, 662 bp, Homo sapiens
tcattaactgttgttgatttgtgastatttgggaatccaactctgctgagggagtaagggagacttttttttttttttggctggctaaaggtttcttttctgccacccctgagtcaacctgctttattttattttttccaaaaccaccataaagcgaagttttgaaaaagacttcttggagaaaatgtcttgaggagggaagaaaggatgagtagaaaaatagcatgatcagccatgcagcatttatatttccaaaaactgtatatattactggaagattgagtttcttccttcctttatgtattcacctaaaatttagaccaattaatatgttatttaagtatctataattcatgttactggattaacccatggtgctggacattataaaaatattcagaaagaaaattttgaaagcagttacttcagatggcattttataggcctgggaagtcgctgaagagataataataataaatatgaaatagttaaataaagccaagtatgtaataaattaagtcatatagttatatgctttgatataaagtattatcaaaactaattacataggacttaagttgtccctgaggcagaatagagaagacaaggaaaggcatcctaagcccttcaaatagcagaccaagataaacagacaaggaaat

SEQ ID NO: 916482 - DNA, 643 bp, Homo sapiens
actatacataaattatcattgagaagttgttttaaaaactccaaattgcatttttacatgaatgtttaaacattagaaaatcagatatttgaaaataatattgttcctgctaaaatgtgtctgtagattaracaagcctgtaagttgaacatttgtggtctctgttttacataattaatgcatggtgaattgttatactattattgactttgttggggaaggttttttttctttttcctttaatacttgatccatactcagaatatacaggcacaatcagattctatacaacagatatttcaaagaaaagatattcagagtttatacaaattgaagtagggaaccatatttttaaatttatttttcactgaagctctattgatttcttatttggctgaacctatatgatcttttgtgactagcttacctgtatttgagtatgttcaccctacaccattaatcaaaccgtcctctgtggaaaagtgagcttatttcctgaaaaatatttaagaaaagaggagacatttactgtcttttacatactccacccccaacataaaaaattgttcttacattcaaaatgtattgcgtatttggctaattcacagtttgcatcttcgatcctaggcttggcaggttcttg

SEQ ID NO: 916483 - DNA, 591 bp, Homo sapiens
tttcattttgtccttagagaatctgatgactatgtgtcttaaggatggttgtcttgcatagtatttcacaggggttctctgcatttcctgaattttaatgttagcctccccagtgagattggggaaattttcatgaatggtatccttagatatgttttccaagttgttgctttctctccctctcattcagggatgccaatgagtaacagattttgtctcttcatataatcccatatttctcagaggtttctcacattctttattgttttttctttatttttatgtgactgagttattttggagaactagtcctcaaactctgaaattctttcctcagcttggtctattctgcttctgaaattcttgaagtgaatttttcatctctctcagatcagtttggttctttcttaaaatggcgattttatctttcatctcctgtatcattttattgtattccttagattcctcagattgagtatttgattttcacctgaatctctatcttcattcctatccmtattctgaattctatttctgtcatttcagccattttaccctagttaagaaccattgcagggaaactagtgcaat

SEQ ID NO: 916484 - DNA, 641 bp, Homo sapiens
ttaatcctgattgccaacaacataccaataatttgctcttcatgtgatctgaaattttccaaggtttgttgaatgtacacagttggagaacgtacaacagcacaattacgtttcaagccattactatttaacttattttgatgaatgccatttgtggggggaaaaaaaagcaaagcagataagtacatattaagatgcctttagggagctccactttccctactaaaagcatttttctaagtaatatagcttcagaacatcttgactgaaatagctttagaatatttacagcaaaagcatctcttttaggaaagttgaggtggctgaaagtgaatgtgtcttaatgcatgaagagcttacaggtccacaagattgcaggacatacgtgttcatgaagccaatgaaaactcagtaggttacaggacctacattctggttctttccaggagagttgacgtagagctggagtggcttcatctgcctctatttacaatgagagattatgagtacataattgcagtgttagcagaaggcatcacacgtgtgcctccgcattttagggaaagccaacttgccttccatttgtcatgtgtctatgaatacgcgaatacatayaagagttctctgtcttcacggagttg

SEQ ID NO: 916485 - DNA, 637 bp, Homo sapiens
ttttcacactacttttacccctttttctagtttatttgtagtgttactgattactgtttgttttggtgtaaattggggttgctccttggtttccttaagctggctasaattcaaccttttggattgtgctaagctatttaccacctccctctctgttctccagcttccaaagttttattgctattatctcctcttcccattttgtcctcgtgggtttgtcttttgtgaatctttccagcctcctcctcctgccctgcccattttgtgcattttctggaggaggcaagattaatgaatttattcagtcctccatttttgatgcttgttccccagagcctaccagctttcagtcatgtagcttttatctttacagtgtatctattttctatcctctctgtcctatttcttttggcaccattctaactcagaccttcagaaactcccttgtaaacaagatcttcatcccaagattcttaccatcccaagattaaatccatttgggataacactgccaggctaaccttcccaaagcatagcactgtgtacaccatccccttgtttaaaaacctttacaacttgctactaatcaacatgaaatataaatggttcgctcctgtatttaagttctggcattata

SEQ ID NO: 916486 - DNA, 637 bp, Homo sapiens
ttttcacactacttttacccctttttctagtttatttgtagtgttactgattactgtttgttttggtgtaaattggggttgctccttggtttccttaagctggctacaattcaacctttyggattgtgctaagctatttaccacctccctctctgttctccagcttccaaagttttattgctattatctcctcttcccattttgtcctcgtgggtttgtcttttgtgaatctttccagcctcctcctcctgccctgcccattttgtgcattttctggaggaggcaagattaatgaatttattcagtcctccatttttgatgcttgttccccagagcctaccagctttcagtcatgtagcttttatctttacagtgtatctattttctatcctctctgtcctatttcttttggcaccattctaactcagaccttcagaaactcccttgtaaacaagatcttcatcccaagattcttaccatcccaagattaaatccatttgggataacactgccaggctaaccttcccaaagcatagcactgtgtacaccatccccttgtttaaaaacctttacaacttgctactaatcaacatgaaatataaatggttcgctcctgtatttaagttctggcattata

SEQ ID NO: 916487 - DNA, 632 bp, Homo sapiens
catcattctcagcaaactatcgcaaggacaaaaaaccaaacaccacatgttctcactcataggtgggaactgaacaatgagaacacacaggaaggggaacatcacactccggggcctgttgtggtgtgggaggaagggggagggatagcattaggagatatacctaatgtaaatgacgagttaatgggtgcagcacaccaacatggcacatgtatacatatgtaacaaacctgcacattgtgcacatgtaccctaaaacttaaagtgtaataataataaaataaaataaaaatggtttccaagaactttataaaatatcaaacattaaatcccccttatatttgtattttcttttacaagcacaggaaaatattttaaagcttttggaaaacatttaagtttttttctgaaagaacaaaattagctctttgtgtcagagttttaaccacatttgtttacatgagacaaaaataagaaaagagacaatacttaaagaaacaaaggaacttgctccagtttttttttcaaatttaaaagtgtaagcaataagctagatcactagtmacaatgagcagtcttattctctgctgggtcaacacttccattgtattaccatatccattttctcttgg

SEQ ID NO: 916488 - DNA, 637 bp, Homo sapiens
tgcaagtgccagcgtcttcttagccgctctgtgcatcccaggctgccctgttatctggccaccgtccctggccattgggactgcttctgatggctctggcctctgctgccccagggagcatcttctgtaagcagctccttttctctctcctggtgagtaacaaccaaaggattagggaattcaagcatgttactacctgcttcctctctgcagtttgggcttgaaagagactaggagtgaggatgggaggcagagaagagagattggggaaaacaaaagcagatctgaggaagattcagggaagagttgagaggcttgggattcaggatggaaagtgttcagcttacttctcaagcacccactgccagagtgttaaaagttttcaagggaatccctcttccatcctgctgtggtgattttctaagagtagagaagtgaattcattctttaggcatttggcccagaagtttctgaggtttacttctgctaccagtgattacataaactcatgttatttaacatgctgagttctactaagctgcaaaaaaagagaaaggattctgggtgaacatgcaaattatccaggacwttttgaattttacccacgaagcagtttaagcaaagaatagtttaagaa

SEQ ID NO: 916489 - DNA, 618 bp, Homo sapiens
taaaaagtatgtcacatggacatattataccccttacaactcacataatagtgatgtaataaaagctaaaattgggtttaaaagagtaataagttattgaaaaaaatcatagcagatgggaaaggagcacaaagatggataataattcctagaaaggatatgattattattttcccatcagattatattgaatcttgagaataaaactgttaattgtttctctcatatatgacatgaagtcatttactgccgggaaatgatactagcctccttttcacatgagtgggagaacttaaattaaggtatttaacgctctgcttcagaattatattatttggaaaaaaattcccaatgcaataaatggctctgttgataaaactgaataaaaacaaatcataaatatgaataaatgaagatgataaaagataaagaaggaaatggagtagtccaaatgatatttaaaaaatgacatggtttgaatctgtgtccctacccaaatctcacgtagaaatgtaacccccaatgctggatgtagggccttgtgggaggtgactggattatggaggaagtttctcatgatttaacawcatccagttttgatactgtcatcacaatagc

SEQ ID NO: 916490 - DNA, 636 bp, Homo sapiens
ccttgttcggtcgggatggacaaaatcctaaagtcaccaagtatttcaggagcagatatgaaatttctcttgaaaakaaatggaatctcttccacgctggttcttatccaacaacttcgcaaaaactaatctttcaatagcaaaacaattgaaatagccattattctcaaatgttgttgtatggcatttactagccacacacccttgacatgtcattgacccatctaagcctagatatttcctcctataaatggggataataaaaccagcctgtctaggatcaaatgacgtaagccatatgagagcattttagaaacaacgaagcagtaaaaatatgcaagatattatttatcattggcaaagatattgggcaaggcatatagacacttgtgtaatgaattttatttttataaagcacttgagttaataacatagaatataaaaatgagctcattttttaaaaagttatgattcctttcacttcccctggaatgggaaattcttcattttggttaatatgctgcaggaggcaccaacttaataccaacactgtgccaagtgaggttttaggagctgtgtgaggaaagtagtggcagccctagcatctagcaaggcacccagaacagaagaggcccc

SEQ ID NO: 916491 - DNA, 613 bp, Homo sapiens
gcaggggcgggtggcagggggcgccacataaattcagaattatcccctccccatgcttgtgtaagcaccaacaaaatgccaggccaggggggcgcagctcagcacttgtataatgagggcctcccctgagmcttcaccttctgcttaaaatgcagagaggaggaacagtgatggtggaaaaaaagtgttcactaacccaagtggggactccaagccagctcaggtggctcagccctgcagagacccaggagccccagtcccaaccctgtcatctccctactctgccccacttctcctgttcccggggtctatggaaggacgagctgttcccattgagccctgccagggctgcgctttaacccctacaatccttcctaatccccctcagctccacccctccagctgctcctccctagccctggcattctgcccgctggcctctgcccagcccttgccccaccctgcccaggccaccctctcctctccccaagaagatccaggggttggcccagggccctccagagcacagtcagcaagctgggcacctgcaactcggaggcagagccagggctgaggctcagagtctggcccagcctattctcacccacccagt

SEQ ID NO: 916492 - DNA, 663 bp, Homo sapiens
cttttccaggctgagggtgcaagctgtcagtaaagctaccattctagggtctggaggatgatgggcctcttctcasagctccattaggcagtgcctaagtggggactctgtgtggggtcaccaaccccacatttatcctctgcactgccctagtagaagttctccatgatggttccattcctgtagcaggcttctgcctggacatccaggtttttccataaatcctttgaaatctaggtggaggcttccaagcctcaactcttgcactctgcaaacccgcaggcttaagaccatacagaaacccccagggcttatggcttgcaccctctgaagcagcttcctgagatgtacctggacctctttgagccacagctggaactggagcagcagggatggagagatgcagctgggatacagtgtctccacgctctgcagtgcagcagggccctgggtgtggcccacaaagccattcttccctcccaggcttcttggcctgtgataggaggggctgccaggaagttctttgaaatgccttcatgtccttttccccattgttttggctatgaccatctggctcctctttacttatgtgaatttctgcagctggcttgaattcctccccagaaaatgggctttccttttctatgatatggcctactattt

SEQ ID NO: 916493 - DNA, 663 bp, Homo sapiens
cttttccaggctgagggtgcaagctgtcagtaaagctaccattctagggtctggaggatgatgggcctcttctcagagctccattaggcagtrcctaagtggggactctgtgtggggtcaccaaccccacatttatcctctgcactgccctagtagaagttctccatgatggttccattcctgtagcaggcttctgcctggacatccaggtttttccataaatcctttgaaatctaggtggaggcttccaagcctcaactcttgcactctgcaaacccgcaggcttaagaccatacagaaacccccagggcttatggcttgcaccctctgaagcagcttcctgagatgtacctggacctctttgagccacagctggaactggagcagcagggatggagagatgcagctgggatacagtgtctccacgctctgcagtgcagcagggccctgggtgtggcccacaaagccattcttccctcccaggcttcttggcctgtgataggaggggctgccaggaagttctttgaaatgccttcatgtccttttccccattgttttggctatgaccatctggctcctctttacttatgtgaatttctgcagctggcttgaattcctccccagaaaatgggctttccttttctatgatatggcctactattt

SEQ ID NO: 916494 - DNA, 640 bp, Homo sapiens
tcatcctcacccccatctctcaccaccaccccaggatactaataggaaagctgctttcgcactaaccagaaaaataggaaaagggtgaaaacaaaaccttacctgagaagttgcaaacataagcagccctggagcagatcatagctgaaatttacatctcttggttgggggtggggaataaaatcctttggcatgaatttaatgtaatgtggttctagatttgtagttcccctagggatgcagaaaagtaaacacaaatcctctctgaagaatgcaccttcatatatgcctcgaacgatctcaaaaataatatttatgagggcaatgacattcatatagtcaacaataataaaacagataaagcaaaaggaacgagaaccaacagaaacaatagccacaaagacttcaactattagtattatcaggctagattaaacttcaactacccttactttgtttaatgcaataaaacaccattttaaaatatcagcaataaatctctggacagaagctataaaaagttatagtrtgctttttttaataattagaatatcttctctgttactccttggaataaaaaatggatgagtgtaacagccaacgaacacggcaaatgcagaattagtgaacaaaatggagc

SEQ ID NO: 916495 - DNA, 651 bp, Homo sapiens
gccatccccaacctttttggcaccagggaccggttacatgaagacaatttttccacagaccaagggtgcgggggatggtttcagggtggaactgttccacctcagatcatcaggcattagtttgactctcataaggagcacacaacctagatccctcatacgtgcagttcataatagggttcttgctcctatgagaatctaatgccaccgttgatctgacaggtggagctcaggtggtaatgctcactggacagccattcatctcctgctgtgccgccatggcccgaggactggggatccctgggtttgagaattacagatgatttctgcttgtatacttgctccattttctattataaatatgtataacttttataattatataaaatgattgtgtaattattttatataggatgtattttatatgtagggggtatgattgtgataaaacaaaagaaataaaagagactggaccaagaaaagggtgaatctgccgatgttattacttgtgcataacattggtggggggaaatgaagayactcatttcaaaggttagtcataaagtttacatgaaatagcaatgtaaagcattttgtccactggcaaatttaaaaatagctggctatcactattatctgctccttcatatt

SEQ ID NO: 916496 - DNA, 599 bp, Homo sapiens
aacatatcaaattccacatattttaaatatgtgcagtttattatatatcaatttttaaagatctaaatggcctgccagggaggcgttggcctgatcttaatgagaagccactggactgaagtcatccaccatgcatcacctcatgcaccacccccatctccctccaggtggcaccaatcccagttgtgtgctttaagctccaccatggttggcctcaagtgacccttgaattagctatttagacaaagatttaaaacaaacatagacttaaaaataaatttacactatatatatattttgagataggatcttgctgtgtgcccaggctggagcgcagtggaacaatcatggttcactgtagccttgacctcctgggctcaagctatcctcctgccccagcctccagagtagctgggactacaggcaggtgccaccatgccaggttagtttttatgtttctttggtrgagacagggtcttgctatgttgcccaggctactcttgaactcctgggttcaagtgatctgcccatgtaggcctctcaaagcactgggattataggcatgagccgctgcacctggcctgattttggctttctct

SEQ ID NO: 916497 - DNA, 681 bp, Homo sapiens
ctgccacactactggactttattaaacacagataaaatttgtctcatccagcaacagcccatgaaktgatgggacccaggaatggccaggcaggtgccatgtctgctcactcatgctgggctggcaaaacctgcctcattctaaaaagagcttggcaggaactggagtaaatatccagcagccctctccctggagtgatgttgttgggtagggacaatgttttcggagagtttcccgtgtgcccaactttatgtacactggtgcctttaacccccatagcagttctgcagataatatcatcctctctgtcttgtaagggaggaaagtgaggcacaaagatgtaaggaaactggcccaggtccaaagaagagtaagcagtaggtctattagatcctaaggtttgttttcttttttcaataaaccatgctgtctttcctgaggtctaacaaagtgaggtctgaccttccacctttgcttggatggatgatagacacatcagcagctctcccagacgttccattttgttcagactggtctccttcacccgctcctagacaggcccaccttgaattcctggctttccccattcccccacttccccacaacctcataatacctttcctggctttcttccaaaggtccaattcctctacctgccctacccaacttctatgccttgag

SEQ ID NO: 916498 - DNA, 560 bp, Homo sapiens
ttaaagtttttttttaaaaaaagaggtgaagttttaatagcatcaggaacaaaaataccattgtaagccagctctcattttttgacattttttggtatcatctggacaaggtcatttgtcacagggtatgactctatccatgatgctacagacatcatagaaagtccaatgatgaaaacaattttccagaatgaaaaatccctgggagactagaagtcttatagttcttgcacaattgtagaagatctttggttttacaccatgagttttccaagtctttgatcctgtgtaacttactcagtgtagtataactatagtggttttctttaattcacttcctcttcaaaagaacaaatttttataatggggtctaacactgtaaacatttcataatattgtagcttcaaagaaggcaggctgtaaacacatttgcatccagttagctgacggtttatagatctgagggactcttgggtccwtgctttccatgaggaagcatttatttcattggctttgcctctgaagtgcagttcccatcaacccactcagagaggaagtgc

SEQ ID NO: 916499 - DNA, 638 bp, Homo sapiens
gggggcctcttctgttctgggtgccttgctagatgctagggctgccactactttcctcacacagctcctaaaacctcacttggcacagtgttggtattaagttggtgcctcctgcagcatattaaccaaaatgaagaatttcccattccaggggaagtgaaaggaatcataactttttaaaaaatgagctcatttttatattctatgttattaactcaagtgctttataaaaataaaattcattacacaagtgtctatatgccttgcccaatatctttgccaatgataaataatatcttgcatatttttactgcttcgttgtttctaaaatgctctcatatggcttacgtcatttgatcctagacaggctggttttattatccccatttataggaggaaatatctaggcttagatgggtcaatgacatgtcaagggtgtgtggctagtaaatgccatacaacaacatttgagaataatggctatttcaattgttttgctattgaaagattagtttttgcgaagttgttggataagaaccagcgtggaagagattccatttmttttcaagagaaatttcatatctgctcctgaaatacttggtgactttaggattttgtccatcccgaccgaacaaggg

SEQ ID NO: 916500 - DNA, 679 bp, Homo sapiens
aaacttaaataggagcaaaatttatgtgaccttttggtgttccagtttcccagtttctcagtgtttttcttttcacatttccatttcacctaatttctttgcttacattttcccccaaactgagttttttttgatctccctataccatcttacacttgattttttttcccccatgaccttcatcttattctcttttgtttttcttatgtgtttacatcgctcagatcctttagatgcattttggggcattttctatatattatttataaaatgaatgcaggcctattctataaacaatttcaaacaatgcaaaatgcataaagttgtaaggggcctctcctgcatctagattttgtctatgcattttacatatatctatgtgtttgtgaatctagtaatatatatacacacttaagaatttttatacaaagtcttttaacctctctttcatattttccttcttgttgactctgtctgctgcattcttggtaatttattcatcttgcttttctaatttccatattttctcttcagctgtttttaagctgcacttttacctatctgctgattttttttttcaattccaattctacctttkggaaactctacctagatcttatagaaatctttgggtaatctttgataatatcttaatcatcataattttgaaaacattaaa

SEQ ID NO: 916501 - DNA, 594 bp, Homo sapiens
actgcattgtattctgtcttctcagtattatactaactagtcctccacttatttccaatttttaagtttttttcaacttttcactgttataaacaactgtgaaaacctacatcatttgcagatttttgtakgtatctttgattatttctttaggaaaagctcctagatatcgaatttcttggtcaaggtttgtacattctaatagcttttgattagttgagtcagattgtcatccaggaaagtgttatcagtgattgctccattaatattgtgttggaatatttaataccagccaaagatgggaaaaaataggcagtttgcttgataactcccaagatcctttttaaaaaagtaaactttttggccaggcacagtgtctcacgtctgtaatcccagcattttgggtggctgaggcaggcggatcacttgaggtcaggaggttgagaccagcctgaccaacatggtcaaacctgtctctactaaaaatacaaaaaaaattagctgggtgtggtggcgggcacctgtaatcccagctactcaggggggctgaggcaggaatatcacttaaacccgggaggcagagattgcagtgag

SEQ ID NO: 916502 - DNA, 594 bp, Homo sapiens
actgcattgtattctgtcttctcagtattatactaactagtcctccacttatttccaatttttaagtttttttcaacttttcactgttataaacaactgtgaaaacctacatcatttgcagatttttgtatgtatctttgattatttctttaggaaaagctcctagatatcgaatttcttggtcaaggtttgtacattctaatagcttttgattagttgagtcagattgtcatccaggaaagtgttatcagtgattgctccattaatattgtgttggaatatttaataccagccaaagatgggaaaaaataggcagtttgcttgataactcccaagatcctttttaaaaaagtaaactttttggccaggcacagtgtctcacgtctgtaatcccagcattttgggtggctgaggcaggcggatcacttgaggtcaggaggttgagaccagcctgaccaacatggtcaaacctgtctctactaaaaatacaaaaaaaattagctgggtgtggtggcgggcacctgtaatcccagctactcaggggggctgaggcaggaatatcacttraacccgggaggcagagattgcagtgag

SEQ ID NO: 916503 - DNA, 611 bp, Homo sapiens
ggacgcctcacacggccaggtactcctctgagacaaaacttccagtggagcgatcaggcagcaacatttgctgtccaccaatatccgctgttctgcagcctccactgctgatacccaggaaaacagggtctggggtggacctccagcaaactccaacagacctgcagctgagggtcctgactgttagaaggaaaactaacaaacagaaaggatatccacaccaaaaccccatctgtacgtcaccattgtcaaagaccaaaggtagataaaaccacaaagatggggaaaaaacagagcagaaaaactggaaactctaaaaatcagagcacctatcctcctccaaaggaacacagcttctctccagcaacagaacagaactggatggagaataacattgatgagttgagagaaggcttcaaatgatcaaactactccaagctaaaggaagaatttcgaacccatggcaaagaagtttaaaaccttgaaaaamaaattagacaaatggctaactagaataacaaatgcagagaagtccttaaaggaccagatggagctgaaagccatggcacaagaactacatgacgaatgcacaaaggctcagtagttgattc

SEQ ID NO: 916504 - DNA, 641 bp, Homo sapiens
tttttggaagcccaaagaaaggaggaaatgtgaatatttaatgtcttgatgtgcaaaagaaaaaggcaaaccagacacattagagaagcacaattatctcttggtattaaaaccagagaatcatttctctggggcctaacagaggataaggtttaatataattaacaatgcctacaagagcatctttactgtaaatatcatgcacaacaaaaaggccaggaccatgaaattactgaaattatttgaataccttgaaattatttcaatacctcttgctaatgtgagggatgggatccacttggttctgcagtcatcccttttatgtaatgtcttaaacctcacttcttagagaaggtattattcttcaggaatgtttctaaatagtcatcaattatgcagatcaaaaacctccacgcaggccacatgtttgttgtaggaagagactaccactaagctctactcttcaggaagtagattctcaaagttgcagatgctccctctatacatgttgaactggctctgagaaaacaatgtttaaggaggactgtctgaagattatactgttcgtttgttcctctaggtattataaaatctatctctacattgcaaataaccagsaggaatgtccctagatttcatgg

SEQ ID NO: 916505 - DNA, 604 bp, Homo sapiens
tcaaataattttattattgctttgtgagttcctactcataatcatacctcaacagaatgatactgacctctattttagaccaggcccttctgttacacattctcctagtacaacacaatttttttttcataattgattatagttggggaaaatttatttcactgtgcattaatatcccttccccatcaaaatatgtgacatatgagcatgggtcttctctgtatttacttgccgttgtgtctcaagcatataatatagtgtttgacacatagtaggtactcactattttaaataaacagaaaaagatgtcttaaacaccaaatgaggctctgatcatcaaccaattttatggagaataaataaagttaaaatgtggaatccttgatttattccccatagtaaaataaattattgattaatgagttatttatagttattataaaaataattatgactaattaaagagttaattatacttttaaaagacataaaattgccccagattaacaytgatacaatgttagcatggagaaactcaagcatagccaagaggaagaaaaagaggaaggaaggaaggaaggaaggaagaaaggaggaaggaagg

SEQ ID NO: 916506 - DNA, 624 bp, Homo sapiens
taaatagccatgtgatcaaattccaagattctacaaccagagaatatgcccatataaagaaaaatatatcttagaacaacaaaagtaagaaggaaaacacaggggtaaatttttgtgaccttggatttggcmatgggctgttagacgcaaaagcaaaatcacaagcaatacaaataaaaaaaaaacctagactttattaaaattaaaatgaaaacccattgttcttcaaatgcccctatcaagaaagtaaaagacaagccaaatatttgtaaataatatatctgacacgggtcttctatctagtacatataaataactattacaactcactaataagaagaaaaatagctcaattttgaagtacttaaacagacatttctccaaagaagacataccaatgacctaagaagaacatgaaatgttcaacatcattggccattaggcaaatgtaaatcgaaatcacaataagataccacttaacatccagtatgatggctaaaaacaaaaagtcagatgagttttaaggagtgtgtggaaaaactgaaatgctcatagactgatagtgggatgtataatggtgcagccactttggaaaccagtagggaggttcctcaaaaaattaaa

SEQ ID NO: 916507 - DNA, 643 bp, Homo sapiens
cagtccagtaggtttcagcctcattttacccagctcctattcaagatggagttgctctggttcacgtgcctctgacactgctagataaaatataggatgcaaataatacatcctgtaatatcctaaaatattatcctaaaaattaatttttgtgtatctgatattcaaatttaactgaacctcctatattttaatttgataattctagcaatccttcatataacatttctgagaggtaggtatttcttatatacagagttttatagataaggaaactgaggctcagaggcattggataatttttccaaaattggacttcagatgaaatctgctggtctgcagaggcatatgctctctaagcattattcctggcttggtgaatgtgaagtaagatgctgcatactgtgacatggcattctttgggacagcctagattctatctgtttaaaggagtgaattacatggcctctgggtcatcttcagatctgctgctcctaagataaaagtcctatccaatagttggaaaatgcaatactstgaatattatcttaatgtagggatggaactcttttgagcacaaaagcaaaatctgggccaaaagcctagtcactgtaagtactactggaagcagtgaagataaaat

SEQ ID NO: 916508 - DNA, 608 bp, Homo sapiens
catctgtttaaaaatatctgaaacgtaatcaggtgaaataaggactttgttttgtggccctaataggttgaccagggtccagtgaataaggactatagtccttgggaaacagacttggttcaaaagaagaatcaacttactcactttctaagagtcagagctgaatactacttactacattgggttacgttctgtttacatgtatgtatctgcccaaatattgtaaacttcttgaaggcaggaaatgtgttattcatctctggatctctggcaaataatatctgactcaaagcaggtaatgaatgtttgttagctgaatgactaaaacgaatgacctaggtgatctacaaagtcatatattttcagtcgctggatgtattcaaggagagagcaaattaatgactagtggggatactgcagggggtattaaagatgaagcgtatgacatcttccaagcctgaaatcttatgactctgtgagtcatggtgtaaaggaacttgcttggactgtctcaagaaacttgggttctagtcctactcctgccatccacttgttaagwgacactgatcaaattctttcctcctcagggcctttcttttcatctacaa

SEQ ID NO: 916509 - DNA, 642 bp, Homo sapiens
cttgtgatcatgtgagttaataatacttaacaaactcccatatatatatatacacacacacacacatatatatatacatatatatatatgtatatcctattakttctgtccctctagagaaccctaatacacattacatgctcatagataaggaaaattaatattattacaatggccatactacccaaagcaatttacagattcaatgctattcctgtcaaactaccaatgacattcttcatagaatcagaaaaaaagctatttaaaaatttatagggaaccttgaacccaaatagccaaagcaatcctaagcaaaaagaacaaacctggagcatcacgttacctgacttcaaactatactataaggctacaggaagcaaaacagcatggtactggtgcaaaaacagacaaaacaatgaaacagaattgaaaggccataaataagaccacacacctacaaccatctgatttttgacaaagctgacaaaagaacagggggaaaggacaccctattcaataaatggtgctaggctgactggctagccatatacagaagattgaaaccggacctgtttcttacaccatacacaaaaatcaactaaagatgaattaaagacttaaatataaaaccctgaactgtca

SEQ ID NO: 916510 - DNA, 614 bp, Homo sapiens
ctaatctcgtatccagggtcacgcagcacaaagcatggcagctttatagagagataagcatctgggagcactttccaccgaaggacctaagtgcagggcaggcagaatgtcctggataaccaaatgcactattgtattcatgtagtgtaaacaaagctagctgctatttaaaaaaaaatgtgtaatatcccaggtgataaatcatcaaaggggaatggaggatggaagaagtctgctctgatggggaagaatttattaccattgacattgtttagaattgctggtgactggtgataatgaagaccaatatttagtctattttattattgctgttaaattctgtaaaaaaaaaaaaaacttactccttatggtctatacctagggtggaatggtcccactgcccctacatgcagccctatacaccactgaatggctcaaacacaataaaagtttgttctttgctcacttgacactactgagcgtgtacaattgtcagtggggcaactctcttccaaacagtcattcaggaaccaagttctgatrttgcgattctttacctcaccttgcaagatacagcaaggctttgagctgtaggatgctggataaattgccaa

SEQ ID NO: 916511 - DNA, 683 bp, Homo sapiens
ggcaaattctggtggtgttctgagtgttattggatcattgtttcccctttatatgtttaatctctcttgattttttaatatactccartggaaaatatttcatatgcaaattgttttgataatcatctgtctacatttttctttaatattttactttttcactttataaagaataaaatcccattaattccattatattaaacttttttgtttgtagaaatttgtaatgtaaaattatatatgcagtcagaaatacgggaagaaatagaagcccatgcaacaagaataaacaaaaatctagtcctttggggttgacagctgtttatggctacctttctagcaactaattgcctttctcagtaaggaaaagttttagtgcagattcagatctcttttatttttaatagaaatgattattgtaactgtcatgagtatatcctttttagtttgttagaaacgcatttatctctgtgtgtgcgtgtatgcgtctgtgttgtatgtgtgtgagaatgtgtgtgtgtatatgtgtgtgtgtctgtgtgtatgttcaatatttttgctttcttttcttttcttttttaattttttgaccaattggtttcaggagtgtgttatttaatttctagatattttttattttttcaaattttctttctgttactaatttccagcttctttccata

SEQ ID NO: 916512 - DNA, 671 bp, Homo sapiens; identical to SEQ ID NO: 905621

SEQ ID NO: 916513 - DNA, 566 bp, Homo sapiens; identical to SEQ ID NO: 905622

SEQ ID NO: 916514 - DNA, 618 bp, Homo sapiens
tccccaggctcctcaactgaggccacctttgagaaactggtgayattattttttccaaaatgaacttgactcctaattaaccccaagacaacagctccagtgcagtagatctaacctcaggagtccagtgtttacagtacatgcttctaataaccacatcccacgttggtcatcagaacttctgaagatggtgacttatctggagaagctgggagtcctgatagatggaggaggctagctctgttgattcagatgagagtttctatctcaaggcagcttccctctcatttgctgttatttcctcaggctctgatttgtggcagtggtgctacttgtcaggagactgccaaatactgaatagctgcttctctctaaattagaagggagagagcaatgtaagtacttaccgagcagtgggaacattgacctagcttggggatttgtggggactggacttgaatgatgggtagtgtttgagaaagcctctttctgtgcctcccatggagatcagtgatggcatttctggtaagtagcagagttaaaaaggagaatcagaggctacctttcactgaacttactaagagtgactgggaatggcctttataattctcagaattt

SEQ ID NO: 916515 - DNA, 577 bp, Homo sapiens
tatctctactttactttatttgaaatacacttcaagttaaaatatatttttaacataaatttttatatgtttgatgcattctatttctattttataaactgtatgcttttatctgttttcttcttcaaagtttgttattttctccatcggcttgtaatacattttttattaatattaacatctgaagaatatttttggtagttttccatttgttgtttgctttctattatttctaattgtgcctttctgtaaataaatattttattttacaccaattgttgcttaatactctttgataatatctcattattgtttacgtttagcttttcaaattttctgtccagtaatacaatgttttctaatcctttacatttttttgtattttattaacatataaattttgaatgtatccgttgaaaatttaaactgatatttaaaatgtattaaagatgtrtttattaagttactattataggtcagaaacagtttaggtggcattgagatgttttatattttaaaaatcattaaatttttgtttaggtaaagaattaaggtataaactttcttctgataactg

SEQ ID NO: 916516 - DNA, 594 bp, Homo sapiens
attatctttagaagacatactcagctgaggcaactgctaagttttacagatactgggtgactcagcagttttgggaggctctggctttcaaagttactcaataagacttaaaaaatgaaagtaaggtttttggatgaaaaattagaaaaaaaaaacccatatatttttaggaaatacagctcaacaacttcatccaactcaactgcagatttttcacagtctttaagtcaacgaattatcctggctttttctagagagtctttcacaaaataagattttattcctaacctcaacaatttggtctttaaaaatctgatttagttgtactcttaatcatttaaatggaaggaacaaaaaaagttatatgatgtgttcattaatattttgtaaaacaaaaattaggataccttatttgacaaaccaatgatgtcacaagaaagttgaaaatatggctgacttctgatatatatggtataaatcatcctaytgtaagtattaattttaatggagaacaaaaggaggtagactttttccataggcatagttattttagactaacttacaaaaatgaaacaaacaagcaaaaagaaaata

SEQ ID NO: 916517 - DNA, 621 bp, Homo sapiens
agaggtgcctgggtccgcagccgtggtttgggtggctacacttgcatggaggagtgggaggccatgatccacagtcatgacttgggtggctgtagcccgaacctcctgggtggggcttctgccagttccatggagcaggtggcccagatctacagcctgggtttgggtggctgcagctgcgcctggaggatggggctctcaccttctccttggccccaagagcacaaggatgcctgggtctgcaacagtggcttgcagcgacaccctggggtgctcccaccccaactcggaaggcgcagggctcccccttgtccctggttcctgccctggccacactgctaccgtcaatactggcaatatattcctaagtcagggaatatatacttgagactaatcagtagagatataattgaaaggtaatgctagtgtttaactagatttgaattcagaggattaaggttcagtttcttccatgccttgtattgcctgtgtgtactggagaaagcttttggcttctctgagcctccacatctgcaaaatgcgaatcactgtagtcttgcttaccttatacaaagaggtttttttaatatgatgaaaarcaaatcacataaatcttaacca

SEQ ID NO: 916518 - DNA, 695 bp, Homo sapiens
aaataaataaaaacaagtccttatttatttactatcacctacatgtcagacactgtgcactgtggtttacaaatcttaacgttaatattcaaaacactcttcaagaaaatatcrttatcaaataatgaaattaagactcagagatgctaagttactttctaaagattaagtaattagcaagtgactgaataaaatatgatttaaatccagatatatatgagttcaaaaaacatgcttttttctactgtaccagtcttctccacatgaaatgattgcaagtggtacaaaaaacatcatgaatcacattttgtttaggacatgcctgactatatttatattaagtcaagtaaatttgaaaaatgcctataaacgtataataggtaagacacagattttaaaaaaaacctaagtgtgatacataaacatctcagttttgaaaatcactgcactacatcatgttgaagggatgtgtactttccctagtctctggtctcaagccaaatgtggctccagcagacagtatgaaggtcgctataacactggaagtcagtcagcacttgctgcagctccaccaccccacatagaaaagcactgaatttttagtttctcgtctctggccactgttgatccctggggccaccatatcctcaggcccggccttggcctactctcagccccaactcatgccaatatcc

SEQ ID NO: 916519 - DNA, 577 bp, Homo sapiens
tatctctactttactttatttgaaatrcacttcaagttaaaatatatttttaacataaatttttatatgtttgatgcattctatttctattttataaactgtatgcttttatctgttttcttcttcaaagtttgttattttctccatcggcttgtaatacattttttattaatattaacatctgaagaatatttttggtagttttccatttgttgtttgctttctattatttctaattgtgcctttctgtaaataaatattttattttacaccaattgttgcttaatactctttgataatatctcattattgtttacgtttagcttttcaaattttctgtccagtaatacaatgttttctaatcctttacatttttttgtattttattaacatataaattttgaatgtatccgttgaaaatttaaactgatatttaaaatgtattaaagatgtatttattaagttactattataggtcagaaacagtttaggtggcattgagatgttttatattttaaaaatcattaaatttttgtttaggtaaagaattaaggtataaactttcttctgataactg

SEQ ID NO: 916520 - DNA, 661 bp, Homo sapiens
caaagtttagaatcaccatatagtcacttcataaacctatatcatatttcatttcactggtttctgtaatttgaatagattatctctggagcatgtccaagaagttagacttgtgaaaatatgacagttttacaagtaaatgataggagaaccgggattgggaaacatctgactgaggcacatggagttcgcaggacagaaaggatgttctccgtgaacaggggaggagtaatgaaagcactgaggagcatgagactttgcctgtgcctgtgcctgtgcctgtgcctgtgcctgtgttatgactatcgacctcattgaggccaggctggattaatacagttgagtacactaaagcacacctgaatgcttaagcaggaactgagacaaaacagcatagagattgtttcacctcccatagatcatctgctctgggtttagatgtcctccttttttctttattggttgtgaataaaattaaatccattccagcaaaaggaaaaacctcatcaaagaagaggaagcagagaaaagtaggtccaactacacctttagcaaccacagacaagaagttcacagctgaagraggagaggagactcctatagctcaggtaagcttgagtaagaggagcaggcttcaattcccacagaagaaactgccatg

SEQ ID NO: 916521 - DNA, 670 bp, Homo sapiens
tgtgaggcctgggagaggtgtttgagtcatgttcggtcatgggggtgaattcctcatggcttggtgctattctccatagtgtgtttttgtgagatcttgttgcttaaaagtgtgtggcatctcctccccttcttgctctcgctctaccacgtgacatgttggctcctcttttgcctcctgtcatgattgaaagcttcctgaaggctcaccagaagctgagcagattctggcatcatgcatcctatacagcctgcagagctgtgaaccaactaaaccccttttctttaaaaattaatctcaagtcccagtctcaagtatttctttataacaatccaagaaaggccaaatacactgtcacaactactaagctcaggctttgtagcacaaatgtagccatcagcaatatgtaaacaaataaatgtagctgtgatctgataaaattttatttacaaaaacgaactatcttgtttggtccatgggccttagctggatacaggcttgcagtttagcaaaccattacatgtatatactttctctctctctctctctctctctatctctctatctctctctctctctctctcwcacacacacacacacacacacacacacacacacacacacacacacacatacacaaatacacacgaacattttattttgaatagta

SEQ ID NO: 916522 - DNA, 656 bp, Homo sapiens
taatgtaccaaatataacaaaatcacagctaacaccatactgaaagtcaaaaggttaaaattttttccttctagatrtggaacaagaaaatgatgcccactttctccacttctattcaacatagtaatggatttcatagccagaataattaggcaagagaaaaaataataggcaccaaaagtggaaagaaagaaactaaattgccttttatttgcagatgacaaaatttacatataaaaatgtataaaaagtccaccaaaaaactgtttgatttaaacaaattcagtaacattacagaacacaaaagtaatgtacaaaaatcaatagtgtttttatacattaacagttaattacatgaaaaacaagtcaagaaaacaatagcattaacaatagctacaaaaacaaaatatttaggaataaatttaaccaacaaggtagaagagctctacattgaaacctataaaacattaaggaaggaaaatgaaaaagacacaattaaaaaaaaagatatcttgtattcatggattggaagaattaatattgttaaaatgatcggactactcaaaatgatctatagattcaatgcaacctccatcaaaatactgatgatattcttcacagaaattaaaaaacagtcctaaaatgtatgtggaata

SEQ ID NO: 916523 - DNA, 513 bp, Homo sapiens
acttactcatcactcataaattatttttctcttcttcacatgttaacacccaaaatcaagcaaaagctattaataaatctaagttccagtgaaatttgctcgtgctgctgaacaaatctaagttaaattrtagatagatattagtaacttaaggtaagaattcccaaaactagatgtatggggtgaagagttaactattgataacagtagagaatctcatttccaatttcagggataaatagtattaggggaaatcctgagagacaacagtggaagtacagaagtaaagatgagaaaataaattactaactaggaagattcttcaatgaatgcttcctagagtatggtctattatagataaattgagcaaacagaggatggagataacagaaattaaaggtacagagtacagtgctatcgtttaaatgcttttgtcccctacaaaaccaatgcttaaacttagtacgcaaagcaacagtgttggcaggtgaggcctaatgggaagtgtttaaa

SEQ ID NO: 916524 - DNA, 523 bp, Homo sapiens
ctagaagggctgtagcgcaacagaaaaagcattctatttctaaattgactttgtaaacttgttttgccactaactcaaaatgaacattgggcttaaccatttctcctttctttacttcaacttccccttctctawataaatgttgtataaagcccctcaccaccctggtagtctgtggatctctaaagccattgaaaaatgtttctagggtggatatggagttgggtggtctatatcaatgtccctggagttttctttccatattctaatagtccttatctgggaaagatcaaagcctttacctagttctcttttttagatactctaatcttttctgtaccacccctgcccattacctgatggttttgatgacattagaatttacaacatcctcctctgcatcttttctaccccaagacactcccctacttatatttcatgttcctggaaatgctgacctcccaggggctccttgctatatgttctctggagttgctaagtgtgtaaagttttttgtaagtgc

SEQ ID NO: 916525 - DNA, 454 bp, Homo sapiens
ctagttcaggtcctgctttccttaagaagtgctataggtgcctgtaatcccagctacttgggaggctgrggcaggagaatggcttgaactcgggaggcagtggttgcagtgagctgagatcgcgccattgcactccagcctgggggacaagagcaagacgtcatctcaaaaaaaaaaaaaaaaaaaaaaagtactgtaagcatagaatcaaaactccctaagctgagaggaatgtgagcactcattcattgccagcctttcattttacagacagagagaatgaggctgaggagggtaactcagtcagctgaagtggatttagggttgaatctgtctgtctttactgcaagttcaataatctttataattttattacgtaaatattgggatgttcttccttcttcagagggatattataaagattaaatttttaaaaacatgaaggcagctgtaa

SEQ ID NO: 916526 - DNA, 583 bp, Homo sapiens
aactccttaaatatacttttactgaatccctcagaaaaagaattatttattcattttctatgccctcataatatttacatttagcatattgktacctttttaacaagtctgtcttccccaaaaattgttaagatctttgagagcaaatgtagtacttcattaattattatatatttccctgctgatgcctggaacagtaggcatagaattgtgaaatcaattaatgttttattctagcctaaatttaagttacattttctcttttgcacctgaacacatcccttttgttgtcttcttagcaatacaaagcttacagtattctaataaacttagcgtctcacatttagtctggcctcaactttccctaatcctgttgaaagacctatcattgttcccactgacccagagaaattaaattcaagaaatagttttgatcatcttttgtgtgcaaggaactgttgttggtaatgtttcccctttatacaagttagcttttctgaagccaactgtatgtgtagaacaagtaaggcctagcaaacataataatttcaggagcaccctaaaggcctctggaccccaaatt

SEQ ID NO: 916527 - DNA, 631 bp, Homo sapiens; identical to SEQ ID NO: 910642

SEQ ID NO: 916528 - DNA, 543 bp, Homo sapiens; identical to SEQ ID NO: 910643

SEQ ID NO: 916529 - DNA, 639 bp, Homo sapiens
tcttcagccattgtcctcggtcaagtctaatcagtactctgtaaaatccatgagagcagagactgtgtttgattttgctcactattatatttccaccatttagcaggtgcctgacacatggtagatgtaataattattgtctgatgaaagaatgagtgaatgaatattatttttacctggtcctggttgaatcccttaccctgtgggaaaggggctgactgtcaagaagtgaggggatgtccttagttgtcccttcttgccagagcatctcaacccctcgggattgacccctcaacaggtgatgaacagagatcccagaagtagtcactttctgagaaaacatctcctaatctaacccaccaaagcttgcttcatagtgtattgagatgtgcttcctgtcttggtctgtcaaaagacttgaaatcccttcacagtgtgagtcacacatgaagtgagtgcttagtggtgactgtgtttgctgatttgcttatgaaggcaaaatctgatttaagagccaaaattatatrtgtatatattctttgaacatccctaatctgaaaatctgaaatgctccaaaatttgaaactttttaaacaccaacaggatgccacatgtggaaaattccacatctgacctcat

SEQ ID NO: 916530 - DNA, 505 bp, Homo sapiens
tcttgtccatatcactatcagcatttttgtcaaagccattcaaccagtctctagggagttccaaactttcccacatttccctatcttcttctgagccctccraactgttccagcctctgcctattaccaagttccaaagttgcttccacatttttgggtatcttttcagcaatgcactctaatcttaccaatttgctgtattagttcattttcatgctgctgataaagacatacaagagactaagaaatctacaaaagaaagaggcttattggacttacatttccacgtggctggagacctcacaatcatggcagaaggtgaaaggcacgtctcacatggcagcagacaagagaagagagagcttgtgcagggaaactcccatttttgataccatcagatctcatgagacttattcactgtcatgagaaaggcatgggaaagacctgcccccatgattcatttatctcccaccaggtccctcccacaacatatgggaattatggg

SEQ ID NO: 916531 - DNA, 373 bp, Homo sapiens; identical to SEQ ID NO: 908101

SEQ ID NO: 916532 - DNA, 623 bp, Homo sapiens
ggctataacaagcttattttgagtcaagccagccaagctatttctttgtttmataagattccaaggccctgaataaaaatattttcaaaaatcaaacaagggatggttagaaaaccccagtgagaattttttacatggatttaatccaacccttgctctctacatgtcattgagactctgtgcccacacgtccctgatgctctgctgatgtgtttttgagtaggttttcagtttataccattattaatttcagctcttgcatatctaataatttcctggtactagtccagagaaagcactgaaataaagatgaaaagttgatgaatgtaccagaaaattaaaatgtcacaatcttgccttcattgcttattcttcatcatgtaaccaccagatataaaagctatcttgtggtaaaaatggtggggagaagagagagaaagtgaagtggagtactccagctgattctcttgaaacaagaagataaaagaaagaaagaaattggcaactctcacggttttgggatgggaacagaggatggaatggcaacacgtttgccaaaggattgcctctccatcctcagggaaacacacaacccagaagacagtttcaataggattcaaggg

SEQ ID NO: 916533 - DNA, 691 bp, Homo sapiens
accaaatccagcagcacatcaagaagcttattcaatatgatcaagtgggcttcatctctgggatgcaaggctggttcaacatacgcaaatcaataaatgtaatccagcatrtaaacagaaccaatgacaaaaaccatatgattatctcagtagatgcagaaaaggcctttgacaaaattcaacaacgcttcatcctagaaactctcaataaattatgtattgattggacatatctcaaaataataagagctatctatgacaaatccacagccaatatcatactgaataggcaaaaactggaagcattccctttgaaaactggcacaagacagggatgccgtctctcaccactcctattcaacatagtattggaagttctggccagggcaatcaggcaggagaaggaaataaagggtattcaattaggaaaagaggaagtcaaattgtccctgtttgcagatgacatgattgtatatttagaaaaccccatcgtctcaacccaaaatctccttaagctgataggcaacttcagcaaagtctcaggatacaaaatcaatgtgcaaaaatcacaagcattcttatacaccaataacagacagagagccaaatcatgagtgaactcccattcacaattgcttcaaagagaataaaatacctaggaatccaacttgcaagggacgtgaaggacctt

SEQ ID NO: 916534 - DNA, 631 bp, Homo sapiens
cccttgaatcctattgaaactgtcttctgggttgtgtgtttccctgaggatggagaggcaatcctttggcaaacgtgttgccattccatcctctgttcccatcccaaaaccgtgagagttgccaatttctttctttcttttatcttcttgtttcaagagaatcagctggagtactccacttcactttctctctcttctccccaccatttttaccacaagatagcttttatatctggtggttacatgatgaagaataagcaatgaaggcaagattgtgacattttaattttctggtacattcatcaacttttcatctttatttcagtgctttctctggactagtaccaggaaattattagatatgcaagagctgaaattaataatggtataaactgaaaacctactcaaaaacacatcagcagagcatcagggacgtgtgggcacagagtctcaatgacatgtagagagcaagggttggattaaatccatgtaaaaaattctcactggggttttctaaccatcccttgtttgatttttgaaaatatttttattcagggccttggaatcttatkaaacaaagaaatagcttggctggcttgactcaaaataagcttgttatagccaagtaact

SEQ ID NO: 916535 - DNA, 622 bp, Homo sapiens
gctctctgtctattattggcgtatagtaatgcttgtgatttttgcacattgattttatattctgagactttgcagaagttgtttatcagcttaaggaggttttgggcagagwtgttggggttttctaaatatacagtcatgtcatctgtaaaccgagactatttgacttcctctcttcctatttgaataccttttatttctttctcttgcctgattgccctggccagaacttccaatactatgtcgaataggagtggtcagagagggcatccctgtcttgtgccagttttcaaagggaatgcttccagcttttgcccattcagtatgatgttggctgtaggtttgtcataaatagctcttattattttgagatacagtctgtcaatacctagtttattgagagtttttagcatgaaggggtattgaattttgtcgaaggccttttctgaatctattgagataatcacgtggtttttgtcattggttctctttatgtgatggattacgtttattgatttgtgtatgttgaaccagccttgtatcccaggggtgaagccgacttgatcgtcgtggataagctttttgatgtgctgccggattcggtttgccagtattttcttga

SEQ ID NO: 916536 - DNA, 668 bp, Homo sapiens
tgctttttgaatctgggtgctcctgtattgagtgcatatatatttaggaaagttagctcttcttgttgcattgatcccatwaccattatgtaatgcccttctgtgtctcttttgatctttgttatccgtctagaattgcaacccttgcttttttttttttttttttggctttcaatttgcgtggtaaatattcctccatccttttattttgagcctatgtgtgtctttgcacatgtgatgggtctcctgaatacagcacactgatgggtcttgactttatccaatttgccagtctgtgtcttttaattggggcatttagcccatttacatttaaggataatactgttatgtgtgaatttgatcctgttgttatgatgctagatgggtatttttcctgttagatgatgtagtttcttcatagtgttgatggcctttacaatttgatatgtttttgcagtggctgctactggttccttttcatgtttagtgcttccttcaggaactcttgtaaggccggtctggtggtgacaaaatctgtcagcatttgcctgtctgtaaagtattttatttctcctttgcttatgaagcttagtttggctggagatgatcttctgggttgaaaatttgtttctctaagaatgttgaatattggcccccactctcttcta

SEQ ID NO: 916537 - DNA, 621 bp, Homo sapiens
ccctagctccccatcccctggtatgcattgttcccctccctgtgtccatgtgttctcattgttcaactcctacttataagtgagaacacgtggtgtttggttttctgtttctgtgttagtttgctgaggatgatggcttccagtttcatccatgtccctgcaagggacatggtcccatttcttattatggctgcatagtattccgtggtgtgtatgtaccacattttctttagacagtctatcattgatgggcatttgggttggttccaagtctttgctattgtaaatagtgctgcaataaccatatgtgtgcatgtgtctttatagtagaaggatttatattcctttgggtatatacccagtaatgggattgctgggtcaaatggtatttctggttctagaaccttgaggaatcaacacactgtcttctacaatggttgaactaatttacatacccaccaacagtggaaaagtgttactatttctccacagcctygccaacatctattgtttcttgactttttaataatcattattctgactggcgtgagatggtatcacattgtggttttgcatttctcaaatgatcagtgacgatcggcttctttttcatatatttgt

SEQ ID NO: 916538 - DNA, 579 bp, Homo sapiens
gggcactgtaaacagcctggctaattgtgggttaccctgcctagcagtcataagatagtattcatattttggagctgagcrctgctaaatatggaagcaactcctgaataattaagatacaactgcggaatctgacctaggtgcctttgttttgtgttgcagatttttctctcttgacttctctgagagaagattgcagtgtctcctgacacaccagggggaatgccgcagaacagaaggagtgaacttcagtactgtaaccaggctggtactctaacaccagctttgcaccttagtggcagcatgaagcactttgttagagtcccaaattagactctagttagatgtcttagccatcccccatctctcacatggtggctgtctttattgaggggcgaagggaaattctcctaagaaatataaagcccttctggggttaccttctaaaaagcatccagaagtgggtgagcccacacttgggattctttcttcacccagttggctcctcctccttcaagaatttttggggacaggatgaaagaactcaaggctccgggtttacccaccacaactttgcaa

SEQ ID NO: 916539 - DNA, 579 bp, Homo sapiens
gggcactgtaaacagcctggctaattgtgggttaccctgcctagcagtcataagatagtattcatattttggagctgagcactgctaaatatggaagcaactcctgaataattaagatacaactgmggaatctgacctaggtgcctttgttttgtgttgcagatttttctctcttgacttctctgagagaagattgcagtgtctcctgacacaccagggggaatgccgcagaacagaaggagtgaacttcagtactgtaaccaggctggtactctaacaccagctttgcaccttagtggcagcatgaagcactttgttagagtcccaaattagactctagttagatgtcttagccatcccccatctctcacatggtggctgtctttattgaggggcgaagggaaattctcctaagaaatataaagcccttctggggttaccttctaaaaagcatccagaagtgggtgagcccacacttgggattctttcttcacccagttggctcctcctccttcaagaatttttggggacaggatgaaagaactcaaggctccgggtttacccaccacaactttgcaa

SEQ ID NO: 916540 - DNA, 624 bp, Homo sapiens
aaattttaatcccagttctggaccatattagttacatgttgagtgcctaaaatttctaattttcatgattattatttctatgttacatgggattattatgatgattcagtagcaaaaagtatcattttacagtgcctagcatcacagtaagccctttggaaaggggaagttataattcctcttactccttgagcaagtcacaatatctttaggcttcagttttcttgtattttgagaaatcaggactaggtgaacccaaatcaaaatctagaaatctatgaagcaaaactggagaaggtaaatcagaaaattcagtcttactttaattgctttcttatgggccacatactctaaagttccttctaatgcctttgaactgtattagtctgcccctaaattccatataaaagcaactgactgaaggacagcaagaataaaatcactcagccagttcattttgagtgtgtgacctactgtgggtccagtaaaaggaaaatataagtrtaggcaaatgtggtaggaaaatgaatgtactgagatattgtttgcaatcttccttatatttccccctttacttcttccaaaaatagccaggctgtttctaaagtgcaggcctgagacaca

SEQ ID NO: 916541 - DNA, 575 bp, Homo sapiens
  misc_feature 479: n = A,T,C or G
aacctgcagtattttattatgggtatatgatctgaagttctaagtgaagggtttgctttaaatattggcttatcctcatgataatacaattttattctaagagacgggtcttgctatgtggctggagtgcagtggctattcacaggcacgattatagagcactacagcctcgaattaccaggctcaagcaatcccccgcctcagcctcccacgccgctgggactacaggcacaccccaccacacccagcagtaaatgtaattttatgtataataattcaatttatgtaaattttgatgaatacagccatcttgtaatgtgatattaatactgtaattatcaatcaacatgtaagttagcaaccgtgtgcaaaattaggctctgtggcaacacacaacaaaactgaacagcctaccttggagattataatccagtttggaagacattatgtatgtatctcaaccctccgcactactgatntcttgggccagataattcttcactgtggcaggctgtcctgtgtactgtaggatgtttggyagcatccctggcctctaccccatagatgccaatatt

SEQ ID NO: 916542 - DNA, 629 bp, Homo sapiens
aaaaaaggctattaaattctgcaaataattccattacacacagatatgtcactcagaggctagataaatataaatttacttagtgttatggagggcacttggtaaggaagcaggcacgtaatacaattataaaacacaaagctccttgtccaagagttttcttttatagacaaatgggctttaaaaatatcttgtggtggctcacgccattgtaattccagtactttgggaggtggaggcgggaggatcatctgaggttgggagttcgagatcagcctgaccaacatggagaaaccctgtctctactaaaaatacaaaaactagccaggcatggtagtgggcacctgtaattccagctactcaggaggttgaggcaggagaatcacttgaaccctggaggcggaggttgcggtgagccaagatcattccattgcactccagcctgggcaacaagagcgaaactctgtctcaaaaaaaaaaaatctatctctctctctctatatatatatgtatgtacatatatgtgtgtgtatgtgtgtgtgtgtgtatatatatattttgccaacaacttgcatttgaattcctgaagtcacaatggaagactgayttgactactttttgtaatgtgc

SEQ ID NO: 916543 - DNA, 658 bp, Homo sapiens
agctttgttgttgttattgttctttagcaaacaaaatattgaaaaaacacaaagcaaacaaataccaggggaaagaaattaaatgtgcttgaaagatagggaagaaagatactgagtgtytaaggagctattactgctgttcaaaagtttgcaaatttaatattctgatttttctcctaataaaataaaattaagaaagacattagtgtattttgtcaacactagttcaagagagagtcagttttctttccttatggagaagtttctgatgtactcttcctgatggaaactatagaaaaatatcatgtccttctattttaacatgttttatcaaaatcaaaatagttaccaaaatctcaaagcattttgtttcttagtatcaaaatccatggaaaaggggagaaatcaacattaagggataatttgaacctatatataatgtttccttaacaattaaatgttattaccatgcaatagtgcaatcaattctaggaaaacacctccaggaaatatattaacctctgaactaatgttaaagaagctcccatgagagtatgttttcacaaatgagctttctgttgacctttttgtaaaacttcatataacgtatttcagttaaacctatgatgcctttagtgttatctctttcctagaaatg

SEQ ID NO: 916544 - DNA, 603 bp, Homo sapiens
ctaagtagtagagttttgattacttwaacaatgatatacaactgtatcctcccttgaatataactcactggaaatacaattaacgttattctatttattttcttagttaatatgagtgatattcaagtgtcaaggtaatgaccaactttcccagatagacgtggtaattttttggtcagggaatgactttttgctaaggcagcatttgacctacatcctgaataatggacagaagccagccgtacaaaatctgggtaaagagcgttccaactggatggaaccattacgtcaaaggccattagatgggtcagagttttcttccaggtggtctgggaggaagattggaggtttgcaaacaaggacagatgggtagatgacattggaaggggaccagatgttatagagaagtaaaagccatgggaataagtttttattttatcctactagccaaggaaagccacaggcagttacggttttctctccaagagactcaaaatatgaacccattatttagagtcccatcagaagacagaaatattaagtaagtatatcatcaccatttagctcaggtgacagttttgttaattgtgatgccactgcatg

SEQ ID NO: 916545 - DNA, 650 bp, Homo sapiens
taagctttggagggattattggaaagacatgatactgttttgcaatgtgaaaaggacatgagatttgggaggggccaaggatggaatgatatggtttggatctstgtctctaccaaattttatgttgaattataatccccagtgttggagctggggcctggtgggaggtgattgaatggtggaagtgtttcttataagtggtttattaccattcccttaatgctgttctcataatgaaatctggttgtttaagagcctgtagcacctcccctttcactgtatttcttgctcctgctccaaccatgtgaagtgtctgctccccctttaccttctgccatgaatgtgagtgtcctgaggcctccccagaaacaaaacagatgccagcaccatgcttcctatatagcctgtggaaccatgagccaatcaaatctcttttctttttaaattacccagtctcaggtatttctttgtagcaatgcaagagtgaacaaatatagaccctaatgatgagtttatatgctttataagaaaaagaagagagagagagagattgctctccttctgtattggatatagcaagaaggcagctatctggcaaaccaggaagaagattatcaccaagaactgaactgattggcatgttgatcttg

SEQ ID NO: 916546 - DNA, 662 bp, Homo sapiens
gctgcctgtgtggaggctgagttctgttaattatctccataactgtttgggtcaatcttccctggctgcccctctgatsatgccattcattattgtaattgcatatacccaccttttaatagctaagctcttccacttggcctctgctttagggtcctaaaaccctgtggctgttaatcacctctattctgtaatgatgcctcctgatagcagccctggcctagagagaaaagccactactgatcttgttggtgattgtcttaatccatttgtgctgctacaaaaaaatacctaagactggataatttataaaaaacagacatttatttctcacagttctggaggctgggaagtccaagatcaagctgccaacagatttggtgtctggtgaggctgcacactccagaggggcagaacgctgtgacctcacatggcagaactgaagagcaacctaaggtaacgctgtgtgaagcctctttcattagagacttaatcccattcatgagggaggagccctcatggcctaatcacctcttaaaggcctcactgcttaacactgccacattggcaacactagaactctggaggggacacattcaaaccatggcagcgatactggcaccactctcatcagcacattctttgttgctttggaaattgat

SEQ ID NO: 916547 - DNA, 571 bp, Homo sapiens
taatatatgctagctcacacatatacagctatcactttttattcttcactacacattattattgcaaacatacacaggcaaatattggcagcaactaatgcaatagtctaataataggcatgytcattttttttttcctaaattaccacaaactatgtgttcagtaagaaacatctgtgaagactgctcttgagccctggaggaaaaaacactatcagattttttttttgacaattaatacaatggtgatatgtcaaggaattgatccttggattcatacatcttaattaaaaggtataatacttaaattataggaagttggttctttgtaaagacctcaagctgaggactattaggaactcttcagcagcagacaccttttggtaagagacagcttccacctgataatcctagatcaattagacaactacagtaaatataaacagcttccacctatggtccatggaatgctaatacagatagtcacagttttatctgtattcgtttgctctttcttctcctgtatatccttatgattctcttgtctaaggctaccattaactaagttact

SEQ ID NO: 916548 - DNA, 726 bp, Homo sapiens
aaaatatttctgtagacttctgtggaattgtcaatattactagcagattacaaaacaaatgaaaaagtaaaactagataatttgtctaatgatccyatgtccggttttgttagctcttcatattaaggatgggacttattctatttacttaatatgagcactcttggatcctggctgaaaattgtgataataatccttctataagtttttatttgcattgcagtatttttatatgtgttaacctcaaatgctgctgtgccaactttgtgaaatcaaatgatttaacaaatgatcacccaacaaaagaacggggaactgcaacagtgtagaggttgaagcaatcatccctgaaaaagtgacacatgaccatgacatcttacataacagtgaagatctgatttgatcatgtcttcaaatattaatgttcagttggcaaaacctagaaaactgatggcctccaactccatcaatgtttctgccaaggacatgatcttgttctgatggatacattgtattccatgatatatatgtgcccgattttctttatccagtctaacactgatgggcatttaggttgattctgagtctttgctattgttaataatgcttcaatgaacatacacattcactgtctttataatagaacaagttatattcttttgggtatatatctggtaatggtatttcttgattgaatgtgttgacgagaagagttacacttggtaa

SEQ ID NO: 916549 - DNA, 579 bp, Homo sapiens
tggatttgaaattctgggttggaaatttttttctttaagaatrttgaatattggccaccaatctcttctggcttgtagggtttctgctgagagatccactgttagttttattggctcccctttgtaggtgacctatcctttctctctggctgccttgaacattttttccctcatttcatcctaggagaatctgaaaattatgtgtcttggggttggtcttcttgtggagtaccttgctggcattctctgaatttcctgaatttgaatgttggcctgtcttgctaggttggggaagttctcctggatgatatcctggagtatgttttccaaattgattttgttctcctatctctttcaggtaccccaactggtcataggtttgatcttttcacataatcccatatttcttggatattttgtttgctccttttcattcttttttctctatttttgtctgcctgtcttattttagaaagatagtcttcatactctgagactctttcctccaattagtctattctgctattaatacttgttattgcattatgaagttctcaagttgtgcttttcagctccatc

SEQ ID NO: 916550 - DNA, 647 bp, Homo sapiens
tagttctagatccctgaggaatggccacaccgacttccacaatggttgaactagtttacagtcccaccaacagtgtaaaagtgttcctatttctccacatcctctccagcacctgttgtttcccgactttttaatgattgccattctaactggtgtgagacggtatctcattgtggttttgatttgcatttctctgatggccagtgatgatgagcattttttcatgtgttttttggctgcataaatgtcttcttttgagaagtgtctgttcatatcctattcatcctcttttttgggttcctttgccatttgattgagttagttctttcaaaccacttagaagaatgtgacacatcagtaaacaacaataagattaatgtcctgtggcatctattgtgtaaataaatttcatctgttttctgaaataccttgatagactcctcattatttacagaaaaaaaattcaaactcctatgcctaatgttaaaatctatatgaagtttaaggccaaatatatgttttcagacttaacatttgaaattttttatacagtgkatgtggactctctttgtctcgcagagatgctgtccaaatttatagctgttcattgctgcatagaaaccttcagtccactttccttttattta

SEQ ID NO: 916551 - DNA, 647 bp, Homo sapiens
tagttctagatccctgaggaatggccacaccgacttccacaatggttgaactagtttacagtcccaccaacagtgtaaaagtgttcctatttctccacatcctctccagcacctgttgtttcccgactttttaatgattgccattctaactggtgtgagacggtatctcattgtggttttgatttgcatttctctgatggccagtgatgatgagcattttttcatgtgttttttggctgcataaatgtcttcttttgagaagtgtctgttcatatcctattcatcctcttttttgggttcctttgccatttgattgagttagttctttcaaaccacttagaagaatgtgacacatcagtaaacaacaataagattaatgtcctgtggcatctattgtgtaaataaatttcatctgttttctgaaataccttgatagactcctcattatttacagaaaaaaaattcaaactcctatgcctaatgttaaaatctatatgaagtttaaggccaaatatatgttttcagacttaacatttgaaattttttatacagtgtatgtggactctctttgtctcgcagagatgctgtccaaatttatagctgttcrttgctgcatagaaaccttcagtccactttccttttattta

SEQ ID NO: 916552 - DNA, 557 bp, Homo sapiens
ggatcacttgaggtcagaagtttgagaccagcctggccaacatggtgaaaccctatctctactaaaaacacaaaaaaaattagctggacatggtgatgcacatctgtagttccagctactcgggaggctgaggcaggagaattgcttgaaccaaggagacagaagttgcagtgagccgagattgcgctactgcactccagtctgggtgacagagtgacactctgtctcaaaaacaaaaaagaaaaagaaaaagaaatattacttattggaagctccacaacagagttaaggaatgatgcctgtggttggagtgaaaagaccagatgtcaagcacctctcctctccattcctaccacccccattctttttcaggtcctcatcacctctcaccttaatccattgcacaaacctctgactgttctctctgcctccrgttcttcccccattccagtttgccctccacagtcttgcccaattaatcgcctttcaagtaacacaattaaaaacactctccacagtctggggctctcttgccgaataaaactgtagaaatcaca

SEQ ID NO: 916553 - DNA, 557 bp, Homo sapiens
ggatcacttgaggtcagaagtttgagaccagcctggccaacatggtgaaaccctatctctactaaaaacacaaaaaaaattagctggacatggtgatgcacatctgtagttccagctactcgggaggctgaggcaggagaattgcttgaaccaaggagacagaagttgcagtgagccgagattgcgctactgcactccagtctgggtgacagagtgacactctgtctcaaaaacaaaaaagaaaaagaaaaagaaatattacttattggaagctccacaacagagttaaggaatgatgcctgtggttggagtgaaaagaccagatgtcaagcacctctcctctccattcctaccacccccattctttttcaggtcctcatcacctctcaccttaatccattgcacaaacctctgactgttctctctgcctccagtycttcccccattccagtttgccctccacagtcttgcccaattaatcgcctttcaagtaacacaattaaaaacactctccacagtctggggctctcttgccgaataaaactgtagaaatcaca

SEQ ID NO: 916554 - DNA, 600 bp, Homo sapiens
ttggttgagttcgtctgaagacctgggattaatggaaagaaatgttcaggttaaggtaaaggattgtggagaccaagttttattgtgcagaagaagctctcagacagcagacttcagagagagcaggttgtaaattgtttcttatcagacttaaaagggtgcctggctcttagttgattatctcctagatcagggaaggaaggaaggaaaacaaagtggagaggggattctctatagaatgtggatttttcccacaagagactttgcaaggcaatttcaaggtatgtcaaggaaatatatttttgtgtaaaacattttgattttcttccttgttatgctacagtcagattgtaaagtaagtcactgtatatggtgttaaataaaacccatctaatgagaatttatggtttgcagggcatgactccccagaccccttagaaaggaatttgggcaagataaaaaaaatcagagcttagtcctcaggtagctacagatgaggaaaayagagtttctaaataacttggatcaggctatgtacctacaaaatggcagagatgaaattaataatctcagatccaatgacttaaaagtgaatattct

SEQ ID NO: 916555 - DNA, 645 bp, Homo sapiens
gtacttattgaaaagaaattcatgtataagtggagctgcatagttcaaaaccatgttgttcaagggtcaactgtacagagaaatgacagaattttcttaatttagcatatcttcaaatcccatgtatttgtaaaacagtaacacaagaaattaagacattttaggtggtatcatactaattatgcttatttactgtctttgtccccaaagacagcacgatagttatctaaaaaattttcagtaaagtttcatgattgtatatatgaaagacacaaattaactcaacattgatgattcaaggttttatatttagccagcttcatgactgaaaataatagtgtttctttttcttttctgggaataaacccatttccttctcattcctttttctcagcagatggcaccaagcagatccatggaagtgagtgggaaccacacctctgtggccatgtttgttctcctaggactctcagatgaaaaagagctgcagctcatcctctttccagtcttcctggtgatctaccttgtgaccctgatttggaacatgggtcttatcatcctcatcagaatagactctcayctgaacacacccatgtacttttttctcagtttcctctcatttacagacatctgctattcttctac

SEQ ID NO: 916556 - DNA, 662 bp, Homo sapiens
tcttctaagagcgtcatagttttagctcttacatttagatctctgatccattttgaattgatttttgtatayagagtgaggtaggggtacaaattcttttgtttttcatgtggaaatccatttgtcccagcacaacttactgaaaatatgattctttcctgcattgaattgtcatggaatctttgttgaaaatcagttgaccatagatggttaggtttatttctggactctcaatttaggtattatttcaatgatatgtatatcgatcttttggcattaatacacattttaaagaatactgtaacattgcagtaagttttgaagttgggaagtgtgagttctccaagtttacttatttttcaaaattatcttggctatcctggatttcttgcatttttgtattaattttaggataagcttgtctgtttctgcaaaagggtagctagaattttgatagggattgtgttgaatacataggtcagtttaaggagtattgccatcttaacaatattacattgtccaattcgtgaacacaggatgtctcattcatatcatgaattgtttttctgatttcattctgctttcattgaattgcctgtctgtattttattgtatcttgttgagtacccttaagataactattttgagtttctttttcagca

SEQ ID NO: 916557 - DNA, 607 bp, Homo sapiens
tttctggtgcctacctcatagtcactggacaagttatggagtgactggccctgggccaggtgaaacttccagaatgatcagggaaacttttgcataaatatcatccaacattagaattcctgaacaggtggctattagtggggtagtgttatctcaaagggaaagttaaatattgtcaggtattaagacaaataaacttaatagcatattttatgcaagctaccattgatttaaagagattattattttacatattaccaaaaaagaaaataaatgctgctgtttaagacacaactcaatttgacagtgtatgcactatgaaaaaatattgtatcacataattgataaaacacagttataaaattattgataatagaagagttgaatactaccagttttaagcattttctatgtcgcagaggctgttctatgtgatttatgtgtattaagtcacttgattaccagaacaatcttatgcagaacacaagatatttaatataaaatgcaaaaatcacaaaaattacatctctgataagtaatcattcatrcttttaaaaataaagatagggaagcatactatctcacatagtagaaaattcacgtttga

SEQ ID NO: 916558 - DNA, 593 bp, Homo sapiens
aaaaaaattaatcttcctttttaattaccatgatgggaaggatactcatatgacttatacttatttttttcttacaacataatatagttaggaaatacaccatgttcaaatgttcaaagattgattaatactgataatatgttatctatccatctatactactatgactaaaaggtaaattaaaggtaggaatcacagcatcatctgggagatggctggaaatgtagaattttgaaaaccactcgattatataaattagtttttgtatttttaaaatatcctaagataattaaaatgcatagtaagtttctggggcactgattaaactaaggcacaaaattttctaactttccaacatacaatttatctgaactttggtaatggtattattcaaaaataactatttgccaaaaaactgaagtcaaaaggggaaaagattattttctacttttagccaataytttttaacattaataagaacttcatatcaacattaatacatccactatataacatatgcagcccaacattctattactgattaggatactaatatatctaaaaatgatatatgacttgtcaaaatgcacaaa

SEQ ID NO: 916559 - DNA, 593 bp, Homo sapiens
aaaaaaattaatcttcctttttaattaccatgatgggaaggatactcatatgacttatacttatttttttcttacaacataatatagttaggaaatacaccatgttcaaatgttcaaagattgattaatactgataatatgttatctatccatctatactactatgactaaaaggtaaattaaaggtaggaatcacagcatcatctgggagatggctggaaatgtagaattttgaaaaccactcgattatataaattagtttttgtatttttaaaatatcctaagataattaaaatgcatagtaagtttctggggcactgattaaactaaggcacaaaattttctaactttccaacatacaatttatctgaactttggtaatggtattattcaaaaataactatttgccaaaaaactgaagtcaaaaggggaaaagattattttctacttttagccaatattttttaacattaataagaacttcatatcaacattaatacatccactatataayatatgcagcccaacattctattactgattaggatactaatatatctaaaaatgatatatgacttgtcaaaatgcacaaa

SEQ ID NO: 916560 - DNA, 594 bp, Homo sapiens
gcatctgcttcatgcaaccaatagactgtatgtgccctcttttggacctggagagcctattatyccttcctgatttatggtgcctgggtatataaattatttcagaatgtgcttattcaaatttcctattctaacccacctgttcttcaactttttttttatgctacaaattccaagattcagattcaatagtgatcagtaggctctactgaagcttccagttgtacctgtgtgcttcaactcaacctgctttaccttggcctactaactcagatattgataaaatactgcttaatttatctacattctgctatttcatgtgtacttaatatgggttaatacatgtggagagacattgtgagttatgttttattcatctctgtgtctacgtccatacattaaatacaatcaaatccagttagcagaattaaggagagtagtaaggaaatggcttgatatttgaatatgcaggcagagcacacagaaatagttcttgtgtttgtattgaagctttctctaactcttaaagttctctttgtaggataacaccattcccaaagtctgggaagaattttccacatctcaccagtagta

SEQ ID NO: 916561 - DNA, 594 bp, Homo sapiens
ctccatttttcacctttcaagggcagtgcctgctgatgcattaattttgaatcttttgctgggaaagccatcatcatgcaataagtgattgatggggcagtaaaaaggtgcaggtccttgccttgatakagaacaattctatagggctgttccagctctagagctccccataggattgactgaggtcactgatatgaaagcttgtagatcaacctttccctctgcccagtcctgctttcctcactcactcacatatttattccagagataaccctctaatcactctctaataaacctgctgcatgcaaatctcagagtctaagagtctgtttcccttggaacccaaaatgtgacatttagtgtccaagtagtagcaggaaggcagatcctagaatgacactttggagctgaatggcatttaggaaaaggaatttttaaaccattcatggatgatgagattcagtgtggcaatgatgaaaggaattgcactagcaggtgtaatatctcaggctattgagaaatactgaagaatagtaactgtaaggattaaacagtcatagaactgttgctagggtaattgatacattatagaaa

SEQ ID NO: 916562 - DNA, 578 bp, Homo sapiens
aaccagaaattccataacattgtgttcacattatgtatacaatattttattttatgaaatgcttacttgcttactgctaatttttattgactccattcattcttctattcattaccattcttaaaatctatagctattaataagtaaagacaatcttctaggtaaatacaaggttattaactggggtctttttttgcaagacttaacactatgttccacctgtctttttctaaacttatcacatggtactgctgtatcttaattaattttttttcctagagtgtattcctttattatagttttactggtgtttcttcttacttctaatctgatgggtatcaagtcattttcataaatcatttattaagtatcattccaattcaacaagtacttactaaatatttactatgtgccagacactactaaacgagagatataacattaaaaaacagaccattgttcctactgctaaatatttttgagtctgatgtggaagccaaggattcagtamcaatatgggttggattacacctcaactcttaacttgtttccacagaattcctaaacaatctcattct

SEQ ID NO: 916563 - DNA, 618 bp, Homo sapiens
tgagttttttctcagataaacaaaaagatcagataattcctcaccaccagaaccatcttacaagaaatgccaaagtgagttcttcaacctgaaagaagaagaaaaaaataaaaaaactaaattgcaaaaccaaaacatttttcaaggtagaaaacccaactgctgacattaagtacacagacaaaccagaatattaaaatactgtaattgtggtgtgcaatccacctgtaagtcaaatataaaacccaaaggaaaaatatactaaaaataataatagctacagcaacttgataagagatatgaaatataaaaatatgtaaattgagacaacataaagcaaaaatgttgaggatttggagttacggcatagaattttatttatttcattttttgattgtttcttttcttttctttgtgatcttgtataagttgtcatcactttaaagtaactttgtatatctttaagattttttttgtaatcctcatggyaaccagaattcaaaaacctataagacattcactaaaaataaaggcaatgaattaaaatatattactggagaaaataacaaaatcacaaaggaagacaggaagaaataaacagagaagttacaaaacaac

SEQ ID NO: 916564 - DNA, 629 bp, Homo sapiens
gatggaaaaaataaaaatatgtttaagtgaccaggggttatgtgacagaaaaggcattattttcctaaaatrtgtgacattttcagcttttgtaatccatcatcagattcttgatttttttttaagttcagtgatttatttatttatttgagatgagtttcactcttgtctcccaggctcactgcaaactctgcctcccgggttcaagtgattctcctgccccagcctcctgaatagctgggattacaggcacccaccaccacgcccagctaatttttgtatttttagtacaggcagagtttcaccatgttggctaggctggtctcaaactcctgatctcaggtgatcctcccgccttggactcccaaagtgctgggattacaggcatgagccacctcacctggccagtaataccttttaaagcataaagcaaagcatctattaacattttaatgtatgtttgccgtattaaggtgatgctattaacccggtgggataatgttgaagaacaggtggtttagtctcctacagtctttgtcctgtttggagagtttgcaagaaaacaagagccagatctccttctgagttcagaagagctatccacactacagcctgcaaaaaaagtgtta

SEQ ID NO: 916565 - DNA, 589 bp, Homo sapiens; identical to SEQ ID NO: 915536

SEQ ID NO: 916566 - DNA, 593 bp, Homo sapiens
tttctgatgccaacttttatgctccttcaactctgcctttcaaggctcattcttcaatttccctatccaagaaagcttcttttctcratgtttgtcttccttatctttctcctcctttttcccctccttcttacaagctacaccacacttatagccagtttattcttttctttctcctgtgcttgttcatctgcgcaaagaggggaataacctccactcttatggagaaagaaacctccttatgacaataaggaagagagaggtctgagctgtaaaggtgctgtacctactgctgaaaacatggactgctcctaaatgtgtgattttttgtgtgtgtagtcacccatccagagaaacgcttgttagacctcaatgccagaccaaggtttctcctcttgaactactggtttggtttccttttgaagatagtctgattcttcttgctgattctttttctgtcgtcatttgctcactacaaacctcaacggtgggaactttacaatgtgtgcttctcctcaccaaaattggtagcctttccttcaaaattcacatccacttggattctcagaatgtgaccttactaagaaataggg

SEQ ID NO: 916567 - DNA, 515 bp, Homo sapiens
tgtgcatgcatttaattgcaacggagaaataatcctggagagatgtcctctaactgtggccctatcacagggtttccgtctgtagctgcattgaagggtgtctggattggtgagtatcctaggtgctgccaatgcctccttccttctcctgactggttctgtggccccatagtggggtgtctgtctgtagccccattgcagggtgttaggattggtgaatctactaggcactgctaatgcctccttccttctctcgacttgtctgtagctctatgatggggtgtctgtagccccattgcagggtgtctgtagccccattgcagggtgtctgtttgtagctccaccacggggtatctgttcggctccactggggtcttggttggctctaactagtaggaagagtcttggttcasgagacttgtcctcaatcaggacaattttgagatttctcagacagagaataggaggatagtttggaagggatactcttggagttcctgtttagggatcatctg

SEQ ID NO: 916568 - DNA, 567 bp, Homo sapiens
caagaaaaacgattacatcatccaaaaaccagtacatcatccaaaagactctagaacaggcttcatagaaratacaaactgatatcaaaatgtctctttttcaatgtaaacacgtattaaaatggcttaatgcacagttgaccatttttcctctttaggaaaatgtttttatatttttacacctgtatatatgttcacaatatttatattcaagtatttatataaagttcaaattttacaacccttttgtactgccactaactataaaaatgattcaaaacatggatttggtggtctgtattgattagaccttcaatcttcacatagaccttcaattagaccttcatatagcctagttatatgttggtaccaaattccttagaaagggcctaagtattaaactaactaaaatttagttaaacagatcaggagcattttaagagtcctgaaagtctgagaatctacttttagacctttagcaacttagatatttcaacactctttccaaatttatggcatttgtttttattttcttttttctttttattaattttgcttcctttgaga

SEQ ID NO: 916569 - DNA, 655 bp, Homo sapiens
gtccaggaggaagtcaatttcctggtcctcaatggttaaacatagccggggctcagtgagggtgatgacaagagctggtgcttaccctgggcaccataagttctgttgttggatcatctggttgggagcttctggcccagagaaccatcgtactctggggcagtgtgccttccagtgattgcctcggcagagtggacatggatgcggaggtggcttgtttctcattggacaatcttttttaaagtgtccttgtaaaccacactgataacaagccctaccaggtgattggcctgctccattttctgtcctctctgaaccaccaaggtttgtttgtctgagggtcatgactaaggctgtggcctttctctgatctcacttttccttttgggcctgttcttcttggcccctattatagaacactgaagttgccaggtttaataatgcctccagattttgttcagggcccagggctcgcttttggagctttcttctgatttctgcagctgattgggtaataagcttaycttttagaatcaattgaccctctagtgagtcaggtgacagggaagtatattttcttaaggcctcccgtagccaatcgaggaaggcagaaggattttcttcctttccctgagtcatggtggacatcattgaa

SEQ ID NO: 916570 - DNA, 514 bp, Homo sapiens
tcttaaaaacgagagtttttctgcacaatctctctctttgcctgccaccatccacgtaagacgtgacttgctcctccttgccttccaacatgattgtgaggcctccccaggcacatggaactgtaagtccagttgaaccactttcttttacaaattgcccagtctcaagtatgtctttatcagaagcataaaaacggactaatacatccattgtatgttggaattaactaacttgttttttattttacagactaataggcagaagaaccttgccaggtctcagatgagactttggacttggacttttgagttaatgctagaatgaattaagactttggggaattattggaaaggcaggattgtgttttgaaatgtgagaagaacataarattttggagggaccagaagtagagtgatatggtttggctcatctcaaattgtaatccccatatgtcaagggaggatgctagtgagatgtgattggatcatgggggaagtttcctcactggtgttc

SEQ ID NO: 916571 - DNA, 645 bp, Homo sapiens
atgagagaggcattatgaagagtgaatgtgttcagtgactagagatgttgtaattgagccattggtttcctctgttgtgggatgcttttctccaaagattttgttggcttcttccaggaaggaacaatyaatacagtaccacttgaacatcctgctctattcctctgtagaagtgtaaggtttcactcacttgtgtttctgaggttccaaggctaattttctaggactagaattcatatagaagcacagactttcactttggctttctaataaccaccctataactctgatttaagctcatactcttcttggtattttaaaaaatgtattcaccattaaaatttgtttcttaaagcatagtaatatatttaaattgttatattttttagttgcattgcagtggtcagtgccttcagagtaactatttgtattaatcttagatgtgattaaatggtcttttaacccttcattttacttaaagtgaggtgagggcaaaatttctgcttctttgtaaacaaagaaaggaatatctgctcagtgaattttaaaatattttttctttcttttatttattttcttctcttttttttttccagtagtgtttcgtgataagagttgatgattgaaaaattagtatgagcacct

SEQ ID NO: 916572 - DNA, 597 bp, Homo sapiens
accatatcattccaccccggcccctaccaaatctcatgtcctcatatttcaaaacaaatcatgccttcccaacagtcccccaaagtcttagctcatttcagcattaactcaaaagtccacagtccaaagtcttatctgtgacaaggcaagtcccttctacctgcgagcctgtaaaatcaaaacaaattagttacttcatagatacaatgggggtaaaaacattgggtaaatatagccattccaaatgggagcaattggccaaaataaaggggctaccggccccatgcaagtctgaaatgcagcaaggcagtcaaatcttaaagctccaaaatgatctcctttgactccatgtttgatatccaggtcatgctgatccaagagatgggttcccatggtcttgtgcagttctgtccctgtgacattgcagggtacatcctccctcctggctgctttcacttcctgggattgagtgtcagcagcktttccagtggatctaccattctgggttctggaggatgatggcccttttctcacagttccactagttgatgccccagtagggactctgtgtgggggctccaaccccacatttccctt

SEQ ID NO: 916573 - DNA, 635 bp, Homo sapiens
atagagtttattgcacccccctgccacctccactggaacaggtgctggcatccacagctgagagacccatagatggttcacrtcataggaccctgtgcagacaacccccaataccagctcagagctgggtagacctgctgggtgggtagacccagaagagaaatagcaattactccagttcatctcatagaaagccacatccataggaaaaggaggagagtactacatcaagggaatgttgatatgagttctaaatttcttttcaaaggatcaatatgtcagtatgttcaattttttgccttctacttttaaacttaactcccttataaagcaacctttttcgattacctgctccagcctgactcattttgattacctgctccaccctgactcattctgattgcctgctctaccctgactcattccaattacctgctctatcataacaatttttcctgccaaaccactcaccccattactctctttaaatttagccaatcagaattcatttagcctgtgtggtctaaccctagccaataggggaatgacacagcaggaggggccacatgtgttagggataagaaccccttcccctcccttgtctaagtgtgcactcaccattgctccatctgtaa

SEQ ID NO: 916574 - DNA, 596 bp, Homo sapiens
ctgacatgtggggattaccattcaagatgagatttgggtgggaatacagaaccaaaccatatcattctgcccctggcccctcccaaatctcatgtccttttcacatttcaaaatcaatcatgccttccyaactgttctgtaaagtcttaactcagtccagcattaactcaaaaatctaagtccaaagtatcatctgagataaggcaagtcccttctccctatgagcctgtaaaataaaaaacaaattagttactcccaacatacagtaggggtgcaggcattgggtaaatgttcccattccaaatgggagacattggccaaaacacaggggccacaggcctcctccaagtccagaatcctaaagggccctcagtaaatcttaaagctccagagtaatctcctttgacttcatgactcacattcagggcatgctgatacaacaggtgggttcccagggccttgggcagctgcacccgtgaagctctggagggtacagcccccagagctgctttcataggttggtgttgagtgcctgtggcttttccaagcacacagtggtaacctgttgctggatctatcattctggcatctagaga

SEQ ID NO: 916575 - DNA, 606 bp, Homo sapiens
ggttctcaacgttggctgcacattggaatcatctggagattctgatttaattagtctgtagtatctgaataatggatgtttaaatggtccccaagtaattttgatttgagaaaccttgtccaagaagaatamttccaattagcattccatgtggatctctaaagattctgtaataaaagcagcacacagaaaaagaggcctgccaaatcctaaccacaacaagcagagattctaggttcctgagtgggcatttgtaactataaatttagatcttacattttcaccagaaaatcaaataaaatctccattatgtagaaatctacttcaagaggaagaaagacaaattgctttttgtaactgactattcctgtctcgtctctggctcttgcggatctctcccacatacaaccctgagaagaactggtgacactcaatggcctacctgtgtcccatcagcattgaggacgccctttttacagactagcaaaggccctaccaggccagagctggtgtccttaattggatcaactgctgagaagtaaagataggtcagacagggaggatcaccagcagttgggcttacgctctcaggcactgtccacttgt

SEQ ID NO: 916576 - DNA, 571 bp, Homo sapiens
acatttcagttttactgatasagaacagagacattgagaatttaagtaacttgcctcaagtcccatagcaaataaattttaattcagttatgtttgattccaaagctctggccctctctactatagcatgtgatctctctgttttaactatgttttacctttttttttaattttattttttggaaggagccctatacccagatggaacatctggaaggaacaaaaatgatgacatggttcctcctgggaaaaactacacctacgtctggccggtgagagaagaatatgcacctactccagccgatgccaactgcctgacctgggtgtaccattcgcacatcgacgccccaaaggacatctgctctgggctaattgggcccctgctggtctgcaaggaaggtaaggagctttgtttccaggtaactagggagttgaaatgtgaataagattcaggtcttattttgcctacctcctttgctccacacagaatgtgcctcttccaaatttctttagaaattctgacatggaagatcaatctgacaccatagcagagggcaataattcagatttt

SEQ ID NO: 916577 - DNA, 469 bp, Homo sapiens
taaatagctccaccatgcagtgtgagattttagaaaattcaattaacctttctaagactcattttccctatctctaaaatgaggggtcacaataccttacaaagattttttgaggattaaatgaaataaaacatttaaatgtggtggagtcagaactcaacccagtctaaaatcaagactcttgacaataatgactgctgcctactctatcagtcttactacataataaaataatcttgatttaaaaactaaaaaggtcattaatggagaacctcttcttcatcaatataacaatataattcctgttatattgaattaaaaaaactaaggtgagatcatcgtcccctatrgtttcatcaggacatcatctttatctcctatagcagggcatccataagttgcagtatatggagactgattgaatgagaggttatatttgactgagaaatcaatgaccaggaagagggca

SEQ ID NO: 916578 - DNA, 657 bp, Homo sapiens
tcatgggccctgtaaaccctttgttttggccaatttctcccatttggaaaggctgtwtttacccaatacctgtatcacccattgtttctaggaagtaactggcttgctttttattttacaggctcataggcggaagggactttccttgtctcagatgagactttggactatggacttttgcgttaatgctgaaatgagttaagatttcgggagactgctgggaagccatgattggttttgaaacgtgaggacatgagatttggaggggccaggaggggaatgatatggtttggcagtgtccccacccaaatctcatctcaaattgtactcctataattcccacacgttgtgggagggacctggtgggagataatttgaatcatgagggcagtttcccccatactggtctcatggtagtgaataagtctcgtaagatctgatggatctttattaggagtttccacttttgcatcttcctcattttctcttgctgccaccatgtaagaagtgcctttcacctgagtgcctgaggcctccccagccatgtggaactataagtccaattaaacctctttttttcccccagtcttgcatatgtctttatcagcagcacaaaaatggactaatacagatggtaagtgtgtatgtctatgatgg

SEQ ID NO: 916579 - DNA, 661 bp, Homo sapiens
tggtttgcactggaagagagaagccaaacgcccgactggtaaaaaatgtttacccttttgccagcatgtcaggcttctggtttcccttctccctagctcaactctaagccaagcattctaaggtttggaaaattaacttttcccaggttggaagaatattataaaagagacatttgaaactatgaaagaaggaaaaacaccacagacatgagttaaattgtggaaagcttctacacacgtatcggggtcttcagaaaattggcctaagtctccctttatttgcttaaggtcctgtaatgagaagggaacttgaaccctcatgggaccattcccatcaggcatttcctgcagaggtaagagtgaagaggggagagtaggtaatactggagatgctggagctggagaagctgacggtatgattggaggggtactggaagggttgagacattcagtagcagtctcagattgcacctctggaatctgctttagctctgtgggcttgcctgccatgggtactaaaagagctgagttgattgtacagaacttgtaaaggtctgggttgtcttgcagggcaaagaaagtctgtacataggggacctcagtccatctgcccctgcrtctgcagaaaagatctaactgttggataatattcaaaatcaag

SEQ ID NO: 916580 - DNA, 596 bp, Homo sapiens
cgcctggaaaactcctagacttgctttaagatctagctcaaatgtctaaaagcagattagtaactcctctattgtcccatagtattttcacacacaaactctatcacagcccttagcatactatattctgacctatttatgtatccatgtgctctttcaataatgaattccatgacaaaagagaccttgataagaagaccaatcaattcataccataaggtcttcaatagaggtatctttaacttgtcttgcctttaattagattatgagtggcctgggggatagaaaaggacttaatatttctatttccttgcacacatccttttcttgagaatgagtaaaccaagctcccattccagcatggaaggggagtgagtaacaagacagcccattaaacagactggacacacatgatggagagaccataatagtactcatagggacattcatgggttcagtttacttctagggaccctragcagtggaaatgaggactgcagactaatttcagaccattcaatctggacagctaattagaattttaataggtagggactagtaccttcaacaatatcttaaggataaaatcccagtcc

SEQ ID NO: 916581 - DNA, 583 bp, Homo sapiens
taagacccaaaaaagttaattaaattaattaaggtcacatagataattactggcatatctgaatctaatataggtcttccagtccagtgattacagctcagtattttatatggaagaatactccagttatctcaataaaatgaattcctatccattcatctaaaatgctacaatagtaaaacgttatgaactacagtgtttaaagtgagcttaattccaatccctacaattcacattttagaaatgtaatgtggctgagtaccttcctcccaaatagtttaagtccctttgaattagtcggtacatacatagaattcatgcagttgcatcaccaaccaagaatagcctaatactgtctgccagagactgcctccagccatgacagtcaattgttggagccattagcagagaaatttatcatatacattaacctgctgccttgaatggacgattactgaaataatgactaggagtatcaaaatcatgaataaaatatgggaatcaggattgcaagttataaagttctcttatcgagcctacagaytaaatgtgttctcaaaggtggtgctcccaccttgggtga

SEQ ID NO: 916582 - DNA, 594 bp, Homo sapiens
atttggcctcttggtttgaaacacatctggttctttgagttgtcaaagagtaagtagtccataacaattgagagaatgaggtaaatatgaaattggagctagacaaagtcaggagaaattcaaactgcagacagctttgtttatctttcaaaacatcctgctggttcataaaatagatttaaattcttaaactgaatcagaaatgaaaatccagtggagtcccaatgaggctatgttgatgtaattaattctgattattcggaggctacttgctaatttgtggtcttctcagggcccttgctttccctcatatacccaactgtcaacctttgggtcaattccctgcttaactatttttagtaatgtatgggtaaagaaggaaaaatgacccagtaagttagctatcattgtaatctaagatcttagtctcagtatttggtagtcatttatgaaatatttgccagataaaggaaatctgctatttgttagcagatctagactaactgagttctggagttgccatgagttttgtgagcccatttggttctcagtctctakgcaggtaactgattgggtctcagaattcataatcag

SEQ ID NO: 916583 - DNA, 618 bp, Homo sapiens
aatgattggaacatttcattaaaacagattgctgatggattcccactgactgcacttcagcaggatttacaaaaccgactagtatgtggctcaatattattctttcctcaagtttatgaacttcataccccagttctgggtggttttcctttttttccttttttgaaaatgctatcgacgtggaaattcttttgtgggacataacatcagtgagattgcttgtcaagaccttgctctatcaccagaactaagttcagtgccaggcacacagatgtcactcaatgaatatttgttaaatgactaaatgacacttttacataaagtttccatttaatgctgtcatagaaattttccaggacctcaattataattcataccaaatatatttctttacattttacaaataggactttatctccatttaaactttagggttttcaacgtcactgtttttttttttgaataaccataattccttcataggcctgtggtgcattatataaaattagtagagtgattgatctagtaggcccctaatacatgttagttcttttcatttagtttatttttctacctcactgaataatargtgataagccaaataatatgcttctgaaa

SEQ ID NO: 916584 - DNA, 566 bp, Homo sapiens
ctaaaacgtgttcactttttgcaatcaaagcatgtatcacacaacttagctgtttaatgtatactccttgtaatttaatgaattatccactaacagtcttaagtaaatttcaaattattggggtgagagagagaccagttcaattaaagcctatctttttcccagactacttggtagctctaaatttactaaagataggtgattatttaggaaactcactgggcttaaagtagacagaggcagagataataaggtttgtgtaatattccatatgtcactctgtacttccaagccccctttcattttgactgggccatttgactgttttggccaatgaactatggactgaaatgtgtcatttccagcttgaggcagcgagacactcaagtgctgtttctcagtttctcccttcccatactttgataatcaaagagctggcaaattctaagtgctgtaactggaaggcggtagaaactcagtctggttcccttagtaaccacatggagtagcttcttcgttytaattttcccaatcctttctgctcctcaatagacatgtactgtgat

SEQ ID NO: 916585 - DNA, 467 bp, Homo sapiens
agtacttagaaaattctctcacacatgaaatagcagcatatacttccttaaaattctatccgttagttgtaattttgaaaccacagggcaaatatactttcttttctatcattttaaaaccaccaatcattccctaattcttctcccaacctttcttaccaagtatttatctgttgtaggcatcacagagagctttttgagaggcattagccattctaattgtgtgttattataaacattaagaaaataggacgacagtgaagtatttatccttgtaatgtgctacctgacataaagtcattggaatgggattttctgaaaaagggataacaatttagccatgtttagttacatcctagagctttacccatgtgaaccctgaaaatttgagatgagtctcgcttaatttagaaattttattttgccaaggttgaggacmtgcacctgtgacacagcctcaagaagtc

SEQ ID NO: 916586 - DNA, 615 bp, Homo sapiens
ccgcctataagcagaattcatgagaaaagaactgtaagcatggagttagtagacctggtttcagatgctggccctgtcacttgtagcatgtcatttgatctccctgctcccagcttcctgagatataaatacaggataataatacccacctcagagctgctgcaaagattgacttggatgataccatgcatgccaaagcatttaatagaattcttagaatatactaatgctggataagcatgtgctagatgagaatttaaatgagtttttaggaacacaagtatgaatatgaaggtttccaaaaataccttcactcacagccccttgtaaaaaaaaatgtctaaaattgcaccattagcgatacagacctcagatttctagaaggactgccagccattgggaattcccatcaaaatacacttcagaacctcaaaccaatattactgaagacctcagcaggaagtaattgctatgggtaagcagccaaggttctgcagaaataagagaagggtggagaagtgggagaaatagggaagtgagttgtgctgaatggtccctggaaggcttcacacacaggagacrtttgagtccaattctcgactttcctttggccaa

SEQ ID NO: 916587 - DNA, 648 bp, Homo sapiens
cttaatggggtctctgccatcttccctgctcatgggcaagggagggcaggcagctctcagacagatcaccccagtcctcagcaggaactgtgactccactgctcctcactcttatttgacctcattcctccctctctccggagtatcatttgtcacaaaatagcaagacagagtctagctcagcgctggcttttcattgggaatagtttaactggctcactcacttactcatctgttcaacacagacttactaagcatctactatgtaccaagtgtcatattaaatgctacagatatacagatgagtaatgcacaatttctgcccgtgagctgtccacaaattgacagtgttctttagtgtcaagaacacagactctgaaactggggaaatttggattttatcctcagctctgctactgccaactcggtgaccttgaacaatgtatgcatccacaccaactccttgtcatggactgaatatttgtgtaccccctaaattcataggttgaaatcctagcccctagtgtaatggtattgggaggcatkggggtggggtcctcatgaatgggattagtgctttttaaaaaagaggacagcttgctttctctctctgctttctgccatgtgaggttacaatgagaagatggc

SEQ ID NO: 916588 - DNA, 609 bp, Homo sapiens
gtcccttcagttagcaaatgtaaagtggcataattgtctgcatgtatggcaggtcccacagagacaccagaatagtttcgtccrtagtgaacatctcaaggaccatagtagttaagaagttgactgaaattttacctcatttgtatgacacgtgtcccctaaacaaaattggactgctttgactcaccataataaaaagttgcatcacaccaaaatcccacattcttattctctacaaaaaggaatgttgaatattatagaaccagtaataacatcataaatacattcagtgagtcttcctcacagctcacttcagagagcattatcactatttaccaaggtaactgtgctctaaattaggctcattttaggaatttttctaatttattttctccatcttggaacccagaatgctactgcagaattttagtattatggatgtctatggagtcagccaaaacaacagtgtttccaaatatttgtacggtttttgaagtgtctgctcaaatcagcaccatgtttattatctcaatatctgggtatatgtttggaattgatatctcaacatcatgcagaatctccattgttctccctccactacctatgggg

SEQ ID NO: 916589 - DNA, 627 bp, Homo sapiens
gggatgccaaattttatagaatactttttctgcatctatttagatgattatatgatttttatctttatgtgatatatcacatttattcacatatgtcaaaacatgcttgcatccctgggataattcccacctgaccatgatgcattattttatgtgctgatggatttgatttgctagtattttgttgagaatttttgcatctacgtttatcagggatattggtctctagttgtttttttttttttctctgtgggggtgtatccttctctggttttagtatcagggtaatactggcctcagattcagttgggagaattccttcttccttgatttaaaaaatacagttttgagaatattagtgttagttctttgtatggttggtggaattaagctgtgaatttcatctggtcctggatttgtgtgtgtgtgttgggagattcttttattactaattcaaccttgctaattattattggtctcttcaggagtcctatttctttctggtttattcgcaggaggttgtgtgtttgcgggaatttatccatttcttctaggtttccttgtttgtgagcatgtagttgttcataatcatcgatcttttrtatttctgtaatatctattgtaatg

SEQ ID NO: 916590 - DNA, 611 bp, Homo sapiens
taataggaagccagaaaatccttccaaacatcagttgacatacgggtcttcagtatggttcaaaaaagaaaattaaatctgctaatatcctgaaatacttattattttgattatcacccttgcgatttaagtgacatactactcaattatattaataccctaccctaaactgatgaaactattttcttttagagttgttcattaataaattcagaatactgctcttctgaaatgctgtttcatctgctatttacaggattctttaatacactaaagagagttacaaacttaatagaaataaaatgagctttcagggcagatttgaagatagttaaggccactgatttaagaagacagttgagtattaaaatggtcttgaggacataagaaatgggggcctttgtatacacatgtcaagaaggcaagcacccaaaagataaatgataatatggaggaaaatacagatcaatacaattggaattttaaaaaaatcaagaaggcaatttaaaaatggatctcagggtaaacaggaatcaagtgayttatataaaccaagataatgtgtatttgttcttagttacggtgaaaaggcaagtaagtaacactatagg

SEQ ID NO: 916591 - DNA, 653 bp, Homo sapiens
tttctatgcataacctcaaatcttcccagagttaaatatgtttatgccagggaaaatagtcacatctagctccttgaagttttggatgacagtagatttgggcyacagatagcgtagactgtagatatcagaaggtccctctccctgacttttctgtcataccaagcccttttttaatgtcactgtatcatgagcttcaaaacttttaaataaagagcccttgttcaggagtgtaggttatacatattatctgctttattacctactcaaaatagtctccaattcacctcttcaacttaatttgattttttattactttggctctgagatagaaagctatatgtatttttcagtataactctaaagacatttgaattagatatcacaaaatatataaattttcttttttaaaattatttttaaaatttgtgtgggtatgtaacaggtatgtttatgggctatatgagatattttggtacaggcatgcattgtataattacataataaaaattggatatgcacccccttgagcatttatcctttgtgttacaaacaagttatgctcttttagttatgtttaaatgcataattaaattacgattgactgttgtcaccctattgtgctatcaaatactagatcttattcattctaa

SEQ ID NO: 916592 - DNA, 653 bp, Homo sapiens
tttctatgcataacctcaaatcttcccagagttaaatatgtttatgccagggaaaatagtcacatctagctccttgaagttttggatgacagtagatttgggctacagatagcgtagactgtagatatcagaaggtccctctccctgacttttctgtcataccaagcccttttttaatgtcactgtatcatgagcttcaaaacttttaaataaagagcccttgttcaggagtgtaggttatacatattatctgctttattacctactcaaaatagtctccaattcacctcttcaacttaatttgattttttattactttggctctgagatagaaagctatatgtatttttcagtataactctaaagacatttgaattagatatcacaaaatatataaattttcttttttaaaattatttttaaaatttgtgtgggtatgtaacaggtatgtttatgggctatatgagatattttggtacaggcatgcattgtataattacataataaaaattggatatgcacccccttgagcatttatcctttgtgttacaaacaagttatgctcttttagttatgtttaaatgcataattaaattacgattgactgttgtcaccctattgtgctatsaaatactagatcttattcattctaa

SEQ ID NO: 916593 - DNA, 615 bp, Homo sapiens
ctgaccatactcaagagaagggaatcacacagsccacttaaatgggcttactctttaagtaggtttcccagaagtcttgtccagtgactaccacttatttcccttggacaaacctgggctacatggttattctagcaacaaagggagctgggaaatgtagtttctagatgggcatattgtccactagagtgtaattgggttctgtaagaaaagtggagaataactattgggtgggcaaatagcaatatttcattcaggtggaaccatatcactgagccaggaatatcaactagtgagtcatactgcgaatatcgaaagccaaaatgattctttttaggacaaaatgaatccattggcatttcattaatggaacatgaaaattattgttctatttgtttctacttgtttaaatgaaatacttgtcttcaattccagttttagaatgtgggccttgaaatgcttcaaattagccaatttaaaattaattctgctttagtaacatttcataaaaatgattataaatcagaacaaaaacctgtagggtatagcaagtttcacaatttctttacaaaaacagcaatgcaccagtaaccacagaacaataaagaaaaatta

SEQ ID NO: 916594 - DNA, 604 bp, Homo sapiens
ggtgatattatttctgtgtttatagacaaatatcccaaacaaaaccctaatcagcatatccaattgtggggygaggagtatcatcagtgaccttaaagaggtgcctgtgaagggtaaggggccggactctccagttgcaagatagaggatgtattgctgcttctccatcagaccaactcattttcctactagtgtttcctctgcgtggaacacatctcctcaactcatacataactaatgtgaagtgtgggcagatgtggtatgtgttgatgtattgcttctaggctggaagtatttacttgccagaacttcgacactctttcttcttggcaaggtaattgtggagtttggagatagcgtctctcccagcctgttgctgggtgaccacatgagcagagctcccaagctaacccacaatgtccaagtaacatgagaaataaacctctttcttttgggtagggggagggggttgtttgttactgtaatataatctcctagcctgttctgatacttcatatcaaatcatcttaattacttatttatagcactgttcatgatccatacactcttaatgtgtttctttattctttttgtctggccttga

SEQ ID NO: 916595 - DNA, 652 bp, Homo sapiens; identical to SEQ ID NO: 904674

SEQ ID NO: 916596 - DNA, 674 bp, Homo sapiens
ttctgacctgctttgtgtatttcttcaattacttcgccttactattgtatcttcatttgtttgwttaaatcttttgaatctggatttctttgttattttcctccagattttgtgactcacttgaatcatgtctttttccattgcctctctggcatcttgatagttgtaggtgattttcttatgaaagaccagtgcccactgtgaggccatgggacacagcctgaagccctttagctcctggataactagctaatagttccctagaaggaatgccctcaggcttcctgaggactggaatgactccttggcagaggtgaagcattttttaatctatctgagttatttaaagtttaagacagggataacctacacgagagactattttcttgaagaatacagacttggggtccaggctctgctatttgctagatttacaactttggagaaattaacctctttggttttccatttctttttcagttaaactgtggtgaaaaaatacctatcaaatagggttatggtgagtgttaagaaaaccgatgtgtgcaaagcacatatatattttgtttttatttttattttgtctgtttcatgttttcagaaaccatgatcaaagcattcataagttctccaaaagggttccattggtcctcaaagcacttttcacacataaa

SEQ ID NO: 916597 - DNA, 643 bp, Homo sapiens
gtcttgttttaatcctcttcaaaaggtggcttataaaaraagatggcttataatcaatataggaccttaacaggtgctcttaaatgcaagtttctgataactttggagattgtgacactagaatggaggaacaaactttcaggactcatggagagctgaaatgttcatgaacatcaagcagaataggagttaactgcatggactaaactaatagtaaactaatagaagtctgaagtaatcttttttaactttttgtttaaaacattgctaatcctttgctttgtttttcagagttaagaaaactcttctgttgagctatttacagcttgaagcaattgagtaaagtacactcctgtaaacagaatttggaacacatttgtttccctctacctgattgcttcagaatttggaagttactcgtgttcttaacttatggcaatatagttatttacataagtgtaataagaatctattttcttttgtaacaggacacaattggagaaactggttattttaccatgtctctgactgaaatggtgtgctttctttaaggaatcaaacttatagagccaataaaagccccttgggaaactggcctcataccttctctacacagtccctgtacagggttcctgacctgtgg

SEQ ID NO: 916598 - DNA, 643 bp, Homo sapiens
gtcttgttttaatcctcttcaaaaggtggcttataaaaaaagatggcttataatcaatataggaccttaacaggtgctcttaaatgcaagtttctgataactttggagattgtgacactagaatggaggaacaaactttcaggactcatggagagctgaaatgttcatgaacatcaagcagaataggagttaactgcatggactaaactaatagtaaactaatagaagtctgaagtaatcttttttaactttttgtttaaaacattgctaatcctttgctttgtttttcagagttaagaaaactcttctgttgagctatttacagcttgaagcaattgagtaaagtacactcctgtaaacagaatttggaacacatttgtttccctctacctgattgcttcagaatttggaagttactcgtgttcttaacttatggcaatatagttatttacataagtgtaataagaatctattttcttttgtaacaggacacaattggagaaactggttattttaccaygtctctgactgaaatggtgtgctttctttaaggaatcaaacttatagagccaataaaagccccttgggaaactggcctcataccttctctacacagtccctgtacagggttcctgacctgtgg

SEQ ID NO: 916599 - DNA, 623 bp, Homo sapiens
gaagcaggcaggaggaagtgagccacctccacacccattccatatatcctccatggtccagcagtaaagaatgcatagagcaactgggcttcatcttccctctttcatttatgtttaacggtatctgtcctggagggtgtcagtggataacagaataaagccttctctaaccactccagaccagagagattaccctccattaatggtaattcctaaaatgtgcattgcaactttccagcctataaagtgtttttccacatcggctgtttcacagaatccttaaaacaatcctatcaataggtattattattcccattctgttgataagcaaactgagactcagagagagaagtggtttgcccaaggccacatagctgataaatgatggagctgagactggaatcataatggtctgacttcaaggtctagactgcttccagtatatcacaacagcctctcaactcctgcagatcctgaatagatcctgaacagagctctcccacttacccatgtcctgctctgtgatggtgcttctgtatagtcttaggtgtgtatttaattcctccaactcttgtgcaagctcaatragaacagggactgactcttcttcggtgtttctttgg

SEQ ID NO: 916600 - DNA, 585 bp, Homo sapiens
ggtattgattttgaaatcctggctgacaagacaatgatttgagtccatttccattttgtggctgaagcctggtgcattctttgcctctgcctgacctcccagagcagagttcatcaagaatcccctctgctgacactcctatcctgattctcaaacagcctctcgcctgtttgtctccgacaagaaaggacatgcacgtgaaaggagcagtgtggcttcctgtgtctcctctggaagaggagggccctatttcaaggctgatttcaaatagtacattttaaaagtctgcttagcctcacacacatatgagcatcaacattagtgtctttacggaggttttcggcccgcacagaaagggcaaagctcaatgcattcaacccaacaagcagcaggttcccgtcttggacaccgaaagtggggggtcctatttcaagactgatttcaaatagcacattttraaattctgcttaacctcacacagatatgaccatcaacattagtatcgttatgaaggttttcggcccatacagaaagggcaagtctcaatgcattgaacccaataagcagcaggtccctgtcttggac

SEQ ID NO: 916601 - DNA, 644 bp, Homo sapiens
gagcaaatgctggcaaggatgtggagcaacaggccctctcattcactgctgctgggaaggcaaaatggcacagccacttggaagacagtgtggcagttaaaaaaaaaaaaaaaagaaaagaaacatactctcactatatgttccagcagttattctccttggtatttatccaaatgagttaaaaatgtaggtccacacaaaaacctgcacacagatgtttatagtattttcattcacggttgccaacacttggaagcaaccaagatgaccttcagcaggtgaatggaaaaataacctgtggtacatccagacaactggaatattatttggtgttaaaaagaactgagctattaagccataaaaggcatagaggaaactgaaatgcttattaccaagtgaaagaagccaatctgaaaaggctacacatactatatgattccaactagatgatattctggaaaagacaacattatagaaataatacaaagattagtggttgccagggtttgtggggaggaagagatgaaaagtagggcacagaggatttttagggcagtgaatctatcctmtttgatactacgtggtagatgcaagtcattatacatgtgttcaaacccataacatgtactgcactaagagtgaat

SEQ ID NO: 916602 - DNA, 609 bp, Homo sapiens
aatgccaaatatttaattctggcccttagagaatccaaatagaaacacttaagtaaccttacatgtactcaaataaaaagtgcaattaatacagctctgagaaggatgggttcctgatgtataaaacattgactttacaaggttgtgaggattaaatacaataatgtatatggaaggcctctgcaatcttgaaagcagagaacagcacaggtaacatggatgaattcagctatccaggtgaggacagggagtgccgatgagtacctgatccttttaaagaacccaaagctactcagttctaacacacctttgcgtgagactcagaaagaaggttcttggtgtgggtaacatttctgaattccaaaaaaaagtcttcctatttttaaatagtgacaatttttaaaatcactatgtgggtcaaacaaaactttgggaatcatgcagaaggatttggccatgagggtgacagtttgcaacctctgcctggttaarggcttcagggatgttggcattgtcaagagagctgagtggaacctcgcagagcaaactaccaaaagaaagggaatttggaatcagactgggtgtcctcccaagatgctctaattttag

SEQ ID NO: 916603 - DNA, 680 bp, Homo sapiens
ctgctggacactgagtcacacagagagacagaaggtggctgaggacaccttatctctgatgagmataaggggattagatctgctggtggaacaggaagctgaagaaacttctggctctaaacatggaatttccagccctctgtctctgctgtccatgcccttctcatctgtatgttcctgggagatgtggaccacgggggtcagaggtgaaggggattgggaagctttcatgttctctctcaccatctcccttgtttatctaacacactcttacacacctactttattagagcttctgctctacaaacatggctgagctctaaattagagacttttgaaagtgcagacggatgcaggaactcgtccatctggagactttccaccacttgaagcagtgaacacatctctgcaaggctccaaatttcaagtgacaggattttgggatttcaaagaaaactaaatctttggtgaaccacgacagaagagggaaggttcacacatttccctgctgcttgggcctcagtgaggactgactcagccagtctcaggctcctggaaacctcctaggagatgtgcactaggaaagtcttttcagtacaacctggggcaggtaagtggcccttactctgatattctgctccctgataattttgctttcagagaagaacaaagacctgtga

SEQ ID NO: 916604 - DNA, 618 bp, Homo sapiens
cacacttgtggataattaacatggttaagagagtagttctacgaatgattaaagctcaggtaccctggtctaaagtaaataccattacggggcaatatccctggttgacctcccaccgagagggccatctggctcaaaggttagttaatggagatagggtaaacaggcttaactgggaaagcctccattgtccctagcatttaccctatgacctaatgctctaaggtaagaaccagctgccttcagcctgtacaattattacaagctatgtaacattttagccttccaaaatgtttgtgattattccctataactttccctaatatttccctttgatatttctgccaccatcctgagtgaatcccaacagaggtccaatataatcaacctgccaccaggtagctggctgataaccccaaggaatggtgccacatcaagggctcagtgttggtctctgctgctggcaaattgggcactcagcagtggctgtagctaggtcagccttggtgagtggaagtccatgttgatgagcccrtgtgtaacctccattcctgccagcatggccacttccctcatgggcccattgggcgatgacaggggtgtctggggaaagaggat

SEQ ID NO: 916605 - DNA, 628 bp, Homo sapiens
ggatcaaatggtagatccagttctttaatgaatctccacactcttttccatrgtggttgtactagtttacattcccaccaacagtgtaaaagggttcccttttcaccacatccatgccagcatcaattattttaatttttttattatgcccattcttgagggagtaaggtggtattgcattgtgactttgattttcatttctctaatcgttagtgatcttgagcattttgccatatgcttgttagccatttgtatatcttcttttgagaattgtctattcatgtctttagcccactttttgatgagattgtttgtttttttcttgctgattagtttgagttctttgtagattctggatattaatactttattagatgtatagattgggaagattttctttcactctgtgggttgtcagttaactctgctgactgtttattttgctgtgcagaggctatttcatttaattcagtcccatctatttatcttcgtttttaatgcatttcattttggattcttggttataaagtctttgcttaagccaatttcttctagaatttctaaggtttcatgtcttagatttaagtctttgaccaatcttgtgttagttttgtataagatgagagat

SEQ ID NO: 916606 - DNA, 694 bp, Homo sapiens
gaattgggtatccatcccctcaagcatttatcctttgtgttacaaactactcaattacastattttaggtattttaaattgtacaattaagttgttatcgatgtgctatcaaatagtattgacataactctgatgcgctatcaaatagtaggtcttattcattctttctattttatttacccattaagcatccacaaataagagcagatttcttcttagaagtcatgcgagcaggaagctcgcatgtggagctatatttataaaatattaaaagaaaaaacttactacccaaacccatctccagaccatgaatttctctctggatatcttattaaaatattgtctcctatcaaatctctatcaaaataccaatgacattcacagaagcagaaaaaaaattctgtaactggtatggaaccacaaaagcccctgaatagccaagcaataccaaacaaaaaaccccaagatgaatatatcacattatctgaatcaaaatatactacaaattatggtaaccaaaacaggatcaatggtattggcataaaatcagacattgagactaataaaattgtatagaacacaccaaaataaattcatgtatttacatccaactgattttcagcataaattccaagaacatacattgagaaaaggacgcacttttcaataaatggtgctgagaaagtggataccc

SEQ ID NO: 916607 - DNA, 606 bp, Homo sapiens
cagctttatgattgcttttcatgcagtaggccctggttagagaggggagtgcttgtggcctggaggtaggattctgcaatttatcaaataaaaacactggaggtcagttaaatttgaattcagtaaaacaatgacaaagaattagtatgtgttagtatctcccacacaatatttttcagttgaaatacaacttatctgggtgccctgtcgtttatctgccaactcctcacaggattcaaggcttggaagagggagtgttggggctggcctcgtcttactgatgccagttctatgagatgaacctcaaaggcagagcttctctaacacagctaccctcaagaaagcacgtcagttagcactaaatacatggtataagttcctcaatcaatagtgcctactcacttccctaattcttctttgtattattcttcaagtctgcagactcaggacctctgctggggttgctgcagccagagttctggatgagggacctcataagcctttcaaaaccagacgcagggggactactcagtccccacgcagcgggrcttaagccaggggtaaataagtaagaaatggaagagctcagcatggctctccctttgt

SEQ ID NO: 916608 - DNA, 604 bp, Homo sapiens
aaatatggctagtacgctatattagrcttgtccaccaaaaattaataggatatgtatggatatgaatatatatgtataatgtatctatatggtgagagagacagacagaaacttattttaagaagctggttcatacaatagtggtggctgatggacaaaatctgttgggcaggctataggctggaaatttaggtaagagttgatattgccgtcctgagttcaaattctgcaagaagctaatgtttccccaagacagcatcagctgttattatgcacactggctccaaatcgaggaaagtgtcccccctgaccattagcagagctcatgccaagaacaaggctgatcattaacatcaatcactgggaaacttcagtatttattctaaaaaccttgaactcattaatgagactcacacacattgtggaaagtagtattgatacaggagacagaaattatttaggcagatagtgagggtgacagggtcctcagcagagcttctcatctaacaaaaagcagccctaaaaatcatttcttttataacaaagagcagcctgaaaaaatcgtgctgcaaacatagataagcaagctggaagcttgcatggg

SEQ ID NO: 916609 - DNA, 604 bp, Homo sapiens
aaatatggctagtacgctatattagacttgtccaccaaaaattaataggatatgtatggatatgaatatatatgtataatgtatctatatggtgagagagacagacagaaacttattttaagaagctggttcatacaatagtggtggctgatggacaaaatctgttgggcaggctataggctggaaatttaggtaagagttgatattgccgtcctgagttcaaattctgcaagaagctaatgtttccccaagacagcatcagctgttattatgcacactggctccaaatcgaggaaagtgtcccccctgaccattagcagagctcatgccaagaacaaggctgatcattaacatcaatcactgggaaacttcagtatttattctaaaaaccttgaactcattaatgagactcacacacattgtggaaagtagtattgatacaggagacagaaattatttaggcagatagtgagggtgacagggtcctcagcagagcttctcatctaacaaaaagcagccctaaaaatcatttcttttataacaaagagcagcctgaaaaaaycgtgctgcaaacatagataagcaagctggaagcttgcatggg

SEQ ID NO: 916610 - DNA, 626 bp, Homo sapiens
tttcgaggagctcaataaactccaagcaagttaaactgaagtctgcagtgagacacattctgatcaaagcatcaaaagccaaatacaaaaggaaaagtgtaaatagtaacaaaaggagagttggggtagctaaagcaatttcagacaatataggcttcaagttaaaaatgcttacaagagacaaagaaaggcgttataattgatgaaataaccaactagtcaagaagacagaataattatgcaccaagggatagcacttcaaagtacataaaggaagaccaatttgaaaaaaaaaatatgtagatctataatataacttggagacttcacttctccacttttactgaccacctaggccgggcatggtggctcacgcctgtaatcccagcactttgggaggctgaggcgggtggatcatgaggttaagagatcgagaccatcctggctaacacagtgaaaccccgtctctactaaaaatacaaaaaaaaaaaaattagctgggcatggtggtgggtgcctgtagtcccagctactcgggaggctgaggcaggagaatggcatggacccaggaggyggagcctgcagtgagcagagatcacaccactgcactccagcctgggcaacag

SEQ ID NO: 916611 - DNA, 601 bp, Homo sapiens
tattcctttacctgtttgttttctcttgcaacatgtggattcagcaacgtgaccatactctccctcttttccccgcagcctgcttttctcttctaaacactgaaaccctaaaatatttttggagaaaggcacagacctctgtcgcccagccatgtctttaaccttggaagaagaaacttctaaattgataagagatctgtctcagacactttttcgtttacatcccgttatctcagaaagcaaaacaggctttgttccaacccaaagtaatttgtgaatattcaagcggtatcattctgatgtaaaatttacataaattcttgggtttaccaaaatgcaaatgggcaagcagatcactatttacagataatggcctaaaaaatggtaagagtaaatgctgtggagctaaatgtttctgagtctgccatttcctagttttgtagtttctctcgggcaagttacccaaagttgctgtatgttattatcttgacatttaaaatagaagtaataactttattataaataatagttaataccatagggtcrttaggaaagtgtctggcatatatagtcacaacccagtgaatgccattattgtttt

SEQ ID NO: 916612 - DNA, 480 bp, Homo sapiens
agcaactggaggaagatcaaagtcacctaaacctaagaattctaaactgcaggaaatttccccaggatctgcacaggcaactccacctgtacaggatttcctttcagcccaggcaattgattgactattgaagtgatggagagagccacacaattaagaaacgtttgcctcagcctggtgtggtggttcacgcctgtaatcccagcactttgggaggctgaggtgggaggctcacctgaggtcaggagttcgagaccagcctgaccaacatggagaaaccccatctctactaaaaatacaaaattagcctggcatggtggcacatgcctgtaatcccagctactcaggaggctgaggcaggagaatcgcttgaacccgggaggcagaggttgcagtgagccgagatcgcgccatygcgcttcagcctgggcgacaagagcggaactcgatctcaagaaaaaaaaagaagaggaggggaag

SEQ ID NO: 916613 - DNA, 627 bp, Homo sapiens
tgcctttactattttgctgctactgtgaaggagaggttattgactggggtggcacaggctatgatgctccgatgctcttcataactcatatgccttgctgtttttgtgtttttatttgtgcttgcttcaaggagacccagctctaatgtaagacctttctaagtacctaactcttcctctgggagggcttggggttcgggaacggctccctacctgtggggggaagagagactgaatctgtgctttccttcttgtggctgattagatcttgagctcttcattgcctttttgtgctgcccttgctcctttcttttgcatgctgcctgctttttgaataacaaagcctgggtcacctccatatcctcatgggacctcagcaaccccaggccacagtggccctaacaccccaacagaggggttcagtggagtcacaggaacgtgccgccttccttgattgtgtccttttacttgtttgatctaatgagtgagtgtttgagtgacaagaataggtatttttccatctcaagattcttaccttcttcttctctatatttttyccttgcagggcaaccaggaccaaaggtaagggctttcttctttttcttttttcatatttttttggcttta

SEQ ID NO: 916614 - DNA, 630 bp, Homo sapiens
ttctggaatcaaaccaatcaacaaattatatgattgcctagtttttgcaggtttgctattttgatgtttgctgtattttaaattcttaaactcaaatgggmtcacagatgcctactacatctcttgctgaaatattccaagactgttgattttagtcttttgctgggcactaaagtctaaagaataaagaacacccttagaaggtttggttatgtttctccatatacgttaaataacatctgtcatattttagagcataaaaataattttataaaatgaaatgcaaggaactgatacttcctcaaataacactttcccttccagtgaaatgattttgccactgtcatctaataatccattcccaaaattactttccaggcatcagtggtaattctgatcaatgataggttagtctccaacaatcagagtttatctcagtagagttctttgtatccatatagagacttacctagccaagtagggaagacctagtgcctttcaacctcctaacgttgttgggtttctttgcagaactttgctgcccagatggctggaggatttgatgaaaaggctggtggcgcccagttgggagtaatgcaaggaccaatggtaagaaaagacactagttct

SEQ ID NO: 916615 - DNA, 591 bp, Homo sapiens
taaaaaggatgcaaccttctatatgtagagttaattgcatcagggaatttgaactcacctcatgttagatgtagagttatacaatagatgaaacaattttatggcatatataatttgagtcaaattaactaacatacctgtcactcctcaaaattctaagtcccatgaaggaggatttcattaagtgagccaaggtcaagtgaccatgcctttagctgccaggaactgggaaataaaatgcctgccgcttgcagcttctacatagaaggtgcagccctgcctttcacaaagatttcaaaatgagaaataaacctcaaacagagaagttctttggatgacagaaagtcaaaaagcaacaaactatctgctaatatttaggcagcattttagatttttaaaaaattctctttcaaaaattaccttactgaagcttcaaacaactctgagaagtaggtatcattgcattgataagacacaaggagactgagactccaaaaatgtgaatcagtggctctaagtcacagagttagcaaataasaaaacaaggccttagttttcaattgcagcattccatggaaggtggatggacat

SEQ ID NO: 916616 - DNA, 614 bp, Homo sapiens
cagacagtcatgggatgcatgttcatgataaaacagctcccagaacagcttttargtaatttaacttaggctttttaaaagtagagagtcatacttggaataagcattacaaataattagaactttggaaatgtgctaatttaactgtaaacactaagctgaaatgtcacaagaacatttagaactagaaaagaccagaactgttcctgtgttagtttcctaaggataatggcctccagctccatccatgttcctgcaaaggacatgatcttattcatttttatggtcgcatagtattccatggtgtatattcatcacattttctttaccacattttctaataccacatgttctaccttgtaagtgggagataaataatgagaaccaatgagcacaaagagggggaacaacagacgctggggcctacttgatgggggagtgtaacaggagggagtggagcaggaaaaataactattgggtactatgcttagtacctgggtgatgaaataatctgtataccaaacacccatgacatgacaaacctacacatgtacccctgaaccttaaataaaagttaagcaataaaaaagaccagaactcatctactctaatca

SEQ ID NO: 916617 - DNA, 614 bp, Homo sapiens
cagacagtcatgggatgcatgttcatgataaaacagctcccagaacagcttttaggtaatttaacttargctttttaaaagtagagagtcatacttggaataagcattacaaataattagaactttggaaatgtgctaatttaactgtaaacactaagctgaaatgtcacaagaacatttagaactagaaaagaccagaactgttcctgtgttagtttcctaaggataatggcctccagctccatccatgttcctgcaaaggacatgatcttattcatttttatggtcgcatagtattccatggtgtatattcatcacattttctttaccacattttctaataccacatgttctaccttgtaagtgggagataaataatgagaaccaatgagcacaaagagggggaacaacagacgctggggcctacttgatgggggagtgtaacaggagggagtggagcaggaaaaataactattgggtactatgcttagtacctgggtgatgaaataatctgtataccaaacacccatgacatgacaaacctacacatgtacccctgaaccttaaataaaagttaagcaataaaaaagaccagaactcatctactctaatca

SEQ ID NO: 916618 - DNA, 646 bp, Homo sapiens
atgcccttcaagcccagacattgggaaacactcctctctcatcagatgctcgcctcccccattctgtttttaatcccccttcttaggacgcatgggggtkgagagaacggggagatagacagagggaggtgcctggtcctgccctccccccgcctcaaggacagacagacacctccagaattagcctctgtccctccttatctcccacaataccccaggtcagacagatgggcgtggaggtgacatttctcacctcagggtcagggcaaggagccctgaggcagaaggttagtcagaaaatctggcgggggcggatggaatcccgtcccccagagagctgcagaagaaggaggaggcagaatcctgaccctacaaactctactgcctgtgtgagctccaagcctcagtttaccccttcctctccgtgtaatggttaaatgcccggctatgcaaacctcccagaatccaatagccgctttccggaattctgccctgggttctagaactacctctgcaaacccagctgtttcccaccccataaggcaataggggagcccacctccgccagggggtgccctagggcggatgtcccttctctggttaggcaggtctgacgcccaggttaatgacatgttgggttcgctca

SEQ ID NO: 916619 - DNA, 433 bp, Homo sapiens
cgatcagtggaattctgaatcggttaacgttagttaagagcgaggggaaaaaattgccctgggttctacgttatttccaagttggcaagttggatgttggatttctaccctcagtttcttttctttttttctttttctttctttctttcttttttttttttttttttgagacggagtctctctctgtcacccagactagagtgcggtggtgcgatcacacctcactgcagcctcaacctcccgggctcagatgatcctcccacatcagcttaccgagtagctggaccacaggcgcgcgccaccacgcctggccaacttttgtattttttttgtaraggcgtgggggtgggggggtggggtctcactatagcccaggctggtctcgaactcctgggctcaagcgatcctcccttctcgccctcccaaagtgtcg

SEQ ID NO: 916620 - DNA, 554 bp, Homo sapiens
cccccttgacattcatttatctatgtaacaaacctgcacatcctgtacacgtacccctgaacttaaaataaaagttgaaaacaagaaagcaacagtttgaacacttgttatggtctattctctcattctttacaattacactagaaaatagccacaggctcctgcaaggcagccacagaatttatgacttgtgatatccaagtcattcctggataatgcaaaatctaacacaaaatctagtagaatcatttgcttacatctatttttgttctgagaatatagatttagatacataatggaagcagaataatttaaaatctggctaatttagaatcctaagcagctcttttcctatcagtggtttacaagccttgtttatatttttcctattttaaaaataaaaataaagtaagttatttgtggtaaagaatattcattaaagtatttatttcttagataataccatgaaaaacattcagtgaagtgaagggcctactttaccyaacaagaatctaatttatataatttttcatactaatagcatctaagaacag

SEQ ID NO: 916621 - DNA, 613 bp, Homo sapiens
tgattgctgctgtcttcagttagatggttaactttgtgaagttgaaaactgtggctctctggttgactgttagagttctggcacttgtcactatgcctattatttaacaaatgcatgaatgcttcagaatatgggaatattatcttctggaatagggaatcaagttatattatgtaacccaggattagaagattcttctgtgtgtaagaatttcataaacattaagctgtctagcaaaagcaagggcttggaaaatctgtgagctcctcaccatatagaaagcttttaacccatcattgaataaatccctataggggatttctaccctgagcaaaaggctggtcttgattaattcccaaactcatatagctctgagaaagtctatgctgttaacgttttcttgtctgctaccccatcatatgcacaacaataaatgcaggcctaggcatgactgaaggctctctcataattcttggttgcatgaatcagatyatcaacagaaatgttgagacaaactatggggaagcagggtatgaaagagctctgaatgaaatggaaaccgcaatgcttcctgcccattcagggctccagcatgtagaaatctggggctttg

SEQ ID NO: 916622 - DNA, 613 bp, Homo sapiens
tgattgctgctgtcttcagttagatggttaactttgtgaagttgaaaactgtggctctctggttgactgttagagttctggcacttgtcactatgcctattatttaacaaatgcatgaatgcttcagaatatgggaatattatcttctggaatagggaatcaagttatattatgtaacccaggattagaagattcttctgtgtgtaagaatttcataaacattaagctgtctagcaaaagcaagggcttggaaaatctgtgagctcctcaccatatagaaagcttttaacccatcattgaataaatccctataggggatttctaccctgagcaaaaggctggtcttgattaattcccaaactcatatagctctgagaaagtctatgctgttaacgttttcttgtctgctaccccatcatatgcacaacaataaatgcaggcctaggcatgactgaaggctctctcataattcttggttgcatgaatcagattatcaacagaaatgttgagacaaactmtggggaagcagggtatgaaagagctctgaatgaaatggaaaccgcaatgcttcctgcccattcagggctccagcatgtagaaatctggggctttg

SEQ ID NO: 916623 - DNA, 658 bp, Homo sapiens
tctcaggacatttcccaaacaaaaatagttttaytcaatcctcattttagaaattagtattagaatgcctagggaatggatgatagggcaggtgcatgacaaactcagcctgaagtccaaactacaaaggggtttcttttctggatgaggctaggctcaaagctttttttgtttatgatctacactgagacattggaccagcaccttttgttcaaggtgacagtaacataagcctgctcaaataagtaacatttccctttgccactggctcatttgagtggaatgacaaagtttgcttgcgtttgtgtggacagacccacacaaccctggcactgataaatattcagtatgtctttatgttttcacactaagcagcactgaaaagtggtcaactttttgtttgttttttgttttagagagacacctgtaatcctgctgatgctcatgtgctgaaaactatgaccgtactcaataaagaaggagacacagtgttacagctcttttggaattagtctagcagatttctcagttttcactggaaacccttaaaaaggtagaggagagagaggtgcgtggaagagtgagcacaagaaaggaggcatcttacagtttataaacatctgaacactggagctctatcaagattctgtttcaatct

SEQ ID NO: 916624 - DNA, 578 bp, Homo sapiens
tggttaaatgctgcgagtccagcaactcgactcaggacccgactagcacctggatcctgycaccaggatcgacctcaccgggcgtttgtcagtggatgctcctggtctcgagttagttacatgcttgggtgtcactctgggggctcaacggtcttctcatcacttatcacctgggaacaaccactccctccccactttggagccagcagcctttggggaaggtgggctctcgtggtttctgtgcctggcagaatgtcctataatcctggcgtctggctgctcagaaaacagggtccccttcccatctgagctgccgcagccttggcaccttggtttaccagtgcaacacagcccatgatgatccagttgaggggagacgggttcttccttttctcccctcttgcctgcagtcctcctgggcctccacacccgtccttcgacgacccccatggacagcaacatcccaccataggagagaaacccttctgttcattcccggggggctcgctagggaaacgcctgagtgatctattttacagcctcccccatgctccattcctgccccttgcagctggggg

SEQ ID NO: 916625 - DNA, 488 bp, Homo sapiens
ctttagatcatgtggcaggaatgtttccctcaggaggcagagtgtctaattttagatgcaactttgatatattacttgcatgttctgtagcctgtaagtaatgagggatagatgggctctaaacatgctctaaaatgttcttaaatattttcactgcatatggtctatgtgtgattcctattacaacaaaaaattcacgtgcttatcacatcatatctttatggtggtgcatactttatttgtctagaatcgaacagatgtgcagtgccagcaccgatggcagaaagtactaaaccctgagctcatcaagggtccttggaccaaagaagaagatcagagagtaagttctttcttcattggtgtgtgactcataattaagaatattcccaaaatgctaatattttcctatttgaggaagcaggtaaawtgggcaaacaggaagtagaggactctattcccatatttccagtgaatgaaagcaaattttg

SEQ ID NO: 916626 - DNA, 684 bp, Homo sapiens
cttcatcaaggaatgaaacacatgaaagtcttctacttytaaaatgaactctgaattactctactcccacagtaaaaacttccttactttagcacttacatggagaaatcttgaggcagcctgcctacttcccactaagaaatcctaaaaagaagcctgtcaacccatttccacagagtctatattcagtattcagcattttcaatctagagagtagccttttggagttatgtacatgtataactgtaaaagaaacccatgccagcgactgttctagtcaatatagttctgcaggcataaataaaaatgaccaataatagataattagatgtttgaggaaaaacaacaacatgaaagagaaggactagcctgaattgggaaaaaaaaatgacactagaggaaacagataatcctgggatcattaataagtggtagctacacactgagtgcatatggacacaaagaagagaacaacagacaccatggcctacttaagcgtgaagggtgggaggagggcgagataaaaaaactccttatcaagtactatgctgattacctgggtgataaaattaaaagggccctttgagggccaaacaggatttaaaaaatggcccctacctacttggtattgaaagataccaagttgaaatttcagttcatgaaagataaagagaaaaatcactt

SEQ ID NO: 916627 - DNA, 647 bp, Homo sapiens
tattccatcttcagttgatttttgtataagttgtaaggaaggggtccagtttcaatcttctgcatatggctagccagttatcctagtactakttattgaatagggaatcctttgacaaacctgctcttttcaggtttgtcaaagatcagataggtgtaggtgtgcagtcttatttctgggttctctattctgttccatttgtctatgtatctgttcttgtaccagtactatgctcttttggttactgtagccctgtagtatacagtctgaagtcaggtagcgtgatacctccagctttgttcttattgcttaggattgccgtggctatttgggctttttttttttttggttccatatgaattctaaaataattttttctagttctgtgaagaatgccaatggtagtttaatgggaatagcattgaatctataggttgcttagggcagtagggccattttcgcaatattgattcttcctatccatgagcatggaaagtttttacatttgtttgtgccatctctgatttctttgaacagtggtttgtagttctctttctagagatctttcacctccctagttagctgtattcctaggtattttattctttttgtgacaattgtgaatgggagttcatttctgatttggc

SEQ ID NO: 916628 - DNA, 640 bp, Homo sapiens
gacccggcgcccggtaggagcagggctggggcaaggcctgggtacattgtctgttccattctgacctcctattggactcagtttctttttttcacctacttttgtgtcattaaagcttggcacagatgttttttagctttattccgttctgagatgaagcactacctccttccgtccctcctcccgacttgttccttcgctcgtgctcattgctgatccagcccttcctgcttctttacagaaagaggaggaccctgctacaggcactggagacccaccccggaagaagcccacgcggctggctattggtgagcaccgctgcagtcctattcttctccctgagctggtctttctggctctcagcagcaccaggaaagccccaaagagtgggcctgattgatggccctagaactctggatggggcaagtgaggtgctggctcggaggagggacattgacctgttgtcattgctctactctccctcttcttccctatccttccaggtgttgaaggcggrtttgaccttagcgaggagaagtttgaattagacgaggatgtgaagattgtcattttgccagattacctggagattgcccgggatggactggggggactgcctgacattgtcagagatcgggta

SEQ ID NO: 916629 - DNA, 609 bp, Homo sapiens
tctctctgggggccacgttgcttcctctctccagggtttcctccagtacccactctcatgtggtctcacctgtggcccgcctttcccatctgagcagtcacccccgaaggccttgctgggcctctgcacaccacctcccctcgcctttctactgcagccatgaggctgcctcttctgtgcctccttcctttccaacacagagacctcaaaggccatttcctccgccctgggctagtgccttcctttctgcagtggtcagcttctacctgcacttctgatctcagcatgatcagcctctcctgctggaagcactccctcaactctcagctgaggtcaaatttcagtttccctctcataagctcacagaatcatgtgcctcttagtaaagttcagcaccgttgcaatttttccaacacttgttttattccttttgtgctccacttaattttaaactcatgaagctgaaggctgagcttgttacattyaccaccagcagtgcctggcaggcagggagtcctcattcatttcacagagaatggatgagtgagtgacaggtgagtgagtgatgagtgggtgaatgaaccagtaacaggaacacactagattcat

SEQ ID NO: 916630 - DNA, 609 bp, Homo sapiens
tctctctgggggccacgttgcttcctctctccagggtttcctccagtacccactctcatgtggtctcacctgtggcccgcctttcccatctgagcagtcacccccgaaggccttgctgggcctctgcacaccacctcccctcgcctttctactgcagccatgaggctgcctcttctgtgcctccttcctttccaacacagagacctcaaaggccatttcctccgccctgggctagtgccttcctttctgcagtggtcagcttctacctgcacttctgatctcagcatgatcagcctctcctgctggaagcactccctcaactctcagctgaggtcaaatttcagtttccctctcataagctcacagaatcatgtgcctcttagtaaagttcagcaccgttgcaatttttccaacacttgttttattccttttgtgctccacttaattttaaactcatgaagctgaaggctgagcttgttacattcaccaccagcagtgcctggcaggcagggagtcctcattcatttcacagagaatggatgrgtgagtgacaggtgagtgagtgatgagtgggtgaatgaaccagtaacaggaacacactagattcat

SEQ ID NO: 916631 - DNA, 578 bp, Homo sapiens
ttgggaaacaccagtgcaaaaaacagacaaagcttcaagttgaggtagacrattttaacacataattgttataatttattatacttaataataaattaatttaaaagtagaaggatatattcctggtagatgcttatctccccggagaagttagagtgtcattgagaatatcaacattcttggtaaatcatacctgatttagggaatgatccttggagctctggaattctacatgccttaccttgcaaaatgaaggtcctgatctgaaaagttttttttttttttttttttttttttatgccctggcccaaccatgaggattggcttctttgctgtgtggctcttggtctcccaggatcaggtgagttctgggcatagatgagaaagtccttcctgggcttgtcgggccccaaccacggcctcctatgggggtgctcatgggcctcctccctgtctccacttctgattctgtgtcctctctcactggagcatgattgtgggaattacccatccaggttgcatcaagatgtgcaatagatagcctattgtatctgaaataactattgcagtgttatgga

SEQ ID NO: 916632 - DNA, 547 bp, Homo sapiens
tgagaaaaacaacaaagtagtatgaacacatgtggcatgtgttctttccacggacrtttctttgggaagaagtactgtattttaagattttggtttttttaataatggaagagtatgtttaatgtttttatttgaaaataatgtattagttcttgaaaataaaatgtataagatccttcactttattttccaagcaataatttcatggctaaacatttcttttgggaatacttctgtaggaaatgcttacttaactacttgatgacccagatcaaaataagatgcattttttttgaagtcatatctcgttttgaaccttatgccataacccagatgaatcaaacatactgctcacagaaggacatttggctctttccaaaaatcaaattgactctcagaggacaaataatttctacttattgatatattcaagaaaatgtgctctaaatctgaaggtatttactaaggattagttttaaaaggcttgaatcatggcaacaatgatagaataagtgtacatctgcccattggtttctataaaaagaaa

SEQ ID NO: 916633 - DNA, 419 bp, Homo sapiens
gaagaaactgcatcaactaatgggcaaaataaccagctagcatcataatgacaggatcaaattcacaaatarcagtattaaccttaaatgtaaatgggctaaatgctctgattaaaaggcacagactggcaaattggataaagagtcaagacccactggtgtgctgtattcagaagacccatctcatgtgcaaagacacactaggctcaaaataaagggatggaggaagatttgcccatcaaatgggaagtaaaaagaaaaagcaggggttgcaattttcatctctgataaaacagattttaaaccaacaaatatcaaaaaagacaaagaaggccattacataatgttaagagctaactaccataaatatatatgcacccaatacagaagcacccacattcataaggcaagtccttaga

SEQ ID NO: 916634 - DNA, 601 bp, Homo sapiens
agattgcaggtctacattcaacacaattaaagaaaaaaatcttcaaccaagtgtttcatatccagccaaactaagtttcctaagtgaaggagaaataagatctttttcagataagcaaatgttgagagactttattatcaccagacttgccttacaagggatcttgaaaggagcactaaatatagaaaggaatgattgctatcagctgatacaaaaacacacttaaacacacagcccagcatcactgtaaagcaaccacacaaacaagccaacataataaccagctaacagcacaatgacaggatcaaattcacacgtcaaaactaacctttaaaactaaacaggctaaatactctacttaaaaggcacagagtgacaagctggataaaaacacatgacccaatggtatgctgtcttcaagagatccgtctcacatgtaatgacactcatagcctctaaataaagggatggagaaaaatctaccaaccgattagaaaacagaaaaatgcaaggrttgcaattccaatttcagacaaaacaaagatcaacaaaagacaaggaagggcatgacataatggtaaagggttcagttcaacaagaa

SEQ ID NO: 916635 - DNA, 628 bp, Homo sapiens
aagcagcacaacaatccctcaaagagccaaaagctgaactaccattcgayccagcaatctcattactgggtatatacccagaggaatataaagcattctaccataaagagacatttccagaaatgttcattgcagcactgctcacaatagcaaagacatggaatcaacctcagtgcccatcagtgacacactggataaaataaatctggtacatataccccatgaaatataacgcatccatagaaaagaatgagatcatgccttttgcaggaacatgaatggagctagaggctatcatcaaattagcaaactaacccaggaaaggaaaaccaaataccacatgatctcacatataagtgagagctgaatgataagagctgatgaacacaagaaggaaacaagagacactgaggtctacttgagggggatggtcggagaagggagaggagcagaaaagataactattgggtactgagcttaatacctgggtgatataataatatgtacaacaaaccccatgacacgtgtttatctatgtaacaaacctttacatgtacctcaaaacctaaaataaaacttataaaaaagcataattcagttcccaagagatttttcctggatgtgagat

SEQ ID NO: 916636 - DNA, 674 bp, Homo sapiens
taaactgggggacaactttaagtagcttaatatgtaattagagtcccaaaagcaaatttttaaacttgaatgaatttctttaaaggataattggctatttacactgaaataattccaamacagtgcagggattctaatatatgcaaacataaatctataacaagactagcataaagacaggtgaggaataaatgaacacatatatcattggaaggtttccataatctgagtgaagtcacttgaaggcagactgcgttaaagtagagatgcaactgaaaatcatagagcaaccactaagatgacaaaacacagcattatagttaataagccaacacaatacagagttataaaaatgctcaaataatccataaaaacaacataaaaagaaaaaaggaatatagaagagatgggattgatagaaaacaaatagaagatgatagacccaaaagtaaccacatcaacaatcacatcaaatctaaatagtctaaaagcacagattgtactattgaatattatcgaatcatatcaaaaaaacaactatatgctgcttatcagaatactatgaagactcagaatgtaaaaaaatataaaagtatggaaaaagatgtactatgccaacaccaattaaaggaaagccagactagtaacgttaatatcaaacaaaataaatttca

SEQ ID NO: 916637 - DNA, 599 bp, Homo sapiens
gttacagacagagaccatcagttgatgtcaaaaccaacatctgaaaggttattggagaccaagatatctatattgtgtcaaagtatcactccactaattgcttattaactataaaatataaatgatatctttgcaatggagagatctgatgtctgtgatgttaaatttagtatcgccaaaaatgtgtaaagacagcattatatgttcttgtaattgatcggatgcaatgggaaacacacatcaactatggcatggtatttgccaaaatatttaacctctgataatgtggaaattctgattgggggtcattttaccagtcagctgacatggactcttacaaaaatcaagaccatgaaagttggaaaatataagtgggccaaagagatgtctagtttaaaagtagctaaaaagacctgacaaccaaaagaaatgcataatctttgataatgtcctgtagaaaaaaaattaaaaccaaargacacattggtacaactggagaaaggggaatgtgaagcatatatgagaaaataatgttatatgaatattaagtttttgagtgtaataaaggcatttgtggttttctaagataatggcctctt

SEQ ID NO: 916638 - DNA, 525 bp, Homo sapiens
atactccatgagaagataaaccccaagacacataatcatcggattctccaaagttgaaatgaaaaaaawatgttaagggcagccagagagaatggccaggccacctacaaacggaagcccatcagactaacagcagacctgtccgtggaaaccttataaagtacagtggttggaagctattctttaacattcttaaagaaaagaatctccaacccagaatttcatatctgaccaaactagcttcgtaagtgaagaagaaatacgatccttttcagacagcaaacacttaggaatttgtaccacaggactgccttgcaagagctcctctaggaagcactaaatatggaaagaagaaaaccattaccagccctacaaagcacactgaaatacacagaccagcaacactatgaagcaaccacataaacaagtctgtgaaataaccaggtagcatagtaatgacaggatccaacttacccataacaatactaacttttaagtgtaaacagggtaaatgccacaattaaa

SEQ ID NO: 916639 - DNA, 645 bp, Homo sapiens
gtggcacatttgagatatcctcatatctatccttataatcaaaacaaactcactatctgctcattctatgaccagtgacctcactcactgctgccttatacttcagggcttacacgtagacacacacacacacaggcacacacacacacacacacacacacacacactaagaaaagtagcttaaaattagaccatagagaatctaaaattttaaaatttagaacagatcttcatctgagccaggaaccattcatctatggcttctgtcatttaatagaataaacaaaatctgcatatgaatccatgcagaactccaagttcagcatggtttctcactgttctcagagctggtacctgaagctgcaggtgtgcattctctgccacactctgtaatggatgagtggaaattcttccataaagcttttgtctattgggagcaggtaagtctaggcaaagtatgcacaatttttttttctgggatacccagtggaaaaaaatagaaaagcatcatttttaaagtactgaaagaaaaaaagtcaacctgmaacaacctcattctagccagggaaaattagtcatttcaagaaaataagagacaatcagactagaaaggaagatataaaacaatctctaactacagttgac

SEQ ID NO: 916640 - DNA, 584 bp, Homo sapiens
tttaatcacaggctcctcaccctccgctgatgggtaggtgtgttagctccagcatggagcaccaccgcactaggtgggggaagggtgakagggcaatggggcagcctgtgagctggggcaacgtaggcagagaaggaactgtgtcaccacagaaacttctgccttcacccatcccttcagctctgcaggacaggtagagactccaggatcatccactgagcactggacataaggaaggctgcatggggaggactcaggacagtgacatcacaggatacccctcctattaggaaaatcaaggcccagaattcactcggctcttccccaggaggaccaagccctgaatcaggtgcagtgctgcctgccccactgtgccatgggccctgggctcctctgctgggtgctgctttgtctcctgggagcaggtgagtcctgggcacaggacagcagccccattctcagctttcccacccatgtcctccactttaccttggggaggacctccaggctttctgctgtgctcatcctccatctgcttttcccacaggctcagtggagactggagtcacccaaagtcccacaca

SEQ ID NO: 916641 - DNA, 533 bp, Homo sapiens
aagtgaccaaatggcatctttacgcttccaggttctcctcaccccagcacccagttgatgattccagcttttccatcactcatagtcctggcaggtctgagagctccatttggtttctcctgcatgaggagacagggagggataaaaggatagacctttatcaaacctaccagagactacatggtatctcagttcatcctcataaagcattgaggggaatgctagtcttgttttatagatgagtctagatgaggctagagtccaggaaatcaataaatagccttgcccatggtctcagagctaataaatggtggaggcagatgaagggcagtcggcttgcttccatgtggaattgatagaggggtcactggagtttgagggaggggaagtctagaaccatctggcgttgtcttcagatcggacaccagggttgagacagtctgtgtaccctayagcaccgcaggtacaagcatcatggtgttggcagtggggagatactagagtgggtaagtgattagtggcctggaactgga

SEQ ID NO: 916642 - DNA, 659 bp, Homo sapiens
ctgtcaaggtaaattctgcatacaggctgaatgcattgtggtaaaacactacatggaggaagaggaggaatgggattaaagaaaaggaggcctagaacagtgagaggggctgagagaggccatgtcgaagttagttgaggaagactgtcaggggagagaagagaagtctgaaagcagagaaaggttgggaaagaggagggagccctttgttgagagcctgcttgcttcaggcctcaggctggacgctgctacctgtgctgtctgcatctgcacaatgatcccaggaacaggtattattttccccatgttatagatgtggaaactgaagattacagttcaaattacttatgagttgtgaaaccgtggcatgttctgctgaagatggcaattctggaaactttttccaagtagttaccaggatggtgggattgctcctggtatctgggtgatcctagagcagcttctcccaaactccaggcagggcccatggtaacacactgaagacaccttaatgccttggtgtctttgtttcccackgctgccgtaacaaagtaccactggtgggtttaaaacaataaaaacttattctctcacagttctggaggctaaagatacaacaccaagatgtcagcgggtcatcctgtatgacagctctaggg

SEQ ID NO: 916643 - DNA, 579 bp, Homo sapiens
ccatcagcaccagtatccatagagattttcctactactaggctcattgctgggccacataaggttggggagtggggatggtcgggagctgctgggacaatccaagagaaaaaggctttttctctctcragggagtgatttcataataagagtttgagataagggcaatggatcctaatagatattaaagtctccatttccgtccctgagccatttcctcatttttcttctgtagtggcccagaaaggaggggtggagatagactgatatcagcccctaacagtctgtgtgacacacagccccaaatgtcctatataggagaatctttgtgaggtttctctggttataaatgaatgtgggaatggaatattggtgctttgagacctctgttgaagctgcatagtgaaaacaaaaatgagtttttgcttcttcctcaggtaacactgagcaaagatgtctagccatattttcatttaggggtgttgggagatgctggtggagatcacgggaatggctaaaacccagaggtgaactcagctttgccatggacccatgagtgaatccattttctgcttctcta

SEQ ID NO: 916644 - DNA, 571 bp, Homo sapiens
atattcatcagaaatattgtcctgtaattctcttttcttrtagtatccctgtctggttttggtatcaggtaatgctggcttcataaaatgagtttaaaaggactccctcttctccaattttttggaaacatttgagaacaattagcataagttcttctttaaatgtttgatagaatctggcagtgaagccatcaggtccttggctattatttgatgggaaaaattttattactaatttaatctcctcaatcattgatctgttcagatttttttcttcatgattcagtcttagtaggttgtatgtgtctaggaatttatacatttcttctaggttctccaatttgttggtgtataattcttcatagtagtctcacaattctttgtatttctgtggtatcagttgtaatatcttctctttcatttggattttaataaaaaaagaatcaagtagtacaagttacattatctctctccagtgggattatattagaaattaatagtagaaaaatctggaaaatctccaaatacttggaaactaaatacatgtatataaactacctatgggtcaaag

SEQ ID NO: 916645 - DNA, 625 bp, Homo sapiens
gcattcagaaactttcagctacactacatggaattttggtctctggggaaagggagaagagtaaaaagaaccatmaaaatgtatttcaaataatgtgtataaggatgacaaaatatagattactttcatgaaaaacattagaacattatattgtctttgggagtgatttatcagtggataaattaaaacaaattcctgaggaagtttgggaaaaaaataaatttaggaaaacaaattttaaatgatttcctgaaaaccatcagggtttaccataaagttaacaattgaaaaaaatcaaataatttaatagtgaatgagaatatgaatacagaaaattcatatgaatatggaatgaaatattagtaaaaatgtgtttgagaacacttacaaatgaattttgttgtccaatttgattaagagtctagtcaaagtgttactcttttaaactacttgtaatagtgtcagtttgacaatctggaacaaaaacctttaaaatgcttatttttgggaatttggctctaaatcaaaatagatagttgttactgtacttgttctattgccttaagccactataaaacttgacaaaaattgtaagacaactatgttcagacatcagacaacaggc

SEQ ID NO: 916646 - DNA, 662 bp, Homo sapiens
actttcctaaaatatcttacctaaaaccacctytgtgaagccctctttcttttcccagacagatatggaggtttctttctttatgtgtttataataaattaaacaaacttcaacttctatcactatgttatgatatttatggtcatgtctgactcttcctagactagtatggtttttgagggattggactatatattcgcttacctttgtaaatccagtatgtaggacttggtacaatatattggatacagaattataagcccgatgggagcagacacctttatttgttgttcatgcttatatcccagaatctagtactatgtctggtgcatgtagtaagagtgaggcaagaggatgcaagtcagaaaaaggctatgtgacaatggaagtagagatcggaatgacagacacactttgaagatggaggaagggccctgagcccagtagtgcagatggcacctagaagctggaaaaggcaaagaaatggattctcccataaagcctacaaaaggaacaccacctgccaacaccttgatttttagccccataagactcatttcagacatttatcctgaacaggacagaagcaaaaaaatggaatcgatcaacataaaagcagaagtgaataaggtagaaaatgttttaatgatagaactaagaaa

SEQ ID NO: 916647 - DNA, 616 bp, Homo sapiens
tattttaaaatgtatttcaccaacagcaattaatttgtgttgagtktttgaggatagataattccactgggcaacaaaaatcacttaatcttccatgttgttgcaagagcaaagaaaagcaactgcattttaaaagtttaattagaagtaaaagcaagtttatataatgatatatcacactgctagcaagtaataaagataaacatcctcgcatattatcagcaccaaaaaacagtcaaatttcgctttgcttacagattgcagaaacttctatagtatgaaatggctttttcagataccgcttctgagtttggtggatttttttcccaagaacttgtggttaggataatttgagggattacagtgtagacagtgacattcccttgtatttgagagaagtttgtgcaattcagacatgactgtgtttgcttttagcaaacatactgttcacattttgagaaaaactgctgatgcagtctggtgaaagtgttctagcaatgccaaatcactgacagatgtgctgtctgccaagggatttccctaggaatgttctaattttcttctatctgtttagagaaagttcgtttaaaatctgttaaaatgtattaatgtgcag

SEQ ID NO: 916648 - DNA, 560 bp, Homo sapiens
aatagaaaaagtcaaagctgaaaactaaattaccatgatggagaaactcaaaataatttcactgaatacctgagaaaaaaggcaaggaacttgttcaagcaaacaaagtaagcattaatttggaagacagatagagtaagccaagaaaatcatcatcagtgtccctgaaacactggaccgtaaaaagaaaaattctcagttttcacacaaaacatttatctaaagtgaagaaagaactgaatccatgggtggaaatgatacagtatcctgagaaaaatttaatgatcagcattgtcatcctaattaagctattacacatcaaggataaaactagagctgttcaaacatctaagaagaaagcaagtcaattacaatagggaaaagaaaatcagcctggcctcacactttctacagcaacagccaatctcggaaaaccrtggagcaatgtctaaacttcagagaaaaagaaaaggtgacccaagaatgtcctatcagccaagttgttattcaggtataaaggtaataggtagatattctcaaaagtgaaaaatctcagagaa

SEQ ID NO: 916649 - DNA, 648 bp, Homo sapiens
gccctcttggtatcagctttgagacacctggccaagtacagcctgtgctaagtttcaaagaggaggcagataactttgaagattttatttcacaggggacaacagataaaagtctctgtcaagttgtcattagatgcttaatgctattcttggtggggagcttgaggcgcccctcctcctctgtagacttctagcagattaggtttcagagctttaatttgaggaaggatttacagctgtgaagaggtataatatcattttgatttgggttgtactaggctggggaagccagattacatttgtatgaaactgtattagaccatatgactgaaaccaccaaaatcaaataaagggaaaattttccagagagcctaaaaacaagagcctgtctttccagcacctgagcattgtttcactaactattattctgatttacatctaggggatccatgcagaaatgcggagggagatggcaacaatgcctgtgcttgctggacctatccattcattaatctgtcatcaacctaatccaggggcccatcccctakaacaagatgaaaaaaattaacacttagagaagatgggaagttggcagggggaggggagataactttatgaaaaatagccttctttcatctccggaggcac

SEQ ID NO: 916650 - DNA, 648 bp, Homo sapiens
gccctcttggtatcagctttgagacacctggccaagtacagcctgtgctaagtttcaaagaggaggcagataactttgaagattttatttcacaggggacaacagataaaagtctctgtcaagttgtcattagatgcttaatgctattcttggtggggagcttgaggcgcccctcctcctctgtagacttctagcagattaggtttcagagctttaatttgaggaaggatttacagctgtgaagaggtataatatcattttgatttgggttgtactaggctggggaagccagattacatttgtatgaaactgtattagaccatatgactgaaaccaccaaaatcaaataaagggaaaattttccagagagcctaaaaacaagagcctgtctttccagcacctgagcattgtttcactaactattattctgatttacatctaggggatccatgcagaaatgcggagggagatggcaacaatgcctgtgcttgctggacctatccattcattaatctgtcatcaacctaatccaggggcccatcccctataacaagakgaaaaaaattaacacttagagaagatgggaagttggcagggggaggggagataactttatgaaaaatagccttctttcatctccggaggcac

SEQ ID NO: 916651 - DNA, 648 bp, Homo sapiens
gccctcttggtatcagctttgagacacctggccaagtacagcctgtgctaagtttcaaagaggaggcagataactttgaagattttatttcacaggggacaacagataaaagtctctgtcaagttgtcattagatgcttaatgctattcttggtggggagcttgaggcgcccctcctcctctgtagacttctagcagattaggtttcagagctttaatttgaggaaggatttacagctgtgaagaggtataatatcattttgatttgggttgtactaggctggggaagccagattacatttgtatgaaactgtattagaccatatgactgaaaccaccaaaatcaaataaagggaaaattttccagagagcctaaaaacaagagcctgtctttccagcacctgagcattgtttcactaactattattctgatttacatctaggggatccatgcagaaatgcggagggagatggcaacaatgcctgtgcttgctggacctatccattcattaatctgtcatcaacctaatccaggggcccatcccctataacaagatgaaaaaaattaacacttagagaagakgggaagttggcagggggaggggagataactttatgaaaaatagccttctttcatctccggaggcac

SEQ ID NO: 916652 - DNA, 598 bp, Homo sapiens
aattattttactgaaagaaatggttctattaatctaaatagatacatttattaatatgtgttgaatacataggtatgtacctaggagttttgtagagagcatgtctgtttagaaataagcatacaaatacataacttcatgtaacgagtatgctgaacaagcatgatccattgcataaaacacaacattttactctccttgcccctctaaatttgattaggtggtaataatcttcctttgcccttggataaaaactacagcaggcccacgagtttgctgttcacaggtaatgggcagttcaaaaacaacttcaggttacacatacagtcccaggtgagaaaacaaactccacaaccatgttgcttttgtatggaatctttccccttctcagcttgtccctgcttcagactgaaagcctccagatcaccctgtggcccctccaccttattagccagcattctgcctttctcaaggttgaagaaactaagagacagaagggctcctccttgtgctagttctgttataatctascttggctgtctctgggcctggcagatagttagggctgacactttctcttttgataagcttttatgga

SEQ ID NO: 916653 - DNA, 628 bp, Homo sapiens
ctctaggacactgttacaaatgtgtcttgtatgtaagcagatacttacatacttttacatacagctaggtaatggtccaggttgaagagtcaaagacagccccagccaaggcagtagatgtggagaggaggagagctttgatttttaacgtatcttagaggcagaatcaacagagtttgttaactgacagatcctggggatgaagactgaaggaaagaatgatgaaagatggaagatgatgcaaaagtttttatgttgggtggctgtgatgttgctattaaactatagaacaccagaggggaaaggatgaaaggtaaaataatgagttgagtcactatgttgaaaatgagatgactttgagatatgcagttggaatcatgggtttgaattaaagggaaaattggagctacatatattttggaagtcatcatgaatatggaagacaattaaactgccaacataataaatgtttttcaaaattatttcatttaatgtccatggcaactctgagctgtacattatttttactgatgaaraccctgagagattctgggagattaagtaactttccagaagccacatagctagtaagctgcagagccaggattcaactaactctcactaaatg

SEQ ID NO: 916654 - DNA, 606 bp, Homo sapiens
ctgggcaaagtccatgtcatccccagcactgccataatcggwgtttttctgtctcctctcctctcctttcccctcctctcccttcccctcctttctctctctctctctctctctctctctctctctctctctctcatactttctctgatgtttatgggcattaactcttcctttttgtcaaaatccttaaaaagagcaaattatttgtgcttccatgcaatgttttgcccattaaaccgtgaaccagggtagatgctctggcatatttgaatccctaatgcctgatatactcagcacctggtgcatcttttgtgtttagtaaatgctgactagctaaaagaatgaatatgtgaatgaataaacaaatgagcaaacaaaggaacacatcaaccaacatgccagggttatgtttcagtgttcgtctttgtgacagtgacagtttctgcagtctctttagcctttgcttgctttgcactgacccaacatggtgaaatattatttgcaaagactatagctaaaagaacattttttaagaatgcagtgggtgatagtgattaaaaggactggctgtttagtgtgacagatgatggtttgcacctcacctct

SEQ ID NO: 916655 - DNA, 604 bp, Homo sapiens
cttccctttataaaaccatcacatctcgtgagacttattcactatcatgagaatagcacaggaaagacctgcctcccaccaggtccctcccatgacacatgggaattatggaagctacaattcaagatgagatttgggtgagaacacagccaaaccgtatcacctgggttgtctttcactttcttgatggtgacctttgaagtgcaaaagctttttaaagtttaaataataactaaataaaatttattttttcttgggttgcttgttcttttggtgtcacagctaagaaaccattgcctaatccaaggtcacaaagaattgcaccaatgtgttttctaagagttttataattctagctcctacatttagatttttgatctatttttagttaatttctctatgtggtctaaggtaaaggcacagctttgttcttctaaatgtggatatccagttgtcccagcaccacttgttgaaaatactattcttttstcattgaattatattagcactctttggaaaatcaattgaccataaatgtaaatatttatttttaaactctcaagcctattctgtcaatccagatatttatctttatgccagtacc

SEQ ID NO: 916656 - DNA, 589 bp, Homo sapiens
tctggagaggacagcattttttcaycatatattctggttacatatttttcctagcacttgccttatttattattcatggagtagaatctgttatccattgccatggtatctcattcattatctatccagaagaaaatttttagtaaataaatttaaaacatataactcatcacaatagaatttactggtataaccacaattgtcatcatctagaagctgaacaaatgagacattggaatggcctcctaaaagatgagttacggtgccagctggacaatcctaacctgagaatgtgaaatgctcatttccacatgtttgacacacaatatgtgctcagtaagttttagtcatcacatacctatgccacatatattctgagaaattaacccaatgctaataaacattcccccatgcagccatctattttgccttttttgttccgatatccacaagatgcctttacatacgttcctccaattcttgtcagtgcatatttgatattcacaatttgttagtcaaatgaaatatttccttgtagaacaaggcaatatttatcacttgcactccagtgacacctaaatattgatct

SEQ ID NO: 916657 - DNA, 624 bp, Homo sapiens
tgtggagtgttagaactgtgtaagtctctagggaagttctttgctaaaaggggagagaacaagtttccattctttatcttgagaaggaagcagtggatgcatcagtctccccaraaccccgctatttcagacaaagatgtcaggggagtctgccaagaagtggaactcagaatttcgtttctaaatattctcaaggccataaagctaaggaaccttacacatttggagcaaaaaaaaaaaaaagaaggatcagattggattctggcttagattcttccatcatgctttaaaatttagaaactgtaaagaattaatttgcaaaaggaaggattaatttttgaattatcaaatgtgtagattcaaaggattctcttgaaatgtcttttatatacaaatagtgatttttatttattttatggctgtagatgttgtaactgcaggtttttccttgcaggagtgagtccgtgctgctgcacatgccccagcctctgaatccagagctcagtgcagggcccatcactggactgagggacaggctcaaccaattccgaggtaagtctccacccacaggcagcactcccactatctaaatattattattgttaggatcacataggtaatatt

SEQ ID NO: 916658 - DNA, 597 bp, Homo sapiens
atggactctggggactcaggaggaaagggtgggaagggggtcaggtttagataaaagactacaaattgagtatatactgctcaggtaatgggtgcactaaaatctcacaaatcatcactaaagaacttacacatgtaaccaaacaccacctgttccccagtaacctatagaaataaaaaattaatttttaaaaaaagcaaaacagatataaactaactttagcacttaagaccttccatgctcaggtctaaaaataacttaccggtcccacttccctctcatcctacccccttacaaacaaagtgaattatattttttcccaaatgtgccttgtacctgtcctgcttttttatattttttattctcctctatttctacttaatacaagtctacccattctgcaagacttagtataagggttacttcgctgataatttcctccattacctttctccctttgtgagataggttttttttacagaaagtttttagttttcaatgaacttgtaaacaaaaaaagttcccatttcaaaataaaaacaaaatcccagatcatgcaratgtttacagtgattatgtttatctaagcaacatgga

SEQ ID NO: 916659 - DNA, 613 bp, Homo sapiens
gaatgcttagccacttagaaatttgttcccctagataccctaaatcatctctcctaagttcaaaattccacacacctgtagggcaagggcaaaatgccaccagtctctttgcatagcaagagtgacctggccaggtgcagtggctcatgcctgtaatcccagcactttgggaggccaaggcgggcagatcatgaggtcagattgagaccatcttggctaacaaggtgaaaccctgtctctactaaaaatacaaaaaattagctaggcacggtggcaggtgcctgtagtcccagctacttgggaggctgaggcaggagaatggcgtgaacccaggaggtggagcttgcagtgagccaagattgcgccactgcagtccagcctgggtgacagagctagactccttctcagaaaaataaataaaagagtggcctccagttcccaacaggatcctcatctctatctgagacaacctcagcatcgacctttttgtccaaatcactgmcagcattttggtcaaagccattcaacaagtctctaggaagttccaaatttcccacaccttcctgtcttctaagccctctgagtctctaggaagtttcaaacttttccacat

SEQ ID NO: 916660 - DNA, 664 bp, Homo sapiens
tcacttgcaacaacatggatggaactggagatcattttgtttaacaaaatgaatcagatacagaaagacaaacatcgcatgttctcacctatttgtgggatctgaraatcaaaacaattaaactcatggacatagagagcagaagaattgttaccagaggctgggaagggtagtgggggctggggagtatattgggatacttattgggtacaaaaacagtaagaaataatacacctactatttgatagcactatagggtaactatagtctataataacttaattgtacattttaaactaacttaaagagtataatttgcattgtttgtaactcaaaggataaatgcttgaggggatggataccacattctccatgatgtgcttatctcatatggcattcctgtaccaaaacatctcatgtatcccataaatatatatgtctactatgcacccacgaaaataaaaaaaggaaaatgccagagactccatccaaaaactgttccaactaataaataaatcctgtaaagtggaagaatataaaaatcaacatacaaaaatcagtagtgtttcatgcacatgtatgtttactgcagcactgttcccaatagcaaagacttggaatcaacccaaatgcccatcaacgatagactggataaagaaaatgt

SEQ ID NO: 916661 - DNA, 592 bp, Homo sapiens
ttcttttgcacatcagtccctatcgggggacctgccctgataatcacgtaggttcttttctatttccctaagcattgactggcttgagaaataaaaggacagagtacaaaagagataaattttaaagctgggcatctgggggagacatcacacatcggtaggatctgtgatgccccacaagccacaaaaaccagcaagtttttattagggattttcagaaggggagggagtgtgcgaataggtgtgggtgacagacatcaagtacttaacagggtaatagaatatcacaaggcaagtggaggcagggtgagatcacaggaccacaggaccaaggtgaaattaaaattgctaacgaagtttagggcaccactgtcattgataatatcttatcaggagacagggttttgagatcaaccagtctgaccaaaatttattaggtgggaatttcctttttctaataagcctgggagygctatgggagactggagtttatttcacccctgcagtctcaaccataagagacaggtacgccccaggggggccagttcagagacctacccctaggtgcgcattctctttctcagggatatcc

SEQ ID NO: 916662 - DNA, 631 bp, Homo sapiens
tgatcttattctagtcatcatatagcaaatgagaaacaacttatgtgtctttcagaaagaaakagtttaattaattatggtgtatgcctactttagaattatagaatgtaatttgaaaagtgagatagatctatatatgtattgtttagaaagatcccgcatccattttataaactgacaaaggttagttgcagttcaatatgtacatcactcttcttgcatgttaaataaaaacgacatattgctgtactttatctgtccatgaaaagcctgtagtcagctgtaaaataatacacaagactgatcattgtggtgacctctgaggagcgggttaaactgtggaggaactttgtaaaggggaaatttgtgtattatctatatttctatattttttgccctaagaatatacacagtacaaccttttaagtaaaaatatttatacctaacaacagaaagagtagctctgtcagtttaagtaactactagttaatgcaacagacaagtcctgaaatgtgaatagcctgacacaactcaagtgtattatatgcgcacctaagttctgatgcggtttggcaggggctcctcactctcacatgacccagggatccgggctgcttccaccttatgattc

SEQ ID NO: 916663 - DNA, 631 bp, Homo sapiens
tgatcttattctagtcatcatatagcaaatgagaaacaacttatgtgtctttcagaaagaaagagtttaattaattatggtgtatgcctactttagaattatagaatgtaatttgaaaagtgagatagatctatatatgtattgtttagaaagatcccgcatccattttataaactgacaaaggttagttgcagttcaatatgtacatcactcttcttgcatgttaaataaaaacgacatattgctgtactttatctgtccatgaaaagcctgtagtcagctgtaaaataatacacaagactgatcattgtggtgacctctgaggagcgggttaaactgtggaggaactttgtaaaggggaaatttgtgtattatctatatttctatattttttgccctaagaatatacacagtacaaccttttaagtaaaaatatttatacctaacaacagaaagagtagctctgtcagtttaagtaactactagttaatgcaacagacaagtcctgaaatgtgaatagcctgacacaactcaagtgtattatatgcgcacctaagttctgatgcggtttggcaggggctcctcactstcacatgacccagggatccgggctgcttccaccttatgattc

SEQ ID NO: 916664 - DNA, 580 bp, Homo sapiens
ttgtactggccccataaactgagttaagaattgtttcctgctcctctattttctgaaactgtygtgtaaaattggcaatttttgttccttaaatatttgctggagttcacccatgaaatcatctgggcatggatttttgttttatttttagaaaagttttttgttaataaatatatttatgaagtatagggctatgtgttttttctattcaatccattggaagttttggtaaattgctttgtttccaatgcatgtgtcaattttatctaagttgtcaaaattattgtcataaagttaatattccctcactattcttttaatgcctatataacctctaatgatatccctctttcacggctgatattaatgattattttcttttttcttgattagccttcctaagggctacacatttggttgctcttttaaaatatgtgtgatttacttacttttagtttgttttctattttattgatttctgctcttgtatctctattatctccttccttctacttattcgagatttactttgctattccttttctagcttctttaggtggaatgttttgtatatttactg

SEQ ID NO: 916665 - DNA, 641 bp, Homo sapiens
ggtgctaagacaactgtatttccacttgtaaaacagttaattcagacccccacctcacatcctatataaactcaaaatgaactaaacacctaaatcgaagggctcaaactacagccctcttagaagaaaacatagatgttgatcttcatgaacttggattaggcaatggtttcttagatatgacaccacaagcaaccaaaggaaagaatagataaattggacttcatacaaaacaaaaacaaaaacaaaaacaaaaacgttcgtgcatctaaggacactatcaagaaaggggaggaaagggttgcaggtcttctgccctctgggcaagctcagtgcatatgctgatgacagcagccagtggggaatgatgactgatatcctttctactgctttgggcttggaggaatggctcttccttgctcagcctgggatgagctacacttttaccacaggtctcagtgggtgcaacatgagtatcaaaggagccacagtccccccacttcccacagagggagagagccatggagtatttcctcctcrggactgggtgtagtgaagttccagttcttaggagcttatatgtattattttccatgtgcaaaccgtggagccataccactataccaagttcttaccaccta

SEQ ID NO: 916666 - DNA, 606 bp, Homo sapiens
tggtttgtgggcacattttcttggaagctaactttgcccgttacctctaaattttgttcagtgcatcgttgttataaagacatacttagatttttgtgattgtacatttcaataattcagttgttgagtgagacaatcttaggagacataatgttcttgatgtcagccatttttcaaaggaggtgtttattatggaactaaaggaaactatgtgcttcaatctatcaactagactataaaagagctaactgcaattttcaagaatatgtatttagtaaaaggtatttgacttaccatttctgggagagaagtaaatttttacatttgttttattgtgacttgtttctgatattctgacttaaaatttcatggtcacaaaaaagtataaattaaatgttctctttatgaaaaataaagtactggctacgcacaggtgacatgagaaaaatagtcactaaaaagtggtaaccaagagggaatcctgaagtaatctacggacttggggtgataatgatgtgtcartgtaagttcatgatgggtaacaaaggtaccactctggtgggggatattgacagtggggaatgccattgtgggagaacaggggca

SEQ ID NO: 916667 - DNA, 588 bp, Homo sapiens
gcagggaggacccgccaacagaggaccaggcggagacattcactggagaattttctctgaaccccaagggggcactgccacaatgtggctcccgctttggccccagaagctgagtgtgagagggaccaactggaatagaggaggctttggaaacctccttgagactggatggccgaatctttctggagacttggcaccaggtgatagcagaagaagacacgagaaggcacagagggggaaggggaaggggcagtgccccacttcaggggagacacgtcaagagtctcaagcatacttggacttcatcttctttccctagacccttctgatttgcttcagaaggagaaggaatggcaaagatttgtgtaccaagctgatgccagacgctggcagcatcctcacctgttgctccagaaggggctgtgtgcatccttgaagaggcttagctctaccacactcayctacaacaccctcttcaccaccccacctcccaagcacatcactctgctttgtcctcttcacaacactgctcactcattgatgattatcttgggcattttttatgagcttgtttacagtgggtctctc

SEQ ID NO: 916668 - DNA, 601 bp, Homo sapiens
tcttacaaattctgatggctttaccctgcaatctgctaatttctcaaggcatgatatacacttcatgcaargttcatcattaacaatagtgatgaaatgttacgtttcatattatcttgaaaatttcaacgttttacaaatttttgtcacatctgattaccttgtcatgtataaaaggtttgttcctaggttggttgaagggtctgccgtgtcattttcttgtcattcatttatgctagcattgttggtgttatcttcaatctgctgtttctttgcaagaaacttttaaaggtacttatctactttgtgagggtgaattgagttaaaagtgggcaagttttttattttagccattctaatgagtgtgacttggtatctcattgtgattttgattgacatttccctataaaagaatattgagcatctttttacagttttctgcccacttgtatattgtctttggagaaatatctactcagatccctcaatcattttttagcaaggtaatttatcttttttgaattctaagagtttattttatattctaatacacgtccttatcagatatataatttgcaaatattttctctcattctgtatg

SEQ ID NO: 916669 - DNA, 657 bp, Homo sapiens; identical to SEQ ID NO: 909581

SEQ ID NO: 916670 - DNA, 620 bp, Homo sapiens
ggctcttactgaagataactgttaaggttggtctctcctgtgttctactacttcttctatttccctcagagtcagtttttatgtgtgagacctttagcttggggaatattgtaatagcactcctgtgataggcaagaccaatatccatagtttgtttcctaggagactctctgggtttctagctttttccaattttgtaacagcaggtgcgacaaagtctgtggggcttaacaggtctcgttgaaatcttcagatctgtggttttctttctgttccaaagcaaatttggaaaaaaagagaagaaaaagctaacatggttgttacttggcaagagatgtgttcttattggtgcattcacattttaagaaattcacactttgaattactaaggtgctaacatagatcttcacagactagaagaaacagaatttcagggttggagggacattagaggtcatctgatccaactatcatctgtaatgttttaagtcaagctccctgaacagtsgtttttcttttttaattttacaattttatttatttatttattttttgagacagggtcttgctctgtcgctcaggctggagtgcagcgacgtgatcacggctcactgcagcct

SEQ ID NO: 916671 - DNA, 620 bp, Homo sapiens
ggctcttactgaagataactgttaaggttggtctctcctgtgttctactacttcttctatttccctcagagtcagtttttatgtgtgagacctttagcttggggaatattgtaatagcactcctgtgataggcaagaccaatatccatagtttgtttcctaggagactctctgggtttctagctttttccaattttgtaacagcaggtgcgacaaagtctgtggggcttaacaggtctcgttgaaatcttcagatctgtggttttctttctgttccaaagcaaatttggaaaaaaagagaagaaaaagctaacatggttgttacttggcaagagatgtgttcttattggtgcattcacattttaagaaattcacactttgaattactaaggtgctaacatagatcttcacagactagaagaaacagaatttcagggttggagggacattagaggtcatctgatccaactatcatctgtaatgttttaagtcaagctccctgaacagtcrtttttcttttttaattttacaattttatttatttatttattttttgagacagggtcttgctctgtcgctcaggctggagtgcagcgacgtgatcacggctcactgcagcct

SEQ ID NO: 916672 - DNA, 516 bp, Homo sapiens
ttcactatctgagaatcttctatatactcctactggtaaaataacaacaacaataacaataataataataataaccctaaaaacatacatgcaagacctagatagagaaggcttctttgcccagggatcaatggtcattgtgccaggattttaaaagtgtatgctcagcaaatccaacaatcagaggacaaaaggaccccgagacactagctcctgagttcatagaccagggcagttgggcatttatcgtgatctgaacaagaacaggagagagttcctcacaagactaaagagaagagaaagacatttagcattaggtgggtggtgggagagaagagagaaattcttgggaagactacagccatgttctggtgtcagatctgacctccctagatggagaagagaggcyaagtgaggcagtgggtcctcagcccacctggtagaggaagagggcacctgccacttcctgcactggttcaaactacactcctaacagaatcctatcatttaatctgg

SEQ ID NO: 916673 - DNA, 516 bp, Homo sapiens
ttcactatctgagaatcttctatatactcctactggtaaaataacaacaacaataacaataataataataataaccctaaaaacatacatgcaagacctagatagagaaggcttctttgcccagggatcaatggtcattgtgccaggattttaaaagtgtatgctcagcaaatccaacaatcagaggacaaaaggaccccgagacactagctcctgagttcatagaccagggcagttgggcatttatcgtgatctgaacaagaacaggagagagttcctcacaagactaaagagaagagaaagacatttagcattaggtgggtggtgggagagaagagagaaattcttgggaagactacagccatgttctggtgtcagatctgacctccctagatggagaagagaggccaagtgaggcagtgggtcctcarcccacctggtagaggaagagggcacctgccacttcctgcactggttcaaactacactcctaacagaatcctatcatttaatctgg

SEQ ID NO: 916674 - DNA, 537 bp, Homo sapiens
ctactttctattcctggagacaacatggttggataccactatcagagccatattaggctgactgaaccaccattgtgacttgcattatattatcttctctcaattctttatytccgtggagttttaccttaaaagatgttcattcatatacttttattcactaggtataactatgaggaagctgataaaaagggatgtttctcattagtcttttgtttatctaagatttgttgtaggttctgatacattagcagaataatataatcaatactttgatttgtttatcagatctatctaggttcatatgctacctctttgtgttcttgaacttcttcgagtctttgaggattaaatgaaagaattgatatcaaattaaaagcacagtggttggcatgtggtaggcaccaataagccactaataacagctcttgaaatacgtcatatcctttcattgctcctttacaacattgagtttataacagggaaaaaaaataaatattattgcacagactccaagagactatggactgggactcg

SEQ ID NO: 916675 - DNA, 516 bp, Homo sapiens; identical to SEQ ID NO: 916672

SEQ ID NO: 916676 - DNA, 516 bp, Homo sapiens; identical to SEQ ID NO: 916673

SEQ ID NO: 916677 - DNA, 559 bp, Homo sapiens
acatctcagtgtgcttccgggctggaggctctgctaaacaacagaagcagagaccggactaattgtcccccatgtctctttgactgaactcacacaaaatagaatctaccatttttactcagtgcggggtacccagactcaagtttactgcaatgttgttaccaatattctaatggaaaattatatattcagagctatgttaaatttgaccatttattaaacatgaaatttctactttttctgtaagtgccttgtcttacttgtatttcccggtatttcccttctaaagctaactccccaaagggctttcctgtatgttctcacttccattacaaagtcaatgtacaagttaatttttttaatttctttagaaacctttataaagagatttcctccttcatttctctgttatcccaggcagctgtcaggagcaaagagctcaagcctgcactgccttggaacaggacatcagyaaaagacactctcaatctactcagaaggctgaggtgggaggattgcttgagccaggggttcaagaccagcctggacaactaagtga

SEQ ID NO: 916678 - DNA, 460 bp, Homo sapiens
tgtatttctgtgggatgagctgtaatgtcatctttgtcatttctgattgcacttatttggatcttcacccttttacaaatttcttaatctacctagaagtttatcaatctttgtttattctttcagaaaatcaactctcagtttcattgttcttttgtatagattgtatgtctcaatttccttatgttcttctcagattttagttatttctattcttctgctagctttactgttggtttgttcttatttttccagttcctctaggtgcaatgttagattgtaaatttgggatatttctagcttcttgatgaagacgtttagcactagaaactttcctcttaacacygctttagccgcatcccaaagattttggtaagttgtatctcttattttcactaatttcaaagattttttaaatttctgtcttaatttcatttttcacccaagagttattcaggaa

SEQ ID NO: 916679 - DNA, 557 bp, Homo sapiens
aagctctttgctaaagcaaaacaaaagtgacctttgctccagttctcaataagttcttcacttccatctgacatctcttctgcctggactttgcagtccatgtaactatcagcattttggttacaaccattagacaagtatctaggaagttccaaactttcccccatcttcctgtcttcttctgacccctccaaactgttccaacctccaactgttacacagttccaaagtcgcttccacatttttggttatcctttcagcaacacctcactcctggtaccaatttactgtattagtctgttttcatgctgctgataaagacatacccaagactgggaaatttacaaaagaaagaggtttaattggacttacagttccatgtggctggaaaagcctcacaatcatggcagaaggcaaggaagggcaagttatgtcttacatggacggcagcacgcaaagagaacttgtgcaggaaaactcccccttataayagccatcagatctcttgagacttactatcatgagaacagcatgggaaagacttgcccccataattc

SEQ ID NO: 916680 - DNA, 659 bp, Homo sapiens
aattccaagtcatttttcattcatctaactctgttaattatccttatttttgatttctttaaaatggagggaaaagaccatgataactttaaaacaatctgaagacagaatacttctaacacccagaaagtttttgtgtgtgcctttccagtcaacccaccttctggaggcaacagatgttcatatttctagtattacagagactttaaccgttttaaaacttcgaatcaatgggattattcagtaggaactctcttctgcctggtttctttcactcgtcatgttctggaggttaatccgtgttcattaccgtaattgttgagaagtttcctattatatgaataaagcacaatttatttattcatttggctgtgcacaccattggctgattacagaatcttttagggattaaagctttggtagcattcttttttttttaattagattcaggggttacatgagcaagtttgttacatgggttcactgcgtgatgttgaggtttgggcttctaatgatcttgtagtgaaygtagtaacctatagatagttttgcaacactttaccctccccccatctcctcccttttggaatccccagtgcttattgttctcatctttgtgtccttgtgtactcaatgtttaactcccacttataagtgag

SEQ ID NO: 916681 - DNA, 602 bp, Homo sapiens
ttcaaaattggagtcagtcctctcaaaccctgctgctgctttatcaactaagttgaaataatattgtaaacattttgctgtcatttcagcaatattcacagtgtctttactggaattagattctgtctcaagaaaccactttctttgctcatccatgaagggcaactcctgatgttttcaagttttatcatgacattgcagcaattcattcatatcttgtctctacttctgctttttctcttgctatatccacaacatctgcagttattttctgcaacgtcatccttgagggtaggtgttaatttcttcaaaactcctgtgattgttgattttttttacctcctcccatgaatcacagatgttcttaatggtatctagagtgttgagttcttggcagagtattttcagtttactttgccggatccattggaggaatcactatggcagctatagccttagaaaatatatttcttaagycataagacttgaaagttgacatttctctgtgattgatggactgcagaatggatgttgtgctagcagatatgaaagcaacattactcttcctgtgtatctccatcagagcttttaggtgaccaggt

SEQ ID NO: 916682 - DNA, 684 bp, Homo sapiens
taaaatattaaacggttacatttacagccaaaatttgttttgtttttattttgttgtgttttcattaagaagacattgtgttggtatgaaatatgggttctggtcaatcaaagggaaattctagattatttgtaatatcatgtaataacttgtagcagaaattggcagaccatagcctgattgccaaccccaacccatttttataaataaagtgttttggaatacagccaagttattcatttacatattatctgtgtctgctttcaagctatagtagtagggttgagtagctgtgtcagacaccatatggcctacaaagcttaaaatatttactatctagtcatttatgggtaatatttgcatacctctgccctataagcaaattaatgcatatcttggaaatataaagttatcaaacttgttattttttagccatatattagtgggtagcatttttgtaattaaacatagaataaaacctctactggaaatatttccctcaaaaggtaaccatctttttattcagtcatttatcttatttaaaaaaattatttttattcatttatttatttattttgaggcagtgtctcactctgttgcccaggctggagtgcggtagygagctcggcacactgcaacctccacctcccgggttcaagtgattcttgtgcctcagcctccaag

SEQ ID NO: 916683 - DNA, 656 bp, Homo sapiens
ccgagggcgcgggcttgagaaacacaggtcccttcccaggccacctcccagccaggccagaactggggccgagaggctccccatagcttctcaaattggagcctggacacagtcagagccaccccagaactggggggaggctcaacatcaaaattatgttaacaactgatgtcaaaagtaatcaactcagcttggctcccccactgctgctggctgcaggagggctgtgagtaggaggagagcaagcggccccagagggaccctcggctatgaccccctcagcctgaacactacttcaagaaaagatgtggtggcatctgtctggtatggtcctgtgggctccattccaatgctaatggactcttaaggggcccaggaatcaaaatggtcaacacttgaggaatttccagtaatcagagaaaacgtatagaaatgaggatgatgcttacttaggaaatggcctattacaggaaacagagggccacgtggctaatgtcagtgagctgtgggagagacagagaccccaggtggggcaggcagatcagcaaatcttggaggacctgctatrtggcaggcactggagacatggaggtaaagaacacaatatccatgttctcagggacacactcatatgcccttagcattcacgttcttca

SEQ ID NO: 916684 - DNA, 607 bp, Homo sapiens
ccattatttccctcacccagcatatcctgatacctgagccaagagttcacccagagcttttgcccacttcattgatggtctggtgggcttttgttgacacatacccgtgactcccaaatgaacctttcargttggcttaaagccgctgggacctacacatgacaaaacccagacggaaacagtggcttacactcctgtgtccctaaaggtacctgttcctaacagtgggagtgccagagcctggaagctggaagccaaggagacagggacctccctcctgctgaccccctgccaggccacatccacctaagggatttgggatcatactccatcttcaaccactgggatcaaatggaaagccctcaggaattctgagagacagcccctatacctatgtgcactgacacacatacactgacaaatacgcattctgacacatatatgaacatgcacatatgtgtgccccactccctgccaggaggtgggttctgtcccatctttgacatgttacttcttgtccttccctaggcccagtggcactttctttgtgataggtgctgagacccccccgactgggcccagtggctgttcccaggacccagtctct

SEQ ID NO: 916685 - DNA, 600 bp, Homo sapiens
tggagggaagtggaaaggtattttgtatttacaggtaaaataactatccacctctcagccccacagtgcagtttggcctggggaggtaggactttggggaatcaaatcttatctaggttcagttcctcactctgctactcagatcttactctatatgctcagtggcaaacaacctcacactgctggttctcagtttcctcatttgttagaaaaacaaaagagagaaaatatggtcgggcttgagattatacagatgtagatgagatgagctatgcaaagcacttagcctaaccagacaaagccactttccgattccaccctttcaaatctccctgagttcctccttcaggacgtgtgtttatttatttctctcaccacacaccatcaatcagttttgtactaaacatgttaaatattaagtcattctgctaaatcagtggtgactcgggtatttttattatttcccatttaacagacgaaaatgtggcacaggaaggttatatgacttgyccaagttcatacaactagtagatgccaggattcgttggaatttgaacacagtctgactccagagttccatgccttaactagtgaatcatt

SEQ ID NO: 916686 - DNA, 592 bp, Homo sapiens
tttaaagaatttattgctgcacatattattgctccaggttccatgctaggttctagggatacakaggtgaaaaactcctaatcctcatccacaaaaatagctcacaggtaattcataacagttggttcataagatacatgaaaaaagagaagatctgtccaaatgcactaaattaggaaaaaaaaaaaaaaaagcagaaaggagaagagaagaggctatgtcacggccatgtcagtcccagaacaaaaacattgtttctgtgttatttattcttaacaacttttttttgttttgttttgtttttgagacagggtctctctctgtcgcccaggctggagtgcagtggcacaatctcggctcactgcaacctccacctccagggttcaagcgattctcctgcctcagcctcccgagtagctgggattacaggcgtccgacaccactcccggctaatttttgtatttttggtagagatgggttttcaccatgttggccaggctggtctcgaactcctgacctcaggtgaactgcccgcttcagccagcctccatagtgctgggattaaaagcatgggccgccgcgcctggcctta

SEQ ID NO: 916687 - DNA, 694 bp, Homo sapiens
ggggatgaaattatcaggatatggaaactgtattcttctacgagtcatctctttgctgggcccttcagaccatctggtgtgggtrgttttattaagtggaacctaaaggagaaactcgagcagaaagcttatttttttacaatgtcttcgatttcatctatagaacagaatagaaacaaaggatcttgtgacaaggtctgttaccttcggatagtaaacagtgaccaactacaaggaaatggaccaaagggcaagctgtcttaaggattactgctgactgtgctgcaagcctgggtgaattttgctttttccgcttcatcgattttattattttattttatgtatttatttgttttttgagatagagtctagctctgtcacccaggctggagtgtagtggcacgatctcagctcactgcaacctctgcctcctgggttcaaatgattctcctgcctcagcctcctgagtagctgggattacaggtgtgcactaccatgcccggctaatttttgtatctttagtaaagacggagtttcaccatattggccaggctggtctcaaattctgacctcaggtgatccacctgcctcagcctcccaaattgctgggattacaagcatgagccaccacatccaacccacttcatcaattttataaagttttttcagggatggtttcaagaccatgacgggt

SEQ ID NO: 916688 - DNA, 654 bp, Homo sapiens
tggccccggctgaatcctaatatgcatgtggaaattgataattatgttcattcaaccctttacaaagtgccttcatgtgttaagatgcaaaaacatgaagctaagtgcccaattctttattaattcggtgtggagttttgcagttaacggtgccaggtttgcatctgcaattacccctcagctttttagtggatctaaaagggcaagtgaaccaccctaaccgcagcctccctcccccagtacaatgcatcattctcctgtttgaagaaatgaagggaagttgatatggagctagccactctgttgatgactgtgagtttttctctaagatttagctggagaaacctaagccccgtaagtagaaagtttagagatatttcttgtggcctggaattggaatcagactcacttaatgaggagataaaacgtggctaccttgggctaaggactctcaggacctggcaggtgtcttgagaaagacaaacaaatgctgttctccattgtcctaggagagacatacactaaacaaaatcaytttagatgtaaggactgctaagaagaaaatcaaatggaattgaaatctggctagtgactcctctttgccaatttcttgtgaatctgaatgacttcgtcactatgtccgggacacatgac

SEQ ID NO: 916689 - DNA, 657 bp, Homo sapiens
agagaaaccaaccaaaggttaactttatttcaaacaggttgtaatatattstctgcttttcactatttgggagagggaaatgttcttattttttctttaattataaaggcccttttaagttttcctgtggaagcagccctaaaatcaaaggctgtattgctgcaagatgtatattgaagttcaggttcaactaattggtgttaagcacttataatacacccaatactttcatgtaactatgttcactgaatcttaaaaaccctgaaaaataggctctattgtctccattctttacataaagaaactgagaaagatgcattaacagacttgctcataaacggtgaagtcagaatttgaactctgctctctttgttctttgccatggcttttccctctacaaagatgctactgggaatccattggtgataatgacgatgacgatgatgatgatggtaacgaggatgacggtgccagtagccacaaaactagaaaacactgattaccatgttgtgtaacagaaattgtcctaagcacctcaaggaataattatttacttttcagagccttttttttttttttttaaccttttggagactttcctgatggtgaaactgaggctaacaagtgtcaagtaacctgttgagattacgtagctta

SEQ ID NO: 916690 - DNA, 633 bp, Homo sapiens
aacaatattcatcaaaaatcattgcccattggcccactggagaacagtcatctgtaactatatctgtacctaactctgtcatctgtacctatatctaggtccctctcagagacacaaagccttgtttggtaagaagaatagaggagattaatagggatttctaaagaattagctaaaccccagataaaacaagaagcaaataagtaaatccttgaacattcaagtcattctgccttaagtaactatcaatctccctggtaaatgagggagtggggaagatttgtcaagttcttttttcattccttcacccaggcatttactcgacaactatatcctgagtatctgccacatgccaggcacagttcaaggggcttggggacatcagagaacaacaaaaagacaacgactcctagagttgtgtgatttccatcccaacagaggtgtgtgggaggtgaggacaacaacaataaggatgatacagaggtaatgatatagcatattagcaggtgaaagtgcagtagaaattgaagaraagcaggggaggagagacaaggagtgtgatgaggaggacggggttgaaatttcaaagacgacggttgcatggaaaagataacttgagcaaaagacctgatg

SEQ ID NO: 916691 - DNA, 621 bp, Homo sapiens
tcaatgctcttaacctttggcaaattttcccctacaactgttattaggataagtcaccaaaatatcacttgtccctgaaaaatttaacaaacctttgaaatggaagtcaccatccatcagtgctgtagggtcataacaacacttaagaaatagctcctcctgaagttaacttcattatttaactgttaaatttattatttttgcatgaagcccacatataccctgaaatatactctgtggtccagaaacggaactctaaaacaacagcaacgaacttgacaggcgcttcccgggaagttcgaattccccacactctgtccccaccagccatggaatcctaagactgttcaaactgctttcctgtaatcccacataagaggagatcattgttagcaagagggctgcattggtatctgtgtgagatttccccttttgtttggttttgacttggagaagattttccattgtgatgctcagatgcaaaggcagaaagaaggttttacatyaggtagaggatggtataagctggaagcctgttgggagacctttggcatatttctgagttaacatggaagaagaagaactttgaacagttttcatcctaatgacatgttcagagtt

SEQ ID NO: 916692 - DNA, 546 bp, Homo sapiens
ttcatctcatcatttcatcttttcatctcatcatttcatttaatcattttatttcatktaatcttttcatgtcatcatttcatcatttcatttcatcgattcatcatttcatcatttgcatttcattatttcatcatttcatcatttcacttcatctcatcatttcatttcatcattgtatatcatttgcgtttcatcatttcatcttttcatcatttcatttcatttcatcatttcacttcatcatttcttcatttcatttcctcatttcattgcaccatttcatcacttcatcatttcatcatttcatttcatcattccatttcatcatttcatcatttcatttcatctcatcatttcatttcatcatttcatttcctcatttcaccattacatttcatctcatcatttcattttatcatttcatttcatcatttcatttattcatttcatcatttcgtttcatcatttcatcatttcctttcatttcatcatttcatttcatcatttcatctcatcatttcatctcatcatttcatttcatca

SEQ ID NO: 916693 - DNA, 546 bp, Homo sapiens
ttcatctcatcatttcatcttttcatctcatcatttcatttaatcattttatttcatgtwatcttttcatgtcatcatttcatcatttcatttcatcgattcatcatttcatcatttgcatttcattatttcatcatttcatcatttcacttcatctcatcatttcatttcatcattgtatatcatttgcgtttcatcatttcatcttttcatcatttcatttcatttcatcatttcacttcatcatttcttcatttcatttcctcatttcattgcaccatttcatcacttcatcatttcatcatttcatttcatcattccatttcatcatttcatcatttcatttcatctcatcatttcatttcatcatttcatttcctcatttcaccattacatttcatctcatcatttcattttatcatttcatttcatcatttcatttattcatttcatcatttcgtttcatcatttcatcatttcctttcatttcatcatttcatttcatcatttcatctcatcatttcatctcatcatttcatttcatca

SEQ ID NO: 916694 - DNA, 546 bp, Homo sapiens
ttcatctcatcatttcatcttttcatctcatcatttcatttaatcattttatttcatgtaatcttttcatstcatcatttcatcatttcatttcatcgattcatcatttcatcatttgcatttcattatttcatcatttcatcatttcacttcatctcatcatttcatttcatcattgtatatcatttgcgtttcatcatttcatcttttcatcatttcatttcatttcatcatttcacttcatcatttcttcatttcatttcctcatttcattgcaccatttcatcacttcatcatttcatcatttcatttcatcattccatttcatcatttcatcatttcatttcatctcatcatttcatttcatcatttcatttcctcatttcaccattacatttcatctcatcatttcattttatcatttcatttcatcatttcatttattcatttcatcatttcgtttcatcatttcatcatttcctttcatttcatcatttcatttcatcatttcatctcatcatttcatctcatcatttcatttcatca

SEQ ID NO: 916695 - DNA, 645 bp, Homo sapiens; identical to SEQ ID NO: 906957

SEQ ID NO: 916696 - DNA, 598 bp, Homo sapiens
tgtgattgtgtaattaatggatgaagaattattgacctaaatgtatccaatctttgagtgttttagtatgctagattattgtaggtgaaatggctaagtcaaaggtgatgagtgtttttgagactgttaatgctaattgcaaaattaacctcttaaaaaggcactgccagcttagaccatgactgagagctcttgttttatcttgtccttgctgagctgggtgttataacattgaaaccttctgcagtctctctctctctctctccccccaccccctcctcccttcctccctttattccttttacttctcttaggataggctcatctgtacttttttgatagaggtaaccatttgccacaccattttctgaagggcctgctctcttcccattcatttgtgatggcacatttatcctaccataagctttggtaacatgtcaggatctttctgtcctgtcctctcaaagaggttaattttttttttataatgacttataattgactgaagttataatagttttctcatgtcaaatatagaaagaggccaggtgcggtgcctcaygcctgtaatcccagcactttgaaaggccaaagcagc

SEQ ID NO: 916697 - DNA, 624 bp, Homo sapiens
gctccaggcaatagggtgagatgagcctgagatgcctcaaaaacttgttttttcagtttagcaatatctaatgttaaattatcttyttttccttgtaggtgacgtctaatcgtctctcactggtgttcaatggcattataagagctaggagtaaaacaaaaatcggaagtattccagtcacattgtttttgaattctatgctccaagctcataatccaatctcccatccaaattactgtttgacagagatcattaatttgatttgccaatttttgacctatttggctttgggaattccaaagcttagaagaatttttctgccaactatccacaaagcccgctgtttgaatagaagagtgcaaagcaacaccagcagcagcagcagtagctgtgacagctataaggcccatgatcacagctattaaagtaaatatgaatctctttgatctattaagtattccttttagtacttccgtgataatatgtatggagggagaggcctcccaaggtctattgagggaaacagttattcaaactccttgggccctaaccggtaaaatgctattatctttattaaaggtagaattaatgcaggtaaaaagatgacagttgaggcatgatatg

SEQ ID NO: 916698 - DNA, 601 bp, Homo sapiens
tgaagcaattctgaccccaacaagacctactggggccttttgtttgggccagttttttggccattgataaagagctatgatcracacgtctgcttctgtgtccaccagaccctcaaattgttttccttgaatagtaaccatacaaataggtctattgtcagagacttgatgtacccaataggtagcattgcctgctgaatttgtgttccaaatcctcctgttcttttttctgagctttctcctaacttaacatatggtaaaagcaacagttgagctattctgtcaccttgattagcactccagggaacagtggaggagataacaatttgaatttctccctggcaatcagagtccactactccagtatgtacttgaattccctttaagtttaagctggaccttcccagtataagtcccaccgtgccatttcacaatgggccataaacttccactgggaccttcctaggaggctccccaggaaggagggatatggcttcggtacagcataaatctactgccccacttttagctgtggagggggacaattcctgtacattcatacagggatagactgggctgaggacactccgtttggagttgg

SEQ ID NO: 916699 - DNA, 541 bp, Homo sapiens
tctttttgtatgtcctatctgtccacaattatagcaagatccagggcacactcatatgttttttgttacccttagtccagccattccttgagcaaggaggctggccttatataagtgccygccaatgccatcacaggctttaatgtatactcttaaagttttttcctcatttagatctgcctttcccttaataggtctaattgctgcctgacattctgtattaacattttcataagcaagtagctggacgatcactttcctggcatgagaatccaaaatagccttttgagccacatcttgcaaatgaatgataaaatctggataaggctcccttcgaccctgtcaaactgagttaaaagaaggataagtagtaccagggtagtgaattttttcccaggctcttaggcatatagttctgagctgatcaacagcctcatcacccattaccatctgttgatttagagtaccccatgcctgtccacttccaagcaattgatcagatgtgatattaatgaaagtttgggcttgagcatttctgcat

SEQ ID NO: 916700 - DNA, 541 bp, Homo sapiens
tctttttgtatgtcctatctgtccacaattatagcaagatccagggcacactcatatgttttttgttacccttagtccagccattccttgagcaaggaggctggccttatataagtgcctsccaatgccatcacaggctttaatgtatactcttaaagttttttcctcatttagatctgcctttcccttaataggtctaattgctgcctgacattctgtattaacattttcataagcaagtagctggacgatcactttcctggcatgagaatccaaaatagccttttgagccacatcttgcaaatgaatgataaaatctggataaggctcccttcgaccctgtcaaactgagttaaaagaaggataagtagtaccagggtagtgaattttttcccaggctcttaggcatatagttctgagctgatcaacagcctcatcacccattaccatctgttgatttagagtaccccatgcctgtccacttccaagcaattgatcagatgtgatattaatgaaagtttgggcttgagcatttctgcat

SEQ ID NO: 916701 - DNA, 647 bp, Homo sapiens
atcttttaaagacaccattgattaggttttctgttttatgcaatggatacagaaagtcagggctacataggtaggagaataatcagcccagaaccaatgtctgggctattgttactcagagtcatggtataataatagagaagaaaacactaaatgtaattcatgggtctggttctagtcctaattctgtcttttatataagaaagaacctatgtccttgctgttcaccttctaagcatcactggactctccaaaattcttttggtccccagccaagcagtggtcaccatcagtctccctcatcttgcacaacttcccatgacccaagcatcctttcccgccaggaaagttccccaagactcctccaccatcacccaaacaaaacccatctcagtgttaatatctagtgttttttgagtgtatattgtgtgccaggcattgtgctgggcactttctacttatctcatttgaatgcacccagcaacccaaccagattttctgtatgagaaaaacagagtcataagtggcagaggtagaatttgaattcaagtccacctggcctctgtaaccacaccagaccaatctggttcaacttttaygtaacaaagttgtgagttgtttttcagttggtatcaacccccaggtta

SEQ ID NO: 916702 - DNA, 615 bp, Homo sapiens
aaaaagaaagaaagaaaagaaaagaaaaaagattctaccaaatggacttcttttcaccaaatcctctaacaaagcaaatagsaatagagcggacatcgatttcctttttccttttccctcattgtctaaaagctgtggtggatggaattgacctaaatctcaaatccaagggtgggacttgatgggtccaagcttatcagggtatttccatcagacttgcccttgactggttcaagtaacccaggcctagcctaagcgaatcagctcagtgatccacgattaggagaattggtttaagactggtccaatcaacggagttaggatttgtattcatcaattaagggcagtgactcgccctcctcagatatgaataaagaagcttgtaaccttgtttgttgttgatagctaccttaaagccctggagaaagccagtttgtggatgaatccaacttacggagaaggcagtgccagaagaactgcagtgaaacagagctggaatcttgatcaaaccacaccagaagtgtctctgaagctggcttttattgtttgacctggtttgagttggtttcctgttacttgcaaccaaaagaatcacaattgatagactaaaccata

SEQ ID NO: 916703 - DNA, 635 bp, Homo sapiens
actatccaaaattaaaaagaaaaaaagagggaataaaaagtgaaaaactggtygtaagtgacttacgggacagtgacaaggcttttttgttaccaaatttgatgaaaactagaaatctgaagttcttaaaagctaaactagctcaagcaaaaagcacaaaaaaaaaggcatgcaaagtcacatatttctgaaaactacaaactagtaagaaaaggaaatctttaatcccagcactttgggagaccgaggcagttgggtcacctgagatcaggagttgaagaccagcgtgcccaacatggtgaaaccccatttctactaaaaatgcaaaaattagctgggcgtggtggtgaacgcctgtaatcccagttaccctggaggctgaggcggcagaatagcagaagtggcagtgagccagtgagccaaagggtcatgccatttgcactccagcctgggagaccggagtgaaactctgtctaaaaaaaaagaaaagaaaatcttaaaaacagcaagataagaaagatacaataagtaaaaaagagcaaggataccaaatatagtaggcgtctcaccagagactacacaagccagaatacaatgaagaaacacatttaaaatactgaacatgtattcaccta

SEQ ID NO: 916704 - DNA, 635 bp, Homo sapiens
actatccaaaattaaaaagaaaaaaagagggaataaaaagtgaaaaactggttrtaagtgacttacgggacagtgacaaggcttttttgttaccaaatttgatgaaaactagaaatctgaagttcttaaaagctaaactagctcaagcaaaaagcacaaaaaaaaaggcatgcaaagtcacatatttctgaaaactacaaactagtaagaaaaggaaatctttaatcccagcactttgggagaccgaggcagttgggtcacctgagatcaggagttgaagaccagcgtgcccaacatggtgaaaccccatttctactaaaaatgcaaaaattagctgggcgtggtggtgaacgcctgtaatcccagttaccctggaggctgaggcggcagaatagcagaagtggcagtgagccagtgagccaaagggtcatgccatttgcactccagcctgggagaccggagtgaaactctgtctaaaaaaaaagaaaagaaaatcttaaaaacagcaagataagaaagatacaataagtaaaaaagagcaaggataccaaatatagtaggcgtctcaccagagactacacaagccagaatacaatgaagaaacacatttaaaatactgaacatgtattcaccta

SEQ ID NO: 916705 - DNA, 622 bp, Homo sapiens
ttctcccacctactttcataaacccactgaattctacccacaaatccctctgcaggtgtgtgggtcccaggtgaagcactgtgtastagtgagacttagagctacttacctattctcttcatgcttctatttttttaaaatagggataacaatagtatctctatcattggctgttatgagagataaaataatagataaaaagacagtagcttaatgcttaacacctagtaaacatttcagcattagcttttgttatgagaattattctttcagatgattcctataacctcacaaaattgtgttttatttttcgccactcatagaagaagaaacaggctcaaagaggtaaaaattgcacaaagtaacccaggaagtcagtggcagagctgattgaaacctggttctctctgattcaaccttaagctctggcctatcgtgtgtgctgtgtcattttttaaaactgatagtattaaatgtcctcacttctccctggaatgaggctagaccgactttggagtagatcaccatggatgtccccatttcttcacccctcccagaggagaaagacaaatgtccaaggttcaggaagctcttgtctggcgcctgtttatttaagggctta

SEQ ID NO: 916706 - DNA, 687 bp, Homo sapiens
gatttgagtgagacacgcccaggtgagggttctgagatgggtacagattcagtctcgtgcccacagctggccaggmagaaggtgaaggttactgtgacttgtaagagaggcagggctgattgaaagttatttttcaactggtcttaaaggaacttggaatattagctccagtatttctctgcatgggcacggtgagcacattgggtgggatgaatccctgtgggacaccacacattgcaggacattttagcaaacctggtgcccaatgctagtagcctcccctgcatcactttgataataaaatatgcccccccacactttcacgtgcttccaagggtgggtgggggctttccttagaacgtcacatgtgaggagaccaagcaagagagagaaactagttaggtacaaatccagagggctattgagttggcagaactgagatttgaaccgaggtatgttctcactctccctctgtctcttgccaaatcaaatctctaaagttacatttaaatgtaactttaagtaggcatagcatttttttcctactaaagttacgtttaaatgtaactttaaatatcttttttataacttagcttaatttccgtgttttttttataaaaacctgcctaatgttaaaaacctctattagttgattacaatttctttactcagtttattctaccttta

SEQ ID NO: 916707 - DNA, 687 bp, Homo sapiens
gatttgagtgagacacgcccaggtgagggttctgagatgggtacagattcagtctcgtgcccacagctggccaggcagaaggtgaaggttactgtgacttgtaagagaggcagggctgattgaaagttatttttcaactggtcttaaaggaacttggaatattagctccagtatttctctgcatgggcacggtgagcacattgggtgggatgaatccctgtgggacaccacacattgcaggacattttagcaaacctggtgcccaatgctagtagcctcccctgcatcactttgataataaaatatgcccccccacactttcacgtgcttccaagggtgggtgggggctttccttagaacgtcacatgtgaggagaccaagcaagagagagaaactagttaggtacaaatccagagggctattgagttggcagaactgagatttgaaccgaggtatgttctcactctccctctgtctcttgccaaatcaaatctctaaagttacatttaaatgtaactttaagtaggcatagcatttttttcctactaaagttacrtttaaatgtaactttaaatatcttttttataacttagcttaatttccgtgttttttttataaaaacctgcctaatgttaaaaacctctattagttgattacaatttctttactcagtttattctaccttta

SEQ ID NO: 916708 - DNA, 587 bp, Homo sapiens
ctattgtaattgttttggggcacctcaractgtgcccatataggatggtgaacttgatcaataaatgtgtgtgttctgactgctccactgaatggttgtttcctcatctctttcctgctcctcagggttccctatttcctgagaccctaaatattgaaattaggccagttagtcctatgatggcctctaagtgttcaagtgaaaggaggagtcacacatctctcactttaaatcaaaagctagaagtgattaaagttagggaggaaggcatgttgaaagagaagcctcttgtgccagttaggttgtaaatgcaaaggaaaagttcttgaaggaaatgcaaagtgctactccagtgaacatccagatgataagaaagtgaaagtcttattgctggtatggagaaagttttaatggcctgaatagaagatcaaaccagccataacattcccttaagccaaagcctaatccagagcaagaccctaattctgttcaattatatgagggctgagagaggtgaggaagctgcagaaaaaaggtttgaagccaaatagaggttggttcatgaggtttaaggaaagaggccatct

SEQ ID NO: 916709 - DNA, 605 bp, Homo sapiens
ctaatctgctatagacagagactccggtgaaccaattttattaggatttgatcaaataaactctctctgacaaaggactgctgaaagagtaactaagagtttgatgtttactgagtgcatagtatgtgctagatgctggccgtggatgcctcatagaatcctcccaacaactcatgaaatgactactgtcattcagcccaatacccagacgagaaagctgagggtaagacaggtttcaagcttggcagtctgactacagaggccactggcttagcccctgggttagtctgcctctgtaggattgggggcacgtaattttgctgtttggggtctcatttgccttcttagagatcacaagccaaagctttttattctagagccaaggtcacggaagcccagagggcatcttgtggctcgggagtagctctctgctgtcttctcagctctgctgacaatacttgagattttcagatgtcaccaaccrccaagagagcttgatatgactgtatatagtatagtcataaagaacctgaacttgaccatatacttatgtcatgtggaaaatttctcatagcttcagatagattatatctggagtgaagaat

SEQ ID NO: 916710 - DNA, 638 bp, Homo sapiens
ccgtaaataaactttcagaccagagatctattctctagcttattttaagctcaacttaaaargaagaactgttctctgattcttttcgccttcaatacacttaatgatttaactccaccctccttcaaaagaaacagcatttcctacttttatactgtctatatgattgatttgcacagctcatctggccagaagagctgagacatccgttcccctacaagaaactctccccggtaagtaacctctcagctgcttggcctgttagttagcttctgagatgagtaaaagactttacaggaaacccatagaagacatttggcaaacaccaagtgctcatacaattatcttaaaatataatctttaagataaggaaagggtcacagtttggaatgagtttcagacggttataacatcaaagatacaaaacatgattgtgagtgaaagactttaaagggagcaatagtattttaataactaacaatccttacctctcaaaagaaagatttgcagagagatgagtcttagctgaaatcttgaaatcttatcttctgctaaggagaactaaaccctctccagtgagatgccttctgaatatgtgcccacaagaagttgtgtctaagtctggttctcttttttct

SEQ ID NO: 916711 - DNA, 566 bp, Homo sapiens
tcccagcaccatttattgaatagggaaccttttccccattgmttgtttttatcagctttgtggaagatcagatggtcatgggtgtgtggccttacttctgggcccctattctgttccgttggtctatgtgcctgtttttgtaccagcaccatgctgttttgattactgtagccttgtagtatggtttgaagttggataatgtgatgcctccagctttgttctttttgcttaggattgcctgggctagtcaggctcttttttggttccatatgaattttaaaatagtttttttttctatttctgtgaagaacgacattggtagtttcatagtaacagcattgaatctgtaaattcctttgggcagtatggcctttttaatgatattgattcttcctatccatgagcatgaaatgtttttccatttgtttgtgttttctctgatttctttgagcagtgtttgtaattctgattgtacagatccttcacctcctggttagctgtattcctaggtattttattctttttgtggcaattatgaatgggattgcctttccgatttggctctt

SEQ ID NO: 916712 - DNA, 566 bp, Homo sapiens
tcccagcaccatttattgaatagggaaccttttccccattgcytgtttttatcagctttgtggaagatcagatggtcatgggtgtgtggccttacttctgggcccctattctgttccgttggtctatgtgcctgtttttgtaccagcaccatgctgttttgattactgtagccttgtagtatggtttgaagttggataatgtgatgcctccagctttgttctttttgcttaggattgcctgggctagtcaggctcttttttggttccatatgaattttaaaatagtttttttttctatttctgtgaagaacgacattggtagtttcatagtaacagcattgaatctgtaaattcctttgggcagtatggcctttttaatgatattgattcttcctatccatgagcatgaaatgtttttccatttgtttgtgttttctctgatttctttgagcagtgtttgtaattctgattgtacagatccttcacctcctggttagctgtattcctaggtattttattctttttgtggcaattatgaatgggattgcctttccgatttggctctt

SEQ ID NO: 916713 - DNA, 554 bp, Homo sapiens
accatatcactcactattcctttttatttagtctactagcttatttatacctcttattatatttttagtgttttccctggggtttgcaatgcacattcctaattagagtctaccttcaaataatattatgcttctttatgtgtcatattaggagcttacattatagtcccaatttgtccctcccattatttgtgttattgttgtcatatataacatttttaaacattctataaacacaattatgctttaaacaattactttttagggcaattaaaaataaggaaaaatgtactttctatgtttagggccctttttatttcctcttgtagatccaagattttgtttaataccatattccccttgcttgaagaactccttttaacatttctcatgtctctgttgacaacgtatttcttcatttgttgtttccctgagaaagttttcagttctactgcawttttgaaagctgtttcttctggtatagaattctgggttgacagtttttttgtttttctttcagcacttcaaagatgccactccatggtcttctagcc

SEQ ID NO: 916714 - DNA, 623 bp, Homo sapiens
acaattgctgtaatcatcatcatataattaacacctgagagtagttagatggttaggtcagcctgcttatacattatccttaagtctgcatttcatcctatccatagtccaagtaacaaagtcctttggataaattgaggggcagcggtatagagagatgtccacaagttctttgatatttctccattaaaaaagtggggcctaactccacctcttgagtgtgggctggacttagggacagaaagtggcagaagtcacagtatgtaacttctaagattaggtcatagaaaacattgtacagaaagcattcctccttgctctttcctgaatcactcactctgggaaaagtcagccaccacgttgtagcctcctctcaaatgccctatggagaggcccacacagcaaggagctgaggactcctgccaacagccatgcgagtgagccatcctgaaagtggatccctcaatcccaatcaaactttcagatgaccacatcctcagcgaacatcttgatttcaatctcatcaaagaccctgaaacagaaccgcccagctaagatgctcttgaattcctgacccaaagaaactgtgaartaataaaggttcaatatttcaaactaagttt

SEQ ID NO: 916715 - DNA, 682 bp, Homo sapiens
taaatattcaaaaactagccaggtgtggtagagcacgcacctgtaatcccagcctctcaggagactgaggcaggagaatcacttraaccagggaggcagaggttgcagtgagcaaagaatgagccactgcactgcagcatgggagacagagcaagactctgtcaaaaaaaaaaaaaaaaaagaaagaaaaagaaagagagagagaaggaaggaaggaaggggaaaaagaaagaaaaacaaagaaagaaagaaagaaagaaagaaaaaagaaagaaagagaaagaggaaagaaagtaatgagggaaggaaggaaggagaaaggaaggaagaagaaagaaaaaagaaagagaaaaggaaagagaaggaaggaaggaaagagagaaggaaggaaggcaggaaggaaggaaggaaggaaggaaggaaggaaggaaggaaggaaagaaagagagagacactattgggtactatgctcactacctgggtggtaggatcaattgtacctcacacctcagcatcacacattataccgatgtagcaaagctgtgcatgtaccctctgaatctaaagtaaaagttgaaattattttaaaaaaaaaaaggaggtcttctaagaatgaagaaaaccacctttgtaaaaagttcctgaaaccaaaaaatacttcagaaatgcagcttccttttcc

SEQ ID NO: 916716 - DNA, 628 bp, Homo sapiens
ggtcaacaattgctgtaatcatcatcatataattaacacctgagagtagttagatggttaggtcagcctgcttatacattatccttaagtctgcatttcatcctatccatagtccaagtaacaaagtcctttggataaattgaggggcagcggtatagagagatgtccacaagttctttgatatttctccattaaaaaagtggggcctaactccacctcttgagtgtgggctggacttagggacagaaagtggcagaagtcacagtatgtaacttctaagattaggtcatagaaaacattgtacagaaagcattcctccttgctctttcctgaatcactcactctgggaaaagtcagccaccacgttgtagcctcctctcaaatgccctatggagaggcccacacagcaaggagctgaggactcctgccaacagccatgcgagtgagccatcctgaaagtggatccctcaatcccaatcaaactttcagatgaccacatcctcagcgaacatcttgatttcaatctcatcaaagaccctgaaacagaaccgcccagctaagatgctcttgaattcctgacccaaagaaactgtgaartaataaaggttcaatatttcaaactaagttt

SEQ ID NO: 916717 - DNA, 600 bp, Homo sapiens
caagtccatcttcttcccaggtgtcaacatcacgtggcctgaatagacactgcaggtttgggacagggttcwtcacctcattttctacctggtccctgaaggccatcgactctgtgatccctgcttcccaaggggaagatcctttattcccctgtcctcatatgtccaaaggagtgttttccaagatgtctaccctctggaggagctccccaaagagatagcttcaacctctaactccccttttcccttgatcctcccccagagaggaaagtaactaatctgattggtgagatgcctggggacccaccttctggtgggtggtgggctcactttgcatcaagaacaagaaaaggggcttctcccactctttcagtggcctccacggacctctgatatgcaaaagccaggcctgctctgtgctcctcaccattcagctcccccagaccaggcacaaggtcttctctgaccccatcctatgaagaccccaaggtactaaaatgaagagtgatcctctatggagccagctgggtgagaatactcagaggccactttgccacccaacgccgtcagtggatcatccaagagctagatacagggaaa

SEQ ID NO: 916718 - DNA, 612 bp, Homo sapiens
gagtgcagtggtccaatcatagctcactgtaatcgtgacttcccgggctcaagcgatcctcctgcctcagcctcctgagtagctaggactaytggtacacactagcatgcccagctaattttttaaaattttttgtggagttagagtcttactgtattgcccaggctgatctcaaacttctgacgtcaagcaatccttccacactggcctccaaaagtgctgggattacaggcatgagctattgctactagctaagtgtcactaaattttagtgtcacttttctatttttttgagacaaggtcttgctctgtcacccaggctggagtgcagtggcatgatctcggctcactgtaacctccgcctcccaggctcaagtgatcctcccacatcatccttcctagtagctggaattataggcatgcaccaccacacctggctaattgtttgtgttttttgtagagatgatgtttcgccatgttgcccaggctagtctcgaattcttcagctcaagcaatcctcctgcctcagtctcccaaactgctgggattacaggcgtgagccaccacaccctgctaagtgtcacttttcatgtgcctttttacagaatacta

SEQ ID NO: 916719 - DNA, 600 bp, Homo sapiens
gaaatccacccccatgatccaatcacctcccaccaggtccctcctccaacactgggaattacaattcaacatgmaatttgggtgggcatacagagccaaaccatatcaagatatcacatacaaacccaagtgaaacagtcaagaggcagttggatagatgagtctagagtccaagaaataggtctatgctggagacgtagctctatttacatataaaaatatttagaaatatagctttgccaacttcatgtattcagctaagtacttctggttataatcagaaatccaactccagctagtttaaggaacagcaggaaatttattggaccacagatctgaacgcccagatgcaatggtttcagatacaggcagatcctggggctcaaacattgtcaaatgtctctctccatctctcacttctgcttttcctccttgttggctccatatgcaaacaagcccacctgctgtgatgggagacatagctacaaaaagtactaatacattcttttttactgagacaaaattagcataacataatctaatcattttaaactataccattcagtggcatttagtacattcacagtgttgtgcaaccat

SEQ ID NO: 916720 - DNA, 529 bp, Homo sapiens
tttctctttattaaaatcatgactaaatcccttaccagtcaatggatctcccaaagtagtcagaactccagaagtccacttgggcagcttctcccctgcacaatgaaatctgttgtctcttcaaagagtgtgaaaatcaaacgtcatttgcaaggcttctcaggtccatcagaagtggaacttcagttgttaagccacattatttctcttgaatatcataactttttttcctaaagcatttaatttgattcaaccccaagggattgtttttcagaaatgccaggaatctgctgagctctctgtactctgggcgaaatttcagtcctgttgttaacgtggtaccttgtctccctcctctgtctgagctgggaacaggaagaaaccttacatcaccatagtaatctcataataagattgtacttttttctgcacattacatctcaagggatcattgtcatttgtttcccgcaaatgacaatcyagcttctccgggccccctagttgctcggtgagaaatgttaccgaacag

SEQ ID NO: 916721 - DNA, 548 bp, Homo sapiens
tgcaggtttttctaaacccagtagcacctcagggcaccattcatataggctgtgatgagatttgtgccgctggagatgtcccaaaagcttttttcaatataccacgctggactctcccggagctcgcgtgacttaaaaaaaattaaattaacaaatcaatggcattggtgccagcatggagacttgggtgtgcatgaagtcccagaaaaagaaattccttctcagaaacactgtctttcctacatgtctcctgctctcgttaacaattctgggtaaaggagaagtttctttcttctcttactaagcaatctactcttctctgtaactcctatgtcctcacccttcctgagccttgatagagtgcaaaattctcttcccctgtgatctttatgtcctaaggttgaattattgaaaaaaggtgtgctgtgtgaaaagttatacttaaggctttgccaatgcaaagggccaacagagcccacctkgtaggacgataccttttgctagagctatggaactgtggcaaaattgccatcaaacaaattacacca

SEQ ID NO: 916722 - DNA, 601 bp, Homo sapiens
agatgatttttgtgtatgaccaagtagtgaagtactaacttagragaataattaatagaaggaatcaacaattccagctgggtttttgacaggaaatggatttgaaacagttcaagactgtgggctctggtgatgtctctgctgtgtccttttcataacaaatgctgtaagttagcatagtgtctggaacttggagatagccattatcactactttcagtcccctctctgctaccagtcaattgctcactatccccaagctgacctcaacatctcaggggagctggtttgtgggaaaagtgggtaggaaagagggagggtaaactggcatggtaagagtgggtctctatggaattcatgagttctgattatttttagtttcttctcaaaaaatgtaaattttgccctatcacaatataaagagaatctatttcacaatttacacagctgattttaaatactatcctatttcaagctccatcacattttcctcagatattgaaatgttattctggcagaaacattggcatgtacttgccaagccctcctgggcacaacactaaacatttcccagccccttgcagttaagcgaggccagggaa

SEQ ID NO: 916723 - DNA, 598 bp, Homo sapiens
tctaaaatttacagagaaatacaaagtaactataatattgaaagcaatcttggagatgaacaaagttggaaagctgcattcatcaagaccgtatggaactggcacgaggatgaacaaagcagcataacaacaaagatggttcagaaacagagccccacttctataatgaccaccttttcaacaaagggaagggaaagtctttttaacaaatggtgctgcaatgcccatatagaagaagtatcagaaacctgaccactgccacacaccataaacactgagatggatctttaattataagagctaataccataaagcatttggtgaaaaacactgaaaatatcttcatgatgttgggtaggcacaggtttcttgggtcacagaaagtagtaacaagagaattgtatctcctcaaaattgaaaacttctgctaatcagacgacaccatacagaaaatgattaggcaagcsacaaattaaaaaaataatttacaaaacatatctgacaatggactagtgtccagcgcaaaaaattcctgtaactcagcaataaaaaagactaaatacatccatacgatactattcattgagaaaagaaactg

SEQ ID NO: 916724 - DNA, 664 bp, Homo sapiens
tgatgaaagtgttctttattttaattatatcaatgtcaatatccagactgtgataatttactgtagtttacaagatgttatccttgggggaaactgggtaaaatgtacatgagatatctctgtaacatttcttamaagtgtctgtgaatcaacaattatatcaaaataaaaagtataatttaatacagcatcttaacattttcaacaaaactaagtgtcaaagtatccccataaacctcaaatacaaattggtgaggacaaaccactagtagttgcacgttattaatttttcctgttatggattatgcctttggtgtcaagtctaaaagctttttgcttaatcctagatcctgaagattttctcctgagagttttgtgactttatgttttacatattagactttgatccatttttatttcttcctttgaaatctgcacgccttttttttttctcgcccattacattatctagaacttccaacgccatgttgaataagcatggcgagagtggacatcattgctttgttcccgatctttgggggaaaaatttcagtctttcaccgctgtgttagctgtaagattttttgcagatgctctttatcaaattgaggcagttcctctctatttgcattttctgagcattttatcatgaatggccattgaa

SEQ ID NO: 916725 - DNA, 598 bp, Homo sapiens
gcagtgatgtgatgatagctcactgcaacctccagctcctgggctcaagtgatcctcctgcctcaacttcctgagtagttaggactacaggcacgtgccaccatgcctggctaattaaaaaaaaaaaaaatttgtagagatggggcttcaatatgttgccaagtctggtcttgaactcctgggctcaagtaaccctcccacaatactgggattacaggcatgagccatagcctgttgtttctactacatcatagttatattctatgagacatgtgttttctttggaggttatctctgaagtgcactttgaagtacgttagtggcagttaaagttaagaagagttttatatctaaaacttggatggtggggaaactgggaattcagtaatagactgtttatctaatgtagtagttagaatatatatttctgtactgaaatagtattacagttagaatggtttcagttgcttgatttttgcaggcacacaaataataataatattattattataattataatwattattattattatttggagacggagtctcactctgtcgcccaggctggagtgcagtggcgcaatctgggttcactg

SEQ ID NO: 916726 - DNA, 641 bp, Homo sapiens
atcttccttcctgcttttctacaaaataaaagtaaccaaccctcatmcattgccattggtaaatggtgcagccactgtgaaaaacagtctggtagttcttcaaaaagttaaatacagagttaccatatgacccagcaattccactcctagtacatacccaagagaaatggaaacatatgtccacacaaaaactcgtacatgatattcatagtggtattagtcataatagcaaaaaggtggaaacacctaactgtctgtcagcagaacaagtaagcaagatatggtctatccatacagtggattgttattctgccatagacatttaatccatttacctttaaggttaatgttgatatgtgaggttttgttcctgtcatattgctaattgttttctagttgttttataaattatttgtttctttcattctctctgtttgtcattgtggtttggtgaaattctgtagtggtgctatttgattactttcacttcctcctttgtgtgattgctttaccagtgagttttatacttttgtatgtttccatgatggtgaatgtcatccttttgcttccaagtttaggactcccttgagcatttcttgaagggccggtctagtggtgacaaatacagtcatcatttactt

SEQ ID NO: 916727 - DNA, 571 bp, Homo sapiens
atttggtgctataaatttccctgttaacactgccttagctttgtcttagagactctggtatgttgtatctttgttctcattattttcaaagaacttcttgattcctgccttaatttcattatttaccccaaagtcattcaggagcaaattactcaatttctgtgtaattatatggttttgagtgaatttcttagtcttgatttctaatttgattgcatttggtctgagagattgttatgatttcagtttccttgcacttgctgaggagtgttttacttccaattatgtgatcaattttagagtgtgtgccatgtggcaatgagcagaaagtatattctattgttgtggggtggagatttctataattagccatgaggttcatttgatccagtgctgaattcaggtcccgaatatctttgttaatcatctgtctcaattatctgtctaatattgtcagtgaggttctaaagtctcccgctattattgtgtgggactctaactttccttgaaggtcyctgagaacttgctttatgaatctgggtgcttctgtgatgggtacatatatatttag

SEQ ID NO: 916728 - DNA, 604 bp, Homo sapiens
ggcacacattttcaaagtcaaatatcagtagacttgcaggtactgacacctccacttagaggtatttaaagcacttgtctattagatactttctaagccctttgcatatatataaattcatttaatgctygaaatagctctatgagggagtcagtactgccaccccattttacagccatagacagatcactcgtttgtgtttctctctctctctctttcgcaggggacccgtggggcagaccccacaaccttcatggctgcatacccagcacgctatccattgttctcctgacagccaagcccaatccactgcagaaaagagtgtttgggttgttgcacatccagataagaagggaccacagagaggtaacagcaaaagtctagagcacagagctgctcgaactggactcagctgcctggtgaagttgggggcagggaaactcatgctggctaaacagctgtctaataaatctgccctagcatcacagacaggctctcaccgatattagcattcagtagtacaccttctgttggcaaatgcttcattgtcatttttattagttatgccttacaacttccccgctaggtcaatattatcaagggg

SEQ ID NO: 916729 - DNA, 507 bp, Homo sapiens
tcagacgcaaacatcctgctgatgtgctggtcctagttctggattgggaggttagaagataattgatccatgtaacaatcccgcctgaacccagatctcccaacgtgggttttgtgccagatgacttttgtttgccccttcaggttcatttcctacccttttctattcttgttgcattccaaactacatcctgcatcaacagactactttgccctctggtttcagactggggaattctggaaggagattaaaaggcaggaggagagtaaggtcagggtatttattccctcagctctctctctctctgcctgtcaccgttggtcggctgagtctcttaactggagtctgtggctctatcaggtaaccactccctcccctggtcctttccctcccaggcatagtaacagcttctaatgtaactgggtctggttgcttttcctaaacctttcccacacccttggaaatagtcacktcattaaactctcctctgtaacttagcctgactgg

SEQ ID NO: 916730 - DNA, 632 bp, Homo sapiens
tgactgcttggctagaacattgatctacccttggtgctcctcctggttctcagaccttcggacttggactggaatctayacctaaatctgcaagctctccagctctcagactttacctaaatctgtctcagaccatacctaaatctctctctctctttctctctgtctctccctctccctctcttacagggcagttgtttatagaatatatctcaatttgagtttgatgtttttgagagacagaatatctatctgtctgtctatctatccatccatccatctatcatctatttattatctatctatctatctatctatctatctatctatctatctatctatcctgcttttctagagaacacagactaatgtaggtgataactaggatcccttccccactaagaattgttcagggccctgcaccccagaggaagaacctatttcctttctttcccctggatccactgctcaccttttcttctgcctacaatcctagaagttcaaaatcttccaggaagaattctccaagtttgtccttgcttcatctccaccaacctgagtcagcgagtttttcaaccttgctatttgtacccatgtccaggttgttaatatatatacatgcactgtgtgct

SEQ ID NO: 916731 - DNA, 606 bp, Homo sapiens
cagtaagcaccaaatgaacacttttcagataaattaaataactgcagaatagtcataatgacagtgttttttttaaaacaatatttaataattgcttactctgtgccagtacttttcakccaagggcaatttgcccccctgccgcggagacatttggcaatgtctggagacacttttggagtcacaaatcaggggagagatgctgctggtacatagtaggttcggaaagctgcaaaatgtcatacagttcacaagacagcctccctgccccccataaggaaggattctccagcccccaaaatctagcgcttataaatcactatttattttcacagctactcttttttttttttttttccagttgaggaaactgggccctgagacattaacttgcccaaaagatcacagtgggcaacattctagagcacagtggaagccgacaggtaaataagtagatgggtagagtgcaacagacaggcagacagattgagacaaaaatgggaaaactgggaaatatggaaaagaacagggaatggatgaaaagtagtcctaagccaagctctgccaagaaatgacacatggccctgggccttcccctcctgactc

SEQ ID NO: 916732 - DNA, 606 bp, Homo sapiens
cagtaagcaccaaatgaacacttttcagataaattaaataactgcagaatagtcataatgacagtgttttttttaaaacaatatttaataattgcttactctgtgccagtacttttcagccaarggcaatttgcccccctgccgcggagacatttggcaatgtctggagacacttttggagtcacaaatcaggggagagatgctgctggtacatagtaggttcggaaagctgcaaaatgtcatacagttcacaagacagcctccctgccccccataaggaaggattctccagcccccaaaatctagcgcttataaatcactatttattttcacagctactcttttttttttttttttccagttgaggaaactgggccctgagacattaacttgcccaaaagatcacagtgggcaacattctagagcacagtggaagccgacaggtaaataagtagatgggtagagtgcaacagacaggcagacagattgagacaaaaatgggaaaactgggaaatatggaaaagaacagggaatggatgaaaagtagtcctaagccaagctctgccaagaaatgacacatggccctgggccttcccctcctgactc

SEQ ID NO: 916733 - DNA, 598 bp, Homo sapiens
tgtagagaaagcttcagtcttcttagagattacctaagtggtcataagcagatgccaaaggtgttaactgcttacacccmgagccgaccagttgcacttcaacagtcctaggaactgcccagaccacccattttccagcctagggtctatatgggtctattcagattactgcaccagagggagggtactggactaaacaaaatgcattaaacttcctctatctccactaatcttcattctccttctggttggctggtaggattacaaattatgatatattcagctaacatacattgagaatttaagtgtcaggaacaataccacttaagatatgtgcactccttcttttattctttccaacacttttatgttgtgtgtacttttatttttatttcatagatgaggaaataagttcttagggaaaacacataactatggttaattatcatgcaaacaacaataagttaaactcaggctttcattaaatatatctatatattagatcgctttatgaacttgccattttgttccttaaacattcattatcatgtttctagccataaaatgggcacttctcacttacgactctagatatagg

SEQ ID NO: 916734 - DNA, 598 bp, Homo sapiens
tgtagagaaagcttcagtcttcttagagattacctaagtggtcataagcagatgccaaaggtgttaactgcttacaccccgagccgaccagttgcacttcaacagtcctaggaactgcccagaccacccattttccagcctagggtctatatgggtctattcagattactgcaccagagggagggtactggactaaacaaaatgcattaaacttcctctatctccactaatcttcattctccttctggttggctggtaggattacaaattatgatatattcagctaacatacattgagaatttaagtgtcaggaacaataccacttaagatatgtgcactccttcttttattctttccaacacttttatgttgtgtgtacttttatttttatttcatagatgaggaaataagttcttagggaaaacacataactatggttaattatcatgcaaacaacaataagttaaactcaggctttcattaaatatatctatatattagatckctttatgaacttgccattttgttccttaaacattcattatcatgtttctagccataaaatgggcacttctcacttacgactctagatatagg

SEQ ID NO: 916735 - DNA, 623 bp, Homo sapiens
cttatgtaccttctgccagtggttagtacttataaaacaatactctttgttattaacttcagaggactgttagtattaggggaattgtacttaaaaatgagagttgtccataaaagacttcatagtagactcctgtgtaacatcttgtgctgattaggagcaacaatgaggctcctgacccaccatcaataaggcaagagtttgagttcttcacacactcacctaatctacttgattgttcaaaacaatctacaaaaagattgttttagatggctggctattaggaatactggctatgatgatgatgctaccttttctagacaagaaaacctacaactccggcctcaccaatatatgttctaaataggatactattaatatactcatgaaaacagaagtcaaaatggacactaggactaacttaattattcttataattgtaaaacaaaacaaaacaaaacatagattaaatgtcccagaccctgtcacaaactgcattccagaccagagctaatcaaggaaaaatatttgtgtttgtgttacaaaacgaaactgccagaatttttaaygtacaatatttttgcttaaagaaagactgacaaactatgattatttaaactctg

SEQ ID NO: 916736 - DNA, 637 bp, Homo sapiens
acatcactccctcattctgcagtttgtaggggaaggagagatcaccttcaatcctccttagctcttgtgttagctcttcagctgggtctaggaacaaagttgacaccacacagattaacagagaaaggtatgcaagtttatatatttacatgtacgtggggcactgcgtaagtgagtgaagtcccaacaaaatggccaagcaagatgcttttatacattttagacaaagaataacagatttgtgaagaaatgacaggacaaaggggatctggctaggagcaataagttctaggggaaccactaggagacataaaggggtgtaaaactagtggaaaataagtgttacttaggaggaagttgattctggcccattgtagcctgaactcccattcttctggtgatgaaggctattttctcaccctggtatggggaaagtatccctcctggagtaatatttatggcttgctacatgtagaaaaggacagatcagctctccttttctgaaactataatttctccaatattttcagcttggagtaatcaagacaccaattcagcatattttgggatggcatatscatgtcttcttaattgtcacttcttcctatctgcactcctgaccaacacagttactaag

SEQ ID NO: 916737 - DNA, 658 bp, Homo sapiens
cagcttaccctctctggagctctatctaattcaytgatttttcttaagatcttattactttctctttctgcaaaaccgagccacttgcaaccttctccctttcaatttatggcaattcctatccttccagttacccaggctagaagctttggagttattcttaattcctctgttcctctgataatcaccatccaattcattaggaaatagtactggctctacctttagaatagatccagaatctcaccacttttcagtgcttccactgatatcacctatcccctatccccagttaatgaagagctttctgatagatccctcctatgatggtatgttcatcatagcaaccagtgtcttttaaaatataaggttagatcgtgtcatccttctgtacaagtccctgcaaaagctcccattttactcaaagaaaaaatctgagttcttgctgtggtctgtaagaccatggatgatctgacagtatcttctactctctctcccttcctgactttgccatagctatactggcctttttgctgttgttccagtatgtttccactagcatattttcaaattaagatttttgcattgactgtttcctctgcctggagtgctttttctccagatattgtcatggctaactcttatttccttcatgttt

SEQ ID NO: 916738 - DNA, 540 bp, Homo sapiens; identical to SEQ ID NO: 910901

SEQ ID NO: 916739 - DNA, 583 bp, Homo sapiens
aaagacagagtgccagggcctgcaggtctgggctttaaggtttctttcctcactgtgtggctttggcaagttcacttggacctgctgaacctcagtgtcttattctgtcaagtgaaggaaggyattagcccacattcttaaagtgtgatcccagaacatcagcatcagcatcacccgggagcttgggagaaatgcaatcctctatatccaccccagaccttctgcattagacacttcggtagtggagccaacagtttgtgtttgagtaagtcctccaggtggctctcaccacgctaaagctgaagaacccctggtatgctatggactccaccaggcagggattctggcaggtgtggacatcagggtggtaccagctctaaagacctggttggggctgaaaactgagaaaataatcaaatcagttccttaaggcaggaggcctgtcaacgagtcaaagactgtgcgtaaaatgtcctgcctccgagtttagcctctaccacttatttggtgttttaacttcatatttcttgacctcttctgacctcattttcacatctgcaaaaggcaggataggtaaataagt

SEQ ID NO: 916740 - DNA, 583 bp, Homo sapiens
aaagacagagtgccagggcctgcaggtctgggctttaaggtttctttcctcactgtgtggctttggcaagttcacttggacctgctgaacctcagtgtcttattctgtcaagtgaaggaaggcattagcccacattcttaaagtgtgatcccagaacatcagcatcagcatcacccgggagcttgggagaaatgcaatcctctatatccaccccagaccttctgcattagacacttcggtagtggagccaacagtttgtgtttgagtaagtcctccaggtggctctcaccacgctaaagctgaagaacccctggtatgctatggactccaccaggcagggattctggcaggtgtggacatcagggtggtaccagctctaaagacctggttggggctgaaaactgagaaaataatcaaatcagttccttaaggcaggaggcctgtcaacgagtcaaagactgtgcgtaaaatgtyctgcctccgagtttagcctctaccacttatttggtgttttaacttcatatttcttgacctcttctgacctcattttcacatctgcaaaaggcaggataggtaaataagt

SEQ ID NO: 916741 - DNA, 660 bp, Homo sapiens
acatctgatagtgcccctcagtggtgaggagactgtttgtaccyggaagacgatgcaaacatcagcctgctcagtgtggagatgctgcacttagtgcttccaagcacatgaacccagaccatcagatggttcctagaagggaagctgaaagctaggaacacttaaagcctccctataattttcttcctcatcttcaaattctgtcaaaaaacacatttctatctattatatcttcctaataacaagttatgagctatatgcctaagcccagttctgccactagtactttagatgcatcagttgggtggtttcatcctttaaaaagggagaagaagtcaatggaaattagaagataagtggtttgagagagggcataaaggaagagaagggttatgttaggatgggttacaattatcatctctagggacactccctggcatccatctgtcccctgagctgcctgcctgcttcacagggacaaatttttctctcctgagaagacatttgggcaatttgaaacttggtttgaaggcatctggtcacttgagttcatggataaggaagtgatttttaggaaaggtagccccagtctacctgcttagtaagtaaaaatccaaggtagccccagtctacctgcttagtaagtaaaaatccatttta

SEQ ID NO: 916742 - DNA, 682 bp, Homo sapiens
attatacagaaaagtatgagattgtactaaaggaaattttataaaaatcagaaagtggaggaatattcttgtcaagaactacaaaargtctagaatttgaccctatttacaaacttacaaattagcctgacacacacagtttcatgtattctgtcagaagacatgagaatcttgggtgagaggcaaaggactttattactcagaaaaagcagtagctagaacttcctgttggcttgtgttcgttcccaatgccccccaaatcccacaagggcaatgcaaaggaccaatgatggatggctgcacagtgggttgcattacaggaaagaaacaatacatttggaggatccactgcttttatagaacatggaaataaacctgctgtttgtgatgttttcccatccttcagggtttctcactgaaaacatggtcctgagaatggccaaggtgaagagtcatcagtgccttacctttttggcatactcagcaagagtacgcataaatgcttagggaccatgatgggttgtctttcccaacaatattccatttgtatgtgtggaaactttaagtcagcaaattggtaattcttctcaaattagtccataaatccaatattattccaatcaaaatattaacaggccaattttttgtggaatttgaaacactgattacaaaactggaaaag

SEQ ID NO: 916743 - DNA, 640 bp, Homo sapiens
ccaagtttttcaaccataaccataaaccagttagagcattttaatcacagctagtccttggcatccactgtccactttctggccctatggatttgcatattctggtcaattcatgtaagttgaatcaaataatatttggcttatttcacttatcaagatgttagaaaggttcatcaatgtgtagcatgaatcagtacttcgttcctttttatagttgaataatattccattttgtggatataccatattttgtttatccatttattagttgatgggcatgtgggtttgtttccattttttggctaatgatgctgctatgaacatttgtgtgctagtccttgtgtggatatacatgttcttatctcttgggtatatatctaggagtggaattgtgatggtattaatattaatagtagtatttactactatttcataattcacctgacaattagacagttacatagattcctatggcaaaacaaagtaagtaacttcagatgccccttaaaggagcattcctcaaaacaacataaatcagttagctcttaaaaaaattaaaagattcctatgggaaccatctttaatcacargatagatcatttaaagactttttgcacatcacttttgggagaattcaaaa

SEQ ID NO: 916744 - DNA, 495 bp, Homo sapiens
gtttcaagatacaaaatcaacacagaaaaatcagaggcacttctatatgccactgatataagctgataaatgaattaagaatgcaattccatttacaatagtcccaaaaagaaaatatttatgaatacatttaaccaaggaagggaaagatctctatgagtagaactacagaacattcttgaaggaagtcacaggtgacacgaacaaataaaaaaaattcctcactcatgcataggaagaattaagttcattaaaatgacagtactacctaaagcaatctacaaatacaatgcaattcctatcaaattaccaatgccatttttcacatagttagaagaaatcattttaaaattcatctggaaccaataaaagagcctgaatatctaagcaatcctaggcaaaragaacaaagccagaggtgtcacattacccaacttcagactatattgtaaagctgcagtaatcaaaatagcatggtactggtaaacaaataga

SEQ ID NO: 916745 - DNA, 607 bp, Homo sapiens
taataatagtctctaccttctccatccaatcatataccacctgaccaatactccctcgaccaaaatactcaaattttgaaacaggaagaaaagattccagacagtgtatatcagcaaatttaatgttgcttttaggggaaattgtagcacaatattatacagatggctcctgaaatatgcttcccaggagcaagtagttgttcactaataatgagccatggcaaactagctcatttcctagtttgattttgttttgtttcattttgttttgtttttgtttgtttgttttcggtttttgagacagagtctcactctgttgcccaggctggagtgtagtggagtgatctcgactcactgcaaccactgtctcccgggtttaagcaattctcctgcctcagcctcccaagtagctgggatttcaggtgcccatcaccatgcctggctatcatttcctattttgggtggtgatagcaaattcaatgtaacctcctcgatgcaacccccaatgaaccagtcatcatgttattcactttgtgtggtctccccccacattkaatcaggactgaccctttgtggccaatagaatatggaggaagtgatagtgttg

SEQ ID NO: 916746 - DNA, 621 bp, Homo sapiens
catgtaggctatatggtgtattagaaagaacactggtcttcaaaagtctgagcccaagtcttactactgtcacttattatgttaaccatatagtcttctattttttcataatacttatcagaattttaattttgtattttgatatttatttgtttagtgtttgtctttctcattagaaggtgagccccatgagtgctagagtcatatcttgtttgttccccattacaactccaacacttacaatgcctcacaagaagtaggcactcaacacttatccattgaattaataaattagtaagtcacgactgctctagttttccattttctcatccataatggagacattacttacttccagtagttgtgaggaattgagacaatgtgtatgtaaaagagacaatgtgtgttttgtaaaccatacacaaaacattattaatgatggtacttatgatgtgtgcttgataataatatctgtcttttattgaggaacctattcagtggtaggccttttcaatgttttttytatttcattgttatcgtccttcatataggtaggttggtattttatccccattttagaaattagaagattgagtttacaaagaattacggccaactaca

SEQ ID NO: 916747 - DNA, 635 bp, Homo sapiens
tactgatacagtggttagccgtgccagtgtcttggggacaagccttatggatcccagtattgcagaaaaaccakgctcagtgcagttgttacatttcacaggacacactttgacctgtgatgtagccaggtttttagttacaagctccatcataacagggctctgttgtgttttgtacagttcaataaatcaatttgaacagatacatctcttgttggaaagaacttagatactttttttttaatgagggagcaagcatttgaattgaaggatttgaatacaaattgaagtatattcttacatgtcttagagattatatgattgcaaaaaacaggaatcttcacaagttaagcctagtaaaggagaatgcattttagggtaaaggaagtctcatggaaccccaactcatgggggattagaaattgtcaggcagctagctcatctttccatctcttgctctctgtagcaacacaatctgtcatctctgcttctttctgcacagcggctcgatcctgcattctacaaaatggcttcctctgcctggctcttaatttctacttccccacacctccagctcagctgtagctttaggttgttgttgcacctattctggccctaaatgtttttgacctaat

SEQ ID NO: 916748 - DNA, 587 bp, Homo sapiens
tccaggttaccttgtgacagtctatttaatttctggtccctggagtgtctctatttcaatagtacatgcatatttcttttattagaactgcagaaggggaaaattggtaactcttggaaccaggatgacctttagaagattacatttttgttttgttttgaacaaataacacaagttctacaagagggtttgctctagtcaaacactcaacttcttagagggaattttaaatgtctcctatttggccttggaggaaaaaaggaagaaagaaataaattatacttgcaatacaacagagagtgcttagaaaatgggtttaaaatatattacaatttaaaaactttttaaagtaaaacccaagccataccagagacagacagtatccatagagtgaccaagactgacccacataagaggctggagaattacaaaagatgatcatcagacagatgcccattgctctctggggaatcttgaccttrgcatgttggtttctgaattaattcagagaacctaatttgccaatgtggaaaagtcacataatacatggtatcttatttataaataaaaatccagatggaatttct

SEQ ID NO: 916749 - DNA, 590 bp, Homo sapiens
  misc_feature 474: n = A,T,C or G
aaaatgaacacatttgattattttctgattatyagaaaccaatgataaaaggagaagaaaaatctctcttggcagatatgaattacattcttttctctttctctctctctctctttttttaataaaccatctcttactggggaagaagcttgtattcaatattgaacactagcattttagagctggaaggaacaccatatattatttagttccacacttcattttatagttaggaaagcaagaatctgagaggctatatgtgttggccaaggtgaatgagtagcagtcaggatacaacccaagtcttctgactccccagcttttgttcattacactaggccacactatcttattttatattttttatgtgataataccatttgtaagcactaactaagcactctatgtgtagtaactcatttaacccttatgataaccctttaagataactactattgttgttattcccttttncatatgagcattttgaatcccagagaggtaaaacaacatttccaggatcacccagctaggacatggtgcagggatgattcaaagccagccagtctggttccagagtctttttatct

SEQ ID NO: 916750 - DNA, 613 bp, Homo sapiens
ctttttttttctagagcttgcaggcatgattcattgttttttattctttttttattttgtctcctccgattgtgtaatttcagcctgtcttcaagctcactatttctagtgatagacaaattctgctattaagtgactctgatgcattcttcagtatgtcaattgcattttccaactccagaatttctgctctactctttagttatttcaacttctgggttacaattctctgaaagaattcttaattccttctttgtgatatctttaatttctttgaatttcctcaaaatagcaattttgaatcatctgtttgaaaggtcacatgtctctgtttctccatgattggtccccaatgccttatttagttcatttggtgaggtcatgttttcttggatgatcttgatacttgtgcatgtttgttggtgtctgggtattgaatagttaggtatttattgtagtctttgcagtttgggcttgtttatgcccatccttcttggaaggtgttytaggaatttgaatggacttggtccccaagcccaatattgttgtggtttttgcagattcatagaggtaccatcttggtggtgttggttaagatctggaagaattctct

SEQ ID NO: 916751 - DNA, 590 bp, Homo sapiens
tcatttgattcaagtttcagaatctggccagttttaaagattataaattttgcttaagccacaaatatccacttcctcttttaagggagagaatctatttttctccctgaccaagatttgaatgagagaaaaggttataaaaactctaatgagtaattcaacacaaaaccttaacatcagagaaaagtgaaaatcacaactccgcaatctccagagaataacaaataaaatttatgccttaaagtagacttcaattccaaacttgtcaagttaggaatgtgtatggctcaaataaagtctgaattctcagccaagctagaaagatgcagatcctgagaggggcctgcccagtgatccctgttgacattggcgaggtcaggtcaatgaaagtcattcatgacggtaccaaggcttcaattttcagtgaagtgatagggattgctggaaccccactttgggtcccataggcatcaccaaaatgtcaatcctaaataatgaaattcaaaaatatgattaagtacagagtttatgtgagcccaaagcttgagcatggccacctggggagcatakattcaagattccctaaatat

SEQ ID NO: 916752 - DNA, 594 bp, Homo sapiens
atcatggctaattgaaccagatgggaaagcttgatcacaattacttaaataagaatatttccccagggaatttggaattaggatttaacattagtcagtctccagttggaaatataaaatgtacattaggagctgaagggcagccatagcttcctgaataggacaagcagaaaatgcctaactgaagagaaaaaagagaacaaaatagatgagcagatataagcaaagatgagagagttggattaacacttactgaaggcttttccagctttggatccagtctccttctgagtcctgggtaaacccttgcccttcagctcagtaaggcaattacttatcctcacattctatttctacgttttttcttgcctaatccagttagatttggtttttgctacttacaaccaaaggatcttagttaatggaataattgatatcagggatgaggatgcaatttccagcatgtggaattacttgaagcaagatgaggtgaagcatagtgagaactcctgcttctctagctgggaagtgagccatytatgtaaagagctaggaaagaagcattttagacaattgtctctttcttcttgatac

SEQ ID NO: 916753 - DNA, 632 bp, Homo sapiens
acaaatgagacttaattaaactaaaaagcttctgcaaagaaaaggaaataatcaacaaagtgaacagacaacatgcagaattgaaaaatatatttgtaaattattcatctaaccagatactaatattcagaatatgcaaataactcaacaaaaaataataattccattaaaagttggcaaaggacatgaatagattttttttaaaataagaacatacatatgaccaataagtatgtgaaaaaaatgctcaccatcactaatcgtctgggaaatgccaatgaaattcacaaagagatatcatcccaccctgctctaatggctgctataaaaaaacagaaaagatgtttgtgaggatgtagagaaaagggtaagcttttacaccgttggtgggaatgtatattagtacaacatttatggtaaatagtacggagatttctcaaaggaaccaaaaatagaactaccatttgctccagcaatctcattactgcctatctactcatgggaaatcatwacatcaaaaagatactgcacccatatgtttactgcagcactatttgcaatagcaaaaaaacggaatcaacctaagtgtctgatataattgggctctgtgtccctactcattcatgttgaat

SEQ ID NO: 916754 - DNA, 600 bp, Homo sapiens; identical to SEQ ID NO: 909613

SEQ ID NO: 916755 - DNA, 600 bp, Homo sapiens; identical to SEQ ID NO: 909614

SEQ ID NO: 916756 - DNA, 665 bp, Homo sapiens
tgtcttttgcctaccttttagagaggttgtgttttacttgcgaatgtgtttaatttacaaatttacaaatttgtttaatttacaaacatagattctggatattaaacctttgtcagatgctgatacagtttggctctgtgtccccacccaaatctcatgtcaagttgtaatcctcagtgttggaagagtggcctggcgggaggtgattggatcatgagggaaaatttcctcctttctgttctcatgatagtgagtgagttctcacaagatttggttatttaaaagtgtatagcactttcccccttttctctctctcctgctccaccatgtgaagatgtgtttgcttcccctttgccttccaccatgattacaagtttcctgaggcctccccagccttgtgtcctatacaggttgcagtactgtgagtcaattaaccctcttttcttcataaattacccagtctccagtatgtctttttggcattgtgagaacagactaatacagaacactggtaccaggagtggggcattgttataaggrtacctgaaaatgtggaagtagatttgcacctgggtagtgtgtagaggttggaacagtttggagagttcagaacaaggcaagatgtaggaaagttcaaaacttcccagagacttcttaaattgctg

SEQ ID NO: 916757 - DNA, 451 bp, Homo sapiens
catcaccagctctttttatctcttgtctttttgatcatagccattttaacaagtgtgtgattatatctcattgtggwtttactttacatttccttgatgattagtgatcttgagaatgttttcatgtatctgttgcccattgttgtatcttctttggaaaaatgcccattcaagtctttcacccctttttaaaatgggttattttgttttttcttctttttcttttttctttttttttttttttttttgctattgacttgtaggagttccttacatattttagatattaatcccttatcagatatatggtcatcaaatattttctcccatacggtaaactgcctttttcttttaattgtttctttctttatattagatttggtttttattgtaaagcatgcatttcagggcaaagtgccgcacacacaactacaaatcatttttgggaaaa

SEQ ID NO: 916758 - DNA, 570 bp, Homo sapiens
atagaatcatttttgaaattctgaaggaaaaaaatattgtacattatatacataatttacgtatgtatttaaagagagagtagcataagagtttgctgagtcatgtaacataagtttagatgtcagccctctggagatggtatggcctcttcatgacgctgctggagatgatatccctgcttctctgtcctggcttcacagtcacttactgatcccttagcctttaccctcacagggtcctggagtccaagatgactgtgggaactggagggcagcaggggaaagaagggaacacaatgatgccctgctagtggatgcccttccctaggtcccattcaacaacttcttctgtctccttggccagaaagccacatgactatccctgcttaagggtagatggagctattgagctggacaccctgatgtcttacatataagtgtttttgtttttcaccaaggatgaaagagagaatgstatctgtggtcacctacccatttctgccattgaggggcaataatagatcaggcaaaagattcacagtcattccaatattaatatcaaagaagaat

SEQ ID NO: 916759 - DNA, 572 bp, Homo sapiens
ttgggagctgagcttaatgagaaaaggccattcctaactgctaagctaccrtattaaacagtggcaagtaccttggaaaataaaacagaaaccactgcccatctttttctaacggagaaagacaagagatggcttgaccagagtggagatttagaacttcaggtgctgataaatatggtaacatcatggggtgctttggcagctggatagattttatttattcagggctcctttaagccagaggagattcctggaggctgctaaaatagaatgctccacctggatagttaacatctggattttattttgtttcaaaaagttaattacaaatagttcgaattccttctggtatccctctgagaagagtttcttactgggtggctcacaagcggggagacagaaagggaaaaaaactagattgatattgctcaggagaaacaggattgtggctacacgtgagccatgtatgcaattttgaattttcccatagtcatgtttaaaaaaacgaggaaaaagtgaaattaattttaatactaaacccaatatgtataaaatatgaccatttcaatatg

SEQ ID NO: 916760 - DNA, 586 bp, Homo sapiens
cccactgcctaccatcatttgacccctgagcctaccctccctaggttactcataatgattttgccctctagtggacattcggcaatatctggagagatttttcgttgtcacaatttgggtggggtgggaaatgtacactactactgggcatccagttagttgaggctagggattttgctaaacaacctacaatgcacaggatggcccccagaaataaaaaagcatatggccccaaatgtcaagcatgccaatattgggaaaccctgccctagaaggatatagacaagcccgagaacatttttgacgagtacaaactctttaataactagttagggaactggccccaagtcctgaatgactgtcatagattcaacaggaaacaaactaatgtcacatctagctgctgcagagatgtcccagggccatgacagcttcttagtcactaggtccacatgccccaggtgatgtccaaggctcctccatttgtgtctcaatctggttcaggtctaactcctctccatccttccacctgttagctaaaacatacatgtacccccgawcaacacagcttacagtcatcaaaggg

SEQ ID NO: 916761 - DNA, 575 bp, Homo sapiens
tgcacttaataagatgcgaggcaccacgctgagtgctttctagacatcagggtatttgagacttatgtttgcccttcagggagaatattctgatttccattattcagatgagaaaaataagcctctgaaaggccaactcatttgcccaaattcatagaactactaactgagaacccaaagcagaaactattaatggtgacacgattttctctctgaagtttcagttcatgtctattggaataggcattttcattaacctcttcagcagtagctcctggtagatttgctattgggtttcacatcacatggaaccaggtttgtgaagaaggtgtgaaggttgaggagatatctgagtcagaagaaagcattcatccgaatgactcatagtttgcagtcacagaaatgtagtcaaaattcctcgccaacagaattagatcctgtgtctttaaaacccttctcatcttcccaaattccaaagtamtgaacattcagatgaaactccttaagatatgaggcagataattcctttttgtaggaagtatgtactggtgatttttgaagaaaggcggcctccc

SEQ ID NO: 916762 - DNA, 641 bp, Homo sapiens
ccttggctatcaccatgagaacattcttgggctcacctttgggaagatgagagaaatatggttgttcagttactccaaccagaaccatcctagagtagctgacaagtagrcaactcttacatatgtgggcaagtccacacagctgagtccagacagagtcagaagagctgcctacctgaacatgacagatgtgcaaatgctaaatgctattattgtatgctactgaggttttgtggttgtgtgttacatggcattattgtgaccatagataactgatacagccaatgactatagttggtgtgggaaagggacatttgcagagttgggaaaacacccaggagtttcatgccctatggctgtggcactcacacctgaatgagtctctctgcttcccttcttgtcttgctatagcaggtgctattttcctttttccctaaagttttaatttttaaagttgaagttatacctttatcaaagttgagagggagactatagcatagtgtatattcttgggttcacaaatagcatttgcaggatctataaactaggatgggaaaatactgcatttttcttttcactaatgtctccccacaatttactcttgaatacaggcagccgaataatacatggttgtgttagca

SEQ ID NO: 916763 - DNA, 640 bp, Homo sapiens
agttatccacattagggaaggaaaaataaattacatattaaaattgcagtgacatgggtacctcttcctgtaattcactgggactaaaatcactggattatcaygttagttcctctctagcaacttgtgtttctgttggtgtcatgctgagagaaaggtagaaatgcctgactatattttaaaggttaaaatttcatactcagaattgtaaaattaggagaataaaagtatcaaacttatctttctagagcagttattgagaataataattctcttaaaaatatatggactggagatatatttattttcattaagaaactttattaaagttagtcaaacacctgagtttttaaatattggactttgagaatttatatactgtgcaccaactttgttggatatgagaacactgtagaagtggacaatttattctagtaattttgatcaaatttatagtctgttatttatatataaggaaattttttaatgtcactgtttagaagaattgcatgaaatcatttggttacaaataaaacgtagtttaaaagaaaaataaatgagcagaactgaaggcagaaacagttctacaatattaggtagagacttcaatactgtgctttcaataatggacagaacaacc

SEQ ID NO: 916764 - DNA, 580 bp, Homo sapiens
gaatctttggacaaagtgaaaaacctttttgatgaaaaagagcaaggtactagtgaaatcaccagttttagcmatcaatgggcaaagaccctaaagtacagagaggcctgtaaagaccttgaattagcatgtgagaccattgagatcacagctgccccaaagtgtaaagaaatgcagaattctctcaataatgataaaaaccttgtttctattgagactgtggtgccacctaagctcttaagtgataatttatgtagacaaactgaaaatctcaaaacatcaaaaagtatctttttgaaagttaaagtacatgaaaatgtagaaaaagaaacagcaaaaagtcctgcaacttgttacacaaatcagtccccttattcagtcattgaaaattcagccttagctttttacacaagttgtagtagaaaaacttctgtgagtcagacttcattacttgaagcaaaaaaatggcttagagaaggaatatttgatggtcaaccagaaagaataaatactgcagattatgtaggaaattatttgtatgaaaataattcaaacagtactatagctgaaaatgacaaaa

SEQ ID NO: 916765 - DNA, 643 bp, Homo sapiens
ggggaggagctagcagagatgtcagctgaggagtggccaatggggcagatggaaaatcaggcaactgctgagcctcagaagccaagaaaaggcttccaggaggaggtggggtgatcgatcatgtcaaggtcttaggaaagatagggttgccattcaaactgggatgcttttgagagttgctagagataattaaaataatacattttctgaaatattatgtattgcctgacaaattagattgttggccaggcacgatggctcacgcctgtaatcctagcactttgggaggctgaggcaggcggatcacaaggtcaggagttcgagaccagcctggccaatatggtgaaacctcatctctataaaaaatccaaaaattagacagacatggtggtgggcgcctgtaatcccagctactcaggaggctgaggcaggagaatcgcttgaacccgagaggcggaggttgctgtgaaccaagatcgtgccactgcactccagcctgggtgacagagcgagactctatttcaaaaaaacaaacaaacaacaaaaaaattagtttgttatagtgrtggacctataaatgccagcatttttctaaaaactttttttcttaagtttggtcttactattcttacttctttgataa

SEQ ID NO: 916766 - DNA, 631 bp, Homo sapiens
tgggcagcatggccatttccacgatattgattctttctatccatgagcatggaatgtttttccatttgtgtcctctcttatttccttgggcagtggtttgtagttctccttaaagaggtccttcacatcccgtgtaagttgtattcctaggtattttattccttggtagcaattatgaatgggagttcactcatgatttgactctgtctgttattggtatataggaatgcttgtgatttttgcaccctgattttgtatcctgagattttgctgaagttgcttatcaacttaaggagattttgagctaagaggatggggttttttaaatatacaaacatgtaatctgcaaacagagacaatttggcttcctctcttcatatttaaatactctttatttctttctcttgcctaattgccctggtgagaacttccaatactatgttgaataggagtggtgagagagggcaaccttgtcttgtgccaattttcaaaggaaatgcttccagcttttgccccttcagtatawtattattaactcaagatggataaaagacttaaatgtaagacctaaaaccataaaaaccctagaagaaatcttaggcaataccattcaggacataggcatgggcaa

SEQ ID NO: 916767 - DNA, 672 bp, Homo sapiens
aagagaagatggcaaaaactcttttggacactggcctaggcaaataattgatgacgaagaccccaaaagcaaatgcaacaaaagcaaaaataaataaatggaacctaattaaactaaaaagctttggtacagcaaaagaaataatcttcagagtaaaaagaaaacctacagactaaggaaatttttgcaaatcatgcattcgacaaagaacaatattcagaatctacaaggaactcaaacaaaacagcaagaagcagccaaataatcccattaaaattgggcaaatggcattaattgacacttctcaaaagaagatatacaaatggtcaacaaacatatgaaaaaatgctcaacatcactgtattagttcattttcacactgctgataaagacatatctgaaactggaaacaaaaagaggtttaattgaacttacagttccacatggctggggaagcctcagaattatggcaggaggcaaagggcactacttacactacttacatagcagcagcaagacaaaaatgaggaagaagcaaaagtggaaacccytgataaacccatcagatcacctgagacttattcactatcatgagaacagcacgggaaagacctgtctctatgattcaattacctcccactgagtgtctcccacaacatgagggaattttgg

SEQ ID NO: 916768 - DNA, 638 bp, Homo sapiens
gtaaggagcagtttggaagttagtggtttagagcaggagtcagccaaatcatactcacccctatttttgtaaataaagttttattagaacacagctgtagctatttatttattatctatggctgttttcayactacaatggcaaagttggttagttgtgtccactgggcctgaaaaacctaaagtatttatcatctggccctttacagaagaagtttgccaacaccaggttcagaagtacagctacaaaactggaaatgtgagaactggagtctatacctggctctatcactgttaggagaaacaaaaataggatatgtatgaattactaactgaagtgtaaagtgattcacaaatacagggtggcatatgattagtaattaatctgtgaccttaagcgatttatttaacctttttgagccacgtaccacaatctaatgtgtggaatgttaatatttatcctaagcaatcatatgaaaacatgagaaaatgtatgttttgaaacattaaaagggctatgagatagggaagtttcatttcactctccattaaaaaggatcctgaatcagaaattctctctctctctcagtattccatattccatgtgattaaaaacaaaatatacaggactacaaacat

SEQ ID NO: 916769 - DNA, 756 bp, Homo sapiens
tgtgtaatttttctatatcattttaattgcatttatttaattaataacagttaatagartgtttaattgtttacatgtgcaccacacactttaataaacactttgcatagtttcactcattcatttctgacattaacttcatgaaaatattattgttaacacttagaggtgaagaaattgaagcaaagaaaggttaggtaagctgtgatagattgcatacattctgattctagatccaaacatctaaatcaatgttatatattctattgtcattactttttaaagtaaaacttgatttcatgtttattattttattttcttttttaattgtcaattcatgttccttgcatgtgtttctctagagagtaaagagttcgttttgatgtattataaacctttatatataaaatatattgccctcacttctcacatttgtttctagtagtttttctaccttgctattttctttgtgacttagttcaaagaaattttattactaaaatatttaataaggtcaaaactgatttaatacttacaaatgtcttacctatttcaagatcaattagtcattaatctcattttctctattttaatatttagcattagaatgtatttacttcaatttttataatattaaaaatgttaattcatcttcagtttactggttacatatataaaggggggacttaaatttcctttattccccccaatacatgctatgttagattcctattcctgctgtaaaaaattgctaca

SEQ ID NO: 916770 - DNA, 669 bp, Homo sapiens
tgctgctgtaaaacgtttgtgcacaagttgtgtagacaggtttttcaatttgctggtgtatataccaaggagtggaactgctagatcattttgtagctatatgtttaactttgtgaggagttaccacgctgtttttcaaagtggttgcaccattttacaattccagcagaagctatgaaggttctactttctccatatccttattagcacttttctagtctgcttctgattttagctatcctactgggtttgaagtagtatctcattgtgcttttgatttgcttttccctaatgactaatgaagttgagagtcttatgtgtttattggccatttatatatcttccttggatacaagtctattcagatactttgctcattcttttaatagcaaccaaccttgtttcctggaaatttgctgaattcacctattacttcttccttcatgtataaaggctgtactttcctgtttctctgtgtgccctataattttgttgaaaactcaatgtttaaaataatatggcaactctggaaatcagattctcccccagggtttgttgtttctctttgttgttcttgttgctgctgctgtttgtttgtttaataacctttcagaattaattaygttatgtctataattttttctaatttttgaaacagggtctcactct

SEQ ID NO: 916771 - DNA, 669 bp, Homo sapiens
cctcactcttgcaaagggactatgtgttaatatttatactgactttaaatatgccttccatatcctgcaccaccatgctgttatatgagcagaaaaaagtttccccactacacaaaggtcctycataattaatgcctccttaataaaaactcttcttaaagctgctctacttccaaaaaagctagtcattcactgcaagggccatcaaaaggcatcagatcccatcgctcaaggcaacacttatgctaataagataactaaaaaagcagctagcattccaacttctgtccctcactgccagtttttctccttttcattggtcactcccacctactcccccgctgaaacttccacctatcaatctcttcccacacaaggcaaatggttcttggaccaaggaaaatatttccttccagccttacaggcccattctattctgtcatcatttcataacttcttccatgtaggttacaagctgctagcccgcctcttagaacctctcatttcctttctatcgtggaactctatcctcaaggaaatcacttctcagtgttccatctgctattctactacttctcagggattgttcaggccccctcccttccctacacatcaagctcagggatttgcccctgcccaggactggcaaattgactttactcacatgcc

SEQ ID NO: 916772 - DNA, 586 bp, Homo sapiens
cagcagtagactccacaacacccatggatactcaagctggcagggagagcttcttagagaagtggtaggggcagaattccagcctgtgcgaagcccagggggtttggtgtggagggrtctgtaatggagcacagccagggatgcctatccctcaaggctcacctttctcccttagcagactttagccttagtgaaactgctggacctgaacagtgatgggtggtatttcccatgagagagggccagtctgacctaagcaacccttggtcttctggcctctcccaaggccccagtctagctgtgcctgcttgtagtgtacccttcgatgcccaggcagggtacatcatagctcctgcactgacagatcatacttgagcacccccatggatatgcaccagcccactcttgccctccacccacagcagcctccctggagctgctttgtctgcacacattcacccatgaccaacccccacatcactttgtcttcacgtgtggttgcgggtggacttggctcctattccctgacaatgcacatgtgcgtgtgcacctcccatgccctcacagctccccacatgagtgcaca

SEQ ID NO: 916773 - DNA, 656 bp, Homo sapiens
atgttgctataataagtacctgaaactgtggaagtagctttggaacttagtaatgaagagaggctgtaggagtttggaggtgcatgctagaaaaagcctagattgctgtgagtggagtgttaaggctaaatctggagagggctcagaagaagacagctgtagagggagcctaaattttcttagagattatgtaagtggtcctgatcagaaatatggacagcaagagccattccaatgaagtcttagacaggaatgaggagcattttattggaaactggaggaaaggccattcttattccaaagggtcaaagaacttggctgaattgtgtctatatcctagtactttgtagaaggcagaacttaagtgtgatgaactaggatatttggtaaaataaatctctaagcaaagtaatcaaggtactagatggcttctcttgactgcttatgctaaaatgtgagaagggagaaataatttaaagacagaatttaatatcaaaagggaagcagaacttagagttgaaaaattctcagccattaaaaaatgagaaaacaygttcaggagagaacaccagggatgtggccaagtaaccccttaatgaggaggttagtatggatagtaggaaggcagaagttatccatcaagacaatggaggaat

SEQ ID NO: 916774 - DNA, 622 bp, Homo sapiens
ggaatttcaatcatatgcttgtcccaccattgtattttggaatcacataacttgtttgattccacaggctcattgctagagagggaattttcctcagaatgaatcatacctggaatctcacccatatctgatttagattatatttagatgagactttgaacttggactttaaagttgatgctggaataatttaactcttgagggtaagtggatgaaataaatatattttgtatgtgaagaaggcatgaattttggggttccagatatggaatatggaaactcaaaataaaattcaaatgccccccaaccatctgaaaagacttcctcctcagccaggacttttttaaaatttaacctgagagactgtttcaggccatgatgggaagtgggaattgaacatgcttcattatacctctccaacattaacatcaacacagactaagtctgataagaaacttttacaacctattctctctaaagcctaatacctaaaggtwtcctcagcaaacaagaacttgggactctataatcctttatcttaacccaggcattcctttctattgatcccatgtctttagataaacttaaccaatggtcaaccagaaaaaatttaaatctacct

SEQ ID NO: 916775 - DNA, 591 bp, Homo sapiens
atatataaagaaaatattagtaaatctgaagggagtaataaacagcaatacaataatagtagggtagggtatttyaataccttattttcaagtaatggatagatcatcctaacaaaaattcaataaggaaacactgggcttgaaatgcacattagaccaaatagaccaaacaaaaatacacaaaacgtggaacccaacagaaacagagtacattttcctcaagtgcacatgaaacattctctgaaacagattatatgttagaccacaaaaaaatcttaaagtgctaaaatgattgaaaacatatcaagcatattttctaaccaaaataatatggaagtacataaatatatataccaactatgtacccacaaaaattaagaattaaaaaaaggaagagaatggaagacactgaaatatgcagaaattaaacaacatgttcctgaacaatcaatgggttaaaaaagaaatcaaagggaatatttaaaaatatcttgaaacaaataaaaatggaaacacaacgtaccaaaactcatgaagtccagcaaaagcagttctaagaggaaagttatagtaataaaagtccacctgaag

SEQ ID NO: 916776 - DNA, 639 bp, Homo sapiens
ggaatgtcatgaagcatacacaagtatcaacagccaaatcaaccaagtggaagaaaggatatcagtttgaaaaccaccttgctgaaataaggcatgcagacaagatcagagaaaaaagaatgaaaaggaacaaacaaaacctcggagaaatatgggactatgtaaaaagactgaaactacaattgattgaagtatctgaaggagacagggagaatggaaccaagttggaaaacacacttcaggatgttatccaagagaacttccccaacctagcaagacaggccaacattcaaattcaggaaatacagagaacaccacaaagatattcctcgagaagagcaaccccaagacacatgatcattacattctccaaggtcgaatgaaggaaaaaatgttaagggcagccagagagaagggccaagtcagctacaaaggcaaacccatcagactaactgtgtacctctcagcagaaatgctacaagccagaaaagactggggaccaatattcaacattaaaaaaaattcaacccagaatttcatatccagccaaactgagcttcatgagcaaaggagaaataaactccttttcagacaagcaaatgttgaaggatttcrtgaccactgagcccgccttgtaag

SEQ ID NO: 916777 - DNA, 517 bp, Homo sapiens
taaaacaaggtactgagtgctcatctgatttttccttcttatgaagttgcttttttttgtgtgtagagagttgttaaattgttgtccttgggggagggatgatcagtggagccttctattccagcatcttgctctgcccccaccatcaatgtcactaagattttaggaagccttaactagctaaactccatatgtttttcaaatatatgcaaacagggtggcatgtacatgattattactgggggagaagggtttaattttcagcttatggaatgggaagtttggtaagagagattatttcttgatgatgaggtgtgtgtaaatgctggaatttagctgtcaagcattctcaatgcagtcaaaaaacagcaaaattttccattaatctggaattctttaaatttggttctctctgaaatcagattagtaaattgtaagaaattagatttttttstactctgtaaagttaccattcagtttttgttcttattgaaataagaaacaaaacagctgaaga

SEQ ID NO: 916778 - DNA, 644 bp, Homo sapiens
cttcaccctaccaaactcaatcatcccaggtcgactccagacttctgcactggctgtgagaatttcaagccagtggttcttagcttgctgggctctgtgggagcgggacccactgagcaacactgcttggctccctggcttcagccccctttccaggggagtggatggttctcctgtctcgctggagttccaggtgccactggagtatgaaaaaactcctgtggctacctcggtgcctgctcaaacagccacccagttttgtgcttgaaacccagggccctggttgtatatgctcacaagggactctgctgatctgcagattgcaaaaatccatgggaaaagcgtagtactcagggctggcagcacagtccctcactgtttcccttgcctgggggagggaggtaccccagctccttgcgcttcctgggtgaagtgacaccccatcctgcttctgcttgctctccatgagttgcacccactgcctaaccagtcccattgagatgaactgggtacctcagttggaaatgtagaaattacctaccttctgtgttggttttgctgggagctgcagaccagagctgtttctattcggccatcttggctccttccaaacakacacaattcataaacatacttatgagtta

SEQ ID NO: 916779 - DNA, 565 bp, Homo sapiens
tctgcctttttggggagtttaagctcaattgaattgtgtttctgtgacttgcaaccaaacagctcttatacatccacatgccaataagagtcatagtaattctatgtagtccaaaacrttggttgcctcataagatttttttctgagtcagttagctccattttatagatgaggaagctgagacacagaaaagttaaatgaatttcactaagtcccacagctattcagtaggaaagcctggaatctgtgttttcccctaccccttgctactaaatattgttaatttcacccctacaatacatcttgtagccttcatttcctttctgtcccttctgtcacctacctagggcagggcccttcacctctttcctagtgtatgacagtaatatcctcactagtttccctgcctcccaccgtctccaatctgttgtttcccaatcagtactcctaaaacattctctctggttgtgtaatttactcaactaaaaaaatctttgagggcttcctattgcctactcaattaacttgttatcctggcattcaaaatctgagcataatcaacctt

SEQ ID NO: 916780 - DNA, 588 bp, Homo sapiens
ctcatctggagtcacgcatgaatgtgtcaagcccacacgttctctaaagataattggtatgccctggtcattcttgcataattcaggaattccaggcttgtgttttctcacacaacattgtcaacgaagggaaayagaagaacaggggtctctcttttttggggggactatcttctggggttgcaaaagaggagataataaaactaaattcaaaccaagctgtcatatttagaaccctgatgctttaaaaacccaagttcctatcatggtctgcagctttctcagaaacagcagaagaacttttagtcagtacttggatgaattgcagcatgtgttgcgggagaaaaaagctctaagtcatgtggtgtggctatgaattttagaaacaaatacatgtatgcaaaaattaagcttcatttctctaaagcttaacttagctcttatgcctcctatttctattgaagacagaaaatgtaaccttaccaatacaaggtaaactgtcgtttctgtgtttttccagtctcttttaagtaaatacttcgaccaagcttgtccaaaccacggcctgtgggccacatgcggcccagg

SEQ ID NO: 916781 - DNA, 637 bp, Homo sapiens
aaaatgatgcggcaagtgtagtcaggagccctaggccctgtccctggctctgcgctcatttaaggaacayagcagcagttgtgctttcaatatattttgattgagaaaacaacaaactgcaagcagctaccatgtcttgggtagttcttttaatttgtatattagtagtaataaaggttaatatatacagcacttactttgtaccagggactgttctaaggatttttaaaaaaatatttaatataaggtagacaacaacgttttgaggtacatgctattattatattcatttcccagacaaggatgttgaggctcagagaagttaagcaatttgtctagcatcattatacatacatacaaagcttgtatgttctagatggagaatctcaaaccatgcagtctggttccagagcttattacttatcctgccatcacaagagtatgcatatacttgtgaaaaacaggagcacatatacaggccatattaatcatttagtctatagctaaaactaggtgtgcatatttagtaccttaagcattaatgacacccccataccctcagggtgcatggctcctgtgtcttgaagcctcttcttaatgaaaagcaattgcttcttaatgaaaaggaattgtcatg

SEQ ID NO: 916782 - DNA, 623 bp, Homo sapiens
atagcctttacagtagaatcagttatagagcctatcataagggatacatttctaattattccatcttttactccacaccatggaaaaaagcacttaacaaatgatgcctttctagaagaatgaaggactcccggcaatgttgtctttaacccatgatgtagattaaaaggagtgaaccaacattctgtttctgactatcaggcaacgtatgtaccattaaagttattcacctacattgggccttcatttttcatctatcaaggcatacggttatccatgtataaggctggttatccatgtataaggctggccatttttttttctggggagaaacttccctgggtagctttaccttaagggttctaacgggtgtatagttccataagtgtggagcaaccctccctcagttgtgagattataagcccaaggttcaatgtcccttagctttgctgcagtgtggatggcaaaggaagtccttctctgatgttctcggaagatccagtctttgagttmtagattgtgaaggggttgattgtcttcagttagtgaaccgtaaaaatcttttattcctggtgaaaatacattgtgacgtaataatctgttataacatcacccttctcgca

SEQ ID NO: 916783 - DNA, 663 bp, Homo sapiens
ccaaaagtatgatttattatgtaaatttaaaggaatgggccgggtgctcaagcctataatctcagcactttgggagaccaaggcgggcggatcacatgaggtcaggagttcgagaccagcctggccaacatgtgaaactccgtctctactaaaaatacaaaaattagctgggcgtgatggtgcatgcctgtaatctcagctacttgggaggctgaggcaggaggatcacttgaacctgggaggcagaggttgcagtgagctgagattgtgccactgcattccagtctgggtgacagagggagacttcatctcaaaaaaaaaataataatggtgatatgatttggctctgtatccccacccaaatctcatcaggaattgtaatccccacatgtcaagggagggacctggtggaaggtgattgaatcatggagatggtttccctcatggtattctcatgatagtgagtgagttctcacaagagctgatggttttaaagtgtggcacttccttgctctctctctctctttcctgttaccttgtgaagacgtgccttgtttccccttcrtcttctgccgtgattataagtttcctggggcctccccagccatccagaactgtgaatcaattaaacctactttctttataaattacccagtctcaggt

SEQ ID NO: 916784 - DNA, 606 bp, Homo sapiens
cttccacgttgaaattagaaacaatatcagtggcggcttgtacaccttctgtgatatttaaagtaatatcatcctcttccctccaggatcatgggaataatatccttgggcggtgtacgttttctgcgatatatgtggtaatatcatcccctttgccttggaatattatgaaggaccatctcacatggggttgcagaacccttgcgatattgggaatattattatcttctttcccctctgcatatttggataaatatcagagtgggtgtacacctcctgcgatatggggattaatatccttttctttctttctggatattagaaacaatatcacacgggggtttacactttcttccatatctggagtaatgtcatcctctcctgttctgaatggcaagaacaatatctcaggggggatgtacaccccctgccatattggggtaatattacgctgtctcccccttgatattaggaacaaaatcccagcgtgggtgtacacctcctactctatggaaagtaatgcggtcctctcccttcctgcattttagggacaatatcacaggatgggtgtrcacagcctgcgatattgaaagtaatatcatcctc

SEQ ID NO: 916785 - DNA, 645 bp, Homo sapiens
ccttcccctgaggtagctgctgttttcagtttgttttgtatgttggagggcctttattgtaaccaagtacacatatgaatacacatattaaaataaagaatgttgtttttgtgggktttttttgaaaaggaaaatgtatgttttggatgtatgcttttgatattttattgaactataatatacacttggaaaagtgaacataagtgtacaattgatgaaacatacatgaactgaacatacctatgtaatcagccctcataccaagaaatgctgccatcacctcaaaagcctctcttgtgccccgttccagtcaacaaatcccaaccagtggccactatttctgatttatatcagcatagatttgtttggcctgcttttgtactttatataaatcaaatcacagagtgtattaattttatattgctatgtaacaaattgccacagataccacagcttaaaacaacacagatctattctcagagtttctgtaggtcaaaaatccaggcacggtgtgggtggattcccttcttaggggcttatggggttcaaatcaaggtatcagccagggctgtgatctcatctggggcctggggtcctcttccaagctcactggttgttggcagagttcatttccttgcagttaaa

SEQ ID NO: 916786 - DNA, 626 bp, Homo sapiens
gatcggctacaaacttctacaaatgacatcatgttatagatgaagaaaccaaggccagggtgacttacccaaatcccccagagagtagtggaagagccaagagytgatgctgggtttaggggacctgaaggacaccctggcggagatgtgtctgaactctggagtgaggtcagggctggaccctgggggctttgtcatcagagaagtcaaggagttgatctcgtcaagtcgtgggcatggctgagctcagggagccgggatgcaggagaaccttgaggatgaacccttgaggaagatcgctggctggggcctgggaaaataattacacttgtttgttgaacagtgtgctgggttctgtgtgcacagcatcgcactttgattcttgtatccccttaagaggtaggcaaaaccctctcttttttactaatgatggaagaacaaggctcagagagattgggcaacttgcctaagatcacagaatggaggtaggatttcagccccggttctctgactccaaagcacttgctcctttctaccacactatcctgcttccagaataagaccggaagacgggagcagcacctactgtgggtgaattctcaggagcccagatggccttcctcttt

SEQ ID NO: 916787 - DNA, 626 bp, Homo sapiens
gatcggctacaaacttctacaaatgacatcatgttatagatgaagaaaccaaggccagggtgacttacccaaatcccccagagagtagtggaagagccaagagctgatgctgggtttaggggacctgaaggacaccctggcggagatgtgtctgaactctggagtgaggtcagggctggaccctgggggctttgtcatcagagaagtcaaggagttgatctcgtcaagtcgtgggcatggctgagctcagggagccgggatgcaggagaaccttgaggatgaacccttgaggaagatcgctggctggggcctgggaaaataattacacttgtttgttgaacagtgtgctgggttctgtgtgcacagcatcgcactttgattcttgtatccccttaagaggtaggcaaaaccctctcttttttactaatgatggaagaacaaggctcagagagattgggcaacttgcctaagatcacagaatggaggtaggatttcagccccgsttctctgactccaaagcacttgctcctttctaccacactatcctgcttccagaataagaccggaagacgggagcagcacctactgtgggtgaattctcaggagcccagatggccttcctcttt

SEQ ID NO: 916788 - DNA, 564 bp, Homo sapiens
agcactgagggaggtctgttcagtagagaaaggatggcagtgtctctctctctctcaattaaactgtgagtttaattgactcgcagttctgcagggctggggaggcctcaggaaacttacaatcatggtggatggagaagcaaacatgttcttcacatggcagcagttgagagaagtgcagagcaaaaggggggaaagccccttataaagccatcagatctcatgagaactcactctcaggagaacagcatgaggttaactgcccccatgattcagttacctcccactgggtccctcccatggcatgtggggattagacgaactacaattcgagatttgggtggggtcagagccaaaccacatcagtcagcgaccctgcaaggcctcacctgtttattcctggactccacttcccttggcagtgatgtcactgcccacagcagccttgtttgggaggacatagcctrtacagagcctggcttggcaggtgctggccacgtggagtggtccctactgtgggcatcacggaactttccacagcctctgtggttcaccctcactcgg

SEQ ID NO: 916789 - DNA, 567 bp, Homo sapiens
tggcccaagggaccatcatgtgacctagttggagccaatccactttcttccctgaaatctgctatttggataatagggagaaaggacatctactgcttttggatcaaggtctataaggatgtgggctcagccccatcaagggtatcttccatgttccctgaaggacctggactctgggaggtcacacccgaacaggccagggtgcacggagcccacacacacctacacattcacacccatcaggacacagtgtctggcggagaaattggcccaggccacagctgttatcaggtgtcaccgtctttattgacaagagctagagacagaagcagcaaagggtttcctaactggcctcccagggaccattctaggacattactctcctgtcctaggcagcaagaaggcaggatcagccagagaaggccagaaggccagggcatccttcctyccttggaccctcagatcttcctcaagaaaccccagaccaagtcccagggccgggcctccagcctccatctccacacaaaatgtggttttgtaaacttccttctcttctgatggtcccac

SEQ ID NO: 916790 - DNA, 567 bp, Homo sapiens
tggcccaagggaccatcatgtgacctagttggagccaatccactttcttccctgaaatctgctatttggataatagggagaaaggacatctactgcttttggatcaaggtctataaggatgtgggctcagccccatcaagggtatcttccatgttccctgaaggacctggactctgggaggtcacacccgaacaggccagggtgcacggagcccacacacacctacacattcacacccatcaggacacagtgtctggcggagaaattggcccaggccacagctgttatcaggtgtcaccgtctttattgacaagagctagagacagaagcagcaaagggtttcctaactggcctcccagggaccattctaggacattactctcctgtcctaggcagcaagaaggcaggatcagccagagaaggccagaaggccagggcatccttcctcycttggaccctcagatcttcctcaagaaaccccagaccaagtcccagggccgggcctccagcctccatctccacacaaaatgtggttttgtaaacttccttctcttctgatggtcccac

SEQ ID NO: 916791 - DNA, 669 bp, Homo sapiens
acgctgtgctgagactgtgggtcagagaggccaggtgtgccccgtgaccaccctggggcttcctccctcacaggccacctgaggactttgttctggatacttctctatgcccctttctttttccatccactgctagtccacggggcaacctctgtgttaatttaaataataataataatgtattaaatgcagtgcggtaccccagattagaacctggaacagaaaaagaacatttgtggagcttcagtaagacagaaagagtaagttctggtgtcctgttacacagtagggtgactacagcaaatctcaatctcgtgcatatttcaagacagctggaagggaaggtttcaaatgtcgcaacaaagaaatgataaatattaaaagtgatggatgtgggaattacctggatttgattgatcattatacggtgtatacatgcattggaacatcacattgtaccccataaatatgtacgattattatgtgtcaattacaaattaaaaatttttaatacattttttaaaagaattcatttctagttcttraagggggaaaaagaaacaagtgtttcatctataaatgcagcttcttgaagcaatttaaacgattaaattagctttaaaaaaaaaagaacatcaggccgggtgtggtggctcacgcctgtaatac

SEQ ID NO: 916792 - DNA, 669 bp, Homo sapiens
acgctgtgctgagactgtgggtcagagaggccaggtgtgccccgtgaccaccctggggcttcctccctcacaggccacctgaggactttgttctggatacttctctatgcccctttctttttccatccactgctagtccacggggcaacctctgtgttaatttaaataataataataatgtattaaatgcagtgcggtaccccagattagaacctggaacagaaaaagaacatttgtggagcttcagtaagacagaaagagtaagttctggtgtcctgttacacagtagggtgactacagcaaatctcaatctcgtgcatatttcaagacagctggaagggaaggtttcaaatgtcgcaacaaagaaatgataaatattaaaagtgatggatgtgggaattacctggatttgattgatcattatacggtgtatacatgcattggaacatcacattgtaccccataaatatgtacgattattatgtgtcaattacaaattaaaaatttttaatacattttttaaaagaattcatttctagttcttgaagggggaaaaaraaacaagtgtttcatctataaatgcagcttcttgaagcaatttaaacgattaaattagctttaaaaaaaaaagaacatcaggccgggtgtggtggctcacgcctgtaatac

SEQ ID NO: 916793 - DNA, 669 bp, Homo sapiens
acgctgtgctgagactgtgggtcagagaggccaggtgtgccccgtgaccaccctggggcttcctccctcacaggccacctgaggactttgttctggatacttctctatgcccctttctttttccatccactgctagtccacggggcaacctctgtgttaatttaaataataataataatgtattaaatgcagtgcggtaccccagattagaacctggaacagaaaaagaacatttgtggagcttcagtaagacagaaagagtaagttctggtgtcctgttacacagtagggtgactacagcaaatctcaatctcgtgcatatttcaagacagctggaagggaaggtttcaaatgtcgcaacaaagaaatgataaatattaaaagtgatggatgtgggaattacctggatttgattgatcattatacggtgtatacatgcattggaacatcacattgtaccccataaatatgtacgattattatgtgtcaattacaaattaaaaatttttaatacattttttaaaagaattcatttctagttcttgaagggggaaaaagaaacaagtgtttcatctatamatgcagcttcttgaagcaatttaaacgattaaattagctttaaaaaaaaaagaacatcaggccgggtgtggtggctcacgcctgtaatac

SEQ ID NO: 916794 - DNA, 606 bp, Homo sapiens
catcatcataaagtatatttaaaatatattaaaattgattacataactcttagtggaaataaatgtatatttcaaatactcacaatgctccctagcaacaaatgtcagcaagtgataaggaatcaatagttggactataggagttcaatataaattaggctgaattacgtctctgcttcatatagagggatactcttatcaagaaaaacctccggtttttctatttatatttacctgcttttggacaagtcaacatttcctcatcaaagagttgagtaaaattatgaatcttataaatacaggcaacgtttatcaatatcttttcctcatacagtacttggatatttatccattacattgattgagtttaaacattactcttggaagctctttcaatgtctgaactaactaatcaattaattaaatattgtaggcaacatttattgagtacctagtatattccagactctgttccaggtactcgggaaagatcacyaagcaaaataaagaccctgccctcaaggagctgacattctagtagaggaagacaataaacaaataagcaagtacgtattgattcattcaacaaaaaacagtgagcaaaac

SEQ ID NO: 916795 - DNA, 610 bp, Homo sapiens
tcccaagcatttactctgagccaaccattgttccaaatgttttacatgtgttaacttatccaaatctcataacaaccttctgaggtaggtactgttattagctttatgttataggtgaggagaaaagatacgacgagattaaaaattttgcctaaggtcacacagctaatggatggtggaagtaggatactaactcagacagtcctgctacacacagatatgcaaataatcctgatttatagttatttggtcagagggatggattgtatattttatgaatgatttcagaccctcttctactccctcttactttctttctgtttatatcactgtcaattaactttccagtagtagaggctcagagatggtaaaactaccactaaatttatagaaagttgtatgaatttctttaagaagtgggaatacttctcctttcctcagttttttcctatttatggtcattgcagtaatttctatcatcctttgcagctttgaaatcacttcttcacatgtaaacagctcaccctggtgttgccatggagatttatatcaatgccatgagccagggcytaatttgcgcattctgctgattaacaggagtatttgctaa

SEQ ID NO: 916796 - DNA, 604 bp, Homo sapiens
ataaatggatgcgtcatcctgtgaccagtgctaaaattgagggttgtattawgcagactcattcattcattcatgcaaccacagtctgacccgggtgatttgcttcaagctaatgttacagccccaagtgcagccccttatcttcccaacaacccctgttcttgggtctctagagctccttgctcaagaacaggtttacttgtccacacatcaagtgcttgcctgcgcacagctgaagccaacagtgcaagagcggacttagccccagctggcctctatgcctacacctggctgtgccgctgggaaggtgtctggcgacaagtaaatgtaacctacagcctaaaggacccaagaccccagagctgcaggaagcctccatgaggagctactgatgcaattaacttgggaaacacttgctaagagttggagtaggaagaagcaacccatggggcaaattgggacaaaagacacatttttatgcaatcaggtagacttgaactgtgagttattactgcttatcagaatgtctctcctgctctgcaaaccatctttaaagataaacagtgcttctccccagggtggattctttctcttatatttatta

SEQ ID NO: 916797 - DNA, 615 bp, Homo sapiens
ttcaagggctggcctgaaatgagacttgtctccagaaagtggccagtaagtgaaattggatttagttattaaaatatattcttcttcatgctagaccacaaaaggatatttacccctatctttctagctttgtactcattgtgactttagaaatgtcaagataggaattgagggttcacttcaaatataccatcacatttgaaatctctattttgctttgccagtggcaagttgatactaaacttttaaaatatattaaatatatatttatgtattacttattttattgtatttttttctagagacgggctctcactctgtcacccaaactggagtacagtggcacaatcatagctcactgtagcctcaacctcctgggctcaagtgatcctcccacctcggcttcccaagtagctgggactacaagtgcacaccaccatacctagatatttttttgttgttgtttttggtagagatggtttctcattatgttgcccaggctagtcttgaactcctgggcttgagtgatcctccygcctaggcctcccaaagtcgtggaataataggcatgagccgccacattcagcctatttttaaaaatattttagaaacaag

SEQ ID NO: 916798 - DNA, 591 bp, Homo sapiens
gatgagagggttgatatttgcatagagacttgaacgaaacaaaggagggatgcacacagacactagggatgcaaatcctgctgggtgtgctcaagaaacagcagagaaggggcacacctggggcaaggtgaacaggaggaagagtgggaagagacggtggcagagggaacagaagcctcactatccctgaccagaatataccactctttgccctccacattctcgccatgacccccaggacatttgtttttacatctcccattctgcctcaagtcgcactctggtcaattgtgaacatatcagtcccgcagtagactgtagcccagtgaagctaagggccttgttctcatcagcactgtagcccttgcacccagcactgaatgccctcgtagctcagactagcaacagtcagtgtggaaaagagcacagcacaacccagtggggatggggaggaagacgtctaggaaggagcagagcatggagtcagcccccttggcatcctgtggtctaatacacyttatctgcaggagctcaacaacttaggccaatgggtctgatcccttgcatgtgtgatactcagagccagtgagt

SEQ ID NO: 916799 - DNA, 581 bp, Homo sapiens
aatttaaaaatatatataacaaagcaaaaaaaaaagacaaacaaaaattccacccagagccatgcartgaaaccacagtggaaggacaagaagaggtcatggaggatgttaaaagatacaaaactgtggtcagaaattcgctaatatgtaaggagggacttcaggggacaaataagtacgctgagacttcaaaatcccatctggttgattgagaaaaatggattagagaggggtaagaaaggaagaggagacatcataatagtttcaaatgagacagtaatttttttcttctgtttccttttttaaaattttgtattccgtatgtttaagatgtacaacatgatgttttgaaatatgcatatatggtgaaatgattagtacagttaagcaaattaatcgatctacctgtcactttccacagttaccttgtgtgagtgtgatcgtgtgtgtgtgtgagtgtgtatgtgataagagcacctaaaatctactttcttagcacgctttcagtacattatgcaatattattaactacagttctcatgctgtgcattaggtctctggactttctcatcatacataac

SEQ ID NO: 916800 - DNA, 585 bp, Homo sapiens
gcatttgcagggcagaggctgacataattttcatcagataattgtgaagaagtccataactcaaaccaggttaaaagctacaagcatcttacctatccttaatgtgacagtttacaaaatgtaactgaaacaaaaaaaccaattacttccccataagaaacaatcagaggaaaactccaagaagccgatggcgggtgtgaaaatgtatcatgtagactatcaacaccctaaaaatggaacaaaggaaaagtgccctgtggtcactacaaataatgactcacactgacacagcttctctgtgctgggcaccactttaagtccttatgtatattaactaagttaatcagatacaacctatttttaccccccacttctttacagatgagaaaactgaagaaacaggttattggcctaagatggccagtaaagggcagaacctatattggaactacyctgtgaaactcccaccctatctagacatatggcattccatatggggcacagggatccagggagacatatcatgaggtccctacctctgggagttcacagtctaccggaggaggcaggtacaaaacactgaga

SEQ ID NO: 916801 - DNA, 682 bp, Homo sapiens
tttgttattaaaccgagcataccattcctgctaccctgagtcttctctatatcaccatgaaggagacttggggatctgatcccaggcctgtctgtctgcagagtgtgcactcttagccctttgggaagtacagcaagcaaagctcagctccagtgcccagaacccttcctgccaccctccccagcttcttttcagaacctcaaagttcttcattttttttctcccttaacgctttatagctctcagtaggtatcagggattcttataaaatctcacatgtggtagagctttcaaagattatcttttcaaagctcccacctgaagcaggaatgctgcccctggcacttcagcagctggttccctgctttgcctggagaacatctcactttctccattgcccttctgtgacactcctatcctggagaagtgccaactctgctctgtctggaaatggctttttgtacttcttctgctttgtgcaacccagctaccccaggccacacagactggcaccactcctcccaactcctaacagcgatttgagcactcccagacatcactgcatcttccccttgtcagataaccccattcccttccttgtgtatctttcaaaaataaattwacatggggtacatctccatctttactcttattccttcctgtggaatgagggactctgaac

SEQ ID NO: 916802 - DNA, 536 bp, Homo sapiens
caggtttaagatgtttggtcttcacaactctagagagattttttaaatgaggaaaccgatacccaggcataataagaaaaacagatcaaccacagtagggacttaagcatcaggcaagtgtgtattcaaacccrgtcctcatacctacatggcttgagaattcttccttttcttctacctgctgaaccctgagctccgctggtaaagtgaagctaacctctgttgctttacttctgacttcttctgtgcccatatgctcttccggtacaggtctggcctggagtatacaggggtgatttgtcattttacaaaacaaatacagttcggttgagaagagagccaagtgaaaaataatcccaaggctagaaagctacagtggaagtttggagcaaaagaaaaaaacacaaaccaaccccccaaaaacataaaagctcaggatgatttatttcataatttaaaaatcaaaattgccttcaggcaggaaggcttgtttgcccagttttaccctagagtgagtcataatagctaagttacat

SEQ ID NO: 916803 - DNA, 669 bp, Homo sapiens
ttcttccccttgtaaactttcattccagcagggagagacagataaatatagtaaataagtaaattatatagaacataaaatactataaatcacaatgagatattactttacatycattatagtggtgatatcaaagagaaaatgacaagttgtggcgaggatgtggagaagtcaaaaccctcgtacgtcgctggtgggaatgtaaaatggggcagccactttggaaactattttggcagttcctcagaaagttcagcagggagttactatgtgatccagcaattccactcctaggcatatacccaaaagatcgaaaacgtatgtccacataaaaacttctcagaatttattcataacagcattattcatgttagtcaaaaaggagaaaaaactggaatgttcatccactgatgaatgaataaacaaagtgtaatatatccatacaacctggatatatcctacaacctggatgaaatttgaagacattatgccaagaaagaaggcaggcacaaaatgccacagatgttgtgattcaacttatataaaatgtacagaatagtcagatccataaagacagaaagtaaatcaatggttttcaggagctgagcaaaggaagcattggagagggagtgctagtgggttcagggattctttgggggatgatgaaaa

SEQ ID NO: 916804 - DNA, 655 bp, Homo sapiens
cctaaatcaatttaaattttttttttttttttttggagatggagtctttctctgtcacccaggctggagcgcagcggcacaatctcggctcactgcaagctccgcctcccgggttcacgccattctcctgcctcagcctcctgagtagctgggactacaggcacccgccaccacgcctggctaattttttgtattttttttagtagagacggggtttcaccgtgttagccaggatgaccttgatctcctgaccttatgatccacccgcctcagcctcccaaagtgctgggattacaggtgtgagccaccatgcctggcaatcaattttaaattttacctgaaaatttggatctgaaactattagtggtaaaaaaaaaaaaacactcaaatcaaaaagagaaacaaaataacttatgcacttagcatttgcataaaagaaagatatatcaattacttgagggacttgaacttatacagagggaaatctttcccataagttttcacataggggacacaaagtagcataatccacttcaataaaagcctacagcacattcagtgttaagctttacatyacagttgtagtgtccttaaaatatatgacaagttcaatgttctaaatgctgagcaaatcaattgatatctctcttggttt

SEQ ID NO: 916805 - DNA, 551 bp, Homo sapiens
ggaaggcacctcttcacagggcagcaggagagaaaagtgctgaacaaaggaggaaaagccccttatcacaccatcagatctcatgagaactcagtcactatcacagaacagcacgggggtaactgccccagtgattcaattacctcccaccaggtccctcccctgacacgtggggatgatgggaactacaattcaagatgagatctgggtgagaacatagccaaactatatcatcttccctatgacttttctttctctttacttaaagtatcagaaaaatcataaatcaggatcaactttgctggcaaggaagttactgatggcttgcttatctacagaagaaagaatggctgcctggaggttggggtgaaaatagaggatgtctgtaaattggcacatgaagccttttcggggtgatggaaatattctaaaattgaattgtggcagtggttgcacagctctaacaattgactgaaarttactgaattatacacttatgacaaaatgttatggcacactaagtacctcttaaaactttcataataaggaga

SEQ ID NO: 916806 - DNA, 524 bp, Homo sapiens
atcataagatctgatggtttaaaagttgtagtttcctctgcactctttctctcctgcccccttgggaagaaggtacttgcttcccctttgccttctgccatgagtgtgagtttcctgaggcctccccaatcatgcagaactgtgagtcaattaaatctctttcctttaaaaattaccccatcttggtatctttataacagtgtgagaatggactaatacagagaattggtaccatcagtggtactgctataaagtgggtactgctataaaggtaacctgaaaatgtggaagcaactttggaactgggtaacagacagcggttggaacagttaggagggctcagaagaagacaggaagatgtgggaaagtttggaacttcctagagacttgttggatggttttgaccaaaatgctgatagtgatatggaygataaagtccaggctgaggtggtctcagatggagataaggaagtttttgggaactggagcaaaggtcactcttgctatgctttagtaaagcaact

SEQ ID NO: 916807 - DNA, 628 bp, Homo sapiens
gccctggaattgctccagctagcagaataaatcaaggctagaaccagatcagaatttcttacgagatgacagggatctgaaggactttacctctatagtcgttttgcctttttargcactgggtgacctggtcccatgtccatcctagtgggccctgtatgatccaatccaaaggcccctttaggtttgcgttttatcattccctctttctcagaatttgatgtttgtatgtaaaagcactctggaaaatatttaaatcatggtacaaatataagagaagtcatgcaggtatggaattgctttgagaagtatcattttattaatttgtctggcttgataccaattacctgatgcagttgttaagggcagatccatccagaaacctttgggttctctgctccctgattttgttttgcaaattatataaccatacttcatagaaaacaccagtggtggctatgttgttcacagacacaaagtgattctaaggcaaccacaggagagagacacaaaagaaatcacacaaaaatctctcatcacaacataaatattgtgacaattgtgtggtactttttgtcttttttgttctctctgttccttttttgtcagtacaagtaagtcatcatga

SEQ ID NO: 916808 - DNA, 678 bp, Homo sapiens
ttcacaaaggcccgctagcctttgcagactggggactttaagattgttcactacccatccagcagggctgggcatacagataccaaagctccatctccagagacgtgaactctaaccaaggatcctcaaaccacttaaatcatgaacctgaaccttgaaatgaagcaaacattacatttaaactcccatgtttaaaatcagtttgcccttttcgctcactctttactctgggggatgcataaacaccttgggtgcctgctgtgacaatcaagttggcaatacatgccacctgctggaaccatagtctccaatctgaactccttccccagctacctgtttcctgtcacaggccttggcattccctgtagcttcattgcttacctcatagaatcatgcttctcattagagagtattcaacagcttcttgtcactggggggtgcacttcatttcctctactcttggacttctgctctacttggacttcatactcttggctgtctctgaggtagaggcagagagaacatccctgactctctgctgcccattttctgccatgggccgccscccccttccagaggaggaggtgttggggaacctctcccacatggcagaacaaccactcaagtctggggaggtctttggcagtcatcttgggccagatgttgtgctagaccaag

SEQ ID NO: 916809 - DNA, 610 bp, Homo sapiens
tctttattcattttccttggtaccattatacaaaaycggttgatcataaatgtttggatttatttctggattctattttacttgtctataaagctatctttaatcaagtgacacacagtcttgactactgttgctttgtagctagttttgaaagcaggaagtgcgaatcttttatttattttttctttctctagattgttttggctattcttggcaccttgaatttcattgtgaattttagcatcagcttatcaatatccacaaagaagccggctgggatttttttagggattgtattaaatctgtagatcaattttggggagtattgccatatggacaatattgtttttcaattcaaaaacatgggctatttttccatttgtttaggtcttctttaaattctttcagtgctaattttgaagcctttagattgtaagttttgaatttattttgttaaatttatttaaaagtattttactcttttgatattattgtaaattgaatttttttcatttttggattgttcattgctactatataaaaagatagttttttttgtttgtttgttttgcaacggagtctctgtcggccaggctggagtgcggtggtg

SEQ ID NO: 916810 - DNA, 606 bp, Homo sapiens
cggccatactgcccaaagtaatttatagattaagtgatatcccatcaagctaccattgactttcttcccagaaatagaaaaaaactaccagggcagttctcctggataatatcctgaagagtgttttccaacttggctccattctcccccatcactttcaggtacaccagtcaaatgtaggtttggtcttttcacatagtcccatatttcttggaggctttgcttgttccttttcattcttttttctctaatcttagtttcacactttatttcattaagttgatattcaatctctgatatcattttttccgcatgatcaatttggctattgatacttgtatatgcttcacgaagttctcatgctgtgtttttcagctccatcaggtcatttatgttcttctctaaacttattattctacttagaaatttctctaaccttttttcaaggttcttagctttcttgcattgcgttagaacatgctcctttagcttggaagagtgtgttattacccaccttctgaagcctrcttctgtcaattcgtcaaactcattctccgtccagttttgttcccttgctggtgaggagttgtgatcctttagagcaga

SEQ ID NO: 916811 - DNA, 526 bp, Homo sapiens
caatatgtgaaataaatagaaaagagtccatcaggaaaattaaataggaaacagcatttggaacagcaatgtccataactctctgcatccttccatgtttattctgaaaataatacattatagtgtatgtgtgttgtgaattgtgaattgtgacccctccaaaactcatatattgaagccctcactgccaagtgactgtacttggaaattggggtttgtggaggtaattaatgttcaatgagttcataaaaatggggtcctaagttaataggatttatggtcttataagaagagaaagtttctctttctctctctctgtctctctatctctccaaatatataaaccaagaaaatgccatgtgagaacaacgagaagacagccattaacaatccagcaagagagcacttaccasaacttgctggcactctaatctcatattttcagcttctaaaattgtgagaaaataaatctttatatttcagtaacacaatacatggcactttttatggcagcctgagctacaac

SEQ ID NO: 916812 - DNA, 641 bp, Homo sapiens
aatttaacaaatgatgtaaaagatctactcaatgaaaattatataattytcatgaaataaattgaagagaaaaatgaaaaggcatcccatatttatggattggaagaattaatgttgttaaaatgaccataatacccaaagtgacccacaaatttaatgcaatgcctatcaaaataccaatgacattcttacaagaaaaagcaacgataaaatttccatagaaccaaaaaaacccgaaagccaatgcctatctgagcaaatagaacaaagctacaggcaccacattacctaatttcaaaatattctacaaagccatagtaaccaacaacatggtactgtcattaaaaatagacacatacaccaatgaaagataatagaaaacccagaaataaatccacatatttgcaaccatctcattttcaacaagggcaccaagaacctacactgagaaaaggacactctctttaataaaaactgctggaaaaactagatagccatatgcaaaagattgaaactgcacccctttctcttaacatatacaaaaatgaactcaaaatggattaaaaacctgaatgtaagacccaagtctgtgagagtactagaagaaaacatagaggaaatgcttcaagacattggtcagg

SEQ ID NO: 916813 - DNA, 664 bp, Homo sapiens
atcaaggtggacaaacagcttctccaccatcttgagttccttggcaggagacctgatcctgccttaaaccacgggaagcatcacaaatgcccacagggagaaatatccctgaggacagccaggcacaagggkggaagtgggactttatcacccacagccctgagaactctgctctgtaactcagccaaaaaggacctcattcagagtggctgttcagcagcaccatgctgttagttgttcattccacagggcccctgggcacaaccccttagtcagctttcccacactatcttgcatcccatttaagacctccacctttggggataaacagtgctaggatctgttactaaaccttaagcaaaccatggcttaaggtaccatctagtgacaaacaaaaaggcagcaagccagtggggcaggggagtgggaggaagaaattcaaaaattataaaaaactctagcaaaaaaaacaaatgcaatagaaaacaaaacaagccagacagagaagactggcataaaaaaactaatctgtcaatgtgaataaataaacatacattcactaggaacaatagaaaacaagatagcatgacttccccaaacggtcaaaacaagtatccagtgatggaccttaatgacatgttaatactgagctctctgaccaaaa

SEQ ID NO: 916814 - DNA, 484 bp, Homo sapiens
aaaaaaactagaaaaccaaaagcaaacaaagcccaaagctagtagaagaaaygaaataagcaaaatcagagctgaactgaatgatatagacatgaaaaaacattcaaaacatcatcaaatccagaagctgctattctgaaaaaaataataaaaaagatagactgctagatagactaataaagaaaaaaggagagaagattcaaatacaatcagaaattataagggggatgttcccagcgacccaagagaaatacaatcatcagagaatattataaacacctctatgcacataaactagaaaatctagaagaaatggatagattcctggacacatacaccctcccaagactgaatcaagaagaaactgaatccctgaagagaccagtaatgaattttgaaattgaggcggtaataattagcttaccaaacaaaaaaaaaaaacccatgatcagatggcttctcagctgcattttaccagatgtac

SEQ ID NO: 916815 - DNA, 576 bp, Homo sapiens
gctaagtggaggttgctctgggaagaatatcatataacctgcatgcatttgacaaacaggaggggatttcttgtcttgcctgctgctcctgggcaacctgtacataagctccctgaataaagcttatgtctcacctgctgtctccaggtcttttcttctgtctctccaagtctgtgtcctgtcagctcattagcataggggtccagcatgacaaatataaaacggtgtttaacattctttggattatgtttatataaatgtgttattaatatgtgttccaaaattgtacgagattctataggtctaatatgtcttggcatatgttatcagaaactattattattattatgttaagtagttgtttgccacagaaataaagtaatttccttgtcgaatgtgtctttaccaatgctgttctcatacttttgttatctgcaaaaagtgtttactttacwtctcaaaaaacagtttatgatcagctacagattgtgccatcggactaagaaaaaaataaatcttccaggactgtaattcaaaagttgatgtggtcatgaagattgctaacccaatatcaag

SEQ ID NO: 916816 - DNA, 421 bp, Homo sapiens
gtattttatctcttttgttaaaaaaacatgatttcatcttgtaactgaactgcacatataatatcagagaaaatcttctaatggcatgacttgtaaaatctctaccccaacaaattagtttgatatctaggagttaccttatctgaaacataatgagttatgttctacagtgtctgcaatcaaactttaaacaatcaggtccctctttcagttagtatgttgttatactgaatacatgagtgttatggaaaagatttaggtctcataaatgggtgaagaaattgtcatctacagaactaattcattccattagatttcttgggtagcagcatggttccaaattctgattggcctttagtgatggaaaaataacaaagtactaatgcagagacacacacacamaaaaaaaacggctttgagt

SEQ ID NO: 916817 - DNA, 563 bp, Homo sapiens
tgagctaaacacatcaaccaccacaagccctgaatggaacaatctaacttcctttgtaggagaaagtcctgctacccacagggctccctccttcccttcttctctagagtaattagggtaaaggaaggagagtatatctggaagtaaagtccagtattgacgaaagtatactagacatatctttgggtttaggccctacctataatctcaactgaagggaccatattcgaacctgtgacctgtcactccattatagctgattggatcagggttgaacacctaacgcaaaagaggatgtatttataagctgagctgagccaaccttatgcccacaagacattaaacttagagatatggaagaaagttccaggcactggatctgaaagcccatgcagagttagggccaggccatccatactgagcaatgctaaagattcytaagcagagggagccaattaagaggagcagaggtgtgagagggagtaagagcagatgtgcagaaagaagccatttgagagaagcagacataagaaaaactatgcactcacagagaggtagaaaag

SEQ ID NO: 916818 - DNA, 555 bp, Homo sapiens
taaaggaaggagagtatatctggaagtaaagtccagtattgacgaaagtatactagacatatctttgggtttaggccctacctataatctcaactgaagggaccatattcgaacctgtgacctgtcactccattatagctgattggatcagggttgaacacctaacgcaaaagaggatgtatttataagctgagctgagccaaccttatgcccacaagacattaaacttagagatatggaagaaagttccaggcactggatctgaaagcccatgcagagttagggccaggccatccatactgagcaatgctaaagattcctaagcagagggagccaattaagaggagcagaggtgtgagagggagtaagagcagatgtgcagaaagaagccatttgagagaagcagacataagaaaaactatgcactcacagagaggtagaaaagccacctcayttcctggcatggcagttacatcttgcccctgcattctgtgaggtacctctatattcttttaaggatcttctcactttactatcttaactgggttttcattt

SEQ ID NO: 916819 - DNA, 588 bp, Homo sapiens
tatgattgctaatcacaagaaaaaagctgtagactctcacttttggttttaagccccttaacgtatcctcatgctagctcccttggaacgctcagactgaatttagtgttggcctaaggatttacaggacccgcacacccatctcctgagtaagacttcttatgcccatgattatgtttctaaaaatttactctttgccatgcttcaccaaacctaactcctgcttttgaggtaaatgagcctgacaaatatatggtcctctaagaactggtgttataacaccaatcagctattgtaacatctatatcatctatcacagtaaccaatagatcagcccagatgaattttaagagttatatttttataccatatttcaattatataatttattattagatccaaatatgcttgcctattatgctgaatctttcctgagtcagtacctgaaaattttgataattcaaataatgtatcaaatgtaaagttgaagtaaawccaaaaaagttaccaaattaagttaaataagaacattttttgtatttatttgtgaccagactctgttattggtctataatagttaattctcac

SEQ ID NO: 916820 - DNA, 588 bp, Homo sapiens
tatgattgctaatcacaagaaaaaagctgtagactctcacttttggttttaagccccttaacgtatcctcatgctagctcccttggaacgctcagactgaatttagtgttggcctaaggatttacaggacccgcacacccatctcctgagtaagacttcttatgcccatgattatgtttctaaaaatttactctttgccatgcttcaccaaacctaactcctgcttttgaggtaaatgagcctgacaaatatatggtcctctaagaactggtgttataacaccaatcagctattgtaacatctatatcatctatcacagtaaccaatagatcagcccagatgaattttaagagttatatttttataccatatttcaattatataatttattattagatccaaatatgcttgcctattatgctgaatctttcctgagtcagtacctgaaaattttgataattcaaataatgtatcaaatgtaaagttgaagtaaatycaaaaaagttaccaaattaagttaaataagaacattttttgtatttatttgtgaccagactctgttattggtctataatagttaattctcac

SEQ ID NO: 916821 - DNA, 601 bp, Homo sapiens
atctctgctgctctctcatctgctggccattggattgaggatctacactggaacacatcaggcaaccttcgccagcactttttgataaagaattggaatttgactctgtttacatagtagatactatatctgagattgcaacatatctaactgaagactattatgattcatgaattttgggtcgtcacaacacttgcattgatttgttctgtaagagtgacattcctaatttagtaaaacataagaatagactgtaaggcaggacgcggtggctcacacctgtaattccagcactttgggaggcttaggtggatcacctaggtcgagagttgaagaccagcctggccaacacggtgaaaccccgtctctactaaaatacaaaaactagccaggcgtggtggcagacaactgtaatcccagctacttaggggttgaggcaagagaatcgcttgaacccaggaggcagaggttccagtgagctgagatcacgccactgcactccagcctgggtgacagagccagactccatcccmaaaaaacaaaaaacaaaacaaaacaaaagatagaatgtaaaattttgctaacctactactctatcttt

SEQ ID NO: 916822 - DNA, 627 bp, Homo sapiens
taatctagaaagtaaacactatgcagctattccaagtgctcaggaaaacacatcaatgccctcgaggggaaaagggtaaacattttaattgctgtacatggtgacacaaatccatgttgttaatgtaagtggaaggggctgaagcacaaaacgtaattcaaagagtttacttgatccaaaatgaggacagctacctggaagaaacagacccaagtatccttggatatgaactccatttggagctttgcaacaagcagtttcttaaaggcaaaaaagggtccagaagtgggatgatgcaaagaggtttgtcataaattctcattggcttatggaaataacatttattagtgactggttatacactgttacaccattattgggtgtggattatagtgtctggtgtgacattatttgttaatttatagctactgtggcaacagcaagcagcctagatgctcaaagaggagcaggacagaactgctgtctcatttgaatatctctctgggcctgattatttaaaaggacttgcatttctcacatgaaagttattttcttttctcaatgtccataaatgakaataaatagacataaaatagatctttttgaggatgaagtaaatggaataaa

SEQ ID NO: 916823 - DNA, 579 bp, Homo sapiens
tgttacactctacgtgtaggaatgcaggataagcttactcaatgttctcttaaattgaacacttaataattttccagrtatcaccttttgttggaactcaagagttataaatggcccttgacataccaagtcagcattttgactgagctcctctctaccccaaatgcaagggaaccaatagttaagcgggaatatcattgccctattcagcctaaagaagttacagaagatgaatcttcatccttctacgaaggagaacccttaggattaaaggttctcttataaaagggagaggagaaatgtcagaggcatttgaacaagagcaactccatcatgagtaggggctgggtaaaataaggctgagacctactgggctgcattccgaggtggttaggcattctaagtcacaggatgatataggaggtcagcacaagatatgggtcataaagaacttgctgataagcctgctaaatctcaccaaaaccaagatagcaatgagagcgacctctggttgtcctcattgctacactcccaccagcgccatgacagtttacaaatgccgtggcaatgtcaggaagt

SEQ ID NO: 916824 - DNA, 556 bp, Homo sapiens
tcagagttcgcaactttaagctgacaaatgcctgtggcttttgaaatgcatggcaggaagttggaaaccagcccagtccccactcctcattcccttggtgttctatgtaccatttccatttggagaagaaagtgaatcctgagctaccagagaagttgtgcaccaggagaggtgactgggctccctggcatttgggaccagggggaatttttacctgcaagcccacctcccttgcctgcaaagccaggctccagcccagtgagctctgtgtttacatgccatctgctgaggtgtcagtgatcacaacacgtggctttgagcatttgaattttttatttagaacataaaaaatgtcggaacaaagaaagggaaagtagagaacagaagaagaagacctggaaggggaagagagaagggaatagttgttattggcaagcaaaacagcataactaaatcttatttaaacttgttttctctctaagcaaaataggcccttctgtttttcaagtacattctgagatctggtragctgcagagttcacttcctcaagcttgt

SEQ ID NO: 916825 - DNA, 656 bp, Homo sapiens
ctcctattcagcatagtattggaagttctggccagggcaatcaggcaagagaaakaaataaagggcatccaaataggaagagaggaagtcaaactatccctgttggcagatgacatgatcctatatctagaaaattccatagtctcagccccaaagcttcttaagctgataagcaacttcagcaaagtctcaggatacaaaatccatgtgcaaaaattactagcattcctatacacaaacaacagtcaagcctagagctaaattaggaacaaactcccattcacaattgccacagaaagaataaaatacctaggaatacagctaactagggagccaaaagatctctacaaggagaactacaaaccactgctcaaagaaatcagagatgacacaaacaaatggaaaaacattccatactcatggataggaagaatcaatatcgtgaaaatggccatactgcccaaagcaatttatagactcaatgctattcctattaaactaccatggagtttcttcacaaaactataaaaaagtattttaaaattcatatggaaccacaaaaagagcctgaatagccaagcaatcctaaacaagaagaacaaagctggaggcatcatgctgtctaacttcatactatagtacaaggctaaagtaac

SEQ ID NO: 916826 - DNA, 472 bp, Homo sapiens
ggtctgtagtgggtcactgcaatttccrttatttattattatctttatctttatatatatatatatattttttttaaattatactttaagttctgggatacatgagcagaacgtgcaggtttgttacataggtatacacgtgccatggtgatttgctgcactcatcaactcatcatctacattatgtatttctcctaatgctatccctcccctagtgccccagaccctgaaaggccccagcgtgtgatgttcccctttctgtgtccatgtgttctcattgttcaactcccacttgtgagtgagaaaatgcagtgtttggttttctgttcctgcatcagtttgctgagaatgatggtttccagcttcatccttgtccctgaaaaggacatgaagtcattcttttttatggctgcatagtattccatggtgtatatgtgccacattttctttatccagtctatcattgatgggc

SEQ ID NO: 916827 - DNA, 628 bp, Homo sapiens
caattttatttttaggaatcataaatgggattactttcctgatttcctttccaaatttttgctgttggaatatagaaatgctactgattttttaatgttgattttgtattctacaactttactgaatctgttgatcagttctaagctttttggtggagtctttaggtttttcctaatataagaacatatcatctgaaagctagcataatatgacttctaactttccagtttggatgcccctaatttctttctcttgtctaattgctctagctaggactcccagtactatgttgaataacagtggtgaaagtgagcatctttgttatgctcctgatcttagaggaaaggattttggcttttctgcattctgtatgacactagctatgggtctgtcatatatagtttttattatattgacgtatgttccttgtatactcagttttttagggctttttatcacgaaaagatgttgaattttatcaaatgctttatcagcctcaatcgaaatgatcatacagtgtttgcccttcattctgctgctattgtktatcatattggttgatttgtgtatgttaaaccattattgcatacctgggataaatcccatttggtcaagatgaatgatctt

SEQ ID NO: 916828 - DNA, 624 bp, Homo sapiens
gtttactctgctaattatttattttgctctgcagaaasttttcagtttaattaagttccatctatttatctgtttttgttgtatttgcttttggtttcttggtcatgaagtctttgcctaagccaatatctagaaaggtttttccagtgttatcttctaaaattcttatggtttcaggtcttagatttaagtctttgatccatcttgagttgacttttgtataaggtgagagaagaggatccacttttattcttctacatgtagcttgccaattatcctagcaccatttgttgaataaggtgtccttccccactttatatttttgtttgctttgtcaaagatcagttggctgttagtatttggcttcatttctacattctctattgtgttccattggtctctgtgcctattttcatagcagtaccatgctgtttttgtgactatagccttatagttagaagtcgagtaatatgatgcctctagatttgttccttttgataagccttctttggctatgccagctcttgtttgattccatattaattttaggattgttttttctagtactgtgaagaatgatggtggtattttgatgagaattgcattgaatttataaattgcttt

SEQ ID NO: 916829 - DNA, 647 bp, Homo sapiens
ggtggaggttgcagtgagccaagattgatccactgcactccagcctgggtgacaaagggagattctggttttttttyttaagattatctttttggtcctttgcatttttttatttaacaaaaatttatgctgggatttttatagggactgcattgaatataaacataaactctggaagaagtgacataccaatttatatttgtagtagctttagttagactttcaaagttgtgtaggatcatagcagttcttaattgggtaggactgcacagagcatcgttgaatgccagaataccctagcctcatgcattaaatattactgataatcactgtaataaccaaaaccatgttgatatccaagaactgaaaaagttcatccagtaatgtttctttcctacggctgaagtctgtaattcctattgttcattatttaataatcatttacttagtatctaataagtgatcttttctacctcttatcaattttgacatttatatctagctaattgaatttatcccatagtacagatggaagaaatctctttaattattaaattgtgaattctttaaaatagaaacaatgtcttatttttgtatctctagtaccccctatacagtaggcttttaaatagatgtttagcaaatta

SEQ ID NO: 916830 - DNA, 641 bp, Homo sapiens
acaggtgtccaacctcccactttgctggagttgcagttacttttgctgagaagcctgaaatgctggcgtatctaaagcycctgggtctccacatgtgcctgagtggctactctgcagaaactccgtgtagctctgtgtgtcaggctgaaggtcccagtggagtggattcacgatgggatctcccgacctgagggttgcaaagatccatgggagaattgtggtttcccagggtcacacattcactcaactgcttccttgggtgggggaggttcacttggttctgtgtcactctcaggtgggctgtcattctttgttctccatgggttgagttgtttccttcgttagtcccaatgcgagtacctgaatgtttcagttgaaggtgctgtgtttactgtcctttccattcctctctttgagagctatggagcttctagtcagccttcttggccattccccattccctccattgtattttgaaagtagacagtttgttttgatttcacagtctcacagctggagagaaactgcctgaggaatttgcctccctgagtctcacccatatatgacttagatgagactttgaacatttgagttggtattgaaataagattgctggggctactgggatggaatgaatctat

SEQ ID NO: 916831 - DNA, 616 bp, Homo sapiens
ctttatattcaggtcttgcccaagggttagtttatctgcttcttgtgctaacagggcctttgctgccagggcccttagacatgggggccaggctttggaaaccccatctagttgttttgagagataggccactggccttggccagggcctcacagtctgggttaaaactccaactgtcattttctttctttctgacacatagggtgtaaagggttttgtcaggtcgggtagccccagggctggggccaacatgagtttttcttttaactcatgaaaagcttgttgctgttggttgtaatagatgtattatccagtctatatttttattaactgtcacccaccaaaatattgactaaaatcctgctgctatttgatttcaagctttaaattgatctggtattctccatgggactccaattgtgtctaagtggacgtgagagtcaaaagatccataaggggcttctctcgctttatgatgtcttatttttcctccctctggttgatgaaatgccagggtraaagagatagccaattggactaaagtataagtgccactccagttattcagcagagtgtccagtaaaggtccaccacaataccaccacacatccactcg

SEQ ID NO: 916832 - DNA, 600 bp, Homo sapiens
actgttgggaaagtacgattgtattttgcaatgtgggaaggacatgagatttaggaggcgccagaggtggaatgatgtaatttggatatttgtccctgcccaaatctcatgttgaatcacaatccccaatgctgaatgcgagacctagtgggaggtgtttgcattatgggggcagatcccttatggcttggtgttgtcttcatgacagtgagtgagctgttgcgagacctggtcatttaaaactgtgtggaacctcccctccccacatactctctgtctctctctcttgccctttctcttgtcatgggagatgcctgctcctccttttgtagtctgccatgattggaggctttgtgaggcctccccagaagcagatgccaccatgcttcctgtaaagcctaaacaatcgtgagccaattaaacctcttttgcttataaattacccagtctcaggtatttctttatagcaatgcacaaatggcctaacacagtycagtttacaacaatggtctgtacccatacccattcagagctctgttttgaaagagctatttcaaagagctcaccagcagactggcaactctcatctttcccaattcc

SEQ ID NO: 916833 - DNA, 632 bp, Homo sapiens
aaaggggaatgttcactgcatcctctaagacaggaagtaaattacaaaatatagtggtgagaagttaaagtagtttatgacttgatggtctcacccaagaaaaatgagagrcagggttatgtgctgaaagtgtgaatcaagtcaaaggcttcagatgagtagtgaggtaagtttttgacgaggccaaaacagaattgcacatgcctatctagagctcaggtgaggtggaactgtagatggagatgtgggaacattaatgacaataaatattgttgaccactatgtgccaagtactctgctaactgagcttgcatatattttttatttagtccttatttgcaaccctgtgatgtaaagataattatcatggtggtgggaggcaaccaagcagtaaactctgcccctacatttcaccctcccttgccattatgtcatcttgatttactactgtcaccatcaactaggaagttttccacttagtgccaaaaccacagatggtctgggttttgtttctaacaagagaggtaatatttccttatataaacatttatacaacacatcccttcatataaatgattttacaaattttgctgatgagtatgaatgtatatattgtacaggtaagtctggaa

SEQ ID NO: 916834 - DNA, 585 bp, Homo sapiens
ttctgcattataattttgagtccctaacattttttttaaaagatgagtgagaatatttagtaatatataactaaagcatagaaacattttgggatgtctaaagaaaagaaagatccatagtaatatggattattgactctaagtcttcacttctccataatgggattaaacatttatgccatttgacatataactttacagtgttctcccattgtgggggaagaatacttccccagctcatttatattgggcaacgctaagcaacttgcattggtcaataaaatgttagcatataggacaaaatccttacatatgctagcatagtttgacatggcttcttgtattcttttccttcaccatgacaagaatatgtcatcagtaggtgttggtttaagaaggctaggaaacatttattgcagacctgaattcaatctacaacctgattccaaccccaatggttctatagcactaagcattctgtctagactgaagaagagttacccagttgagcttagcctggatcagccgaacaagagaamtataagaacaaatatttgttgtagcaagccactaaattgggggatg

SEQ ID NO: 916835 - DNA, 594 bp, Homo sapiens
gtgcacagcagaacaaaaaataaacaaagtagaaatatgttgttggctttgtttaggatgagatggcttgagaaaaaaaattgtcctgaatctgcaaaatgaatatctagtatttcatgtgttatacagcagaagtgtggaaattactttaaaaaggagaaagaaaaagaatatatttgcagatatattcaagtattttactggagatgtgagaaaaacatggggttccaggaaacatttccataaaaatagttgactgtacataattatttattccagtctgctaaatgtcactattgatgtcttaatattttgttagaattcttaaaatttttatggattctaagattccctttttttcacatttttacatatctaaactttggatgtatcttacaatcaaagacattttacaattgtttttcaagtggcaactctaatacagtagtcatttcctgaacttgtgatcacatcagaaggattarcatcaccaacatgtgcagagtagatgtcagaggctgagagcccatagtggagtgtttagtttaacccctatgagacaaaggattgtaggaagagagtagaagagttggt

SEQ ID NO: 916836 - DNA, 751 bp, Homo sapiens
ggtaacacaaaaattagcaaaaaatgtccaggactagacatattcacaactgaattttatcagacattcaaakaataattggtaccaatcctattgaaattattccaaaaaacagagcaagtgaaaatcctccctaaatcattttataaagccagcatcacccaaatacctataccaggaaataacataacaaaaagaaaactacagaccaatatccctgatgaacatagatgcaaaaatcctcaacaaaattctagctaaccaaatctaagagcggattaaaaaataaccaataaaaataaatggttttataccaggaatgcaagggtggcttagcatacataagtcaataaatgtgatacaccacataaacagatttaaaaacaaaaatcatgtgatcatctcaatatatgcagaaaaagcaagagacaaaaaactagcatcactttatgattaaaatccttagcaaaatcggcatagaaggaacataccttaaggcaataaaagccaaggatgacaaacccacagccaacatcatactgaatggggcaatgttgaaagcatttctcacaaaaactggaacaagacaagtacgtgcactctcaccacttcttttcaacatagtactggaaatcctagccagagcaatcagacaaaaataaataaataaataaagggcatccaaatcagtaaagaggaagtaaaattgttgctgttcactgatgatatgattgtatacctagaaaacatt

SEQ ID NO: 916837 - DNA, 654 bp, Homo sapiens
cacagcaggctgtgaagtgagcagcaggctctgctcttgtgtggcttctctgtagctgtggctttcacgagagaatggataatgtttgaggtgagggagaaaatgggaaatccagccttttgacggctatttggaacatcgggtgtttgcagttccagccacatgtcgtgagcttcccatgagctctgcattttgacaaagaaatggtttcttgagcatttatcatcactacctgcatcttgagctgagccattgatatggttaggctttttgtccccatccaaatctcatcttgaattgtaatccccataatccccacatgtcaagggagagatgaggtggaggtaattgaatcatgagggtgtcttcccccatgctgttctcatgatagtgagtgagttctcagagacctgatggttttataagagactcctcccccttcacttagcacttctccttcctgctgccttgtgaagaaggtgccttgcttcccttttgcctacagccacgagtgtaagtttcctgaggcctccccagccatactgaactgtgagtcgattaaacctctttcctttatgagttacccagtctcaggcagttctttataggaatayggaagtggatgaaaacagccatcaatggtgcggtgcaggg

SEQ ID NO: 916838 - DNA, 618 bp, Homo sapiens
catgtggcttttagacttagtaagtaatgcggcwttccatggtgatagcacatcagtgcccagatgggaaaggccagcggcatgtacctataacataaatgccttcaatagctacatttggaatctgaaaaactctctgaagctcattttgagatattgatcctaagaaacgaattggaagtccacacaaagactcgggaagaccactgtttattcctcacagcgtaatttgtgatagtgagtaattagagtctgtctaaatgtcctataatgaggaaatgattaagtaaattatgctccgaagatgcttacaatgagtttgtaataacatggggaaaagtctggcatattaagtgagaaaaacaacaaggcaaaaaatcatatctggaggctgatctcaaccatctcaaccatataaaattatagtttgaaagatagacacttttttgttttggagatatgatcgcattctatcgcctaggctagggtgcagtggcatgatcatagcttacttcagtctgcatttcccagcctcaagtgatcttctcacctcagcctccctgggactataggtgcacaccactatgcctggccatttaaaaaagtttggtagagatg

SEQ ID NO: 916839 - DNA, 611 bp, Homo sapiens
tcacatagactgcatgttttctgcgtgctggggtccattctcatttaattctcacccrcctgcccaccctgggaggcaggtgctagtatcccgcccatgtgacaggagaggaagtagaagcagaggtgtcgagtagctctcacgcctgctccctgccttccaagtgcactcctagctccacgtggccaaatccaacttcctttttggggtatccctaaaatgcctcctctgcggtaccggactgcgctcagggtatctctcttcctgtgcacaccagtcagcttttgctaattatgctgcataacagtctcactgggctgcaacatgtttctttctcgctaaggttgggaggtagacaggccagcaggggctcggcccacctccatgtacctgcattttggtaccgggctgaagaagtagcctcttgacatgccattctcagggtggggactggaataagagtggccacgccaaactacgctgtctccttggacgtggtatatgttgtgtctgctcacgtcccacagcagggcacatggcccagcccagagtcagtggggcagggaggtgactgccctccaggaaatgaaggtgacacagagaggaagggg

SEQ ID NO: 916840 - DNA, 583 bp, Homo sapiens
catcacactacccaacttcaaactatactacaaggctacagtaaccaaaacagcatggtactggtacaacaatgacacatagatcaatgaaacagaatagagaacccagaaataagaccacacacgtacaaccatctgatctttgacaaacctgacaaaaaaagcaatggggaaaggattccctatacaaaaaattgttctgggagaactggctagccatatgcagaaaattgaaacaggaccctctccttacaccatatacaaaaatcaactcaagatggaataaatacttaaatgtaaaatccaaaaatataaaaaccctagaagaaaatctgggcaataccattcaggatatagacacaggaaaatatttcatgacaaagacaccaaaagcaattgcaacaaaagcaaaaattgacaaatgggatctaattaaactaaatagctcctgcagagcaaaagaagctatcaccaaagtgarcagacaacctacagagtgggagaaaaattttgcaacctattcacctcacaaaagtctaacatctagcatatacaaggaacttaaaaaatttacaagaatgga

SEQ ID NO: 916841 - DNA, 573 bp, Homo sapiens
gctatagcttctttgtattaaaatataaaataaaatagtaatgcatcttcataattatatacttagccctttatgttttgttaagctagttcataaaattctaaaagacttcaggtctctgccatctraacacaatttgaaactcactgggataggtgaaagacatgaagtagatggataatagcatgagaatacaataagaaaaagcattagattgtacaatgagaagacccacttggagtggatagtatgtatcttctgtattagtagaaaataatgttggttgggtaataataaggtacagtactatctaccaaggtctgtctcagagtcccattctctcctgaaagaatgaaatgctcaggatgctcattcagagggaacaaagggctttgcccacgcaaaaaggctgggattactgatcaaatcctttaggggaggagataaatgctgacaggagtgcttagactagagaaaggccagaaatcaattagctccagagagaataatttaatctgccatagaatgtggacccttttggtacagaagctttcctacccattccctactgaa

SEQ ID NO: 916842 - DNA, 573 bp, Homo sapiens
gtttccttgccagtctgagtgtctggcaccaagggcatggagactgctctgttccaaggcccctctggcactgcactcaagaggccctataccttccccatcacctttaccccacttccctgtgcaccagttcccataagccaaggccaggcttctgacagcacctgaacttctctgtccaatcagtgcgcaagagcaggctgtcaatggggcggcctcagagggtttcctgaaggaggtagcaattgagctggcttttgagggatacacgtttattaatcaagaggcagcgtttattggctgataaccgccagcttgttactaacatatgagtgcactgtctcatggaacactggcacaaccctaggggcaggcattgctttacacatgaggaactggaggctcagagataaagtcacttgtccaaggtcacatagctagtaagtggcagaactgaggtttgaaccctggtctctgatcccagagcaggcattccccrtaactccagatggggtgggagtgtggggccatgttttggaatcagttgacaattcagtgtggccaaggcaagga

SEQ ID NO: 916843 - DNA, 668 bp, Homo sapiens
ataaatatttatagaataaatggcttgtccaccccgaattttaatgtttttagcctgtattttgttttacgtatgcttgcagatatacaggcatgaatctcagtccacaaactaatgtgtacaagaaatgaaattttattttctgataaatttcaacttagaatcttcattccaacagagtttgaaaacttaattgtagtcagtttggggctatcacacttttttcctgtgggttgcatctaagttattgaggggtaggtggagaactcatttagtgccaagatattgggaggtgatctactatatcctcaatatcatctgctcatataggcgtctgctgagatgtccatagtcccatctgagccttcatcaagtgtccgtagacaccatcaggaaagatactccttgctgttaccctcattgctcctttaggttgattggttttttctgctattttcatgttactattgtgctcatgtgaattactcagctgttcctgcaccatgatgaggtgtagtaaatttctgtgacacagtctatggccccttctgcctgaacacatgtaagccattttttctctggtgtatcttattgtttcccaagggatttacttaaaaatraggcccaaattctctatctcttggaaaccaaaaacctatgtaactttt

SEQ ID NO: 916844 - DNA, 566 bp, Homo sapiens
gctgcaataaacatacacttgcaggtgtctttttgatataatgacttattttcctttgggtagatatytagtagtgcaattgccagatggaatggtaaatttacttttagttgtttaagaaatcttcatactgttctctatagaggttgtactaacttacattcccaccagcagtgtataaacgttcccttttaaccacatcaatgccaacatttattgttttttgactttttaatcaatggccactcctgcaggagtaagatggtatctcactgtggttttaatttgtacttccctgatgattagtgatgttgagcatttttttcccatatgtttgttgcccatttttatatcttcttttgagaaatgcctactcatgtaatttgcccaccttttgatgggattatttgtttgcttgttttcttactgatttatttgagtttcttatagattctggatattagtctttggttggatccatagtttacaaatacttcccccattctttgggttgcctgtttatgctgatgattatttcttttgctgtacagaaactttttagttta

SEQ ID NO: 916845 - DNA, 618 bp, Homo sapiens
tttaaataatcatagtttgtcagtctttctttaagcaaaaatattgtacrttaaaaattctggcagtttcgttttgtaacacaaacacaaatatttttccttgattagctctggtctggaatgcagtttgtgacagggtctgggacatttaatctatgttttgttttgttttgttttacaattataagaataattaagttagtcctagtgtccattttgacttctgttttcatgagtatattaatagtatcctatttagaacatatattggtgaggccggagttgtaggttttcttgtctagaaaaggtagcatcatcatcatagccagtattcctaatagccagccatctaaaacaatctttttgtagattgttttgaacaatcaagtagattaggtgagtgtgtgaagaactcaaactcttgccttattgatggtgggtcaggagcctcattgttgctcctaatcagcacaagatgttacacaggagtctactatgaagtcttttatggacaactctcatttttaagtacaattcccctaatactaacagtcctctgaagttaataacaaagagtattgttttataagtactaaccactggcagaaggtacataag

SEQ ID NO: 916846 - DNA, 599 bp, Homo sapiens
ctggcctgtgcaccacctaaggccccctttcaagaccaaaatacaggcttctctggctgccaggggtgccagctgctgagggtccctttggtgaaggagccaactccccccaggagaggaaggagccatcctctcctggggacagctaaccactgaccagtcaacgcaggatgtaatggctgagcccctgccttggtctggaaccaagcgggaccacccctgctcccaagtgcccgtgagatcacctgaggcctctgtttctattgcactgcagcccaacctcaccctctgccccccacaggagttgttattaagagtgttccccagtaaacctctccagggtcaccctggattctgattctggtgaagccgccctgtgacaatgccccttcccatctcggctggggcccaagagccgtgcaccaaatccctcatagaaatgagacatagcaccgtcgcctgctatgctgccagcagcaccttggacagaccctgtgacatgcttccaactcyccgctcttcaatctagggcaggcatttgtgcccagctgacagatgccaggttctgggtaaggatgggggccaccagcgagagccct

SEQ ID NO: 916847 - DNA, 590 bp, Homo sapiens
gtgttgattttgcaacttttctataagtctaaaattatttcaaaacaaaaagtaaaaaaaaaaaagttgaaaatatgtagttagggaactccacaccaagttgggggaartatctgaagttagagagctagatagaatgtctgagcaccaaaacctcttttccattatgggttttctctgtctattttccttacacaatgaccaagtgtttcaagatcccaaaatcccccagtgtaacaggcaatctaaatatcctattcccatgtatgggagtgcttactatatgccagaccctgttacagtgttactcatttaatccttacaacctgcatatatatgcactattaatattcccatctaactgaggcacagaaaagttacataattgtaacttgaggtaacccagcttgtaagtcacagagtcaagattcaaagccaggcagtctgggtctagagcttatgctccctctattttacagtttcttttaaagaaaattccatacagtaattctgtaaattccattaatacattctagtattactcgaatgtatcagctgacttcaattttattatttgtcttttgaagtca

SEQ ID NO: 916848 - DNA, 618 bp, Homo sapiens
tggaggttaagtcattctatgagttaattacrcaaaaatcaaaatgagaagctgattagctttgttaccagaaagttgtacttttttctttgtaaacctgtaatgacgtataatttctcagaaatactgaattcagttcctcctgacctgtttctaactacagaaccagaaaatatatacagaaacatgtcaaatgatttctaataaagtagttcctgaacagcatcttgttttgttattgaaattctctctcctatttaaaatatacacatgactaaataaaaagtgttttattactcataaagagctctttatttaaaatgatggcatttttgaaaattataaaaacataatacagctacaggaagatttctgaagattcttaaggaaaataacaaaataataactattggaaacagagttcaggttttgcagttattcataaaaaacaatgtataaactacgctatgttctgcataaacatattttaagtagaagcaaaactggcacttactataggacaacctgttatataaaaaatacaaacttaaaaaaatagaacaagaaattaggaaataatcataattaggatttaaatgaacaccaagtgttccacca

SEQ ID NO: 916849 - DNA, 618 bp, Homo sapiens
tggaggttaagtcattctatgagttaattacgcaaaaatcaaaatgagaagctgattagctttgttaccagaaagttgtacttttttctttgtaaacctgtaatgacgtataatttctcagaaatactgaattcagttcctcctgacctgtttctaactacagaaccagaaaatatatacagaaacatgtcaaatgatttctaataaagtagttcctgaacagcatcttgttttgttattgaaattctctctcctatttaaaatatacacatgactaaataaaaagtgttttattactcataaagagctctttatttaaaatgatggcatttttgaaaattataaaaacataatacagctacaggaagatttctgaagattcttaaggaaaataacaaaataataactattggaaacagagttcaggttttgcagttattcataaaaaacaatgtataaactacgctatgttctgcataaacatattttaagtagaagcaaaactggcacttactataggacaacctgttatataaaaaatacaarcttaaaaaaatagaacaagaaattaggaaataatcataattaggatttaaatgaacaccaagtgttccacca

SEQ ID NO: 916850 - DNA, 611 bp, Homo sapiens
tacatttttgttgaaaactggacatttaaataatataatgtggcaactctgggaatcagrttctctcccctcctcaggatttgtttttattgctttgttttgtttttagtgaccttcctgaactaattctgtaaagcctgtgttctttgtcatatgtggctacccaagtctctgctccgttagcttagtggtcagctaatgattggacagatatttctttaaatcacctgaaaccagtaagtctcccagactttgctgatgggctctatgtgcatgtcagggtgtgcctttaatgcaaaggcaggctgtttacaactttgccttatccttcatttcctgcttgtgcagagttttgaggtcagccagagatcctaggcatacatacagccttatgcgtatttgtggttttctagattcccaggcatatgtcagagctttttaaagcctaataatggactgataatggatatataattacctagattttccttttaagttttcttgaaaagcttgttgttttttcctaaatgttatcactgctgtgttaaacagttgctgctaattgtttctgaaaagcacccccagagaaagctgtttataccagatgagcc

SEQ ID NO: 916851 - DNA, 586 bp, Homo sapiens
taaagagcactcatggtatactaaggaatttagaaaccccacatactcacccaggataggaaacatgctcagaaaagacctcaaaagactcttaagttttcaccactggcttatctatatgctcagggaagtaargaagtgaaggcttaggcaaaattataaatgtcctggctaaatataaaagaagggcctggaataaagtcaacctgcaaagactgggaaaggcgggttttttgtttgtttgtttgtttgattttctagacggagtctcacattgttacccagtctggagtgcaatggtatgatcttggctcactgcaacctccatctcctgggttcaagtgattctcctgcctcagcctccctcgtagctgggattacaggtgcccgccaccacacccagctaattttttgtatttttagtagagatggggtttcaccatgttggccaggctggtctcgaactcctgacctcatgattcacccacctcagcctcccaaaatgctgggattacaggcataagccaccatgcctggccttcccccccacccccatccaagctactgaagttcaaggaaaacccag

SEQ ID NO: 916852 - DNA, 592 bp, Homo sapiens
tcctggttgggtgctatttctctagaccacatagtatatatctcatatcatgtttcctcacaaatatcagaatatcctggcacttaaaagagatttttgtaaattcttatagctgatagaatgtatagtatatgacattcagtaattcacttattcatcatcgcaataagcatataacttacaatgctgcaggccctgaagtggatagtgttgaaatatttgaggcattcacagaggtatcactaccgaataattcttattaaataaatctctaggagcattattggatataaatgcgtaaatttttctaagagacctataattcttcatttgaaagggttttcagaagtcacactatccatttcctacctccaagcagagctgcatccaactttgatgactgcaatcatgtgtagtatcactgatctaagattatatatatagagagtatagtatcactgatatatagtattgtatcactgatctaagattatatatatatatatatatatatatakagagagagagagagagagagagagagaaagagagagagagagatttaatccacaccataattctaacagataga

SEQ ID NO: 916853 - DNA, 637 bp, Homo sapiens
taagttgtaagtgtgtctactatttctatttgctcttggagtggttttttgggtgcccaggatgaattccagaaaaattgtgacatcttgaaaatacatttgattcataatttttcactgctgagagtaattcactggattggaagcctgaattgaggataagccagaaactttgaggaatttggcaatttaagtgcaaaagtaatcagaatgaagagaagaacaaaatgttggcacacaatatacttctcacaaggaaaacctggccttgtagcaaggaaggctaaacacaagtcccccccaccccctaaaaaaaggaatgaaagctaaagaggtcttaaaacttaccaaaaaattttccatttgtattctttcatttgctatgagtcagcagaatttgaaaacaccatcaaacttgacatcaaggggccaggctgactcaatggaccaaaagattatggtagacacagttgtcaaagcaaaaactgcaccatgcaatgttaaacaggtaagggagactaagcctactgtaagagtatagagaggttaatctgagctcaaytttgctgaaacaaaaagcaggacagatttaagagctgggttaaggaatcttaggatatctgtgtttgctaattgg

SEQ ID NO: 916854 - DNA, 543 bp, Homo sapiens
ttgatagcctctgacatgaagatggccagtgctgcaactacccttaaacagtgaggccagccttttgctactacatcaatttccttacttaggtatgccactggttgtggggttgtcccaagagtctgagtaaggactccaagagctatccctgctctctctgtgacatataaagagaagtttgtgggaaggcttaaagctggaacttgtacagggcctgctttaaggttttgaaggctgtttctgcccctggttaccattctactagataagtatttgccctctgggtctccttgattagagtatggaggggcctgactatctcactgtatccagggatccatagtcggcaaaagccggtgattccaaggaacccctgcaactgttttaatgtcttagggcaaggataagccagtataggctgtattcattccttgctgagggccctggtccctctggctaagattaggcctagatatttagcctgctgtaarcaaagctgcacctttgacctagatgccttgtacccttgattaggtagaa

SEQ ID NO: 916855 - DNA, 655 bp, Homo sapiens
tatctttttttttttttttcattagtttcaaagaacttctagatttttgccttaattttattatttacccaaaagtcatttaggggcaggttattcaatttccatgtaattgtttatggttttgagataatttcttagtcttgatttcaaatttgattgtactgttttccaagagagtggttgttattacttcagtccttttgcatttgctgaggagtgtttttgtctgattatttgatcgattttacagcatgtgccaagtggcagagagaagaatctatattctgttgtttttggatggagagttctgaagatgtctatcaggtccatttgacccagtgctgaggtcaggtcctggatatctttgttagttttctgtcttgatgatatgtctaatactgtcagtggggtgttgaagtctcaagctgttattgtgtgggagtctaagtctctttgaagatttctaagaacttgctttatgaatctgggtgctcctgtgttgcatgcacatatatttgggataattagttcttaatgaattgaaccacttgccattatgtaatgccctttttttcttttttgatctttatttgtttaaagtstttttattctgaaattaggattgcaatccctccttttttactgttttccatta

SEQ ID NO: 916856 - DNA, 740 bp, Homo sapiens
ttatttgtatacagtgcagcaagaataattatttttcacatagtcctttcaaattggttttgatggaactctgtttcatagaaggattctgagataagacctttttaaagccaagcccagcgatggatttgtaacaccaaatacctgtgagttgggtgaattcttgtcctcttgagactccaagataacttgggattctgggcctttcagaaagtgacattctttacttaccataaatcagaaaccctgtacagcaactgtgtacacaaaatatgaggccagttttccaagagctttattggcttcataagtcaagtttaattccttaaaggaaagcacatcattacaggcaaacccttggtaaaagaaaaaaaaaacagtttttccaattgtgttctgtttcaaaaggaaacagattcttattacacttatgcaaataaatatattgccataaattaagaatactcacaattagtttccaaatttcagaaaaatcaggaagagagaaaaatatgctccaaattttgttcataggagtatattttagttaattattaaaagctgttaatagctcaaaagaaaagtttccttgtctgtgaacagcagacaaaggattagcaatattgtaagcaaaaagtcaaaaagatcacttcgatctcctattagttcagttcatgcagttatttcccrtactgtttgatattaatgaacatttcagctcctcaagagccctgaacttt

SEQ ID NO: 916857 - DNA, 653 bp, Homo sapiens
caattctctttcctacatctattgttctgttctcttttattgttttggtaagtagttaggagcaagaaaagatgtgctagagaaaacagagtcctatgtatctgcatgaatgtatatgcattgtgacctcaacacggctctgtcctggggacatgtgttaagacggcattacaaataaggctatggtgtttctggttgatcagtaattaagccttctgctacaagaatcaaaatgaatctattcatgatcattcccacactcatagccaggtctagggtttctgtcctgtgctgtaaaagactttggtatactaatttgtgtgtggataacaaggcagaaatgaagagttctcttcttatcaagttttatcacatgcaaacatgttatggaaacttggaagaagttgcctcactttttgagaccttgttttcttcacaacactttacttagtattttacttctattaggctgtatttatccattcctgattatagtttacttcaaaattataaattagtaggtgtkccctttcatcagtctatgaactgttcctaggaagcttttattcaaagaaaatcttttccttcagaaattatattaaagcagcagcagtactttggcaggaaaaaaataatctagtatcacaatggaa

SEQ ID NO: 916858 - DNA, 676 bp, Homo sapiens
caaatattttcttccgttctataggttgtcttttcattctgtcagttgtttccttcctgtgcagaagctttttagtttgatgtagtcccacttatttttgttttaatttggcttatctgactcattcatttactctacaaatacgtattttataactcttatgtattaagagttataaaatacacttatctaggtgtctttatctaggagttataaaatactagtatacatacacttatctaggagtataaaatacacttatctaggagttataaaatacacttatctaggtgtatctaggcatttatctgggtgtgctacttattaacctattaactcccagctccagattgacccttccgcactctgttgtatgccacaatatcttttcatgttaaattatatatgttataaaatggaaagtgacatggtttctattttcttcactgtcagaccccagaatttctgctctgtgtccagcacctccctgggaactaaagatacagaagtaagcaagagcagatgcagttcctaccatcacagaactcatagtctagtccaggagatagacactaatcagttaattataaaatggcactgaaattkcagatggtgatagtaatactgaggaaagaggcatctggtagtgaatgctaggagcatgggctgtgtggtc

SEQ ID NO: 916859 - DNA, 594 bp, Homo sapiens
gtgcactataggttctgcattctattccagaaagagttttgatatgtgattacatgtaattacatgtgttggtttcacttagatttgtgtaagttaatatattttttaaattttttaattatttattagaacatgtacaaaatttattccctcagattattttaggtggaagaaatggtcactttacatgagcaattaaagtgtcctttttgcatttatatatatatatattttgcatttatatatatatcagtatatacatatcagtgtacatatatgtgtgtgtgtgtgtatatatatatatatatacactaagcaatttgaaaggcaatatgtaattgagtttagaatgcgactgatagtttggaggaggtagaaggagcatactcctttctgtttgcttctttttcgtatctggaaggaaatgttttctttctttattttttcccccattttaacccgkttttacacctttaccacctcccaactgctctattgtaacaatcttgtaactggctttctgcctttagtgtaaacctgcacacatacacacaccttccattctgcaccaatagtcataggcttaatcttaat

SEQ ID NO: 916860 - DNA, 594 bp, Homo sapiens
gtgcactataggttctgcattctattccagaaagagttttgatatgtgattacatgtaattacatgtgttggtttcacttagatttgtgtaagttaatatattttttaaattttttaattatttattagaacatgtacaaaatttattccctcagattattttaggtggaagaaatggtcactttacatgagcaattaaagtgtcctttttgcatttatatatatatatattttgcatttatatatatatcagtatatacatatcagtgtacatatatgtgtgtgtgtgtgtatatatatatatatatacactaagcaatttgaaaggcaatatgtaattgagtttagaatgcgactgatagtttggaggaggtagaaggagcatactcctttctgtttgcttctttttcgtatctggaaggaaatgttttctttctttattttttcccccattttaacccggttttacacctttaccacctcccaactgctctattgtaacaaycttgtaactggctttctgcctttagtgtaaacctgcacacatacacacaccttccattctgcaccaatagtcataggcttaatcttaat

SEQ ID NO: 916861 - DNA, 621 bp, Homo sapiens
cttaaattccatatctccaaatacagtcacactgggaattaggtcttcagtatatgatttttcagggggacacaattcagtccataataacaggtaaaattaatttttaaaatgtgtttcatttaattcaatatatctaagatattatcatttcaacatataaccttttacattttgtataacatgctatttttatactgcatctttaaaatctggtgtgtattttatgcttatactgcatcttaatttggactagccactttttcaaatactctgtagccacatatagctagtgactaccatattggacagcacaggtatatcaggaccagatatactattccagatgacccctctctaagctgcaacttaaacctcatccccatttgctcaggctgcaatgttttgcccatataaaatgactttagttacaatacattgccaagagtaagggtggattttcccactgcacctatcaattcttttcatacaaagtggcacacatctagaaggctttgtgkagatgagtcaagatgaggaaacgaacaactttctttgacaacagaggctaaatcaggaagagtagaaagcaacagttaagaaacaatttcaatgttctgg

SEQ ID NO: 916862 - DNA, 665 bp, Homo sapiens
aaaagtaaccccgatgagaagatcaatcatacccagagccttggcatcatgcagtatatctatacaacaaacctgcacatatgcaccctgaattttaaaatagatgttgaaattatatttaaaaatatttctaactaaccccaaaataattgatttcttttaaacaaacaccagaggcttctaaagaatatttttgcctacattttctttggtcattttaaacaaatttgagcatgcacccctattttataataaagggatttttgccctcgtttcaagaaaaatgtgaatcttggtacttaggagggaatgaggcctatcactgtatcttgataatgctaatcaacaatgcaggagaggaaaataacagcctggatgagcagactacacagagtgagtgggaagctgatgaggcttattgctttcaaatgtcgaccctatttataatgaacactcagaaaaacaggaccacgttccctttgcacacaactgtggcaaagctgtactctcctgtttctcacaatgagattttttaaacgacgccgttgatcttcttgggaatcaaatgattcagacaaatgtctagaatgggctttgaaaggcatcttgggaagaagtgtcccyaaaccctcgtggataaggatctattccattttcaaatccca

SEQ ID NO: 916863 - DNA, 561 bp, Homo sapiens
aaacattactacaacacttgaataagaaacacttccatagcatttacaattctaagtgctttccatgtattgacttagttaatcctcacaaggatataaccatgaggtgctattactatccctactttacagatgaggaaatagaggcacagacttcagataatttgcccaaggtcccacagctaataagggggcagaattaggaaagcctggctgagtctatgctctcatcacttgctcaactctgcctggaatgcccttcccgtaccctctaccgcctctgcccaatcctccgggttctctgctccttccacacacccccatctcaggtcccagtcttttgtagcattcttcactttttctgttacagatcctcagacaatgcttccttgaagaagacttgcctgtctaaactgccttcccatcccaatccctgttaccttctatcctttctctgctttattttcatttgttatctctcttcttcccaakaatgtaagctccataagaacaggatcatattttgaatcccctagaaaagtgcctagtgtaatatttgtt

SEQ ID NO: 916864 - DNA, 608 bp, Homo sapiens
tcctagtgctttgggaggctgaggtgggcagattgcttgagcccaggagttcatctggtacaaattccagcaatttttttgtctctacaaaaaaaatacaaaaattaggcaggcatggtggcatccacctgcaktcccagctacttgggaggctaaactgggaggatcagttgagtccaggaggttgaggctacagtgagccatgatggcaccactgcactccagcttgggtgacagagttaggccttgtctcaaataaaataaaataaaactaaaaataaataaaacattaaatagtgtagttacaggatgtgtgcttgcaagtaaaaaaaacaactgatctaattttttttttttgaaagatggagtcaaggctgggctcagtggctcacacctgtaatcccagcactttgggaggccaaggcaggcagatcttttgaggtcaggagttcgagaccagcctggctaacatggcaaaaccccgtctttactaaaaatacaaaaattagccgggcatagtggtgggtgcctgtaatcccagctactcaagaggctgagacatgagaattgcatgaacccaggaggcagaggttgcagtgagccaagat

SEQ ID NO: 916865 - DNA, 595 bp, Homo sapiens
gaagaaaaaagaagattcagtagtggccacagggctgctaaaaaatggatgacaaaagaaacagaaggaagaaaaataaagattttttaagattttactttaagttctgggatacatgtgcagaatgtgcaggtttgttacatagttatacatgtgctatgggggtttgctgcacctatcaatctgtcatctaggttttaagccccacatgccttaggtatttgtcctaatgctctccctccccttgcctccaacccccgcaacaggccctggagtgtgatgttcccctccctgtatccatgtgttcacactgttcaactcccacttatgagtgataacatgcagtgtctagttttccgttcttgtgttagtgtccctgcaaaggacatgaactcattctttttatggctgcataacattccatggtatatatgtgccacttttttttatccagtcaatcattggtgggcatttgggttggttccaagtctttgctatagtaaayagtgctgcaataaacatacgtgtgcatgtgtctttatagtagaatgatttacaatcctttggatacatacccagtaatgggattgctggg

SEQ ID NO: 916866 - DNA, 606 bp, Homo sapiens
gttcaattgcaataaaagaatttacagattgatgaaatttttttaaaaaattacataagctgcctcttgtcatagggctagagagagctcattttaartgcttagaaaaaaatcagtgaatgcacctaatgctatgatgaattacatcttaacatatcacaggggtgaaggatggtggtttgcaagctttccgataaatttctggaattttgtaatgaaaagtattatgcaagagttggcattaaatccatatcagagctgatattttaggcctgttgctaagtacatgtagtcattttgaagtttataatattgtaggttgaaaagaattttttatttgatttatttcaaagcttagccatgtatgtagttgtttctgactttgactgacattaactgatcttattctattcttgacaccaagaaagaaaagatgtatgaaaacttatctgatatttgaattaccagattacattatcaaatgctacagtaactcactgattgatttgttcaattagtttaaaatagcaaccatatttacattatttagaaagaaacctttgtcatctagaagggtactttaaagtcctttttgttttagataag

SEQ ID NO: 916867 - DNA, 609 bp, Homo sapiens
taaatcactaaagggctaaggaaaacaaatgtacttttcatataatatgatccattctttttaataaatccattataaacataactgcagtgttttcttatatatttatatactacgtgtaaggcactgtctatataccaagattattcaaattctgtcaataactctgcaaggaaaatattatcactcccacattgtggatgagaaaaataaggttcagaaatgtcaatcagatactttacccagtaaagtttaaaatattagcttcaaaatactgagtcaagtatttggatttaggtttctttgtacaaaactatgctgtatcaattattatgttaatgttttgtctcttttttttctcctattacattttaaactcactgatgcagatagcatggacagaaatatcctggcagatttcatagctgtttagagccctcaggtctctgtggacccatttcctctgagagattttctattaggagaccacgaatccagtgtaggacacarcacccactactgctgctacattgtctcaactgtcttgttcttcctaggatttctctctcataggctcatgctttccttagccaggaagggggaggagca

SEQ ID NO: 916868 - DNA, 603 bp, Homo sapiens
caatgtactttggggagttctgtgaggaggatatcgacagccttacagtccgacattcttcacaactatctgccaatcaaaccaaactacayttcctttcatgtctttgcaagggtctgttttttctccctgaaagaagttatcttttaggatttcctggagaaatcctaaaattcatccttgaggtttctacttagttaacaactttgcagctaagtgctctcaacatgtttttgaccgcgttgtgacctccaacgcctcaatggaatctcaatgtctggctctccaagtttgtctgttcctcctccagctcaccttcttccctacccagcatgactgccctggttggttacttaacaggccaccaacaaagactccttatccttacaataaactttgactccttgttcaaacatgaatatatgtggaatacatgcaatccttcttttcatctggtacttgtcctgggtgctgagtgttgctggaggacatcactctactggcccagctggaaccaagtcatttttatagtttcagcctctgctgggccactgtcctgctcagcagggccttctgctttcctgtgccccatactgtttccat

SEQ ID NO: 916869 - DNA, 603 bp, Homo sapiens
caatgtactttggggagttctgtgaggaggatatcgacagccttacagtccgacattcttcacaactatctgccaatcaaaccaaactacacttcctttcatgtctttgcaagggtctgttttttctccctgaaagaagttatcttttaggatttcctggagaaatcctaaaattcatccttgaggtttctacttagttaacaactttgcagctaagtgctctcaacatgtttttgaccgcgttgtgacctccaacgcctcaatggaatctcaatgtctggctctccaagtttgtctgttcctcctccagctcaccttcttccctacccagcatgactgccctggttggttacttaacaggccaccaacaaagactccttatccttacaataaactttgactccttgttcaaacatgaatatatgtggaatacatgcaatccttcttttcatctggtacttgtcctgggtgctragtgttgctggaggacatcactctactggcccagctggaaccaagtcatttttatagtttcagcctctgctgggccactgtcctgctcagcagggccttctgctttcctgtgccccatactgtttccat

SEQ ID NO: 916870 - DNA, 437 bp, Homo sapiens
gtgattttggttccagacagcactgcaagaaagtcaaacgtatcttttggtttcccagtgcatrtaaaagtcatgtttacaatatatagtagtctattaagtgtgaaatggccttatgtctaaaaaagtgcataccttaattaaaatattttatggctaaaaatactaacaatcctctgagcctttagtgagttataatctttttgctgatagaaggttctttccttgatgttgatggctgctgctgcagtttgaggtggctgtgataatttcttaaaatgaaagaacaatgaagtttgctgcatagattgactcttcctttcatgaaatattttttgtagcatgtgatgatgtttggtagcattttacccacagtagaccttctttcaaaattgtagtcaatcctctcaaaccctgctgctgctttctcaactaag

SEQ ID NO: 916871 - DNA, 437 bp, Homo sapiens
gtgattttggttccagacagcactgcaagaaagtcaaacgtatcttttggtttcccagtgcatataaaagtcatgtttacaatatayagtagtctattaagtgtgaaatggccttatgtctaaaaaagtgcataccttaattaaaatattttatggctaaaaatactaacaatcctctgagcctttagtgagttataatctttttgctgatagaaggttctttccttgatgttgatggctgctgctgcagtttgaggtggctgtgataatttcttaaaatgaaagaacaatgaagtttgctgcatagattgactcttcctttcatgaaatattttttgtagcatgtgatgatgtttggtagcattttacccacagtagaccttctttcaaaattgtagtcaatcctctcaaaccctgctgctgctttctcaactaag

SEQ ID NO: 916872 - DNA, 437 bp, Homo sapiens
gtgattttggttccagacagcactgcaagaaagtcaaacgtatcttttggtttcccagtgcatataaaagtcatgtttacaatatatagtwgtctattaagtgtgaaatggccttatgtctaaaaaagtgcataccttaattaaaatattttatggctaaaaatactaacaatcctctgagcctttagtgagttataatctttttgctgatagaaggttctttccttgatgttgatggctgctgctgcagtttgaggtggctgtgataatttcttaaaatgaaagaacaatgaagtttgctgcatagattgactcttcctttcatgaaatattttttgtagcatgtgatgatgtttggtagcattttacccacagtagaccttctttcaaaattgtagtcaatcctctcaaaccctgctgctgctttctcaactaag

SEQ ID NO: 916873 - DNA, 437 bp, Homo sapiens
gtgattttggttccagacagcactgcaagaaagtcaaacgtatcttttggtttcccagtgcatataaaagtcatgtttacaatatatagtagtctattaagtgtgaaatggcmttatgtctaaaaaagtgcataccttaattaaaatattttatggctaaaaatactaacaatcctctgagcctttagtgagttataatctttttgctgatagaaggttctttccttgatgttgatggctgctgctgcagtttgaggtggctgtgataatttcttaaaatgaaagaacaatgaagtttgctgcatagattgactcttcctttcatgaaatattttttgtagcatgtgatgatgtttggtagcattttacccacagtagaccttctttcaaaattgtagtcaatcctctcaaaccctgctgctgctttctcaactaag

SEQ ID NO: 916874 - DNA, 580 bp, Homo sapiens
tactgcacattaactttacccttctcaataatcatggaatgtttaacttcagaggagagttcataagttaatagggtgaatcaattgagttaatagaaattgagatgattgagatgatatttttaaacaaaaaagtttttgaaaataaagaacagaaaactttatttgaacaagaaaaagttaagaatgttacatttcaaaaaatttaaattatttttaatttacaaataattgagtacttataaggtacaattgacatttcgatatatgtatacactatgaaatgattaaatcaagctaattaacatatccatcacttcacatacttatttttttatgtggtatgaatatttaaaatctgtcttagcaattttcaaatatacaatacagctggccctgtatttgtgggttttgcatcctctgattcagtcaaccatggattgaaaatatttggaaaaaatgataaaatacaacaatacaacataaaaataatacagcttaaaagaatacagtataacaactayttacatagcatttacattgcattaagtattataagtaatctaaagatgatttaaag

SEQ ID NO: 916875 - DNA, 634 bp, Homo sapiens
ttccagttgccaaaattaagtatctacatcttttttttycccccaatattgtcaaagctgaaaatattgacattctgctgtagcaataagattccttgggctttgctcacagattaattctaaatttgaaaaaaaaagtttatcactttctaaatatcacttatgtagtcaggtattctttgcttgccaagaaactgctgtagtaggatcccttttcagtgagatcctgggttaaacccagtttcctggattccttaccttcctatatcctgattaacaatctcaattggtcatatccttagtcaatttctagtaaaactctgcgtggtaggtaaattttatgtcctttcacattcacaggtatttttattctttctccatgcctgattgtgactttgaaaagatctacatttattaataaaaaataattttcctttagaacttcaaggactttctcattatcttaataatagaagtattttttttgttgtcagtttgtttcattttggtttccgccactggaatattttatgacttttctataacacctgaagttctgaaattttgaaaatgagatatttagaagtgagtctgttaattttgctaaatacctgacaagactattccatggaag

SEQ ID NO: 916876 - DNA, 577 bp, Homo sapiens
aaatactttttgaatacattctttcagtaaaatccaactaccattatatttgctttcctcagtatttcttggggaaggattctaaataggggagcatttgtgtatttctgtatgactctggttataatgccattcaatgtaagccttacacacacacacgcacacacacacacacacacaaatgcacacacctccagaatgctgggttcttggctcatgaatcattgaaatttatataaaatttattttaaatcctattgcagaaaagttcttagcacattcatgcattttcatgtgaccatttttatactacagttttaattttatatatttgggatcattattgttgaccttttcttttctttttttttaatagagtttattttagagaagttttaggttcccagaaaaattgtagagtacagatagatgtatcccatatgctctctgttcccacacatgcatagcctcccccactagtaacatcctycacgacagaggtacatttgctacaacttatgaacttacactgacacatcattatcacccaaagtccatagtttatattaaggttcat

SEQ ID NO: 916877 - DNA, 577 bp, Homo sapiens
aaatactttttgaatacattctttcagtaaaatccaactaccattatatttgctttcctcagtatttcttggggaaggattctaaataggggagcatttgtgtatttctgtatgactctggttataatgccattcaatgtaagccttacacacacacacgcacacacacacacacacacaaatgcacacacctccagaatgctgggttcttggctcatgaatcattgaaatttatataaaatttattttaaatcctattgcagaaaagttcttagcacattcatgcattttcatgtgaccatttttatactacagttttaattttatatatttgggatcattattgttgaccttttcttttctttttttttaatagagtttattttagagaagttttaggttcccagaaaaattgtagagtacagatagatgtatcccatatgctctctgttcccacacatgcatagcctcccccactagtaacatcctccaygacagaggtacatttgctacaacttatgaacttacactgacacatcattatcacccaaagtccatagtttatattaaggttcat

SEQ ID NO: 916878 - DNA, 611 bp, Homo sapiens
catttgtggtttttaaaaaaaattgccctgatgatttgtgcagaatgtactatagaggagctagaattgaggtagaaaaagcaattaggagtcagcgaatcataatctatggcagggatgaagagggaagaagatggtaaatagtcaaatttcagattttttttttaagagtagtgaaatgcagtagtgagaagggaggagtgagttaaaacaaggagtttgatgtctaactaaccatgagcaatcagttgagaataactcactgcctttcgaccaccctcagatttattttgatgttagatagatcagatgatctttctaatggattagatgtgaacagttagggaaagggacgatttaagggtgtatcctgggctttttacctgaataactggagagatggtggtaccgtttactgagatacagaagccttgaggaagaacaggctctgtttgtatgtatgtgttttggggaagtggraataagaagagtgttcaaataactgttttggctacattaaagatcaggtgcctattagaatttcaagtgaagtgttgagtagacaattggatatgtgagtttagaactcagcgtagctggaccagagattg

SEQ ID NO: 916879 - DNA, 570 bp, Homo sapiens
aaaaaccaattcatttttcatgttactgttaattctggaaaagaataatcactgccccttccaatgttgagggggtctgatataatgaatttgtcacaaatgtctggttcatttccttgagagattttaccaactcaaaagctcaacattaactgctgacattcagacaggtcagaatttagtagagagagcagctagatcataatttgtgtgaaggagtcatgcagttgaacttgggcagagcctccatcgctgccatcgtggttgttctgttcatgtgcccaatgtgccaccactcagggatggtcaagtacaaatgacgactaattttcactgaatgagttagtctatctatctggttgttcagtgcctctctgtggtagacgttttcttaggcattaacacaaaacatgcagtttcacaccagtttatgccatttccattggtccattaaaatgtctgttkcccagaactccttgtctctgaccttccaattttgcttcttccatatctctaaccaatccaatatgtcactgaccattgactatgagcccctacattcttaactct

SEQ ID NO: 916880 - DNA, 598 bp, Homo sapiens
cattgttaccatataaagtagccacaggactaggttgcttaattatggttacagtggtgtgcrtgttaaattaggagtcaagagaaaaaggattctgtaatgccagcactttgggaggccaaagccggtggatcacttgaggccagaagttcaagaccagcctggccaacatgccgaaaccctgtctctactaaaaatacaaaaaaatagccaggtgtggaggctgagacatgagaattgcttgaagctggaaggcggaggttgcagtgagccaagtttgcaccactgcactccaacctgggcaacagagcaagactctgtctaaaaaaagagagaaggatttaatccaccttgccactgtgctcaaagatgtgcagctttggacaaattactcatactcactgagcatatttcttcacctataaaatgaaagacatgttaaacagcctattctgtcccttcaggctttaaaattattctaatccttaagtagttgttgaccaaataattgaggcatgaaacttgttgataagaatgagtctggtaaaatatctaattagtgctgaatgaaagagcggtgtgtgtgtgtgtgtgtgtg

SEQ ID NO: 916881 - DNA, 577 bp, Homo sapiens
aggggaagagctgtgattgtcagctcacctcaaaagggtcacctattctctgcaattgtatttcatctagtgcatgttgcttccacagctctccttttcctttaaagtacgaattttgtgttttaaatttttaacttttctagctggtgtactgggagtgttgagttaatctggcagtatcccacagagaagtcaaagtcgtatatttatgttctgttatgtttttcttggattttattattttttgttttcttatatattttttaattgatgccatgcagaagaaaaatatgagtgataatttgaggctccaggaaatattatatttctctagaggttatttagttttgcttgtgtcaggcaatgaggctatgaggctaaggtcattaatatctcaaatcacccaaatctagtctaggattagttagttagaactcaagattcagttcctatgaaggatgatctgtttctrtttcaccttattccacatattagacttccaaggtttctatggaaagcgtatttttatcttatggagtccttcctttatttgtgaggcatgaaatccaaatttgtc

SEQ ID NO: 916882 - DNA, 563 bp, Homo sapiens
tgttaaaatacaaccagacatagttaaatgttttatatatggtcatgaaactaaattgtccccaattattttcatattccagttcatatcaatttcaatggctaggctatcctttgggrtatagttttcctttcatcctgctaacccattaattatccttttctacgtgtccacaaatgtcagaggtgtttgagccggagcaactccatcttgaataggggctgggtacaatgaggctgagagctactgggctgcattcccaggaggttaaggcattttcagtcacaggatgagataggaggtctgcacaggatacaggtcatgaagaccttgctgataaaacaggttgcagttaagaaacgggccaaaacccaccaaaaccaacatggccacaagagtgacctctggtcatcctcactgctcattatatgctaattataaagtattagcatgctaaaagacactcccaccagcgccatgacagtttacagatgccatggcaacatccaaaattaccctatatggtctaaaaaggagagaaacccttagtccaggaattgccc

SEQ ID NO: 916883 - DNA, 565 bp, Homo sapiens
actattttagagataaatatcaagtcatagttttatagacaaatgagcaacagttcatygtgtttcaaatattccttcctctcatcttaatgtcatatctttctccccaaccccaaatttcactcagcttttccactcaaagacacatcttcaaatataaggtggtttcaagaatcagtcagactactctctcggtaataaaataggcatctgagactatgtctaacagaatgggtaaggccagtcttcagtgtccaatctctttgctcattaaatctggaatgaacgatgttgatatgtaaatcctgcaatgtttatggattcttctgtcttccttctccccactctaaccccatctgctcccctccatcccatgcattctgagatccataccttggggtttcagattcactctactgaagatagagttatatcattgctcagtagagatctcccaacaaaccaaccccactttaggttttcctgatgaggactagaccacaacaagagggttgcctgcagatgcacaaaatgagaccaagcccaaatgaaccgggatatgtct

SEQ ID NO: 916884 - DNA, 541 bp, Homo sapiens
ctgtttgagaaaaaaagactattgttatcagaactgtttttttctacagatataggcacataaattaatagaatgcarcagagtccaaaattaagtatgtctgtctatctatctatctatctacctatccatctacctaccaatcactcttctgggtatgtatctaaaggaaataaaatcagcacctcatagaaatatctgtgctcccatgttcattatagcattattcaaaatagccaatatatgaaaacaaccttagtgtctctggaattatgactgcataaaggtattgtgttatacatacaattgaatattattcacatttttaaaggtagatcctgccatttgtggcaacagagatgaacctggaggacattatgctaagttaaataagctagacacagaaaaaaaatgctacttgatttctctatgtagaattttaaaacaatctaatagagagtaggattgttgttattacaggtaaagagaaaatggggagatgcacatcatagggtgtaaagctgcagttatgtagcataaa

SEQ ID NO: 916885 - DNA, 541 bp, Homo sapiens
ctgtttgagaaaaaaagactattgttatcagaactgtttttttctacagatataggcacataaattaatagaatgcagcagagtccaaaattaagtatgtctgtctatctatctatctatctacctatccatctacctaccaatcactcttctgggtatgtatctaaaggaaataaaatcagcacctcatagaaatatctgtgctcccatgttcattatagcattattcaaaatagccaatatatgaaaacaaccttagtgtctctggaattatgactgcataaaggtattgtgttatacatacaattgaatattattcacatttttaaaggtagatcctgccatttgtggcaacagagatgaacctggaggacattatgctaagttaaataagctagacacagaaaaaaaatgctacttgatttctctatgtagaattttaaaacaatctaatagagagtaggattgttgttattacaggtaaagagaaaatggggagatgcacatcatagggtrtaaagctgcagttatgtagcataaa

SEQ ID NO: 916886 - DNA, 648 bp, Homo sapiens
tcagagaggccaggtgtgccccgtgaccaccctggggcttcctccctcacaggccacctgaggactttgttctggatacttctctatgcccctttctttttccatccactgctagtccacggggcaacctctgtgttaatttaaataataataataatgtattaaatgcagtgcggtaccccagattagaacctggaacagaaaaagaacatttgtggagcttcagtaagacagaaagagtaagttctggtgtcctgttacacagtagggtgactacagcaaatctcaatctcgtgcatatttcaagacagctggaagggaaggtttcaaatgtcgcaacaaagaaatgataaatattaaaagtgatggatgtgggaattacctggatttgattgatcattatacggtgtatacatgcattggaacatcacattgtaccccataaatatgtacgattattatgtgtcaattacaaattaaaaatttttaatacattttttaaaagaattcatttctagttcttraagggggaaaaagaaacaagtgtttcatctataaatgcagcttcttgaagcaatttaaacgattaaattagctttaaaaaaaaaagaacatcaggccgggtgtggtggctcacgcctgtaatac

SEQ ID NO: 916887 - DNA, 648 bp, Homo sapiens
tcagagaggccaggtgtgccccgtgaccaccctggggcttcctccctcacaggccacctgaggactttgttctggatacttctctatgcccctttctttttccatccactgctagtccacggggcaacctctgtgttaatttaaataataataataatgtattaaatgcagtgcggtaccccagattagaacctggaacagaaaaagaacatttgtggagcttcagtaagacagaaagagtaagttctggtgtcctgttacacagtagggtgactacagcaaatctcaatctcgtgcatatttcaagacagctggaagggaaggtttcaaatgtcgcaacaaagaaatgataaatattaaaagtgatggatgtgggaattacctggatttgattgatcattatacggtgtatacatgcattggaacatcacattgtaccccataaatatgtacgattattatgtgtcaattacaaattaaaaatttttaatacattttttaaaagaattcatttctagttcttgaagggggaaaaaraaacaagtgtttcatctataaatgcagcttcttgaagcaatttaaacgattaaattagctttaaaaaaaaaagaacatcaggccgggtgtggtggctcacgcctgtaatac

SEQ ID NO: 916888 - DNA, 648 bp, Homo sapiens
tcagagaggccaggtgtgccccgtgaccaccctggggcttcctccctcacaggccacctgaggactttgttctggatacttctctatgcccctttctttttccatccactgctagtccacggggcaacctctgtgttaatttaaataataataataatgtattaaatgcagtgcggtaccccagattagaacctggaacagaaaaagaacatttgtggagcttcagtaagacagaaagagtaagttctggtgtcctgttacacagtagggtgactacagcaaatctcaatctcgtgcatatttcaagacagctggaagggaaggtttcaaatgtcgcaacaaagaaatgataaatattaaaagtgatggatgtgggaattacctggatttgattgatcattatacggtgtatacatgcattggaacatcacattgtaccccataaatatgtacgattattatgtgtcaattacaaattaaaaatttttaatacattttttaaaagaattcatttctagttcttgaagggggaaaaagaaacaagtgtttcatctatamatgcagcttcttgaagcaatttaaacgattaaattagctttaaaaaaaaaagaacatcaggccgggtgtggtggctcacgcctgtaatac

SEQ ID NO: 916889 - DNA, 441 bp, Homo sapiens
aactgggcctccctgaccccacaggcaaccacctctctcctggccaccactggcccctccaccagaccagacctgctcccagtcagctgtcayttcggaaaccatctgataaacctcccagccctccacagagagcatcagatgaacgataaacaaggcatctctgagaagtaggcagcaggggctgcacgtgagacaccacttctacatacagtcattcacaccgaggcgggctgacttccctgggccgacattctcatcctgaagtgtgctaagtttgggggtaggggtgtctatcttgatttaaacaaaggacaaatgccttgagaccaaaggtgactctacagtggtggaacctgaggcacagtgaggagctgaaagtgataaggaggagggggacttctctactaaagcaagcgctttaggtttatctttgaattc

SEQ ID NO: 916890 - DNA, 614 bp, Homo sapiens
ccaaagcctatgtgcttttcacactagcaatgttttggccccttcrtttctctgtggctatctcccaattagaaatgatgccccttcaagttacaagtgagttttcacatgtccatttttttgcaattgtaaggaacattgaatgagccctcatctgcaaacccagatctgacaaagccttggctgatgcctgattctcacttcccaggaataactttggactgctcttgtcttcaggatccaaggaaaacaggcagaaagccatcagaatagcttgtcaactccttcgtaaccacagagggctttataatctccccacagaaactgctgtaccacctaaggttgctggggctgcctgtctgactgtgacatccaagctactctctagctgggatgatgctgtgggagtttcttcctgcctaagggcaaaggatacagctgcagtctgcatccaacactaggcagtacttgcctccacacacagccccaccatggtttccctgtagccatggtgtctcttctttcagaaaagctgatagacactgaagtagtggggacggcccctggagtaggaagaagaattcagaactgcttatttgaagttgaacttgctg

SEQ ID NO: 916891 - DNA, 610 bp, Homo sapiens
gtgctcttaaattcaaagattttcaaagatggagaatttcaaagataagacagagaagcccacataacctcatctccaccggctctgccaaaacatgaagtggccaccctgtttgcaggtttsctaatccctaccccatgccttttggctttactagatccccaaagtaattacagttgacctttcccttcccttcagaacttgaatttggaactcacaggtacccagtgaacaaaggagtcttcccatgggacccagaggaataagttatgcagataccactgtcacccctagcaaatgattctactatccccataaccattcctgatcctcaagcacatgtgctaaaatttattattatatacttccagaaggatttattcagtttggggtggttttgttttgtttttgtactagcatcataatagacacaatgcaaattgagtcttaacaggagtttggtgcttcatcgttaatgagaagggaaaaaaacctagaaaaataaaactaaattttcttcaattgagaaatggttaataaaataggatgcatccatactgtgaaatgctatggttacacaggatgtagccatactgtgaattactaaaaa

SEQ ID NO: 916892 - DNA, 603 bp, Homo sapiens
ggagtttcaagagtcatgggcagattcttcttaggtctaaagttctgttttcctgtattgcataacccgacctctttagggataccagagattaccttgtactgtgagaggatttgagtttggtgtgtgtaatagcatacgagagctacaaatttaggggtggctgagcacagtttacaggaagtggtcttggctgttgttttttttcttttctcctaggaagttgtttaaggatcttaattctagttcgaagatacattctaaagggtcttccctattgctttttctccccaaattaatttcattttggcttgtctgtgtgcatttgcatgaggaacagaacagttgttttcatcggtaaatgagagacagttttctcagctcggaagagaaagggcatttttctcctcccagccaaaaggtgcccctgggtgaccagggacctcatgggagtgtctggggggttgacccccctgtgacatgcagcagcccwacagggaaattcccaacaaaaattactgttttaaaaaatagctcatccaggaaacgcatataagggctaatcagctggcattctgagccctctcagaggtcacagacctc

SEQ ID NO: 916893 - DNA, 692 bp, Homo sapiens
accatacgagatacgtatgctgttattacccctcactttaacagataacaaaggagtgatttgtccatctaataactgagagccagtatttgaagccagactgttctctagaatctgtgctcttaaccactgttrtgttgcctctcaaaaacagcattgtgtttaattctgcaaattacttagtgaagtcagtgctctcatctccattttatgaacaaggagacagctaggactggactgtagattttccaatttccagctgaaggcttttattccattatgttgttaattgcctcttcccaagctttttcttccacaccagtgtttcttaaatttcagcacacatcagaatcccctggagaaatcccaagacccctccacctcaaccctagagtttctgattcagtgggtctggggtggagcctgataatcagcaatttcagtaagttcccagtgatgctgttgctgctggttcagggaccacaatttgagagcccctgcttgacacgtatccactcagactaacttcatcccaggagattctgtaaagttatactaatattagaacacaagggtttattattagctattggctgctcaggccaattccaggagctaaagagattgggctttcacattctttgcttttcctcgtgtgtttttgggtaggaacggatcatccctagaagatt

SEQ ID NO: 916894 - DNA, 528 bp, Homo sapiens
atgccctatttctctgactcccttgcagctaggcttttgcacatgagcaggttttaccaatgggaattcatacataaggcaaagaccatgttcctactgcttttctgcctttaaacagagaygtgtagtgtttccgaggctgatttccaatgtttaatttgcactacagggatgtcatatgttcttgctttgtggcttctatttctttatttccttcttcccaatcagcttcccccttctttgtattctgaatacaaaccccagactggagtgtgcaggttctgaagaatggtgaggtaactcaatgtgtctgggtgacctttggagacacatgggggattgtaggagagggacatcaatggggacttcctggtccctggatggtgtgtttcagtggtagcctcctctgagtcttcaccttctcaattgtatccggggcaggatttcttcgggtcaataagttctgtgatgtttgggcaacaaacatcttcaaacaattgtctagcccttcaaacaatatgggaagca

SEQ ID NO: 916895 - DNA, 581 bp, Homo sapiens
aaaatcttagtctccatatgcagctatttttataccaatttttgtttccatgtacttgtgtagtagagatatttttacaaatgcaggactttacacatgaagggacttgaaaaagtttatggaaagtggaattaaatcataaaaattaaaagttgtatactttatttctcaacataagttctatcaaggtcaagacgcttttgtaagtgatgataccagccatttagtctttctctaaagaactgaaggttctgggaatttgaccatgtcaatgcagtcttttttacattattagctgaagaaaaatgggtggcctttacagatttttaaagattaggaaacaaaaagaagtcaaaaggagccaaatcaggactgttaggtggatgcctaatgctttcccattgaaactctcacaaaattgcccttgtttgatgagaggcatgagcaggagcattgctctggtggagaaaaacgcttrttaaagatttcctggacatttttctgctaaatcttcctctaaacactctcataataagcagctgttatcattctttggccctccagaaagtcaacaagtgaaa

SEQ ID NO: 916896 - DNA, 616 bp, Homo sapiens
gggtgcagcacaccaatgtggcacatgtatacatatgtaactaacctgcacrttgtgcacatgtaccctaaaacttgaagtataataataataataataataataaaaagattctatagttctccagcagtcgggttctagagtaatctgcccatgttgcctacatcagaaccatttaaaaactacaagaaaacatgaataagggtgtcacagcattgatagttctgatgagcacttttaaactttctattattaataataatagtaaataaagaaggtaaagaggtagacatcaaaatgacaacccatagaatggaaaaaaatatttacaaaccatataagagagtcatatccagaatatataaagaattcttacaagtcaataatgaaaaaagaaatgaggcaatttaaaaatgagcaaaagatctctaaagaaaacacacaaatgaccaataagagcatgagaagaggttcaatatcattagtcatcagagcaatgcaaatctaaaccaagaagagatactatgtcacacataggaggatggctataataaaaaataaagacaataccaagtattttgagaaactaaaacacttatacattgcttgtgaaaat

SEQ ID NO: 916897 - DNA, 616 bp, Homo sapiens
gggtgcagcacaccaatgtggcacatgtatacatatgtaactaacctgcacgttgtgcacatgtaccctaaaacttraagtataataataataataataataataaaaagattctatagttctccagcagtcgggttctagagtaatctgcccatgttgcctacatcagaaccatttaaaaactacaagaaaacatgaataagggtgtcacagcattgatagttctgatgagcacttttaaactttctattattaataataatagtaaataaagaaggtaaagaggtagacatcaaaatgacaacccatagaatggaaaaaaatatttacaaaccatataagagagtcatatccagaatatataaagaattcttacaagtcaataatgaaaaaagaaatgaggcaatttaaaaatgagcaaaagatctctaaagaaaacacacaaatgaccaataagagcatgagaagaggttcaatatcattagtcatcagagcaatgcaaatctaaaccaagaagagatactatgtcacacataggaggatggctataataaaaaataaagacaataccaagtattttgagaaactaaaacacttatacattgcttgtgaaaat

SEQ ID NO: 916898 - DNA, 616 bp, Homo sapiens
gggtgcagcacaccaatgtggcacatgtatacatatgtaactaacctgcacgttgtgcacatgtaccctaaaacttgaagtataataataataataataataataaaaagattctatagttctccagcagtcgggttctagagtaatctgcccatgttgcctacatcagaaccatttaaaaactacaagaaaacatgaataagggtgtcacagcattgatagttctgatgagcacttttaaactttctattattaataataatagtaaataaagaaggtaaagaggtagacatcaaaatgacaacccatagaatggaaaaaaatatttacaaaccatataagagagtcatatccagaatatataaagaattcttacaagtcaataatgaaaaaagaaatgaggcaatttaaaaatgagcaaaagatctctaaagaaaacacacaaatgaccaataagagcatgagaagaggttcaatatcattagtcatcagagcaatgcaaatctaaaccaagaagagatactatgtcacrcataggaggatggctataataaaaaataaagacaataccaagtattttgagaaactaaaacacttatacattgcttgtgaaaat

SEQ ID NO: 916899 - DNA, 615 bp, Homo sapiens
tcatcagatctcatgagaattcactcactatcacaaaaatagcatgggagaaaccgcccccataatccaatcacttcccaccaggtatctccacaacacctggggatttaaattaagatgagatttgggtgagaacacaaagcctaaccatttcagcttgtcatctaaatttgaagtcagcaggggtctatgctgaaaacttagccaaatggtgtactccacagccttatacttgtggttttcagaactgatgtggccaaagcttagtggatcaccttgtttctttaatcctgtacttccgtaacccattatgcagaatatgtgatttgtaataaatttatatttaaacagatgattactgaacataagaaaagagaaatgaaaaagggttatgaactaaagttgtattttgagggggtgcacagaaaatatatacacaactaatgtagccctaagtttatcaaatataaaatcaattgtgcaacagctcatacctcagggggaaatattgtcttttttagtaagaaytgccttgttctaaattaattaggctcgatgatgcttgcttgggctgctaaacacaaatttttcaaagaaatcttgtagtcataagaa

SEQ ID NO: 916900 - DNA, 621 bp, Homo sapiens
gattcagggctctgttcttgatcttttaccttagtgttgtacacatgcttagtaacctcatttactttcatggctttaaatcacagctaatgatttccacaattatatstaaacccagatttatctcttgagaccaaatcttgcatatttaacttcctacttaatgtctatatctggatgtcaattaggtatcttaagcttaacatttcctaagcataatacctaatctccttttccctcaaaattctatccacctctgtgtttccttttacaactgatggcaactccaggttttcagatgtgcagatctaaaatcttggaagaattttttacttctctctgatcttaatctttaatatctaaccaggtttttttaccttgtaattatcaccagcatctgaccacctttaccatctccgctgacaaaagcatcctgctctgagatattttctttcttatccagactatgggaggtagctttgaattggcttactgtttctacttttgttcccaaaagtatattctaaaggcaacttattagtaatttttaaaaattgctgagggaataagaacaaatatttcaaaaatgctttctgagtgaaaaaaattggatgaatatgt

SEQ ID NO: 916901 - DNA, 648 bp, Homo sapiens
aggtgaatacaagatactcctaattgagaaagaaaataagaaaagaatttttgtgaaatagtcacaaggtctttcattttactattgtaatatttataggctttggggttggttaaactaaatgtattkgaaaatataacacttagctgattcattttcttaatccttcctcaattagctttaactttttaaaatgttccatctttttaaattcatctttatgtgttaaatctggaggagttcatttaatttcactactaatgatatgtctcaaatacacacacatacacatacacatacacagacatacacacactcctctcactgtaatcctgttatttctgcctatcaaagtggaaactaattaattagcaaatttggtttgtaattaaaggacatagctgctcttttagcaaaggtggcatgcaggagacagtcttttcagtggtctatgttatcctttccctctatcatttaatcacttattgtatgaacaagatcaaatagctcattttctagataaataatattttagtgtatattgcaacaacagtattccgagggtccccattgcatcttttagttaagttgtaagtaaaactttaagcttaatagttctctgatagtttgtgagcccaagctcactta

SEQ ID NO: 916902 - DNA, 691 bp, Homo sapiens
aacgagtttcagtctttctctgaatagtcattcactcaacaaataattaccaaacacccactatctccgtctgaggcactgaaagacatatgagttctctgtcttcctggaacttgctgtctactgggagagatagatgacaaataagcatacagatgtactgtcaggtggcgtaaattctgtgaagtcagaaagtggaacaaggtgataaagcgtgatggggttgctattttagagaggatgttgtggcagatgcttcttgccttgccaatgtgccttcagcattcacttcaacagtcagaaggctgcttctcatgattccccaagaccctctgcctaagggtgattttttcccctctgacaatgggagaatgcttggcccacacacagggcacgcactggagcagtaacagatgccctcctctgtggtcaagataactctgaagtgtgttctacactatctcccagagttcctcagcaggactgaggcacagctacccacacggtggctgcttgatagcatacctttcttagatcctttcccttctccctctcacttccccactcccctgctgtgttacttgggttcwtctctctgatagactacttgtacttgaatccttgtctcagggtctacttctgggggaattcaaactaagatagtagttaggcaaggcatctctgcaaaggt

SEQ ID NO: 916903 - DNA, 679 bp, Homo sapiens
aaaactgttaatttttcataatatcatagtttttcaattaagtgcctcaattgttctctataaatactccaygcagtatttcttatttttaaaaaattctattcaatttcacatttagaaagggtctgttatgagggcttggcccaaaccagccctaactaatatgaacaaagataattctgactgggatgctgcttaacttggcacctttcggtggccatagaggtacggcattcagatctcctttcaagagccctgctcagaggaggagcatcatttgctgacagtctacagctgcaaaaccttcagatccaccgtggcacccatgccaaggttgtgcttaccccaggccagtggcaaagtacagtgagagaactagagctgggctattcctgcctgacagggaacctctcctatgtgcagtctgtgctctggggctccccatcagcctgggtgagactttctcagagctgcactgccatcagagtctctccctacccacccttccttccttcctctctctttccacaggagtcagacctgcctcccactctgaaggttctctctgcctactcttgcttactgcccatttatccatcaaaatgagcctctcccaataagtcattttacatctaatcccatcttctaggaggacctgagctgactcagcccacaatta

SEQ ID NO: 916904 - DNA, 682 bp, Homo sapiens
ttttccttcagtgcaatcataatgttgttttattccaataaaaatatgacacacactttttagcctagttctttattcccaaatgtttacacttcccaatgtttattaaactaatcactgaaatttgagcttcagctgcgtgtgagattttttgggatcagctacctcaaggactacaatctagaatgtttcatcttgaatttattcctcaaatcagtttatccttgaaccaatcattccaccagattaaaggcaatgttgctcaaaagacaggaagaagcattgctggtgatgaggtatgtatttaacctaatatcctcctggctatttacctccatctccttttcatgttgctactacagtttagtttagttaacagctcagggctgtttacaagttaacaaaagagatgatgcaggagtgccaagtattctcctggagctggtgatgggcttttggcaatggcacatcctcctgcaatgctggccgcttaaagcctattagtggggtgccacatagactgagtgtgttacttggaaaggagtacatamgtctcactgcctttagcatatgttcctccacacagtgtaaaaatgctgcaaacacactcagatttcccctgcacccatctgaactctgtgactggccatctgctactcctctgcctccagttgttggtcca

SEQ ID NO: 916905 - DNA, 649 bp, Homo sapiens
gtagttgatctgtaggacaagccagcaaacaaacaaacaaataaatgcctcactcaggaagctggatggagctcctttagaggaaccttagggaggcgggggaaggggcaggcatgtgaacttggccagcagattctgctaagctgcctgttgctgtccactttccagatgatcccagcctccaaataccccattgctcacccactggagcaatgcatgttctcattgatttgtaggagttaaaacttaaaataattgaacttacagagatagagagtagaaggatggttatcagaggctgggaagggcagtaccgggtggggggatggttaatgggtagaaaaaattgaaataatgaataagatcttacatttgctagcacaacaggcggtctatggtcaaaaataatttaactgtacattttaaaataactaaaagggtataattggattgtttctaacagagaagataattgcttgaggggatggacaccccatctatcgagatatgattattacgcattgcatgcttatgtcaaaatacctcrtgtaacccataaatatatatacacctactatgtacccacaaaaaatttttaaaaaaagaaacagagggcgacccacagatgtcattttgaattttctgacag

SEQ ID NO: 916906 - DNA, 689 bp, Homo sapiens
aggctggtagtccactaagaacctaagccctatttcagtagatagctttggggtcagaatgctactgcaggctgatttttaaaaaccttgaacttcagtgttgccctctgctgcatcctgcctcagtttccttatcccactctctctagctccctgtggagactggatccctgatctaaatcacgctgccaccttctccatgtgctggagcactgtctcctaaaatggccagctttctggcaccgagatgcattaggcactgactggtaggctatgcagagatcaggtttagcccacactcactgtcctgcctcagatgtggaacaacctgggccttccctccatgcactcctcacttcccttagccccaggcctgcctggcctggttggtttcagatagttccccttctcataagcctttgggtctgagaactggaacagagaatgtgtctccctcccagacattgggccccaatcggaatggggaagatggtcacacagcaagaaacagagaagccccaggaaagggctgccaaaggggaaagaaaatgagcctgcttggtcctacggctcttagcgtagctttgcattgcacttatcatgctgtcttgagcgtgttyttgttctcccattggactctgagctccccgacagtagggtgtgtttctaattcattttgatatcataga

SEQ ID NO: 916907 - DNA, 609 bp, Homo sapiens
taccacgttgtagaactttacctcyacttagctgtctcagagccagctcacactagacacatctaaaactcaacttagccccaacccctacaaacctgtctgctcctccttctacatttcctttcttagtaaatggtagcagcatctgacaagtggccagaatctgaatctagggctcatcctcagttcttaactccttcgttctcactcctcatcctaatcaacagccttacagaagtctgttgatttggcttctgcaggtttgcatctgccccacctctcttttctccttccactgataatgccttggttggacactttcccacttacccagattcaactagtctctttgcctctaaggcacttgatttattaatcactcatcctaatcatatggcttcctaatcatatagctcttcaaacactttcataggccttccattgtccaaattatacaatctgaactcctaatcttggcatttgaagtcctctgtgcctgccttctgtcttccatttagaaggtcttctcatggtgttcccatcttccagctactccagaccccatgctattgcacagacatcttttggatctcacctcatgcattactg

SEQ ID NO: 916908 - DNA, 461 bp, Homo sapiens
atctgaaatcaattatcttcaaaaagcccttctaagctctaaaaatgtaaatggaataattactaattaagcattaaattaatcgtaatagcaggcatacttatttgccagatagggcaaayaaatgcaagagaaaaattataacaccagttgaaatattcttcttatgggaagacgtaacctactgttgaggattgcagaagtgcaatgaggtgaaaatcgtgtatgcacagagaattggaggttctcatccatccaacaacagaattgcctgtgaattctggattcccatgatagacctctgagtgtgaggcttgggaatgcaaattttgaacaggttcaccgtgatattcttatatataccaaattccagagatgtcctttgggagttcttcagacccattcaatgattctgtaacactgacataattgtaatagtaatactaagacttcatttgcct

SEQ ID NO: 916909 - DNA, 454 bp, Homo sapiens
tgaggaaggaggagggggcagggcatgtggagaacaacaacaaacctggtcattctttatctagagtcttgagaaatatataaaagggmaaatagttgagtaaattaaatcgggaacgtagtcactaaattccaaggcatttagaaaagaaaatttctttatttcgtatgaaagtgcgataagggataggactctggagtagacagatgagaaaagagaattctaacatatttctttaattctgtctgcaaaactatatggaacatataaaactggaaggtgctaatgtaaagattgaacaggaggaggtgggtggtaagaagtactataaaaggaactaaaggtgaaaatatagcattcaaatgcaagcaagatatatttggagagctaaccaatgacagtgctaaggaaatggagattgctagcccagtgatgaaagactagggcactatta

SEQ ID NO: 916910 - DNA, 630 bp, Homo sapiens
taaatgacatgatcccatccctgcttacmtccccagcactctctttcctccatcccacccaattcttgctctgtctcctgctaaaccttcaacttctcaaaggggccgtacttttgcacaggtctggaacacccttctccaccaatttgtggccagcatccaggtcagttcctaaagtaactttctgattagcagttgtcaccctttgccctatcccgggcccccacttctcaccctgtccttgccagccaggcatcattgcacgcccacatccaggttttgccagcccacaatgtttatctctttcccagagcacttagagctcaaggttatatttgtttctcccaccacagcatgagcagcctgaaaggttgtgactgtgtcttttccttctttatattcccatcttttagcccagtatttagaacccaacagacactctgttatatatttgttgaattagtaagagtataaacaggtaaatatactggaagacgctgtgagaaagccaagtggctcaccccatgtgggctgagcaggtaaccttgtcctgttggcagacttaggctgcccctgacagtctagccagctactctgcagatgtgcgccattgattctaacaagggagag

SEQ ID NO: 916911 - DNA, 630 bp, Homo sapiens
taaatgacatgatcccatccctgcttacctccccagcactctctytcctccatcccacccaattcttgctctgtctcctgctaaaccttcaacttctcaaaggggccgtacttttgcacaggtctggaacacccttctccaccaatttgtggccagcatccaggtcagttcctaaagtaactttctgattagcagttgtcaccctttgccctatcccgggcccccacttctcaccctgtccttgccagccaggcatcattgcacgcccacatccaggttttgccagcccacaatgtttatctctttcccagagcacttagagctcaaggttatatttgtttctcccaccacagcatgagcagcctgaaaggttgtgactgtgtcttttccttctttatattcccatcttttagcccagtatttagaacccaacagacactctgttatatatttgttgaattagtaagagtataaacaggtaaatatactggaagacgctgtgagaaagccaagtggctcaccccatgtgggctgagcaggtaaccttgtcctgttggcagacttaggctgcccctgacagtctagccagctactctgcagatgtgcgccattgattctaacaagggagag

SEQ ID NO: 916912 - DNA, 630 bp, Homo sapiens
taaatgacatgatcccatccctgcttacctccccagcactctctttcctccatcccacccaattcttgctctgtctcctgctaaaccttcaacttctcaaaggggccgtacttttgcacaggtctggaacacccttctccaccaatttgtggccagcatccaggtcagttcctaaagtaactttctgattagcagttgtcaccctttgccctatcccgggcccccacttctcaccctgtccttgccagccaggcatcattgcacgcccacatccaggttttgccagcccacaatgtttatctctttcccagagcacttagagctcaaggttatatttgtttctcccaccacagcatgagcagcctgaaaggttgtgactgtgtcttttccttctttatattcccatcttttagcccagtatttagaacccaacagacactctgttatatatttgttgaattagtaagagtataaacaggtaaatatactggaagacgctgtgagaaagccaagtggctcaccccatgtgggctgagcaggtaaccttgycctgttggcagacttaggctgcccctgacagtctagccagctactctgcagatgtgcgccattgattctaacaagggagag

SEQ ID NO: 916913 - DNA, 626 bp, Homo sapiens
ggtttttttgcttgtaagataaatgcaggtattaattaatcctttgctgtatgcatagatttctatcttcagtaaattcaatcatgcattatatttcctgctttagtagagtgcaaacagcacttaagccatctgaaaatatgagttccagcaatctgagtcatgtaatctttctgagtgcagtttccttctctgtaaaataagtatatctataccaatctgctgtcctctcaagtttcttgcaagaattaaatggaaataaaaacacttggtaaaggataggttctatagaaatttattgtcattccctggtataaccatgcctgcagtaggcaatgcctttgttctaaactacgttaggccagtgcgccctcgacgggtgtgtggcagcaagttgaagggcagtcctggtgcgggggcagttaacacatctccaggggggccttccataaaccgactctaaccacctcttcctgacacaggaggcttcactggtgatctatgatggggtcttaggtgctcagggttttcrgtgaggttgctatgttgccatccttgggtaggtgctgtcacttactctgacccaccagcgggccctgtgtcacacctgtagtgcaccggttctg

SEQ ID NO: 916914 - DNA, 591 bp, Homo sapiens
cgtcagctcctccactgccaggttctgttgctctgcctgggagcagctccagctaatrcaccattagccactgcctctcagctttggtcacttggaaaaaccttttccctttctgtcccttaaaaatggacccagtgcataatataagatcaactctcaccactgggttacattaagtaagaccccagtcagggaacagccccaaaaagagagtcgtgatgggagcttcttccagtccagttccaggagcacaggcagtcaggaagtgcagagataactgagtaacggtgtagggtaagcaccgcaaacccagacatgctctcccatgctggagtgggcagggggatattaggagcctgtctgggggaggtagtatgacaacagaaattatccaagggaaaaaaaagaggtgggagggagcctcatgaaccagggtcgggggcatgaaacggcagagcctgctggaacggggccaggtgtggtttagtactcatgtttgcttgaagttcaataacagagccaggaacagactgggcattgtgaagacccaagaccacaaaggagagacctttctccatcttccatgttaaa

SEQ ID NO: 916915 - DNA, 667 bp, Homo sapiens
cttttcctctattctcttaagctatctataacttatagcaatttargagattatacttttgtgaacaaaaatgaatatttatctttctctctaccttatccctcccagaatttggaaccttttattgaatattctcattttcatggcaatatagttatttgcctaagttcagtaagaatatgttttccttgtaactagacacaactggagaaattggttatattaccaagattttgaccagaatgtcatattagggaatcatgggtatagaattagctttaaggaaataaagttgactttatagagccaatgcttacaaaacgctcttggaaaaactggcctggtacctgccttacagggttcccagcattacaggtgagtgagggaggttactttctggcagattgtataagtcaggattctctggagaaacaaaaccaacaaaaatacagatagatagatagatagatagatagatagatagatagataagaagagatttatcatgggaattagcttgcatgattatggataccaagaaccagaaaagccagtggtgtaattaagtttgagtttgaaggcctcagaaccaggggagccaatggtgtaactcgcaatttacggcagtagtctcgagaaccagagggatgctgatgtaaatcatgga

SEQ ID NO: 916916 - DNA, 617 bp, Homo sapiens
ccaaggtgctataattttagaatctgctgtcttctgcctaaatcagaaagtagatgaggtttggaagcaagaaaattatttggctggatgagaatgttaaaagggagaaaacaatttctcctaagcagaattcttcatttaaaatggagaggagaggtgtggcaagggtagaatggatttgaggctaggggtatacaaagatatatgcccaaaattatagaaaggcagaaacatcaattctcattttcttctaaagaaaagtcaataattgaagtctatattataagcagtgatcaccagaatcctgactacaggaaaaaaattgacagcccttctcctttttttctgcaaatgaaaaattctgattgtataaaaataatttaagggtgaaggcaaggacttgtttccttttagaatcagtggctgaaaagatggtagaaataattgaagatcaattcaaaataggcaatttaattgggtctttatttttcaaaaaaaaggagaaatttaaaacatcaggcttactcttctgagttgtataaaaggaatacagaacataaaaattcaatatagaacaaatcaaatacataccraactttcattctctattgtccaca

SEQ ID NO: 916917 - DNA, 628 bp, Homo sapiens
aaaaactaccctaattaagtcttcccttctaaaagtcaggaaaactagcattacttgaaaatgagtaccaaaaaaactaaggtcaaatcccatacaaagtcattatgaagaaaaaaagagaataaaacataatttctttagaaaataaattatgacagaaagccatggcttcaaaacagatgaaaactaaaatattttaaaataagttaataaacatctaaaatgacattagatatgaaaaaatgacgtgtcagatttagaaatatacagaaaggagatgacaaactcagaaaagaagtaaaaattttaaaaacatttcagaaatgaagagagaaagaaacacgagcaaataaacagaactgataatgcattaaaagaaaagatgaaaaaatatgaggctataaaagagacgtgtggtacaggataacggtcacccaaagatgtccccatcctaatctccagaacctgtgcctgtgtcacctgacatggcaaagtgacagcaaatgtgactaccttatggatctcaagagagaagcctgatcctggatcatctggctgagtccagcctaatygcatgggtccttaacagtggagagtcgactgcagtggtatgaaggaaatgcagcta

SEQ ID NO: 916918 - DNA, 602 bp, Homo sapiens
agatatgttttccaagttgcccgctgtctctccatcttttycagaaatgccaatgaattgtaagtttgtacccttgatataatcccatattttgtagagattttttcattttttaaattattctttttatttttatctgtctgcattgatttgaaggagcagtcttcaagctctgaaatttttcactcagcttggtctattttgttattaatgcttccagttgcattctgaaatgcctgtagtgaatttttcatttctagaagttcagttttgttctttctcaaaatggttatgtcatccttcaactctttgaccattttacttttttccctggattgggtttcaaccttctcctatatctctgtgagcttccttgtcattcagtttctgaattctacatttgtaatttcagccatttcagtttggctagaaatcattgctcaagagctagtggggtcatttagaagtaagaagacagtttggcttttacagttgccagagttcttgtgctggttgtatctcatctgtgtgggctcatgtttctttaatctttggagttgctctctttaggatggtgcttttttcttttatatcctttgatg

SEQ ID NO: 916919 - DNA, 612 bp, Homo sapiens
attcataacagctacaaactggaaacaatttagctctccatcaatagaaaagggatatgaatttaaaaattgagttatatcggccgggcacggtggctcacgcctgtaatcccagcactttgggaggccraggcaggtggatcacaaggtcaggaggtcaagaccagcctggccaatatgatgaaactccacctctactaaaaataaaaaaaaaataaaattaaaaaaattagctgggcatggtggtgcacacctgtagtcccagctacttgagaggctgaggccggagaactgcttgaacctgggagagagaggttgtgatgagccaagatcgtgccactgcactccagcctgggcaacagagggagactctgtctcaaaaaaaaaaaaaattgaatatatccatacaatatactactaccggttagcaaaagtgtccagcataaataaatcttaaaggtattatactgaatgaaagaagctagaaactgaggcctgcatattgtatgattctaatttacatgatattctagaaaaggcagaactatagggataaaaaacaaatcagtagtttacagagcctggagtttagtagaatatgtttactacaaa

SEQ ID NO: 916920 - DNA, 545 bp, Homo sapiens
tgtatggacatcattcgcaatcatttttgtggcttcgtcaaaatcaagtgcaaargaaagcacattgggtgtgatgtcacgcagaatgtcccttaatgcctccaattggtcagtgctggttgcagtcagcctgctggctgtgagttctgctgaccttgtgtatgtgttctccacgatgctggaggcgatcccagccgtggcagatgctattcccagccctaccccagctgcagtaatgctcaggctcagccctgctgtaaatggtgccaacataacgccaatgacagacaggatgccagtggagccagacaccacattggcgatgacgcagcctctgtggaccttttcaatctcatttgcaatgacacgaagcctttctatggactcctgaatcttccatctgatttgaggaaactttcaaaaaccactccctaaactgctgttctttttgctgcatgtctttgtcctcaatagccacatatggtgtaagattcttcagagcttcatagagagcatctgcctcttccctgtaccaataaaggaca

SEQ ID NO: 916921 - DNA, 579 bp, Homo sapiens
gtatggacatcattcgcaatcatttttgtggcttcgtcaaaatcaagtgcaaaagaaagcacattgggtgtgatgtcaygcagaatgtcccttaatgcctccaattggtcagtgctggttgcagtcagcctgctggctgtgagttctgctgaccttgtgtatgtgttctccacgatgctggaggcgatcccagccgtggcagatgctattcccagccctaccccagctgcagtaatgctcaggctcagccctgctgtaaatggtgccaacataacgccaatgacagacaggatgccagtggagccagacaccacattggcgatgacgcagcctctgtggaccttttcaatctcatttgcaatgacacgaagcctttctatggactcctgaatcttccatctgatttgaggaaactttcaaaaaccactccctaaactgctgttctttttgctgcatgtctttgtcctcaatagccacatatggtgtaagattcttcagagcttcatagagagcatctgcctcttccctgtaccaataaaggacagatgattaagaaaggcagcttacttacctgtaaaa

SEQ ID NO: 916922 - DNA, 562 bp, Homo sapiens
tcgcaatcatttttgtggcttcgtcaaaatcaagtgcaaaagaaagcacattgggtgtgatgtcacgcagaatgtcccttaatgcctccaattggtcagtgctggttgcagtcagcctgctggctgtgagttctgctgaccttgtgtatgtgttctccacgatgctggaggcgatcccagccgtggcagatgctattcccagccctaccccagctgcagtaatgctcaggctcagccctgctgtaaatggtgccaacataacgccaatgacagacaggatgccagtggagccagacaccacattggcgatgacgcagcctctgtggaccttttcaatctcatttgcaatgacacgaagcctttctatggactcctgaatcttccatctgatttgaggaaactttcaaaaaccactccctaaactgctgttctttttgctgcatgtctttgtcctcaatagccacatatggtgtaagattcttcagagcttcatagagagcatctgcytcttccctgtaccaataaaggacagatgattaagaaaggcagcttacttacctgt

SEQ ID NO: 916923 - DNA, 616 bp, Homo sapiens
tcccagcaaacaaagccaccaaggcagtcctgcaaattaaggaggatggcaaatctgtctcttaaaaaaaagttcttgaggggaaaaatataaaatacctaagtttcaaaagccggactacttccatacccttcattctctaccctggagtgtccagagatagagagtttcaaggtacgttttcaatgattcagcttttgcaaacatatgcaaatacattcctcatcagcagtcctgttttggcgattaatagcaagcaatatgcttggattagaggtccgatttccacttaaatgcattttcttctcttcttggcaatgaagtcatttgcggagatctgaaagtggggaagactgtgttaggctcagagtaacaattctgaaatagatcatttatatttatacatgtgattgcagaacatactgtcttcatccattcgcataagcatgtaatgttttaagaatgcatcccagatggccagagagagtttaaatttaaaaacgtttcctgggttcttccccacatctcatcttgcatccacttgacctcaaatatacacttttyttatggacacagagcaaatgacagtgattatgtgataaatactgatgaattc

SEQ ID NO: 916924 - DNA, 641 bp, Homo sapiens
cttaggtggttttctctcttattcttcttttyctctcacacattgtttctagtattttaattccatctttttatggaacctccattagtgcttttgttactattgtttcatacagtcaatgcttgtttagatttgactatgtatttttcaactttttaattctccactgcttttctaaaaacatttttgaggtataatatagatataattcctccatttaaagtatacaattcaatggtttttagtatattgacagttgtacaactattagcacaatcaaccttagtacatttttatgaacctcaaaagaaacctcatacccattagcagtcactctccaatttccctccaacccaaccagccctaggcaaccactaatctgctttctgtctctatagatttgcctattctagatatttcggagcaatggaatcatacactatatggtcttttgtgactggcttctttcacacagcatattttcttttttttattatactttaagttctagggtacatgtgcacaacgtgcaggtttgttacatatgtatacatgtgccatgttggtttgctgcacccgttaactcatcatttacattaggtatatctcctaatgctatcccttccccctccctcaacccc

SEQ ID NO: 916925 - DNA, 661 bp, Homo sapiens
gatatttcggagcaatggaatcatacactatatggtcttttgtgactggcttctttcacacagcatattttcttttttttattatactttaagttctagggtacatgtgcacaacgtgcaggtttgttacatatgtatacatgtgccatgttggtttgctgcacccgttaactcatcatttacattaggtatatctcctaatgctatcccttccccctccctcaaccccacgacaggccctggtgtgtgatgttccccctctgtgtccaagtgttctcattgttcaattcccacctatgagtgagaacatcacatagcatattttcaaagttcatccatgttgtagtatgtatcaatacttcattatttttatggctaaataatattccactgtatggatataccacattttatttatccattcatcaattaatggacatttgtattgtttctacttttgggctactgtgaataatgctgctatgaacattcatgtgcaagtttttgtgtggacatatgtatttcatttctcttggatatrtatctaggagtggaattagagggtcaaagggtaactttcaatttagctttttgaaaaactgccaaactgttttccaaaggggctgtgacattttatattcccaccagcaatgtatgaggg

SEQ ID NO: 916926 - DNA, 660 bp, Homo sapiens
ctgaaaattcaaaatctggaaatttcaaaagctattgatttgtcctgaactttttcattcatgttatctttagtttcttgaaaatcagtacttagtataaacactaatgatttaaatgtctctcaaagatggatttgtaggtctttgcatgggccagcaggctgtgtgtctttggtcagttcatttaatcttttagagccctcagttccctcatttgtaaaacgatgtggtcagcatcaatggttttaagttccctcttagccataatattctatgattcttatactattaatactgtaggaaagtaatcacagtaatgtgacaaatagaaattattcatgcttcattgtctgcatgttttaaaatcattcctggcttaggcttagtgtccccccaccccatttgctgatattaaatgttatagttccattctatagacctaaatctcactatacattggctgcatgggtaatatagataaaagaacttctccttacataaatggcataaacatcagtctgcctagctaaattctgacatcaaaaaattctgacaccaaaaattctgacactatgtgctaattgttttatgtctatgygtttgtaattgggagaacagcagtagatgagaaaaattgtcaggaaagaaaaaagatcacta

SEQ ID NO: 916927 - DNA, 613 bp, Homo sapiens
aagtctgacagagctgagctttagattttgaaaccctatatccccttttagctaagaaattgaagagggtcttagtgccttcctgagacctccttggtcccaaccaaactaatattgttattattaggtgcagaggacagtgtcatttacacactgcaaagtttcaacttgagagtgagaaaaactagaaagaattttaaaaagggcctgtgtaagcaacttcctcccaatatagggggctttctgaggaatgaaccttttctttactgaattgggagacaaggaggtgtgttttattaaaacctctctcagtcttcctaaaaagtcagggagattttcatctggtttctggttcaacaaggacagtttagaataattaagaggtttggtcctagtcctttggccctctaatatgtacatttaaaagtgtttccttttccattcatctatggggtcacaggccatccagtcaggattgtcaagaagtatagcctctctacctattgggagtggtttttccattatttcctcaccttccttatctcgccttttcctttttgttctactataargatatattattcatctctgaacttttctgctgctggaagag

SEQ ID NO: 916928 - DNA, 616 bp, Homo sapiens
accttacaagccagaagagagtgggggccaatattcaacattcttagagaaaataattttcaacccagaatttcatatccacccaaactaagcttcataagtgaaggagaaataaaattcttcacagacaagcaaacaccttacaagtctgccttacaagagctcctgaaagaagcactaaacatggaaaggaacaactggcaacagccagtgcaaaaacatacccaattgtaaaggccatcgacactatggaaaaactggattaactaataggcaaaataaccagctagcatcataatgacttgatcaaattcacacataacaatattaactttaaatgtaaatgggctaaataccctaattaaaagtcatagactggcaaattggataaagagtcaagacccatcagtgtgctgtattcaggagacccatctcatgtgcagagacacacacaggctcaaaataaagggatgtaggattatttaccaagtaaatggaaakcaaaaaaaatcaggggttgcagacctagtctctgataaaatagactttaactttaaaccaacaaagatcaaaagagacaaagaagggcattacataatggttaagggattaatgc

SEQ ID NO: 916929 - DNA, 423 bp, Homo sapiens
ctaaagagcttctgtgcagcaaaagaaactatcatcagcgtgaacaggcaacctacagaatgggagaaaatttttgcaatctacccatttgacaaaggtcaaatatccagaacctacaagtaacttraacaaatttacaagaaaaaaacaaacaaccccattaaaaagtgaacaaagaatatgaacagacacttctcaaaagaagacatttatgcagccaacaaacctacaaaaaaaaagctgaacatcactgattgttggagaaatgcaaatcaaaaccacagtgagataccatctcatgccagttagaatggcgatcgttaaaaagccatgaaacaatagatgctggcgaggctgtgaagaaataaaaatgcttttacgctgttggtggaaatgtaaattagtttaaacattgtggaaaac

SEQ ID NO: 916930 - DNA, 579 bp, Homo sapiens
aactggtccttattatcttatgggcccaccttctctgcaacagtccctgagcctagagggagggtgcttgtatagttttagaagcagagctttctcagtgaaaaggattccagcccagtgggacgccagatgamggagattcatatctctggtcttcaaaatgccatgatttttgtttccttggaagtaaaacaaggagagataaataacaaatgtttgacaattatttggcaattataagaggaatttttgtgtcagaacagaaaaagaaacctattccatcagggcatcaactaaaaatatgaagaaaaatatgatctggtactctctggaggattattgtagccaagaaataatgattcaatctgcactcaaacaaaaaagttagggctgaaatctagtattaaatgccacattttccttagaaacaatctctctagctgctttttttccattaaagagaaattatggcaggtctgattatttgcataaaatgcagcaagaattgattggccacacagactccttttaagttggcaaaaaataaactattttagattaagtcttgttaaagcaact

SEQ ID NO: 916931 - DNA, 644 bp, Homo sapiens
ggttgtcttcaaggatttttataattttaggttttacatttaaatatttaatccatcttgagttgatttttgtatatggtgaaagaaaggggtccartttcaatcttctgcatatggctagccagttatcccagcaccatttactgaatagggagtcctttccccattgtttgtttttgttaggtttgttgaagatcagatggttgtagatgtgtggccttatttctgagttctctattctgttctattggtctatgtgtctgttttttttagcagtaccatgttgttttcattactgtagccttgtagcatagttttaagttgggtaatgtgatgcctccagctttgctctttttgcttaagattgctttggctatttgggcttgttttgggttccatgcgaattttagaagaattgtttctaattctatgaaaaatatccttgatagcttgataggaatagcactgaatccgtaaattgctttggacaatatggccatttaaacaatattgattcttcctatccatgagcatggaatcacaaaatcatttttatttttattttttcatgttgttctgtaatttatttaaaaaaattaaaaaatgctagatcttggcagatatatgagttgaaaatatttttt

SEQ ID NO: 916932 - DNA, 644 bp, Homo sapiens
ggttgtcttcaaggatttttataattttaggttttacatttaaatatttaatccatcttgagttgatttttgtatatggtgaaagaaaggggtccaatttcaatcttctgcatatggctagccagttatcccagcaccatttactgaatagggagtcctttccccattgtttgtttttgttaggtttgttgaagatcagatggttgtagatgtgtggccttatttctgagttctctattctgttctattggtctatgtgtctgttttttttagcagtaccatgttgttttcattactgtagccttgtagcatagttttaagttgggtaatgtgatgcctccagctttgctctttttgcttaagattgctttggctatttgggcttgttttgggttccatgcgaattttagaagaattgtttctaattctatgaaaaatatccttgatagcttgataggaatagcactgaatccgtaaattgctttggacaatatggccatttaaacaatattgattcttcctatccatgagcatggaatcacaaaatcatttttatttttattttttcatgttgttctgtaatttatttaaaaaaatwaaaaaatgctagatcttggcagatatatgagttgaaaatatttttt

SEQ ID NO: 916933 - DNA, 638 bp, Homo sapiens
cttctataaatgtttggtagaattcagcagtgaagccatcaggtccctgcattttctttactagaagactttttattatgacttcagtctcattacttattattggtctgttcaggttttggatttcttcctggytcgatcttggtaggttgcatgtgtctagggaatttgtctatttcttctagattttctaatttattgacatataattgctcataacagccactaatgatcctttgagtttctgtggtatcatttgttatgtctcctttttgatttctgattttatttatttggatcttctctctttttttaaattagtctggataaagctttgccaattttgtttaacttcaaaaaaccaactttttgtttcatggattttttgtactgttttcttcatttcaatttcacttatttctgctctaacctttattatatttaagggtgtagggcaaaaggatcagctttacttactctgagttatagtgaagacctatgaagcacagattattaagtgaaatgatgaactagggttaggtgagatttgaggtacagtattactcagatgggctaggaggacagctccccgggcaacatcaaataactatgtttagtagtgataagtagtagaagaa

SEQ ID NO: 916934 - DNA, 647 bp, Homo sapiens; identical to SEQ ID NO: 897291

SEQ ID NO: 916935 - DNA, 647 bp, Homo sapiens; identical to SEQ ID NO: 897292

SEQ ID NO: 916936 - DNA, 622 bp, Homo sapiens
aacaattctgcaaccattgctagtatataggtaaatatatagctcagagacttggtggtgggttcctgagcctgttgcttctctaggtcactggtacgaatcacattcaagttaactatgatgtaaatttctacgatcagacagctcttgattacccaatgtaaattgagctggtaatttttcttcactatatgagtcactaacatatgaaacaaaagaaagcctaatggaaagttttatttggcaacatgtataaagcaaaccaagaagttaaaagaccttaaaacaaaagttcaatctgacaatccagcagtctggcagatgctacagagggagtaaaagtaaggtgttaaaaaagcttacagaattaagatgataaagaatgcagagaatagaacactatccctggaaaaactggctatggtaggaagaaacagctttctatatcatgaagacagaaaatatatagaaaataagagagagttagcaaaaacagactttttatatgtgctcrtattctagagcaacactgttggatctttaacattgtatgctatctactaagcgtatgcagagtgagctccacatatattgactatctccagaggagatgattctatat

SEQ ID NO: 916937 - DNA, 633 bp, Homo sapiens
gggtgtgatacaggcactcccatggcattcaccactgggactatgttggttcacaactaaagccagcacactatttgktttcacccaaggatggtgataactagtgcctgtctactgctaatgtttattcaaggcccaagggctctctagccagcaggtggtgactattgccaggcatatgtctttcccttcaaggcagtagagtcccttctatcccagggtgtgtctagagatggcacgtgggagctggggcatggaatcaggaactttaggaatatactgtgtactttgttttactgtggcttaactggtacccaatttgaaagacaattttttttttttactcttccctatcctttcctcaagtaggagtctcaccccatgatcgctactgtcccagtgccatggatactactacctggcagccactggtgtttattcaaggcccaagggctttttagtcagcaggtagtgactcctgccaggcctagatctctcctttgagggcagcaagttcccttctggcccacatttggtctataaatgccatcaaggagctaaggcctggaattggggatcttaagagtttgcttgttgattttactgtactgagctggtacccaagtgaaaagc

SEQ ID NO: 916938 - DNA, 583 bp, Homo sapiens
ctatccttcccagcctctggtaacatccttctactctctatgtccatsagttccattgatttaatttttacctcctactaataagtgagaaaatgccatgttatatatatatatatatataatttaacagtttctttatccactcgttgattgatgggcatttgggttcattccataattttgcaattgcaaacagtgctgctataaacatgcatgtgcaagtatcttttttgaataacaacgtcttttcctctgggtagataccaagtagtgggattgctagatcaaattgtagttcttcttttagttctttaaggaatctccacactgttttccacagtggctgtactagtttacattcccaccagcagtgtagaaatgtcccctgatcaccacatcaatgccaacatctgctgtttttatttttatttttattttttgattatggcctttcttgcaggagtaagggggtattgcattgtggttttgatttgcatttccctgatcattagtggtgttgatcattttttatatgtttgttggccatttgtgtatcttcttttgagaattctctattcatgtc

SEQ ID NO: 916939 - DNA, 463 bp, Homo sapiens
atgaaatgtgaactttagttaataatagtctatcagtattggttcattaactgtgacaaattatgtaagatattaataagccatgtgagacacactgatagaagatgttaatgagaggaaactaggttgtggctacatgggaaatctctgctttttttttttttttttttttggtaatttctgtgtaagtaaaaaaaaaagatgtaaaataaaactttatttaaaacctttttatattttttaatgcttccttgcttaattatttataccgtgaattactagtaattgacactgttaactagtcctgtttttttaaataagagcatttatgacacaaaaaattaaacagtgcagactgatatataaatcaaaacaaatgctctgtacatgttttctgytacagtagtaacacatatgtgtaaacttaattatcgtatttttgtcttgtgctatggttgtgtcc

SEQ ID NO: 916940 - DNA, 627 bp, Homo sapiens
ctttaactctctatgatttacaggttatgaagtggcccttataattccttccaggggtggaaaagactaatgatgatggtgtctgagctcacagccacaagcrggcatgtgtgttcagcagccatgtggctcatgtgctaggagcttactaaatacaatgttctacatcattgcttaacacaaggggagatgctcctgactcagagggtttaattgctcacctgcttctttttctgccctcttgggctcctaaaatgaaaagaatcctggggtgataaagtgagtcaaaggggtgccagccacatcacagcaaaatagattcctaaaaaaatccctggcctaagatgacagccttggctggataagtttgaatgtgctgatagtggacatggtagaatgaaggtggttgaaatgttcatattaaagaacttctacccagattgcaagaaaagagagaggaatggagatggcagcatgattccctataataaaagcagatgatttaagatcagttatctttgttctgaaaaaaataaagacagaaacaaaagtttagcctgaggctacaattaattgggcaataagtgagaggcacatatggcatagacagatttaaacatttctccc

SEQ ID NO: 916941 - DNA, 636 bp, Homo sapiens
agaacacttgcagtgtttgaagtgacaaaggctgctgtgacaaaaaagaagggaaagggaattttttttaaaaaagcaagcaacaacaacaaaaccccacaaaaaagcagacaacaaacaaacaaaaaacagaggaagaagtcaaaacatgctgggctgtgactacttccaggaaggggctacaagaggcagctggaaattctatttgctttgcaactgtgagttttccggcctgcttcctttctaaagtatattactttgtttttggttcatgaagttatccatttctgttttctggaacagctatgtattttctttatctatcatctatctacctgcctatcatctatctatctatttactatctatcttttctacctttcactatcaagagcttgggtcaagcaggatagaattccagtgtatgttcactctaccatttaaaacaagagctcttgtaggcattctccaacacatcataaacctgagctttctaaaacagggtgtgrcaaactaccattcatgggccatgtctgacatagtctgcgtttgtaagaaaagttgtaatgggacacagccacatacatgtgttacataatgtctctggctactttcatggtataacggaagagctga

SEQ ID NO: 916942 - DNA, 633 bp, Homo sapiens
ggcttcttgccactgcagctgtgggctcccactctccacctgctctcctgctcaggttggggcagccaaagaccttctcttcctggggagagaggttagggagggaccatttttkgattatttggagggtgcggtcaagttgtaaacagtgtaagttttagaatttgtgttattgtgatggcaatgaccaactgcaaaatatatcccatttgccttgtaataacaagagcatgtactttacgcaattaaagtttttggaccctacttatttactttactttattaagaatagtaacatttgagcagagaagagttctaattttgcatcagagtcaaaagtgaaaatgaaaggaactgacccatgaaggaacaggtgtgagctatttacttcattcctgcccatcctggttgatgttgagctcttgccctgcatcccactttcaaatgtggtggatgcctcacctaggaaaggccctcaccacgctggcttgctctgctcactaactgtacttacttctcttaatcccctatgaacactcttttctaggttgggtgtcttttccgtaataaaaaggtattgttgcaccacttattcagggctttttggatgccatgctaagcatttcatagtca

SEQ ID NO: 916943 - DNA, 632 bp, Homo sapiens
ataaagttttaaactaatagccaactgggtaaagtgtaaaatgtgaggtcttattccagccaatggaaactggacacagcagtagggtagacacataaggttataagtaactctgtctcctttgttcrgtgtgttcttctggctggacagctattgagtagcaccctttctgcagaaagtaaagctcaccttgctaagagatcatttgttcccacgttaattcttttttttttccttttttggaacatcaaaaacttcattcccaacagcactctgagaaaagccagcctgatacctagattacagggttcacagccttacaggttagtaaggaaggtcatttcctggtaggcccaggaatttagggatattttgggggcctcaagaagagaggaattcacacaaagctataaggactgcagctgaaatttgatagtatgttcttagcttggcttttagctgaataaggcctttaaaagtcaaatctgagattctatatgaaaacttccagcaaagaaacttgaaagcacctatgtggtcatcgcctgttcttgctgcagttacataaataatcaagcaaaatctaataaaacaagacttatttttaaaacaagaatagtcttactttgatt

SEQ ID NO: 916944 - DNA, 632 bp, Homo sapiens
ataaagttttaaactaatagccaactgggtaaagtgtaaaatgtgaggtcttattccagccaatggaaactggacacagcagtagggtagacacataaggttataagtaactctgtctcctttgttcggtgtgttcttctggctggacagctattgagtagcaccctttctgcagaaagtaaagctcaccttgctaagagatcatttgttcccacgttaattcttttttttttccttttttggaacatcaaaaacttcattcccaacagcactctgagaaaagccagcctgatacctagattacagggttcacagccttacaggttagtaaggaaggtcatttcctggtaggcccaggaatttagggatattttgggggcctcaagaagagaggaattcacacaaagctataaggactgcagctgaaatttgatagtatgttcttagcttggcttttagctgaataaggcctttaaaagtcaaatctgagattctatatgaaaactyccagcaaagaaacttgaaagcacctatgtggtcatcgcctgttcttgctgcagttacataaataatcaagcaaaatctaataaaacaagacttatttttaaaacaagaatagtcttactttgatt

SEQ ID NO: 916945 - DNA, 617 bp, Homo sapiens
ttttagctgaataaggcctttaaaagtcaaatctgagattctatatgaaaacttccagcaaagaaacttgaaagcacctatgtggtcatcgcctgttcttgctgcagttacataaataatcaagcaaaatctaataaaacaagacttatttttaaaacaagaatagtcttactttgattatgataaaaaatgatggttactaccaagagaaattttatatttcaaaggaaaactataacatggccggcatggtgcacatgcctataattccagcactttgggaggccaggagttcaagaccagcctgggcaacatggtaaaaccctgtttctaccaaaaatacaaaaattagttgggtatcatggcatgtgcctgtagtcccagctaatcaggaagctgaggagggaagatcgtttgcacccaggaggtagaggttgcagtgagctgagattgcacctttgcactccagcctgggtgacagagccagaccctgtctcaaaaaaaatgtttttaaaggaaaactacagcctttgtgggttatcagattctagtcttgtttcttgtttytgggctgtttttacctctttgtaaactagatcctgccatctgatgaattc

SEQ ID NO: 916946 - DNA, 674 bp, Homo sapiens
catttgttcgccagatgactacacagcacgggctcatgctgcatgtccagtgttgcgcctcgaggacactgcggtgcaccagacaggcaggaaccctgctctcatggaggtgatatgctagtggtggggacaatgggtaaaagactggtgaggccatttctaataggaatccgcactatgaagggaatcaagcaagctttgggggtggagaatgccatggacaggtatcctttagatgggaaaggcaggaaggatggcaataaggagacagccaggtaagagggctacgggcactgacttctaggcagagggaacaacatgtgcaaaggctctcaggttaaagcaagtttggcttgttcacagacaagagtgaaagctagtggggcaggaggtgtgtgacgggtgagggaggtgggcactagatcatgaagggctttgcagaccaagaaagaaggttgggtttaattttagatgagataggaagccactggagagttggactcaggagaggacgatggtccaatttctattttgccaaggtcactrgggtgctgggaggagaatgcattgaagggtctgggttggccatggagaaacagggaggaggcaggtgcagtcattaaaggtgcaaaaaagtggaggaagagaagtctatgcttcaggatgttgtggag

SEQ ID NO: 916947 - DNA, 618 bp, Homo sapiens
gggaggatcacttgaggccgggagttcaagactagcctagacaacatatcaagaccccatctccacaaaaagttttttwaaaataagctgggcatggccaggcgtggtggctcatgcctgtaatgccagcatttgggaggctgaggtgggtggatcacaaggtcaggaagagttcaagaccagcctggccaacatggtgaaactccatctctactaaaaaaatacaaaaattagccaggtatggtggcatgcacctgtaatcccagctactcgggaggctgaggcaggagaattgcttgaacccaggaggtggaggttgcagtgagccgagatcgtgccactgcactccagcctggacaacagagtgagactctgtctctaaataaataaataaaagctgggcatggtggacgacagagcgagactctgtaaatagataaataaataaataaaaataagctgagcatggtggtccatgcctgtagtcctagctactcaggaggctgaagcaggaggaccacttgagcccaggagtttcaggttgcagtgagctatgattgtaccactgcactccagcctaggcaacagagtgagaccctgtctcaaaagcaagtgctt

SEQ ID NO: 916948 - DNA, 618 bp, Homo sapiens
gggaggatcacttgaggccgggagttcaagactagcctagacaacatatcaagaccccatctccacaaaaagtttttttaaaataagctgggcatggccaggcrtggtggctcatgcctgtaatgccagcatttgggaggctgaggtgggtggatcacaaggtcaggaagagttcaagaccagcctggccaacatggtgaaactccatctctactaaaaaaatacaaaaattagccaggtatggtggcatgcacctgtaatcccagctactcgggaggctgaggcaggagaattgcttgaacccaggaggtggaggttgcagtgagccgagatcgtgccactgcactccagcctggacaacagagtgagactctgtctctaaataaataaataaaagctgggcatggtggacgacagagcgagactctgtaaatagataaataaataaataaaaataagctgagcatggtggtccatgcctgtagtcctagctactcaggaggctgaagcaggaggaccacttgagcccaggagtttcaggttgcagtgagctatgattgtaccactgcactccagcctaggcaacagagtgagaccctgtctcaaaagcaagtgctt

SEQ ID NO: 916949 - DNA, 645 bp, Homo sapiens
ctgaggacacatgttgaatccatttctcattattgaaaaggtttcccagatgatggtgccaggtctgtgtctcagcgtgggaggggagtatagtatagaatttgaacctaactgcccagggatctgaggaacctctcagggcgtagtcgcatccaaagctggtattgctcaccgcgcaacagccagttagtcaagagacaaggtgttggggcaaggaaagagagtttatttttttaggagactctatttacttattattttggaaagccagcaagccgagaagatggactaatgtcctaaagaaccatcttaaaaggcatacatctcaagcttctttttatgttggggaagggggaacaaggggacgttaaagtcaggaggtgactcgtgaccacagacacacgagcatcagctggagtccaaggaggttgcaaaagttatttgtctttggtcaggtcacagtgctcctgtaaatcttggcataacattgttgcttgtgcatacaccctccttatctccttwaagcttagttttcaaaagggactattttcatccttgctttgaactataaactaaattcctgccatagttagcttggcctacatgcagggatgagcaaaggcagtcagcttgtgaggttagaaa

SEQ ID NO: 916950 - DNA, 491 bp, Homo sapiens
tggtaattgctgcctgggatggaactcacccttccaggcattgggctctcytctggcccagggcaggtccagaaataatgtccaagattcaagtcctggaatccgggatcaaaagtgcctgcttgatgcttaccactctttggtcaagctggtacctaaggtgcaagacaaagtcccctttacttttctatctgcttttcttaaccagaaggactctcatccaatagacaacacagctgggaaggtgctgagtctcaaattaagccaagaagtcagagtctcatccaaatttctggatatacttcctggggataactgctggttattcaggatgcaatggctctatggtttgtaggtgatgaatgctgtcaggacagggttcttctcctcaaggcagcaggttcccttttggcctatggtgtgtttagaaatttcattcaggagctagggcctggaaaaggggcctcatgaagctgacaggtgccctatct

SEQ ID NO: 916951 - DNA, 595 bp, Homo sapiens
ttgtagtagtttcatagtctgaggtcttagatttaagtgtttartctgtttttattagatttttatatatggcgagagagtggttgagtttgattcttctgtgtatagatatcttgttttcccagccccatttactgaagacactgtattttccttagtataggtttttggcacctttgttgaaaatgagttcactgtaggtgtgtggatttctttctgggttctgtattctgttccattggtctatatttctgtttttatgccactaccatgctgttttggttactattttttttttcatataatttgaagtcagataatgtgattcctccaatgttcttcttttttgcttaggatagcattggatagtctgggtcttttgtggttccatggttcaaatttggtatgccatatgtgtctaagaatgtattcatgttctctagattttccaacttattggcatatagcagctcatattatccactaatggtccattaaatttcagctgtatcagttgtaatgtctcttttttcatctctgattttattaatttgtgtcttctctctgtgtcttccttaatctggctaaagtgttg

SEQ ID NO: 916952 - DNA, 692 bp, Homo sapiens
ttagctattgttctagaaataatcttaacgtttctgaatattaagcttattcttgagacaccctagcttattttatttgtaatgtatttctaggaattagaaataatgttattcattcaatgctctaagattatgctaatttttaaaagaggaagaatcttcacaataaaatatcttaattagaagcagcataattcttattctttattctacaaattacagatattttgtttatgtggtttagtcttgatatctgaaggagaaaaaaaataaagtaaatcaaaaggaaagtacacagaacacaagacagggagatatctgagatattaacatatgcaggaaattgtcagcagggtgcggtggctcactccttaatcccagcattttaagaggtcaaggcgggtggattgcctgagctcaggagtttgagaccagcctgggcaacacggtgaaaccccatctatagtaaaatacaaaaaattagccaggcatggtggtgtgtgcctgtagtcccagctacttgggaggctgaggcaggagaattacttgaacccagaaggtggaggttgcagtgacccaagatcacrccactgcactccagcctgggtgacagagtgacactccatctcccctcaaaaaggaaagaaaattgtcaagggcacacagtaaatgagcaatttgtaaactctcaa

SEQ ID NO: 916953 - DNA, 630 bp, Homo sapiens
atattttttttaaatcctaggtttctaggcctgtgatgagaggggctgtcataaacawctctgacatgccctggagacattttccctattgtcttggctattaacattcagctcctctttacttatgcaaatttctacagcaggcttgaatttctctccgaaaaatgtttttttttcttttcctaccacatggttggtagaaaacttgtatactctgcttcccttttaaacaaaagttctaatttcagaacatctctttatgaacccatgtgactatatgttcttaggagcagacactttacatcttgaatgctttgctgcttagaaatttcttctaccaggtaccttaaatcatctctcaagtccaaagttccagagatctctggggcagggggaaaatgccatcagtctctttgctatatcataacaagagtgagtgacctttactccaggtcccaataagttcctcatctctatctgagaacacctcagcctggaattccctgtcaatatcactatcagcattttggtcataaccagtcaacaagtctctaggaagtttcaaactttctgacatctttctgtcttctgagcctttcaaacttttccaaactttgcccattacccagt

SEQ ID NO: 916954 - DNA, 566 bp, Homo sapiens
atcctgggagcacaaagcaaacattttgttagtgggtcactaagggtgatggtgagtggtgccacttccacttccacmctttgattcctggacccgtgaatcctggctatgggagaaacaatgccacatatttgacactgatccagagcatacacggccttctggagaactttgtcccagccctgcaaagtactgtcacctagttggcattataattgtgacttcaaaagaacattccaccgttctatcaatccagctggttcaggataatggggaacatggtaagaccaatgaattccatgagcatgagcccactgctgcacttctttatcaataaagtgagtgtcttggtcagaggcaatactatctggaacaccatgacagtggataaggtgactccttggatggtagtcttggcagaagcattgtgtgcaggataggcaaacccatatctggactgaatgtctattctagtgaggacaaactgctgccctttccatgatggaagaggtccaatataatcaacctgccaccaagtagctggctgatcaccccaagaaatggtt

SEQ ID NO: 916955 - DNA, 565 bp, Homo sapiens
cacatacttctacttacatgtgaccaacaagcatatgaaaaaattctcaacatcacaaatcattagagaaatgcaaatcaaaaccacaatgagatattaccttacagcaataagaatacctattattaaayattaaaaaattaaaaataacatgttagcaagatagtggagaaaagggaatgcttatatactgctggtaggaatgtaaattagctcatccactgtgaaaagcaatttggagatttctgaaacaacgtaaaacagaactaacattcaacccagcaatcccattactgggtatatatttaaaggtatataaatcattctatcataaagacatatgcatgtttacatttattgcagcacttttcacaatagcaaagacctggagtcaatctaaatgcccatcaaagttgcactggatgaagaaaatatggtacatatacgtcatagaaaactagatagccataaaaaaaagaatgaactcatgttttttgtagcaacatggatgcaggtggaggccattatcctaagcaaattaacagaggagcagaaaatcaattac

SEQ ID NO: 916956 - DNA, 622 bp, Homo sapiens
taagcaatggaaatttgctatctcacagttctagaggctagaagtctgagatcaaggtgttggcaggattggttccttccgaggagaatgagggagaatctattccatgcccctccctacctcctggtggttgttagcaacctttggcattctttggcttgtttaaacatcaccctcaagtctgcatttatcttcacatggtgtttttcctgtgtgtgtctatctccaaatttccccctttttataagggcatcagtcatattggattagggtcccaccataatccagtattacctcatcttaacgaattatatctgcaattatcctaattacaaataaggttacattccaatgtactgggggttagaacctcaacatatgaattttggggaggtattaatacaatatacattagttatacaataggcataagatattttattattgttaagatattgtattaatcagggttctccagagaaacagaattaattacatgtctattttagatagatagatgatagatagatagatagatagatagatagatagatagatagatagatgatagatagatagatagattctgtttccatggwgaaacagagagagagagagagag

SEQ ID NO: 916957 - DNA, 590 bp, Homo sapiens
gcaactgtcatcctataaattccctaatgtagtctcattaagccctgctgcccatgtgccggccatccagctcgggctactcattctcatccggctgccttgttcgtgcgagctggaaaatacyaacggcaactccaccctgcttaacaagtcagcttagcattcaaaagttgatttttctgaagggtactggcaagctagctcatctgaaacccacaggtaaagcagtcaagcaagcaggcagaacatgcatgttcattccccaggacaggcaccaccagtttgctctggttttttctcacagctagacagacaaaagtagctcctgcatggcactccagccttcccactctcaactcttcctcttccaatggcctcaataccttcctggtacaatggcagacactttcctagtcaatttgaggttttctaaaataataaattggatcttgcttgtagcaaggctcaatgcggaaattcatggttttacatggaagggaattcttttgaatactacagtgcagtggttctcacgtggagaggaattttactcccctaagggacattgggagtgtctacagatattttta

SEQ ID NO: 916958 - DNA, 605 bp, Homo sapiens
ggcaactgtcatcctataaattccctaatgtagtctcattaagccctgctgcccatgtgccggccatccagctcgggctactcattctcatccggctgccttgttcgtgcgagctggaaaatactaacggcaactccaccctgcttaacaagtcagcttagcattcaaaagttgatttttctgaagggtactggcaagctagctcatctgaaacccacaggtaaagcagtcaagcaagcaggcagaacatgcatgttcattccccaggacaggcaccaccagtttgctctggttttttctcacagctagacagacaaaagtagctcctgcatggcactccagccttcccactctcaactcttcctcttccaatggcctcaataccttcctggtacaatggcagacactttcctagtcaatttgaggttttctaaaataataaattggatcttgcttgtagcaaggctcaatgcggaaattcatggttttacatggaagggaattctttygaatactacagtgcagtggttctcacgtggagaggaattttactcccctaagggacattgggagtgtctacagatatttttagtggtcacaactgg

SEQ ID NO: 916959 - DNA, 607 bp, Homo sapiens
ctcactcactgtcactaggacagtaccaaggggagatgatgctgaaacattcatgagaaatccatccccatgatccagtcactacccaccaggccccacctcctacattggggattacaattgacatgagatttggtggggatacagatccaaaccatgtcactgtgattggtagatatttctgttatggctattttaatcttcagacttctccatctctctatttcttgctcttgcaatttgttattaaaaatttttttttgtcctatagattctgtccaatcccccagtgtggatttggctgattgcatcccctgcatatcatttaatgtgctcttccactccttgtatttcctataatttggtatttagatctggaggctcaataattactccttaactgcctctttttgagttagaaaaaggcatctacttcaaaactgacatgcagactagatactaatgttgtacagcagaaaaygacccccttatacacagtgtaaacataagtttctgttgtacttgtagagtctatcttggtctaaaccagtttattgaagcacagataattattacaactaacccaggctatatattaaacatttaa

SEQ ID NO: 916960 - DNA, 719 bp, Homo sapiens
tggtgtgtagaaatgctactaatttttgtatattgaatttgtatcctggaactttaataaagtcacttatcagttctagggcttttttggcagagttattamgggttttctaggaataatagcatattgtcagtgaagagagatagtttggcatcttcttttcctgtttggatggcttttctttctttttcttttctgattactctggctaagacttcagtactgtgttgaataagagtggtgagagtggtcatccttggcttgttccagttctcaaagataatggttccagcttttgcccatttaatatgatgttggctgtgggtttgtcatagatggctcttattattttgaggtatgttccttctatatgtagtctgttgagggtttttatcatgaatggatgttgaatttttactaaaagtttttcctgtatcattgagatgatcatatagtttttgtttctaattttgtttatgtcgtgaatcacatttattgatttgcatatgttgaaacaaccctgcttcccaggaataaagcctacttgattgtcatgaattaactttttgatgtgctgctggatagaatttgctagtattttgttgaagatttttgcatctatgtttatcagggatattggcttgaacttttcttttctcattgtgtttctgcaagattttggtattaaactgatgccagtttcatagaatgagttgggg

SEQ ID NO: 916961 - DNA, 719 bp, Homo sapiens
tggtgtgtagaaatgctactaatttttgtatattgaatttgtatcctggaactttaataaagtcacttatcagttctagggcttttttggcagagttattaagggttttctaggaatartagcatattgtcagtgaagagagatagtttggcatcttcttttcctgtttggatggcttttctttctttttcttttctgattactctggctaagacttcagtactgtgttgaataagagtggtgagagtggtcatccttggcttgttccagttctcaaagataatggttccagcttttgcccatttaatatgatgttggctgtgggtttgtcatagatggctcttattattttgaggtatgttccttctatatgtagtctgttgagggtttttatcatgaatggatgttgaatttttactaaaagtttttcctgtatcattgagatgatcatatagtttttgtttctaattttgtttatgtcgtgaatcacatttattgatttgcatatgttgaaacaaccctgcttcccaggaataaagcctacttgattgtcatgaattaactttttgatgtgctgctggatagaatttgctagtattttgttgaagatttttgcatctatgtttatcagggatattggcttgaacttttcttttctcattgtgtttctgcaagattttggtattaaactgatgccagtttcatagaatgagttgggg

SEQ ID NO: 916962 - DNA, 662 bp, Homo sapiens
cccacgtacacaggataggctccaagactatcccacatacatctgtgcaaagggtagctcagctgaccagttggccaggacagggctacagctatcattggaaaacactgagaggcatacctattccatacagyactgagaggggccgtggacagctggggactgagtctttctgcttctcagcccagattatcatcagcctggactctgagcaatgctgtgagagtgagaatgctaaaaacacccaacacctctgctgcttttattcctttagtataaagtctaatcatcaaccgagcggaggctacatgttgtgaattcgtatctaggcacatatctcttctgttgcatcatagttaactgcatccaaagaagggactgttacctgttacgctctggaggagcagatgtggttccggcctctcagctgaaacaaaagtaaaccagctaatgactaatactgtccacttgcttcctttgtttctccccattcggaccctcatatcggatactcactcattttattcatcttcttagcactgtttatgctggttttgcttacttcccagactgccaacttccctcagtttctgttacaaattaatctaaatcccatttatcttccaaacttatatgactcctagtttatgatggggttttgt

SEQ ID NO: 916963 - DNA, 634 bp, Homo sapiens
tatgtttaatattttgaggaaatgctaaacaattttccaaaatggatgaaccattttataatcccaccagcaatgtataagagttccaatttctctaatctttaccaacacttgctggcttttgtctttttggctttagttatcctagtgggaataaaatggcattcattgtggttttgatttgcaatttcttattgactaatgttgagcattccttcatgtgcttattggccatttttatatgtttcttggagaaatatgtatttatataactttgattgggttacttgtctttttattattgagttgtaaaagttctttatatattcaaggtacaagttccttatgagataacaacttgcaaatattttatcttactttttgttgtcttttcatgtcttgattgttttcctgaagcacatatgctttaaatttcaataaagcccaatttatctgtttttgtcttttttgctcatgcttttggagtcacatctagaaatctattgcctagatttaaggccatgagggttcaatcctttgttttctcctaataatgttakggtattaaccattatatttaggtctattatactttttgaattaactttgtgagggaagcgtccaatgtaattct

SEQ ID NO: 916964 - DNA, 634 bp, Homo sapiens
tttttaatttagtcaattgaatttaaagttattagaaatctctgttcaagagtactcattagagtcttttccatgaatttgattacaaatgattttagaaaagaattcattgtggatgacaaaatcttacaatagttattgttaaaaatctgatgaaagttcacaattgataagggaatttatttatattatatacaacattttaagataacaaccagacgcatgactgacagcattatatcaggaccaccagactgccatcaatcttgtataattcttagaatactcatattaataacacacacacatatatacatatatacacacacgaatataatttaaagatttaacataacaccaaaattatgactaagaacatattagatttcaatgaatttatataacttttaaaacactcatattaataacatacacataaacgtaactgaaagacgatctagcatcacttctcatttgaaaacatttcttatacaatttactaaataagcctaatcatttaatatctctacaagataagatatatatatatatttaggctttctggggcctaactrgaaaatcaaaaggtgattctagattaaaaaaattaatttagaattttgatcctggggaa

SEQ ID NO: 916965 - DNA, 646 bp, Homo sapiens
ctttttttatatttatttattatactttaagttccccggggtacatgtgcagaatgtgcaggtttgttacataggtatacacgtgccgtggtggtttgctgcacccatcaacccatcatctacattagrtatttctccttatgctatccctcccctagccccccacccccaaaaggccccagtgtgtgatgttccccaccctgtgtccatgtttctcattgttcaactctcacttacgagtgagaacatgcggtgtttgtttttctgttcctgtgttagtttgttgagaatgatggttttcagcttcatccatgtccctgcaaaggacacgaactcatacttttttatggctgcatagtgttccatggtgtatatgtgccacattttgtttatccagtctatcattgacattgatgggagatttgggttggttccaagtctttgctattgtgaacagtgccacaataaacatacgtgtgcatgtgtctttacagtagaatgatttataatcctttgggtatatacccagtaatgggattgctgggtcaaattatatttctgtttccagaaccttgaggaatcgccacactgtcttccacaatgattgaaataatttacactcccaccaacagtgtaaaagagttcg

SEQ ID NO: 916966 - DNA, 586 bp, Homo sapiens
tattagcagtgtgagaagagactaatacagtaaattggtaccagtagagtgaggtgttgctgtaaagatacccaaacatgtgaaagcractttggaactgggtaacagacagaggctggaacagtttggagggctcagaagaagacaggaagatgtgggaaagtttgcaacttcctggagacttgttagatgactttgatcaaaatgctgatagtgaatgatatggacaatatagtccaggctgaggtggtctcagatggagatgaggaacttgttgggaactggagcaaaggtgactcttgctatgttttagcaaagagactggtggcattttgcccctgctctagagatttttggaactttgaacttaagagaaatgatttagggcatctggcagaagaaatttctaagcagcaaagtgttcaagaggaagcaaagcataaaagtttgaaaaatttgcagcctggtgatgcaatagaaaagaaaaacccattttctaaggagaaattctagcttgctgtagcaatttgcataaataacaaggagacaaatgttaatcacaaagacaatggagaaaatgtctcca

SEQ ID NO: 916967 - DNA, 577 bp, Homo sapiens
tccttcaaaacttgataatccacagcaactaatgggacaaatggatgaatgggggaactcttcaggaagcaagtaatgcgtgctgttcagcaagcctacatgaaccattcagtaagaaatgttttaatagtgggctaaaagaagaaggaatcaattggtgaaagcaaaatgtataagatgagcttcattattatttaaagaactacagaatcaacatttgaaatacaatttcagattggtggctgttagattgaaataacatcaccattagctcaatctgatatgccaagggaaatacaaatgtgtgctaaaagtgcatcttaaacccaaaaatccttgcctgtcactcagactacaaagttggcatgtttgaccaaaattgatccaaagttttttaatcactcacaactaaaaattattagaactaagctggtcaggatgaaaatatmaattaaaaaaatctgttctatgtgtcttaaattattctttggtcaaatgatgtgatttttgagagatctgaaaatataaacctatttctcatttccaaatacaaggttataagtatgtacagcaaggt

SEQ ID NO: 916968 - DNA, 564 bp, Homo sapiens
cattttgggactttcttccccaataccaggctmtgggtgaaactgggagtcatatccaggtaatcctgccccagagtgcatgctctcagcattcatgctgtgctgcatgtgacccactgatttgtgctatacactgcaaaaaaggtggagataggtggcttgccatcaggaagaccaccatcaatctaggttgaagatatagatacaggaaaggcatagctaattaagcccaggtggaataatacttggcaccaacagaacatcatgcgatttgaaatttgccttcctgcccttctttctctggcccctgtgctttccttcttcccacttcatcttttctgtggctctgtttataggtttcacactgtctagtttggagcaggatttaatcgtggtttcattaataaatcaaaggaagaatgacagtattgaaaaaaagaacgaaaagaagattgaatgaatgtgggggcacagagggagggaggagagggaagaagctggttccagtctcgtagaagtctagaaagagaagactccagcttttgccatcagtgcctgcaggtg

SEQ ID NO: 916969 - DNA, 595 bp, Homo sapiens
agcgtgtatcagaactttattcctttatgtgtttcaataatattccattgtatggatatggcacattttatttatccattcatcactcagtacattctccagtggaattatccaargcactcacttctctcctttggctaaagggtgaagctttactcaaatccacttgtagaaaccacactagagttagggtttaaaaattaacaccagatagtggggtgtggtttgtggaactctggactggaagtcaggagaccgggactttgtttctgagtttgctgtgtgactttgagaatctcctttcccctctgtgggcctcagtcttcccacctgtaaaatggaactgggtcaagatgattttctgattactttctgctccaacatcccatgattttagttgtctcttgagtttccaacagggtgcaaatacctggagagaaactcttattagggatatcagaaggctgttttgtcatattcctgattcacatatcaggcctaggggtgacataggcaaaggggagtcagtgtttccatttgtaaaatcaggagggaagtgtggacccaggcttcagctttacgcatctgtgaatta

SEQ ID NO: 916970 - DNA, 595 bp, Homo sapiens
agcgtgtatcagaactttattcctttatgtgtttcaataatattccattgtatggatatggcacattttatttatccattcatcactcagtacattctccagtggaattatccaaggcactcacttctctcctttggctaaagggtgaagctttactcaaatccacttgtagaaaccacactagagttagggtttaaaaattaacaccagatagtggggtgtggtttgtggaactctggactggaagtcaggagaccgggactttgtttctgagtttgctgtgtgactttgagaatctcctttcccctctgtgggcctcagtcttcccacctgtaaaatggaactgggtcaagatgattttctgattactttctgctccaacatcccatgattttagttgtctcttgagtttccaacagggtgcaaatacctggagagaaactcttattagggatatcagaaggctgttttgtcatattcctgattcacatatcargcctaggggtgacataggcaaaggggagtcagtgtttccatttgtaaaatcaggagggaagtgtggacccaggcttcagctttacgcatctgtgaatta

SEQ ID NO: 916971 - DNA, 587 bp, Homo sapiens
gtgacattaggaaggatggagtcggcgggggcaatggaatatctccaatcacatgaggcgtgaggtctacytgaaggggtggctgagaaaacctcttataagaactctcttcccttctctttgcccttgcgattcccaatgatactgaaggtttctgcaaaacattctacttgaaatgtaccaaaaacaagagggttggagagaggtgcagtctcatgttgggatgtcagatgcatcatgtagtaggggttcaataattatttgttaaataaatgaataaaccaggtaccagggacgatctagacacatgcatacattagttatttttttcaaagcactctttggggataggtattatcctcatttctgagaggaggaaggcagggatgtagcagcagaggctgtaatagatgctgccagggatctgcccctccccctttgacactcttgttgacacaaacacctttgactctcagcgtgggagctttctactggccacagggccatgcttagccccttcatgaaacatgtcagaagtgcttgagagttaatggccttggggcagttctcaatcacagatgggagtt

SEQ ID NO: 916972 - DNA, 577 bp, Homo sapiens
attaactataaattaagatcaacctaatttaggcctattaaaatggaaagcatattatctctcattcaaaggaatttgtatttgatgcaaatagaacaagttcctaaactttaraaatgttcttggatttttcatctccgtagttaaccaacgaagaatgggtcccccatttaaaaacaggggaacataaggaacaataattagttatgtaaataatgtggcattcttgtttataattagttcaagaataaaataaaattcacgcatgtcacaggactaattttcgtatgcaaatgaacaatcaaaattataaatggtaataatgcagtttgggagatgtgacattctcaatttattagcaggggtgccagttacagctgatgatggctgacgttgggagatttcaaaggtgcctgggtctggaaaattctcacccatcaagaggagaaaatctaactaaaatattttcacccattttatgtcactgatggctgcaaagtgaacccagggcgcctctgtggctggagagacaggtgctgcaccagggagacaggagtccaagtgaatttttgaaaag

SEQ ID NO: 916973 - DNA, 650 bp, Homo sapiens
aaagatgttggaaagtcacaaattctcaacaggttatctcttgtccctagagagcatattcagataacagcattgaaatttgcctgtttggggagaaaggtattctgacaatgrtgtaagcttttctattattttctaagattagactaaaatataagctcttaatattatctttacaaatttccaataaaaatattttaactcctccagttccctaaaggtgtgctaaattatttacaatgcttaagaatgctagagaacaatgaaatgagatagattctataatatagtatatgtgcttcagcactgtattagtctgttttcacactgctgataaagacatacctgagactggacaatttacaaaagaaagcggcttattggacttacagttccacatggctggggaggcctcaaaatcatggtggaaggcaaggaggagcaagtcacatcttatgtggatggcagcaggcaaaaagggagcttgtgcggggcaactcccgttttaaaaaccattagatctcatgagacccattcactatcatgacagcagcccagaaaagacctgcccctataattcaataatctccccccaggtccttcccacaacacgtgggaattatgagagctatatgatgagatttgggtag

SEQ ID NO: 916974 - DNA, 633 bp, Homo sapiens
gccagactggtcttgaactcatgagctcaagtgatccgcctgcctcagcctcccaaactgttgggattacagacgtgagccactgcacctggccgacagatccaggttttgtggaccttaagcttatacaattttgagagccttctttaaggaacaaaacataaaattacataaaaaccaaatacaagggagggccagaaactttagctccactagctctgcagagagctgccttacagcagttgaggagaaaagcaaagctggagagataaatgtgtacgtcatcagcagggaagtggtacttctagttgagagattgaattctgtccccctcaaaagacatatgcaagtcctaagtcccagcacctgtgaatgtgacctcatttaaaaataaggtctttgtagatataatcaagttaaagtgaggtcagactaaagtgagctgtaaatccagtatgactggtatccttaaaggaagagggaaatttggacacagatacacagaggaraaaacgtgaagtgatgaaggcagagagtggaatgatgcaactcaagccaaggaatgccaagtgttgccagcaagcacctgaaacgagataagaaaagattctccctcacagccttcagagagaa

SEQ ID NO: 916975 - DNA, 602 bp, Homo sapiens
aaacagagcctctaacagatatttgacacccatgtttataaccgcattattcatgatagctaaaatgtggaagcaacacaagtgtccatggacagatgaatgaataaacccaatgtggtgtgtacatgcaatggaatattattcagtcttaaaaagggaaggaaattttgacacatggtacagcctggatgaagcttcaagacattatgctaagtgaaataaaacagtcataggcggagaaattccatttatatgatatctctagaatgctcaaattcagacacatgaaaatccagctacctgtcagccccagaggagtgagggccaaccttagtgccccagggctctggtgttttccctaatcagtacctcagggctctccaagagctgttgtagaaaatgcctctggaggtctcaagaacaaaccccctccaggatcagaaaagcctggggcggtactccccacagggccattgtctggctgtgcaacagtaggtaggtgactaasccactctgtgcctcaacttcctcagccggtaacagggtggtaacagcacctgcctcctgccacgctgaggacactgagatgagcaagtgcagtg

SEQ ID NO: 916976 - DNA, 596 bp, Homo sapiens
acagcaaaggagctgtgcaaagaagagttcacagtccactgccttggtctgagtcccagctgcaccacacgtgctgggcgacccccttcccaatctgcagttttctcatctattcaatgggataacacaatacctaccttataaggttgttgtgagaaataattaagatactccgtctcaataaattaaggtctactggtggcaaaatatgatatctgattctggccaacatgagcacagattgggaagacacagagtcatttgtccttatacaatgagaggaaaaagagaagcatgagatttcagaaagtacggggaccagatgggttccaggcacctgcaccgcagaaacggtcggtctcctgagggcatccacaaatatcttccatttctatgcaaatcacatttctagggagtcgattgagcctgggtcacatgtgtagccctgtacaggtgaggggggagcctcttgattgacagatccaccagcctgcatgcaagtccagtggaattgtcccccaragcaaagttaaatttactggaacttaggggaatggatgcttggggggaaatggaggcagcacctgtacctctca

SEQ ID NO: 916977 - DNA, 638 bp, Homo sapiens
atttaaaccagaccttacctagtgggttgccgaygctcttcctctcaggcagcccttcagagcaacttcctgttctcatgaggaagaaacccgagtgaatttctttaggcagaaaagacaaaagaaagacagtgtcatttcctatgctgagattatgactgagtatcatccacttaggtcaaacctttaacagaaaggaggagtttctgataagcagctaattagggggaagaatgaagtgtttaacgttagaaacagtgagtttcagtatgtagtgagggccatatccagtttaggagtgagtgcagttggtttggttctgagcacactgagtttgaggtccaggggtactttaacagggaggtgttctgtgaaattggtaggactgacacacaggagagatgtcagggccagagaggcaattggggaattacctgtatgtttgaagatttgagaggtgatggagaaacatgtggagtgacaagagcaaaaaaggttgaggatagagccttggattatacctgattggtgaatggaaagaggatgtaaaaccaatgaaaaagaaagattaacacatgccatagaaaaattgtgacaatataggctcttgcatgccaaggcagattaaattttggaag

SEQ ID NO: 916978 - DNA, 621 bp, Homo sapiens
tgcttttgtgggtagcaagcagggtgttctgcggaagggcagcgaaggcctmtgtgtttgtgatgtcttcctgggttacctcagtggctcatcatggattgttttttgccattaattcatgtgacccattctggaagctgttttcagcgtatttgcaactctttgggctaagaagctcctttagttcacatttgcacctgcgacgatgtaatgtagggtttatggaagtcactgtgtccgagggaaaatccctgttgccagctctgctttctgtgatcctgccacaggcacagaacagtgtgggagatgagaccttcagctttgcgtgggctgtgtgatctccagccaatcacccagcttccctgagcctgtcaggtgcaggagtggggctgtcagggactggctcagagctcatccccgcccctctagcaagggtagctcctggctgagagacctcagggccaggagtggacagaattgcttcccttaagaggcttggggagattccaggcaagggtggggaggtgtgagagacccatgggcctgtgcaagacaggctccgcagacccagcatggacttccagggaccatagcatcgcatggagcttgggagagggccac

SEQ ID NO: 916979 - DNA, 607 bp, Homo sapiens
aaaggacaaacattttcagatgttgaatgcacagtgatgtcagacatcattagtgacagctcatttctgcattttgtggttggactctaaactatgttatcccagaagaagtgtctccatcttgccctggatttggtgggagaaggatctgacacagggagctttgcccctgaaaacagcactgtggcagctggaaatgaccttatatggtagcttcgctttacactccctgtcccagaaagatccgtatggaatgtggtgacttttgatgctgataaggacattccacaggagaatgctggggtcgggtagacgaaggatccctgtgaacggttacccattaacactggctctggtttcacaccagtgaagagtggcagtcggcatagttttcattagtcagacattataacctgagtttggcctatttttctttgaaacatttggaattgtcaagccaaaatgcatttcctatggagtgagtgagtttgcctctgccagcctttccatgtgatagtttattwttatagaggtgacatgggcacccagagtccctggcaagctattgtttttctttgctaagaacagcaggaagagacaaaaaaaa

SEQ ID NO: 916980 - DNA, 652 bp, Homo sapiens
atatataagaagaaccaaagagaattctttgaattggacaatacaatatctaaagtgaaaatgtcaccagatgagttatctattgatatgtaacaaataaccacaaatgtatcagcttaaaacaacacacatttrtgatctcacagtttctgagggtcaggaatccagacatggcttgactgagtcctctgcatcagggcctctcacaaggctgaaatcaaggtgtgagccagggctgaggtctcatctgaaggcttgactgaggaggacctgctgctaagcattcttgattgttttacaaaatcagttccttgacagatgttggatcaagggcttcagttcttagctgactgttgggcacaggccacctttgttaccttgctatatggacctccaatatggcaggttgcttcatcaaagagtgcaagccagaaagataatagagaaagtttgctagcaatatagaagtcacagttttttgtaaccttattacagaagtgacatctcatcatctttgatgtatcccatgagttggaagccagttatcaatatgcccagaatcaacaggttgagattacacaagggattgaataccaggcagtagatttcatttggggtcattttagagtctggttatcgcaatgggattaat

SEQ ID NO: 916981 - DNA, 614 bp, Homo sapiens
ccccattgcttgtttttgtcagctttgtgaagagcaggtgctcagaggtgtgtagccttatttctgagctctctattctgttctgtttgtctatgygcctgtttttgtaccagtatcatgctgttttggttactgtagccctgtgatgtagtttgaagtcaggtaacatgatgcctccagcttttttgcttttttctttttgcttagaattgccttggctatttgggctcttttttggttccatatacattttaaaatagtttttctagttctgtgaagaatgtcattggtagtctgaaaggaatagcattggatctgtaaatcgggcagtgtgtccattttactgatattgattcttcctatccatgaaagtgggatatttttccatttcttcatgtcttctctgatttctttgagcagtgttttgtaattctcattgttgagatctttcacctccctggttagctgtattcctaggtattttattctttttgtggctattgtaaatggaattgtcttcctgattaggttctcaacttggccattcttggtgtgtagaaacactggtgatttttgtacattaattttgtgacctaaaattttgctgaagttgt

SEQ ID NO: 916982 - DNA, 556 bp, Homo sapiens
aaaaaaaaaaagttattattgaccatagtcaccctgttgtactatcaaacagtaggtcttattcgttctttctaattttttttgtacccaataaccatccccaccttccccttagccccttggctatactaatttttgttcccaccaacagtgtatgggagttttcttttctctgcatccttgccagaatctggttttttgtttgttttttatctttctaacaatagccagtctaggcctggcacattggcttatgcctgtaatcccagcactttgggaggccaaggcaggtggatttcttgagcccagaccagcctgggcaacacggtgaaaccccgtctctaccaaaaatacaaaaattagccagtctcataacctagtctaaaaaataaataaataaacaacagccagtctagctgggtaggatgatatctcactgtggttttggtatgcatttcyctgatgcttagtgatgttgaagctccataagcatttgcttgtctggttcaccatacgtattcccagcatctcagatagcacctgacatgttggagat

SEQ ID NO: 916983 - DNA, 605 bp, Homo sapiens
tatttgataagtaaactgaggctcagagagattaaatgactagtctagagtcacagagttgatcagtcaaaggactaaattaagtgaaactttcacaaagtggaatatctgaatgggaacttayatatctatatagcattagcgtacatattctaatttgaggaggtaaaaaattctttagtaatcttgagctttagctgtgaactaaactgaatttcagtttgaacattgtcttcccactcccaacccttaccacatcagcacaatctttaaattctttaaaggtcaagcaagtgataatcacaaaggaatggagtgcttccaattttactctagcaggcaatgcaatttttattcattagcttatacagtttatatgcagtttaccatactgttagtggatgtctctggaatgtgagtgctgcctgtgggactttggaacacagagatggctataaccaaataacagtcaatgaagcagagatttgtaattatttggttcatttgaacccttaggtagcttatttgagtaacttagagtccaaagcctagattttctcatgttaatcaatctagctttatttatttatttatttatttattta

SEQ ID NO: 916984 - DNA, 612 bp, Homo sapiens
ccttgggcatgggacctgccaagccaggcacgagacggtatctcctggtstgttgcattgctgagaccatgggaaaagcagagtatttggtcaggagtgtaccgtttcttgaggtacagtctgtcacagcttcccttggctagaaaaggaaaatcccccaaccccttgtgcttcccaggtgaggtgatgccctgccctgcttcagttcaccctccatgggctgaacccactgtccaacaagtcccaatgagatgaaccaggtatctcagttggaaatgcagaaatcacccaccttctgcactgatctcactgtgagctgcagaccagagctgttcctattcagccatcttggaagtgtggacgaaaaaacctagtatttctatacaccaacaatagtcaagccaagagtcaaataaggaataaactcccattcacaattgccacaagaagaacaaaatacccaagaatacaggtaactaggaagctaaaagatgtctacaaagagaactaaaaaccgcttcttaaaaaaatcagagatgacacaaagaaatggaaaaacattttatgttcatggatagaaaaaatactatttttaaattaaaattgccatac

SEQ ID NO: 916985 - DNA, 612 bp, Homo sapiens
ccttgggcatgggacctgccaagccaggcacgagacggtatctcctggtctgttgcattgctgagaccatgggaaaagcagagtatttggtcaggagtgtaccgtttcttgaggtacagtctgtcacagcttcccttggctagaaaaggaaaatcccccaaccccttgtgcttcccaggtgaggtgatgccctgccctgcttcagttcaccctccatgggctgaacccactgtccaacaagtcccaatgagatgaaccaggtatctcagttggaaatgcagaaatcacccaccttctgcactgatctcactgtgagctgcagaccagagctgttcctattcagccatcttggaagtgtggacgaaaaaacctagtatttctatacaccaacaatagtcaagccaagagtcaaataaggaataaactcccattcacaattgccacaagaagaacaaaatacccaagaatacaggtaactaggaagctaaaagatgtctacaaagagaactaaaaaccscttcttaaaaaaatcagagatgacacaaagaaatggaaaaacattttatgttcatggatagaaaaaatactatttttaaattaaaattgccatac

SEQ ID NO: 916986 - DNA, 603 bp, Homo sapiens
cagtagtcaatcaggaacagtttgttcagttccatgtagttgagctgttttgagtgagtttcttaatcctgagttctaatttgattgcactgtggtctgagggacagtttcttataatttctattcttttacatttgctgaggagtgctttacttccaactatgtggtcagttttggaataagtgtgttgtggtgctgagaagaatgtatattctgttgatttgaggtggagagttctgtagatgtctattaggtccacttgttgcagagctgagttcaattcctggatatccttgttaactttctgtctcattgatctgtctaatgttgacagtggggtgttaaagtcttctattattattgtgtgggaatctaagtctctttgtatgtctctaagacttgctttatgaatctgggtgctcctgtattggatgcatatacatttaacacagttagctcttcttgttgaattgattcctttaccattatgtaayggtcttctttgtctgttttgatctttgtttattttgaactttaaagtctgttttattatagaccaggattgcaacccctgcctttttttgttttccatttgcttggtag

SEQ ID NO: 916987 - DNA, 648 bp, Homo sapiens
aaaccttaataaaaggttacaggaactgctaactagaataaacagttcagagaagagcataaatgacctgatggagctgaaaaacacagcacaaaatattcatgagccatacataagaaatgccgaattgaacaagtgaaagaaaggatatcagagatttaagatcaacttaatgaaataaagtgtgaacacaagattagagaaagaaggataaaaagaaatgaacaaagcctccaagaattatggggttatgtgaaaagaccaaacctacgtttgattggtgtacctgaaagtgacaggaagaatagaaccaagttagaagacactctttaggatattatccaagagaacttccccaacttaggaagacaggccaacattcaaattcaggaaatacaaagaatgccacaaagatactactgtagaagagcaagcccaagacacataatcatcagattcaccaaggttgaatgaaggaaaaaatgttaagggcagccagagagaaaggttgggttaccaacaaagagaaactcatcataytaacagtggatctctctgcagaaacactgcaagccagaagagagtgggggccaatattcaacattcttaaagaaatgaattttcaacctagaatttcatatccagcca

SEQ ID NO: 916988 - DNA, 564 bp, Homo sapiens
tacagctataaacttctctcttaatactgttttagctgtataccagagattctaatattttgtatacttgttctcactagtttcaaagaacttcaggattttattgtttacccaaaagtcatgcagaagcaagttgcttaatttaaatgtaattttgtttttaagtgattcattttttattatttcatatttttattacactgtggtctgtgaccatggctggattatttattttttttaatttccagaggattgttttatgtccaattgtgtggttgattttagagtatgtgccatgtgcagatgagatgactgtatattccttattttgggatggagagttctgtagatgtctattatgtaaatttagtcaagtgtccagttaaggtcttgaatatcttctttagttatctgccttgatgatctaatactgtcagtaagctgttgaaaggtgttgaagtcttcatctattattgtgtagttatctaagtctcttcacaggtgtctaaaaatttgctttatgagtctggatgctcttgtttargtacatgtatatttaggata

SEQ ID NO: 916989 - DNA, 557 bp, Homo sapiens
tgtataccagagattctaatattttgtatacttgttctcactagtttcaaagaacttcaggattttattgtttacccaaaagtcatgcagaagcaagttgcttaatttaaatgtaattttgtttttaagtgattcattttttattatttcatatttttattacactgtggtctgtgaccatggctggattatttattttttttaatttccagaggattgttttatgtccaattgtgtggttgattttagagtatgtgccatgtgcagatgagatgactgtatattccttattttgggatggagagttctgtagatgtctattatgtaaatttagtcaagtgtccagttaaggtcttgaatatcttctttagttatctgccttgatgatctaatactgtcagtaagctgttgaaaggtgttgaagtcttcatctattattgtgtagttatctaagtctcttcacaggtgtctaaaaatttgctttatgagtctggatgctcttgtttaagtacatgtatatttaggatagttagatcytcttgttgaaattagtcttt

SEQ ID NO: 916990 - DNA, 695 bp, Homo sapiens
agaactgactttgtataatttcattcgtccaaaatatgttgagctgygttttaaggcctaatatatcatttatcctggagaatgttttatgtgcacttgagaagaacatgtattcttttgtggttcagttggttggtctatgaatttctgttatgtcttattgctttttagtatttttatgtcctctatttccattttgcaatttcgggtacttgtttaatctattattgtaagtgggatattataagtattcgtctgttattagagaactgtatatttgtcccttcaactctgtcaatgtttttctttatatgttttggagctctcttgttaggtgttttgggtttagattgtttttcttattttaatttcttaaggtacaaatttagattattgatgtgagatcttcctgtttagatacagacatataaactacaaattttctttgagcatttctttacctgcagcccaaaagattttatacgttgtgttttcatttttatttttctcaaaatattttctaattttccttgtaatttctttattctccctttgaattttaagagttttctttaatttctacatatttttggatttctcatttttaaaatcaatttatagtttcattccattataattggacaatttactttgcataagttcagtaattttaattttttgaggcttgttttacg

SEQ ID NO: 916991 - DNA, 695 bp, Homo sapiens
agaactgactttgtataatttcattcgtccaaaatatgttgagctgtgttttaaggcctaatatatcatttatcctggagaatgttttatgtgcacttgagaagaacatgtattcttttgtggttcagttggttggtctatgaatttctgttatgtcttattgctttttagtatttttatgtcctctatttccattttgcaatttcgggtacttgtttaatctattattgtaagtgggatattataagtattcgtctgttattagagaactgtatatttgtcccttcaactctgtcaatgtttttctttatatgttttggagctctcttgttaggtgttttgggtttagattgtttttcttattttaatttcttaaggtacaaatttagattattgatgtgagatcttcctgtttagatacagacatataaactacaaattttctttgagcatttctttacctgcagcccaaaagattttatacgttgtgttttcatttttatttttctcaaaatattttctaattttccttgtaatttctttattctccctttgaattttaagagttttctttaatttctacatatttttggatttctcatttttwaaatcaatttatagtttcattccattataattggacaatttactttgcataagttcagtaattttaattttttgaggcttgttttacg

SEQ ID NO: 916992 - DNA, 695 bp, Homo sapiens
agaactgactttgtataatttcattcgtccaaaatatgttgagctgtgttttaaggcctaatatatcatttatcctggagaatgttttatgtgcacttgagaagaacatgtattcttttgtggttcagttggttggtctatgaatttctgttatgtcttattgctttttagtatttttatgtcctctatttccattttgcaatttcgggtacttgtttaatctattattgtaagtgggatattataagtattcgtctgttattagagaactgtatatttgtcccttcaactctgtcaatgtttttctttatatgttttggagctctcttgttaggtgttttgggtttagattgtttttcttattttaatttcttaaggtacaaatttagattattgatgtgagatcttcctgtttagatacagacatataaactacaaattttctttgagcatttctttacctgcagcccaaaagattttatacgttgtgttttcatttttatttttctcaaaatattttctaattttccttgtaatttctttattctccctttgaattttaagagttttctttaatttctacatatttttggatttctcatttttaaaatcaatttrtagtttcattccattataattggacaatttactttgcataagttcagtaattttaattttttgaggcttgttttacg

SEQ ID NO: 916993 - DNA, 641 bp, Homo sapiens
aaactgcagaatatacattctattcaccagcacatggactattctccaagatagaccatattataggccacaaaacaagtcttaatcaatttcaataaattgaaattatatcaagtaccctctcaaaccacagtaaaataaaattggaaataactccaaaaggaacccacaaaaaaatgccaatatagaggaattaaacaacttatcctgaatgatagtcgggtcaataataaaaatccagaaaaaattttaaaacaaaaattttgatctgaatgctaatagtgacaccacctatcaaaacctctgggatacagcaaaagcagtgctaagaggaaagttcatagccttaaatgcgtacatcaaaaagtctgaaagagcacatatagacaatctaaagtcacacctcaaggaacgagaaaacaagaaaaaaaacaaacccaaacccagcaggaggaaagaaatagtgaagatcaaagcagaactaaataaaattgaaacaaaaagtacaaaaaaagaaaaaaagcgggttttgaaaagacaaataaaattgaaagactattagcgagattaaccaaaaaaagaagagagaagatccaaataamctcaattacaaattaaagaggagaaattacaactgatac

SEQ ID NO: 916994 - DNA, 605 bp, Homo sapiens
atccaggatggtattgcctaggttgtcttccaggatttttataattttgggttttacaatgaagtatttaatttatactgagttgatttttgtatatggtgtaaaaaaagmtgtcctgcttcaattttctgtatatggctaaccagtcatcccagcaccatttattgagtagggagtcttttccccattgcttgtttttgtcagctttgttgatgatcagatcatcatcaatttgtcaccttatttctggactctctattgtgttcaatgggtctattgacctgtttttgtaccagtaccgtgctgttttggatactgtagtcttgtagtatagtttgaagtcaggtagcatatctccaccctgctctttttgcttatgattgctttggctattaaggctctttttcagttccatatgaattttaaaatagttatttctagttctgtgaagaatgtcacttgctgtttcataggaatagcactgaatctgtaaatttcaatgggcagtatagccattttagtggtattgattctttctacccataaacaagaaatgtttttccatttgtttctctgatttctttgagcagtgttttgtaattctc

SEQ ID NO: 916995 - DNA, 563 bp, Homo sapiens
tattcatatttacatgaagcattacacctctcaaaatatgtatggtcttgaacatggtcttgaaaacgcatgcaagattttaatgaatcaaatcttatttaaatacgtatcttttcgttgagccaacaaacagaatatgtacatgcaacagacatgggacatgaccatgaccgtgaaccagactggtctctgctctcgaggaacttccaatctagtgggaagagccatgtgaatttcaaacgggcatatatggtaagaacaatactagccttttatctcacttgtccatagtcaagtgagatattgactagcacaacagtggcaggagatagtcctttttatctacaataaacagtctctggaaggatgtctgattgcttgacttcgcagcagcctggtcagagccgttagcattcagtctgaggaccagggctaccaagccattgttttytaatgccttttaatttggactttaaaaaaaaaaaaagagtgtggaggaggtgtgagaggcaggttgaggcaaaggccagcctgggagcacaggaaatcagttcactctgcag

SEQ ID NO: 916996 - DNA, 641 bp, Homo sapiens
gggtgaaaatatttatgtcttctgtagcgcagggccaagggtggggggaactgaataaaaggcatctaaagctacgtgaaatgtttggatatagatgggcaaatgctagagtataaggaacaaacagaaagatggtttggtttgtggcatttctgtgattatggataatttttttcttcttaaatttagaatgtttggctgggcgtggtggctcacgcctgtaatcccagcactttgggaggctgaggcaggcggaactagggagttcaagaccagcctgaccaacatggagaaaccctgtctctactaaaaatacaaaaaaaattagtcgggcgtggtggtggcttataatcccagctactcaggaggctaaggcaagagagaattgcttgaacctgggaggcggaggttgtgatgagccgagatagcgccattgcactccagcctgggcaacaagagcggaactccatctcaaaaaaaaaaaaatttagaatgctcttggctttgctctgatrtttgaaaaatatcaatagcaaatccctaatgattaggatctattgacttctaaaaaacctcctgtatttccctaaaattttccccctttcaagttctctgcccaaaggtcagcgtttccttgcaaa

SEQ ID NO: 916997 - DNA, 631 bp, Homo sapiens
cttagaattcttgtaccaccttgaggggagtataccctgaaacctaaatgtgaaagtgatcatagatgggctagtatgctagagacactaagaggcrtggaaacccaggaagcagaagctggaagcgggtaagggagaggtctcacagaagagggctaggatagtctggctgttataatacaaggggccaaggagagcatcagatgcactgatcagtcagggaattcaggaagcatgagagtctctggctgccaatattctttctgtctaccctgtccccagtctaatctgtaaaaattcagggttcccccacttttcattgaggtcttcagcaggaatcatgctatctattaaaccaaaaagctcctctagaacatccttcatcctaaataacaaggcatgggagttatcttctcaaatactaggctaactcactgttttgcctcagtttcctcttggtgaggtagtggactacacatcatttttaaggtccctgccaatcctaatcaatcatctatgcttctgtgaataagggatggtggcaccatgtcttcatgtaggccctgctttcacagcttaaagatttcatgggaggaaactgcagtgcttgttctatgctttgtttgttttt

SEQ ID NO: 916998 - DNA, 517 bp, Homo sapiens
tatttaacacaacttatgaattctgcytctgtctcacaagctacttattaatttatgtatagttaacacatcttctgaattttgccttatcttgtaagctattagcttacgtactatctatattggttttatccatccaatttgttttcctatttcctatatctgaatataataaaatcatacagcaaactcatatttcaggagccattgaacttagaactctttgtttttggaaggggagccctagaaagtcagtattctgaatagaaatgactctgaggctctacagataaagataaagctctctttgccaggtgtagagtgtcttcaaacataacttattaggtgataattccatttctattaacttgtctggctggaggcaaagaaatacagaggaaattggaaagagagaaaagaataaagacctggaaaaagggaagatccttgagttatctttgccttagttcctctgaagttataatctaaaaattggtataagctctacatacactct

SEQ ID NO: 916999 - DNA, 668 bp, Homo sapiens
acagtcatgggccagggattgccataggtaaggggaacacagagatgaaaacagcatgatcttcctcaggaaaatagtaggcaggtcaaaacaggtgcccaaataattcttatataagaaggccaaaaatatgtgtcaagagaggaggaagagatgataggttcatataaagagaagattacagggggtgtagattcaaggaaggcttcacggaggaggtgccattcgtgaaggctgtctagtggcttagggtgggatagacaagcaaagatggaggaataagaaaaagaacaggcagagagaacaaacatatctattaaggaataagaatgaaagaaatgaaatgtaagaggcctagggggtaaagttggcatctttgtgatggattggagatacaagaagagtgagtgggaagagacttgggtgacacccatgcctttagtttgaatgcagggcaactggtggcagcatgttcataaatgactaagtagagtttgggcatgtttagtttgagaagcagatggggcatgcaagtggagatgtctattcaaaagtgttagaaacacatctggagtttgagaggatgggtagataagagacacasatgtgggattcatgggcatagaattgatagtgaaatgaaataacagtgctcagagaggaagacc

SEQ ID NO: 917000 - DNA, 630 bp, Homo sapiens
cgggtgcttgcagggctcccccagctggagaggaaacctctgccgggggcttcaaggagtctctggggtatgccctcctcccctatacacacacacagatggccccaaatggaactagtttatgtatactcttatttcagtaacgatgtggaggcttaccacaaaagcatggtgaataaaatggtaacttagcctgaaaatgaggatgagggaagaaagtgatgaggaccagtggtctgggactaggcaggcagctcatggcaccattccccatcccaagaatccctgaaattatcacagcttttgtctgtttccctgttggtttagtaaaccattcaagttattccttattaaacactgacccttggccgggcgcggtgactcatgcctgtaatcccagcactttaggaggctgaggtgggtggatcacctgaggtcaggagttcaagaccagccgggctaatatggtgaaaccccatctctactaacaatacaaaaattagcckggcgtgcgcctgtagtcccagctacgcgggaggctgagacaggagaattgcttgaacctgggaggcagaggttgcagtgagctcaggtgtagagcatacaggtaggtgtaagacacagaccctc

SEQ ID NO: 917001 - DNA, 576 bp, Homo sapiens
gcacactggtgagtcatgccctgcttagataagcattaatcaaggtttaatgcatgcttgatgaacgaccttattctaactaaatccagcaagctttcagctctagagtaaaaaacgctatacttaacaatcccttactattctaaaattctgtgatcaccaaagttattgtgatattaatagtgtaatacataaatatacaaattcatgtgtgtatgtttggcattcattaacatagacatatattctttaatgcctactctgtacaactggtggtggtttggggattcagctggaaaatcatactcaaaagaccccaatcggcaacatcccttactaggttcactcttcagaaggatatcagacaggaaacagagcatactggcaggacaaaaaataggtgtgtcatcagtggaggcctcttctccagtggcagcttaggcaaaagagaacatgtgagtggataaagaagtcattctggctcagtgcaggagaatggttcagacattacacattggcatccacatatgccayacaggcttgaactacagctaatttgagtcctggtagaatgct

SEQ ID NO: 917002 - DNA, 594 bp, Homo sapiens
cggctcatcgttctgcagactgtacaaaaagcatagcaccaacatytgcttctgatgagggcctgaggaagcttccagtagtggtggaaggggaaaggacagtaggtatatcacatagcaagagagagaggaggaggtctcagactcttttaaacaactagatctcatgtgaaccaactagtcaagaatgcactcattaccatgggaaggacatcaagccattcatgagggatctgcccccatgatccaatacctcccactaggctccatctccaacagtaggaatcatgttttgatgtgagacttggacatacagacaatatcaaatgatgagcatttaaattagcaaaaattagtattgtctgaaaataaaatattggaactgaaattctaaatagtatttatgaggaagatggcaagagtggttggaatagttaaactatgctgaggttaaagtcttatttgtgaaggggctaatagacatgattatttccagacatagcttgaaaaatacatttaatatgcaaactattacaagaaaagcaatgcaaaaaaaaacccagaataaataaatttcttttttttttttttgag

SEQ ID NO: 917003 - DNA, 484 bp, Homo sapiens
catatagaaaattgcaaaagtggaaagaaatgtatgctgtgtttagggatatattattgagtctctataatgtaaaaaaaaaaaaaaataaaaaaawaaaaacgagaaacatgcagcaatgtagaaggccagaaaaactgatacgtagggcaaatccagaaaggccttttttgttagccaacatacctgtagtggacataaagtccaaggaagtgccatgactagttatggattttaggtaacagaatctggagcattgtgtagaataaagtgcaagctgaaggaaaggagcctgagtagctggaattaaaaagtctaggcatgagataaggatggtttatgtagtggccacagtgatgaagagagggaagagaattagcagatatattttaaaggatttatatcataactggggtaagaatcagatagggagggtctaggtcgattcccacttttttgtcttggatgtgtgagagtgtggcag

SEQ ID NO: 917004 - DNA, 605 bp, Homo sapiens
caggctatgagggggcacagctgtggctgcatgctccagggagctggtggaagctggaagcagacaccagccccaccatcctgggtacagctgtggccacccaagtcagggatgtggacctgggcctccctgtgctcttgggagcccagaaggcaccccactgcctttgcagtctcagaagtgtctggtcccgctacctggcttctctctgctgttgatgcctgctccaaacttggagcaatgtagcgcttagcctgagcactgtcacagcccagccgggggttcacatgcttggggcagggctgacacaccagccccctgccacttcagccccctctggacattgggagaaaacaagagtgagagggagcctggacagggggcaaaggacagctcagtgatggcctgcaggtgccccttggcataagcagccttggcaccatgcacagtgtcaggaagcagatgagcttctggacagaagggagtgggcccctsgtgaggccccacctacagaccagggagggcctgaaagctgagggctgggcttctagtcctgtggcctggagtaagggcttgtggtactttttcaaagcctgcctatggct

SEQ ID NO: 917005 - DNA, 631 bp, Homo sapiens
ttttggtagaatctttagggttttctatctataagattatgttttcagcaaatagtgacaacttcacttctttcttcccagtttggagtctttatatttctttagtttacctaactgctctggcgtagttttccaatactatgatgaatagaagtggcaggattggaaatccttgtgttgttccaggtctcaaaggaaagcctttcagtttttcaccattgaatataatgttagctgtgggcttctcatacattgtatttattgtgttgagataaatttcttctatacctaatttggtaagagatgttattatgtaatgatgtttaatgttgtcaaatgatttttacatataatgaaatgttatgtttttgtccttcattctgttaatatgatatatttatttatttgtgtatgttgaagcatctctgcattccagagacaaatcccacttgataatgatgaaggatttttttaaagtgttgttgaatttggctatatgtaattttctttttttataatgtccatgtttggctttggtatcagggtaamgctagcttgataaaaacagtatgaaaatattccatcctctttgattttttggaacagtttgagaaggactggtattaattct

SEQ ID NO: 917006 - DNA, 633 bp, Homo sapiens
acaagatctgacggttttacagttgggggtttccctgtaccagctctctttgtctgccaccatataagatgtgactttgctcctcctttgtctttcaccatgattgtgaggcctccccagccatgtggaactgtgagtcaattaaacttctttcctttataaattaccctgtctcaagtatgtctttatcagcagtgtgaaaatggactaatacagtatctatgcaatttattttatccaatttgcaataaaaaaaattaagacattatatttgatgtaaaacatggtaaggcatattcccaatgatcaggtatgaccactgttgctgtgatgacaatgtgattttgtaaaatattccatcaaatttatagaatagactctttcaaaggatattggtggtatctagctaaattctactctggtctaagtatatgaaattccctaaaactttctgataagtgatcttactatcttgaattgaacaattacaaagatggtaaagtaacycctgaaaatgaggcaggataagtaaggttatgaggtgatactgacttctccccttgtgtgaagcccagtaggttctgcatcgtttgcaccctagtgtctcagcacctcactattttgtaaggtaag

SEQ ID NO: 917007 - DNA, 535 bp, Homo sapiens
ctgagttagtacttgtcactccctgtaattattcctttgtttccatcgttttttttctaaacccttaaaggcagggactggggtgagtaaacayagtaaaagacttagccaaagtcacaaaggtaattaataaaaatcccagcctgggtttgaactgaaggaatccgactcaggtacctgggaatttaacctctccccgccatgccaccaatgcctcctgttggtcctctgctgtctcggggctattacatcctttttaatttttttttttattttgaggcaaggtcttgccctgtcatccaggctggagtgcagtggtgcaatcgcggtttactacagcctcaacctcaagcagaatacaggcatgcaccaccacacctggctaattgttctgtatttttgctagagacaaagtttctctgtgtcgcccaggctggtcttgaactcctgggctcaagtgatccacccgccttggcgtcccaaagtgcagggactacaggccacatcttccctggacaccctgagtgctcctgta

SEQ ID NO: 917008 - DNA, 535 bp, Homo sapiens
ctgagttagtacttgtcactccctgtaattattcctttgtttccatcgttttttttctaaacccttaaaggcagggactggggtgagtaaacatagtaaaagacttagccaaagtcacaaaggtaattaataaaaatcccagcctgggtttgaactgaaggaatccgactcaggtacctgggaatttaacctctccccgccatgccaccaatgcctcctgttggtcctctgctgtctcggggctattacatcctttttaatttttttttttattttgaggcaaggtcttgccctgtcatccaggctggagtgcagtggtgcaatcgcggtttactacagcctcaacctcaagcagaatacaggcatgcaccaccacacctggctaattgttctgtatttttgctagagacaaagtttctctgtgtcgcccaggctggtcttgaactcctgggctcaagtgatccacccgccttggcstcccaaagtgcagggactacaggccacatcttccctggacaccctgagtgctcctgta

SEQ ID NO: 917009 - DNA, 564 bp, Homo sapiens
atggtcctcagatcttctagtgcytacttcttatcttctatacatcttatttaggcttcctacttcctgtcccttctatcaaccatcctctctgtctttcttttatgcttatcacatcttgtattttggaaacttctacccacttacctcctctctcccccaactgccaatatatataaacttcatctgtgaccttattacttctcagataatctattttttaaataatgacagcaataataatattaactaatgaactaatctatgcccaggttctggtatattatattttttatatataatatatataatactaacatatataatatattatatacaattgaggccaaccttacaatcaccccagttattggcctagaggacttttctacaccacagcacagggagatggacccatatatagcatgataatctctctggttgtggggacatagattggaattttggttggctaaggcagatgtgctaaatgtagttatgcatgaataaggtgaaattttatgaggtaaagaagaattggtcatctttaggttgagcattttc

SEQ ID NO: 917010 - DNA, 600 bp, Homo sapiens
gttccatatggtaccaattcttaatctaacagttaacagttcattcaaaataatggcaacaatgtatttgattttgtacacatatatttktgtgtgtgtgtgtgtgtgtgtgtgtgtatagtcgtcatacttaggggtgcttatatataagtggaatgacagcaatgatacatgggataggaaagagaaattaggattattttgttactataaggtacactgcccaagaagcagtatattattatttgaaagaggggttgcattatttgtaaatctatactgcaaacacaagggcaaccacaagaaaaccacgctagaagagagaataataaaatgccaaattaacaccatcaaaggcacaagacgaatggaagacaaaaataggaataaagaacaaggttaacaaatagaaaacagtaacattatggtagatgtttatccaaatatataaatactttgaatgtcaagggtgtaaatgtaccaattaaaagatagattattatatggaaaaactgggccagtttaaaaaagaaaaaattgtcaaagcaggatcaaagaacaaaacccaattatatgttggttacaagcaacccacttgaa

SEQ ID NO: 917011 - DNA, 600 bp, Homo sapiens
actgctgtatttcagacttggatggggcctgcagcctcttttggctaatttctcttgtttggaatggtaatatttatccaatatctgcacccccattgtatcttgggagtaaataccttgtttggattttaaaggcttataggtggaagagacctgccttgtctcagaaggcctttgtacttttgaatgatgctggaattagttaagatttttgggagaatattggcagaggacgattgtattttgcaatgtgagaatatgagatttgagatgctggggcagaatgatacagtttgcatgtggtctcctctaaaactcatgttgaattataatccccactgtttgttggaggtaggacatggtgggagataactggatcattggggcagatttctcatcaatgttttagtgccatccacttggtgctgtccttgtgatagtgagttctcacaatatctagatgcttaagtgtagcatcttccccctcattctcttctgctcttgctatgtgagatgccaggtccccygttggcttctgccatcattgcaagttacctgaggcctcaccagaagctgagcagatgccttgcaccatgcttc

SEQ ID NO: 917012 - DNA, 641 bp, Homo sapiens
tataaatggaattatatgtgatctttggggacyggatttctttaaaacccagcattcatgttgttgcatgtactaatggttcattccttttttaagtagtattctatggtataggtttactggtgtgttttttcattcatctattgaaggacatctgggtttccagttttgtctgttacaaataaagctgttatgaacatttatgtgcaggtttttatgtgaacataagattttatctgggataaacagtcaatacttttatgggcattgtgctgctgataatgttggagaaagaccacttcacaagaattatggaataaaatatactaaagcttggtaactaacatgagttggagtattttatcagtaaaagtacattcttttttagtaagggaaatttttatactatctgaagtatctgtggaagaagacaagcatcaaaactggcaaccagaaaaaatagctggaagacatagtagatgtagaatatccactgaaaatatattaatattctccaaactaaactgatccatatactgaagactctttaggggaagaatgcctctttacctttgagatcctacttctggggtcacttacagacaaccaaagggtaacaatctcctaagcaatttaattat

SEQ ID NO: 917013 - DNA, 629 bp, Homo sapiens
gtgtacaccagacagatatggaaggatactcaccttttgaatgaagatgtctctaagttgaaatgctttcatgaatatatagtcagaaatattctaaatrcaaaaggacttgagggtgattgatattttggatcatgtttcacgtaaagcatgtagtaactgtcttagaatcatgctggaacactgtttgttgcagagtggcattatacacagaagttatattttggaatcccaatgaatgggatgtaggtacaaaatgacaaaagaataatgaagagagccataagatggatctcaaaaacaacattctgctaatatagtatattatcaaaatagtgttttttctaagctccattttattgccttcatcaaaagctcatgtttctagggccatgataccgagtgggatatggcactgtctcacccactgacacaccaagattttatatgacctctctctttcttttcttctctcttcgtaggagatttggaagagtgtttgaaaattttggcaatcaagaataagaaggtgatttatattttgaacagaagttaatattggttcttattttattaatgacctttactggtccttttttcctagtctttctctataatgatctcattat

SEQ ID NO: 917014 - DNA, 593 bp, Homo sapiens
cagcctaggcaacagagtgagactttgtctcaaaaaaaaagaaaaacaaagaaaaattcctcagagctcatacaaggctgggtagaatatgtgtttcaacaatagtggatcttttaatatagtacatggatcattgagtagagtcttcagcaaaatattggcaaagtagggttagggttaggttagggagatgggaatagactgaagactactctggacttgccctaacagagtttaagagcaacatttgaaaggatcaaactgatttcaagtaacttgagtgcatccaaggggagaaaacccatcaaaataaaaataaaaactacaataaaatccagcaccaaaagtgtaacattcacaatgattagcatctaataaaaagttaccaggcatgaaaaaaaaaaggaaaaggcaatccacagtcaagagaatctttagtcaatggtaatagactgagaatgacagatgatggcattagtaaatgatatggtttggctctgygtcccaacgcaaatctcatgttgaattgtaacccccagtgttgggggagggacctgataggaggtgactggattatggtgaacacctatatg

SEQ ID NO: 917015 - DNA, 653 bp, Homo sapiens
cccaaatctccttaagctgataagcaacttcagcaaagtctcaggatgcaaaatcaatgtgagaaaatcacaagcattcttatacaccaataatagacaaacakagagccaaattatgagtgaactcccactcacaattgctacaaagagaataaaatacctaggaatacaacttacaaggaatgtgaaggacctcttcaaggatatctacaaaccactgctcaaggaaaccagagaggacacaaacaaatggaaaaacattccaagctcctgaatagaaagaatcaatatcgtgaaaatggccatactgcccaaagtaatttatggattcaatgctatccccatcaagctaccactgtctttcttcacaaaattagaaaaaactactttaaatttcatatggaaccaaaaaggagcctgtatagccaagacaatcctaagcaaaaagaacaaagctggaggcatcacactacctgacttcaaactatactataagtctacagtaaccaaaacaggattgcgctggtaccaaaacagatatatagaccagtgaaacagaacagaggcctcagaaataatgccacacatctacaaccatctgatctttgacaaacatgataaaaacaagcaatgagaaaaggattttctattta

SEQ ID NO: 917016 - DNA, 561 bp, Homo sapiens
attatcaggctgggagtggtaatactggagttcatggtctgactggaagctgtaaaatgattctacaacattgcagtgagtattttttatagttttaaaaagtcccagcaataaaaaaataagtcagagactwacttaatttaggattttgattttgggaacatttattaaagatgttaaaagacccaaacatttgattaaaagagaatcacaggtcattgtgaaataatacttactcattttattgaagtgataatcaaaatgactttgaaaggcaatagacgtaaaatccttaactcttttaaatcttaaaatttggcaactaaaaacctaattaagacggcataataattataaaatcttgtttctaaagccagttaccaaaatggcaaaacaaaaaaatattttgcactgtgactgcttctccttaaggaaagcccatttatataatctggaagtcaaacttggtgaaaaaagtgcttgatttaatcagacacaggaagagtgttttcaaggttatgagtatagcaggggattatgtgactcttaagaacagcatga

SEQ ID NO: 917017 - DNA, 632 bp, Homo sapiens
gactgtgcacctttatttagtagctgtatgatgtttgcccacacagatttctactgctaccaataaaatgatcttttactaagtcctaggataatagccaagagcacctgccctggagtcagcctgtatggccgcatgagtttgggcaggtcatttaatcttttgagcttcaatttctcatatttgatttcagaatagtagtagtacctggctcatagagtcatcaagatgaaacgagatcacctctctaaaaaataccttgtccattgcacacagtaaatgttctgtgaaagtccacagttgtttcaacatctagggaggatcctttcagcccatgtcttcttggagctactgatctgaccattttgacctagtggatggttttttttaaccatatagtttaataaagatggaccacaatacccatatgtccatcacatcactttatcttaccactttctgttacccaggcttaatcttcttgaaagcagaatctaggcatrcagatgagaaaattggctcagaccctgtctcccagtggagagatgtagtatccagctaaatcctagaacttctgacttgaatccacttcttttcccagtatttgatacaatctgttaaatgtcttaatg

SEQ ID NO: 917018 - DNA, 632 bp, Homo sapiens
gactgtgcacctttatttagtagctgtatgatgtttgcccacacagatttctactgctaccaataaaatgatcttttactaagtcctaggataatagccaagagcacctgccctggagtcagcctgtatggccgcatgagtttgggcaggtcatttaatcttttgagcttcaatttctcatatttgatttcagaatagtagtagtacctggctcatagagtcatcaagatgaaacgagatcacctctctaaaaaataccttgtccattgcacacagtaaatgttctgtgaaagtccacagttgtttcaacatctagggaggatcctttcagcccatgtcttcttggagctactgatctgaccattttgacctagtggatggttttttttaaccatatagtttaataaagatggaccacaatacccatatgtccatcacatcactttatcttaccactttctgttacccaggcttaatcttcttgaaagcagaatctaggcatgcagatgagaaaattggctcagacyctgtctcccagtggagagatgtagtatccagctaaatcctagaacttctgacttgaatccacttcttttcccagtatttgatacaatctgttaaatgtcttaatg

SEQ ID NO: 917019 - DNA, 574 bp, Homo sapiens
aaactgaatcatattatgcccagggttataggagacctggaggtttaaagaagtttaagagaggagatgtgacttctccaagctcacagtgccagtcacagctcttggccccctgccttcccttttctctcagttctctaaccacagcaactcaactcagaaggggctcttcacagagcttgctctccttgaccattcccccgatggggatcaggtgctgagacacaggaatgggaggaaggcctcagagatgggacctccatgataggccacattgctggaagaggccagctttgcaggactgaaacctctttctaccaaaaagggatctggagattatgaaatagtttttccatgcaaggaagcctttcagcagctgcagcagctggctaaatcacagattagccacagctgtagcctctactacaagacaggctctccccaccctggccccaacatcctccccaggctggaacttcccaactgctggacactagcagccctggtgggacctttcttagggacattcaaggtcaaygagatgtaaagtaaggtttgtaaaactggataggtg

SEQ ID NO: 917020 - DNA, 572 bp, Homo sapiens
accacaatatccatgatagcccagaaccttgcaytgggcttaatcaggctcacaaacgacactcagtactctctatatgctgcctttgcaaatcgctttctttttctgctttcttgagctggagattaaaagaatcaataagacaactatttggtggcactttggattttaatgaactacacagtcacaaggcaattatattgctaaatcattaattgcctttgagagttcaacaaatgtttatcacatctactatattttgatcattgttagtggaggaggttcttgaattacagtaatgaaaaagaagtgactgagtttatatatgaaatacatgaaagttaactgaaccatttaatgatttcaattttcttgtagccaactaatattaactgcagtgtgataaaaggtttttcaattgactattgttacaacttaaaatctatgcacaatacctggcgcagtgtctgggacatagaatgtgttcaacaaatgttatctccttcatttttgatattgtttggctcagtgtccccagccaaatctcatctcttataatccccatgtgtcaa

SEQ ID NO: 917021 - DNA, 621 bp, Homo sapiens
acttatatgcagaatctaaaaatgaaaacaggtcaaatatacagagatagagaattaaacagtggttaccaggggcagagtgagggaaaaaataggaagatgtaggacaaagatgcaaagttacagatgtgtttgacgaataagtctaaaagtctagtgtacaacgttggggctatagttaataaaagtgtattatatttagtatttttttctaaaggagtagcttattgttactattgccctggattgtggtgaatgggtaacctgtgagacgatgaacatgttaatttgtttcaccataataatcacacacacacacaaacatatataaatatatctcaaaacatcatgttgtattccttacccatacatagtacaatttatttaaatgtacattgaaaaagaaaaatgtaaagccttcaaatcaataatccaagttcctacattaaggaactaaaaaataagagcaaaccaaacccaaagaaagtagtaaagatatcagccaaaaatgaatacattcaaaaacattaaacartatggaaaatcaagcaatgggggaaatactccctattcgataaatgatgctgtgataactggctagccataggcagaaaattgaag

SEQ ID NO: 917022 - DNA, 601 bp, Homo sapiens; identical to SEQ ID NO: 906157

SEQ ID NO: 917023 - DNA, 540 bp, Homo sapiens
cataaatattacttcatagcattttcaatcattaagaaagataagcccttttcttgttggttcttgatattttcctacctgtattcaaattaatgcagaagtaatagccattatcttacttactggtagcaaggagttacattataaaagcttcttgtataaaattttattcactaatagaaaagaaagagaaatagtggaaaactgttaacatttaacacagcgtaaaatacattgcccattctaaatggtttgaggtcttaaagagtctcttccaggggtttttgaatgttcaattctagtaaatatcacagccaaagagttccaggcgaagtgcaatactttgattccatgttttaggaatgacacggataaacctggaaatgattggggggttgaaaaagttcttcacatgtcctttggtattagtatttccttcaaaaatctgaaagccaaataagagaaaatctttaatgacaacataaatggctaaggttttttgtttttgtktttttttagacagggtcttattctgttgcc

SEQ ID NO: 917024 - DNA, 614 bp, Homo sapiens
caaaaacactcattgaacaccayatatatggcagtgatgttgccagatactgtcatgacattgaagtttgagtgacctgaggactttggaagagtcaggcctagtttgaatctcaggtaggtcttattgaaaatgggctgatggaggtaattccaaattagagcccttccttggagagttgtgatgtgtctatataatccaggcactttcttcacagagatgctgtcggcactctgattggcagaaccattcttggtctagatcacactgagagtttacctgagtagaacctctgtttcacaaaggttttcctaggagcctaagtcactgaaaagaactaaaaattctactcattctcctatacctcccaaatcttgattctttgagtggcagtgagaaaataatgcatctttgtaccttaccatttacctcacaaccttgcagttccaatcgaagggtaggtctgttataggctcgagttggagagatcctaatatatctagccacaataggtgggtcaaactgattctcttttattgtagaggcatctgaattgccattaaaatactagaagaaaagaggaaagtttagttatgtaacaatgatctataaag

SEQ ID NO: 917025 - DNA, 598 bp, Homo sapiens
caagttttaagataaatactaaattatttgaacacattttaattgaagaattatctttactatcatggctaatatttattatctgttatatgccagtcattattctaagatttcaygacaacaaacctgtatgacagagacatgattattattaccattttacagatgagaaagatgaggcacacagaggttaaataacttcataaaagtcactgagccaggatttgcacttattagtctagttctaaaacctgcacataaaccactctcctactcaattattctctcaaaggtatgatggctggaacatgtagaaggaaagatatttaaatgtgaaccatgaaaagtctgaaattattttaaaatgttctcataccaacaactattataatatggatacaattttttataccagtgcctgatggaactctactatgcttacaatgatctgaacatcagcataatgggataattagaaccatattaacatcaggtacttactattcagcggctgatacaataacttgcatgactattatctttatgattattgccatcattgtcatcattatttatagagagcttatccgatcccagg

SEQ ID NO: 917026 - DNA, 557 bp, Homo sapiens
ctgcacataaacgagaaatcggcgtttattgtcttaattccttggwtctgggcaattttatagcaagagaaagctaagcaacttgggccaggcacggtggctcacatctgtaatcctagcactttgggaggctgaggcgggtggatcacttgaggtcaggagttcgagaccagcctgggcaacatggtgaaacctcatctctactaaaaatacaaaacactagcagggcatggtggtgggcacctgtaattccagctactcggaaggctgaggcaggagaattgcttgaatccgggaggcagaggttgcagtgagccaagatcgtgccactgcactccagcctgggcaacaagagtgaaattccatctcaaaacaaagaccctcacccaagatgtctgctgttcctgagctgatgctttctgacctctgatgcctgtgggctccctgcttctttgtaggtgccttgctctgcctaccaccaaccggaatgtgagattttgccccctcttcagtttacacacacttacataaaatgctgctcacagaaacacattgtg

SEQ ID NO: 917027 - DNA, 604 bp, Homo sapiens
cattcttccattcacttggattcaaaatcttgaaatcatcttttatccttctttcatcttcatactctgtatccagtttaatcccattgcttcttgtgtgaaaatatcttatattcactacctcctttctctactgctgccatccacgctttgaagctcaaaataagagagaaaatatttaaatatatcatggcctatttttttccaatcagcattctaaatgatttcaaaagcttttgctattctttccactacttattcttttcttcagaccagcttgctcatcactattgcattagtgaccttcctaaaatactactttagttttgtattttctcactcaacatttttgttgacttctcatttcttttggcagtgtttctttttgaaggaaaactattctcatggacgctcagtgttgacataaattattttaatttttagtaatacaacttaaatatgtccaaatataaaactaaatacaaacttttgcacatacaagtgcatrgctaaaataatttgcaaattcgtagcaaggaaaatataaaacagaatttaacataatagcattaatgtgacagaagatgttatttgccataaaaac

SEQ ID NO: 917028 - DNA, 613 bp, Homo sapiens
cctgatttcccattccacatctccatatttctgtgtgtgtgtctttaattcctctagcgccactggttagggtctccctgaccgagctggtcttggcaccaaggacctcatttctkatggggaaattgaggcctggagaagaaaaacttcactaaattcccagagctcagtaggaagctttatagtttaaaagttaagaacgtttatcttgaagtcagactgatgtaagttcaagcactggtcctaccacttcctggctgtgtgacctcgaacaagttacttaagctctatgagccttagcttccttatctgtattaggggacattaataatacctacttcaaagatagttgtgaggattgaattaatggaaccagacagtttcagggcttaatccataaagcctagtcctactactcactagctgtgcaaatttgggcaagtggcttagtctctctgagcctcaattttctcttttataaaatggaatgatcaataaatacaatacttacatcttgagtttgttgggaggattaaaaaaagatgagtatggacagtgcctgactcatgtcaagctctgatacaatcgaaatgttaggaattctttcttattt

SEQ ID NO: 917029 - DNA, 744 bp, Homo sapiens
  misc_feature 80, 267: n = A,T,C or G
tccccacatcccagaagatgggtggccaggcaaagatgctcctcacttcctagatgggacgacggcagggacagaggcgntcctcacttcccagactgggcggccgggcagaggggctcctcacatcccagacgatgggcggccaggcagagacgctcctcacttcctagacggggtggcggccgggcagaggctgcaatctcagcactttgggagaccaaggcaggtggctgggaggtggaggttgtagcgagccgagatcacgcnctgacactcccagccctgggcaacattgagcactgagtgagcgagacttctgtctgcaatccccggcaccttcgggaggctgaggcaggcagatcaactcgagttcaggagctggagaccagcccggccaatagggcgaaaccccgtytccaccaaaaaaatacaaaaaccattcaggcgtggtggcggcgcgcctgcaatccccaggcattcggcaggctgaggcaggagaatcaggcagggaggttgcagtgagccgagattgcggcagtacagtccagccttggcaacagagggagaccgttgaaagcgggagacggagacgagggagagggggagaccgtggaaagcgggagatggagacgacggagagggagagggagaaggagaggcagaggctcaaaaattttcagatccatatttcagtatttcagacattccattttttctgtttcactgctttcagctttttccccc

SEQ ID NO: 917030 - DNA, 610 bp, Homo sapiens
aacagcctcctgaagccccaggaaaaatcttcaaaactaatagcttctactgggtttgttgttgtaatagcatggtttgcaatgcaggaggacctactaatcttgaaagggacatgttacccgatgaagtaactgaggaggagcttccagaaggaactgtgaggctgggggtatcaaaactgttgctgagttttgcctctatcatagtcagcaatatattgccatgaggaccccaccttggagggtctgaccatcttcacctgttccgcagagaaatgttgctctccattattcccttctaagccagagacccttatccactgctcctctaggtggcccatttatggtttgttktaagagaaaaattaaaaaaatattgtttagtggagatgttcatgagcatttgtttgcctgcatgtacttgagcactcatagtggagtctctattcatatctgttcttccctcccttgctctgtattcagggattactttgtggttttattataatcagttgctgtagctattaattgattttggtagttttgtctttgtgcttcatactaaagttatgagtgggttgcacactgcagttatagcattgcaatattt

SEQ ID NO: 917031 - DNA, 781 bp, Homo sapiens
gcaggaaataaagcttgctctgcttaaggctcacttttggtttcatgtattggctctgcgactcccagtgaggaaagatcccaccttctgcagctaccaagatttttggtaacaagaagagtgattatttttcattttcataagtgttgttcttgcaaaattttgcaagcatcattcttggctcatagcatacattctcttatgtacttatttttaaatttttaacttttattttagatacagggggtggccaggcgcggtggctcacgcctgtaatcccagtcgggagttcgagaccagccttatcaatatggagaaaccccatgtctactaaaaatacaaaattagctggaggtggtggcgcatacctgtaatcccacctactcaggaggctgaggcaggagaatcgcttgaacccgggaggcagaggttgcgatgagccgagatcacgccrttgcgctccagcctgagcaacaagagtgaaattgtctcaaaaaaaaaaaaaaaaaaccagaaaaaaatagatacaggggttacatgtgccggtttgttacatgggtatgttgtctgatgctgaggtttggggtatggatcctgtcactcaggtagtgaacatagtacccacaggtagtttttcaacccacgtccccaccctctccactctagtcgtctacagtgtctgttatacacatgtttatgtctatgtgtgctcagtgtttagctcccaattataagtgagaagatgcagtatttggttttctgttcctgcattaattcactt

SEQ ID NO: 917032 - DNA, 860 bp, Homo sapiens
tcttctaccctcgagtgtttgtttcattcctttcctccctgtttccccaccccaaccaccaaactcattgctccattcttccaatataactctatatcagggcaccactgagttcaacgcaatgtgtcacaatcgctgtgttctccctctcccaagtgcatgattctccacactgcagggctgctgctggaggatggggctggggcggcattggcaattcgggacaacatcctacccttctcagtgtttctttcagttatatgaagttaaaaaccaggttttgtgaatgctcacataacttttgtttctagtgaaggtgattttgtctttttttaaatgtagatagttgttagattggtatctttgttgcagggggacggttagtgaagtcttctatctagccatcttgctccacccctctccctaaaaaatttttaaatttctttcctaatgtcttcattgacccaccaggcattcaggagcatattgtttaatttctatgtgtttgtatagtttccaaaattcctcttgttattratttccagttctattccattgttgtcagagaagatgtttgatattatttcaattttttgaatgttctaagacttgttttgtgaccaaatatttggcctgtctttgagaatgatccatgtcctgagaagaaatatgtgtattctgcagctcttggatgaaatatgctgtaaatatctattagatccatttaatgtatagtgcagatcaagtccaatgtttctttggtgcttttctgtctgaacgatctgtcctatgctgaaacgggggctgctgaagtctctggctatgattgtactgagatctatctctctctttagctctaa

SEQ ID NO: 917033 - DNA, 860 bp, Homo sapiens
tcttctaccctcgagtgtttgtttcattcctttcctccctgtttccccaccccaaccaccaaactcattgctccattcttccaatataactctatatcagggcaccactgagttcaacgcaatgtgtcacaatcgctgtgttctccctctcccaagtgcatgattctccacactgcagggctgctgctggaggatggggctggggcggcattggcaattcgggacaacatcctacccttctcagtgtttctttcagttatatgaagttaaaaaccaggttttgtgaatgctcacataacttttgtttctagtgaaggtgattttgtctttttttaaatgtagatagttgttagattggtatctttgttgcagggggacggttagtgaagtcttctatctagccatcttgctccacccctctccctaaaaaatttttaaatttctttcctaatgtcttcattgacccaccaggcattcaggagcatattgtttaatttctatgtgtttgtatagtttccaaaattcctcttgttattaatttccagttytattccattgttgtcagagaagatgtttgatattatttcaattttttgaatgttctaagacttgttttgtgaccaaatatttggcctgtctttgagaatgatccatgtcctgagaagaaatatgtgtattctgcagctcttggatgaaatatgctgtaaatatctattagatccatttaatgtatagtgcagatcaagtccaatgtttctttggtgcttttctgtctgaacgatctgtcctatgctgaaacgggggctgctgaagtctctggctatgattgtactgagatctatctctctctttagctctaa

SEQ ID NO: 917034 - DNA, 750 bp, Homo sapiens
aaagggattgagttcttgatttgattctcacttggtcgttgttggtgtatagcaatgctcctgatttgtgtacattgattttgtgacctgagactttactaaatttgtttatcagatctatgggtcttttggatgagtcttagtattttctaggtatacgatcatatcatcagtgaacagggacagtttgacttcctcttttctaatttggatgcccattatttctttctcttgcttgattgytctggctagaacttgcaatactgtgttgaatagaagtggtgcacgtgggcatccttgccttgtttcagtccttggaggaatgctttcaacttttccccattcactatgatgttggctgtgagtttgtcatatatgactttcatgactttgaggtaagtcccttctatgcctattttgttgaaggtttttatcataaagcaatgctagattttatcaaatgctttttctgcatctattgagataatcatatgattgttgtttttaattctgtttatgtggtgtatcacatttattgacttgcatatgttaaaccatctctgcatccctgggatgaaacccacttcaacatggtgtattatttttttgataggctactggatttggttagctagtattgtgttgaacatttttgcatgtatgttcattggggatattggtctgtatttttcttttttgttatgtcctttcctacttttggcattagggtgatactgtcttcatagaatg

SEQ ID NO: 917035 - DNA, 750 bp, Homo sapiens
aaagggattgagttcttgatttgattctcacttggtcgttgttggtgtatagcaatgctcctgatttgtgtacattgattttgtgacctgagactttactaaatttgtttatcagatctatgggtcttttggatgagtcttagtattttctaggtatacgatcatatcatcagtgaacagggacagtttgacttcctcttttctaatttggatgcccattatttctttctcttgcttgattgctctggctagaacttgcaatactrtgttgaatagaagtggtgcacgtgggcatccttgccttgtttcagtccttggaggaatgctttcaacttttccccattcactatgatgttggctgtgagtttgtcatatatgactttcatgactttgaggtaagtcccttctatgcctattttgttgaaggtttttatcataaagcaatgctagattttatcaaatgctttttctgcatctattgagataatcatatgattgttgtttttaattctgtttatgtggtgtatcacatttattgacttgcatatgttaaaccatctctgcatccctgggatgaaacccacttcaacatggtgtattatttttttgataggctactggatttggttagctagtattgtgttgaacatttttgcatgtatgttcattggggatattggtctgtatttttcttttttgttatgtcctttcctacttttggcattagggtgatactgtcttcatagaatg

SEQ ID NO: 917036 - DNA, 631 bp, Homo sapiens
tccctaaaggtaagatttattgaaataccgaattgtagaattgcctctgcttactgacagtactcaatctagagcaataaaataaaatagaatttctcaactgtgttatctgtattttctttttttccttattctcatgctctggcatctgagtcctcactgattgtgaggactcccctcccaagactagtctattcctacagatactaaagggattgaccgcaaatgcgcctttcttatgcaaactaaccaaaccagagcccaaactyagaatgagttctttttttctggctgtcacatggccccgatactcccagtcaatattctcctgtcttaataatctgagagacaggtatcagacaactagagacaatccctatgcctcagagtcaccaagattattcagactcatcaatactgaacatgtctacactgcttaccctgccttgctcattcattcccctaaaaaccacattagaggctctcgcccatgctttcccctcccgttgccacttgaccagccttggtgctgcctgttgtgctgtgcttcctatgtcagtgggtaataaactcttttttcagtggcatagacctctctgtgtcatcattcagtcataactactaattaatt

SEQ ID NO: 917037 - DNA, 596 bp, Homo sapiens
gattaaattgaaagttgttgcctcctttaatttctaaaaggtatgtgtaaaattgatgttatttccaaattatttgttagatacatttcatcaatgaagccttctggacctggagtttcctatatgagaaggattttgattacacattcaatttctacaatcaatatatgactggccacattttctatctcttctcaggtcagttttcataagttttctctctcaaggaaattgttcatttcatttgcttgtcaaacttattgacatgagattatcaatatttctttttgagatctagagagtgtgcactgatgttcgttttttcttgacattgttaatgtgcatctttttgtcttgatcagtctagctagaaatttataaagtgtactgatttttccccrtagaaccaatatttgggttcattaattttctctgtctttctgcttcattttttccatttaattattattttcttccttctccatgctttggtttaatttgtttttctttgtttcttatagcagaagctaatttactaatttgagacctaccttctttcttaatataggcatttaagggtattggttttttctcta

SEQ ID NO: 917038 - DNA, 628 bp, Homo sapiens
taataatatttaggttgagtcactttggaagccaggattaaatcattttatgaaatatctgttgtaagtatctacaatttggtaccttttagagaaatttacggaataatagtaaattttgaagcaggatgccatcagtctccttgtattgaattttataagctgaacctaagatatttttttatgtgtcatgacagaaatgtgaggtttggtagccaagtattataatgaggtgtcactactcaccatcttggctctcagtcctaccactaacccttattttaccgcacacatgaagtacctcacaggaccaggtcatagccgacatctgattgctccacctctttgaagacttcttcgtaatgtacagagccgtctgcmccgtgtgcagagcgcattccgaccttgtgtcctcctcatttcactagcatggtctcattccttgctcagctctgtttgtgtcgcgagcactctggtaaagcatgcttctgcagatggactgggcttcttccactggacagtgagaggagcagcattaggatgtgaatgagtaatgccagatttgaacatagcactgtatgaaagattcattactaaagctttttgaaaatgatctgtgatttggagt

SEQ ID NO: 917039 - DNA, 619 bp, Homo sapiens
tcccatcagaaatggggctcctcagctgcagtagcctcatctgaggcgtggcctcgggcaggtgagaagacacctgaggcatggcctcgggcaggtgagaagacaccttcaggcgtggcctcgggcaggtgagaagacacctgaggcatggcctcgggcaggtgagaagacacctgaggcgtggccgcgggcaggtgagaagacaccttcaggcgtagcctcrggcaggtgagaaagacacctgaggcgtggccttgggcaggtgagaagacacctgaggcatggcctcgggcaggtgagaagacaccttcaggcgtagcctcgggcaggtgagaaagacacctgaggcgtggcctcgggcaggtgagaagacacctgaggcgtggcctcgggcaggtgagaagacacctgaggcgtggccgcgggcaggtgagaagacaccttcaggcgtagcctcaggcaggtgagaaagacacctgaggcgtggcctcgggcaggtgagaagacacctgaggcatggcctcgggcaggtgagaagacaccttcaggcgtagcctcgggcaggtgagtagacacctgaggcgtggcctcgggcaggtgagaagacacctgaggcgtg

SEQ ID NO: 917040 - DNA, 644 bp, Homo sapiens
ggcgttgagtgtctgtggcttttccaggcacacagtgcaagctgtttgtggatctaccattctggggtctggtggacaatggccctcttctcatagctccactagccagtgccccagtaaggactctgtgtgagggctccaaccccacatttcccttctgcactgccctggcagaggttctccatgagggccccacccctgcagcaaacttttgcctgggcatccaggtgtktccacacatcttctgtaatctaggtggaggttcccaaacctcagttcttgacttctgtgcaccctcatgctcaacaccacgtggaagctaccaaggcttggggcttccaccctctgaagccacagcctgagctgtatgtcggcccctttcagtcatggctggagcatctggaacacagggcaccaagtccctaggctgcacacagcacagggaccctgggcctggcccacaaaaccacttttgcctcctgggcctctggacctgtgatgggaggggctgccatgaaggtctgtgacatggcctggagacattttccccgtggtcttggggattaacattaggctccttgctacttatgaaatttctgcagccggcttgaatttctccccagaagatgggtttttcttttcta

SEQ ID NO: 917041 - DNA, 644 bp, Homo sapiens
ggcgttgagtgtctgtggcttttccaggcacacagtgcaagctgtttgtggatctaccattctggggtctggtggacaatggccctcttctcatagctccactagccagtgccccagtaaggactctgtgtgagggctccaaccccacatttcccttctgcactgccctggcagaggttctccatgagggccccacccctgcagcaaacttttgcctgggcatccaggtgtgtccacacatcttctgtaatctaggtggaggttcccaaacctcagttcttgacttctgtgcaccctcatgctcaacaccacgtggaagctaccaaggcttggggcttccaccctctgaagccacagcctgagctgtatgtcggcccctttcagtcatggctggagcatctggaacacagggcaccaagtccctaggctgcacacagcacagggaccctgggcctggcccacaaaaccacttttgcctcctgggcctctggacctgtgatgggaggggctgccatgaaggtctgtgacatggcctggagacattttccccrtggtcttggggattaacattaggctccttgctacttatgaaatttctgcagccggcttgaatttctccccagaagatgggtttttcttttcta

SEQ ID NO: 917042 - DNA, 627 bp, Homo sapiens
taaaccaccaaagctaagaactctcatggagtctattgcaccccccactgccacctccaccagtacaggcccaggtatccatggctgagagactcatagacggctcacatcacagaactctgtgcagacaacccccagtaccagcccacggctgggtagacttattgggtggctagacccagaagaaagacaataatcactgcagtttggctcacaggaagccacatycataggaaaagggggagagtactacatcaagggaacatcccgtgggacaaaagaatctgaacaacagccttcaaccccagaccttccctctgatagggcctacccaaatgagaaggaaccagaaaatcaaccctggtaatatgacaaaacaaggctcttcaacacccccaaaaatcatactagttcatcagcaatggatccaaaccaaaaagaaatccctgatttacctgaaaaataattcaggaggttagttattaaggtaatcaggaccaaagaaaggcaaagcccaatgcaaggaaatccaaaaaatggcacaagaagtgaagggagaaacattcaaggaaatagatagcttaaagaaaaaacaataaaaaattcaggaaactttggacacacctg

SEQ ID NO: 917043 - DNA, 642 bp, Homo sapiens
ttaggtgatcttgttgtgcaatatgttttgaaattactgatgtgacatacattaatctcaaaataattatgctgtgtgaaataagccggataaaaagagtgtaataattgatatggttcggctgtgtccacacccaaatctcatcttgaatcgtagctcccgtaattcccacatgttgtgggagggacctggtttggtgggaggtaattgaatcatgggggcaggtctatcctgtgctgttctcgtgatagtgaataagtctcacaagatctgatggttttaataaagaggagtttccctgcacaagttctgttcttctctcttgtctgttgccatgtaaracatgcctttcaccttccgccatgattgtaaggcctcctcagccacgtgaggcctttttctttataattacccagtctccagtatgtctttatcagcagcgtgaaaatgggctaatacaatactttatgaatctttttctatacaattattttaaagattcaaaataaatgacaatgagtgagagaaggaggatcaatgactgcttgagaggtggtggatggtgctgctataggaaggatgacagatgggtaccaggaatttttagaagtgatgagtatgtttcttctcttgattgtggtg

SEQ ID NO: 917044 - DNA, 569 bp, Homo sapiens
atgacaaagattattagattgaagactttcttagaaaatagcattaagtcatttacgaaaaggaacaatataaatgtgtatttgagaaattgtaattatttgagagatttcttatgcaacatttattctgtaagcaaattctagggattggagaattaatcaaattaataaagctgacatagaaattcctctgaaggtatctttgyaaacatcaatttctgaatcagtgttgtaaatgttttggaacacagacacaagatcacattttaactctacttttgtctctataaaaaatgccaaaaagagtctcattttgaccatgtacctctttgaattcccaccatcaatgaatgattgttcttgggtttccacattatattaccatttatcattatgagaattgtgtgttttaaccattataataggtgagtaatggtatctaatttttgcttaaatgcacatgcccctaataaaattcatatttaacaattttcatataatttttggtgagatgcctctcctgatatttggttcattttcaatagcactgttttcttttgattagttgt

SEQ ID NO: 917045 - DNA, 569 bp, Homo sapiens
atgacaaagattattagattgaagactttcttagaaaatagcattaagtcatttacgaaaaggaacaatataaatgtgtatttgagaaattgtaattatttgagagatttcttatgcaacatttattctgtaagcaaattctagggattggagaattaatcaaattaataaagctgacatagaaattcctctgaaggtatctttgtaaacatcaatttctgaatcagtgttgtaaatgttttggaacacagacacaagatcacattttaactctacttttgtctctataaaaaatgccaaaaagagtctcattttgaccatgtacctctttgaattcccaccatcaatgaatgattgttcttgggtttccacattatattaccatttatcattatgagaattgtgtgttttaaccattataataggtragtaatggtatctaatttttgcttaaatgcacatgcccctaataaaattcatatttaacaattttcatataatttttggtgagatgcctctcctgatatttggttcattttcaatagcactgttttcttttgattagttgt

SEQ ID NO: 917046 - DNA, 570 bp, Homo sapiens
aggggagcttcctgcacttgctcctgcccctaatgccttttcttaacccttcgtgtacctgattgccttgctgatcttgcattactgggcagtctaagagctccccttttaatgctgcttgtcgaagacagggacatatagctgtagtgtatttcctctattttttctatctattgaaagagggggctcaggcaaaacctccgtttcctctttgttattttgggaagagcaggtggtaaggcaagtgacgtttcttcctccttcccctttttgggttcttctttgtataatgggactaaagccatcyctactaaagcccatagtgttaaagatgatgctgggacccgttgcgcttgtgtgtaatgctgttcaagatttctccctacttgttcccagagctttacttctagctttccttcttctgggaccacagattatgtgagacaacagttttcattaggtgccttaattgagcctgcgaaactgatgctcccctagccttaagcaactgttacaatactttcatatgctgtttgtgttgagctgataactgctgtcccatgatgaaat

SEQ ID NO: 917047 - DNA, 570 bp, Homo sapiens
aggggagcttcctgcacttgctcctgcccctaatgccttttcttaacccttcgtgtacctgattgccttgctgatcttgcattactgggcagtctaagagctccccttttaatgctgcttgtcgaagacagggacatatagctgtagtgtatttcctctattttttctatctattgaaagagggggctcaggcaaaacctccgtttcctctttgttattttgggaagagcaggtggtaaggcaagtgacgtttcttcctccttcccctttttgggttcttctttgtataatgggactaaagccatccctactaaagcccatagtgttaaagatgatgctgggacccgttgcscttgtgtgtaatgctgttcaagatttctccctacttgttcccagagctttacttctagctttccttcttctgggaccacagattatgtgagacaacagttttcattaggtgccttaattgagcctgcgaaactgatgctcccctagccttaagcaactgttacaatactttcatatgctgtttgtgttgagctgataactgctgtcccatgatgaaat

SEQ ID NO: 917048 - DNA, 570 bp, Homo sapiens
aggggagcttcctgcacttgctcctgcccctaatgccttttcttaacccttcgtgtacctgattgccttgctgatcttgcattactgggcagtctaagagctccccttttaatgctgcttgtcgaagacagggacatatagctgtagtgtatttcctctattttttctatctattgaaagagggggctcaggcaaaacctccgtttcctctttgttattttgggaagagcaggtggtaaggcaagtgacgtttcttcctccttcccctttttgggttcttctttgtataatgggactaaagccatccctactaaagcccatagtgttaaagatgatgctgggacccgttgcgcttgtgtgtaatgytgttcaagatttctccctacttgttcccagagctttacttctagctttccttcttctgggaccacagattatgtgagacaacagttttcattaggtgccttaattgagcctgcgaaactgatgctcccctagccttaagcaactgttacaatactttcatatgctgtttgtgttgagctgataactgctgtcccatgatgaaat

SEQ ID NO: 917049 - DNA, 623 bp, Homo sapiens
ttttaataattattgtaatcacatttacattttttatttgaattttcatatatattttattaggattttaatatcaatataaatattttcctaccattgtctattttctatttttatgatataaaattaacataaaaatgcttagattttcaatgtacagcttgagggcttctgacaaatgtgcgcacaaataagaattatttgcttactttttagtgtatactgaggagtgggattgctgggtaaaatgatatctctgttttaagttctttaagaaatctccagtctgctttccaaaggggcaagattaacttatattcttctcatcagggtataagtgttctcttttctccasagtcccaccagcattcattgttttttgactttttcgtgatagccattctgagtggtgtgttgctgcacacctacaatcatctcatatttgataaggctgatgaaaacaagcaataaggaagggactccctgttcaataaatggtgctgggacaactggctagccatgtgatgaagattgaagctggacgtctactttcaacatacataaaattaactcaaaattgatgaaagacttaaatgtaagacctcaaaccataaaaatccttg

SEQ ID NO: 917050 - DNA, 589 bp, Homo sapiens
gggaggcgcagatctcagcgtggactgggcgctcccagcgaagcctggggccgacctgggatagcggcgaagcggctggtaggagctgccccgtggcagcagcggccgtgctgggaataggggactctcctagccaggcggccccgaaaactcctgtaayaggagacgctctgctcggtaaaaaaggaagtcagagtgagtgtgcgtcgtagagggaggaaatgggaggaaaatcgtggaaacccactccactggaatgtatactaaagaattttaagaaaggttttgcagcggattatggaattaagctgaccccctgaagttgaaaactctctgtgaatcagaatggccttctttaggggtcggctgccggccgagggtgctatatagatagggaggtgattggccgggtgtttaaggtggtgaccggggtgggaggacagccagggtacccagatcaatttccctatatcgattcatggctcaatgttatacaaaactgaccagcgtggttgcaccccccagcagcatattgtaagacgcctgtggcccgagcagccgaagacaaaatgaaagtaaaatcagccat

SEQ ID NO: 917051 - DNA, 725 bp, Homo sapiens
cccgacctatagggccgctatccaagaactgtgcaactattgcaggagccactggagtctcagagaagaggcctttctgtcagtcaaagaggcgtgttataggaggacaaggagtccaacaagaattcctgtacctcccaaattgtccagttccttcgctggaaagagacccatttcaaaaaytgcaggcacagattacatttgggccacaaggggatgtaactttaaatctagctcactcagaggctatggtgttaacccttactgtcccacgggctgaggaatggagactatatgcaggaaagactccagaaccaggagtaaattaaatgcgtgggttacttactaaaattactggagtttgggctgaaagtaacctgccggaactggcagtaaatccggcaccaattgtagtggagttaaaactgggagcgactctggttcatgtccgtcagtacccgcttctccctgaggccatacgggagtccacaaacacttagattgacttcacaggtgaggaaccatagtcaaatgccagtcactatggaacacccctctcttgccagtgtggaagccgtctggagaatataggccagtgcaggacttgtgtgcagtaaaccaggccacggtgaccatccacccagtgctgccaaacctgtatactttaatgggacatattccagtgagtgccacttggtttacagtcctagatttgaaggacacat

SEQ ID NO: 917052 - DNA, 698 bp, Homo sapiens
ccctgcgacgagactgggttcccagcggagaggacaacagcccggctctgcttacttcggaagctgaccagtctatgcatggtggaagcttgagaaaacagcaagctctgctctagtcactctggaagctgactagtttacgcatggcagaaagcttgagtcgtcatcatcagatgagtaaatgtggccagagatcttaggtccagtaatcttatttgtattattaattatattactgctgtgctattgcttcaacaaatctcctccaccctgcccatgctaggtgtaagaatgctacaccttgccttgtttctgtcgatccccatatctgtcctaggagaggaagagcctatagaggaatgtccacattgcatgtgtactacgtggataggtaatacactagttaagactttattgtaccatacatactatgaacgcacaggaacccctctggggacttgtatgtacaaccaaacgaactattcagtttgtgacccaggggatagctagctttatgtatactatgaccctaagcttttacctgggcctggtttgagattcgcactgggtcaagggarggaagtcttttaaacaagaccgaagtttctctctcccacaagggagtcacatctttgtattttgatatttgccagataacatccatagactcactctttcccgtaatccacagttccatg

SEQ ID NO: 917053 - DNA, 672 bp, Homo sapiens
gagaccgagggcacaagctgttccagtataataaaatatataaaataagaatagttatactagatatagatcatagatatgattatatatgaatatcattaatcattagtttatagcaattactctttatcccaatgttattaataatcctcgctctataatcataacctaggaaaaaccaagccatacagagataggagtggaagggacatggtgagaagtgaccagaagacaagactgcgagccttctgttatgcccggacatggccaccagagggctccttggtctagcggtaacaccagcttctgggaagatgcccgttgccaagcagaccgtggtctagcggtagcgtcagtgtcaaggaaaaacacccgctacttagcagaccaggacagggagtctccctttccccaggggagtttagagaagactctcctcctccacctcttgtgtagggsatcagtcaggcccacccgagttatctggaggcctaatcatctccctctgatgctgtgcttcagtggtcactctcctagtctgctatcatgttccatcctgtatacctggctctgccttttagataacagtagcaaaattagtgacagtactaaaagtctctgatatgcagaaataatggcgtaagctgtctgtctctctccctctctctctct

SEQ ID NO: 917054 - DNA, 584 bp, Homo sapiens
tgggcacatgtatgtgtctttgctgggctgttgtgtatgtatgtgtgcttgtatgaccatcaagttttcaaatacatcattaaatttcatagttacattcgtcttggccaggcacggaggctcaggcctgtaatcccagcattttgggaggcttaggcaagcagatgacttggagttaagagttcaagaccagccttgtcaacatgscaaaaccccatctctacgaaaaatacaaaaattagccaggtgttgtggcacgtgcctttagtcccagtgcgacagggaaatgctgggtcagaaatcccacacaaagtctctacttggttaccacctaatggaactgtaggaagaaagccaccatccttcagaacccagaatggtagatccactgacagcttgcacagtgtgcctggaagagccagaaacactcagtgacagcccatgagtgtagccagaagggagattgtgccctgcaaagccacaagggcagaactgtccaagaccatgggaacccaccagttgcatccggtaacctggatttgagacatggagtcaaagaagactattttggaacgttaagattt

SEQ ID NO: 917055 - DNA, 736 bp, Homo sapiens
acttgcacgtggcctgcagtttggaccaatttctcccatttgcaatggctgtatttacacaatgcctgaacccccattgtacctaggaagtaacttgcttgttttttattttacaggctcatagatggaagggagttgccttgtctcagaaaagaccatgggctgtggacttttgagttggggctcaaatgagttaagacttcaggggcctgttggaaagtcatgaatggttttgaaacgtaaggacattagatttaagaggcgccagtgktggaatcatatggtttggctgtgtccctgcacaaatctcatcttgaattgtatctcccacaattcccacgtgtcgtgggagaaacccagtgggaggtgattaaatcatggagggagttcttctttgtgcgttattgtgatagtggatgactctcatgagatctgatggttttaaaaaacgggagttccctgccctctctttgtctgctgccatctccatgtaagataaaacttgctcctccttgccttccaccatgatgtggaggcctcccaagccatgtgtaactgtaagtccattaaactttttcctctataaattactcagtctcatgtatgtctttattagcagtgtgaaaacagactaatacagcaaatatcaatctcttaaaatattttgttgttctgcatgtaatatagcacagtctaatatgggaggtaaaataaatcatccatggaccttcagata

SEQ ID NO: 917056 - DNA, 599 bp, Homo sapiens
ttatgtaaataaataaccatatgtaggtgcatcaagtcgtcctctcccttttttttttttttttttttttggagtcctgctctgtcacccaggttggagtgcagtggcgcgatctcggttcactccaacctccgcctcccgagttcaagcgattctcctgactcagcctcccgagtagctggaattacaggtgtgcaccaccgcgccyggctaagttttgtatttttagtagagaccggatttcgccatattggccaggctggcctcaaactcatgatctcagttgatccgcccgccttggcctcccacagtgctgggattacaggtgtgagccaccgcgcccggcccgtcctctccatcttatgtggaacttttccattaagactctgagtccctggatttatttgagaacctcataaatcatggtcaattatgtctctttctcctctttctcccttcttcactcctctctagctcacaaactgaaacacacacagaattttctaacttcaattacctgatgtgttgaagacaattgattaaagcgcagcttttccagttcagccactgttcatattgttgtaagaataagaacgttg

SEQ ID NO: 917057 - DNA, 646 bp, Homo sapiens
taaggattttttttaaaacatgtaatcaattatattggttacttgataaaaattgcattgaatatgtatcttgctttggacagtgtattagtctactgtgcattgctataaattaatgcctgaggccaagtgatttacaaagaaaagaggcttatttggcttacagttttggaggctgtgtgagaagcatggcaccagcatctgcttcttgtgagggcctcaggaagcttacggtcatggtggaagrcaaaggggaagcagacggtgtcctgtggtgagagggggcacagaagaggggaggagggtcgctagactgtttttaacaatcagatttcaaattagctaataaagaaataattcactaattaccatgggggtgataccaagccatacctgaaggatcttttccccacaatccaaaaactcctactaggacccacctcaaatattttggatcacatttcaccatgagatttggaagggacaatcacctaaactgtagcatttcactcttgtgtcccctggtctcaaatccttgtaagattgcaaaatcatctttttttaaaatagttcccaaaagtgttaacttgatcaacctccaactgaaaattacaaagtctcgccagggtcttaaggcaatttccct

SEQ ID NO: 917058 - DNA, 646 bp, Homo sapiens
taaggattttttttaaaacatgtaatcaattatattggttacttgataaaaattgcattgaatatgtatcttgctttggacagtgtattagtctactgtgcattgctataaattaatgcctgaggccaagtgatttacaaagaaaagaggcttatttggcttacagttttggaggctgtgtgagaagcatggcaccagcatctgcttcttgtgagggcctcaggaagcttacggtcatggtggaagacaaaggggaagcagrcggtgtcctgtggtgagagggggcacagaagaggggaggagggtcgctagactgtttttaacaatcagatttcaaattagctaataaagaaataattcactaattaccatgggggtgataccaagccatacctgaaggatcttttccccacaatccaaaaactcctactaggacccacctcaaatattttggatcacatttcaccatgagatttggaagggacaatcacctaaactgtagcatttcactcttgtgtcccctggtctcaaatccttgtaagattgcaaaatcatctttttttaaaatagttcccaaaagtgttaacttgatcaacctccaactgaaaattacaaagtctcgccagggtcttaaggcaatttccct

SEQ ID NO: 917059 - DNA, 646 bp, Homo sapiens
taaggattttttttaaaacatgtaatcaattatattggttacttgataaaaattgcattgaatatgtatcttgctttggacagtgtattagtctactgtgcattgctataaattaatgcctgaggccaagtgatttacaaagaaaagaggcttatttggcttacagttttggaggctgtgtgagaagcatggcaccagcatctgcttcttgtgagggcctcaggaagcttacggtcatggtggaagacaaaggggaagcagacrgtgtcctgtggtgagagggggcacagaagaggggaggagggtcgctagactgtttttaacaatcagatttcaaattagctaataaagaaataattcactaattaccatgggggtgataccaagccatacctgaaggatcttttccccacaatccaaaaactcctactaggacccacctcaaatattttggatcacatttcaccatgagatttggaagggacaatcacctaaactgtagcatttcactcttgtgtcccctggtctcaaatccttgtaagattgcaaaatcatctttttttaaaatagttcccaaaagtgttaacttgatcaacctccaactgaaaattacaaagtctcgccagggtcttaaggcaatttccct

SEQ ID NO: 917060 - DNA, 646 bp, Homo sapiens
taaggattttttttaaaacatgtaatcaattatattggttacttgataaaaattgcattgaatatgtatcttgctttggacagtgtattagtctactgtgcattgctataaattaatgcctgaggccaagtgatttacaaagaaaagaggcttatttggcttacagttttggaggctgtgtgagaagcatggcaccagcatctgcttcttgtgagggcctcaggaagcttacggtcatggtggaagacaaaggggaagcagacggtgtcctgtggtgagagggggcacagaagaggggaggagggtcgctagactgtttttaacaatcagatttcaaattagctaataaagaaataattcactaattaccatggggktgataccaagccatacctgaaggatcttttccccacaatccaaaaactcctactaggacccacctcaaatattttggatcacatttcaccatgagatttggaagggacaatcacctaaactgtagcatttcactcttgtgtcccctggtctcaaatccttgtaagattgcaaaatcatctttttttaaaatagttcccaaaagtgttaacttgatcaacctccaactgaaaattacaaagtctcgccagggtcttaaggcaatttccct

SEQ ID NO: 917061 - DNA, 585 bp, Homo sapiens
cttaaaacataatttctaatattttggctaattcgttagtcccccaaaggcagtctagtccccaggacgaaggagatttgttttgggaaagggcagttattgtctctgttttaaactataaactaaactaagttcctcccaatgttaggtaagcctacacccaggaatgcacaaggacaacctggaggtttgaggcaagatggagcaggttaggtcacagctctttcactgtttcagttgcagctttgcagtggtggcttcaattcctccctttgagttttgaccttatcgacttgttttgtttctctttaagtgatggttttataaccatctatgaaactctaacaggtgctctyacatgcagatttctgattaaaaactctgaagatggttacaatagtatagagataaaactatcaaatagaagactatcttttttgacttttcacttaaaatgttgcccaagaaaacttttcttttgagctatttatagctttcaacaattgagtatagtcctgtacataaaatttggagaatatttgtttctctctgtccactttctccagaatttggaaactctttgtg

SEQ ID NO: 917062 - DNA, 615 bp, Homo sapiens
acctaccactgggtccctaccatgacactgggaattatgggagttaaattcaagatgtgatttgagtggggacacagccaaaccatattattttgccccatggcccctcccaaatctcatgtcctcacattgcaaaaccartcatgcctttcctacagtcccccagagtcaacttgtttcagcgttaactcaaaaatccacagtctaacatctcatctgagacaaggcaagtcccttccacctataaacctgtaaagtcaaaagcaagttacttcctagaaacaatgggggtactggcattggataaacacacccatccaaatgacagaaattgcccaaaacaaaggggccctctgcaagtccaaaatccagcagagcagtcaaatattaaagctccaaaatgatcccctatgactccatttcccaaatccaggtcatgctgatgcaacagatggtttcccttggtcttgggcagctccacccctgtggctttgcagggtacagcctccctcctggctgctttcacaggctggtgttgagtgaatgtgccttttccaggcacatggtgcaagctgtcagtggatctaccacactgggatctggaggatggcggcc

SEQ ID NO: 917063 - DNA, 615 bp, Homo sapiens
acctaccactgggtccctaccatgacactgggaattatgggagttaaattcaagatgtgatttgagtggggacacagccaaaccatattattttgccccatggcccctcccaaatctcatgtcctcacattgcaaaaccaatcatgcctttcctacagtcccccagagtcaacttgtttcagcrttaactcaaaaatccacagtctaacatctcatctgagacaaggcaagtcccttccacctataaacctgtaaagtcaaaagcaagttacttcctagaaacaatgggggtactggcattggataaacacacccatccaaatgacagaaattgcccaaaacaaaggggccctctgcaagtccaaaatccagcagagcagtcaaatattaaagctccaaaatgatcccctatgactccatttcccaaatccaggtcatgctgatgcaacagatggtttcccttggtcttgggcagctccacccctgtggctttgcagggtacagcctccctcctggctgctttcacaggctggtgttgagtgaatgtgccttttccaggcacatggtgcaagctgtcagtggatctaccacactgggatctggaggatggcggcc

SEQ ID NO: 917064 - DNA, 567 bp, Homo sapiens
acactatttcctgcttttttttaaaaaaaaaaaaaaaagggggccctgtattttcatttcacactgggcttcaaaaactatgtagcccatcttttcttgggatatggaaatttgggccagtatccaagtgtgtaagtatgtctaagtttggataaatacaggatggtaagaaacagacaagggaaagagtaatattttcttttcctttttttttttttttttttttttttttttgagacagagtctcactctgtcgccaggctggaatgcagtggcacaatctcggctcactgcaayctccgattcccagattcaagcagttctcctgcctcagcctcctgagtagctgggactacaggtgcgcaccaccacgcccagctaaattttgtatttttcgtagagacagggtttcaccatattggccgggatggtcttgatctcttgactttgtgatccgcctgcctcagccttccaaagtgctgggattacaggcatgaaccaccatgcccagccaagagtaatattttctattacatggaagtggattttgattttctcagaattata

SEQ ID NO: 917065 - DNA, 655 bp, Homo sapiens
ccatgtaaaaacagaaacacgtagccttgttctgggcaattgcaacagttcctaaatggccttactatccttttgccgctgcttctaacctttctttttttttttttttttttttttttttggggaaaaatttggtaaaatttttttttcyttttttttttttttttttttattatactctaagttatagggtacatgtgcacattgtgcaggttagttacatatgtatacatgtgccatgctggtgcgctgcacccactaatgtgtcatctagcattaggtatatctcccaatgctatccctcccccctcccccgaccccaccacagtccccagagtgtgatattccccttcctgtgtccatgtgatctcattgttcaattcccacctatgagtgagaatatgcggtgtttggttttttgttcttgcgatagtttactgagaatgatggtttccaatttcatccatgtccctacaaaggatatgaactcatcattttttatggctgcatagtattccatggtgtatatgtgccacattttcttaatccagtctatcattgttggacatttgggttggttccaagtctttgctattgtgaatagtgccgcaataaacatacgtgtgcatgtgtctttatagcagcatgatttata

SEQ ID NO: 917066 - DNA, 655 bp, Homo sapiens
ccatgtaaaaacagaaacacgtagccttgttctgggcaattgcaacagttcctaaatggccttactatccttttgccgctgcttctaacctttctttttttttttttttttttttttttttggggaaaaatttggtaaaatttttttttcctttttyttttttttttttttattatactctaagttatagggtacatgtgcacattgtgcaggttagttacatatgtatacatgtgccatgctggtgcgctgcacccactaatgtgtcatctagcattaggtatatctcccaatgctatccctcccccctcccccgaccccaccacagtccccagagtgtgatattccccttcctgtgtccatgtgatctcattgttcaattcccacctatgagtgagaatatgcggtgtttggttttttgttcttgcgatagtttactgagaatgatggtttccaatttcatccatgtccctacaaaggatatgaactcatcattttttatggctgcatagtattccatggtgtatatgtgccacattttcttaatccagtctatcattgttggacatttgggttggttccaagtctttgctattgtgaatagtgccgcaataaacatacgtgtgcatgtgtctttatagcagcatgatttata

SEQ ID NO: 917067 - DNA, 501 bp, Homo sapiens
ggtgagactgaagcatggttcatcctgagacgaatcccctcccacaataaacctatgaaatcaaactatttatttatatgtttccagaatacagtggtgggacaggcacaggatagacattcctattctaaaagggaggaataggcaagaagaaaggggtagcaggtttcaagtcccaaagccaatagggccttacatcttaaggcttggaaaaaaatcttgactctatggcctgcctttcaracacacttgggttgacctcccaaggcctcagacaaccctgcccctatgactttgctgggttcagcccacacagcatctctcatgagttggagtctcatgcctgtgctctcccaggctggcagtgtatactagtggctctatgctttcagggtcccggggcggggtggtgggggggtccctgttcccattgcttcactaggcattaccttgatgaagactctctgtggtggccccacccctgtgacaagtctctgcctg

SEQ ID NO: 917068 - DNA, 533 bp, Homo sapiens
cagttatctgactttttgcaagtaggtaaacttccccatgctttagtttcttaaacaatacaaataaaaagggtcatatttttccatcattgttactcttgtcttttcccccttattccctcaaatgattgcacagttagtggtttgggagcatggtgatagggtttggctgtgtccccacccaaatcgcaacttaaattttagtttgcataatccccacgtgttgtgggaggagagcmagtgggaggaaatttagtcatgggtgggttaccttgatgctgttctcatgatagtgagtgagttctcatgagatctgatggctttataaggggcttttaccccttttgctcggcacttccccttgctgccaccatgcgaagaaggacatgtttgcttccccttctgccatgattgtaagtttcctgaggccactctagtcatgctgaactgtgagtccgttaaacctccctcctttataaattacccaggcttgggcgtgtctttatttgcagcatgagaacggactaatacag

SEQ ID NO: 917069 - DNA, 533 bp, Homo sapiens
cagttatctgactttttgcaagtaggtaaacttccccatgctttagtttcttaaacaatacaaataaaaagggtcatatttttccatcattgttactcttgtcttttcccccttattccctcaaatgattgcacagttagtggtttgggagcatggtgatagggtttggctgtgtccccacccaaatcgcaacttaaattttagtttgcataatccccacgtgttgtgggaggagagcaagtgggaggwaatttagtcatgggtgggttaccttgatgctgttctcatgatagtgagtgagttctcatgagatctgatggctttataaggggcttttaccccttttgctcggcacttccccttgctgccaccatgcgaagaaggacatgtttgcttccccttctgccatgattgtaagtttcctgaggccactctagtcatgctgaactgtgagtccgttaaacctccctcctttataaattacccaggcttgggcgtgtctttatttgcagcatgagaacggactaatacag

SEQ ID NO: 917070 - DNA, 582 bp, Homo sapiens
acaaagagatgatacttctttgaggtgatggatatgctaattttcctgatttgatcgttacatattgcatacgcatatccaaataacgctctgtatctcataaataggtacaattattacatgccaactaaaaataaaaggataaaaatctcaggctctgatggtggcactaatgaattctactaaatatgtaaagaagaactaataccagtccttctcaaactcttccaaatatcgaatacaaggaaatactttcacattccttttgtgacgtctgcattaccctgatataaaagccagacaaggaaataaaattacaggcatatgaycctgatgaacatacatgcaaaattccacaatcaattagtaggaacctcaaatcaatagcacattaaaagaatcatttgttatcatcaaatgtgatttgtttctgggatacgggatggttcaacataggcgaatcaataaatgtgatataccacattaacataatagagcaaaaacatatcatcatcttaaatgatgcaaaaatagcatttgacaaaaatcaacatcccttcatgttaaaaactctcaagttag

SEQ ID NO: 917071 - DNA, 742 bp, Homo sapiens
atataattcaatctttagagtttgtagttcttaactaggtaatgtcaacatgggaattggccaatggaacatgaatgggaagacagctacctttgttcaaattttctcttaaggtggattaaaaccagaaccttctacatattgtttctcactttttctttacatcattgttttctatagtataagattatacaaagatctaatatactggccaactatttatttttatctttcactcttacagtaatcagaaaatatttaatgttaattggatattaccctctgttagtactttgatttatgtataagcccctggaatttattagtcactcacattttaatgttatcctcacattaatacaatcaaggcatttctctatactctcacactttctatattatgttttatagataaaaaaatatgaaggtcacaaacyggtaaataacagagatgagatttgtgtgcaaatctgttgggttccaaaatgtgttctctttcttgtcctgccatcataaatattttgatcctaaatgttacacagtctcttgatgaaaagctgcaccaagtattgtctgaaagactttatttagcacttgtatataaacatatttggtaataaaaactttgccaccagaaaggctttcatcaaagttattagcaagtagcatttagcgtactttaccatttccagaaaatttgacaaatactttctcatttaatctttccagcaatgagttaagt

SEQ ID NO: 917072 - DNA, 568 bp, Homo sapiens
gctccattgagtcatgggagaaaacaacttttttttttttcaaactgatattgtgagttaaaatgcacagctacatgccatttgttttttctactttacaacaattcaaaccagactattttctactgcagccacagaaaaacaatcctcgtggccagcccccatccttcctccctcctgacagatatcttttgttctcaaaatacaggttggaaatgggagctgtttactgagtttttttttttttttttactgaggttgcatgatgaaaagctttcataactgatcctgaggtgctasagtgttttaatcagtgtgtaggattttaattaatcccagggctgtcccctttctcagaagctaaaggtgcaagtttatattcctctaggttatgtttgagtgaggctgaaagacccctttagaagacagaacagagaatgcaaagagattcatgctggagatagagacctgaattctatcttgtgtctgttttttctgggattgttgccccgtctgcatgataaggagacttgaagaatgactttgcaaccactgggccaagactcag

SEQ ID NO: 917073 - DNA, 479 bp, Homo sapiens
tttatacctgtttttctccttctcttattccatttagtttttcaattcacacaaaaccgtatccaggccatcaccaatcattctatacggtcaaatgtttcttctaacaaccccacaatatcaccccttaccacaagacctcccttcagcttaatctctcccactctaggttcccacgccgcccctaatcccgcttaaagcaaaccctgagaaacatcacccattctctctccataccaccccccaaaaattttcgccaccccaacacttcaacactaattttgttttatttttctwactaatataaaaaggcaggaatgtcaggcctctgagcccaagccaagccatcacatcccctgtgacttgcacgcatacacccagatggcctgaagtaactgaattaatcacaaaagaagtgaatatgccctgccctaccttaactgatgacattccaccacaaaagaagtgtaaatggccgg

SEQ ID NO: 917074 - DNA, 479 bp, Homo sapiens
tttatacctgtttttctccttctcttattccatttagtttttcaattcacacaaaaccgtatccaggccatcaccaatcattctatacggtcaaatgtttcttctaacaaccccacaatatcaccccttaccacaagacctcccttcagcttaatctctcccactctaggttcccacgccgcccctaatcccgcttaaagcaaaccctgagaaacatcacccattctctctccataccaccccccaaaaattttcgccaccccaacacttcaacactaattttgttttatttttctaactaatataaraaggcaggaatgtcaggcctctgagcccaagccaagccatcacatcccctgtgacttgcacgcatacacccagatggcctgaagtaactgaattaatcacaaaagaagtgaatatgccctgccctaccttaactgatgacattccaccacaaaagaagtgtaaatggccgg

SEQ ID NO: 917075 - DNA, 581 bp, Homo sapiens
atttacaatgacagggtagtcattatctcacaagacagtccatattattgtccatcagttcttgatgtcagaattgttttcaggatactaatactttgctttccttccacccagtggtcctcatttcaggcttgggggtccatagagaaagtytattcccctaatccttcagaagactgctgagagtggtataagaaacatggccatagggggttcaagacctggctttgcccctagtgctccaattttaaagtgtggtcctctcaccagcagcaacatagacatgcagaattccaggctgcatcccagacctactaaagcagaatctgcaatttaacaaaatccccatgtgacttatttgcaagttgatgtttgaagaatgagatgggataccaaggcaaacaaaacaaaacaaaacaaacaaacaaaaaaaaaaaccaaccaacaaaaaaacaaaactagatggaatttcactatgaaagtagcatcagggggtgtattactttgttctcacgctgctgataaagacataccagagattgggtaatttataaagaaaaggaggtttaatggtctcacag

SEQ ID NO: 917076 - DNA, 581 bp, Homo sapiens
atttacaatgacagggtagtcattatctcacaagacagtccatattattgtccatcagttcttgatgtcagaattgttttcaggatactaatactttgctttccttccacccagtggtcctcatttcaggcttgggggtccatagagaaagtttattcccctaatccttcagaagactgctgagagtggtataagaaacatggccatagggggttcaagacctggctttgcccctagtgctccamttttaaagtgtggtcctctcaccagcagcaacatagacatgcagaattccaggctgcatcccagacctactaaagcagaatctgcaatttaacaaaatccccatgtgacttatttgcaagttgatgtttgaagaatgagatgggataccaaggcaaacaaaacaaaacaaaacaaacaaacaaaaaaaaaaaccaaccaacaaaaaaacaaaactagatggaatttcactatgaaagtagcatcagggggtgtattactttgttctcacgctgctgataaagacataccagagattgggtaatttataaagaaaaggaggtttaatggtctcacag

SEQ ID NO: 917077 - DNA, 581 bp, Homo sapiens
atttacaatgacagggtagtcattatctcacaagacagtccatattattgtccatcagttcttgatgtcagaattgttttcaggatactaatactttgctttccttccacccagtggtcctcatttcaggcttgggggtccatagagaaagtttattcccctaatccttcagaagactgctgagagtggtataagaaacatggccatagggggttcaagacctggctttgcccctagtgctccaatyttaaagtgtggtcctctcaccagcagcaacatagacatgcagaattccaggctgcatcccagacctactaaagcagaatctgcaatttaacaaaatccccatgtgacttatttgcaagttgatgtttgaagaatgagatgggataccaaggcaaacaaaacaaaacaaaacaaacaaacaaaaaaaaaaaccaaccaacaaaaaaacaaaactagatggaatttcactatgaaagtagcatcagggggtgtattactttgttctcacgctgctgataaagacataccagagattgggtaatttataaagaaaaggaggtttaatggtctcacag

SEQ ID NO: 917078 - DNA, 575 bp, Homo sapiens
tccctagacttccaggaatcaagcagtcaatctgtcatgcacagtgacctgaataagaggaaatttagagaaatctcaggaaagttgctatgctctatgtttgatgaggcagttctcagaaaaacagggttggggaggagcaggggttcaagatctcagattcaggaggcatgggggactcagcagagcccttgggagctgctggtgaaagaaatgagttattggtaggaacctctgaattccacccagtcgcgtggaggaaacaacctccaatacagcatgacctcacttagagtgtaaaaaggttaactggtagaagcagacagtattaatacaatggtggttaccaaagtctgggcgtggtgggcatggggatgggttggtcaaaggatacaaagtttcagttacttcaaggasgaatacttcaagagatctgttgtaccttctggtgatttgttagtaatggtacactgtgttcttgaaaattgctgagagagtagattttaagtgttctcaccacaaaacacgaaaaccaaataaacaaaactaaaacagcctgaaatgtattgaggcta

SEQ ID NO: 917079 - DNA, 575 bp, Homo sapiens; identical to SEQ ID NO: 917078

SEQ ID NO: 917080 - DNA, 608 bp, Homo sapiens
attcctcaaaagaagacatataaatggtcaatgagtatatgaaaacattctcaacatcattaatcatcagggaaatgcaaattaaaaccacagtgagctcccacctgacacccgttagaatggctattatcagaaagatgaaaggtaagtgttggcgaggatgtagagaaaagggaatccttgcccgctgttgatgggaatgtaaattactacagccgttatggaaaataatatggagttccttcaaaaaattaaaaatggaactaccawatgattcagcagtcctactactaggtatatatacaaatgaaatctggctggagtgcagtgatgtgatcattgctcactgcatcctctaactcctgggctcaaaagataccatttaaaagatatccgcactcttatgttcattgtgtcattcacaataggcaagctatggaatcaccctaagtgtctattgatagaggataaagaaaatgaggtatatgtacacaatggaataacagccctgcaaaagaaggaaatcctgtcgtttgcgacaacatggataagtctggaggacattatgtgaagccaagcacagaaagacaaatactgcatgattgcac

SEQ ID NO: 917081 - DNA, 600 bp, Homo sapiens
ttgctttttcttattaaccagaatatcacctatcttggtgaatgatttgtgtgcaattgaaaagcatatttctgtagttgttggtggaagtgatattaaacaccaattaggtgaagttggctggtatcattatttaattctattatgactgtatatttatctacttgttttatcaattactgatagatttattgaaatttctaactataattgtagttttatatattttttaaatttctgcarattttccttctgttttaagcttgtgttttaaactcatttgttatagctctttgatgacttcaacctttctaattataaattgtaccttataaatccttgataatatagtccttgcttggaagtctactttttctgatattcatccagtcatttcagctttatcattatttgaactggtgtggtaaatattttacatcttcttatttttaacctgtgtctttacattttatttgagtatctggtaaatggcaagtatgtgggtcttgctgttttatctgttctaaaagcatttgcattttaattggaatgcttaggttatttatattgaataaaatttttaatgtgtttgggtttaat

SEQ ID NO: 917082 - DNA, 600 bp, Homo sapiens
ttgctttttcttattaaccagaatatcacctatcttggtgaatgatttgtgtgcaattgaaaagcatatttctgtagttgttggtggaagtgatattaaacaccaattaggtgaagttggctggtatcattatttaattctattatgactgtatatttatctacttgttttatcaattactgatagatttattgaaatttctaactataattgtagttttatatattttttaaatttctgcagattttccttctgttttaagcttgkgttttaaactcatttgttatagctctttgatgacttcaacctttctaattataaattgtaccttataaatccttgataatatagtccttgcttggaagtctactttttctgatattcatccagtcatttcagctttatcattatttgaactggtgtggtaaatattttacatcttcttatttttaacctgtgtctttacattttatttgagtatctggtaaatggcaagtatgtgggtcttgctgttttatctgttctaaaagcatttgcattttaattggaatgcttaggttatttatattgaataaaatttttaatgtgtttgggtttaat

SEQ ID NO: 917083 - DNA, 574 bp, Homo sapiens
gtcaaggactcaggaacccctggctggtcgtgttttttgcatatttatattcctagccccagagccttcatcctaagtctctttatctgaagacgctggctgatgcccttttgaggtgtctctgctgagacctctgctctggtggggctgcatggggggaggtggcaagaagagaaaaccttgaagacatgttgccctactctgacttagcccagtacttttccacttctagctctcttccttcccttaccacaggatccataaatttgctgcaaccttttttgggggctccctcagcagtggaacaatccctaggtctgcacygatccacctgacctgcgcacaagtccatgggggaaaatagaacagagaggagtagcacctgctccggttttagcttgttgctcacattatcaccataagtgattaaagacttcactgctaactttcatcatggctcctccttgctctaattgactacccctacacctggcagctcaatgctctctcttaactctacggagcccctgacccacacacttgaagagattaaagaaagaggtaaaaagattta

SEQ ID NO: 917084 - DNA, 603 bp, Homo sapiens
tctaagatgttataattgcctagttggaggctataggcttgttccccatgacagacctcccagctaaagtggaattcattactttcctggctttttttgttttgttttgtttttattattatactttaagttttagggtacatgggcacaatgtgcaggttagttacatatgtatacatgtgccatgctggtgcgctgtacccactaactcgtcatctagcrttaggtatatctcccaatgctctcccttccccctccccccaccccacaacagtccccagagtgtgatgttccccttcctgtgtccatgtgttctcattgttcaattcccacctatgagtgagaatatgcactgtttggttttttgttcttgcgatagtttactgagaatgatgatttccaatttcattcatgtccctacaaaggacatgaactcatcattttttatggctgcatagtattccatggtgtatatgtgccacattttcttaatccagtctatcactgttggacatttgggttggttccaagtctttgctattgtgagcacaggaaggaatgtttgggaaagcggcattaattgcattacccagtttgaggctg

SEQ ID NO: 917085 - DNA, 546 bp, Homo sapiens
ctaaaaggggccattgtacagctcaatccagtgcttcagagggtgcaagctccaagccttggtagcttccacgtgattttgggcctgcaggtacgcagaagacaagaattgaggtttgggaacctctgcstagatttcagaggatgtatggaaatgcctgcgtgtctaggcagaggtgtgctgcagaggcaaagccctcatggagaacctctgctagggcagtgtggaagggaaatatgagataggagcccccacacagagtccctactggggcactggctagtggagctgtgagaagagggccaccgtcctccagtccccagaaagtagatccacaaacagcttgccccatgtgcctggaaaagcagcagacactcaacaccaacccgtgaaagcacccggcgggggagctgtaccctgcaaagccacaagggcagagctgcccaaagccatgggagcacacctcttgcatcagtgtgccctggatatgagacatggagtcaaaggagatcattttggagctttaagatttgactgccctgctgg

SEQ ID NO: 917086 - DNA, 546 bp, Homo sapiens
ctaaaaggggccattgtacagctcaatccagtgcttcagagggtgcaagctccaagccttggtagcttccacgtgattttgggcctgcaggtacgcagaagacaagaattgaggtttgggaacctctgcgtagatttcagaggatgtatggaaatgyctgcgtgtctaggcagaggtgtgctgcagaggcaaagccctcatggagaacctctgctagggcagtgtggaagggaaatatgagataggagcccccacacagagtccctactggggcactggctagtggagctgtgagaagagggccaccgtcctccagtccccagaaagtagatccacaaacagcttgccccatgtgcctggaaaagcagcagacactcaacaccaacccgtgaaagcacccggcgggggagctgtaccctgcaaagccacaagggcagagctgcccaaagccatgggagcacacctcttgcatcagtgtgccctggatatgagacatggagtcaaaggagatcattttggagctttaagatttgactgccctgctgg

SEQ ID NO: 917087 - DNA, 620 bp, Homo sapiens
ggggtcaagatacactttttgacaaaactgtccaagaatagtctatgccatcctttactttgacttgcaggagtattacaaaggatgtaattttatgaacattttaaaggttgttacctatcttcccaagacttctcttaatcaaataattatattttgaggcacttttgtcattaccttaaagactctactcaggccgggtgtggtggctcatgcctataatcctagcactttgggaggccgaggtgggaggatcatttgagcccaggagtttgagaccagcctgggaaaaatagtgggatcccgcctctacaaaaaatttaaaaattagccagaaatggtggcacacacctgtggtcccagcyacttcggaggctgaggcaggaggatcacttgaacccaggagaggttgaggcggcagtgagctgtgttcgtgccactgcactccagcctggacaacagagcaagaccctgtctcaataaaaaaaaaatattctcctcaaatgttacctggtctcactgtcctgtatctctgtatgtgattgattctccaacaccactctcgccatctccatgaaatcctgtaagacttagaattactctctgtgaagtacagttga

SEQ ID NO: 917088 - DNA, 620 bp, Homo sapiens
ggggtcaagatacactttttgacaaaactgtccaagaatagtctatgccatcctttactttgacttgcaggagtattacaaaggatgtaattttatgaacattttaaaggttgttacctatcttcccaagacttctcttaatcaaataattatattttgaggcacttttgtcattaccttaaagactctactcaggccgggtgtggtggctcatgcctataatcctagcactttgggaggccgaggtgggaggatcatttgagcccaggagtttgagaccagcctgggaaaaatagtgggatcccgcctctacaaaaaatttaaaaattagccagaaatggtggcacacacctgtggtcccagccacttsggaggctgaggcaggaggatcacttgaacccaggagaggttgaggcggcagtgagctgtgttcgtgccactgcactccagcctggacaacagagcaagaccctgtctcaataaaaaaaaaatattctcctcaaatgttacctggtctcactgtcctgtatctctgtatgtgattgattctccaacaccactctcgccatctccatgaaatcctgtaagacttagaattactctctgtgaagtacagttga

SEQ ID NO: 917089 - DNA, 832 bp, Homo sapiens
cttgactgcaggagcagaacccagcataggcaagctttgcttctgagacagagggaagaggctggtattgcaagcaaaggcagtctggaggcaggtggcagtgggggggggtgacggtgggaattagtactgtgattctgagatggacatctgttgtttytgctcacccagcatctattctgtcttctgggaacagaaacactggctttccttcagagcctcgcccttctttctgtccctttcagtccacacaaactgggatcggtgcctgagagacctcgccaaccagagtcacagtgcctggctcaggataatgcaaataggtcctgggacttttgctggaactactgaggggaggggaaaaactcttcccatgggagttattgtgccataaggacatagcctggaactgttgattccttacagctcccactgttgggagcctatccatggcagaagatagctcaatgccaccatccaagcaccctcagccaggagtcccagaagagagcatgctacccacacttgccagctaccggaaccagttggtcccctttttggcctggactagtttgcttttgaaaccaatttggcccaaaccaacactaccatgaacgagtgtttattatgggctggccatgtgtcaaggacattacacaaagcaccctaatttaactttcgtagcaagaggatgagggaagatctaatgattctcattttacaaatgaagaaactgaggctcagagagttaaagggataagcataaagttactgagccaggaaggggcagaggaggggtatggactctgggatctctcattctaagtcccac

SEQ ID NO: 917090 - DNA, 636 bp, Homo sapiens
cactggggcccaggctgaggatgaggctgattattactatcagttgatagacaaccatgctactcaactcacagtgacacaggcagatggaaaagtgagacacaaaccctttttctgtctgtgtcactcacttcctccggccccagcaggactgtggacacagccatgggcaggtctggctcagttttcctggatctgagaccccagggtgccctgacctccaagccctccagggagactctgaagagagtgggttaggtcaggagaggacttggggctggcaggaccagactgtcctggtattgtccagagtggctgtgtcttggcttaagatgacctgagtgtaaggatagtcagagggagacagccattgagtggtaatggtccctggatttccttctgtatggtgactggacctaagkcagtgctgcttttctgtggcccaaatgccccagatcattctgaacttctcaggtttaactgagaccctcaagccccagctccatgacatcctcatattctgaacagggagggccaccacaatgggcagtgtggtgtccatcaagattcccctttcagggctcacccatccgccatacacccaaagctgccgggaggccctggcttctcacagct

SEQ ID NO: 917091 - DNA, 655 bp, Homo sapiens
attttgatagattgaccaaaactgtagtcattgatgtcactatcgccattgtaaacatacttatttggtctcaaaacctacggaaatagcagaagagtggattttgtaaggcgagaacaaggacatcaggttattttttttgtaagggttagagtagagagtacctcctcatgctggaatgtccagtttacaggagaaaaacaaaacctggtctgttctaggatatatttgtatctttaaagtcttagttygattatatcaagtttaccataagtgactccattttggtttgatctgatctgttggggttagtacaggagctcagtctaaaacaatggtctttcataatctcgtttaagaattcctcccttttggtcacattctcacataggtgagagtctgaccaaaacttacagccttagcaccactctcagttaccatcattttgggtttccagtctcaacccatcattcataggttacagtgccctcatggtcatacatttatttgagctcttgtcattccagttgaagagacaccatctgaaattctagagatggctgcaagcaaatatttaaaacttttgagagaatacagtgcaccagtggggctactattatgactatcaacaggataatacacagagtttggagta

SEQ ID NO: 917092 - DNA, 582 bp, Homo sapiens
agagttcaggaattcttacccagtccaaatgatttgatctgaaagttatcagaaacctgtattcgagagtgtttgtcagggtccttttcatcccttcatgaaactccttaaagacaccatattctaagactttgtgtgcttgtgaagttttcagaaactgcatcagaattaagcaattaactgtggaaataacttwaaatggtcatagttaaagagacaatttacaaggaaatttggttatttctgtggcttataataatttaacgtaataaccataattatgactgatagcatacacccaaacattagaattctataaacgccatataattttggaatatatattaataacatagtcactaaaatataacttgaagaaggttaaacattatttcttatttgacaatgcctcccatgtagtttaacatgtcaaataattctatttatctttcttttggatgcttcaggagccttttttatcatccaaaagttaaagataaaaaatacttaattttgaaggtgaaatttgattttgggaagcctgtaaaatatgtcaaaggtttaaaacatgtaaccaaataa

SEQ ID NO: 917093 - DNA, 582 bp, Homo sapiens
agagttcaggaattcttacccagtccaaatgatttgatctgaaagttatcagaaacctgtattcgagagtgtttgtcagggtccttttcatcccttcatgaaactccttaaagacaccatattctaagactttgtgtgcttgtgaagttttcagaaactgcatcagaattaagcaattaactgtggaaataacttaaaatggtcatagttaaagagacaatttacaaggaaatttggttatttctgtggcttataataatttaacgtaataaccataattatgactgatagcatayacccaaacattagaattctataaacgccatataattttggaatatatattaataacatagtcactaaaatataacttgaagaaggttaaacattatttcttatttgacaatgcctcccatgtagtttaacatgtcaaataattctatttatctttcttttggatgcttcaggagccttttttatcatccaaaagttaaagataaaaaatacttaattttgaaggtgaaatttgattttgggaagcctgtaaaatatgtcaaaggtttaaaacatgtaaccaaataa

SEQ ID NO: 917094 - DNA, 690 bp, Homo sapiens
tgacacctgggcttgggagaggtgagtggctgtgaaggttgacactcccctcgtccccttgtctcctggcctagtcagtggcaggaccacagggagccctagcagaacatggcctcactctgcctcctgttcctgacctggtcaagggcatagctccaagccagaaggcctgccgcccttttcccgacacacacaggtctcccaagcagttccttctgatcttgcaatgtgccagggccacatgcagtttgtctgcagcatcctcaagttatcatgaccctgraacagcagagcctcctgaccagatccagaggcagggccaggctggcacactgggctcccaaggactggacagcccccatggcagtgcagcttgagaggctccacaggggtgggagacacagaggaccaagcccacagcagcaccctgatggcacctcgcatggcaggcatggaattgggagcagggctcagctggccacatgatatccccagcccgcatccctctctaagcttggcctggcttcctctctatggcctgttatcctacccgagcactggagcgatggggccagcctcaagagggctgggcacacacctatagctgggccacccgtggcctagaggccccaccaacacttgtgaacagcccctgccatcccttcagcaccggctccccgcatccaagtt

SEQ ID NO: 917095 - DNA, 684 bp, Homo sapiens
ttattattttctacagtttggactaaattctaatttttcctggctacaaatctccaaaataatattttaatttttttcttctttttttcctccatttttcctaatttgaaatcactgaaaactaggctgtgctttcttaaagcccttcgaactgaagctagacaatttaaactccagaagaaaataacagcaacttatttacatacataagtcactctcatacctgtctactgattattaygaacttcagagtaatgtggcctatatcaattttccgggattgctcttttgtttgttgttgtttttctcccttcctccccctattttctctttgtaggacatgagacttcataacctgctataaatgagcttttctaataacttgaaacctacccatgtaggaataaactgtcctagccatgagagatcagatgaagcctgagaccagagactcattttcttctaaaatactttctccaaaagattttaaaaagaaaaagggggaaatgtgaaaggaaaataaatttggggcccccaaatcactaagctgatgggaaaagtcaatctgggaactgctaagggcaaacctgcctcccattctattcaaagtcatccctctgctcattgaaataaatgcacatctgattacctccttcggaaacgctaatcagatactcagaagaa

SEQ ID NO: 917096 - DNA, 593 bp, Homo sapiens
atgggaaacctgccccggtaatctctttgattccaaagaaggctttagtcccgcaggtctctctctctctccctctccacccccgaccacctgctggttgagctccctgccgtctccagacttcccgcagttccttgcaggaccctcttctctgtggacctgggagtgataaaccgcttctgttatttcatgtgttctgttgtgctgtctcccccgtggcccacctgaccaacgcacccagacctaactctctgccggccagggctctcctagggagtggcggtcttggtgggaataaaytggacacaggtcggacaagagccaaagggcgtctgccagggtaaacgagtttcctgtgagagggacacctgatcacagtcagacactgaggcatcaggctgtccgtcaggataaagaagtatccctgagagatgcactgtgacacccacagccacctgcccttgagctccaccagggcagggctagagttcacagccaccctccagagaggggcctcccagccaactcagaggaaaatataaaaccagtgtaaaacttcctcatgcttctgccagccctgctcacctggtgct

SEQ ID NO: 917097 - DNA, 670 bp, Homo sapiens
cttggctctcaggtctgtttctctcagtattggcttttgtgataggcttcctctaaaatggctccaatggccaagtgcctattatcccagcactttgggaagctgaggcaggaggattgtgtgaggccaggagtttgaatccagcctgggcaacaaagcccctgtctaccaaaaattaaacaaactactgggcatggtggtgcatgcctgtagttttagctacttgggaggctgaggcaggaggattgcttgagcccaggagttcaaggttayagtgagctatgattgctaccactgtactccagcctgggtgacagagtaaaaccctgtctctaagagataaattaaaaattaataaaattgttcccaacaattcccacctcctgttattcatgctgttttgtaatcccctccccttcaatgtaggcctgacctagtaattcgttctaatgactagcatatggcaaagtggtggaatgtcatttccgtgagtagtttacaagaagattctggcttctgttttgcttgctctcactctgatggaagccagctacgatgttgagagttgccctaaggagaggcctacatggtaaggaactgaaggaagcctttggccaatagccagtaaggaactgaggtcctaaattcagtgagaaactgaattctacta

SEQ ID NO: 917098 - DNA, 826 bp, Homo sapiens
gacttgggaggctgaggcagaagaatcgctcgaacccaggaggcagaggttgcagtgagccaatattggtgccattgtactcgtgcctgggcaacaagagcaaaactcagtctcaaataaataaataaattagctgggcatagtggcgggcacatgtaatcccagctattccagaaactgaggcaggagaatcacttgaacctgggaggcagaggttgcagtgagccaagatcgcgccactgcactccagcttgggcgacaagagtgaaactccatctcaaaaaaaagaaaaacatgtgccgttggataaggacacacaggtacatggacggaaacacacacatacacacacacacacacacwctctctctgctgtggggatgctgataggattgtgtgtcttctttcccctggaaacaaaaacataattattttagcacttggagctaatgttcttccctttctgagctctaaaaggagtggtcaatttcttatatcatcaacagttcaattttctagatctaccacaagctctaggtcattcctgccacatgtttccaggccttcattcccacccctactccctaccgccataggaggaaaacagaagggacaggaagagaaagcgtaggacaaggcccattattaaacaagtaatacctttcttggtcgtggtgaaatattttgagtcagtcattttggtcccttatctgtagccaggcttctgcaagagagagaagagaggggtgactttcagttatgctccatcccatcttcagttatggtgcagagggaggaggagaaggatccagaacacatgtggtac

SEQ ID NO: 917099 - DNA, 826 bp, Homo sapiens
gacttgggaggctgaggcagaagaatcgctcgaacccaggaggcagaggttgcagtgagccaatattggtgccattgtactcgtgcctgggcaacaagagcaaaactcagtctcaaataaataaataaattagctgggcatagtggcgggcacatgtaatcccagctattccagaaactgaggcaggagaatcacttgaacctgggaggcagaggttgcagtgagccaagatcgcgccactgcactccagcttgggcgacaagagtgaaactccatctcaaaaaaaagaaaaacatgtgccgttggataaggacacacaggtacatggacggaaacacacacatacacacacacacacacactcwctctctgctgtggggatgctgataggattgtgtgtcttctttcccctggaaacaaaaacataattattttagcacttggagctaatgttcttccctttctgagctctaaaaggagtggtcaatttcttatatcatcaacagttcaattttctagatctaccacaagctctaggtcattcctgccacatgtttccaggccttcattcccacccctactccctaccgccataggaggaaaacagaagggacaggaagagaaagcgtaggacaaggcccattattaaacaagtaatacctttcttggtcgtggtgaaatattttgagtcagtcattttggtcccttatctgtagccaggcttctgcaagagagagaagagaggggtgactttcagttatgctccatcccatcttcagttatggtgcagagggaggaggagaaggatccagaacacatgtggtac

SEQ ID NO: 917100 - DNA, 693 bp, Homo sapiens
ttattattttctacagtttggactaaattctaatttttcctggctacaaatctccaaaataatattttaatttttttcttctttttttcctccatttttcctaatttgaaatcactgaaaactaggctgtgctttcttaaagcccttcgaactgaagctagacaatttaaactccagaagaaaataacagcaacttatttacatacataagtcactctcatacctgtctactgattattaygaacttcagagtaatgtggcctatatcaattttccgggattgctcttttgtttgttgttgtttttctcccttcctccccctattttctctttgtaggacatgagacttcataacctgctataaatgagcttttctaataacttgaaacctacccatgtaggaataaactgtcctagccatgagagatcagatgaagcctgagaccagagactcattttcttctaaaatactttctccaaaagattttaaaaagaaaaagggggaaatgtgaaaggaaaataaatttggggcccccaaatcactaagctgatgggaaaagtcaatctgggaactgctaagggcaaacctgcctcccattctattcaaagtcatccctctgctcattgaaataaatgcacatctgattacctccttcggaaacgctaatcagatactcagaagaatgcaaccgt

SEQ ID NO: 917101 - DNA, 596 bp, Homo sapiens
cctatgggaaacctgccccggtaatctctttgattccaaagaaggctttagtcccgcaggtctctctctctctccctctccacccccgaccacctgctggttgagctccctgccgtctccagacttcccgcagttccttgcaggaccctcttctctgtggacctgggagtgataaaccgcttctgttatttcatgtgttctgttgtgctgtctcccccgtggcccacctgaccaacgcacccagacctaactctctgccggccagggctctcctagggagtggcggtcttggtgggaataaaytggacacaggtcggacaagagccaaagggcgtctgccagggtaaacgagtttcctgtgagagggacacctgatcacagtcagacactgaggcatcaggctgtccgtcaggataaagaagtatccctgagagatgcactgtgacacccacagccacctgcccttgagctccaccagggcagggctagagttcacagccaccctccagagaggggcctcccagccaactcagaggaaaatataaaaccagtgtaaaacttcctcatgcttctgccagccctgctcacctggtgct

SEQ ID NO: 917102 - DNA, 655 bp, Homo sapiens
tcaacgtgttttctttacagaatcactgtctcagtatgctgaggggctgagctccttaagggaagtggccacatcatcaagggagaaagaggttcttaatgactgtccactacagcctcagttttcaggcagagcccaatttgctgtcttgggtaacactcatagaagccctgagatgcaggtactgtcagtccattgcaggggaggaattgaggttaaaaagtgtccaagatcatgtggccattcagggccaggtctgtgccttcagtttcatgaagcatttggaggggctggaatgacccatctgtacwtctgcctagttcatgcctgatactttatgtgaataaggcaatggaaggtgctggggttttcagaggatgaaaaaatatatagaatgctgtattagtctgttctcacatggctataaagatactacctgaggctgggtaatttattaaggaaagaggtttaattgattcacagttccacatggctgcggtggactcaggaaacttacaatcatggtggaaggtgaaggggaagcaaggcactttcttcacatgatggcaggacagagaagagtgagtgaaggaggaacttgccaaacacttataaaaccatcagatctcatgagaactcactcactatcaggaga

SEQ ID NO: 917103 - DNA, 681 bp, Homo sapiens
ccaccagttctttttgatcatcccatcagtctcttcttcctttctaccaggtagaagtttttccagcaaagagagtttattaggagagagagccattctgaggagcgtttacataaattaagtgattaggcgacgctttgcatacggtgtgcagtaaattggcattccttcatttagcacacacttgatgtccccgtgcttgacattctgacctggaccatggttcagtcttgaaagcagatgttagcgtttgggagtcacacagtgtttcagccagctgtgtgtctgtacacaggaaaaggtcttctccctgtcaagtaaaaatagcatggtctttctgttctaccccagtggtaatgtttcctggctccagttctggtcttggtatccttcaccacggaatgttatcttctggccatctttcatgcctttgtcaatagggacttctagaatctccttctctgcaactgtcttccttccattgcagctktcacgtctatctttaggacggatggtttccccatgggcttggcactccatgcacacagattgaatttgctgaaccattccaggtcttattgatgaattactgtttgcattcaagcacctcagcagttggcacagcaggatcctgctcccttcttaacacctctgccttcacatttgtcacaaatcatattc

SEQ ID NO: 917104 - DNA, 702 bp, Homo sapiens
ttagcacaggagttcaagaccagcctcggcaacacggtaaaaccccatctctacaaaaaatacaaaaattaaccgagcatggttgttcatacctgtagtgccagctacttgggaagctgagatgggcagatagcttgagcctgggaggtccaggctccagtgagctgagatcatgccactgcactccatcctgggcaatagagcgagaccctgtctcaaaaaaataaaaataaattaaaaaacaagccaggtgtggtggctcatgcttgtaatcccagcactttgggaggccgaggcgggcagatgacttgagatcaggagttcaagaccaacctggccaacatggcaaaaccctgcctctactaaaaatactaaaattagctaggcatggtggcacacgcctgtaatcccagctactcaggaggctgaggcaggagaattgcttgaacctgggagacagaggtggcagtgagcagagatcaagccaagacttcattccagcstgggcaatacagcaagattctgtctcaaaaaaaaaaaaaaaagcaaacaagcttatgaaaaaagtgctcagtatcattgatcatcagagaaatggaaatccaaaactattatgagatatcatcttacacagttaaaatggtttatacccaaaggacaggcaataacaaatactggtgagaatgagaagaggaaatcctc

SEQ ID NO: 917105 - DNA, 689 bp, Homo sapiens
agagtagttttgttttgtttttgtttttgttttgagacggagtctcactctgtggcctaggctggagtgcagtggcgcgatctcggctcactgcagcctccacctcctgggttcaagcagttcttctgcctcagtcccccgagtagctgggattacaggcgcgcgccaccaggcccagctaattttttgtacttgtagtagagatggggtttcactatgttggccaggctgatctcgaactcctgacctcactcaggtgatccgcctgcctcagcctcccaaagtgctgggatcccatgcctggccttagagtagttttttgagcatttattgtgcttggtgttctctgaacttccttagatctgtggtttggtgtctgacattaatttggataaattttcagtcattgttgttttaaatatttcttctcttcctttcttctcctcttggtaytttcatgtgtttatattacaccttttgtacctgtcccagagttcttgggtattatcttctgtttttttggtctttttttttttcctttggttttcagtttgtattgatacatccttaagctcagagattattctttttttcagcggtgtccactctcctaatgagcccatcagtggcattcttcatttctgtcaccatgctttgctctctggcacttcttttcattttttcttaga

SEQ ID NO: 917106 - DNA, 689 bp, Homo sapiens
agagtagttttgttttgtttttgtttttgttttgagacggagtctcactctgtggcctaggctggagtgcagtggcgcgatctcggctcactgcagcctccacctcctgggttcaagcagttcttctgcctcagtcccccgagtagctgggattacaggcgcgcgccaccaggcccagctaattttttgtacttgtagtagagatggggtttcactatgttggccaggctgatctcgaactcctgacctcactcaggtgatccgcctgcctcagcctcccaaagtgctgggatcccatgcctggccttagagtagttttttgagcatttattgtgcttggtgttctctgaacttccttagatctgtggtttggtgtctgacattaatttggataaattttcagtcattgttgttttaaatatttcttctcttcctttcttctcctcttggtattttcatgtgtttatattacaccttttgtacctgtcccagagttcttgggtattatcttctgtttttttggtcttttttttttycctttggttttcagtttgtattgatacatccttaagctcagagattattctttttttcagcggtgtccactctcctaatgagcccatcagtggcattcttcatttctgtcaccatgctttgctctctggcacttcttttcattttttcttaga

SEQ ID NO: 917107 - DNA, 640 bp, Homo sapiens
cgcctgtaatcccagcactttgggaggccgaggcgggcggattatgaggtcagaagattgagaccatcctggctaacacggtgaaaccccatctttactaaaaatacaaaaaattagctgggcgtggtggcgggcacctgtagtctcagctatccgggaggctgaggcaggagaatggcgtgaacctggaaggcagagcttgcagtgagtggagcttgcgccactgcactccagcctgggagacagagcaagactccatctcaaaaagaaaagaaagaaagaaagaaagaaagaaggaaggaaggaaggaaggaaggagagagagagagagagagagagagaragaaagaaagaaagaaagaaatgccgcccagcgtggtggctcacgcctgtaatcccagcactttgggaggccgaggcaggcggatcacctgaggtcaggggttcaagaccagcctggccaacacagtgaaaccccgtctctactaaaaatacaaaaattagccaggcgtggtggtgtgtgcctataatctcagctactcgggaggctgaggcaggagaatcgcttgaacacaggaggcagaggttgcagtgagctgagatcacgccatttgcactccagcctggaggacaaaagcga

SEQ ID NO: 917108 - DNA, 567 bp, Homo sapiens
tgggttgattccaagtctttgctattgtgaatagtgccacaataaacatatgtgtgcctgtgtctttatagtatcatgatttataatcctttgggtatatacccagtaatgggatcactgagtcaaatggtattgtgttcagaattgattccttctggtgggttcttggtctcgctgacttcaagaacgaagccrtggacctcatggtgagtgttacagctcttaaaggtggcgcgtccagggtttgttccttccggtgggtttgtggtctcgctgactttaggagtgaagccgcagacccttgcagtgagtgttacagcttttaaaggtggtgtggaccgaaagagtgagcagcagcaagatttattatgaagagcaaaagaacaaagcttccacagtgtggaaggggaccagggcaggttgcggctgctggcttggatggccagcttttattcccttatttggccctgcccatgtcatgctgattggtccatttttacagaatgctgattggtgcatttacaatcctctagctagacagaagttttccaagtccccacctgaccc

SEQ ID NO: 917109 - DNA, 567 bp, Homo sapiens
tgggttgattccaagtctttgctattgtgaatagtgccacaataaacatatgtgtgcctgtgtctttatagtatcatgatttataatcctttgggtatatacccagtaatgggatcactgagtcaaatggtattgtgttcagaattgattccttctggtgggttcttggtctcgctgacttcaagaacgaagccatggacctcatggtgagtgttacagctcttaaaggtggcgcgtccagggtttgttccttccggtgggtttgtggtctcgctgactttaggagtgaagccgcagacccttgcagtgagtgttacagcttttaaaggtggtgtggaccraaagagtgagcagcagcaagatttattatgaagagcaaaagaacaaagcttccacagtgtggaaggggaccagggcaggttgcggctgctggcttggatggccagcttttattcccttatttggccctgcccatgtcatgctgattggtccatttttacagaatgctgattggtgcatttacaatcctctagctagacagaagttttccaagtccccacctgaccc

SEQ ID NO: 917110 - DNA, 708 bp, Homo sapiens
tcttccttccgctgtctagattaaaggagcagttcctatttgggataaggggaaaacagctatacttgaacagtgtgataatcttttaagcttctgctcagaggtggcatatgtcacttcactcatatttcattgaccagaacattttcataagcaagccataggaacaagtctgttgtcagtgatgatgggcagcataatcctcttatgagaagccagtgaacaatcggaacacgtgtgagatctctctcagctgggtgactcgctttgaggaacgtatctgtagatgccatgaaacccttaggacaggacttgggtgagcatcacagcgataacaaaggggagggactgagatccagtgcttacttcccgagcagattccgcaatctggctgataatcagattcacctggggcactttttaaaaggtcccgggcgcggtggctcacacctgtaatcccagcactttgggaggccgaggctggcagatcacgaggtcaggagttygagaccagcctggccaacatggtgaaaccccgtctctactaaaaatacaaaaattagccgggcatggtggcaggtacctgtaatcccagctacttgggaggctgaggcaggagaatcatttgaacctgggaggcggaggttgcagtgagctgagatcatgccattgcactccagcctgcacaacaaaagcaaaactcagtct

SEQ ID NO: 917111 - DNA, 708 bp, Homo sapiens
tcttccttccgctgtctagattaaaggagcagttcctatttgggataaggggaaaacagctatacttgaacagtgtgataatcttttaagcttctgctcagaggtggcatatgtcacttcactcatatttcattgaccagaacattttcataagcaagccataggaacaagtctgttgtcagtgatgatgggcagcataatcctcttatgagaagccagtgaacaatcggaacacgtgtgagatctctctcagctgggtgactcgctttgaggaacgtatctgtagatgccatgaaacccttaggacaggacttgggtgagcatcacagcgataacaaaggggagggactgagatccagtgcttacttcccgagcagattccgcaatctggctgataatcagattcacctggggcactttttaaaaggtcccgggcgcggtggctcacacctgtaatcccagcactttgggaggccgaggctggcagatcacgaggtcaggagtttgagaccagcctggccaacatggtgaaaccccgtctctactaaaaatacaaaaattagycgggcatggtggcaggtacctgtaatcccagctacttgggaggctgaggcaggagaatcatttgaacctgggaggcggaggttgcagtgagctgagatcatgccattgcactccagcctgcacaacaaaagcaaaactcagtct

SEQ ID NO: 917112 - DNA, 654 bp, Homo sapiens
attcaagttataggtatatttaaaagacctttatatttttctcttcttaaatttttctgggaaaagggtttttttctccatcaactgaattatttttctccattctttgtcttgacacttttaacacatgcacaagaggccctaagataacttctggtaacatgggattccttgggaaaaacagagaccacagactccattttgggggggaaaaccctctgttttcctcataaaaccccaggaattaaaagcagatagttccctctcaaaatcaaaggctctgtactattttgcrttgtgttatctgacagttttaagtttgaggggcatcaaattactgcacattacagagacctttggtgtctaataaccaggtaaggaaaacactttaagggatggctaatagtagttataaatcagagaagcatgttattggccacctgaaagatatggaaatatccccaccccccactgagagatgaggctcctgtgggaaatgggctgattacaaaataagccaattgtctttgggttgccttgcaatgaaatgcatagtagaggcactgcacactgtcttctcccatagaatctccctccttttggggatccaagatccagaataaaatggcacccttaattttgaggatctgcctt

SEQ ID NO: 917113 - DNA, 686 bp, Homo sapiens
ctactaaaaatacaaaaaattagccgggcgtggtggcgggcacctgcagtcccagctacatgggaggctgaggcaggaaaacggcgtgaactcgggaggtggagcttgcagtaagccgagatcgcaccactgcactccagcctgggcgacagagcaagactccgtctcaaaaataaataaataaataaataaataaaatggcacaattatatcctaacatatcaataattacattaaatgtaaatgtcttaactcaccaattaaaagagattggtaagatggattttaaaacatgtatcaactatatactatctacaagaaattcacttcaagatgtttcacacagatattaatcaaaggaaagcaggagtggytatattagtatcaaatgaggcagacttcagggcaaagaaacttaccagggataagactgacatgcaataataaaagggtcaatgcaacaagaatgcatagtaatcctaaacatttatctaacaaacaacagaactgcaaaatatatacaacaaaaagggatagaactgaaaggagaaatagacaaatccactattgtggttggatacgtcaacactcctctctcaacaattgatagatcaactagacagaaaatcagcaagaaaatagaagcacgcaatgatatcgtcaaccaacaggatctaattgacatt

SEQ ID NO: 917114 - DNA, 655 bp, Homo sapiens
gttctgggtaagatttcacttcatttctttgaaacaccactctgctgggccagccaagtcctgtagaccccatcacttgtaccccttgacctcagcaacaggaccaagacctgtagaccccaccacttgcaccccttgacctgaaaaacaggaccacaacctacacccagccatcctcacctggactatgaggatggtactgctcactggctccggacagctgtgtgactccaggggagccagctgtggttgagatctcgggggtcttggtaaatctggtaaactccttgtgcagttctagcgagcccagtgtgaggactgcctgttggctgggaaccgtaaatctgcttgggtttcatgagaatcttgccctgagtgacctccagctggggaactcaccctccatctgcgccarggagagcttggtcattgtctgcagggacccaactaatcaggacgggcttccacgaggagacagatttgaaagtatgctctcttcgggaagcagtagctttaaactggactagctcttatataatgggcactgtgtccctaacgaaaccaaaatatggtccaataatggcttctttgagggaagcacagggcagttgggttgtccaaagccttctttggaacttcacaggtttaaaaggtg

SEQ ID NO: 917115 - DNA, 668 bp, Homo sapiens
tctgggatttcctggttctgctcccaagcacacttttttttccactgctttattgagatacaatttgcatgccatacaattcacccatttaaaatgtacaatgtgatggcttttatttattttattgttatttttttagagacagggtctcrctctgttgcccagggtggaatgcaatggcatgatcatagctcacagcagccttgacctcccagtctcaagcaatcttcctacctcagcctcttgagtagctgggacaacaggtgcatgccaccacgccttgctaattttaaaaatttttgtaaagatgtatcactatgtggcccagactggtctcaaattcctaggctcaagcaatcctttcacctcagcctcccaaagtgctgggaggaacaggcatgagccactgtgcccagcctgcaatgacttttagtaggttgcagttaggttttgcaaggttgtgcagcaatcaccactatctaattttagagcatttttgttgccccagagagatcctcccagcctctggcaaccaccagtctcccttttgtctttatgaattggctgttctgagcatttcatacaaatgggatcatataagatatggttctttgtgaccgggttcttcacttagcatcatatttgcaaggctcatctatattgtagga

SEQ ID NO: 917116 - DNA, 668 bp, Homo sapiens
tctgggatttcctggttctgctcccaagcacacttttttttccactgctttattgagatacaatttgcatgccatacaattcacccatttaaaatgtacaatgtgatggcttttatttattttattgttatttttttagagacagggtctcgctctgttgcccagggtggaatgcaatggcatgatcatagctcacagcagccttgacctcccagtctcaagcaatcttcctacctcagcctcttgagtagctgggacaasaggtgcatgccaccacgccttgctaattttaaaaatttttgtaaagatgtatcactatgtggcccagactggtctcaaattcctaggctcaagcaatcctttcacctcagcctcccaaagtgctgggaggaacaggcatgagccactgtgcccagcctgcaatgacttttagtaggttgcagttaggttttgcaaggttgtgcagcaatcaccactatctaattttagagcatttttgttgccccagagagatcctcccagcctctggcaaccaccagtctcccttttgtctttatgaattggctgttctgagcatttcatacaaatgggatcatataagatatggttctttgtgaccgggttcttcacttagcatcatatttgcaaggctcatctatattgtagga

SEQ ID NO: 917117 - DNA, 703 bp, Homo sapiens
tgaattctattgaacattcaaagaagaatttgtaccaatcttactgaagctattacaaaagacagagaaagagggaatctccctaaatcactctatgaagccagtatcaccctaataccaaaaccaggaaaggacataacaaaaaatgaaatctacagaccaatatccctggtgaacatagatgcaaaaatcctcaacaaaatactacctaatggaatcaaatggtgtatcaaaaagataatacaccatgatcaagtgggtttcataccagggatacagggaagacttaacgtacgcatgtcaataaatgagatacatcacataaacagaattaaaaacaaaatcatatgatcatctcaatagatgccgaaaaagcatctgacaaaatctagcatgccttcgattaaagccctcaggaaaaccgtcatagaatggaaatacctcaaggtaataaaagccactatgacaaactcacagttgactttatacygaaaagggaaaagataaaagggttccccctgagaactctaacagacaaggatgcccactgtcaccactgctattcaacattgtactggaagtcctagccagagcaaacagacaagagaaagaaataaagggcatccaaatatgtaaaggggaagtcaaaatatcgctgtttgccaatgatatgatcgtatacctagaaaaccctaaagactca

SEQ ID NO: 917118 - DNA, 681 bp, Homo sapiens
cacctgtggtcctggctactcaggaggctgaggcaacaggatcacttgagccaaggggttcaattttgcagtgagccatgattgtaccactgcactccagcctgggtgacagcaagaccctgtttcaaaaaaataaataaactagaatgaccacgtgatccagcarttttatttgtcagtatgccggaaaggtttgaaaagcaaggtctccaggaggtacctgcacacccatgttcacagcagcatcattcacaacagccaacctaacctgggttgcttggggaggagcaacctaagtgtcagtcaacagaagaacagatgaacgaagtgtggtttatacatacactggaaaatttagcctcaaaaaggaaaggaattctgatacatgccctaatattgatgaaccttgaggtcattatgctcagtgaaataagccaatcacacaaaagacaaataccgtatgattccatttatatgaggtgccatgtgtggtcaaacccatagagacagaaagcagaacggtggttgccaggggctggggaggtggggatggagcattggcatctaatgggacagtctcggttttacacaatgacaaagctctggaggtgggtgtggtgagagccgaatgtgaatgcacttattgcccctgaactgcatgcttagaaatggtcagagtgg

SEQ ID NO: 917119 - DNA, 599 bp, Homo sapiens
cctgatcatgaggtgttgcctgcatatattaaagcttgtgaaggcgttggatcggagacccacagagctattctgtgggcaccggccatgaagcacggcaaccaaactggctcgactgattcttttcttggagcctgctataattgtggccaacttggtcatacccaaaaaaactacactgttaaaaacttaaaagcggccaagccggctcaacaaacacggccaaatgctcctgctactgtttgcctgcgttgtcgtaagggtaaacattgggcaagtacttgccactcagtctgatatagatgaaaatcccttgccacagaaccagggaaacaggaagcaaggccagtcccaggccccartatcaaatgggacacctcggactcagaccaatgttgtgtttttgcgtcaagcagtcccaacgcagcccccagcacaaacaaatttacctacagccaatccagatgggtcccagcctcttcttctgtctcagtacaatgcttgtctacctccacagtaggcagcagggcggtcgatctctgtagtaccattcctctaaatttactacctaattctttgcctttaattgtccccatggg

SEQ ID NO: 917120 - DNA, 527 bp, Homo sapiens
gtgcagggtccagcaggcccacttgatcccagcatcccacgtgtgcctgctcggggtggccagctcactgcttcttcacctctagcccaaccagcaggtgccccaccatgagcccctccaggctcaccttgcccatccctgccatgtgacctgggactcttgagatgagatcacagctgcagagcacacagcacagggaggagctcatcagcatcttcccacctgtggtgccctggcccagcctccttccggttggggttggacccgccctggcagccaggttttgcgtcacctgccccacccgccctgtaacctacttgcccaactgctatcccggtggccgtgaggccagttgacagratggagaggggtaagcattttccgcctggagaggatgggcgtgtggccatctgactgcttctgcaagcctggtggttgtgtgcaggctgccctggtggtcttagccccttggggcaggcggggtcctgtgcaggatgcagagactgggcgtggcttcctgcagatgt

SEQ ID NO: 917121 - DNA, 573 bp, Homo sapiens
gagccaagattgtgccactgcactccagcctgggtgacagagacagaccctgtctcaaaaaaaaaaaaaaaaaaaaatctgacactggggaatatgcaaaaagaaattactcatctgatagtcctgtggtttctatgtataaggggcttaaggaagatgtctgcctgggaggactacaactgtgtttgtacaagagtattagtgagaacatcaactgcctacatcagtgaagccagaatgcttaagttgcactgaacatccccatgttttcacacctatgtggacaccaatattttttctttctgtatctgtctccttcccagtctcactcactgctttatccttgtgcctagcatatggatggtaaacaaayagtaaaacaaattacttgtttcagggcagtaaaatttagttcatctacagtttttaaaacatactttgagggcctggcgtggctgctcacgcctgtaataccagcactttgggaggccgaggcgggtggatcacctgaggtcaggagttggagaccagcctggccaacataatgaaaccccatctctataaaaatacaaa

SEQ ID NO: 917122 - DNA, 688 bp, Homo sapiens
tgtgatactgctgtcatgccacttcacttctacatatgttataattacaaactacattttcattatttggcttaaaaaggcagaactttttgactttttttttttttgagacagggtcttgcgctctgttgcccaggctggagtgcagtggcgtgatcttggctcactgcaacctctgcctctcaggttcaagcaattcttgtgtcttcgcctcctgagtagctgggactacaggcatgtgccaccacacccggctaatttttgtatttctagtagagatggggtttcgccacgttggccaggctggtcttgaactcctggcctcaagtgatctgtccacctcggcctcccaaagtgctgggattacaggcgtgagccaccgcgccgaacsagaacttttttacattttgacatttagatgaacacttttgacatttaattcttaaccctttggaggtatatttttatgaactgaagatctgcttttacttagttacatataaataaccagtttcctaaactccatttattgaatagccccccctatttttcccactgtatctgttttgtcttctctctcatatagcaaagtatctaaattactccggcttcataataaacccaaatatctggtagcatagtgaatgtcttaactattcttggctttttactgctccatataaattgt

SEQ ID NO: 917123 - DNA, 705 bp, Homo sapiens
tattgaacattcaaagaagaatttgtaccaatcttactgaagctattacaaaagacagagaaagagggaatctccctaaatcactctatgaagccagtatcaccctaataccaaaaccaggaaaggacataacaaaaaatgaaatctacagaccaatatccctggtgaacatagatgcaaaaatcctcaacaaaatactacctaatsgaatcaaatggtgtatcaaaaagataatacaccatgatcaagtgggtttcataccagggatacagggaagacttaacgtacacatgtcaataaatgagatacatcacataaacagaattaaaaacaaaatcatatgatcatctcaatagatgccgaaaaagcatctgacaaaatctagcatgccttcgattaaagccctcaggaaaaccgtcatagaatggaaatacctcaaggtaataaaagccactatgacaaactcacagttgactttataccgaaaagggaaaagataaaagggttccccctgagaactctaacagacaaggatgcccactgtcaccactgctattcaacattgtactggaagtcctagccagagcaaacagacaagagaaagaaataaagggcatccaaatatgtaaaggggaagtcaaaatatcgctgtttgccaatgatatgatcgtatacctagaaaaccctaaagactcatccaaaaag

SEQ ID NO: 917124 - DNA, 705 bp, Homo sapiens
tattgaacattcaaagaagaatttgtaccaatcttactgaagctattacaaaagacagagaaagagggaatctccctaaatcactctatgaagccagtatcaccctaataccaaaaccaggaaaggacataacaaaaaatgaaatctacagaccaatatccctggtgaacatagatgcaaaaatcctcaacaaaatactacctaatcgaatcaaatggtgtatcaaaaagataatacaccatgatcaagtgggtttcataccagggatacagggaagacttaacgtacrcatgtcaataaatgagatacatcacataaacagaattaaaaacaaaatcatatgatcatctcaatagatgccgaaaaagcatctgacaaaatctagcatgccttcgattaaagccctcaggaaaaccgtcatagaatggaaatacctcaaggtaataaaagccactatgacaaactcacagttgactttataccgaaaagggaaaagataaaagggttccccctgagaactctaacagacaaggatgcccactgtcaccactgctattcaacattgtactggaagtcctagccagagcaaacagacaagagaaagaaataaagggcatccaaatatgtaaaggggaagtcaaaatatcgctgtttgccaatgatatgatcgtatacctagaaaaccctaaagactcatccaaaaag

SEQ ID NO: 917125 - DNA, 685 bp, Homo sapiens
tatatgggggcctgctttctgggatttcctggttctgctcccaagcacacttttttttccactgctttattgagatacaatttgcatgccatacaattcacccatttaaaatgtacaatgtgatggcttttatttattttattgttatttttttagagacagggtctcrctctgttgcccagggtggaatgcaatggcatgatcatagctcacagcagccttgacctcccagtctcaagcaatcttcctacctcagcctcttgagtagctgggacaacaggtgcatgccaccacgccttgctaattttaaaaatttttgtaaagatgtatcactatgtggcccagactggtctcaaattcctaggctcaagcaatcctttcacctcagcctcccaaagtgctgggaggaacaggcatgagccactgtgcccagcctgcaatgacttttagtaggttgcagttaggttttgcaaggttgtgcagcaatcaccactatctaattttagagcatttttgttgccccagagagatcctcccagcctctggcaaccaccagtctcccttttgtctttatgaattggctgttctgagcatttcatacaaatgggatcatataagatatggttctttgtgaccgggttcttcacttagcatcatatttgcaaggctcatctatattgtagga

SEQ ID NO: 917126 - DNA, 685 bp, Homo sapiens
tatatgggggcctgctttctgggatttcctggttctgctcccaagcacacttttttttccactgctttattgagatacaatttgcatgccatacaattcacccatttaaaatgtacaatgtgatggcttttatttattttattgttatttttttagagacagggtctcgctctgttgcccagggtggaatgcaatggcatgatcatagctcacagcagccttgacctcccagtctcaagcaatcttcctacctcagcctcttgagtagctgggacaasaggtgcatgccaccacgccttgctaattttaaaaatttttgtaaagatgtatcactatgtggcccagactggtctcaaattcctaggctcaagcaatcctttcacctcagcctcccaaagtgctgggaggaacaggcatgagccactgtgcccagcctgcaatgacttttagtaggttgcagttaggttttgcaaggttgtgcagcaatcaccactatctaattttagagcatttttgttgccccagagagatcctcccagcctctggcaaccaccagtctcccttttgtctttatgaattggctgttctgagcatttcatacaaatgggatcatataagatatggttctttgtgaccgggttcttcacttagcatcatatttgcaaggctcatctatattgtagga

SEQ ID NO: 917127 - DNA, 615 bp, Homo sapiens
cctgatcatgaggtgttgcctgcatatattaaagcttgtgaaggcgttggatcggagacccacagagctattctgtgggcaccggccatgaagcacggcaaccaaactggctcgactgattcttttcttggagcctgctataattgtggccaacttggtcatacccaaaaaaactacactgttaaaaacttaaaagcggccaagccggctcaacaaacacggccaaatgctcctgctactgtttgcctgcgttgtcgtaagggtaaacattgggcaagtacttgccactcagtctgatatagatgaaaatcccttgccacagaaccagggaaacaggaagcaaggccagtcccaggccccartatcaaatgggacacctcggactcagaccaatgttgtgtttttgcgtcaagcagtcccaacgcagcccccagcacaaacaaatttacctacagccaatccagatgggtcccagcctcttcttctgtctcagtacaatgcttgtctacctccacagtaggcagcagggcggtcgatctctgtagtaccattcctctaaatttactacctaattctttgcctttaattgtccccatgggggtcactggcccttta

SEQ ID NO: 917128 - DNA, 813 bp, Homo sapiens
actgagaccctgcctcggcaggggtctccaagcttggctccaccccctgaggggccagttactgcatacctcgcccacccaggagctgggggccctggtcctgtttcccagggagctgttggcacttgtgggctcctggctggggtccaggtgggctctgctcctctgccctgcccagcgctttgtactgagcccatcctgcagagactcaacggggccaaacgcacattccttgaccttctgtgagtctgtcagtcttcatccctccctggacctaggaaggcctggacagctttgaccattggtgttgggtggacatggcgctgcgctgcaccccaggccctcagagcccagctgttctgctttctgcttttggtcctgagctgccttgaaggaatctgaccagcagggagagcccacggagcgggagggcctgtggggctcagccctgcagccggtctgccgaggccaggcctgggggcacagctggggctgagtacactgaatgccccctcgatgccaygcacagcagaagagctgcccacaccgccctgctgggccctgcccgggctccagacccacagaccaagcacacaagagactgggctgctttgtcatgcagcagcaggtagccggacacatgtttccccattcccctgccatcctctgaaatcctgtggggagaaagcatgtgaggtccagtgggggttggggtgagggtctgactgggggctttctaacccacgtctgagtcccatccggcgccagtgccacagtggcgggtgactggtgctgctcacactggcaagctcc

SEQ ID NO: 917129 - DNA, 756 bp, Homo sapiens
taaggccactgcccagttaaaggcagagccatgaagcaaatctccctcccctcgccctgaagacttgaggtccacgctcatcccaccaactgaagaagctggcatttcctccccaccagagggagcacagagaggtgaagcaacttgcccagggccacacagccccaggtcggaggtccaccccacgggtcagactagggcagggcctcctgctttcagctcccactgggaacccccaccctcctggctatccacggaggtgttgattatcacatggggtttcttccctcagagacttccttggtacctacatttttttcctccaatattaggaataaatgataataataccaattaatgtgcactgaagtttcccaggtgcaggtcattgctggtgagtctttctgcgcatgaacgggtttcgtgcccgcagaaccccagggggttgacactgccwtcatcctcatttcacagatgaggaaactgaggcttagacatagcaacagtcgtgacaattccataagggccctgtgtgccaggggcagctctgccaggtaccaacctaagccactggcagactagaccccctgtcaccctgacaatacccaggccagctataccccctcctgagccccccatatcacagaccatccagcttgcatagcccctgggcaactccacaggtgatggggagccggtaggtgggaggccccagttctgtgctcttgttcctgcttccaggggctggtgatgtct

SEQ ID NO: 917130 - DNA, 597 bp, Homo sapiens
accaatcagctctctgtaaaaccaatctgctgtctgtaaaatggaccaatcagcaggatgtgggtggggccagataagagaataaaagcaggctgcctgagccagaagtggcaacctgctggggtctgtagaagctttgttcttttgttctttgcaataaattttgctactgctcactttttgggtccgcattgcgtttatgagctgtgacactcactgggaaggtctgcagcttcactcctgaagccagcgagatcacgaacccaccagaagaaagaaactcctaacacatccgaacatyagaaggaacaaactcaggacacgcggcctttaagaactataacactcactgcaagggtccttggcttcattctcgaagtcagtgagaccaagaacccaccaattccggacacaatttgactgcagaaaatggatgtccaaccctgtggtttccctgggccacattggaagaagaaaggagttgtcttgggccacacataaaatacacttactatagcagatgagctaaagaaaagaaaaaagtccatgcgtaatctttgtgatatgtgccaccaccaataagcaaaattgttctct

SEQ ID NO: 917131 - DNA, 597 bp, Homo sapiens
accaatcagctctctgtaaaaccaatctgctgtctgtaaaatggaccaatcagcaggatgtgggtggggccagataagagaataaaagcaggctgcctgagccagaagtggcaacctgctggggtctgtagaagctttgttcttttgttctttgcaataaattttgctactgctcactttttgggtccgcattgcgtttatgagctgtgacactcactgggaaggtctgcagcttcactcctgaagccagcgagatcacgaacccaccagaagaaagaaactcctaacacatccgaacatcagaaggaacaaactcaggacacgcggcctttaagaactataacactcactgcaagggtccttggcttcattctcgaagtcagtgagaccaagaacccaccaattcyggacacaatttgactgcagaaaatggatgtccaaccctgtggtttccctgggccacattggaagaagaaaggagttgtcttgggccacacataaaatacacttactatagcagatgagctaaagaaaagaaaaaagtccatgcgtaatctttgtgatatgtgccaccaccaataagcaaaattgttctct

SEQ ID NO: 917132 - DNA, 639 bp, Homo sapiens
gaatatttaaatccatgcgttgaattcatgcattcaaagaaacatgtcctgagtcactaaatgctgacatttgtttttcatgttaagagtgtaaataactggtcccaaatataatattattacatcagataaaaactggaatgtgaacctcttaacttgattgtgaaagtatttgccaatggtgcctcttgataattatttgaggctcacttcagaactcctctggaagggttaatttttaaatagtcattttataaattaacatttttgacatatgtgatggctctcaaattttttctttkatgccagtttgaatcatttctgctcaatttttttttttaattgggatggagtctcactctgttgcccaggctggagtgcagtgatgcaatcttggctgactgcaacctccacctcctcggttcaagcgattctctcgcatcagcctccagagtagctgggattacaggcgcgcaccaccatgcctggataatttttgtattattactagagatggggtttcaccacgttggccaggctggtcttgaactcctgaactcctgacctcaagtgatccacctgcctcagcctcttaaagagctggaattataggtgtgagccactgcaccaggccctgtt

SEQ ID NO: 917133 - DNA, 568 bp, Homo sapiens
cgtatcaaaactctgggatacagcaaaagcggtgctaaaagtgtagtttatagcattaaacgccttcatcaaaaagtctgaaagcacaaatagacaatctaaggtcatatctcatggaactggagaaacaagaacaatccaaactcaaacccagcggaagaaaagaaataacaaagatcagagcagaactaaatgaaattgaaacaaaaaaatacaaaagataaatgaaacaaaaagatggttctttgaaaagatgaacaaaattgatrgaccattagcgagattaaccaagaaaagaagattgaagatccacataaactggattagaaatgaaacaggagatattacaactgataccacagaaatacagaagattattcgaggctactgtgaacacctggatgctcataaactagaaaacctagaggagatggataaactcctggaaatatacaatcttcctagattaatccaggaagatatagaatctctgaacagaccaataacaagcaacaagattgaaatggtaatttaaaaattgccaacaacaaaaagtccaggaccagat

SEQ ID NO: 917134 - DNA, 502 bp, Homo sapiens
ctccttcagctacactcactgttgagtctcccacaattaccgttgttcctggcccagacttcaatccggcctcccacattattcctgataccacacctgacccccatgactgtatctctctgatccaactgacattcgccccatttmcccaaatttccttctttcctgttcctcaccctgatcacgcttgatttattgatggcggttccaccaggcctaatcgccacacaccagcaaaggcaggttatgctatagtacaagccactagcccgcctcttagaacctctcatttcctttccacgtggaaatctatcctcaaggaaataacttctcagtgttccatctgctattctactactcctcagggattattcaggctccctcccttccctacacatcaagctcgaggatttgccccacccaggactggcaaattagctttactcaacatgccctagtcaggaaactaaaatacctcttagtctaggtagatactttcact

SEQ ID NO: 917135 - DNA, 580 bp, Homo sapiens
ctcaatagatgcagaaaaagcatttgacaaattcaacatccctttatgagtaaaactgtcaagaaaatcagcatacaagggacacacctcaatgtaataaaagccatctatgacaaatccacagccaacataatactgaatagggaatagttgaaagcattccctctgagaactggaacaagacaaggctgcccactctcaccactcctcttcaacatagttctggaagtcctagccagagcaatcagacaaaagaaataaataaagggcatccaaattggtaaagaggaagttaaaatgtcactgtttgctgatgatatgatcatgtacctcaaaaacyatagagactcctctagtaagctcctagacctggtcaaagaattcatcaaagtttctggatacaagattaatgtacacaaatcagtacattctctacatagctcttctatacaccaacagcgaccaagcagagaatcaaatcaagagctcaacccattttacaagagctgcaataaataaataaataaaatacttagaaatatacctaaccaaggaggcaaaagacttctacaaggaaaac

SEQ ID NO: 917136 - DNA, 576 bp, Homo sapiens
ttgaaatacactgagatcttttcaggggggatgtgtgggagccaagtcagcttcctttccaggccagcagaaaaatgatccacctctgagtcaccctcctgacccagtgttccagctcttcaactgagacaggcatctctttttatctgcaggaatgttgatgttagatgtaaagcagcactgtgactcaaccccttgtgcaactctgaacatggaggggagtcctgtgaagatgcactgaccctgaartgtttcagaaaggctgtctatagctgtacctaagccttgatcatgtgagagaagtcctagctctgtctgcagtggtgggcaagggggacaagaagtcaccttctccaagacccttttcaagcaccagggttgcctgactgttgaattagggccatagactttccacactgagcccagcactgcacttgtgcctctgctgaaagatgctttccatagcagaaagttctgggactcaagtcctgctgtctgtatttttttgtcccttgatgtggtgtactcccccttcccctaggagtaggaatccctgaagaacagactactgtgaat

SEQ ID NO: 917137 - DNA, 767 bp, Homo sapiens
gtatctgttatattccctatgtagcaggcaataatctttatgcatattatttcctttaacttcccaaccgctctatgaggcaagtattattttaatgtattagtctggactctaggttgctagctaaaaatgggaaaacataattaggagaaccttgaactatctcacatatctacaagaaaagcctggttaaggtcctcatcaccatcagaactctttccatctgtcacctttattctgttgcacaagtcaatattattcttccaggtcagcttcccccttgtggtggaaacttcccagcctcatatctcacagcctcaaactactgcctcccaccccctgagagagaataatcttcctcctttcactcccattttagatattactcggaaggactctgataatttagctttagtgaagagctcagtgttaaatcaatcagttgtggctgaagagacacmaaggagaggatcagggttgtagaatagagacatggccagaggggctccacttatggacagtgaaaacaatttctacagaaactggaatggcagggtcctctccttcaacatatttctgagtcctcaaggctctatctcaggccctctgcaatttccactccacatactttctggatctgtctcaccaagtcccattaatatactagtgaggccccaattctctgtctcagcaagaccttgtattcttagcttcagactcacataaccaagtaacccttcccagacatctgcagctctatatctcat

SEQ ID NO: 917138 - DNA, 767 bp, Homo sapiens
gtatctgttatattccctatgtagcaggcaataatctttatgcatattatttcctttaacttcccaaccgctctatgaggcaagtattattttaatgtattagtctggactctaggttgctagctaaaaatgggaaaacataattaggagaaccttgaactatctcacatatctacaagaaaagcctggttaaggtcctcatcaccatcagaactctttccatctgtcacctttattctgttgcacaagtcaatattattcttccaggtcagcttcccccttgtggtggaaacttcccagcctcatatctcacagcctcaaactactgcctcccaccccctgagagagaataatcttcctcctttcactcccattttagatattactcggaaggactctgataatttagctttagtgaagagctcagtgttaaatcaatcagttgtggctgaagagacacaarggagaggatcagggttgtagaatagagacatggccagaggggctccacttatggacagtgaaaacaatttctacagaaactggaatggcagggtcctctccttcaacatatttctgagtcctcaaggctctatctcaggccctctgcaatttccactccacatactttctggatctgtctcaccaagtcccattaatatactagtgaggccccaattctctgtctcagcaagaccttgtattcttagcttcagactcacataaccaagtaacccttcccagacatctgcagctctatatctcat

SEQ ID NO: 917139 - DNA, 609 bp, Homo sapiens
tttatttgggttgtttccagtttttgactattttaaataatggtactatgaacattaatgtacggatttttatgtggactttcaaactttatcgtggagatgacagagagatagacagacagacagacagacagacagacagatagatagatagaaccactgtgttatatagaaactatacttaacattttgaggaactgccaaattgtcttccaaagtagctctatcatattataatctcagcaatatacaaggttccaatttctccacacttttaaacacttgttgtctatctattttcatttatgacatgacccagagggaaaaaaatcaaccagaatgtgatggcaacccaaggtggaatgcagactgtgacgaatcaatctaaccgtattacaaataaatyatataactagactgaagtgggtgaagaagaaaggaaatgacctgagtaactgaacaatggtgttttgggccaggctcagtggtgcacacctgtaattccagcactttgggaggcagaggcagacagatcacatgaggccatgagtttgagacctgcctggccaacatggtgaaactctctctctactaaaaatacagaaatta

SEQ ID NO: 917140 - DNA, 613 bp, Homo sapiens
tttatttgggttgtttccagtttttgactattttaaataatggtactatgaacattaatgtacggatttttatgtggactttcaaactttatcgtggagatgacagagagatagacagacagacagacagacagacagacagatagatagatagaaccactgtgttatatagaaactatacttaacattttgaggaactgccaaattgtcttccaaagtagctctatcatattataatctcagcaatatacaaggttccaatttctccacacttttaaacacttgttgtctatctattttcatttatgacatgacccagagggaaaaaaatcaaccagaatgtgatggcaacccaaggtggaatgcagactgtgacgaatcaatctaaccgtattacaaataaatyatataactagactgaagtgggtgaagaagaaaggaaatgacctgagtaactgaacaatggtgttttgggccaggctcagtggtgcacacctgtaattccagcactttgggaggcagaggcagacagatcacatgaggccatgagtttgagacctgcctggccaacatggtgaaactctctctctactaaaaatacagaaattagccg

SEQ ID NO: 917141 - DNA, 643 bp, Homo sapiens
ggatcagtgttgtttttaatcattcctaccaccttgtcccacaggcaggagtcctgccatcttcgaaggccagcccctaaacaggttccctgagtgttaggtcaaaataactttaaaaagacacgcagctatccacagcaatccttaatagttacttatctatttcagggtataacataagacacacctatcatttcagacctgcctaggacatgcctggagaaggtatttaagtaattttaaaagtgcatcaaaacaaggtcaggcgcggtggctcacrcctataatcccaacactttgggaggccgaagcaggcagatcacctaaggtcaggagttccagaccagcctgggcaacatggcaaaaccccatctctactaaaaaaatacaaaaaaattagccaggcgtggtggcatgcgcctgtagtcccagctactcaggaggctgaggcaggagaattgcttgaacctgggaggcagaggttgcagtgagccgagatcacgccactgcactccagcctgggtgacagagcgagactctgtctcataaataaataaataaataaataaataaataaagtgcatcaaaacaagaaaaaccctgctaagggccagtctgctgggtggtggatgggtcagcagag

SEQ ID NO: 917142 - DNA, 643 bp, Homo sapiens
ggatcagtgttgtttttaatcattcctaccaccttgtcccacaggcaggagtcctgccatcttcgaaggccagcccctaaacaggttccctgagtgttaggtcaaaataactttaaaaagacacgcagctatccacagcaatccttaatagttacttatctatttcagggtataacataagacacacctatcatttcagacctgcctaggacatgcctggagaaggtatttaagtaattttaaaagtgcatcaaaacaaggtcaggcgcggtggctcacacctataatcccarcactttgggaggccgaagcaggcagatcacctaaggtcaggagttccagaccagcctgggcaacatggcaaaaccccatctctactaaaaaaatacaaaaaaattagccaggcgtggtggcatgcgcctgtagtcccagctactcaggaggctgaggcaggagaattgcttgaacctgggaggcagaggttgcagtgagccgagatcacgccactgcactccagcctgggtgacagagcgagactctgtctcataaataaataaataaataaataaataaataaagtgcatcaaaacaagaaaaaccctgctaagggccagtctgctgggtggtggatgggtcagcagag

SEQ ID NO: 917143 - DNA, 585 bp, Homo sapiens
agagggattgtttgattagggtgcagtagttgagagttcagacccaggagacagcctgcctgcttcgaatcctggcccaacccctggccctgtgtgaccttgggcaagtgactgcatctctctgtgctgttgttttcttattaataaaatgggggatagaatgatacctacctcttagggttgttgtcagggttgagtacaaaagcctgtggatcagtgcctggctcatggtaaatgcatgtcagtgttagmtagtgtttttattcagtctcaaaatgtttaataaatgccttctatgagccagacaccatggatcagcagtacccgtgacagatgagggtctgcttgcatgggagagccagagaataaacaaagaaatgaagaaacaagaaaagaccagatgagagtggctttaaagccaataaaacagggaaatggtgaatggagcaactggggagaagagtcaccaaagtcggggaatcagggaagccttccccaaagaggtggcatttgaactggggcctgagtggtgaagcagccagccatgggaagggcttgggggaacaggatatgcacaggtcctgt

SEQ ID NO: 917144 - DNA, 715 bp, Homo sapiens
cagctcctagcatatggattctcattcctaccaggctggtccagcccacagcactggaaccctcacccacaccctctgtcctgcccgccgaagggtttggagtttcctgctcttgtctgtctctgggttgccccatgggcccctgttggaaggtttagctcttgccatacctttggaactagttcctctggtgaattctctgcattgatcctgctggaatgagctctttcctgactgatgcaggatggattttattttttacttatttttttgagacagagtctcactgtgttgcccaggctggattaccgtggcacagtctcggctccctgaaacctctgcctcctgggttcaagcaactctcgtgcctagcytcctaagaagctgggactacaggcacatgccaccatgcctggctaatttttgtatttttggtagagacagagtttcaccatgttggccaggctgatctcgaactcctgacctcaggtgatccacctgcctcggcctcccaatgtgctgggattacaggcatgagccaccgcacctggcctaggatggattttaaagatgggcccgaaagtgcagggtttgacataaggatgtcgagaggccattcctcagtaggcagtagcagacctatcttagtgaaagggccacacttttagcaagtaaacaatcccctgcttctccaatacctgctttctccctaatc

SEQ ID NO: 917145 - DNA, 512 bp, Homo sapiens
caatagactattcagtcatggtccaatcaaacattctgcaatggtgggcttgctctactctgcactgtccaacatgggagctgctagccacccacatgggctgttgagcccttgaaatgtggctggtgagaatgaagagctgaattttcaattttctcttaactaattttttttttttcagacagagtctcactctatcctccaggctggagtgcagtggtgcaatctcatctcactgcaacctccatctcccgggttcaagcaattctcctgcctcagcctcctgagtagccaggattacaggaacccrccatcatgcccggctaatttttgtatttttgtagagaagagatttcaccatgttggccaggctgatcttgaacgcctgacctcaggtgatctgcccaacttggcctcccaaaatgctgggattgcaggcatgagccaccacgcccgcccttaattcatttctaaatcacaaaatctaaacaacaagtggataggaggtacca

SEQ ID NO: 917146 - DNA, 512 bp, Homo sapiens
caatagactattcagtcatggtccaatcaaacattctgcaatggtgggcttgctctactctgcactgtccaacatgggagctgctagccacccacatgggctgttgagcccttgaaatgtggctggtgagaatgaagagctgaattttcaattttctcttaactaattttttttttttcagacagagtctcactctatcctccaggctggagtgcagtggtgcaatctcatctcactgcaacctccatctcccgggttcaagcaattctcctgcctcagcctcctgagtagccaggattacaggaacccaccatcatgcccggctaatttttgtatttttgtagakaagagatttcaccatgttggccaggctgatcttgaacgcctgacctcaggtgatctgcccaacttggcctcccaaaatgctgggattgcaggcatgagccaccacgcccgcccttaattcatttctaaatcacaaaatctaaacaacaagtggataggaggtacca

SEQ ID NO: 917147 - DNA, 601 bp, Homo sapiens
tccatcagctctctgccatccagccagatgttgtcattgcagcaggcaatgcccagccccgggcactctgtgcaggcggtgtccttgcagctctacccagctctgggctctgggaaaagggaacaatggacgctgtcgggcatggacatgatggggcttccagaagagttactctgggcctccagggtgacatcaaaggacaggggtgcctcttaaggtgaccttccagccacagccctcttgttggagacaggcatactcccattacagtcatcaccacatggctctgtcccagagccatgcctctgtctttcagagaccacaggaggaaaacaaccacttctgggatgaggacagggcccttgagagaaggtggtgtttggctgggccaccgaaaacccctcgcccctgccagcacactcggtctcctctctsgttgaacagagctctgcctgtggtcctgggtcccagccctgaaacccacaggtccagcggtggccagggacacaggcccacccctgcaagccagcagacaaatcggcagacacctgaaacacgaagttcatggcagggtcaggctttgtgtcattcacagccctct

SEQ ID NO: 917148 - DNA, 497 bp, Homo sapiens
gtactgctgaagtgtcttctttgtacttggaatgtgctaggatggatagacttcaaagtgcaaagcgcctgaaggatctcgcattcatcaattctatgcactgagcttctgtccccagaataccactctcagagtaggaatatggcaaggccagtttgataggtggggcatggattggaggctcaggccactgcactgcacatacaggtcttgatgtaaacggtctggtggaggtcaagttctgtttagcgkgggtagactatgtgacagagtgaagaaaggtaatggtctaaacgcagcaaaagtttcattcccactcacgtgccagtctgtggagcaggcagctcctctcctcatgaacctgggacccaggtatcctccatcttgtggttctgcttctccagagccttgtcatttttttcatctagctatggtgacaagatcttttggataagccatgaatattaaaccaaaggcaaactctgaaaattgatttg

SEQ ID NO: 917149 - DNA, 576 bp, Homo sapiens
aaagaacgaggatggttttggcatttttaccaagctaatggtctacacagacaaaatctcataaaagggcactctgttcttcttgatccactcagacatggcctgtgagtgaagaaacggctctcctcctcaaagaaatcactgctgattctcacaccagcctgacactgcttcatgggttcttcaaagagagtattcccatagaaactaaaagggaagaggaatgtgtctggcgggcattgtgggcagcagtgggctttgggccaaattttaagtttgaaaatcmagattgcctctttttgaggggccgccggactgagcagatacaaacaccgtgaaaagagggtgccatgttcagattcaggaaacaaggatggtttctgttcagttcctccatcaaccttcaggtcatgcgattcccatttccctctgtggaccaaacaattcagtggggtttctgccttttaaatatttcattatcaacatatcatccttttagcctccagaaagcattttaacatgaagattctggcttaagactcttgtgggtctgtgtctctctctctctctatctct

SEQ ID NO: 917150 - DNA, 634 bp, Homo sapiens
ggcaattgactaaaagtcagttactgagctatctcaatactttcatttcattttaacttttgcagtagggtgcaattaaaggagagaaagaaaacaaagtgataagtgtaagataatgtacacacatgtgtaaaagaraatgacaagacaggatgactatttgtctcttgggtagctccttgggctccatgtctccttcctcagagaacctcgttttcctttgtccagatttgttagggtggataatccaggggcctgctcccccatgatagaagccaaagacgtccctgcaggcgcctcccgctgcatccttttctgcactgcccacatggacacaactcagccgattagacttgttctcagaactttagtcttgagcaaagagattaaagggtgaagtgactgaaggtatgcccttccaaagtggtacgtgagctaatggctaaagtttgccaagcccatccaatcactttttttcgtaatttttatatatttatttttttgagagagattcttgctctgttgcccaggctggagtgcagtggcgtgatctcgattcactgccacctctgtctcccggcttcaaaggagtctcctgtctcagcctccccagtagctgggattacaggcatac

SEQ ID NO: 917151 - DNA, 634 bp, Homo sapiens
ggcaattgactaaaagtcagttactgagctatctcaatactttcatttcattttaacttttgcagtagggtgcaattaaaggagagaaagaaaacaaagtgataagtgtaagataatgtacacacatgtgtaaaagagaatgacaagacaggatgactatttgtctcttggktagctccttgggctccatgtctccttcctcagagaacctcgttttcctttgtccagatttgttagggtggataatccaggggcctgctcccccatgatagaagccaaagacgtccctgcaggcgcctcccgctgcatccttttctgcactgcccacatggacacaactcagccgattagacttgttctcagaactttagtcttgagcaaagagattaaagggtgaagtgactgaaggtatgcccttccaaagtggtacgtgagctaatggctaaagtttgccaagcccatccaatcactttttttcgtaatttttatatatttatttttttgagagagattcttgctctgttgcccaggctggagtgcagtggcgtgatctcgattcactgccacctctgtctcccggcttcaaaggagtctcctgtctcagcctccccagtagctgggattacaggcatac

SEQ ID NO: 917152 - DNA, 634 bp, Homo sapiens
ggcaattgactaaaagtcagttactgagctatctcaatactttcatttcattttaacttttgcagtagggtgcaattaaaggagagaaagaaaacaaagtgataagtgtaagataatgtacacacatgtgtaaaagagaatgacaagacaggatgactatttgtctcttgggtagctccttgggctccatgtctccttcctcagagaacctcgttttcctttgtccagatttgttagggtggataatccaggggcctgctcccccatgatagaagccaaagacgtccctgcaggcgcctcccgctgcatccttttctgcactgcccacatggacacaactcagccgattagacttgttctcagaactttagtcttgagcaaagagattaaagggtgaagtgactgaaggtatgcccttccaaagtggtacgtgagctaatggytaaagtttgccaagcccatccaatcactttttttcgtaatttttatatatttatttttttgagagagattcttgctctgttgcccaggctggagtgcagtggcgtgatctcgattcactgccacctctgtctcccggcttcaaaggagtctcctgtctcagcctccccagtagctgggattacaggcatac

SEQ ID NO: 917153 - DNA, 687 bp, Homo sapiens
cacaactcagccgattagacttgttctcagaactttagtcttgagcaaagagattaaagggtgaagtgactgaaggtatgcccttccaaagtggtacgtgagctaatggctaaagtttgccaagcccatccaatcactttttttcgtaatttttatatatttatttttttgagagagattcttgctctgttgcccaggctggagtgcagtggcgtgatctcgattcactgccacctctgtctcccggcttcaaaggagtctcctgtctcagcctccccagtagctgggattacaggcatacgccaccatgcatggctaattttttttgtgtgtgtgtatttttagtagagacagggtttcaccatgttggccaggctggtcttgaactcctgaccttgtgattcgcctgcctcagcctcccaaagggctgggattacacgcrtgagccaccgcgcccagcttcaaaaagttttaagcaaagctcagaggtcttaaccacaggcacatcggaggatcatgtttgaaacactttccagcttcctcaataggaatggaaaccaaactccgaattgatgactcctttgaggaagtcgagagctgtaaggaaagccagtaacaggggcaagggagagatgcgtcccgaatgatcctgtgccaattctttctggaatccttgatgtgatctca

SEQ ID NO: 917154 - DNA, 687 bp, Homo sapiens
cacaactcagccgattagacttgttctcagaactttagtcttgagcaaagagattaaagggtgaagtgactgaaggtatgcccttccaaagtggtacgtgagctaatggctaaagtttgccaagcccatccaatcactttttttcgtaatttttatatatttatttttttgagagagattcttgctctgttgcccaggctggagtgcagtggcgtgatctcgattcactgccacctctgtctcccggcttcaaaggagtctcctgtctcagcctccccagtagctgggattacaggcatacgccaccatgcatggctaattttttttgtgtgtgtgtatttttagtagagacagggtttcaccatgttggccaggctggtcttgaactcctgaccttgtgattcgcctgcctcagcctcccaaagggctgggattacacgcatgagccaccgcgcccagcttcaaaaagttttaagcaaagctcagaggtcttaaccacaggcacatcggaggatcatktttgaaacactttccagcttcctcaataggaatggaaaccaaactccgaattgatgactcctttgaggaagtcgagagctgtaaggaaagccagtaacaggggcaagggagagatgcgtcccgaatgatcctgtgccaattctttctggaatccttgatgtgatctca

SEQ ID NO: 917155 - DNA, 674 bp, Homo sapiens
ggttaaggaaaaaggacaccaaaacgaagaagacacagaggtgaggattcactatgactgggtagtgcagagggcgacagatggctacaaagcagccataggccatcacagtcaggagcatgccttctatacatgcaraaaggaccaagaaagacatctgtgtcaggcagcccacatgagagatgactctgctatgcgactgcatatccagaatcaccttgggaaccgtggccgaggtgagaccgatgtcagcccagcacaggttggagaggaagaagtacatgggggtgtggaggggggagtcagagctgacagccaggatgctgagcaggttcctcagcaccgtgaccagattcagggacagggacagggacagcaaagcgaggaccgactgcagttctggatcctctgagagtcccaggaggaggaattctcagacacctgtgagattccgtggctctgtgtgtcttggacaccttgagaaggaaagaggattggaaaaataaaagataaaaaccagcccttaatgctggatgcaagcaatttacaaggaacatcttcacacttccggaccatacatcgccagcaatgtttctcagttgtgacaattccaaaaatctcagaattattacgtgatttgcttttttgctatacaaggctttctgtacatacta

SEQ ID NO: 917156 - DNA, 524 bp, Homo sapiens
aagacaatagtactatttttgatagtccgattcatccgctccacctttccggaactctgaggccgggaggtgccatgcagtttccgtgtgatccccaatacctttgccgtcttctgtaccaaggcagccaaaaacgcaggcccattttctgagccgatctgtaagggcggttgaaatctaggaatcacatctcgaagaagcacaggggttacttcaygagctttctcagttcgtgttggataggcctccacccacccagagtaggtacgcccaagaactagtacacacttgttacctccacactttggcatctctgtgaagtccacctggagaccttcaaagggggctgctccataagcttctatggcgggcggaacggctggaccttgcctcgcatcatgctgtcgcaggtaacacaccgctgcctcaccgttttggcaagggctgacaaaggcgagatgtagaaataccggcctaacaacttttccagtgactcctgacctcgatgggtggtttcttgcaca

SEQ ID NO: 917157 - DNA, 524 bp, Homo sapiens
aagacaatagtactatttttgatagtccgattcatccgctccacctttccggaactctgaggccgggaggtgccatgcagtttccgtgtgatccccaatacctttgccgtcttctgtaccaaggcagccaaaaacgcaggcccattttctgagccgatctgtaagggcggttgaaatctaggaatcacatctcgaagaagcacaggggttacttcacgagctttctcagttcgtgttggataggcctccacccacccagagtaggtacgcccaagaactagtacayacttgttacctccacactttggcatctctgtgaagtccacctggagaccttcaaagggggctgctccataagcttctatggcgggcggaacggctggaccttgcctcgcatcatgctgtcgcaggtaacacaccgctgcctcaccgttttggcaagggctgacaaaggcgagatgtagaaataccggcctaacaacttttccagtgactcctgacctcgatgggtggtttcttgcaca

SEQ ID NO: 917158 - DNA, 634 bp, Homo sapiens
agggttaaaaagacataccgagaatcagtgtaaatgttgacagtctcaccctcactgagttctaaggcccgaatgaaagcaatgagttcagcttactggactgaagtggcctggggcaacgatctggcttcaacaacagtgtccagagttatcactgcataccctgcacctctctctccttgggggttgaagaagctgctcccatccacgtatagttcccagtctactgatgcccaaggctggtcccrgaggtcaggtctgctagagtcaacagagtccaacacttctatacaatcatgatcaacagggctctctgatactgggagcaaggtggcagggtgtagggtgttacaaacttcaatagttatgaggagattttcgcagagcagtttggtacttggtgagtctgacattcgttagccaatgatgtcctttagtattcattaaagtcaccacagcacgggaggcctttatgttcaggttttgcccaagagtcagcttatttgcttcttatactggcagggcagttggtgccaaggccctccaacaggggggccatcgtttagaaaccccgtctagttgttgagagaggtaggccaccggcctcggccagggccccacagtttgggttgaa

SEQ ID NO: 917159 - DNA, 634 bp, Homo sapiens
agggttaaaaagacataccgagaatcagtgtaaatgttgacagtctcaccctcactgagttctaaggcccgaatgaaagcaatgagttcagcttactggactgaagtggcctggggcaacgatctggcttcaacaacagtgtccagagttatcactgcataccctgcacctctctctccttgggggttgaagaagctgctcccatccacgtatagttcccagtctactgatgcccaaggctggtcccagaggtcaggtctgctagagtcaacagagtccaacacttctatacaatcatgatcaacagggctctctgatactgggagcaaggtggcagggtgtagggtgttacaaacttcaatagttatgaggrgattttcgcagagcagtttggtacttggtgagtctgacattcgttagccaatgatgtcctttagtattcattaaagtcaccacagcacgggaggcctttatgttcaggttttgcccaagagtcagcttatttgcttcttatactggcagggcagttggtgccaaggccctccaacaggggggccatcgtttagaaaccccgtctagttgttgagagaggtaggccaccggcctcggccagggccccacagtttgggttgaa

SEQ ID NO: 917160 - DNA, 704 bp, Homo sapiens
acctggcggcaaccccaacaatgtggacgggttaggtactgttggatgtaaagtcagtgtagcttaatgaagcaagcgcaaatcctgtaccggccggtagtccttggtccatggcttgggaacaggcaggaggggagtgttccatggagactgacaaggaacaatcattccaaaagttcttaggtgcttgagatggacctggataccttgaagggcttctctggggaccggctcctgtttttgcctyactggcagggccccagtcttaactggcaaatcccggagggttgtcttctgcccgtactcttggccaccgcttagccagagctggtcttctctcttggcccggctcagttcagaaaagtctccattcctcctctcgggggaccgtaagggtcataatgactcccgttctgggtaaccttagcaacgaagatccgtgctctgtcaaacagatagtggttctcagcttgctgagcaagttccttaacgaaaaggtcaagggacagtcaggcatgtaccaaaactgatgaatgactttatgtcctcctacagtacaagtccgaggcaagcagaaagcttgctttgctgaaacccccttggctccgatgacgtcagtagtctttttggataagggggtgaccggggcggttactaccgaatgttcagcaccgctatctacaagaaagtcaatgtctccaccc

SEQ ID NO: 917161 - DNA, 581 bp, Homo sapiens
catcacttgtccttccctctacctggagaaagtccttttcttccttagaataagtaggtccaagatcaggtgcttgagggagcagaggggctgtgactgatgcccggaagggggcagatgctgcttgtcgaggctctgagtcagcacgggagttccccaaacccaccaaggtggaagctcgctggtgtcctctgcaatgcacaactgccaccttgtggggtttccatactgcttctgataattgcaagatttcttgtggttactttctgtcttttcccccagagttcarcaggcctttttctttctatcatgctccatgcacttgaagggttaaaaaggcatacagaggatcagcgtaaatgttgacagtctcaccttcactgagttctaaagcccaaattaaaacaatgagttcagctttctgagctgaagtgccctggggcaaagatctggctttaacaacagtgtccagggttaccactgcataccctgcacctctctctctttgggggttgaagaagctgctcccatccacctatagttcctggtctgctgatgcctaagtctggtcccagaggtca

SEQ ID NO: 917162 - DNA, 705 bp, Homo sapiens
gtaggaatactctctcgtagctagaacattcattcgttcattcactccagaggtattgacggagtttttatgctctcccctcctgacactgcagtgaacaagacaaagccttagctgttgtggagctgaccccctcctagggacagacagacaatcataaattactaaaacatacggtgtgcctgatggtgttcagtgctagggagaaaaggcaggcaggaaagggagccagggagatgggctgatgtggtcatggcagctatatatgggtaataaatatcgtgggtarttttatttttctttttgatcattggtttttttccacttttctgtggcagacaggtattactaggtaatcaaaattgagtttggttttaaaaatcagtcatcatgatgtaatggagacagagctggcctggaaggtcctataaatctcttgggatccttgcttaatttgtaggtgtccttggcattcctgaagctgatggtttacgagatgatgtgccagcccatcttggctttgccatccacaggaaggctttctgcattgctgtcctgcgacaccatggccctctctgtgttccctcctcatatccccagccacagagaaggagccccaagacaataaaataagtgtgtttaaaaggattaaaaacataaaataaactttttaaaaaaagactaatgaaattttctggaagtttt

SEQ ID NO: 917163 - DNA, 705 bp, Homo sapiens
gtaggaatactctctcgtagctagaacattcattcgttcattcactccagaggtattgacggagtttttatgctctcccctcctgacactgcagtgaacaagacaaagccttagctgttgtggagctgaccccctcctagggacagacagacaatcataaattactaaaacatacggtgtgcctgatggtgttcagtgctagggagaaaaggcaggcaggaaagggagccagggagatgggctgatgtggtcatggcagctatatatgggtaataaatatcgtgggtagttttatttttctttttgatcattggtttttttccacttttctgtggcagacaggtattactaggtaatcaaaattgagtttggttttaaaaatcagtcatcatgatgtaatggagacagagctggcctggaaggtcctataaatctcttgggatccttgcttaatttgtaggtgtccttggcattcctgaagctgatggtttacgagatgatgtgccagcccatcttggctttgccatccacaggaaggctttctgcattgctgtcctgsgacaccatggccctctctgtgttccctcctcatatccccagccacagagaaggagccccaagacaataaaataagtgtgtttaaaaggattaaaaacataaaataaactttttaaaaaaagactaatgaaattttctggaagtttt

SEQ ID NO: 917164 - DNA, 738 bp, Homo sapiens
cttatggaaaatttttttttaaaaaagaaatagccagagaactagaattataagtggagcctgaagatgtgactgaattgctgcagtcccatgataaaactttagcagataaggagttgcttcttagagatgaataacgaaagtagtttcttaagatacaacctactcctggtgaagatgccatgagcattgttgaaatgacaagggatttagggatttagaatattccataawtttagttgataaagcaatggtaggcttcgagaggattaactccaattttgaaagacgttcaaccatgagtaaaatgctgtctaacagcatcacatgctacaggcaaatcttttgtgaaagaaagtcagttgatataacaagcttcatttttgtcttaagaaattgccacagtcacctcaaccttcaacagccaccaccctgatcagtcagcagccatcgacactgtggcaagtccctccaccagaaaaaatattacacttactgaaggtccaggtgaatgttagcattttttaggaataaggtatttctgaattaaggtatgtacacttttttagacataatgctattgcacacttaatagactacagtatactgtaaacataacttttttatttttttgagacagggtctcactctgtcacccaggctggagtccagtggtgcaatctcggctcactgcaatctccacctcctggactcaagtgattctcccacttcagcctc

SEQ ID NO: 917165 - DNA, 762 bp, Homo sapiens
cagctaggcacgggttccatctctgtagctctgtcctggcactgagctcagtatcaaagaaccccagataccccaggtcccctaatccaatagcccctcaccctacagctaagatttaaaaatgaagtatctgatgttgagagagacaaattaagttgtgcaatgatgtagtaaccagaacaagaaagggaagcaatccaatattcactaggtggtgagcagatagtgaaacctgacttaagagtggatgtttttaactctacataatagatgctctcttgtgaaaatgtgtagaaaacaaaataacagtctacatattgaagaatttgaattttaaaagaattgcagagtactccactgcttatgaaattcaagtaatcttacatgtttttcttatctagcttatgggtagaagcagaatgagcttctccagtgggatgaacacagacacttcatattcaacaagttcacactgagcccatcatcattgcttggaaggctgctcctcttcctgtgttctctctcttggccaatggcactgccatttccccatccagaacctgggatactgcagcagtcttttcactgcccctgtctacccctctccaakccattctctacacaactgcctacaggaatctttccaaaacattagttctgaccataactctacttttcttaagacagcactttggctccccattgacatcacagtctttagagtgatgtaatgttcatcattcggtcataagctgcaaatcc

SEQ ID NO: 917166 - DNA, 726 bp, Homo sapiens
gctttttgctgtgtttaacactttcttaaaactggcagtcaaaacgaatgctcagattcagcactttctaagtcttaaaccacacacatctcagaaatttcaaaagatgaaggaatggccaggcgcggtggctcacgcctgtactcccagcactttgggaggccgaggcgggtggatcacgaggtcaggagatcgagaccatcctggccaacacggtgaaaccccatctctgctaaaaaaaaaaaaatacaaaaaattagccgggcgcggtggcrggcgcctgttgtcccagctactcaggaggctgaggcagaagaatggcgtgaacccgggaggcggagcttgcagtgagccgagatcgcgccactgcactccagcctgggagacagagtgagactccatctcaaacaaacaaacaaacaaaaagatgaaggaatggctgcttatggacagtgaggggccactgtgtgaaccccaagttcaagcattcatctggcatgcctgagcagaaaagggaaccctggaagctgcagctcggctccactcggcagcaggaacgagccacacctcagcgcacccagcctaccaggtcaccaggaacaaaaataagccccagtgtgagccaaatggcaggtggtgactgggctggtcagaggacccaccattctgcctcggctcagagaaggagaggcaaatcaaccctggcccatcatatcacatcctcgg

SEQ ID NO: 917167 - DNA, 576 bp, Homo sapiens
  misc_feature 101, 113, 143, 153, 188, 261, 262, 268: n = A,T,C or G
gaaccaaaaggggttctgggacaaatctcaaaccatgggcaagcttcgctcaagcactcaaggaacattcgagctagatgggccctcagagactcagatcntatttcttcgtntcagtgagagagattgaggcccagtgaggnttctgcaccntagacaggccccatccttagagggaccagtgaggngaagtcagaccccagcaagacggaggaagtcccaaattggagacaatcagaaagacaacaccagtgcagaccnntaaacncaacaccccacstgctccaagttgggctccagtcgcataaggatgagctgggcccatgcaaactccctgtgtgtttcctgcatgtgggccaccaggcaaccaccctctaacttgaacccctgcccacagaccccagtaccacccaatggttggccaggggcacccccaaaggattggatcatgccgaaggtagccacaggcagatgacagtgtcaaagggaagggggataagtggtttttgttcacgcagaccataggagtgaaggttgtagcattcccaaatgtaagtccgcgtggctaagaccacg

SEQ ID NO: 917168 - DNA, 576 bp, Homo sapiens
  misc_feature 101, 113, 143, 153, 188, 261, 262, 268: n = A,T,C or G
gaaccaaaaggggttctgggacaaatctcaaaccatgggcaagcttcgctcaagcactcaaggaacattcgagctagatgggccctcagagactcagatcntatttcttcgtntcagtgagagagattgaggcccagtgaggnttctgcaccntagacaggccccatccttagagggaccagtgaggngaagtcagaccccagcaagacggaggaagtcccaaattggagacaatcagaaagacaacaccagtgcagaccnntaaacncaacaccccacgtgctccaagytgggctccagtcgcataaggatgagctgggcccatgcaaactccctgtgtgtttcctgcatgtgggccaccaggcaaccaccctctaacttgaacccctgcccacagaccccagtaccacccaatggttggccaggggcacccccaaaggattggatcatgccgaaggtagccacaggcagatgacagtgtcaaagggaagggggataagtggtttttgttcacgcagaccataggagtgaaggttgtagcattcccaaatgtaagtccgcgtggctaagaccacg

SEQ ID NO: 917169 - DNA, 607 bp, Homo sapiens
  misc_feature 125, 137, 167, 177, 212, 285, 286, 292: n = A,T,C or G
cagctagagcagaagggtctaaaggaaccaaaaggggttctgggacaaatctcaaaccatgggcaagcttcgctcaagcactcaaggaacattcgagctagatgggccctcagagactcagatcntatttcttcgtntcagtgagagagattgaggcccagtgaggnttctgcaccntagacaggccccatccttagagggaccagtgaggngaagtcagaccccagcaagacggaggaagtcccaaattggagacaatcagaaagacaacaccagtgcagaccnntaaacncaacaccccacgtgctccaagttgggctccagtcgcmtaaggatgagctgggcccatgcaaactccctgtgtgtttcctgcatgtgggccaccaggcaaccaccctctaacttgaacccctgcccacagaccccagtaccacccaatggttggccaggggcacccccaaaggattggatcatgccgaaggtagccacaggcagatgacagtgtcaaagggaagggggataagtggtttttgttcacgcagaccataggagtgaaggttgtagcattcccaaatgtaagtccgcgtggctaagaccacgggcaggg

SEQ ID NO: 917170 - DNA, 576 bp, Homo sapiens
  misc_feature 101, 113, 143, 153, 188, 261, 262, 268: n = A,T,C or G
gaaccaaaaggggttctgggacaaatctcaaaccatgggcaagcttcgctcaagcactcaaggaacattcgagctagatgggccctcagagactcagatcntatttcttcgtntcagtgagagagattgaggcccagtgaggnttctgcaccntagacaggccccatccttagagggaccagtgaggngaagtcagaccccagcaagacggaggaagtcccaaattggagacaatcagaaagacaacaccagtgcagaccnntaaacncaacaccccacgtgctccaagttgggctccagtcgcataaggatgagctgggcccatgcaaactccctgtgtgtttcctgcatgtgggccaccaggcaaccaccctctracttgaacccctgcccacagaccccagtaccacccaatggttggccaggggcacccccaaaggattggatcatgccgaaggtagccacaggcagatgacagtgtcaaagggaagggggataagtggtttttgttcacgcagaccataggagtgaaggttgtagcattcccaaatgtaagtccgcgtggctaagaccacg

SEQ ID NO: 917171 - DNA, 665 bp, Homo sapiens
aaacataggtgctcaaaaaataaacatgtgcatgaatatttacagcagtaatattcatacagtcaaaaagtggaaacaatccatatgcttgttgactcataactggacaccaaattttcagctataacaaagaatgaagtacttatatatggtataatattggtgaaatttgaaagcattatgttaagtgcacaaaaggacaaatattgcttgattttattcacatgaaacatcaggaattggcaaatcaattgggatgtaaattagattagtggtcattagggctcagggaagcagaatagggtgtaaccactttatgcataatgggattttggaagggacatgatgaaattgccctggaacattgtgaatatactaaaagcaagtgcattgtatgctttaaaatggttgttattaattttctattatgtgatttttaccytaaaaaaagagaaaatagccttactctatacataataaactcaagatatgttacaaatttacatgtgaaatccgaaatactataatatttaaggaatagctaagtagaataacactgaaatttaacataatgaaacatttccttaaaaaagaaaaaaagcacagtaattaaaaaggaaaataatattttttctctccattaagcatgccattaactgagtata

SEQ ID NO: 917172 - DNA, 776 bp, Homo sapiens
aatttcttctgaaatcactaatgagaggattagaggtctggctgttgtctgtacctcatatgactcccagtgcagacaattgtttctatggagcacagacagttgaaaggattgacctcctgcctagaatagtttctcctgtgcttcttatccttcttgtggagatttcagattatctgaattgcttttctatcttaagaaaaaacgcaacaattctcccacctgagaggaatgtaaactgtagtaagttagctgaaccaatccgtaaaatttttacattgtttgttgcaaaatgcagcgctggtgtctccatcactaaccttttctatccctcattgctctttgactgcactaggatacctctaggcaaatctgtattcccgagacagagtgcccttttggtgagctataagcacactcaatggtaggctgaaatactagcttttatctatggtgaaatggaatcatawcagtgattttttaaaaaaggaaatttaactcttgctatggtttgaatgattgccccttccaatctcatgttaaaatttgatccccaatgttgcaggtggggcttactgggaggtgtttggtcatggggttggaccttcatgaatggataataccctcccttagaaatctaaagctatcctccctcctcggtgccctcaggaatgagtgtaccattctttattcacctgtaattcctttacccatcctttttgagatattaattacatgtatgttacactgctgcatattgtctgacgtatcagtga

SEQ ID NO: 917173 - DNA, 776 bp, Homo sapiens
aatttcttctgaaatcactaatgagaggattagaggtctggctgttgtctgtacctcatatgactcccagtgcagacaattgtttctatggagcacagacagttgaaaggattgacctcctgcctagaatagtttctcctgtgcttcttatccttcttgtggagatttcagattatctgaattgcttttctatcttaagaaaaaacgcaacaattctcccacctgagaggaatgtaaactgtagtaagttagctgaaccaatccgtaaaatttttacattgtttgttgcaaaatgcagcgctggtgtctccatcactaaccttttctatccctcattgctctttgactgcactaggatacctctaggcaaatctgtattcccgagacagagtgcccttttggtgagctataagcacactcaatggtaggctgaaatactagcttttatctatggtgaaatggaatcataacagtgattttttaaaaaaggaaatttaactcttgctatggtttgaatgattgccccttccaatctcatgttaaaatttgatccccaatgttgcaggtggggcttactggraggtgtttggtcatggggttggaccttcatgaatggataataccctcccttagaaatctaaagctatcctccctcctcggtgccctcaggaatgagtgtaccattctttattcacctgtaattcctttacccatcctttttgagatattaattacatgtatgttacactgctgcatattgtctgacgtatcagtga

SEQ ID NO: 917174 - DNA, 572 bp, Homo sapiens
ttacctaagcaagcctgggcaatggagggcgcccctcccccagcctcgctgcctccttgcagtttgatctcagactgctgtgctagcaatcagcgagattccgtgggcgtaggaccctccaagccaggtgtggcatatagtctcgtggtgcgccgtkttttaagccagtctgaaaagcgcaatattcgggtgggagtgacccgattttccaggtgcgtccatcacccctttctttgactcagaaagagaactccctgaccccttgcgcttcccaggtgaggcaatgcctcgccctgctttggctcacgcacagtgagcacacccactggcctgtgtccactgtctggcactccctagtgagatgcacccggtacctcagatggaaatgcagaaatcacccgtcttctgtgttgctcacgctgggagctgtagaccggagatgttcctattcggccatcttggctcctccccccgaaatttacccatttcttgtaggtgttctactttgtttgcataaacatgttcatcatagtctctgagagttttttgtatttctgtgtggttggcggtaa

SEQ ID NO: 917175 - DNA, 582 bp, Homo sapiens
cagttctgttggagtttgctggagttccactccagacactgtttgcctgggtatcaccagtggaggctgcagaacagcaaatattgcagaacagcaaatattgctgcctgatccttcctctggaagcttcgtccaagaggggtagccgtctatatgaggtgtctgtcagcccctactgggaggtgtgtcccagttaggctacacaggggtcagggacctacttgaggaggcwgtctgtccattctcagaactcaaacgccatgctggaaaaaccactgctctcttcagagctgtcagacagggatgtttaagtctgcagaagttgctgccttttgttcagctatccctgcccacagatgtggagtctagaggcaatgggccctgttgagctgcggtgggctccacccagttcaatcttccctggccactttgttcacctacttaagcctcagcaatggtggacgcccctcccccagccaggctgccacctcacagatggatttcagactgttgtgcgtgtgggtgtgggacccactgagccaggcacaggagagaatcacgttgtctgctagttgctaagac

SEQ ID NO: 917176 - DNA, 629 bp, Homo sapiens
tttgcccttaggaagctctcagtctgatggggaagacgctgtccctgccctcaggaggctcttggtctgagaggggagacataattcattctctctgagtgccctcagtctgatgggggagacaccgtccctgccctcaagaggctccaagtctgatgggggaatattggctctgtcctcaggagtccggtctaaggagrgtgtctcagccccactcctgagggtaaggattccatggccacagtctggacagtgggccagtcacgcttgacagtgggcatgttgccagcaggaccctttgggatgtgtctgagcctggaggtgagtggcacgggggctggcaaggctagggtggaggcaagcaggttccgctgtctgccgccttcacacctttctccttccacatgcatagatgagcccaccagccccagcactgacctccaagccaagcatgtccctgcctttgctgtggtctccagtgccatgaactcagccgctgtcctgggcaccagcccatcttccccgaccttcaccttcaccctcggacggcattactcgcgggactgcagtgagcgctccccacacccacagccccaccctttccctcactgcccagtcccaggggtctc

SEQ ID NO: 917177 - DNA, 631 bp, Homo sapiens
aatagatttaaaaaacattttattttcttaaacctaacaattcaaataacataaartaatattacgtttctattaagcattcatttttatagagaccaaaacttctttacaaaatgtcttcatgtataatataaattagatgtgagaaaagcaataatcataatcattgcctaaatccacaaaataagtagatattctataatatgtatttcagtaatcacaatgtagtggattcaggcagagatgagagacactctgattttagtagaaaaagactgtgctaaattacctctttgccttttttcactctgttcctaggataccaatataataaatagtacctttagaactgtgatacactgagaaaagttctaatttaaatctcaatagatgattacacaggtagtgtttacacacacacacacacacacacacacacacacacacacacacacaatgacaggagtttttaaagatattagtatctcggaatttttgtattctgaaaactgtccaagcttttatcattaaatcacttgttatgaaacacactttagaaacaccctttcctatttttaatagcctatgatagtcatacagaatgagttaatcataattgattggtcaattg

SEQ ID NO: 917178 - DNA, 630 bp, Homo sapiens
tacatcttagatttcctggcatctctcagttcctgtttccaggcctgtagggaaaagaaagagagatcagactgttactgtgtctatgtagaaaaggaagacataagatactccattttgatctgtactaagaaaaattgttttgccttgagatactgttaatctgtaactttagccccaaccctgtgctcacacaaatatgtgctgtatggaatcaagstttaagggatctagggctgtgcaggatgtgcctggttaacaatatgtttgcaggcagtatgcttggtaaaagtcatcgccattctcgattaaccaggggcacaatgcactgtggaaagccacagggacctctgcccaagagagcctgggtattgtccaaggtttccccccactgagacagcctgagatatggcctcgtgggaagggaaagacctgaccgtcccctagccctacatccataaagggtctgtgctgaggaggattagtaaaagaggaaggcctcttgcagttgagataagaggaaggcctctgtctcttgcatatccctgggaatggaatgtctcggtgtaaaacccactagtacatttgttctattctgataggagaaaaccaccctgtgcctggagttga

SEQ ID NO: 917179 - DNA, 763 bp, Homo sapiens
ccttctcccttctattttagtttgttattctccccttttaagagcttcttccttataggtttaaccctgataggcagacacactttgttctcattctctttttttttttctgtcaccacagaatattttgcatgccatagagtttcaaactgtcttgaaatgaacgggttcacatttatgttctggttcacagagtgagtatctctatccacgtggggcaggcaggtgtccagataggcaaygcccgctgggaactgtactgccttgaacttgcaattcagcctgacggtcaaatgccaagtgacaaaaccatcggtggtggggatgactccttcaacatgttcttcagtgagattggggctggcaagcacgtgcccagagcagtgtttgtggacctggagcccactgtggttgataggtcctcgggcactggatggcagctttcctgggagagtgggagagcattggtaaaaccccacgtgcgctcctgtgaatccccctgcagaatggatgggatagacaagcaaatgcccatggcattgttagggcggaaactgaaagtttcatgtttagtgtatgtgagactcagctcctaatttaggatgtatgggaaaagctgctttgccagcagtaagatgggctgtggagagattcccctgtggctgcctcagccctgcacaggtggccctgcctgcagggtgtggggcattgattccctcctgaatgctgtgcactgtctcatgctggtgcatgaagagtcttg

SEQ ID NO: 917180 - DNA, 757 bp, Homo sapiens
agactcttttcatctggtcggcaggcatgtgtcagtatcacttggaaggaaggagggaggaataaagggctggccagaaagatgcttacagggttaaagcacatttgtcagccacgacgacatcctccatttccttaaaagcagaaacaaccaaaatacccaatgatataagcctagcttagcaaatttcagtgtagctactcaatagacttaatagtgagtcattagaattgttgggaaatgtttatgatatcaaaacatcaaatgaaaaacaggattaaaacgatgaaaatacatgcctgaccggccgcggtggctcacgcctgtaatcccagcactttgggaggctgagggggcggatcacctgaggtcaggagtttcagaccagcctgaccaacatggagaaaccccgtctctaccaaaaatacaaaattagccgggcatggtggtgtaatcccagctacttgggaggctgaggcaggagtatcacttaaacctggaaagcggaggttgtggtgagctgagatcagcgccattgcactccagcctgggcaacaagagcgaaactccgtctcaaaaaaacaagaaagaaaaattagctgggcatagyggcgggcgcatgtaatcccagcaattccggaggctgaggcaggagaataacttcaactcgagaggcggaggttgcaatgagccaagatcgcaccactgcactccagcctgggtgacatgagtgaaactccgtctcaaaaaaaaagaa

SEQ ID NO: 917181 - DNA, 655 bp, Homo sapiens
tattcaagttataggtatatttaaaagacctttatatttttctcttcttaaatttttctgggaaaagggtttttttctccatcaactgaattatttttctccattctttgtcttgacacttttaacacatgcacaagaggccctaagataacttctggtaacatgggattccttgggaaaaacagagaccacagactccattttgggggggaaaaccctctgttttcctcataaaaccccaggaattaaaagcagatagttccctctcaaaatcaaaggctctgtactattttgcrttgtgttatctgacagttttaagtttgaggggcatcaaattactgcacattacagagacctttggtgtctaataaccaggtaaggaaaacactttaagggatggctaatagtagttataaatcagagaagcatgttattggccacctgaaagatatggaaatatccccaccccccactgagagatgaggctcctgtgggaaatgggctgattacaaaataagccaattgtctttgggttgccttgcaatgaaatgcatagtagaggcactgcacactgtcttctcccatagaatctccctccttttggggatccaagatccagaataaaatggcacccttaattttgaggatctgcctt

SEQ ID NO: 917182 - DNA, 787 bp, Homo sapiens
tctattgttgtatatcacacagcagagtgaacatagttaacataatttattgtacatttcaaaatacatagaagatttgaaatattcccaacatatagaaatgacaaatgctcaaggtgatggatatcctaaacactaattcgatccttacatactgtattcatgcatcaaaatagcacgtgtaccccataaacatatacaattataatgtatcagtaaaacatgttctttaaattaaaaaaaactgtcaattctgaattctttactcagtgaaaatatctttcagaagggaaggcaaaataaaatggttttaaccataaatatacttgcactattcatgacctgcagacacacactatagaaaataataaagaacacttctcagatagaaaatcatactaaagatgtgactctgaataaagaaaacaaaaacatcaaatatagtaactacataaaaacatayagaaatggtaaataaacatagatataaacgacttaaattacattacaaaacaactagacttaatagacaactatagaacagtccatccaacacagcagaatacataataatctcaagtgcatatggaacactctccagggtagaacctgcaaaaaaaaaatgagtaccttaaaaaaatagaaaatctataaagtatattctttgtgttacttcactcttgtattgctataaagaagtacctgagcttgggtaatccataaagaaaagaggtttaattggctcatggttatgcaggctctacaggaaatctggtgccagtatctg

SEQ ID NO: 917183 - DNA, 617 bp, Homo sapiens
ggagtgtgcttcatgctctaggaaggagccactttgcacacagatgatccagggcccagccatccttccagggtgaataattaatgtcttctctcatggtgaactctaggattcaagccatctaatgtttttgaagccactgtcattatatttaattgatgatgacaggtggccaccaatgatgaatattttcccagggggagtctccccaagtggctttagacttcctcacatggccccaggggattaaatggctcctgattactcagaggataagaggttctgtcttatcttgttcttttcttatttgtcttatgtgtctttcctgccccaggcctgggatcccccactgatctcccttcccttagtgagaggtggtatttggagaccacattctggaggctcccttatgtcccscatttgaaaaagacaacggcagccaccaccccagctgtcccacccaacatgaggccagattcaggggtgcagggatgctcccaaggttaccctaacagatgtgactggcacttcatattgggaccagccaggcctcactgaccaggcctatccaactagaactactccagaaggtggggctgaaacccaccaaggttccc

SEQ ID NO: 917184 - DNA, 596 bp, Homo sapiens
acattctggaggctcccttatgtcccgcatttgaaaaagacaacggcagccaccaccccagctgtcccacccaacatgaggccagattcaggggtgcagggatgctcccaaggttaccctaacagatgtgactggcacttcatattgggaccagccaggcctcactgaccaggcctatccaactagaactactccagaaggtggggctgaaacccaccaaggttcccagaacactgcactctagggcaatcagcctctgcatgggaggagaggagcaccctctgcaccaccccatggtgttaccaaaagttgaaccattggttggttcaactttgcagagaagrgaccacctaacccatctgtggaaattcactccttagcgacactaatgccctctaataaattcaatcctgggcctgagtgatggttggtgcaaaaaacaaattcaagatcccagtgtcctccagaagcctggatttccagggatcctgctgtgggtcacaggacgtcaccggtccccttctctttgtgggttgagtgtgggggccatgtggactccctcatgagcagatgccaccaggaccactggccccagc

SEQ ID NO: 917185 - DNA, 677 bp, Homo sapiens
tgatcagggagcagcaggccacatctcagcagtcaggggaggcgcttgctgtggggaatactgttggggactgcatggtgccaggagtgtgtcccaggtgtgagctcttcaggtgatgggcccagaccaggatgcaggtccaggctgtgtgtgtccaggccccacactgcacatgcccatccactgtgggtgccccccgtgcyggtgacactccagagcacaggctgtgtgggtcacccgtgcatgtaggggactgcagagcacacacatgtgggtgtgtgtgtaagccgggggagctgaagtggacagcagagatcccccacacgtagagctcctggaggaaaccacactgccagtgaggcctatgacctcccttgagaagctctcctctgggccattgcagctctaatccagcacacatggcctataggtaggaggctgtccccatgggttcaggaggcggacttgggcagtgatctgtgagctgctccttcaggacagctgggccaaggatgctggagctcagaccttgcagtggggtctgtgtccctgtggtcaacgtcattcttcccacaacccccaattcccattccaagcccatcccatcataacctccagtgctgaggatgtggggggcatcaaggaccctccccaccattcccaacttctcaaagagg

SEQ ID NO: 917186 - DNA, 677 bp, Homo sapiens
tgatcagggagcagcaggccacatctcagcagtcaggggaggcgcttgctgtggggaatactgttggggactgcatggtgccaggagtgtgtcccaggtgtgagctcttcaggtgatgggcccagaccaggatgcaggtccaggctgtgtgtgtccaggccccacactgcacatgcccatccactgtgggtgccccccgtgctggtgacactccagagcacaggctgtgtgggtcacccgtgcatgtaggggactgcagagcacacacatgtgggtgtgtgtgtaagccgggggagctgaagtggacagcagagatcccccacacgtagagctcctggaggaaaccacactgccagtgaggcctatgacctcccttgagaagctctcctctgggccattgcagctctaatccagcacacatggcctataggtaggargctgtccccatgggttcaggaggcggacttgggcagtgatctgtgagctgctccttcaggacagctgggccaaggatgctggagctcagaccttgcagtggggtctgtgtccctgtggtcaacgtcattcttcccacaacccccaattcccattccaagcccatcccatcataacctccagtgctgaggatgtggggggcatcaaggaccctccccaccattcccaacttctcaaagagg

SEQ ID NO: 917187 - DNA, 651 bp, Homo sapiens
ccttttcctagagaccccatctcagtcctggttctggatccagggcttacggtgtcccccacctccaggagagtcagtccctggcaggtggctccccaagcccaatcccctccattcctggtcccagttgctccctcaacatccaaaaattcctgacatcttcagtcagggactgctctcccaagggaagagcacatggggctctgggtctggggctgtgggaaagaggaaccccggtcctctcggggcccagcaccgagcgcagtaggtgttcgaggggggctgagtggtgacatgtgagactctttgtagaaccccagattcaggttcgtgtacctgatatgcagcggaggtcaaaaactgacacaagtgcttggagatagaaaaagatttatttcatttggctaaagtaagaagacaagaaagcaaattcctccactccatgttaacaaaaggatgaagcagggagtttttrtgtggctaaggagtgagggaggtggcatttcaggggaaaagtctgtgtttattcagtctcaggtaacatcttaagcaactagacttgcgggcgacagcggctggtctctacgtccctaaaggcattcactcctgcaaaatacttttgtgactctgaagttatctcctccttcttga

SEQ ID NO: 917188 - DNA, 577 bp, Homo sapiens
agccagggctaaaaggaacaaaggtacatctcaggccattgcttcagagggtgcaagccccaagccttggcagcttccaggaggtgttgggcatctgtgggtgcacagaagacaagaattgatgtttgggaacctccacctagatttcagacgaygtatggaaatgcctggatgtccaggcagaagtctgctgcaggggcggaaccctcatagaaaacctttactagggcagtgtggaggggaaatgtggggttagatcccacacagggtccccactgggcactgcctagtagagctgttagaaaaggaccaccattctccagaccccagaatgttagatccactgacagcttgcaccatgtacctggaaaatccacagacactcaatgtcagtcatgaaggcagcctggagggggaccatgtcctgcaaagccacaggggtggagcttctcaaggtggtgggagcccaacacttgcatcagcatgacttggatgtgagacatggagtccaaggagatcattttggaacttttagttttaatgattgctctattggatttcagacttgcattgagcc

SEQ ID NO: 917189 - DNA, 577 bp, Homo sapiens
agccagggctaaaaggaacaaaggtacatctcaggccattgcttcagagggtgcaagccccaagccttggcagcttccaggaggtgttgggcatctgtgggtgcacagaagacaagaattgatgtttgggaacctccacctagatttcagacgacgtatgsaaatgcctggatgtccaggcagaagtctgctgcaggggcggaaccctcatagaaaacctttactagggcagtgtggaggggaaatgtggggttagatcccacacagggtccccactgggcactgcctagtagagctgttagaaaaggaccaccattctccagaccccagaatgttagatccactgacagcttgcaccatgtacctggaaaatccacagacactcaatgtcagtcatgaaggcagcctggagggggaccatgtcctgcaaagccacaggggtggagcttctcaaggtggtgggagcccaacacttgcatcagcatgacttggatgtgagacatggagtccaaggagatcattttggaacttttagttttaatgattgctctattggatttcagacttgcattgagcc

SEQ ID NO: 917190 - DNA, 767 bp, Homo sapiens
gtctcagtaaatttaagaaaatcaaattatatcaagtactctctctgatcacagaggaataaaattggaaatcaactccaaaagcaactctcaaaaccatgcaaatacatagaaataaaataacctgcttctgaaacatcattgggtcaacaatgaaatcaagatggaaataaaaaaattctttgaactgaataatagtgtcacaacctatcaaaacctctgggatacagcaaaagtagtagtactaagaggaaagttcctartgttaaatgcctacatcaaaaagtctgaaagaacacaaatagacaatctaaggtcatgcctcatgaaaccagagaaacaacaatccaaactcaaacccagcagaaaaaaataaataatgaagatcatagcagaactaaatgaaattgaaacaaaaaaatacaaaagataaatgaaacaaaaagctggttctttgaaaagataaataaaatttatagaccattagtgagattaaccaagaaaagaagagggaagatccaagtaagctccattagaaacaaaacaagagatattataactcataccatagaaatacataagatcaatcaaggctactatgaacaccttgatatgcataacctagaaaacctagaggagatggataaattcctggaaatatacaaccctcctaaattaaaccaggaaaatatggaatctctgaacataccaataacaagcagtgagactgaaagggtgatttttaaaattgccaacaaaaaacaagt

SEQ ID NO: 917191 - DNA, 605 bp, Homo sapiens
aaataaaaaaattctttgaactgaataatagtgtcacaacctatcaaaacctctgggatacagcaaaagtagtagtactaagaggaaagttcctagtgttaaatgcctacatcaaaaagtctgaaagaacacaaatagacaatctaaggtcatgcctcatgaaaccagagaaacaacaatccaaactcaaacccagcagaaaaaaataaataatgaagatcatagcagaactaaatgaaattgaaacaaaaaaatacaaaagataaatgaaacaaaaagctggttctttgaaaagataaataaaatttatagaccattagtgagattaaccaagaaaagaagagggaagatccaagtaagctccattagaaacaaaacaagagayattataactcataccatagaaatacataagatcaatcaaggctactatgaacaccttgatatgcataacctagaaaacctagaggagatggataaattcctggaaatatacaaccctcctaaattaaaccaggaaaatatggaatctctgaacataccaataacaagcagtgagactgaaagggtgatttttaaaattgccaacaaaaaacaagtccagg

SEQ ID NO: 917192 - DNA, 605 bp, Homo sapiens
aaataaaaaaattctttgaactgaataatagtgtcacaacctatcaaaacctctgggatacagcaaaagtagtagtactaagaggaaagttcctagtgttaaatgcctacatcaaaaagtctgaaagaacacaaatagacaatctaaggtcatgcctcatgaaaccagagaaacaacaatccaaactcaaacccagcagaaaaaaataaataatgaagatcatagcagaactaaatgaaattgaaacaaaaaaatacaaaagataaatgaaacaaaaagctggttctttgaaaagataaataaaatttatagaccattagtgagattaaccaagaaaagaagagggaagatccaagtaagctccattagaaacaaaacaagagataktataactcataccatagaaatacataagatcaatcaaggctactatgaacaccttgatatgcataacctagaaaacctagaggagatggataaattcctggaaatatacaaccctcctaaattaaaccaggaaaatatggaatctctgaacataccaataacaagcagtgagactgaaagggtgatttttaaaattgccaacaaaaaacaagtccagg

SEQ ID NO: 917193 - DNA, 779 bp, Homo sapiens
aattaactttcacaggacagatggcattaggttacaaataacaccagcgtcctctaaataatgcaaggaggttaaatcaaaggacagcactattttaaccccaatatctttttttttttttttttttttttttgagactgagtctcgctctgtcgccaggctagagtacagtggtgtgatctcagctcactgcaacctccacctcctgggttcaggcgattctcctgcctcagcatcctgagtagctgggactataggtgagygtcaccacgcccagctaatttttgtatttttcagtagagacggggctttaccatgttatctttaaaagtccttggaaatcaagtgaccagaaaaaaaaattcctaacacttgtatttctatattttaagaaacctctaaataatcaaaaaagagtttactcagctcggtattatttatttggaaagacaatgtagtttgtcttctgactgaccctagttctcctgcctccacgtgccattcctcagcataggtgagttcagccataagatgcaagcttcagatgggcctttcaggagcctcacccaaatatgcatgctgtcgtaactccgtcccaaactcgtattgagaacccaccattcgctaggctctagaaataccaaagtgaataaggagctcacattttaatcctttcccatgtgtgttatttgagacaacatttgttctcctaagtgaaaagaaaagactctagcccaacagttgagtgcaggaggacatggagtcctctgatacagctg

SEQ ID NO: 917194 - DNA, 779 bp, Homo sapiens
aattaactttcacaggacagatggcattaggttacaaataacaccagcgtcctctaaataatgcaaggaggttaaatcaaaggacagcactattttaaccccaatatctttttttttttttttttttttttttgagactgagtctcgctctgtcgccaggctagagtacagtggtgtgatctcagctcactgcaacctccacctcctgggttcaggcgattctcctgcctcagcatcctgagtagctgggactataggtgagcgtcaccacgcccagctaatttttgtatytttcagtagagacggggctttaccatgttatctttaaaagtccttggaaatcaagtgaccagaaaaaaaaattcctaacacttgtatttctatattttaagaaacctctaaataatcaaaaaagagtttactcagctcggtattatttatttggaaagacaatgtagtttgtcttctgactgaccctagttctcctgcctccacgtgccattcctcagcataggtgagttcagccataagatgcaagcttcagatgggcctttcaggagcctcacccaaatatgcatgctgtcgtaactccgtcccaaactcgtattgagaacccaccattcgctaggctctagaaataccaaagtgaataaggagctcacattttaatcctttcccatgtgtgttatttgagacaacatttgttctcctaagtgaaaagaaaagactctagcccaacagttgagtgcaggaggacatggagtcctctgatacagctg

SEQ ID NO: 917195 - DNA, 765 bp, Homo sapiens
ctatgtgccttttaacttctgttattgtcagcctctggatcccttagatccagttttctttcctagggctttgacttgaagcttggaattgagtttgagataaaaaaaaaaaaacgtgtctcaggggttggcatggactcattactataagccaaaatgctaaggtgaatctgtaaaattgagtgctccttcaacaagggagagaaaaagatgtactgtgacatgcccagataactggtggctacagttatacttgctaatatatgagtgcatggggcttggctttggttacctcccttggtcttactttccccaaaaggaaacctccaggtgatgggtaccctttttattcccatcacccaacaggatctgcaggataattgatcagaactagaatattcatccagatttttatattacccaaccccttttgttcttctgagctgcagtcagagatcactggttggttcataggagtaggcacrgctagtctaaaatgcaggcaaaaaacttaaaaaaattaatgtgtgtagaatttaatgacatatgataagttctaaaacataattcctgtctctctagtcctcaattttgttaaaaacaaatcatgatagtactgagttttttgcaaaatagactttagtctatatttgtcctgattatttgcacaaagtgcagcaagaataattttttttacataggccttttagcttggctttgatggaaatctgttccacaaggaatctcagatagaactttctgaaa

SEQ ID NO: 917196 - DNA, 574 bp, Homo sapiens
aggtggcaagtcttgctgaaattcaaattccaactgctggggtgggcaactttcctcttgctagggctagtttaaatgctccctacatgagtgggcatcaactgaatttgtctagttttgctttctgctataataaaggcagcactgagttcaatgtctcacagttgctggctctctctctcccaagaccacagaaatgctctctgcacctcactactgctggggatgggaggaggtcacatcagcaattcaagactgttttgcttacctctttcagtgcctttttcagtgatatgaagttaaaatcagstatcatgagtgcctacctgatttttggttcttcgaaggtggcttttttgtgaagatagttcttaatttggtgtcctctgagggtgggatgatcagtgaatcccctttgttccaccattttcctccacccttcttttctttaatttctaaagcaaatgatttgtgtccttttcttccctctttctctaagagtgcaattcatcgattataactgtattcaactttttggaatcttctttcctcttttatttttttctgcttacac

SEQ ID NO: 917197 - DNA, 569 bp, Homo sapiens
taagatgtacatgttagatccatagctcgctgggcggggtggctgatgcctctaatcccagcactttgggaggctgaggtgggaggatcacttgagcccaggagttcaagaccagcctgggcaacatagtaagaccccgtctctaaaaaaaaaaaaaaaaaaaaaaaaaaaaaaaaaatctatagctcccttctcccctaatgacctggctatgaagctccacctctcaaaagtctggtgtgttctcaggacttacctgcacagacaacctcttcctcccttctgagcttcccaacacacacagctaagagctccctggcctgctgagcccatgccatctctttccttctagytccttcttttccctattcttgttgtcaaggccttgcaccttccacagtggccacattcttgcttccaagaggtttgaacattgcttggtttgaatcttgatcctgccacttactagttacatcatcttgggcaagatattttacttctctggcctagtttcctcatctataaaatgaactgctgtgaaaattaatggaaataatatgtattaaaaa

SEQ ID NO: 917198 - DNA, 781 bp, Homo sapiens
cacaaaagaaaacaaccttaactcaagtctggcatgagatgctgagggttttttttgtaatcgtaagcagtatggagaaagaatttgttagcacacttccagcactgcccatgggagaagggactctagcttttgggrgaaaaatgaaaaacacggcaaaataagcacagcaggttgctacagttgcagaaggcatgccattccttgaggccctggttttgatggtttaagacttagggatgacatttacagactgaggtcttagtctacataagtttgagcttatcttatcacctcaaaagataagctcttgcctaaaagaatattgtagagcgaagagatggtaatggtgcatactggatggactttattcaagtgtccaaagagtcgttcaacaaatacatcattcacccagcaaacactctgagcacccactacattctaggcactttgctaagctctgggatacaaagacaaactagatacggctccacacttggagaatttcacactctaagagtgatgctagatgtgtaaacaaatactgaaatggatataactgaggtatgaagagaataacgaagagaataacaaagagagaagaagtctctgattggtggggagaggtatgggtggatttggcggggggctcctccacagaagatgggatggtattggcagactctaataggctgattgccaggcagtaacaggcattctggcctgaaggaacaacatgtgcaaatgcactgaggcataaagagtatggtatgctcatata

SEQ ID NO: 917199 - DNA, 619 bp, Homo sapiens
ctaaccaggaggttgtgatgtccttcttattctcttactcctctctctctctctctctctctctactgtgaaggtttgaatcttgtgtctaacatttatgaattagacatgttatttaatgccactgaacattagtgaattcatctataaaatggagtagaatgtatataaagcctctccccttcccctgcccatagcccatcccacttkctaatactttagtgtgggtgttccacttagttgtctattcaaatgtcaaatcactgttctggtcatggtgtaatattcctaccagcagggacctgatctgtcttgttctttctctttaatacctaaaaaagtgcttgggacaataaatgttggtggaattaatgaatgtcaggaaaatccacttcatctccagtcttccttctgccattagcaagctgtaagtaaccttcacaaactcatctgagctgctttggctacagtttctccacctgtaaaacaagatgtttgcagtacaaagtctttggttctctaagacatgctttctctgttaggagattattatgaccttcagttcttttctctgctcagctttcatcattcaggcacatttcacatccaaaaggcatcc

SEQ ID NO: 917200 - DNA, 621 bp, Homo sapiens
gcccataatcacatgacctcagaagaggacactgtggctcagatgaaactatagccccaactgtcatcttgatcacagccttgtgagaccttgagcagagaagttaattgagccttgtctggactaaggtaataaatgcgtatgttatcttaagccatttcatttgtggttcccttagtcagtttgggcacttataacaaagtacttcaaactaggtggcagaaatttatttgtcacagttctggaagctgcaagtccaagatcaggatgccaacrtgattgggttttagtgagggtattcttccgagttacagactgtcagctttttgttgtatccttacatggtggaaagagggcaagagagctttctggttcctttataagggcactaatcctatttgtaagagctccaccctcatgacctaattactgcccaaattttcaccttctaataccatcacattgaggttagaatttcaacatatgaatttgggggggaaacacacctttagtccctaacagtggtaatttgttaggcagcaacagaaaatgaacacacctggtaacagtcgattgtatgccaggtattgtcaattttaacttgttcaatttgtattccta

SEQ ID NO: 917201 - DNA, 525 bp, Homo sapiens
aagggcactaatcctatttgtaagagctccaccctcatgacctaattactgcccaaattttcaccttctaataccatcacattgaggttagaatttcaacatatgaatttgggggggaaacacacctttagtccctaacagtggtaatttgttaggcagcaacagaaaatgaacacacctggtaacagtcgattgtatgccaggtatygtcaattttaacttgttcaatttgtattcctaaaaatactcttgatctttgtccttaacacagttagattacttggcaacagttaaatcctctcaggaattgctgttaggctttcttctagaaagtgtttcatctagaatgacttttccctgactactgagtcaaacatcttctgtatatgttacctgattctccataaatcatgagcttttccactctggctgttgggaacagaaacttctccaggccctgggtgagctctgagtattattctctctaatcctttgagtagttctttccccagccttggctaattt

SEQ ID NO: 917202 - DNA, 653 bp, Homo sapiens
cctccaatattctgccatcagtgactcagcgctcatgactcatctctccttgagggagcctgtctttgcctacattttaggctgcttggtttccttgtcattttattgttattgtttttgttattttttgagatagagactcactctgtcacccaggctggagtgcagtggtgcaatcttggctcactgtaacttctgcctcctgggttcaagcagttcccctgtctcagcctcctgagtagctggggttacaggcatatgccactatgcctggctaagttttgtacttttattgtacaaaaattattttgtacaatttttgtacttttagtagagacatggtttcaccatgttggccaggctggtctcgaactcctgacttcaagtgatcctccctcctcagcttcccaaagtactgcgattacaggcatgagccaccgctcccagcctccttgtcattttagctctstgattggttaaaaaagaattacaattttttagtttatctagcttttcttattggagtaggagcgatgctctttccaggttattacactctggataatagtagaactcaactagatatttttaaaatccaagctcacatatcttctcttgtctcagttttctttttattcaccctctgtcctgag

SEQ ID NO: 917203 - DNA, 616 bp, Homo sapiens
taaagcaggcagaaaaacatgaaaagactagactggcttagcctcccagcctacatctttctcccatgctggatgcttcctgtcctcaaatatcggactccaagttcttcagctttgggactcagactggcttccttgcttctcagcttgcagagagcctgttgagggacattgtgattgtgtgagttaatactctttaatmaactgtcttttatatatatatctatcctattagttctgtccctccagagaaccttgactaatacagattttggtacctggagtggagtcagtagagacattccttctaaggtgaaggataagttgctgcatttggcccctcctacaaccaagaaagaggcacagcgcctaatgggcctatttgatttggaggcaatacattcctcagttggatgtgttactttggcccatttatcgagtgacccaaaaggctgccagttttgagtggtgtccagaacaggagaaggctctgcaacaggtacaggctgctgtgcaagctgctctgccacttgggccatatgacccaggagatccaatggtgcctgaggtatcaggagaagatacggattgtatttggagcctttggcaggctccc

SEQ ID NO: 917204 - DNA, 879 bp, Homo sapiens
ataaagcaggcagaaaaacatgaaaagactagactggcttagcctcccagcctacatctttctcccatgctggatgcttcctgtcctcaaatatcggactccaagttcttcagctttgggactcagactggcttccttgcttctcagcttgcagagagcctgttgagggacattgtgattgtgtgagttaatactctttaataaactgtcttttatatatatatctatcctattagttctgtccctccagagaaccttgactaatacagattttggtacctggagtggagtcagtagagacattccttctaaggtgaaggataagttgctgcatttggcccctcctacaaccaagaaaraggcacagcgcctaatgggcctatttgatttggaggcaatacattcctcagttggatgtgttactttggcccatttatcgagtgacccaaaaggctgccagttttgagtggtgtccagaacaggagaaggctctgcaacaggtacaggctgctgtgcaagctgctctgccacttgggccatatgacccaggagatccaatggtgcctgaggtatcaggagaagatacggattgtatttggagcctttggcaggctcccacaggtgaatcacagcagaggcctctaggattttggaacaaggctctgccatctcctgcagataactactctccttttgagagatagctcttgtcccgttactgggctttggtggaaactgaatatttgactatgggtcatcaagtcaccacgtctgcctatcacttgaactgcctatcatgaactgggtgctttctgacccacctactcacaaagtgggtcatgtccacagcattccatcatcaaatggaagtagtatata

SEQ ID NO: 917205 - DNA, 622 bp, Homo sapiens
ttttgagtggtgtccagaacaggagaaggctctgcaacaggtacaggctgctgtgcaagctgctctgccacttgggccatatgacccaggagatccaatggtgcctgaggtatcaggagaagatacggattgtatttggagcctttggcaggctcccacaggtgaatcacagcagaggcctctaggattttggaacaaggctctgccatctcctgcagataactactctccttttgagagatagctcttgtcccrttactgggctttggtggaaactgaatatttgactatgggtcatcaagtcaccacgtctgcctatcacttgaactgcctatcatgaactgggtgctttctgacccacctactcacaaagtgggtcatgtccacagcattccatcatcaaatggaagtagtatatatgtgattgggtttgagcaggtcctgaagttatatgaggaaatggctcaaatgcccatggtccccagtcctgccaccctgccttctctcacccagcctgcaccaatggcctcatggggagttccctataatcagttgacagaggaagagaagaccagggcctcgttcacagatggttctgcacaatatgcaggcaccacccaaa

SEQ ID NO: 917206 - DNA, 572 bp, Homo sapiens
gctggcactgaaaccataagacctagtccttcctgcttttccctcccctttccaaaggcaaaggagcctcactccacagccactgccacccctggccacaaggagcactgacagactaccatcaatgttccgttaaggcccaaggtctcttaagttagcttgtggtgaatgctgcctggtctgggactcatccttcagggcagtgggctcccctctggcctggggcaggtccagaaatgctgtcaagtcctggaatctggaacctcaagaacctgcttggtgctctagsccccgtggtggtgttggtacctgaagccagcaagtctcagaggctcatgatggccctcaatgtagtgcctgtgcattgctgttggttattcagggcccaagggctcttcagttagcgggtgatgaatgctggcaggatggggtcctttccttcaaggcagtgggttcccttctggcccacagtttgtctagaaatgtcatttgggaactagggctggaacaggggcctgttgactctgactggagccctatcttgctgtggctgagttggtatccaagatgca

SEQ ID NO: 917207 - DNA, 572 bp, Homo sapiens
gctggcactgaaaccataagacctagtccttcctgcttttccctcccctttccaaaggcaaaggagcctcactccacagccactgccacccctggccacaaggagcactgacagactaccatcaatgttccgttaaggcccaaggtctcttaagttagcttgtggtgaatgctgcctggtctgggactcatccttcagggcagtgggctcccctctggcctggggcaggtccagaaatgctgtcaagtcctggaatctggaacctcaagaacctgcttggtgctctagcccccgtggtggtgttggtacctgaagccagcaagtctcagaggctcatgatggccctcaatgtagtgcctgtgcattgctgttggttattcarggcccaagggctcttcagttagcgggtgatgaatgctggcaggatggggtcctttccttcaaggcagtgggttcccttctggcccacagtttgtctagaaatgtcatttgggaactagggctggaacaggggcctgttgactctgactggagccctatcttgctgtggctgagttggtatccaagatgca

SEQ ID NO: 917208 - DNA, 560 bp, Homo sapiens
aaattgtggtttatttgaaggaatagtttttgaggtccacgtctgatatttgttctgataccaggagtgctcttaccagccatcttatttcctggttttctcctgaaaactatccagcttacaggccatgctttatcttcattagatccacaaatctcaactgccttgtatgacaacgtccactgttcttgagagcactcttagctttgaactttacactctgttgcaaatgaagtcaatccctttgggaagagattaggagctacctgttttgtagcctgttcctcctccaaggcaaaatctttgagcaagagctctagagacaaggtggggacggtggcaagcttctgcctgartggcaacccctttctatgggctgaggccttggcagagtggggtgcagcagcctaaggtgctctcggcttgcctcttcagcatgtaaccaccacctcatgagcgaggcaaggaaaacttgagccgcggtttcctcagtgtgttgcatctaaggtagagcctccattaaataactgggggacagagtcggcagattaaatgagcca

SEQ ID NO: 917209 - DNA, 628 bp, Homo sapiens
ctcacaactctcatttctcccaatcttcttgcaaatctgtgcctgaagctggaagcacaacacatgaacaataactagcttggtgcttggtgttgaattaacttttttaagaaagcaggctaacaggttggaaattgttctgtcaatattttagaatctagtaatacaaaagaccccttctaaaagcacrttctgttgtgttacacaagcaaggggacaaaggtgatttcagaggtagcattcaggtgtgagcatcataattgatacatttggacccctctaaagcacaggccacagacaaaactagggcctctatgagaactgcagagttggattatgattttttatttcaagccgaagaatcttggtttaggcaaaataatggagggaaggcagagaacaaggaagagtctctgtccattccctttgaacgagagaaacaaaaaaattaaacaaaggatgttttaaaatcaaaaggtgaaagagtctgtggagacataggaggaaagaaatccatggcaatggctgagcctggagctgttgttgaggtgtggggagcttgacgataaacagcggctagcagctaggtactgcctctggaagatagccagtggggcacaaggaggta

SEQ ID NO: 917210 - DNA, 798 bp, Homo sapiens
actggtttcatctcactggagagtgtcagacagtgggtacaggacagtgggtgcagcgcaccgagtatgagccaaagcagggtgaggcatcgtcgcctcacccgggaagcgcaaggggtcggggaattccctttcctagtcaaagaaaggggtgacagatggcacctggaaaatcaggtcactcccaccctaatactgcgcttttccaatggtcttagcaaacagcacaccaggagattatgtcccacgcctgactcggagggtcctacgcccacggagcctcgctcattgctagcacagcagtctgagatcaaactgcaaggcggcagcgaggctgggggaggggcgcctgccattgctgaggctcgagtaggtaaacaaagcggccrggaagctcgaactgggtggatcccaccgcagctcaaggaggcccacctgcctctgtagactccacctctgggggcagggcatagccaaacagaaggcagcagaaacctctgcagacttaaatgtcgctgtctgacagctttgaagagagtagtggttctcccagcatgcagcttgagatcggagaacggacagactgcctcctcaagtgggtccctgacctccgagtagcctaactgggaggcaccccccagtaggggcagactgacacctcacacggccgggtactcctctgagatgaaacttccagaggaattatcaggcagcaacattttctgttcaccaatatccgctgttctggagcctctgctgctgatacccaggcaaacagggtctggagtggacatccag

SEQ ID NO: 917211 - DNA, 798 bp, Homo sapiens
actggtttcatctcactggagagtgtcagacagtgggtacaggacagtgggtgcagcgcaccgagtatgagccaaagcagggtgaggcatcgtcgcctcacccgggaagcgcaaggggtcggggaattccctttcctagtcaaagaaaggggtgacagatggcacctggaaaatcaggtcactcccaccctaatactgcgcttttccaatggtcttagcaaacagcacaccaggagattatgtcccacgcctgactcggagggtcctacgcccacggagcctcgctcattgctagcacagcagtctgagatcaaactgcaaggcggcagcgaggctgggggaggggcgcctgccattgctgaggctcgagtaggtaaacaaagcggccaggaagctcgaactgggtggatcccaccgcagctcaaggaggcccacctgcctctgtagactccacctctgggggcagggcatagccaaacagaaggcagcagaaacctctgcagacttaaatgtcgctgtctgacagctttgaagagagtagtggttctcccagcatgcagcttgagatcggagaacggacagactgcctcctcaagtgggtccctgaccyccgagtagcctaactgggaggcaccccccagtaggggcagactgacacctcacacggccgggtactcctctgagatgaaacttccagaggaattatcaggcagcaacattttctgttcaccaatatccgctgttctggagcctctgctgctgatacccaggcaaacagggtctggagtggacatccag

SEQ ID NO: 917212 - DNA, 579 bp, Homo sapiens
tgaataagttctcactctgttcattcacaggagagcggattgttaaaaagagcatggtgctggccgggtgcagtggctcatgcctgtaatcccagcattttgggaggctgaggagggcggatcacctgaggtcaggagtttgagaccagcctgcccacatagtgaaaccccatctctactaaaaatacaaaaaattagccagacgtggtggtgggctcctgtaatcccagctactcatgaggctgaggcaggagaatcacttgaattcgggaggcggaggttgcagtgagccgagatcgtgccactgcactccagcctgggcgacaagagcgaaattmtatctcaaaaaaaaaaaaaaaatagcatggtgcctcccccacccctcctccctgactccccaactcttgttcccggaatgggggtcccctctcctttctccatgagtaaaagcttcctgacatccttactggaagcagatgttcatggcctgcttcttaaacagcctgaaaaaccatgagccaaataaaccttctttataaattagcaagcctcaggtattcctttacagcaattcaaaac

SEQ ID NO: 917213 - DNA, 607 bp, Homo sapiens
actctatactgtgaagcatggctagaatacaggttttcttcaattaaagaagtgtcaaccttctgcatatagccagccgatatccccagcacattttattgaacagggtgtcctttccccattgtttattttttactttacagaagatcggttgattgtgggtatgtggctttattttggagttctctattctgttccattaacctatctgtctttgtaggagtaccatgttgtttcagttatcattgccttatagtataatttgaagtcaggcaatgtgatgcctctggactraattcctatctttcacaatctacaaaaatgaactcgagatgaattaacaacctagacataagacctgaaactataaaaatcctagaagaaaacctaggaaaaattattctgaacatcagcctaaacacataatttataataaaagacctctaaagcaaatgctatgaaaacaaaaataggcaagtgagatttgattaaacataaaatcttctgcacagaaaaataaataataaacagaataaacaggcaatctacagaatgggagaaaatatttgcaagttgtgcccctgacaaaggactaaaatccagaatc

SEQ ID NO: 917214 - DNA, 626 bp, Homo sapiens
atattcctgcaaaaatcatgatttcattctttttttatttctgtgtagcatttcatggtgtatatgtaccatattttctttatttgattcactgctaatggggggcccctaggttgatccacgtctttgttattgtaaatactaatgtgatgaatagaggagtgcatgtgtctttttggtagaacaatttattttcttttggatatataccccataatgggattgtgaggttgaatggtagttctgttctaagttctttaagaaattcacccccggctggacacagtggctcacacctgtaattccagcactttgggagactraggtgagtggatcacctgaggttgagagttcgagaccagcctgaccaacatggagaaatcctgtctctactgaaaatacaaaattagctaggcgtggtggtgcatgcctgcaatcctggctacttgggaggctgaggcaggagaatcgcttgaacccgggaggcagaggttgcagtgagctgagatcatgccattgcactccagcctgggcaacaagagcgaaactccgtctcggaaaaaaaaaaaaaagaaatctccaaattgctttccaagtggcagaactaatttacattcccaccaata

SEQ ID NO: 917215 - DNA, 626 bp, Homo sapiens
atattcctgcaaaaatcatgatttcattctttttttatttctgtgtagcatttcatggtgtatatgtaccatattttctttatttgattcactgctaatggggggcccctaggttgatccacgtctttgttattgtaaatactaatgtgatgaatagaggagtgcatgtgtctttttggtagaacaatttattttcttttggatatataccccataatgggattgtgaggttgaatggtagttctgttctaagttctttaagaaattcacccccggctggacacagtggctcacacctgtaattccagcactttgggagactaaggkgagtggatcacctgaggttgagagttcgagaccagcctgaccaacatggagaaatcctgtctctactgaaaatacaaaattagctaggcgtggtggtgcatgcctgcaatcctggctacttgggaggctgaggcaggagaatcgcttgaacccgggaggcagaggttgcagtgagctgagatcatgccattgcactccagcctgggcaacaagagcgaaactccgtctcggaaaaaaaaaaaaaagaaatctccaaattgctttccaagtggcagaactaatttacattcccaccaata

SEQ ID NO: 917216 - DNA, 663 bp, Homo sapiens
tctaacatagttgtgcccaagcatttacatattggaatgtgtgttattttattttatttatttatttttgagacggagcctcactctatcacccaggctggagtgcagtggcacaatctcggctcactgcaacctctgcctcccttgttcaagtgattctcctgcctcagcctcttgagtagctaggactataggtgtgtgccaccacatccggctaattttttgtatttttagtagggacagggtttcaccatgttgtccaggctgatctcgaactcctgacctcaagcaatccacctgcctcggcctcccaaaaatgacgggattacaggtgtgagccactgtgcccagcccatgttattttattatacttggcttcttcttcttcatattgtgttgatatagtggaggaaattatggatgttggaaggcaatatgataaaggggtgtgttatatattttattgtttttaattatttatwtttttgagatggagtctcgccctgtcgtccaggctggagtgcagtggcgcaatcttggctcactgcaacctctgtctcccgggttcaggcgattctcctgcctcagcccccaagtagctgggattacaggtgcccgccaccacgcctggctaatttttgtatttttagtagagttggggtt

SEQ ID NO: 917217 - DNA, 623 bp, Homo sapiens
ggttgaggttcaatatttttgttgataaatgtccagttccctagcactaattgtggaaaaagctatcttctctccattgaatcacttttgcaccattgtaaaaactaaccgagcatatttgtgtgggtctgtttctgggttctatgcctgttaatatgatggattataatgatagattttcaaatattgaaccccttgcatccttggcctaaaccccacttagtcatggtgtatacttctttgtatatttgctgaattctgtttgtaatattttgttaaagatttttgcaccctatatttatgagactcttgatctgaagtttttttatttgatactgcctttgtatgcattggtataaggataatactagcttcataaaatgaattgagaagtgatttctcctcttttattttctgtaagagattgcaaaattggtacttattgtccaaacgtttggtagaattttccrgtaaaatcatttaagccaggagacttctttggggggaattattaacttacaaattcaattttcttaatgatgatagggccattccaattatttattttgtattgggtcaggcgtggcagcttcttatttttgaagaatcgatctattttatct

SEQ ID NO: 917218 - DNA, 606 bp, Homo sapiens
taaagcaggcagaaaaacatgaaaagactagactggcttagcctcccagcctacatctttctcccatgctggatgcttcctgtcctcaaatatcggactccaagttcttcagctttgggactcagactggcttccttgcttctcagcttgcagagagcctgttgagggacattgtgattgtgtgagttaatactctttaatmaactgtcttttatatatatatctatcctattagttctgtccctccagagaaccttgactaatacagattttggtacctggagtggagtcagtagagacattccttctaaggtgaaggataagttgctgcatttggcccctcctacaaccaagaaagaggcacagcgcctaatgggcctatttgatttggaggcaatacattcctcagttggatgtgttactttggcccatttatcgagtgacccaaaaggctgccagttttgagtggtgtccagaacaggagaaggctctgcaacaggtacaggctgctgtgcaagctgctctgccacttgggccatatgacccaggagatccaatggtgcctgaggtatcaggagaagatacggattgtatttggagcctttg

SEQ ID NO: 917219 - DNA, 632 bp, Homo sapiens
aggctgccagttttgagtggtgtccagaacaggagaaggctctgcaacaggtacaggctgctgtgcaagctgctctgccacttgggccatatgacccaggagatccaatggtgcctgaggtatcaggagaagatacggattgtatttggagcctttggcaggctcccacaggtgaatcacagcagaggcctctaggattttggaacaaggctctgccatctcctgcagataactactctccttttgagagatagctcttgtcccrttactgggctttggtggaaactgaatatttgactatgggtcatcaagtcaccacgtctgcctatcacttgaactgcctatcatgaactgggtgctttctgacccacctactcacaaagtgggtcatgtccacagcattccatcatcaaatggaagtagtatatatgtgattgggtttgagcaggtcctgaagttatatgaggaaatggctcaaatgcccatggtccccagtcctgccaccctgccttctctcacccagcctgcaccaatggcctcatggggagttccctataatcagttgacagaggaagagaagaccagggcctcgttcacagatggttctgcacaatatgcaggcaccacccaaa

SEQ ID NO: 917220 - DNA, 590 bp, Homo sapiens
ggaaggcccctctgacccctgcaggcttggaggtgcctgcttccactgcctggcttctccccactgtcagtgtatgctctgatcttggagtaaggttggggccaagcctgagcactgttgcagtttggccaggggcatatgctcagggcagcagtgacccaccaaccccttgctgcctcggctccctctaaactttggctgtggacaagcacaggagggaggcacaaggggtgctgaggacagcggggtactggcctgcaggcgcmccttggcatgaacggtctgggtgcgatgaatggtgacaggcggcagacaggctcctgggcagaagggggaaggtcctcagtgatgccctaccttcaagctgaggagggcctgaaccctgggggctgggagccattcccgcataccagaaggtgaactcgtagcgcttttccctgggccctcgtgggtgcccatggactgatcaacatgcacttcctcccctctgaggcccataaaaacccccagactcagccagactcaagcagaggacagacagatgatggggagatgaccagatgacaagctgcagagaggagctgcccacc

SEQ ID NO: 917221 - DNA, 640 bp, Homo sapiens
gtgtggtggctcatgcctgtaatcccagcactttgggaggccaaggcaggtgggtcacctgaggtcaggagttcaagaccagcctggccaacatggtgaaaccccaactctactaaaaatacaaaaattagctgggcatggtagcacatgcctgtaatcccaactactcaggaggctgaggcacgagaactgcttgaacccaggaggcagaggttgcagtgagctgagatcacaccattgtactccagcctggagaaaagactgagactctgtctcagtaaataaataagagcgatacagaggccaggcatggtggttcacacctataatcctagcactttgaaagatcaaggcagaaggatcatttaaggccaggagttcamgacaagcctgggcaacataatgagattccatctctacaacaacaacaaaaatcaaaaattagctgggtgtggtggtttgtaccagctacgtgggaggctgaggcaggaggattgcttgagcccaggagttcgaggctgcagtgaactgtgatcatgccagtgcacttcagcctgagtgagagagcaagaccttgtctcaaaaaataaaagggatttgccgggcgcggtggctcacgcctgtaatcccagcactttgg

SEQ ID NO: 917222 - DNA, 600 bp, Homo sapiens
gcttcctgtccgactgtggtgtctttgctgagggtcacattgagctgcaggttgaatccggggtgcctttaggtgagtgtggagggttctgtaacctgggaccccagtctagcgggctgaggagccggaccccagcttccctgagaacgggttgaggcttccggctggcggcgtccggcctccctggaccccggggccctgttctgttcatcgtaagagctaacaatkatacggttcttccttgatgccaggcaacatcccaaacaactttaattaatttatttaactctcccaccagccctatgagatagggcctgcgattatccccttttgtcagtaaacaggctcagagataccaagcgacctagctgaacctacacagcgaccaggatttggcccaggagtttgtcctccagggctcttcatggctaattcacaggcgtggcctctcgcggcttgcctgggccgcagcctggctcccgggtgtccagtccatcctcccttttggacgttggaggggccgcagcgtcatctccgatgcaccctcatcctcagataccgggtagagatctcgccggtaacgatccttcctactgcgtc

SEQ ID NO: 917223 - DNA, 587 bp, Homo sapiens
gaaaatatttgcaacatatgtattagtttaaaataattgaatgaataggcagttcagaaagaaaaaatgtgtaatcagtaaataataagatggttaaagtcataatggaagaaatgaccattaaagcaataattatttctcttagattggcatagattaaggcttggtaaactttttttttttttttgcgagacggagtctcgctctgtcgcccaggctagagtgcagtggcgcagtcttggctcactgccagctccacctcctgggttcacgccattctcctgcctcagcctcccgagtagctgggactacagccgcccgtgaccacactggctaattttttgtatttttagtagggacggggtttcactgtgttagccaggatggtctcgatctcctgacctcgtgatccacccgcctygacctcccaaagtgctaggattacaggcgtgagccaccgcgcccggccacttttttttttttaatagggacaggggtctcactatattgcccaggctggccttgaactcctgggcttaagcagtcctcccgcctcagcctcccaaagtgctgggattacaggtgtg

SEQ ID NO: 917224 - DNA, 631 bp, Homo sapiens
gagcatatcagcctcgtgcactcgtttggtttttttttttttttttttttgagacggagtctcactctgtcgcccaggctggagtgcagtggcaatctcggcttactccaagctccgcctcccaggttcacgccattctcctgcctcagcctcccgagtagctgggactacaggcgccgccaccacgcccggctaattttttgtatttttagtagagacggggtttcaccttgttagccaggatggtctcgatctcctgacctcatgayccacccacctcagcctcccaaagtgctgggattacaggcatgagccactgtgtccggccccttcttctacttttaatattcgcccgactaagggcacctcttttaaggccgtgggtcaccatgagacgttgacactacactgtttattctgctacaaagaatattttaatttctgaattggtgtcattgagtaagcctgcttgaggcggcagatataaacttgtgtagaagttcaaaagaaagcagatcatttctggttgaaaggtaaaagaaaggtgcaaatcagaaaataattcacagagggggctgtttttatccttccttggtctgatacttgttttaaagaactgacttctcaccgc

SEQ ID NO: 917225 - DNA, 676 bp, Homo sapiens
accattgaccgcagttatttctgggggctggaacagagggttaaatttcactctcagtgccacctttaaaagagacttgtgactgggcgtggtggctcatgcctgtaatcccagtgctttgggaggccaaggtaggtggatcacttgaggtcaggagtttgagaccagcctggccaacatggtgaaacctcatctctactaaaaatacaaaaatttggccgggtgcggcagctcacgcctgtattcccagcacttagggaggmcgaggcgggcggatcacgaggtcaggagattgagaccatcctggctaacacagtgaaaccccgtctctactaaaaatacaaaaatttagccgggcatggtggcgggcgcctgtagtcccagctactcgggaggctgaggcaggagaatggtgtgaacccgggaggtggagcttgcagtgagccgagattgtgccactgcactccagcctgggcaacagagcaagactctgtctcaaaaaaaaaaaaaaatttggtgggctcctgtaatcccagctactcgggaggctgaggcatgagaatcacttgaaccccagaggtagaggttgcagtgagtagagattgcgccactgcactccagcctgggcaacagagcaagactccatctcaaacttttttttaaagagacttggcgt

SEQ ID NO: 917226 - DNA, 676 bp, Homo sapiens
accattgaccgcagttatttctgggggctggaacagagggttaaatttcactctcagtgccacctttaaaagagacttgtgactgggcgtggtggctcatgcctgtaatcccagtgctttgggaggccaaggtaggtggatcacttgaggtcaggagtttgagaccagcctggccaacatggtgaaacctcatctctactaaaaatacaaaaatttggccgggtgcggcagctcacgcctgtattcccagcacttagggaggacgaggcgggcggatcacgaggtcaggagattgagaccatcctggctaacacagtgaaaccccgtctctactaaaaatacaaaaatttagccgggcatggtggcgggcgcctgtagtcccagctactcgggaggctgaggcaggagaatggtgtgaaccygggaggtggagcttgcagtgagccgagattgtgccactgcactccagcctgggcaacagagcaagactctgtctcaaaaaaaaaaaaaaatttggtgggctcctgtaatcccagctactcgggaggctgaggcatgagaatcacttgaaccccagaggtagaggttgcagtgagtagagattgcgccactgcactccagcctgggcaacagagcaagactccatctcaaacttttttttaaagagacttggcgt

SEQ ID NO: 917227 - DNA, 821 bp, Homo sapiens
attagcgcattggcggtagcctttcaattccagcgctgaagcaacagactgagaggaggtgaacctttaccttctcccaggcacagacaaggcgaggtgaggcagagatggattgcagaaccgcattaagcaaccgcggggtggaggagagtgcagggtgtctccaaaccctgggagggctatcttctcctttcagagcacatttctgcccaggtctttttattctcagtgcagctcgctccctggtggcttaaattrcggtaaacgaaataaggtccgttaaaaaccacttctgagaggggtgattattgggggttttgaaagcacagaggtcttatagagaccaaaaatatgtgcctcgctaagatacagaaaggcttgtaagtgaatcttcataactctgggtacgtgcatgtatatgcacatatacgtatgcatgtctcgtttctataccttatataagttttctgcccaaaactttcctcgtccgtgcgttccctaccacggcgcatctaatctgtctgccctatttgtggctgcacagctcattcttgcaaccggctggggagctgttgcttctgccaacgccgccgtcagccagagcgctgaagaaaagctgaaggccagcaggcaacgaaagagtaaagaaaacgccctcctcctgcccatctcctccaccacagcctccccagtcctcccaggtgactcccaaacagtagaaagttggctcagagatagggcagaagaaccggggggctgggcggctgaggccgggaggtgggagaggcgggtcctgcagccccgagagccccccgcggctg

SEQ ID NO: 917228 - DNA, 644 bp, Homo sapiens
ggattctctacttagggtctcacaaggctgaaatcaacgtgtcagccaggctaggctcccatctggaggctctgaggaagaatttacttccaagttcatcccttaaaaaactttttttctaggagacccagtcttgatctcttgcccgggctggagtgcagtggcatgatcagagctcactgcagccttgaacttcagggttcaagcaatcctcccacctcagccttccaagtatctgggactagaggcatgcaccaccatgcctcgctaattttaaaaattttttgtaaagatggggyctcactatgatgcccaagctggtcagggactcctggactcaagcaatccttctgtctcagcctcctgagtagatgggattatagtgtgagccatcatgcccagccaagctcattcttattactggcagaactcggtaacttgtgactgtagggctgaggtcccagttaccttgctggctgtgagctggagtcacccttatctcacagatggcattccctggtccttacacatgccccctctatataccaagccagcaatggtacctccaatctttctcatccttcaaatctctctgatttacccttctgctgccagcttgagaaaactctcagctcttaacgggc

SEQ ID NO: 917229 - DNA, 644 bp, Homo sapiens
ggattctctacttagggtctcacaaggctgaaatcaacgtgtcagccaggctaggctcccatctggaggctctgaggaagaatttacttccaagttcatcccttaaaaaactttttttctaggagacccagtcttgatctcttgcccgggctggagtgcagtggcatgatcagagctcactgcagccttgaacttcagggttcaagcaatcctcccacctcagccttccaagtatctgggactagaggcatgcaccaccatgcctcgctaattttaaaaattttttgtaaagatggggcctcactatgatgcccaagctggtcagggactcctggactcaagcaatccttctgtctcrgcctcctgagtagatgggattatagtgtgagccatcatgcccagccaagctcattcttattactggcagaactcggtaacttgtgactgtagggctgaggtcccagttaccttgctggctgtgagctggagtcacccttatctcacagatggcattccctggtccttacacatgccccctctatataccaagccagcaatggtacctccaatctttctcatccttcaaatctctctgatttacccttctgctgccagcttgagaaaactctcagctcttaacgggc

SEQ ID NO: 917230 - DNA, 644 bp, Homo sapiens
ggattctctacttagggtctcacaaggctgaaatcaacgtgtcagccaggctaggctcccatctggaggctctgaggaagaatttacttccaagttcatcccttaaaaaactttttttctaggagacccagtcttgatctcttgcccgggctggagtgcagtggcatgatcagagctcactgcagccttgaacttcagggttcaagcaatcctcccacctcagccttccaagtatctgggactagaggcatgcaccaccatgcctcgctaattttaaaaattttttgtaaagatggggcctcactatgatgcccaagctggtcagggactcctggactcaagcaatccttctgtctcagcctcctgagtagatgggattatagtrtgagccatcatgcccagccaagctcattcttattactggcagaactcggtaacttgtgactgtagggctgaggtcccagttaccttgctggctgtgagctggagtcacccttatctcacagatggcattccctggtccttacacatgccccctctatataccaagccagcaatggtacctccaatctttctcatccttcaaatctctctgatttacccttctgctgccagcttgagaaaactctcagctcttaacgggc

SEQ ID NO: 917231 - DNA, 445 bp, Homo sapiens
ctaattcggtgccaacgctctctacccagagattgtgttaaatcccacaagttgagtgctcagtgcccacgactgccctcccttaacaccagtggcaagttcaggcctccggaacttcttacatgccggctttaagttggggctcctatgcccccctctttgggttgaattaattttctggagcagctcccagaactcaggtaaacacttatatttactggcttwttataaaagatattgcaaaagacacagatgatgatgtacgtaggatggggtataggggaagggacgcagaacttccatgcccctgctgagcacgtcaccctccaggaacttccacatgttgggctatccaggagctcttcgaacccagttatgttggtttttttaaggaggcttcatgatctgagcattccttctccctgagtatagggtgggaccctct

SEQ ID NO: 917232 - DNA, 818 bp, Homo sapiens
gacaggttgcatggccccatgccccgggtagggctctggcgagggtgggcagcagccacacgtagggctcggctcagtgaggccatgggggctccaggcctcagcaaaacagggagctggggagagaatcagagctgggtggggtgcagaggggacacgctgggggctgtgctgagtacccagggaaataagggccctatggtgttacctcccagggccttcctcttgccacttccccatggcattcattcattcactcattcattcattcattcactcattcattcattcactcattcattcattcactcattcattcactcactcattcattcattcactcattcattcactcattcattcattcactcattcattcattcattcattctgtgtgtatgtattaagggcctggtatgcagcaggctctgtcagtgcccgggggcaaccttggtgaggataggtctctgccagcccacagaaaagacagggagcgccaagctctgggtagaagtgggggtcggggccacaaggggaggtagagaagagtgggtgrcgtggctggcagagatccaaagtgagacctgaggaaagtgggctgccccgtgaggccgggcagggaggatggggaggggactgaggacagaggaccaacagctggaaaggaggggctccggtctcagggacactcacccccagatcacagacagcgagaggctggggctgggcgggggccgtcccgccagccttgagagccctttcggagctcaagatgctcctgaggggccaagcagccctgctgccccacaggtctgtgc

SEQ ID NO: 917233 - DNA, 708 bp, Homo sapiens
cagatttcggggactctataagatctcttggactattgcgcagccttagagagaaaaaaaggctcccctcaaacataaggattcaaagctagactttatgctatttaaaacagaggcaatatggtatttctttcatctgagggatatggagcgaattctcggctctgtgatgaaaggcagcaggcagccttgagtaaatgagttaccccacctccaccccgaaaggacagctcagagtgagagcgtggmacctctgaaggtgcaggggtgggttcccaaccccactgcggcagccccggtgctccccgaccccagccccagtcccgtccgcctgtgtgctacctctgctgaaagggcaggtgctcagcacttagggcactttgcgtgaccaaggggaccaggcggcaggggaggacaagggtcacaaactcactaggtggcctggggcaggttccttcccttccccaggcctcagtttccccatctgcatggtgaatagggtgcgagggaagaggtagtctctgaggctgtgcccagcctgtggcccagtgaggccagggtggggggctgtagccagggagggagccctacctgctcaccggagcggcagcacctgcctgagtgtggccaccaccagacccccaccccggggtttccagacctctggagcagggagcttggctgtgggtgtctcacatccactggctg

SEQ ID NO: 917234 - DNA, 708 bp, Homo sapiens
cagatttcggggactctataagatctcttggactattgcgcagccttagagagaaaaaaaggctcccctcaaacataaggattcaaagctagactttatgctatttaaaacagaggcaatatggtatttctttcatctgagggatatggagcgaattctcggctctgtgatgaaaggcagcaggcagccttgagtaaatgagttaccccacctccaccccgaaaggacagctcagagtgagagcgtggaacctctgaaggtgcaggggtgggttcccaaccccactgcggcagccccggtgmtccccgaccccagccccagtcccgtccgcctgtgtgctacctctgctgaaagggcaggtgctcagcacttagggcactttgcgtgaccaaggggaccaggcggcaggggaggacaagggtcacaaactcactaggtggcctggggcaggttccttcccttccccaggcctcagtttccccatctgcatggtgaatagggtgcgagggaagaggtagtctctgaggctgtgcccagcctgtggcccagtgaggccagggtggggggctgtagccagggagggagccctacctgctcaccggagcggcagcacctgcctgagtgtggccaccaccagacccccaccccggggtttccagacctctggagcagggagcttggctgtgggtgtctcacatccactggctg

SEQ ID NO: 917235 - DNA, 708 bp, Homo sapiens
cagatttcggggactctataagatctcttggactattgcgcagccttagagagaaaaaaaggctcccctcaaacataaggattcaaagctagactttatgctatttaaaacagaggcaatatggtatttctttcatctgagggatatggagcgaattctcggctctgtgatgaaaggcagcaggcagccttgagtaaatgagttaccccacctccaccccgaaaggacagctcagagtgagagcgtggaacctctgaaggtgcaggggtgggttcccaaccccactgcggcagccccggtgctccccgaccccagccccagtcccgtccgcctgtgtgctacctctgctgaaagggcaggtgctcagcacttagggcactttgcgtgaccaaggggaccaggcggcaggggaggacaagggtcacaaactcactaggtggcctggggcaggttccttcccttccccaggcctcagtttccccatctgcatggtgmatagggtgcgagggaagaggtagtctctgaggctgtgcccagcctgtggcccagtgaggccagggtggggggctgtagccagggagggagccctacctgctcaccggagcggcagcacctgcctgagtgtggccaccaccagacccccaccccggggtttccagacctctggagcagggagcttggctgtgggtgtctcacatccactggctg

SEQ ID NO: 917236 - DNA, 653 bp, Homo sapiens
tggctgggctgcagtctctgaaccagcacaggggaatgcttattgaatgaatgaggtagaaagcacagagattttgtcaaagagctggaagtcatgggaaagggcacaagaggtcttttgcacaactcaggctatcttgccctgctctgctgtatgtgtttagttaatactaagagcgtgcaacttttgttctaaaaaataccacgccgtgttgaggttaaggaattctctagataagcagactgaaattcaatgtactcaaaatcccactgtctcctctccccagacacacacacaaatggctaaaagggcatgcacgcttggacatctacggtttatgcacagggcacctgtgaagaaagcaggatgtgtgtttatggggaaggattgtttgttttgcrtcttgtgttggaccagggcatactcacagtgacttctgtgagatcctaaagatcagcgaccctcacctttggagccatcagaataacccgaagtgccttaccagaatgcacatgcttctgccttaccccagagattaagtctgggtatgagtattttggaaaagtctccatttggcttgcagaccactgcctttaaaaatactgtccaaatgaagtgatttttcaactctgatggaagcctgaaagcaatag

SEQ ID NO: 917237 - DNA, 600 bp, Homo sapiens
gtgttgtgtgccaggaatgatactaaggactctgtgatacatcatttcatgtcatcatctccatgtcttgaaaaggtgatgaatgtttaggaagcttcaatcaccaaatgcaaattaagtgccttctctgtgccatactcctctaggtaccagggaaacagtggaaagcaaaacagacaaaatccttgccattggggagcttacattctggtataaggagaaagatgataaattgggaaacaagtaaatatatggtttgtaagatggtgacaagtgttttagagaaaatcaagtaagtaaggcggatggagattgctgagagcaattttatgtagggtgttcagggaagrgccctcttatcagaggtgagagagttctggggaaagagtgctctgagcagagggaacagcaggtgcaaaggccctggggtaagagcatgtttggtgcattcagagagcagcaaggaggccagtgcggaagtagaaaggaggctgaaatcagaggggctcagtcatctgtggcctttggcttttactttgagaataatgggatggtatatatattgggcagaggaatgttatgacttaactgatgtattct

SEQ ID NO: 917238 - DNA, 562 bp, Homo sapiens
ttgggagcacagcctgccagggttccaatcctgcccagccacttaccggctatctgcagcacagttttctgtgcctcggtgtcttttaggtcctgtttcctggaggcagagcctgaggcagggatgtattgaagagctcgcgaagcattgagagaactgtgttaggaaaagtctgcagggaaagtgggataaggaaggaggatttggaacatgtaggaaaaggagaaaatagaaaaagaaaaaggaaaggctgggcgtggtgggtgggtggcttacccctgtagtcccagcactttgtgaggtggagacgggaggatcgcttgagaccaggagttcaagaccagcctgggtaatatagtgagactccagctctagaaaatagkaaaataaattaaattttaaaaggaaggaggaaaaagttaaacaaggatgtggtcttaggtaaagtctaggctcagcttgatctgtgggaggatctggagcataaactgaaccagagtggtcctcccttgaaggaggggaccagcctttctgcgtgccccgtgagctggtcactggctgt

SEQ ID NO: 917239 - DNA, 604 bp, Homo sapiens
acaacagcagaaacttccatgcaaattttaaactaataggatcaagattcagaagcatttcctcacataattgtaacaggagattaaacgtggctttaccagttcatcctgaagacaaagcagtggctccaaagaggtagacgaggttcagtcaagacaaaagcagaccggtcaagaaaagcaaaggtcatggcaacmggtttttgggatgctcaaggcattttgcttgttgactttctggacagccaaagaatgataacatctgcttatcatgagagtgttttggggaaattagccaaagctttagcagaaaaacgcgcaggaaagcttcaccagagagtcctccaccatagcaatgctcctgctcattcttctcatcaaataagggcaattttacagcttccatgagaaattaggcatccaccttaaagtcctgtttggctccttctgacttctttttgtctcctaatcttaagcaatctttaacgatcacccatttttctttagttaataatgtaaaaaagcctgcattgacatggctatattcccaggaccccccagttctttggagatggactatgtgcctggtatcatcacttacaaa

SEQ ID NO: 917240 - DNA, 464 bp, Homo sapiens
tatctgacaacagtgttctaagaaaacagtatcacaaatatactttctcaccataattgttcaaaacagaaattttgtaagcaaagaatcaagcatttaaaccaaaggaaagttagagtgatgtcatctctggttgaaaaacacagtctttctgaacagattttcaatgtccttcaagaccayaactaatataaaattacagaatacatttgctaataatatgaactgtacactttttatatgaaaatgatgcttgctacaacatgacttaactaaactggatttctgcaaaagataaaacaccaggcatggttgctcacacctgcaatcccagcactttgggagtgctgaggcagggaggatcacttgagtccaggacttcgagaccagcctgggtaacatagtgagactctgtctcttaggaaagtaaaaaattagccgggcatgatgaagcatgactgtag

SEQ ID NO: 917241 - DNA, 464 bp, Homo sapiens
tatctgacaacagtgttctaagaaaacagtatcacaaatatactttctcaccataattgttcaaaacagaaattttgtaagcaaagaatcaagcatttaaaccaaaggaaagttagagtgatgtcatctctggttgaaaaacacagtctttctgaacagattttcaatgtccttcaagaccacaastaatataaaattacagaatacatttgctaataatatgaactgtacactttttatatgaaaatgatgcttgctacaacatgacttaactaaactggatttctgcaaaagataaaacaccaggcatggttgctcacacctgcaatcccagcactttgggagtgctgaggcagggaggatcacttgagtccaggacttcgagaccagcctgggtaacatagtgagactctgtctcttaggaaagtaaaaaattagccgggcatgatgaagcatgactgtag

SEQ ID NO: 917242 - DNA, 578 bp, Homo sapiens
gacttttaggagtgcattgaggactatggtgaaaaaagaaatatcttcagataaaaaccagaaagaagctttctgagaaactgctttgttatgtataaattcctctcacacagttacacctctctttacatacaaaaatttgtaaacactgtttttgtccatttctgtgaatgtatatttgggagctcattgaggccaatggaaawaatgaatatgcttggatcaaaactacaaggaagctatctcagaaactgctttgtgatgtctgcattagtctcacagagtgaagccattcttttcattcagcagtttggaaacactgtttctgtagaatctgtgaagggatatttgggagcgtattgaggcctatggtgaaaaagaaaatatcttcagatgaaaactagaaagaagctttctgaaaaactgctttgggaggtgcgcattcatctcacaaatttaaacctttcttttgattcggcagtttggaaactgtatttctccgttggataaatggacatttgggagctcattgaggccaattgtgaaaaagcaaatatcccaggataaaatctcgaagg

SEQ ID NO: 917243 - DNA, 632 bp, Homo sapiens
ccattctgcaaacggacattttggagctcattgaggccagtgttgaaaaagtaaataacccaggataaaatctggaatgaagctatctggaaaccgctttctggtgtgtgcattcatcgcacaaagataaaattgttttttcattcagcaattaggaaacattgtttttgtccattctgtgaatggacatttgggagcttattgaggccaatggcaaaaaggtgaattttccaggataaaaactagaaggaagctatagaagaaaccactttgtgacgcgtgcatttatctcacagaattaactttcctatacattcagcagtttggaaacactatttttgtagaatctacaaagggatatgttgtactgcatcgaargctctggtgaaaaaaaaatatcctcagacaaaaactagagaaaagctttctgagaaactggttttttaggttggcatttatctcatagagttaagcctttcttttgattcagcagtttgcaaacactgtttttgtctattctgcaaatggacatttgggagctcattgaggccaattgagaaaaagcaaatattccaggattaaaactagaaggaagctctctgagaaactgctttgtgatgtgtgcattcatc

SEQ ID NO: 917244 - DNA, 609 bp, Homo sapiens
ggaaacactgtgtttttagaatctgcaaagggatatttgggagggcaatgaggcctatggtgaaaaagaaaatatcttcagataaaaactagaaagaagcattctgctttgtgttgtgtgcattaatctcacagagttaaacttttccttgattcaccagtttggaaacactytttcagtccattccgtgaagggacgctggggagctgattgaggccaatggcaaaaaggcgagtatcccaggacaaaaacaagaaagaaactatctgacaaacggctttgtgatgtgtgcttcatctcacagagataaaccatcctctcattcagcagtctgaaaactctatttttctagaatctgcaaagggatatttgggagtacattttgtcctattgtgaaaaagaaaatatcttcaggtaaaagccagaaagaagctttttgtgaaactgctttctgatgtgtgcattgatctcatggagtgaaaactttcttttgattcaggagtttggaaacactgtttctgtccattctgtgaatggacttttgaaaagtcattgaggtcaatcatgaaaaagtgaatatcccaggataaaaacaaaaggaagctatct

SEQ ID NO: 917245 - DNA, 618 bp, Homo sapiens
acactgtgtttttagaatctgcaaagggatatttgggagggcaatgaggcctatggtgaaaaagaaaatatcttcagataaaaactagaaagaagcattctgctttgtgttgtgtgcattaatctcacagagttaaacttttccttgattcaccagtttggaaacactctttcagtccattccgtgaagggacgctggggagctgattgaggccaatggcaaaaaggcgagtatcccaggacaaaaacaagaaagaaactatctgacaaacggctttgtgatgtgtgcttcatctcacagagataaaccatcctctcattcagcagtctgaaaactctatttttctaraatctgcaaagggatatttgggagtacattttgtcctattgtgaaaaagaaaatatcttcaggtaaaagccagaaagaagctttttgtgaaactgctttctgatgtgtgcattgatctcatggagtgaaaactttcttttgattcaggagtttggaaacactgtttctgtccattctgtgaatggacttttgaaaagtcattgaggtcaatcatgaaaaagtgaatatcccaggataaaaacaaaaggaagctatctgagaaaccgcttt

SEQ ID NO: 917246 - DNA, 618 bp, Homo sapiens
acactgtgtttttagaatctgcaaagggatatttgggagggcaatgaggcctatggtgaaaaagaaaatatcttcagataaaaactagaaagaagcattctgctttgtgttgtgtgcattaatctcacagagttaaacttttccttgattcaccagtttggaaacactctttcagtccattccgtgaagggacgctggggagctgattgaggccaatggcaaaaaggcgagtatcccaggacaaaaacaagaaagaaactatctgacaaacggctttgtgatgtgtgcttcatctcacagagataaaccatcctctcattcagcagtctgaaaactctatttttctagaatctgcaaagggatatttgggagtacattttgtcctattgtgaaaaagaaaatatcttcaggtaaaagccagaaagaagctttttgtgaaactgctttctgatgtgtgcattgatctcayggagtgaaaactttcttttgattcaggagtttggaaacactgtttctgtccattctgtgaatggacttttgaaaagtcattgaggtcaatcatgaaaaagtgaatatcccaggataaaaacaaaaggaagctatctgagaaaccgcttt

SEQ ID NO: 917247 - DNA, 701 bp, Homo sapiens
agattctttatgtgggccctggaatagcctcagtccagcctgatctctctctcttccctcctgaagttttatttcaaacattttgagactctaaaagggtttctttgtctcatttctctcctccagtcctactaccagggttgtcttcaatttatatccaatgtttctctggcctggaactgagacctacctcccaagcagcgacccgacccgtggagtggggtccctggggcaagcgaatggycctttgcctggagaacctgggccagcagtcatggcaggtgacacattccattctggggcgaggaaccagggagggagcactgcatagatcagaagggtaaacaaggggagggagaaggagcaaacttagatttgggagggaaagagggaagggtgcagaggaagcagaacacggatgactgggcctccttcagttgttcttgtgactagaccctcccatctaagccaccaggggacaggaagggtatgagtttgaggactctaatggccccaaggtactactgtggtttatcctacttgtaggcggtcccaagagctttgttctctccagggactcaaaggggatgaacttgcaagtcttttgtctccactcagtgccttctctgattaggccaataaacatccccaggcctcagtctcaggccactgtaggggctgaggacagtgagaaagatgtg

SEQ ID NO: 917248 - DNA, 642 bp, Homo sapiens
ctcccggtgggtttttaatctcactggcttcaagagtaaagctacaaaccttcatggtgagtgctacagctcataaagtcagtgtggacccaaagagcaagcagcagccagttttactgcaaacagcaaagcttgcatagtgtgtaaggcaaccacggctggcttcggcagcccgctgttattcttttatctggccccacccgcatcctgctgattggtccattttacagagagctgattggtccgttttgacagggtgctgattggtgcgtttrcaatccctgagctagacacaaaagttctccacgtccccactagattagctagatacagagtgtccattggtgtatttacaaaccctgagctagatatagagtgctgattggtgcatttacaaaccttgagctagatacagagtgccaattggtgcattcacaatcccttagctagacataaagattctccaagtccccaccagattaactagatacagagtgccgactggtgcattcacaaaccctgagctaggcagagggtgccgattggtgtgtttacaaaccttcagctagatacagagtgctgattggtgcatttacaaccccttagctagacataaagattctccaagtccccaccagactc

SEQ ID NO: 917249 - DNA, 602 bp, Homo sapiens
tgcatcacttaataatgggaatgcattctgagaaatgcatccttacatcgtccttctgcaaatatcataaagtgtgttcacccaagcctagatggtacagcctgctacacatctaagctatataatgcagcctgttgctcctaggatacaaacttggacatagggttacgattgcctacagcactcagcaccttactgtamtgaatactgtaggcacttgtaacacaatgttcctaaacatagtttttgtgcatctagacatagaataggtacagtaaaaatgaagtagaaaagattttaaaagggcacacctatatagggcacttaccatgaatggagcttgcaggactggaagttgctctgggtgagtcagtgagtgggtggtgagtgaatgtgaaggcctaggacatcactgtatcactgtaccccactgtagactttataaggactgtacacttaggctacactaagtttgttttttaaattgttctttctttgataataaattaaccacgctcagcttacttttttactttataaactttttaatttttaaaaactttttgataactttcataatagcactcagtttaaaatacaaa

SEQ ID NO: 917250 - DNA, 550 bp, Homo sapiens
ctctgaagaaaaaaacagataacaaattcatgaatcatagttatacttaaatttcctccgtcacagagaaacatgttatttttagaaagtggatcccaaacctaactgatcagaatcccttgggggaaatgtttttaaaaaataccattacctgtgcactggcccagaaaatccagggccattagagactgcaaatgtctgagaatctgtgtttcctaaaaggcacaatggtgattctgatgggcagccatgtttgagaacctctgattgaattgtgcacaattttgatggtgctgctgttgcattataggtaattcaaagaagagcttctttttttwtaaaaaaaatagtaatctataaatataatagttttcatctgaatagtgttttcttgttttcagaagaccttcataactttttttttttttttttttttttgagatggagtcttgctgtgtcacccaggctggagtgcagtgacgcaatctcggctcactgcaacctccgcctcccaggttcatgtgattctcctgcctcagcctcctgatta

SEQ ID NO: 917251 - DNA, 550 bp, Homo sapiens
ctctgaagaaaaaaacagataacaaattcatgaatcatagttatacttaaatttcctccgtcacagagaaacatgttatttttagaaagtggatcccaaacctaactgatcagaatcccttgggggaaatgtttttaaaaaataccattacctgtgcactggcccagaaaatccagggccattagagactgcaaatgtctgagaatctgtgtttcctaaaaggcacaatggtgattctgatgggcagccatgtttgagaacctctgattgaattgtgcacaattttgatggtgctgctgttgcattataggtaattcaaagaagagcttcttttttttwaaaaaaaatagtaatctataaatataatagttttcatctgaatagtgttttcttgttttcagaagaccttcataactttttttttttttttttttttttgagatggagtcttgctgtgtcacccaggctggagtgcagtgacgcaatctcggctcactgcaacctccgcctcccaggttcatgtgattctcctgcctcagcctcctgatta

SEQ ID NO: 917252 - DNA, 794 bp, Homo sapiens
atacacagctgtgcagactgcgcactgcacaattctacagggaagtattcacatttgtagtgagtgtagctttttatacttaaaacatacattggcttaaaaaatgacagatttttcttatttgcacaaagttaggcttgtggcaggactagagcaggtaaatcagaacctccacggctgtgggttacagcaggtttaacttgtaaaagttccctcaggtgatcctgatctgtctctcccgcctccaactgtgaagggctaatttacaacatgagcctttcccatttgagtgaaaaatgaaaatatctgcatcaaatgttccaggttctgaagacactattttaaatataatgaactggccggcatggtggctcacacctgtaatcccagcactttgggaggcgtaggctggaggaccacttgaacccaggacttcgagacctgcctgggcaacatggcaaaaccctgtctgtccaaaaaactacaaaaattagccaggcayggtggcatgcacctgcaatcccagctacttgggaggctgaggcacgagaatcgcttgaacctgggaggcggaggttacagtgagtcgagattgtaccactacactccagcctgggtgacacagccagaccctgtctcaaagaaaaataaataaataacgaacaccttcccacatcagatgttagggtcgcttccagtcatttggttattataaataacactgtcaagaacatcttctcagaaaagatctttgcctccatccaccccatctctgatgatttctagactagatt

SEQ ID NO: 917253 - DNA, 827 bp, Homo sapiens
cagacatcaggtcctcatatctgagtcccatgcagaagggaagaggtatgatgggtctaaagagaatcttgtcttcttttattatttactttatttttatgagacagggtctcactcttgttgcctaagctggggtgcaatggtgccatcacggctcactgtagcctcaacttcctgggctcaggtgattctcccacctcagcttctcaagtagttggggctacaggtgcgcactaccatgccccgctaattttttgtactcttagtatagatagggttttgccattttgcccagactggtctcgaactcttggactcaagcagtctgcccacctcagccwcccaaagtgctgggattacaggcgtgagctactgcgcctggccattttcttcttttatttaaaaggatgatcttcctcagagattgtccccttccttcacaaagttggatctctgtccatttaatctctctgagcctcaatttccccatcctggaaatgggagtaatcatagcaccttcctgataaggtgttgtgagaattaattgagaaagcttattagcctgtaataagcacttgctataataagtgcactgatatcttcactttgcctgtccagatccactcttctccacctctctccagcttgctctgtgctgccccaggactgcaacggcctccctcggctctggtttctgctggatttggccaatggaagatattgacaggagatcagatgcaggaaggagagggaggtcaggtatgtattcttctggctccctccctgggggactgccaagggaggctgagcttctctaccgatggcca

SEQ ID NO: 917254 - DNA, 827 bp, Homo sapiens
cagacatcaggtcctcatatctgagtcccatgcagaagggaagaggtatgatgggtctaaagagaatcttgtcttcttttattatttactttatttttatgagacagggtctcactcttgttgcctaagctggggtgcaatggtgccatcacggctcactgtagcctcaacttcctgggctcaggtgattctcccacctcagcttctcaagtagttggggctacaggtgcgcactaccatgccccgctaattttttgtactcttagtatagatagggttttgccattttgcccagactggtctcgaactcttggactcaagcagtctgcccacctcagcctcccaaagtgctgggattacaggcrtgagctactgcgcctggccattttcttcttttatttaaaaggatgatcttcctcagagattgtccccttccttcacaaagttggatctctgtccatttaatctctctgagcctcaatttccccatcctggaaatgggagtaatcatagcaccttcctgataaggtgttgtgagaattaattgagaaagcttattagcctgtaataagcacttgctataataagtgcactgatatcttcactttgcctgtccagatccactcttctccacctctctccagcttgctctgtgctgccccaggactgcaacggcctccctcggctctggtttctgctggatttggccaatggaagatattgacaggagatcagatgcaggaaggagagggaggtcaggtatgtattcttctggctccctccctgggggactgccaagggaggctgagcttctctaccgatggcca

SEQ ID NO: 917255 - DNA, 827 bp, Homo sapiens
cagacatcaggtcctcatatctgagtcccatgcagaagggaagaggtatgatgggtctaaagagaatcttgtcttcttttattatttactttatttttatgagacagggtctcactcttgttgcctaagctggggtgcaatggtgccatcacggctcactgtagcctcaacttcctgggctcaggtgattctcccacctcagcttctcaagtagttggggctacaggtgcgcactaccatgccccgctaattttttgtactcttagtatagatagggttttgccattttgcccagactggtctcgaactcttggactcaagcagtctgcccacctcagcctcccaaagtgctgggattacaggcgtgagctactgcgcctggccattttcttcttttatttaaaaggatgatcttcctcagagattgtccccttccttcacaaagttggatctctgtccatttaatctctctgagcctcaatttccccatcctggaaatgggagtaatcatagcaccttcctgataaggtgttgtgagaattaattgagaaagcttattagcctgtaataagcacttgctataataagtgcactgatatcttcactttgcctgtmcagatccactcttctccacctctctccagcttgctctgtgctgccccaggactgcaacggcctccctcggctctggtttctgctggatttggccaatggaagatattgacaggagatcagatgcaggaaggagagggaggtcaggtatgtattcttctggctccctccctgggggactgccaagggaggctgagcttctctaccgatggcca

SEQ ID NO: 917256 - DNA, 654 bp, Homo sapiens
tactaggagggcatcattctccactgttctctgggaagcctcggggttttaggtaagtttggcagcttggcaggattagctcagggaggctcttaagttccttccttatattattcatggtttgttcattcagtcagtgttggtttattgcccactctgtgcccagccccgcctgggctctgagggagaaaaatgttaatgtcatagcaggagccattgaagatcatcyagtaggccaggcgtagtggctcacacctgtaatcccagcaatttgggagactgaggcaggaggatcacatgagcccaggagttccagaccagtgtgggcaacatagggagacccccatctctaaatgaatgaatgaatgaatgattatccagttgttaaagccccaagctgtggagtcatccgtggcccctctgttgcttttatgcctccaacatccactctgtgttcccaaggagcaaatcctgtggctcgaccttcacaatcccagaatcctagcaccactgccaccatcctgctctgagccgcctgggttgttctcctggaactcggcaggagccacttccctggtctccctgtttccaccccagaccctcagtcccttctccgcacaacagccagatgggtcctgttaaaacgcgtgtcag

SEQ ID NO: 917257 - DNA, 564 bp, Homo sapiens
gtgctggaagtaaaggcatgtgccactgcaaaaactcctgaatgagagaggacatgcaaattgaaattacagatttaaaaaaaaggaaaataaaacactacatataaaaatctatgagatgcatttaaagcaaagattagagagagattcatttcattgaacacttttaccaataaaaatgagagtggaaatcaatgggaaaatgcccagwtcaaaatattagaaaaagaataacaaagtacaccaaaagaaagcaaaaagaaggaatttataaagacaaaatagaaaataatgaggtagagagcagaacaatagagcaaatctaatcaataaatcaaagttctgtgatttttaaattatgcaaataaactattagctaatttaatgaagaaaaagaagtagaaagaaaaactatacaaaataagatatgacaagagggaactatcctttagagaaaaataagttttcaaaaatcacaagtatttacttttcagatatccacatgaagttgaaaacctagataaaatcaataatttcctagagaaatacacattaccaagactg

SEQ ID NO: 917258 - DNA, 577 bp, Homo sapiens
caatgaatggaaggccatccagttgctgtttacaactcatgctaagaatttttcacttgatgtattagtctgttttcatgctgctgataaagacgtacctgagtctgggcatttacaaaagaaagatatttaatggacttacagttccacgtggctggggaggcctcacaatcatggtggaaggtgagaggcatatctcacattatggcagacaagagaggagagcttgtgcagggaaactcccccttataataaccatcagaccttgtgatacttagtaactgtcatgagaacatcacagcaaagaccttctcccatgattcaattacttcctattgggttcctcccacagagcatgggaattatgggagttacaattcaagataakatttgggtggggacacagccaaaccatattaatccacccccagcccctcccaaatctcatgtcctcacatttcaaatccaatcatgccttcccaacagtaccccaaagtcttaactcatttcagcattaactcaaaagtccacagtctaaagtctaatctgaatcaatgcaagtcccttccgcttatga

SEQ ID NO: 917259 - DNA, 610 bp, Homo sapiens
atcagttaggagaggcttggttatgctgcaggaataaatgccaccccctcacgcattcttagtggtttaaaactttaaggtttcttccttgttgatgacacgtaactgttgtgggttggctaagagcccttatatcttctcacactgggactaggctgaaggaatagccaccatcttgaacattgccaggtattatgggaaagaaagagttctagagggtttcatgctggcmattgaatattccagtctggaagtgaaacatgtcacttcttttttttttttgaaagagtcttgctctcttgcccaggctggaatgcagtggtgcaatcttggctcactgcaacctctgcttcctgggttcaagtgattctcatgcctcagccacctgagtagctgggattacaggcgtgcaccaccatgctggctaatttttgtatttttagtagagacagggtttcaccatgttggccaggctggtctcaaactcctgatgtcaaatgatcttcccgcctcggcctcccaaaatgctgagattacgggcgtgagccaccgtgcctggctgaaacacgtcacttctgctcatgacccaggggctcaaaatagtcgtgtt

SEQ ID NO: 917260 - DNA, 665 bp, Homo sapiens
attttgggaggctgagagggaggattgcttgagcctgggaggttgaagctgcagtgagccatgttgcactctagactaagcagctatgcaagaccctgtatcctcccaaaaattaactgatcagagatgtgactgtttatttttggactctctrttctattctattgatctgtatgcctgccctcatgccagtaacatagtgttttaattattgtagctttgtagtaagtttagaagtcgagaattgtgaggcccccatctttggtctttttcaagatattttttggttattcaggcccccttgaaatttgatgtgaatttgaggataagcttttccacttctgcaaaaaatattcttgagattttcatagagatttaagtgaatctgtatatcactttggatagtactagtgtcttacaaatgtcaagtcttcctattcatgaacacgcatgtctatttctgtaatggaatttaaagacttaaaaataaaatcttcatttttttcagcattattttgtagttttcattgaataagactttcgctttcttgattagatttattcctaagtattttaatttttaagatgctactgtaaatagacatgctttccaattttctttttggattattcattgctgctgtatagaaacatgattgattttt

SEQ ID NO: 917261 - DNA, 627 bp, Homo sapiens
accatcaggagaaagctcatatgtgctgagtctcagaacagccgtataaagaaaactgctccccaggcttaacaggagctggcctctgagggactttggccaaggggcccctgaacaggaggctgggagtgcctccccgggtaccttcccgtccagcccaggccctcggttggcatcctccccggggcacaccagccactgttctctccacctacacccaggagggccggctgggcgccagagcccatgcgaggctctcggcacgaccattgtcactgttactggggttcacgtggatgatcacgtgctgcaggccagcaacatrctgagtacttcacatttcatatccatctaccggagtcgcactccacagaagagagtggcaagacccgcagagaggaaaggaccttgcccaaagtcccccagcactgaagagctgggcttccagccccaggtctgccttgacagttccatagccaggcctcaccccctgcaaataaaagaattaagactcaccacttctaggccaggcacagtggctcacacctgtaatcccagcactttgggaggctgaggagggcggatcacctgaggtcaggagttcaagaccagcctggccaaaatggt

SEQ ID NO: 917262 - DNA, 597 bp, Homo sapiens
gggtgtttctctacccattgttggcaaacatcttggaaaggctcagatagtaaatattttcagttttgcagctcatacagttcctgtggcaaggattcaactctgccaatacagtctgaaagtagccttatgtaaaaaagtagaagtggctgtttttatatttatttacaaaaggaggctgaaggccagatttggcccatgggtcttagtttgctgactcctacctgtaacacaacatgcmtaagaagaaactaatcctaaaacttcttttgagagaattagtaattttatttatttatttaacttttattttagaatcagggggtacatgtgcaggtttgctacataagtatattgcctgatactgaggtttaggtttctaatgatcccatcatccaagtagtgaacatagtacctgataggtagttatttaacccttgcccccttcccttccttccccactttgaaatcccagtgtctattgttcccatctctgtgtccatgtgtacccaatgtttagctcctgcttataagtgaaaacagaacatgtggtatttggctttctgtttctgcgttaattcacttaggatgagggcc

SEQ ID NO: 917263 - DNA, 801 bp, Homo sapiens
ctggaggcataaatttggaaaacatcatcacatggttggcatttaaagccctaagccaggtgcgatcactgagagtaagtgtagacagagaaagtagaagaccaaaggctgagctgagccaagccaacaggaggagttaaggaaaaagacaaggaattcaccgggggaaactgagactgagaaggattcagcagtgaagaaacccaagacagtgttacgaagaccaagtgaagaagtctcatcaaaggagcagcaagggaaccaattatgtcatatctgctggagactgagaactttaccattggatttagcaatttagaagtcatttggtgacctcgagaagagtagtttccatggggtggcaggagtgaaagcctagataatacgagtttaacagagaatagggaagaattaaagtcagaaagtataagccacattttgagttttgctacaaaaagaggcatagaaatggggctagcagaggaagtggggtcaaagaatgttttattcttttttaagattggatgcaaatagcatagaaataaatgttaattagaataggcccaggaatgtgtgaaaatttatacaagaaaaagaggaaagacttgctggtgtgctacccttaacgaacagaagttgatgggaggawgtagttttagacaggagcacagttagatagaccacccaggtacagacaggaaggatgcaaatgccaagtcatttgtagaagttgggagcaggtggggaccatgtggaggctctcttcttattgctttcctttgtttagtaaagtgggaaaca

SEQ ID NO: 917264 - DNA, 785 bp, Homo sapiens
ccctcttgggttcaccattccagaataaagctgtgtccattggacagccagcctggtctctcctcttcctcctggaagtcacaagtactctcccctacttcccttaaactcactcgcatttctgaagaacagtaataacccttatgaccctaatacatcccttcattctattaggtctattcrtccttaccctactttttgcaacagggctttacgcagtcacccccactacttggactgtgccccaaaaacttggcatccctgctatcttctgtctagtcatactcctattcaccattctcaactactcataaatgccctgaccctgtttacactgctggtttacactttttctccaaactatcatagcagatatctcctggtactatccccaaaatgccacccttaactccctcttggagtgggtagatgatctttgcttgcagggcaccctccaaaacttccaccctgatgaagtcctagtctttacttttatactcactcttattctcgttctcattcttatgtctctctctacctctccccagctatctccacgacactatcaatctcactcactctctcctagctgtttctaatccctcattagtgaacaattgctggctttgcatttccctttcttcctgcacttacatggctctccccaccttacataccaactaggcaatatctcctgtctccctacatctccgaacctcctttaacagccctcatctttactcttctgaagaacttctttactttctagacaggtctagaaaaac

SEQ ID NO: 917265 - DNA, 785 bp, Homo sapiens
ccctcttgggttcaccattccagaataaagctgtgtccattggacagccagcctggtctctcctcttcctcctggaagtcacaagtactctcccctacttcccttaaactcactcgcatttctgaagaacagtaataacccttatgaccctaatacatcccttcattctattaggtctattcgtccttaccctactttttgcaacagggctttacgcagtcacccccactacttggactgtgccccaaaaacttggcatccctgctatcttctgtctagtcatactcctattcaccattctcaactactcataaatgccctgaccctgtttacactgctggtttacactttttctccaaactatcatagcagatatctcctggtactatccccaaaatgycacccttaactccctcttggagtgggtagatgatctttgcttgcagggcaccctccaaaacttccaccctgatgaagtcctagtctttacttttatactcactcttattctcgttctcattcttatgtctctctctacctctccccagctatctccacgacactatcaatctcactcactctctcctagctgtttctaatccctcattagtgaacaattgctggctttgcatttccctttcttcctgcacttacatggctctccccaccttacataccaactaggcaatatctcctgtctccctacatctccgaacctcctttaacagccctcatctttactcttctgaagaacttctttactttctagacaggtctagaaaaac

SEQ ID NO: 917266 - DNA, 603 bp, Homo sapiens
tgtccagagtttgttccttcatatgttcagatatgtctggagtttcttccttctgctgggttcgtgatctcactgacttcaggagtgaagccacagaccttcacagtgagtgttacagctcttaaaggtggtgggtccagagttgtttgttcctcctggtgggttcatggtcttgctgacttcaggaatgaaggcgcagaccctcgcggtgagtgttacagctcataaaggtcgtgtggacccaaagaatgatcagcatcaagatttattgtgaagagcgaaagaacaaagcttctacagtgtggaaggggacccgagtgggttgcygctgctggctcaggtggccagcttttattcccgtatttggccctgcccacatcctgctgattggtccattttacagagtgatgattggtccattttacagagtgctgattggtgtgtttttacagagtgctgattggtgcatttacaatcctttagctagacacagaatgctgattggtgcatttacaattctttagctagacacaaaattctccaagtccccacccaacccagaagcccagctggcttcacctctcaataacgagttaagttaac

SEQ ID NO: 917267 - DNA, 797 bp, Homo sapiens
gtccccataggaatccttcctgcccccactgtggccagcctggctaagcccagcacccctgcccttggccacacctttttcaggtgacgccttctgcgcctcgccaccacaaggccatggacgccccaaaccacgagtgccaggctgtgctggcctccagacagaagggagagcaagcagctcccttggcagggagggggcaagcctggctccctgcagtgggtgggggttgttcacgcctgtaacgagcactttgggaggtcaagatgggcggatcacttgaggtcaggagttcsagaccagcctggccaacatggtgaaaccctgcctctactaaaaattcaaaaattagccaggcgtggtggtgcatgtgtagtcccagctactcaggaggctgaggcacgagaatcacctgaacctgggaggcggaggttgcagtgagccgagatcgtgctactgcactccagcttgggctacttcaagatgccctctcaaaaacaaaaaaaacaccagtgaggactgtagccaggccccgcatctgtgacgatcaccgagggtatcatggggccccagggctgggtctactgtagcacacaccagtggggccaggtccccaggcttgaatggggcaccgacggcccatccccctgccacaaagccaggaccagctcggggaagccccggccaagcatctgctctgcaccgggtgtgggtggaaaaagatgtggttaagaaacaacaaaaaacctctgtcgcccgtctcgggtggggagagtgcaccagaggagaggggactc

SEQ ID NO: 917268 - DNA, 687 bp, Homo sapiens
aacgactaaacctcatgtggtatcctggggggcgagctggaacagaaaagggacattagaggaaaactggcaaagccaaaggaacagtggcgtttagctaatagtgatgtacccgtgctggttccttagctacaaccaatgtacacagcagcgtaagatgtgaaccttcggtgaagctgggtaccatgtgtaaaggaacactrctatctttgcaactttcctgtaagtctaaacattttttttttttttgagacagagtctcactctgtcaccaaggctggaatacagtggtgcaatcttagttcactgtaactttccctcccaggttcaagtgattctcctgactcagcctcccaagtagccgggattacaggcgtgcgccactgtgctcagctaattttttatatttttagtagagacagggtttcactatgttggccagactggtcttgaacccctggcctcaaatgatctgcccaccttggcctcccaaagtgctggggttacaggcgtgacccactgcacctggcctgtaaatctaaaattctaaaataaaaagttcttttttattgtatttatttagagacagggtcttactccgtcacccaggcctggagtgtgttggcatgatcacggctcactgtagcctccacctcctgggctcaagtcatcctcccttctcagtct

SEQ ID NO: 917269 - DNA, 764 bp, Homo sapiens
atacaaactgggagctgtttattggtcgccgtgagaagcctatatacaaagaaggcacaaggagggggagggaattcccctgctacagtaccatggaaggggctggggctggggagtgggcctgccaacaggcaggggtcaggagaggttttctggaactagcctcagcttctcaaatgggccttaggacacagcccatgggggagggggcagagccaggctggctctgaaagccaaggatagctaagaactccacctctaggcccctgacgcatggtcagcgtggggtctggctggatggggtggggcagggccccctgcctattctacattcaagtgtcgctccctccgtggtcttgcagggtctctctggggccttctgaggctggctggtagtggtgagtgagaagtggcatctcctctgtatcctcccaacatctgtctgtccagaattggtcccctcctctctgtggaggatcccgccgtgccccagcacagtgagcccaggctacgttgccgtttgcctgtctttgttccttcctgctgcaytccctgcgagttcagtctgtggccaaggagagaggcttcacagagatgcaggaaagcaagccgttctgggtccttctttctagttcctttgctgttgggtctgagcacgccaggtcctccaagtgcccccgtagacaaccttaggcaggatccccacctctctggcatgggtgtcattgggggcccaccagccagcggcccgggggctgctccct

SEQ ID NO: 917270 - DNA, 632 bp, Homo sapiens
tcactcctttggttatctctttctgtctgatggcttaaatttcatctatgtaccaacaactcccaaatttacatctccactctagacctgtctccataactcagatttgtacatgtatttcctctttggtgtctatcagatgtctcaaaaataagtctctgctcaaatgttaccttctcagcaaaaccctgaccatacttataacccaaatcctccttatactgctttttacctccctaagtacgtatcaccttataatatgctgtattactcacctatrtctgtgtacctctgctagaatgtaatgtctataagggaaagaaacttccctgtgttttgttcactaatgtattccaagtgcctacaatactgcccagcatatagagtaagcaagcaacattcattcgttaaatatatgaatgctaatcttcaagtaaatgtttggtcattaagatattagttcttaaccctctaaaaaaaaaaaaaaaaaacaaagccaggtgcagtggctcacgcctataatcacaccactttgggaggccaaggtgggaggattgcttcagcctgggtaatatagtgagaccatctctaaaaaaatttttaaattagctgggcatggtggtatggggctg

SEQ ID NO: 917271 - DNA, 621 bp, Homo sapiens
acttccagctgcactctacaggaaccaagagcatctcaggaatgctgtagcttaatcttccattagtttttcataccactctgcagactttattatatggtggccacagtttagtgtagacatgacttcaaaaagtcccaaatattggctgaaygcggtggttcacacctgtcatcccagcattttgggaggctgaggcagacggatcacctgaggtcaggagttcaagactagcctggccaacatggtgaaaccccatctctactaaaaatacaaaaattaactcagtgtggtggcggatgcctgaaatcccatctacttgggaggctgaggcggaagaatggcttgaacccaggaagcagaggttgcagtgagccaagatcgagctactgcactccagcctggatgacagagcgagactctgtttaaaaaaaaaaaaaaaaagacccaaatatcaaccaaagtgaaggctcaccgaccattttgtcaacttacctgaaacatttttctctctcgtttgctcacatgtcgctttctgtgttccttgtttgtgccgcaccccttgagtccagctttctgcagtctttcaggaccagaagagatggattttaggttttcctt

SEQ ID NO: 917272 - DNA, 761 bp, Homo sapiens
tggatgtcctacagtttaactcaattctgacactctctacctgcagatagaatcagatctcacaagttaagggctcaatcccacaagactgtccccacttcagatgctggttgcatgtccaggttttcatctgtgcctctgcccagttggctataaatcagatgttattacaaccccctctttgtgtttgattatgctaggataacttccagaactcaggaaatcagtttacctactagattactgttttactatgagagacacaactcaggaacagccagatggaagagatgcatgggaagaggtatggaggaggggcacaaagcttccattgcctctccaagtgtgccacccttgcagtttctccacatgttcaccagcctggaaactctctgaaccttatctttttattctttgtggaggttccatcacatgggcaagattgatcaaattattggcccttgataatcaactctacctccagcctctctctcctccccagasgttgggctgtggggataaatatttcaatcttctaatcatattgttggttcctctggaaaggagccaccatcctgaggctatccaggagcccccagcccccagtcatctcattaacatacaaaaagacacctttcacttcagagagtccaagggtttggtttttgtttgtttgtttgtttgttgttgttgttgttgttgtttgagatggagtctcactcttgtcgcccaggctggggtgcaatggggcgatcacagct

SEQ ID NO: 917273 - DNA, 604 bp, Homo sapiens
cagataaaattgcagtactttcctttggcgtattaaggagtggtaaggtgagaatgaagcaaaggaatgggaagaactatgaagagtttttactggttctgtcactaacatttgtgacacttaagaaaccaagggcagaacaatgcttaaaaataaatatataacagcattgattctgttcagtagacagaattatttggacaaattcagggaaaggacactgattaaagttatttttggttgtataccaaaaaaaaaaaycatgcatcgtaggatgcgtagtggcattcctggctctatgcactagaagccagtagcacacctcccttactcagtcatgacaacaaaaaatgtctccagaaagtgccaaatgaccccttagatgcaaaatcactgtcattgagatccactgctctaccataatagcagacaaatcacaacactcaagaaaagctcaactcttctaggtaccacttgaaacatttgatttaaaaaaaatattttagcacttttaacagggtagggtttcaataccgtgaaagaaaaaacattcttgcaggtcttagctaatttatttaattagaaaactctttatgcatatatg

SEQ ID NO: 917274 - DNA, 604 bp, Homo sapiens
cagataaaattgcagtactttcctttggcgtattaaggagtggtaaggtgagaatgaagcaaaggaatgggaagaactatgaagagtttttactggttctgtcactaacatttgtgacacttaagaaaccaagggcagaacaatgcttaaaaataaatatataacagcattgattctgttcagtagacagaattatttggacaaattcagggaaaggacactgattaaagttatttttggttgtataccaaaaaaaaaaaccatgcatygtaggatgcgtagtggcattcctggctctatgcactagaagccagtagcacacctcccttactcagtcatgacaacaaaaaatgtctccagaaagtgccaaatgaccccttagatgcaaaatcactgtcattgagatccactgctctaccataatagcagacaaatcacaacactcaagaaaagctcaactcttctaggtaccacttgaaacatttgatttaaaaaaaatattttagcacttttaacagggtagggtttcaataccgtgaaagaaaaaacattcttgcaggtcttagctaatttatttaattagaaaactctttatgcatatatg

SEQ ID NO: 917275 - DNA, 655 bp, Homo sapiens
caacaaaacaaaaaaaattagcggccgggcacgtggctcacgcctgcaatcttgcactttgggagggcgaggcggtcagatcacttgaggtcaggagtttgagacaagcctgaccaacatggtgaaaccctgtctctactaaaatacaaaaaaattagccgggcgtagtggctcttgcctataatcccagctactcaggaggctgaggcaggagaatcgcttcaacctgggaggtggaggttgcagtgagccaagatcgtgccattgcattccagcctgggcaacacagtgagagtcagtctcaaaaaaaaaaaaaaaaaattagcttggcgtggtggctcatgcctgtagtcccagttacccaggagactgaggcatgagaattgcttgaacctgggaggcagaggttgcagtgagccgagatcatgccactgcacgccakcctgggcaacagagtgagagtcagtctcaaaataaataaataaataaataaagacaggtcagataatttctttatgaccagtctttacaaaacaagatagatgaaaaggttttatggctggcactggggaaaaggggttctggtttctatgaccccccatggggaacagggattttagtttctgtggctagccgtgggggagaatgagaggtg

SEQ ID NO: 917276 - DNA, 614 bp, Homo sapiens
agaaggagtctcgctcatgtcgcccaggctggagtgcaatggtgcaatctctgctcattgagatctccgtctcccagattcaggtgattctcctgcctcagcctccggagtagctgggattacaggtgtctgccaccacacayacccagctaatttttggatttttggtagagatgtgatcgcaccatattggccaggctgatcttgaactcctgatctcagatgatccacccgccttggcctccaaagtgctgggattacaggcgtgagccatcgtgcccggccccagtggcttttttttttaagtagtttcatagtttgaggtcttacagttaagtctttaatccattttgatttgatttttgtatatggcgagagatagaggttcagtttcattcttttgcatatggatagccagttttcccagcacctgaggccttcatttggggtaatttttttctgagtcccaacaatataaaaagcttatttacatatgtaagcatatattcattattcaacatatatttcttgagcacctactaggcgccacacttgttctacacactgaaatacagcaattaacaaaacacagaaatatctcatccctaatggac

SEQ ID NO: 917277 - DNA, 631 bp, Homo sapiens
gatgaaaaggggagaatgcgaacttaatggttcaacttacaaaatttaaatgtaaagttgttggaactttaaattatcctgagcctcgaagaaatgtaactatgcaacctgagtcacatgcatgcaactgcaacctcttctgcctctgattttttttttttttgggggaaaaattacaaccaaacagtgccaaagataggacaccctcagatcactaccacttttcacaaagtaatacagtatycaatcttggaatgtagcaatctgtaaccaatcaaattgcaagggcatatgcaccttgaggggcctggccctaaaagggaaactgaaacccggcgggaacttttctgtctcggcctacataagtgaaatcattacttctccactttggaaatgctgacccaatccatttggagtcctgagtggccatcctcaagctttgtgcttgaataaattttatacttactcatattttctgaatctcattattcaaggttgacattcataatagaagctactcttatagaacatgatatcaataagaaaatagcagaacacactaataagcaatttctaacatgaagtaatggaggtatcctgaagagtgggtgaagaattgtgtcaaagaatc

SEQ ID NO: 917278 - DNA, 570 bp, Homo sapiens
tggaactttaaattatcctgagcctcgaagaaatgtaactatgcaacctgagtcacatgcatgcaactgcaacctcttctgcctctgattttttttttttttgggggaaaaattacaaccaaacagtgccaaagataggacaccctcagatcactaccacttttcacaaagtaatacagtatccaatcttggaatgtagcaatctgtaaccaatcaaattgcaagggcatatgcaccttgaggggcctggccctaaaagggaaactgaaacccggcgggaacttttctgtctcggcctacataagtgaaatcattacttctccactttggaaatgctgacccaatccatttggagtcctgagtggccatcctcaagctttgtgcttgaataaattttatacttamtcatattttctgaatctcattattcaaggttgacattcataatagaagctactcttatagaacatgatatcaataagaaaatagcagaacacactaataagcaatttctaacatgaagtaatggaggtatcctgaagagtgggtgaagaattgtgtcaaagaatc

SEQ ID NO: 917279 - DNA, 791 bp, Homo sapiens
gagccatggttagggcaactgaggaacactgtgcccaatgcagggagcagagacccaagatggctctgggcagtcaacccatagagggggccctgggcccaccccgcaaaaccattctcccctcttagagctctgggcctgtaatgggaggcgcagccttgaagatctctgaaatgctgtcatcttcattctctcattgtcctgatgatgccttctatccatactgatgttcttagcaaaggtcatgtgaccatatccttggtttgctctccgaaacaagcttttttaaattctttatgtggccaggctgatatttttaaaaatatttttgttctgtttccctttctatctttaaattatttatttattatctcattttactgtaagcagccatagaaccatgcggcaccttaaacactttgctgcttagatatttcttctgccaaatattctagttcactatttctaaatttcaacttccataaagcctgagggcatagatataattagccraattctttgccacttcataacgaggatgacatttagtccagtttccaataagatatatctcttttctgcctgagccctcatcagaatggccttttattgtccatatttccaccaacattttgatcatgaccacttaagcaatttctaagaagttttagtctttcccaacagctctcgtcttctaaatcctcaccagaattgcccttaatactctatttatagcaatctaggcttttcctaacctgctcatctaagttctttcagcctctacccattac

SEQ ID NO: 917280 - DNA, 685 bp, Homo sapiens
atttcatttcccttgctctgaccaatgaccccaattttctagcctctcaccctccataatccccttaaaagccccatcccagaattccctggggagatgcattcgcaggtctcctcctatccccttgcacagtgccctgtgatcatgaaactctctctactgcatccctgctgtccagtgtaatagggctgtgacagggcagcaggcatacaaatctgctgttcctgtaacaaaaagcacacctctacgtctagatggagccacgtctagagccctgcagatccatgctagaggggttccagcaggctggagtacaatggcgtgatctcggctcactgcaacctctgcctcctgggttcaagagattcttccgcctcagcctcccgagtatcttgaattacaggtgcatgcctccacgcccagctaatttttgtatttttagtaaagacrgagtttcaccatgttggccaagctggtcttgaactcctgacctggtgatccacccgcctcggcctcccaaagtgctgggattacaggcgtgaactaccgcgcctggcccttttttttgttttgttttgttttttgagatggagtctcgctctgtcgcccaggctggagtgcagtggcgcgatctgggctcactgcaagctccgccttccgggttcatgccattctccagcctcag

SEQ ID NO: 917281 - DNA, 596 bp, Homo sapiens
tagaccatgttggcctgaaccacgtcagattaatattctaaatctgtttttattacatctatttagggaccaccggcggaatataagtcacatgtaaacagcaggagagtttgcagagcgctataaaaacatggaaagaacgccacctgactgagatctggtgtgttatttccatcctgggggccctataacaacgtcgtgaaccagaaatgatagacttgcaattccaaaagcacttgtgggactcaccacccagggcaaaggttctgggagctgctttgcagaaagaaraggatcttcgtcaaaactaactccactcacctgattcagttaaaagacctgctgtgaatgtcaagtgcagtggagtaaaggggaatcactgtccagtgagtgttcatttctatttcatttaagaaacacaactattaatcattttcaatggtactggctgaattgtgtccctatagcgtgaaggtatgttgaagttctgactgccggcacctcaaaatgtgatcttatttggaaatagagtctttccagaggtaatcaagttaagatgagatcattcggatggctcctaatccaatatgactggt

SEQ ID NO: 917282 - DNA, 687 bp, Homo sapiens
gtctggggaccacactttgagtagcaagaggctagagcacatctgtcctcctgtaaacagtaaataatgatgagaatccaggccttggaacccaaagatctcattcactagttgtatgatttgggagcaaaacctctcactttctgagggtattaatcacctcatttataaaccgattactgaactagagatgatctccaagttgccttcccattcattaattttaaattaattytttaaaaatgtaaataatgaaagatgaagtactgtggatttccaaggaagaagatatgcagattaaaaacataaactcagacacaaatgtttgattaaactacttaaggccatacaaggcatttttttgtttgtttgttttttgttttttagatgctctgtcacccaggctggagtgtagtggcacgatctcggctcactgcaagctccgcctcccgggttcacgccatcctcctgcctcagcctccctagtagctgggactacaggcgcccaccaccacgcccggctaattttttgtatttttagtagagacggggtttcaccgtgttagccaggatggtcttgatctcctgacctcgtgatccgcccacctcggcctcccaaagtgctgggattacaggcgtgacaaggatctttatgacattgtacacatggatcaaaatatcacaggt

SEQ ID NO: 917283 - DNA, 687 bp, Homo sapiens
gtctggggaccacactttgagtagcaagaggctagagcacatctgtcctcctgtaaacagtaaataatgatgagaatccaggccttggaacccaaagatctcattcactagttgtatgatttgggagcaaaacctctcactttctgagggtattaatcacctcatttataaaccgattactgaactagagatgatctccaagttgccttcccattcattaattttaaattaattttttaaaaatgtaaataatgaaagatgaagtactgtggatttccaaggaagaaratatgcagattaaaaacataaactcagacacaaatgtttgattaaactacttaaggccatacaaggcatttttttgtttgtttgttttttgttttttagatgctctgtcacccaggctggagtgtagtggcacgatctcggctcactgcaagctccgcctcccgggttcacgccatcctcctgcctcagcctccctagtagctgggactacaggcgcccaccaccacgcccggctaattttttgtatttttagtagagacggggtttcaccgtgttagccaggatggtcttgatctcctgacctcgtgatccgcccacctcggcctcccaaagtgctgggattacaggcgtgacaaggatctttatgacattgtacacatggatcaaaatatcacaggt

SEQ ID NO: 917284 - DNA, 687 bp, Homo sapiens
gtctggggaccacactttgagtagcaagaggctagagcacatctgtcctcctgtaaacagtaaataatgatgagaatccaggccttggaacccaaagatctcattcactagttgtatgatttgggagcaaaacctctcactttctgagggtattaatcacctcatttataaaccgattactgaactagagatgatctccaagttgccttcccattcattaattttaaattaattttttaaaaatgtaaataatgaaagatgaagtactgtggatttccaaggaagaagatatgcagattaaaaacataaactcagacacaaatgtttgattaaactacttaaggccatacaaggcatttttttgtttgtttgttttttgttttttagatgctctgtcacccaggctggagtgtagtggcacgatctcggctcactgcaagctccgcctcccgggttcaygccatcctcctgcctcagcctccctagtagctgggactacaggcgcccaccaccacgcccggctaattttttgtatttttagtagagacggggtttcaccgtgttagccaggatggtcttgatctcctgacctcgtgatccgcccacctcggcctcccaaagtgctgggattacaggcgtgacaaggatctttatgacattgtacacatggatcaaaatatcacaggt

SEQ ID NO: 917285 - DNA, 687 bp, Homo sapiens
gtctggggaccacactttgagtagcaagaggctagagcacatctgtcctcctgtaaacagtaaataatgatgagaatccaggccttggaacccaaagatctcattcactagttgtatgatttgggagcaaaacctctcactttctgagggtattaatcacctcatttataaaccgattactgaactagagatgatctccaagttgccttcccattcattaattttaaattaattttttaaaaatgtaaataatgaaagatgaagtactgtggatttccaaggaagaagatatgcagattaaaaacataaactcagacacaaatgtttgattaaactacttaaggccatacaaggcatttttttgtttgtttgttttttgttttttagatgctctgtcacccaggctggagtgtagtggcacgatctcggctcactgcaagctccgcctcccgggttcacgccatyctcctgcctcagcctccctagtagctgggactacaggcgcccaccaccacgcccggctaattttttgtatttttagtagagacggggtttcaccgtgttagccaggatggtcttgatctcctgacctcgtgatccgcccacctcggcctcccaaagtgctgggattacaggcgtgacaaggatctttatgacattgtacacatggatcaaaatatcacaggt

SEQ ID NO: 917286 - DNA, 795 bp, Homo sapiens
tttagattatttccagtttgggctactctttgatgattaatgcatctgaaatttattttatttatgaggtttgaggtagggatctatttttttttctaaatgtgtatcaatcctttcatcactatttaatgaataacagtaactccactgattttaaytagtacttttatcacacattaactttctatttatccttggatctattttgggactccctcttgaagtccaccgattatttgtctgttttcatcatagtggttttatgctacgttttatttttattttatttatttgtttacttatgagacagagtctcattctgtcacccaggctggagtgcagtggcatgatctcagctcactgtaacctctgtctcctgagttcaagtgattctcatgcctcagcctccccagtagctgggactataggcatgcaccaccacgctcagctaatttttgcatttttagtagagatggggtttcactatgttggctaggctggtctcaaactcctggcctcaagtgatctgcctgccttggtctcccaagtgctgagattacaggcatgagccactgccccacctatgctatattttaacatctggtacagtaattatcatttagttattcttctttatcaaaattttctcagccatttccacacatttattatctgatatgaaatttaaaataaaattgtcagctcctcacctttccaaaaagataacattatgattcttatcagaattatattaaatattttggttggttttggagggatttttatatttatgat

SEQ ID NO: 917287 - DNA, 773 bp, Homo sapiens
catttagattatttccagtttgggctactctttgatgattaatgcatctgaaatttattttatttatgaggtttgaggtagggatctatttttttttctaaatgtgtatcaatcctttcatcactatttaatgaataacagtaactccactgattttaactagtacttttatcacacattaactttctatttatccttggatctattttgggactccctcttgaagtccacygattatttgtctgttttcatcatagtggttttatgctacgttttatttttattttatttatttgtttacttatgagacagagtctcattctgtcacccaggctggagtgcagtggcatgatctcagctcactgtaacctctgtctcctgagttcaagtgattctcatgcctcagcctccccagtagctgggactataggcatgcaccaccacgctcagctaatttttgcatttttagtagagatggggtttcactatgttggctaggctggtctcaaactcctggcctcaagtgatctgcctgccttggtctcccaagtgctgagattacaggcatgagccactgccccacctatgctatattttaacatctggtacagtaattatcatttagttattcttctttatcaaaattttctcagccatttccacacatttattatctgatatgaaatttaaaataaaattgtcagctcctcacctttccaaaaagataacattatgattcttatcagaattatattaaatattttggttggttt

SEQ ID NO: 917288 - DNA, 773 bp, Homo sapiens
catttagattatttccagtttgggctactctttgatgattaatgcatctgaaatttattttatttatgaggtttgaggtagggatctatttttttttctaaatgtgtatcaatcctttcatcactatttaatgaataacagtaactccactgattttaactagtacttttatcacacattaactttctatttatccttggatctattttgggactccctcttgaagtccaccgattatttgtctgttttcatcatagtggttttatgctacgttttatttttattttatttatttgtttacttatgagacagagtctcattctgtcacccaggctggagtgcagtggcatgatctcagctcactgtaacctctgtctcctgagttcaagtgattctcatgcctcagcctccccagtagctgggactataggcatgcaccaccacgctcagctaatttttgcatttttagtagagatggggtttcactatgttggctaggctggtctcaaactcctggcctcaagtgatctgcctgccttggtctcccaagtgctgagattacaggcatgagccactgcccmacctatgctatattttaacatctggtacagtaattatcatttagttattcttctttatcaaaattttctcagccatttccacacatttattatctgatatgaaatttaaaataaaattgtcagctcctcacctttccaaaaagataacattatgattcttatcagaattatattaaatattttggttggttt

SEQ ID NO: 917289 - DNA, 476 bp, Homo sapiens
ccaggaatatttatctacggttttccttttttgttgtgtctttgtcagactttggaatcagggttatactggygtcaaagaatgggttaggaaggacaacctcctcctcaattttttataatactttcagtagaattggtaccagctctttttttctttttcttttctttttttgagatggagtctcgctctgtcacccaggctgcagtgcagtggtgtgatctcagctcactgcaacctctgcctcccgggttcaagcaattctcatgcctcagcctctcggtagctgggattacaggtgtgtgccaccatgcccagctaatgttttagtagagatgggatttcaccatgttggccaggctagtctcaaactcctgatctcaagtgatccgcctgcctcagccacacaaagtgctgggattacaggcataagccacttttcccggccaataccagcttttccttatatgtctggc

SEQ ID NO: 917290 - DNA, 601 bp, Homo sapiens
cctcgttgattttaatagtcacctcatacatgtccacagtgaattccagatctcctttaaaacttgtcttcctacctcagtgaatagcaattccatgttttcagttgctcaggcccaaaactttggaatcgtctctgactcctctattctctttcacattctacttctcatctgtcagcagaagatgggttgtagaattctgaagacttctcaatgggctgaccaccactatctgggtccaaggcatcaccgtctctcacctggagtgtgcagcaggctcctagctggcctcaccacctccaccttgctccctacagcrtcttcttagtacacagctaggagtcctgttaaaatgtcagctcatgccacacatctgctcaaaaccctccaaaagcttcctctcattctgagtaaaagccaagtaagtccttagaaggacttatgcaacctctcccaatctgacctcctcccctcctcctctcctctttgactttgtcttctgctacctcctccctccttccctctgccctagtcataggggtctcctccttgctgttcctcaaaccttccaggcccaatccacccttggggccttcatact

SEQ ID NO: 917291 - DNA, 570 bp, Homo sapiens
ctgctgtcatctttatttcctttcttttgaatttaaattgctatttattttctagtttctcagggtagaatctgagttcattgatttgagacctttcttctgttctaacataggcttgcagtgccataaatatacccataagtactgctttagcagcatattgtcaactcctaaactcagggtgtccactaaacttagtctggattccccctctctgtgtagcagactagacattcttttaaggcaataaaataagggtaatcataggacttatctcatttatttcttatctcttggagatctttgtcttttgttgcctgatatcttgtttctcaaaagtgttggggctctgaaaatgactccaaagcgaagaccttagaagcagcctcaaaagcaaagtttctctctgatcttttgcccttctrtctctcacccctcattcttccctgaggcaaaccatagaaactagaattcctcttccccaaggtaggtcatagaaaccagaacccttttcccccaaagccagccgtaaaacctaaaagtgttgctctaaccttcctctgccttttt

SEQ ID NO: 917292 - DNA, 717 bp, Homo sapiens
caggaaagttgcgagccagtgtattgtgactgtgatatggactgttggtggagtacataaatagaacattacctctgaccctgtatgtgcgtgtataaattgattacaacagaatcccatagtaacatggaatttaagaaaatcatttgtgttataaggggactcctaagtccagataatcaaaaacaaaacacctgggattttctgaacttcttgccttcctgggcttgtactgggactcaatataatgtcacccatatgaagttctctatggaaatctataggaagtttaaaaatacgtgtatgagctaacatctataaaaatgttaagtgaataggcaaaaattttgtaagtgatattctaattgcagtttggaatgctatcacttataaaataattctttaacaataccataggtctttacaatataacttgttatcattctttgaatgatgtgcaaagagctatggcgctggacgcggtggctcatgcctattaccccagcacttcaggaggccaaggcaggcaaattgcttgagcccargagtttgagaccaggctgggcaacgtagggagactccatctctacaaaaaatacagaaactagtcagatgtggtggtgcacacccgtggtctcagctacttgggaggttgaggtgggaggattgcttgagcccaggaggtcatggctgtagtgggccatgattgtgccactg

SEQ ID NO: 917293 - DNA, 797 bp, Homo sapiens
ccctctgctttgtttacactgtgaggggaaaaccacgtactcaagcctcagcaatggcggacacccctacccccaccaagcttgagtgtcccagttcgacttcagactgctgtgctggtagtgagaatttcaagccagtggatcttagcttgctggactccatagrggtgggatctgctgagctagaccacttggctccctgacttcagccccctttccaagggagtgaatggttctgtcttgctggtgttacaggtgccaccggggtatgaaaaaatactcctgcagctagcttggtgtctgcctaaacagccacccagttttgtgcttgaaacccagggccctggtggcataggcactggagggaatctcctggtctaaaggttgcaaagaccgtgggaaaagtgtagtatctgggccagaatgcaccattcctcacagcacagtccctcacggcttcccttggctatgggagggagttttctgacctcttgcacttcctgggtgaggtgatgccccaccctgcttcggctcgccccaagtgggctgcacccactgtctaaccagtccccatgagatgagctgtgtacctcggttggaaatgcagaaatcacccacgttctgcgttgatctagctgggtgctgcagaccatagctgttcctattcagctatcttgccagcctctcttgaaaagagctacatttttatagtcatgtgtcacttagcgacggggatacgttctgagagatgcttcaaggtgattttgttgttgtgcaaacatcatggactttattta

SEQ ID NO: 917294 - DNA, 797 bp, Homo sapiens
ccctctgctttgtttacactgtgaggggaaaaccacgtactcaagcctcagcaatggcggacacccctacccccaccaagcttgagtgtcccagttcgacttcagactgctgtgctggtagtgagaatttcaagccagtggatcttagcttgctggactccataggggtgggatctgctgagctagaccacttggctccctgacttcagccccctttccaagggagtgaatggttctgtcttgctggtgttacaggtgccaccggggtatgaaaaaatactcctgcagctagcttggtgtctgcctaaacagccacccagttttgtgcttgaaacccagggccctggtggcataggcacyggagggaatctcctggtctaaaggttgcaaagaccgtgggaaaagtgtagtatctgggccagaatgcaccattcctcacagcacagtccctcacggcttcccttggctatgggagggagttttctgacctcttgcacttcctgggtgaggtgatgccccaccctgcttcggctcgccccaagtgggctgcacccactgtctaaccagtccccatgagatgagctgtgtacctcggttggaaatgcagaaatcacccacgttctgcgttgatctagctgggtgctgcagaccatagctgttcctattcagctatcttgccagcctctcttgaaaagagctacatttttatagtcatgtgtcacttagcgacggggatacgttctgagagatgcttcaaggtgattttgttgttgtgcaaacatcatggactttattta

SEQ ID NO: 917295 - DNA, 744 bp, Homo sapiens
aggaggtgcaaagagcctggttctgagagtgtaggaaaaactgcaagctggaatgaactactgctactggaacttgctgcaccgactggataaggaagagaggttggggagactgatgggaagatcgagtgtccttttttcctctttcagtcttccaggctccctctagcaccaccgccctcccctttccataccactggcagaaccaaaaagagagcagggtggcaaagcagaaatgtgacttccagagtcccagccccagcatcgaaaaagagagtactggaggggtgggtttgaagctaagaaacaatagtttaataacgtgcacaggtaggtgctactattatccccattttaaagatgaggatagggccggatgtggtggctcacgcctgtaatcccagcactttgggtggccaatgctggtggatcgccygtggtcagagttcgagaccagcctggccaacatggtgaaacccgtctctactaaaaatacaaaaaattagctgggtgtggtggcgggcgcctgtaatcccagctactcaggaggctgaggtgggagaattgcttgaacctgggaggcggaggttgcagtgagctgagatggcaccactgcattccagcctgggcaaccagagcaaaactccatctcaaaaaaagatgaggatattgaggcagagaaaagttatgtaactttcttaagctattaaagctaataagtaacagagctgagatctgaacttg

SEQ ID NO: 917296 - DNA, 593 bp, Homo sapiens
gagggatctgggcagtccagacaagtgggattgcctccagcacagtgcaccccctcctccaaggggcagacagagtgcttcattaagcgggtcccagatcctatgcctcctgaccaggcgagaccccaaaacagagrtcactagataccttatacaagagcattcctgctgtcatcaagttggtacccctctgggatggagctcccagaggaagaagcaggtggccatttttgctgttctgcagcctccactggttatatctccaggcgtgggaggggcctgggtgaatagggtctggagtggacccccagcaaagcgcaggagccctatgggaaagggacctgactgttaaaagagaagcaaatgaaagcaacaacaacagcagcatcaacaaaaaaagtctccacaaaaaccctatccaaaggtgagcagccccaaatattgcagctagataaacttatgaagatgggaaagaaccaatgaaaaagtgctaaaagctcaaaaagccagagtgctttctcaccatcaaatgatagcaacacctttacagcaagggcacagaactgggcagaagctgagagagatgaatggac

SEQ ID NO: 917297 - DNA, 593 bp, Homo sapiens
gagggatctgggcagtccagacaagtgggattgcctccagcacagtgcaccccctcctccaaggggcagacagagtgcttcattaagcgggtcccagatcctatgcctcctgaccaggcgagaccccaaaacagaggtcactagataccttatacaagagcattcctgctgtcatcaagttggtacccctctgggatggagctcccagaggaagaagcaggtggccatttttgctgttctgcagcctccactggttatatctccaggcgtgggaggggcctgggtgaatagggtctggagtggacccccagcaaagcrcaggagccctatgggaaagggacctgactgttaaaagagaagcaaatgaaagcaacaacaacagcagcatcaacaaaaaaagtctccacaaaaaccctatccaaaggtgagcagccccaaatattgcagctagataaacttatgaagatgggaaagaaccaatgaaaaagtgctaaaagctcaaaaagccagagtgctttctcaccatcaaatgatagcaacacctttacagcaagggcacagaactgggcagaagctgagagagatgaatggac

SEQ ID NO: 917298 - DNA, 570 bp, Homo sapiens
tcacgccatgggcaatgctggttgtggtggtattggtggtagtagtgatggtgccagacagtggatatgttaagggtgatctggggtgtttggaggaagagctatgttggggatcaggaaatgctactagaattggcatttgggatggctgtagaaagatgagcaagattttggcaaataattggtagacagtggggaaaaatgtccaagactgagtaaaagcacagatgtaggagctagagatacattggagaaataatgactagtttcacctggctgctgtctagagtaccctaagggcagaaggaaaggaagattcagttatctcatgaaagcctgaaatgctagtatgaggtctatgagatktctagagtaagcagcagggaactgttgaagcctttaaatcagggagcaatgtgttttctgtttaaatttgttagcagttaaataattctactaaactttattgaacacctactatgtactaggcactgtgattaatgctgaggacataaagatgaagaaggcatagtttgtcttcaaagacgggagacagacatgaaaataatc

SEQ ID NO: 917299 - DNA, 429 bp, Homo sapiens
aaatgaggattttcattcctctagttttatggaaaaacaaacagtatgatttatatttgaaagttctagaataaaaactatgaatttggaaaaaagcatttcaatgcctcattttattactgcaacatctccttaaagaaagggtctggaattaatgtcctagttgttttgtgatacagcaacaataaagttgctctctctattattttggggacagagttcacaggctctgtgggaaaggtcaaatctttctatttaatttcaaatkgtttgattggatgcagatctgatgtggctggggaaaaaattttacagttcagttttcaaattaagtcctattgaatgttacttcctcctagccgaaagtatccttgaaatacccatgggaaagttgagtgaaagaaaaggcaaggtgaatggtaaagattc

SEQ ID NO: 917300 - DNA, 584 bp, Homo sapiens
acattgacatcattttactattgcgctgtcttcattaacatgactttactattccaggaaactctttcccagaaagatatatgttacaaataccttgtggttcatttcaggaatttcccaaactcatttaaatgaatatcaaatggttaaacttttcagtagaaagtgtgaaacaacagtttgctccccagaatcttttgaacccyttgcctcaaaatccccacctcactgtgtcctccaatcctaaactcatatcaagatcattatcaaaccccaatccagcccctccgttgaaatacctgcctggaaccagactccaaaacctcatctcctttcgtcctctgctttctgaacactattaagactctggcaagtaagtagtttcccttactgctgtgaggcttggctttatcaagtagtagtgaaactgcctttgcaaaaattatgacagtgagagaaatctgatatagctggcgtcatctggcttctagcctcacaagctaatcccctttgttaactgtaaaacaaagagaataacagcctcttctaataacagccaaaactaatattctccttgcccagga

SEQ ID NO: 917301 - DNA, 601 bp, Homo sapiens
atttagattatttccagtttgggctactctttgatgattaatgcatctgaaatttattttatttatgaggtttgaggtagggatctatttttttttctaaatgtgtatcaatcctttcatcactatttaatgaataacagtaactccactgattttaaytagtacttttatcacacattaactttctatttatccttggatctattttgggactccctcttgaagtccaccgattatttgtctgttttcatcatagtggttttatgctacgttttatttttattttatttatttgtttacttatgagacagagtctcattctgtcacccaggctggagtgcagtggcatgatctcagctcactgtaacctctgtctcctgagttcaagtgattctcatgcctcagcctccccagtagctgggactataggcatgcaccaccacgctcagctaatttttgcatttttagtagagatggggtttcactatgttggctaggctggtctcaaactcctggcctcaagtgatctgcctgccttggtctcccaagtgctgagattacaggcatgagccactgccccacctatgctatattttaacat

SEQ ID NO: 917302 - DNA, 746 bp, Homo sapiens
catttagattatttccagtttgggctactctttgatgattaatgcatctgaaatttattttatttatgaggtttgaggtagggatctatttttttttctaaatgtgtatcaatcctttcatcactatttaatgaataacagtaactccactgattttaactagtacttttatcacacattaactttctatttatccttggatctattttgggactccctcttgaagtccacygattatttgtctgttttcatcatagtggttttatgctacgttttatttttattttatttatttgtttacttatgagacagagtctcattctgtcacccaggctggagtgcagtggcatgatctcagctcactgtaacctctgtctcctgagttcaagtgattctcatgcctcagcctccccagtagctgggactataggcatgcaccaccacgctcagctaatttttgcatttttagtagagatggggtttcactatgttggctaggctggtctcaaactcctggcctcaagtgatctgcctgccttggtctcccaagtgctgagattacaggcatgagccactgccccacctatgctatattttaacatctggtacagtaattatcatttagttattcttctttatcaaaattttctcagccatttccacacatttattatctgatatgaaatttaaaataaaattgtcagctcctcacctttccaaaaagataacattatgattcttatcag

SEQ ID NO: 917303 - DNA, 746 bp, Homo sapiens
catttagattatttccagtttgggctactctttgatgattaatgcatctgaaatttattttatttatgaggtttgaggtagggatctatttttttttctaaatgtgtatcaatcctttcatcactatttaatgaataacagtaactccactgattttaactagtacttttatcacacattaactttctatttatccttggatctattttgggactccctcttgaagtccaccgattatttgtctgttttcatcatagtggttttatgctacgttttatttttattttatttatttgtttacttatgagacagagtctcattctgtcacccaggctggagtgcagtggcatgatctcagctcactgtaacctctgtctcctgagttcaagtgattctcatgcctcagcctccccagtagctgggactataggcatgcaccaccacgctcagctaatttttgcatttttagtagagatggggtttcactatgttggctaggctggtctcaaactcctggcctcaagtgatctgcctgccttggtctcccaagtgctgagattacaggcatgagccactgcccmacctatgctatattttaacatctggtacagtaattatcatttagttattcttctttatcaaaattttctcagccatttccacacatttattatctgatatgaaatttaaaataaaattgtcagctcctcacctttccaaaaagataacattatgattcttatcag

SEQ ID NO: 917304 - DNA, 726 bp, Homo sapiens
tggctctgcggaggggggtgtggacctgcctcggtacctggagcggttgaggcctgtcttggtggtggctggggcacaggtgtctgcctggcctgtccttacagactgtcagtgttctctttcctggtattttggtgtttgctctgtcaaacccttcttcctcattggttggaactaggtcacaagcacattaagtccggtcatttcctctgccttctgggggtggattttagcagargaaacaactcctcccttgctggcctcatgacctctggtgaacactagctttcagcaaacagaaacttccagaggccagagcagcactcagtcgcctggccttccagcctcacaggcaagataagccaccctcacagacttctctgtgctcccatctaaacatctaaatcagccatctggtttccttaacagtagcacagactctgggagtttgagagaatgtgtctcttgtgaataagagaaaataagtccatactggggaaggtagctctccaaattgagatgaggaggtcagggtgggagggtgagtggtcgtgggttggccctgatgggaggagctcaccatcagggaagctgaggacctccctcctaatgtgacagcagagtcttggccacctcttcattccccagtccccaacctggctgctctgagtgtctttccagctactggaaagcttcttctgcagcctgcaaagctagctggaactg

SEQ ID NO: 917305 - DNA, 570 bp, Homo sapiens
tcaaaaaaaaaaaaaacaaaaaactgattttgcttagatttgtggtaccagtgctaagcctttgtgtatcctgatcctttttctcttagtgttttatatttaatcttgcaagtaagaaggcttacaaagcaccacctcttctctctcctctctggctctttcctggctgctgttcctagtaaaaaggcagaaagcagccctgggcatatctccctacccccagcgtgcacaaacacacacacacatacacacacacacacacagtcacaaacctgggaaaaggctttactcttcaccctgacagaatcaattaagtcaagactcatctctgcagtgggtgcagyccccccaggcaacacagatccctgtctctcccacttacccacaccatcaagaagcatttgcaggtgccgtgactgtttgctcatgcctgcgtgtcatttcctcctcctgcagatgagctgtccatgggactgggtcgtctgaaggacatagccctggggatgcagacagaaattgaggagcaagatgacattcttgaccggctgacaaccaaagtggacaagttag

SEQ ID NO: 917306 - DNA, 710 bp, Homo sapiens
atgcctataatcccagcactttggaaggccgaggtgggtgaatcacttgaggtcaggagtttgagaccagcctggccaacattgtgagagaccctttctgtactaaaaatacaaaaattagccagccatggtggcaggagcctgtaatcccagctactcgggaggctaaggcaggagtattgcttgagcctgggaggtggaggttgcagtgagccaagatcacgccactgcactccagcctgggtgacagagtaagaccctgtctcaaaaacaaacaaacaaacaaatcccacttctgttggctcctattaacgtgtcatttaaggaagccaattggccagtttaggcagcacatgacacagtctccactgatggccctgagtgtggccctgggttcacaggacgagaggtggctagcgtcttacaggtactaaccaaaatcacaataaatcttataatcagaagaccattattactcatttacaataagaragataactgaccagaatgtaagttttctgatgcgagcgcagagcattgtgcctggcacagagtaggcacttaagaagtttttgtaggatggatagtaagaaaaggaagggagagaagagggggtggggaaggagcaagtgaaaggggaaaaaagctcattctctttctgtaggaaggctatttgaggagccaagttaaaatcagattgaatagtgctt

SEQ ID NO: 917307 - DNA, 534 bp, Homo sapiens
gacatgggcttattcctggatacacagcactgtccccatatctacagtggtgatcctaagggcaacatggcatcacccaaatgtcttgttagtcactacagaatcacagtgtgagggatgaaggccatcaagacagagctgaggctggcagggtggctcaygcctataatcccagtgctttggaaggctgaggcaggaggattgcttgaggccaagggtttgagaccagcctaggtaacatagcaagaccccatctacaattaaaaaaaaaaaaaaagacagaaagaaaaaatagccaggcgtggcatgtgcttgtagtccaagctactggggagggaggctgaggcaggaggattccttgagcctgggagtgtgaggctgcagtgagctatgatggcatcgccgcactccagcctgcatgacacagtgagacctggtctcaaaaaccaaataataataacagtaataaaagctggaaagagctcaaagttactcatttgacagatgtgacagatgaagaaatagaagcgagtt

SEQ ID NO: 917308 - DNA, 577 bp, Homo sapiens
tgttcagggtgcccagagtggagagcctgttttcttctgtcttgacccctcctcccctcactcctgcaggactggcgacatgtcctggcttacggggaaaggatcctgagctcacatgcagtagacttgggcaggcaaagggggcaccaagggcacaggccaagccttgggggcaggtgccaatctccagtcccaggatcccccagggcagaacctgagccctcccagtgcttgccttcagccacctggctcccctcctgggaggcctctgctggatccagaagatgctcaaccctcaaggcctctgctgccactgacagctggcactggaggcaggacaagccctgcctcttctccctctattgggactggtcccctgaagaaccctgcaacaygttaaacattaccgtaaaattaaaacgcacaaatttgcagatctgtatgactcccagtgtaattgggccaataggcacaggaccagaccacagggaaacaggcacaatcacagaatgccaggtgccacaccaaggaaatttggcctgtgaacgcccagaggaggtagcaactaattctgcgc

SEQ ID NO: 917309 - DNA, 577 bp, Homo sapiens
tgttcagggtgcccagagtggagagcctgttttcttctgtcttgacccctcctcccctcactcctgcaggactggcgacatgtcctggcttacggggaaaggatcctgagctcacatgcagtagacttgggcaggcaaagggggcaccaagggcacaggccaagccttgggggcaggtgccaatctccagtcccaggatcccccagggcagaacctgagccctcccagtgcttgccttcagccacctggctcccctcctgggaggcctctgctggatccagaagatgctcaaccctcaaggcctctgctgccactgacagctggcactggaggcaggacaagccctgcctcttctccctctattgggactggtcccctgaagaaccctgcaacacgttaracattaccgtaaaattaaaacgcacaaatttgcagatctgtatgactcccagtgtaattgggccaataggcacaggaccagaccacagggaaacaggcacaatcacagaatgccaggtgccacaccaaggaaatttggcctgtgaacgcccagaggaggtagcaactaattctgcgc

SEQ ID NO: 917310 - DNA, 737 bp, Homo sapiens
taaaagccaggcatagctttaaatgtgaagtgaagataccaaaaagaacaactcagagatccatgtaatgattccatgatttatgcactacactggcatgtcaggcagaataatggcacctcaaagatgtccacaccctcaatcccctggaagctgtgaatatgttactttacatggcaaaagagaccttccagatctaattaaattaagaaccttgaaatggagggatatcctggattatttagataggcccagggcaatcacaaaggtcattaaaaggagaagagagaggcagaagagggagtcagagtgatgtgagatgggggcttggccaaccattgctccctttgaaaatgaaggaaggggccagaaatcaaggaatgtgggcagctctaggagctgtaaaaggcttggaaatgatggctgggtgcggtggctcatacctgtaattccagcactttgggaggctgaagtgggtggatcacctgaggttaggagttcaagactagcctagccaacattgtgaaaccccatctctactaaaaatacaaaaattagccgggcatggtggcaggccccrtggcaggtgcctgtagtcccagctactcgggatgctgaggcaggagaattgcttgaacccgggaggcagaggttgcagtgagctgagattgcgccactgcactccagcctgggcaacagagcaagactccatctcaatatatacatattaaaaaaaa

SEQ ID NO: 917311 - DNA, 537 bp, Homo sapiens
aggctgaccaccttgtgtgacaaggttggaacccaactgccacacttccctgtgtgtctccacatgtcctcaggcctgctgggggctcccttttcctggtctttcatgcagaggaaagacgtagtgtgtgttgagagccagcctggtggtgggatgtagtgactgcccagccagtggaagctgctgctcttgcctctttggaccgtccctcccctgtccaggacctcacttcatctaaacacctcaggtcaagcccagcaggaaaatgagattctcttttcctttctttttttcttttttcttttttctttcttttttttttttctcatgtrgagtctcattctgttgtccaggctggagtgcagtggcgagatctcggctcatcgcaacccctgcctcctgggttcaagggattattctgcctcagcctcccagggagctgggattacaggcacctgccaccatgtctggctaatttttgtatttttagtagagacagggtttcaccatgttggccaggctcgtctcgaactcctg

SEQ ID NO: 917312 - DNA, 901 bp, Homo sapiens
gcctgggcgatcaatttaagttgttccagttaggcttttattgcaaagcagtcatttgtattttcttaaggatcttaggaaaagcatgaattagagcagagcctacccagatatagagagaactagatggctgtgggttctggaactggctacactctttgactgtctcttggttttgtgttcagctcctcctcatgattttcatctttctgtatcctttcagcttttgccccagatagtagtcccttcattatctcagtacttgcatgtctaaaattccagaaagaaaatatgattcagctaaaaaatatctctgcttggcaggacctttaatgttaggtgctggccagccagttgatttctggtgtccctatgtccagtatgtgcctcagcctgcygagtagctgggattacagccaccaccacacccagctaattttttgtaatttttagcagagacaggttttcaccatgttgcttagactggtcttgaactcctgacctcaggtgatccgctcacctcagcctcccaaagtgcttggattataggcgtgagccacagggcccagcccacctgaggcttctttttccttcccaagccacatcaccatcctggtggaactctcctgtgaggacagccaaggcctgaactacctgcggtggggagcacctcagggtttgcccaggcaaccagccagccctggtccaaggcatcctggagcgagttgtggatggccccgtgccccaccagacagtgcgcctggaggacctggatgagagcggtgagccccaggctggggagccagtgctgcctggcatcctccgggcatcctacctggctgaggggctgggcctgggcctgccggtgacagccatccctgtccttcctgctgagggggca

SEQ ID NO: 917313 - DNA, 559 bp, Homo sapiens
gaaatagaagcagcagcaaaagaaaataaagagaaacaagaagatgagaagaagacaatacagactagaagaaagaaaaaagaacaggtgtgggaagtagaaggcctattatgataccttttatcccctccccaattcatgaaatttgaaaaagtcagagactatcacaacaaaaaagaaacaagatacacaaatagtcaccccctaagttttgttaagaataagacaatcctgcccctcacgcctggctcagtcaccagcaggaggagggcaccctccacagattgcaggagaaggggaaggactcctcctttccctaggtgcacctccactgctgccaccaaggcctggtacagtacccgcaggttcctccccatccccaggtcgggctgggccctgcagygctcctactcccccttcccagcccccagacttaatgctgataccaccactagcaccgatgccaatacaaccgctgtcgccctcaatgcagcagcccaccctacaaggctcctaccaccttgcccccgcgggcaccctcctaccactccagtcgagc

SEQ ID NO: 917314 - DNA, 628 bp, Homo sapiens
tacatcttagatttcctggcatctctcagttcctgtttccaggcctgtagggaaaagaaagagagatcagactgttactgtgtctatgtagaaaaggaagacataagatactccattttgatctgtactaagaaaaattgttttgccttgagatactgttaatctgtaactttagccccaaccctgtgctcacacaaatatgtgctgtatggaatcaagstttaagggatctagggctgtgcaggatgtgcctggttaacaatatgtttgcaggcagtatgcttggtaaaagtcatcgccattctcgattaaccaggggcacaatgcactgtggaaagccacagggacctctgcccaagagagcctgggtattgtccaaggtttccccccactgagacagcctgagatatggcctcgtgggaagggaaagacctgaccgtcccctagccctacatccataaagggtctgtgctgaggaggattagtaaaagaggaaggcctcttgcagttgagataagaggaaggcctctgtctcttgcatatccctgggaatggaatgtctcggtgtaaaacccactagtacatttgttctattctgataggagaaaaccaccctgtgcctggagtt

SEQ ID NO: 917315 - DNA, 606 bp, Homo sapiens
aacaccaatacctgtgggatagacaatggagtaggaaaaagatgtaaaagggcagatagaaaatggcgccagagaagctaaggatggaacgtttcaattaaggtggaaagacagcaaataatagtagaaagctttgaaacatgtccattgcctctagcaatatgaagggtgggagatatgagtaaaattgctgcaggtttaagagggaatgggaagtgattggttaggacatcaagaacttgggcagggtaacaaatacaatactcattttgaraagtttagaatgattaaggcaggacaaaagggaggtaattagaagggggacatagggacaagaaaggatagcttaaggttagaagaacttaaataggatgagggaaacagccattagcaattgacagaagatgctgaatggtacaagttctcctacaagttaagagattgaattccaaaagcgtaagacattaagaactcaatacataacaatctggggtcacttagtaatgggaaaagagatataaatgggccttgatgacataactgtttgcctcagtttaaccaggaaaagaaaacctactctgagactggagaggaggaaggaatgct

SEQ ID NO: 917316 - DNA, 584 bp, Homo sapiens
ggttggtgtatgtgtgtatttccccacacattttggtgaccacaggtggagtgttctgtgtttccttgagtgtgagagtaggaaaaacactttgttttgttttcctatctttaaaacatccaaaaatcaattactgtaatagaccatatcagtagaataaaaagcaaaaaccacataatcatctcaawagatgcagaaaaaatatttgccccaaatccaactccttttcatgataacaacactcaacaaactaggaatacaggggaacttttctcaactcagaaaagagcatctacaaaaaactcgcagctaataacatacttagtggtgatagactggatgttttcctcctaagatcaggaacaagagaagaatgtctaatctcaccacctctattcaacattgtcctggaagctccatcaatggcaactgggcaagacaatgaaataaaatgtattcagattgtaaaggaagaactaaaactttattggcagatgacatagtcttggttcatgtacatagaatatcgtggtcatgtatatagaaaatcctaaggaatccactaaaaaacaacctgctaggac

SEQ ID NO: 917317 - DNA, 632 bp, Homo sapiens
aaaagcatggtgtaaacatggggaatagtgctagctatagcttgatgggaatatgagcattttgttgagaaaagtgtgacatgaaacttgtttttttttttttctgagacaaggagttgcccagcctggagtgcagtggcacgatcatagctcactgcagtcttaaattcctgtgctcaaacgatcctcctgcctcagcctcccaaagtgctgggattacaccacgcctggccattgtgggaagtcttaaatgacacagtgaaacattttcattttgtttggcaggcaatgggggagctgctggaggttgctttttttttttttttctgagatggagtttcgctcttgtcgcccaggctgaagtgcaatggcgcgatctcagctcactgcaacctccgcctcctgggttcgaaggattctcatgcctcagcctctcaagtagctgggattacaggcgcccaccaccaygcccggctcatttttgcatttttagtagagacggggtttcaccatgttggccgagctggtctcgaactcctgaccttaagtgatctgcccgcctcagcctcccaaagtgctgggattacaggcgtgagccactaagcttgcgcccggcccacgggaggtttttg

SEQ ID NO: 917318 - DNA, 465 bp, Homo sapiens
caggaaagaaaggaaaattcatttgaaagagacccaagcgggcacctgaagatccaagagagaaaagagagcaaaagaagactgcaaaaagagagcctttcaccttgatcccaggactttttgggctcacctcttcccatgattcttccctttagggtgggctttccacatgcccagtgcttgcaccctttggcattgagcacagcgcagtgtgtttaaggagttatatgcatgcccacgtgagcctttcttcccttttctggtggagttgcccccagaagatcatacttcaccacttttgtctcttgacacgtatgyccaggaagttgcttctccctggggtttgcattcaattgacattttgatgttaatgggtgtggaccattagtaagtggcctctccctcgtgctgccaaactgtcatttttagaaaggcaatgcaataaccaccgaaccatcaccagac

SEQ ID NO: 917319 - DNA, 564 bp, Homo sapiens
acattaaaatgggctacaatgaggaactcagtcctagtgataagatgaagcactgagatacactgatttgtaaccacagtgaatttttttaaatttgcactaggatgaactagggtgggaaacagtagaagggaatgcactgtcagatgcaatgtattaagtcgttgagctatgggttggataataattataagggctatggaatttgatggctgttgtcagggagagagatgtattgagtaaaaacagtgaaagactgagtgtgatcaatcactatttaaaattaaatgtgactaccagaggccttattggaaacacatagagaaactctcatatcctgcagccagagggcagaaaacgctgagtatcagacccaggacttcattataaaaatagcagaatcacagaggarattgaattctcaacccagaaggtattccacatcagagtctggtctctaattatgaaggggtgagacactgagacttggaatggggaaatttatgttgatacactcataaatctcaaatccccagattctccaccccacccccaaacttcctg

SEQ ID NO: 917320 - DNA, 783 bp, Homo sapiens
gtaaaagtaaccttataaaatacttggtaacattgtcatataatatgataaatttgtttaataaatcttgtgctggttttaatttaatggtcatcttatcagaatgtttctaatttttaaatgattatcacacatataattttgccagatattaacatcaagttcagtaattttttttccatttttgagtaatagaagaaagtttgcataatcttgtaataaaaagttattcacaaaacttttataaaagtgttttaattcatctttccttcttgacaatctatttctgacatagcctaatatttkcactgtattttattattaatagcattcttttgagacggaagacataaattgatatacagtataatcctcctggataacaattcttttgttgctctgagtgatcaacttgattgggccacagggtaaccacatatttgattaacatgattatgtgcatatctgtgaagatgtttgtagatgaaattaacattcaaattgatagactaaataaagcagattgccctcccaaatatgagttggcccaatccaatctgttcaaattatgaataaaattaaaatgctgagtaagaaagaatttgctctctctgcctatctcttagtcaggacatcaatcttctactgccttcagtctcagactcagctttctatttaccccatcagctcctctggttctcaagcctttggacttgtagtggaacatatataatcacttctctttttactcagggtcttcagactcagttggaactatgccat

SEQ ID NO: 917321 - DNA, 626 bp, Homo sapiens
attcagtgtctgtggcttttccaggtacactatgcaagctgttggtggatctaccttctggagtctggaagaaaatggccctcttctcaaagctccattaggcagtcccccagtaggaactctgtgtgggggctccaaccccacatttcctttccacactgccrtatcacaggttctctctgtgggttccaccactgcaacagatttctgcctggacatctaagcgttcctatacagcctctaaaatctagacacaggttcccaaactttaattattgtcttctgtgcacccacaggactaacaccacttggaagctgccatagctgggggcttgcactctctgaagaaatgacctgagctatactttgggcccttttagcccttgctggagaggcagggatacagtcctgaggctgcacaccacaggagatccctgaactgggcccacaaaaccatttttctctcctagttctccaggcctatgaggggaggggctgtcatgaagatcctgacatgccctggagacatattccccattgtcttggtgattaacattcggctccttgttacttgtgcaaatttctgcagccggcttgaatatctccccagaaaattggtttttctt

SEQ ID NO: 917322 - DNA, 485 bp, Homo sapiens
tctaccaaaaatacaaaaattagccaagcgtagtggcatgcctatagtcccagctacttggtaggctgaagagggaggatcaattgatcctgggaggtagaagctacagtgagctgtgatcacaccaatgcactccagcctgggcaacaaagtgagaccctgtctcwcaaaataataataataataataatgatacaaaaataaattaatttagaagtaggtagtaaaagaggaagaaaaggacaaaaatggaagaaacaagtataaaaccaataccaaaaggcatgatgtaaataaattcattcataagaaagccacattaaatttaaatggtttaaatagctatggcacagaaagagattgtcaggcctaaatacatacacaaatatactatgttcataatatagttaatgtcagttcttccaaaactgatctataaattcaacaaaatgccaatgaaaaaatctcagaagccctttttttgt

SEQ ID NO: 917323 - DNA, 562 bp, Homo sapiens
tgagaggccgaggcaggtggcttacttgagcctaggacttacagaccagtctgggcaacatggcaaaatcccagctctaccaaaaatacaaaaattagccaagcgtagtggcatgcctatagtcccagctacttggtaggctgaagagggaggatcaattgatcctgggaggtagaagctacagtgagctgtgatcacaccaatgcactccagcctgggcaacaaagtgagaccctgtctcacaaaataataataataataataatgatacaaaaataaattaatttagaagtaggtagtaaaagaggaagaaaaggacaaaaatggaagaaacaagtataaaaccaataccaaaaggcatgatgtaaataaattcattcataagaaagycacattaaatttaaatggtttaaatagctatggcacagaaagagattgtcaggcctaaatacatacacaaatatactatgttcataatatagttaatgtcagttcttccaaaactgatctataaattcaacaaaatgccaatgaaaaaatctcagaagccctttttttgtat

SEQ ID NO: 917324 - DNA, 625 bp, Homo sapiens
gcagaaacattaaaagatgaggaggccgggcacggtggctcacgcctgtaatcccagcactttgggaggcccaggcgggtggatcacgaggtcaggcgatcgagaccatcctggctaacatggtgaaaccctgtctctactaaaaatacaaaaaaattagtcgggcgtgagcgggcgcctgtagtcccagctactcaggaggctgaggcaggagaatggtgtgaacctgggaggcggagcttgcagtgagccgagatcgcaccactgcactccagcctgggcgacagagcgagactccatctcaaaaaaaaaaaaaaaaaaaggtgaggagagcaaaatttattaaaagaaagctctcagtgaaaaaaaggagtcctgccaacagggtctcacctcccagattgaataccaggtcaccacacacacktgccgaagagaccaggctccttcctggtgcacaaggcaccatcttcccagtgtctccaccccactctcccagtgtgcaggtgggtctcccagtgttcaggtgggtcccccagttcgttgtgggtatgcccaaacaaggccctgggtgggttccctcgtctgtacaaaagcatctgatgcaaacacttgtgaggcgggt

SEQ ID NO: 917325 - DNA, 558 bp, Homo sapiens
taatttttgtagatattgatgaatgttttctagactgattatttatttaggaaatataaactagtgaagtttgtgttgcataatttttccacatcttttagctatagctgttttacaaagtggaaatttcctgaattggcacatttgttcagtaagataaaatatattcagaaaatctkggataaataattggtactcctccatccttttaaatcagttttcagagcaatgattaattgcccaagcagtggtatgaccagtgagattactgattttttttttagttattttgaaatggggtctcactttattgcctaggatggtctccaacttttaagttcaagggatcctcctgcaccagcctctggagtggctagaattacaggcagtaaacaccatgcctggtgtgatgattaacactgaatgtcaacttaattggattaaaagatgcaaaatattgttcctgggtgtgtctgtgatggtgttgccaaagaagattaacatttgagtcagtggactgggaaaggcagacccaccctcaatctgggtaggcaccat

SEQ ID NO: 917326 - DNA, 476 bp, Homo sapiens
tttgacataaagtcctgtaatcccagcactttgggaggctgaggcaggtggatcacttgaggaaaggagtttgttaccagcctggacaacatggcaaaaccctgtctctactaaaaatacaaaaaattagctgggygtggtggtgcacacctgtaatcccagctactcgaaaggctgagacaggagaatcacttgaactcaggaggcaaaggttgcagtgagctgagatagcaccactgcactccagcctgggcaacagagcaagactctgctcccccgcacctccccccagccccccaaaaaaagctagatgtctaaataacggcaacagttacaaatgaaattaaaataaaaagcagtattcacaaagcatcaacagacaaaatgcttaagaataaatttaatgaaagacgtgcaagtcttctagtaaaaactatattatgctgatagacatgaaaagatctaaagaaatagaa

SEQ ID NO: 917327 - DNA, 688 bp, Homo sapiens
atgaccacatcacctcttcagcaagggttctgaatttgatgagatggctaaaatgacagaagtagatttcagaatatggctaggaattaagatcattaagctacaggaatatgttgaaacccaaggcaaggaagctaaaaatcatgataaaacaatgcaggagctaagacacaaaatagccagtatagaaaataatgtaaccaaccaaatagagctgaaaaacacactacaagaatttcataatgcaatcacaacattaataggacagtagaccaaacagaggaaagaatctcagagtttcaaaactggctttctgaaataaaacagtcagacaagaatagagaaaaaaaaatctaaaggaatgaacaaaacctccaagaaataagggrttatgtaaagagaccaaatctatgactaattgatgtctctgaaagagatggggagaaaggaaccaacttggaaaacatatttcagtttatcatccatgagaatttcttcaatctagctacagaggccaacattcaaattcaggaaatgcagagaacccctgtaaaatacttcacaagaaggtcatccccaagacacataatcatcagattttccaaggctgaaatgaaagaaagaatgttaaaggcagctagagagaaaggcccggtcatctacaaagggaagcccatcagactaacag

SEQ ID NO: 917328 - DNA, 674 bp, Homo sapiens
aggaaaaacagacacaagctcttatcatgggaatggctgacctgcaaggaaagatgcatgcccagccttgccaggtgtctattgttaaagtgagggctttgattggaaaagaatgagaccctgaaacttggaataaggacatgtgggaggaccctgatgaagctggggacactgagcttgtaagatctgatgaaccttttttgccagaaggagcagcttccccacccccagtagtggcaacatcgcctccccaactcatgctgycatcagcctttccacctttgtctgaggagataaaccctgcactgcctgaggcaacagtaatggtctcccctgaggcagtttccaggcaaaataatgttgattctcctcaggagccacccccaatacccctgtttgcttttagacctataactaaagcactggtgggtccctggaggtgagcttgagagtgtgacccatgaggaggtgcactacactcgaaaagaactttttgagttctctaatttatataaacaccgatctggagaacaggcatgggaatggatattaaggtatgggaataatggtggaagggacatagaattggatcaggctgaatttattgatttgggcccactgagtagggactctgcttttaatgttgtagctcagggagttaaaaaaggttctaa

SEQ ID NO: 917329 - DNA, 714 bp, Homo sapiens
agatgtggtttcattgcttgagcaaattgacactggtacctggtacatagctattgacttggcaaatgcctttttctcccttcctgtccataagacccaccagaagcaatttgacttcaactggcaaagccagcartatacctttactgtcctacctcaggggtatttcaactctctggctttgtgtcataatcttatttggagagaacttcattgcattttgcttccaccaaatatcaaactggtccgttacactgatgatgttatgctaattggatccagtgtgcaagcagtagcaaacacactggagttattggtgagacatttgtgtgccagaggatgggaaacaaatctgactaaaattcagggatcttctacctcagtaaaatttctaggggtccagtgatgtggggcctgttgagatattccttctaaggtaaaggataaattgctgcattaggcccctcctacaagcaagaaagaggcacagtgcctagtgggcatatttggattttggaggcaacacattcctcatttgggtgtgttactccagcccatttatcgagtgacccaaaagactgcctgttttgaacgcagtttagaaaaggagaaggctctgcaacaggtccaggctgctgtgcaagctgctctgccacttgggctgtgtgactcagcagatccagtggtgcttgaggtgtcagtggcagacaggat

SEQ ID NO: 917330 - DNA, 667 bp, Homo sapiens
aaagaacacaatatcattttggaggtgacatatatgtttagtaccttgattgtgtgatgacatcacaggtatatgtgtatgtccaaactaattaaattgtatacaataaatatgtgcaatttttgtatatcaattgcatctcaacaaagcttaaacaacagcaaaccaaaatgtgttctgttggaatcagtttgcactggcttgtgagagccaattgttayatttttatgaattttatgagcctaatattaagcacaactattattaaaagctaaatgatataaacttacaattaaaaaattaaatttaaaacacaggttattactcagaacatatcattttctaattactgcactccatttcatgattattagtaatcttggagttgtttacatttgctatgtctgcccaaagggaataaacctaatggtgggaggctgcatagctccttccaaatgggtgtgcagtgatgttaccttagtagcttgaaacaggatggaaactggcaaacactacaaacctgagctttcctgttctctccactggagacctgtggttaaacatttacccacagatgacggggtcaacaagcagaagtggctgcaagtggcccttcaaggtgctgtcagggttggtttctcattcaggatggcctggaaaacaaacc

SEQ ID NO: 917331 - DNA, 611 bp, Homo sapiens
ctttccatcatgtgaagaaacagagaaagttggctgtctgcaagccaggaagagagccctcaatataaaataatctttccaatccttaatctgggaattgtagctccaagtgtgaaaaaataaatttctgttgtttraggtatccagtctatggtattttcttataagagcatgtgcagcctaatgcaaccccttatcagatatacgacttgcaaatacttttcccattgtgcagctcacatttttactttgctgattgtgtcttttgaggcacagattttagttttgatatagtccaatctatctgtttttttaattttgccgcctgtgctcttggtgtcatacccaagaaaacattgcctaatgcaaggtaaggaaattttcccctatttctctttctacaagtttcatagttatagttctcatatttaggtcttttattcatttgagttaatttttgtgtaggctgtaagataagggtccaacttcattgttttgcatgtggatattcagctttcccaatataatttgttaaatactatttcaccaaggaatggcactggcacccttgatgaaaattatttgaccacatgtgagaccacatttggggg

SEQ ID NO: 917332 - DNA, 632 bp, Homo sapiens
tcattagacccagcaatctcaatattgagtatatactcacaggaaaataaattgttctaccaaaaagacacctgccctcacatgtttttcacagtactatttacagtagcaaagacatggaattgagagacaggactagctggatttcttaggctgactaagaatccctaagcctagctgggaaggtgacctcttccacctttaaacacagggcttgcaacttagctcacacccgaccaatcagatagtaaggagagctcactaaaatgctaattaggcaaaaacagtaggtaaagaaatagccaatcatctgttgcctgttgcctgagagcacagcgggagggccaatgatcgagatagaaacccaggcattygagccagcaatggcaaccccctttgggtcccctccctttgtatgggagctctgttttcactctatttcactctattaaatcttgcaactgcactcttctggtccgtgtttgttatggcttgacctgagctttcgctcgttgtccacgactgctgtttgccactgtcacagacccaccactgacttccatctctctggatccggcagggtgttcactgtgctcctgatccagcaaggcgcccattgccactcctgatcg

SEQ ID NO: 917333 - DNA, 519 bp, Homo sapiens
gtgcagggtccagcaggcccacttgatcccagcatcccacgtgtgcctgctcggggtggccagctcactgcttcttcacctctagcccaaccagcaggtgccccaccatgagcccctccaggctcaccttgcccatccctgccatgtgacctgggactcttgagatgagatcacagctgcagagcacacagcacagggaggagctcatcagcatcttcccacctgtggtgccctggcccagcctccttccggttggggttggacccgccctggcagccaggttttgcgtcacctgccccacccgccctgtaacctacttgcccaactgctatcccggtggccgtgaggccagttgacagratggagaggggtaagcattttccgcctggagaggatgggcgtgtggccatctgactgcttctgcaagcctggtggttgtgtgcaggctgccctggtggtcttagccccttggggcaggcggggtcctgtgcaggatgcagagactgggcgtggcttcct

SEQ ID NO: 917334 - DNA, 603 bp, Homo sapiens
acacactccagcctgagcaataagagcaaaactccatctcaaaaaaaaaaaaaaaaaaaaaaagaaaagaaaagaataaaagaaaaatccatttaaaaaaatcgagagccaatcttgctaggaactgagggggttactggctgcaagggagatggggaaaacaagtcctggcctccacctaggggatctatagactcacagtgcaggaatttccccggagacagaggagcgctttaaaggtactgtgcggcccaaaatggtggagtagggaattccagggctccatccctcccccaacacaactaataaggtggcaaaaactgtcagaatcaacttctgaagtactctgggatctagctttttgttagctttcatttttttgagatggggtctcactctgtcccccagactggagtgccactgtgcaatctcagcccactgcagccttgacctcccrcctcagcctcagagtaggtgggatcacgggcgcaagccaccatgccaggctaatttttgtattttttgtagagacagggttttacaatgttgcccaggctggtattgaactcctgagttcaagcaattcaccagcctcagcctccc

SEQ ID NO: 917335 - DNA, 732 bp, Homo sapiens
tctccagctggagatttctgcacctgtctgtagcatccattactagcatcccattcccaatattattattcactcctttacttccgaatataaagcagatgtcatctggggccctttttgccccttctgatttcaataaaattttccccaacgtcctgtcttcctcctcctcctctatcccattcctgaggcatctcaagtcttcccttggatttctgtcaactcctgacttttctgcctctagagctttggctcctagtaggatatttctgacctgcagcatatcatattctttgtttttaaaatttattattgttggccaggtgcagtggctcatgcctgtaatcccatcactttgggagaccgaggcaggtggatcacctgaggtcaggagtttgagattaacctggccaacatggtgaaatcccgtttctactraaaatacaaaaattagctggatgtggtggcatgctcctgtaatcccagctactcgggaggctgaggcaggagaattgcttgaacccggagggagaggttgcagtgagtcgagatctcgccactactccagtgtggacgacagagcaagactccatctcaaaaaaaacaaaaacaaaaccaaacaagcaaacaaaaaaaaaaaaaacaagaaaaggcagctcagagaggtcaagtgtctagcttgaggccatacagctaactgggtcagaactgagatttgaacccatgtatgtc

SEQ ID NO: 917336 - DNA, 732 bp, Homo sapiens
tctccagctggagatttctgcacctgtctgtagcatccattactagcatcccattcccaatattattattcactcctttacttccgaatataaagcagatgtcatctggggccctttttgccccttctgatttcaataaaattttccccaacgtcctgtcttcctcctcctcctctatcccattcctgaggcatctcaagtcttcccttggatttctgtcaactcctgacttttctgcctctagagctttggctcctagtaggatatttctgacctgcagcatatcatattctttgtttttaaaatttattattgttggccaggtgcagtggctcatgcctgtaatcccatcactttgggagaccgaggcaggtggatcacctgaggtcaggagtttgagattaacctggccaacatggtgaaatcccgtttctactaaaaatacaaaaattagctggatgtggtggcatgctcctgtaatcccagctactcgggaggctgaggcaggagaattgcttgaacccggagggagaggttgcagtgagtsgagatctcgccactactccagtgtggacgacagagcaagactccatctcaaaaaaaacaaaaacaaaaccaaacaagcaaacaaaaaaaaaaaaaacaagaaaaggcagctcagagaggtcaagtgtctagcttgaggccatacagctaactgggtcagaactgagatttgaacccatgtatgtc

SEQ ID NO: 917337 - DNA, 478 bp, Homo sapiens
ttgagattaacctggccaacatggtgaaatcccgtttctactaaaaatacaaaaattagctggatgtggtggcatgctcctgtaatcccagctactcgggaggctgaggcaggagaattgcttgaacccggagggagaggttgcagtgagtcgagatctcgccactactccagtgtggaygacagagcaagactccatctcaaaaaaaacaaaaacaaaaccaaacaagcaaacaaaaaaaaaaaaaacaagaaaaggcagctcagagaggtcaagtgtctagcttgaggccatacagctaactgggtcagaactgagatttgaacccatgtatgtctgacctggtgctgggctcttttctgtagaggattcatccagccccacatacctggtctagaagaagggaagtggtgggagaggagcaccccagagagaggagcccgaatcatggggctgcaagctggtcctgggtcccatg

SEQ ID NO: 917338 - DNA, 478 bp, Homo sapiens
ttgagattaacctggccaacatggtgaaatcccgtttctactaaaaatacaaaaattagctggatgtggtggcatgctcctgtaatcccagctactcgggaggctgaggcaggagaattgcttgaacccggagggagaggttgcagtgagtcgagatctcgccactactccagtgtggacgacagagcaagactccatctcaaaaaaaacaaaaacaaaaccaaacaagcaaacaaaaaaaaaaaaaacaagaaaaggcagctcagagaggtyaagtgtctagcttgaggccatacagctaactgggtcagaactgagatttgaacccatgtatgtctgacctggtgctgggctcttttctgtagaggattcatccagccccacatacctggtctagaagaagggaagtggtgggagaggagcaccccagagagaggagcccgaatcatggggctgcaagctggtcctgggtcccatg

SEQ ID NO: 917339 - DNA, 478 bp, Homo sapiens
ttgagattaacctggccaacatggtgaaatcccgtttctactaaaaatacaaaaattagctggatgtggtggcatgctcctgtaatcccagctactcgggaggctgaggcaggagaattgcttgaacccggagggagaggttgcagtgagtcgagatctcgccactactccagtgtggacgacagagcaagactccatctcaaaaaaaacaaaaacaaaaccaaacaagcaaacaaaaaaaaaaaaaacaagaaaaggcagctcagagaggtcaagtgtctagcttgaggccatacagctaactggrtcagaactgagatttgaacccatgtatgtctgacctggtgctgggctcttttctgtagaggattcatccagccccacatacctggtctagaagaagggaagtggtgggagaggagcaccccagagagaggagcccgaatcatggggctgcaagctggtcctgggtcccatg

SEQ ID NO: 917340 - DNA, 704 bp, Homo sapiens
ggagacccaggagaactgatgatttagctccagtgtgaggcccaaagaccctgtgagttcccaggagagccaatgacataagttctggtcctaacgcgagcagacttgagatgcaggaaaagccaatgtttcagttcaagtctcagggtggaaaagcacagtgtcccagcccaagcaggcaggcagcaggagttctcttgtactgtgcctttttgttctatatgggccttcaacggattggatggggcccacccacattagggagggcgacttgctctattcagtctgcagttcaaatgtgaatctcacccaggaacacccttacagacacacactcacaataatgtttgaacaaaaatatctgggggccaggcatggtggctcacacctgtagtcccagcactctggaaagccaaaatgcgtggatcacttgaggccaggagtttgagaccagcctgagcaacatgacaaaaccctgtatctayaaaaaaaaatacaaaaattagctggtatgatggcaccacatgtggtaccagctactcaggaggctaaggtggaaggatcgtctgagttcagggaggttgaggctgcagtgagccatgactgactgtgccaccgcactccagcctgagcgacagagcaagagcttgtctcaaaaaaaaaaaaaaaaaaaaaaaatctgggcagcccgtggcccagtcaaa

SEQ ID NO: 917341 - DNA, 601 bp, Homo sapiens
cggagtctcgccttccatctaactgtaggttagggccttttaatattcctctgacagagattctttatgtaggaagggatgttaagaagaaagatgttctctaacaagaaaacatttagacaaagaggatatgacctccctcactcaatctcgcctgctttcttggcatacatgggaagagaggatgaactagaaaggaaatattatttgctgatctcctttctttgtctgaggcacattgcacaggatgtctcatttgatattcacatgcccatgcgaggtgaacaatccacaccatgctttacagaaggggaaactgaggtcaagaaacatgctcatgggccgggcgcggtggctcacacttgtaatcccagcactttgggaggctgaggtgggcggatcatgaggtwcagcattcgagaccagcctggccaacatggtgaaaccctgtctctactaaaaatacaaacattaggccaggtgtggtggcatgcacctgtaatcccagttactcgggaagctgagacaggagaatcgcttgaacccggaaggcaggaggttgcagtgagctgagattgcaccattgcactccagcctgggc

SEQ ID NO: 917342 - DNA, 493 bp, Homo sapiens
ccagactggtaacttggctcccagttctgccatcccacccaggaacagaagaccgcaaaaaaacctcacttcgaccccctatgataccatctccaacctgaccaatcagcaccacttcctgagccgctacccaccaaattatctttaaaaactctgatccccaaatgctccaggaaggctgatttgaataataataaaactcaggtctcccgcacacgtggctccgtgtgaattactgtttttccactgcagttcccccatcttgctaaattggctctgtctaggcagggggccaggtgaacccaytggatggtatatttctcaagagtcaaatattaataggtttaacatgtaagactgacatatgtgtgtgtgtgtgtgtgtgtgtgtgtttacatatacatatatttcaatagcttttggggttcaagtggtttttggttacatggatgaattataaattatatagtggtaaagtctaagattttagtac

SEQ ID NO: 917343 - DNA, 634 bp, Homo sapiens
aatataaggaccaatgacactatgaagaaactgtatcaactagtgtgcaaaataaccaaatagcagcatgatgacaggatcaaattcacacataacaatactaaccttaaatgtgaatgggctaaatactccaattaaaagacacagagtggcaaattgaatagagtcaagacctatgggtgtgctgtattcaggagatccatctcatgtgcamagacacacataggctcaaaataaaaggatggaggaaaatttacaaagcaaatggaaagcaaaaaaaaagcaggggttgcaatcctagtctctgacaaaacagactttaaaccaatatagatcaaaaaagggcattatgtaatggtaaaggaaacaattcaataagaagagctaactactctaaatgtataagcacacaatacaggagcacccagattcataaaaacaagttcttagagatctacaaagagacttagactcccacataataatagtgggagactttaacaccccattctcagtattagacagaaaacgagacagaaaattagcaaggatattcaggacttgaactaagctctggatcaagtggaactagtagacatctacagaattctctacaccaaatcaacaggatata

SEQ ID NO: 917344 - DNA, 584 bp, Homo sapiens
ctcattaacatagatgcaaaaagcttcaacaaaataccagcaaatcaagttcaacagcatgataaaatgatgatacaccatgatcaattgggttttatccctggagtgcaaggatgttttgacatatacaaatcaataaaaataatacactaccttaagagaatgcaagatacaaatcacatgagcatctcaatagatgcagaaaaaacatttgacaaaattcaacatccttttatgagaaaaattctcaacaagttaagaatagaaataatgtaccctaacctaataaacaccttataaaacaagcccatagctaatactatactcaatggagaaaaatatttctccyaagatctggaataatacaagggtactcactcttatttattttattcaacatagtagtaaactccctggacagagaagttggcaagaaaaagaaaggaaagtcatccaaatttaaaagaaaaaagctaaatcttctgtgtactgatgatacgactttatatataaaatttcctgaaactccacccaaaacaattagaactaataaatgaattgcagggtacaaaattaacatataa

SEQ ID NO: 917345 - DNA, 584 bp, Homo sapiens
acaacttcagcaaagtttcagaatacaaaatcaacatacaaaaatcactagcattcctgtacaccaacaacagccaagctgagagccaaatcaggaaggcaatcccgttcacaatcaccacaaaaagaatagaatacctaggaatacagctcaccaggaaggtgaaagacccctacagtgagaattacaaaacactgctcaagtaaatcagtgatgacacaaacaaatggaaaaacattccatgctcatgaataggaaaaatcaatatcattaaaatggctagactgcccaaagcaatgtacagattcaatgctattcctatcaaactaccaatgaaattcttcacagaacaagaaaaaactatttaaaaattcatatggaaccaaaaragagcctgaatagccgaggtaatcctacgcaaaaagaacaaagctggaggcatcatgctacctgacttcaaactatactacagggctacagtaaccaaaacagcatggtcctggtaaaaaacaggcacatagtccagtggaacataatagagaggccagaaataaggccacacagctacaaccatctgatctttg

SEQ ID NO: 917346 - DNA, 812 bp, Homo sapiens
gttcactattacccaccttctgacgcctacttctgtcaattcatccatctcagccttctccctcttactggagaggtgttgtgatcatttggaggagaagaggccctctggctttttgagtttttagagctttttcattgattccttctcatcttcatgaatttatctgtcttcaaactttgaaggtgctgacctttggatggggtttttgtggggacttttttgttgatgctattgttgttgttgctttctgtttgtttttcttttaacagtcagggccttcttctatagggctgctgtggtttgctgggggtccactccagacactatttgcctggattcctcccacacatggaggtgtcacctgtggaggctgcagaacagcaaagatagctgcctgctcctttctctgggatctctgtcccagaggggcactgatctgatgccagaaggaactctcctgtataagctgtcyggcaatttttgtttgggggtgtctcacccactcaggaggcatgggatctgggacccacttaatgaagcattctggctgccccttggcagagtcagtgtgctgcactgaggggaatcccactcatctggactgctcgaattcctcagagcaagcaggaggatatggctgatccaaagagactgtggctgcccctcccctcaggggttcagtcccagggggatcagagttctgtccctaaacccctggctggagttcctaaaattcctttagggaggcccctcaccctcagtgaggagggttgggtcagggtctggcctaaagaggcagtctggccaca

SEQ ID NO: 917347 - DNA, 658 bp, Homo sapiens
actcctgtgttcattgcagcattattcacaatagctaagacatggaattagcctgagtgtccatcaacagattaatggataaagacaatgtggtatatatacacaatgaaataatatttggccataagaagaaaattctgtcattcacaataatatggaagaacctggaggacatcatgttaagtgaaattaggcacagaaagacacatactgcatgatctcacacatatgtgtaatctaaataagttgatctcatagaaatagagagtagaatgatggttaccagaggctgtgctgattgggagggatggggagaggttggtcaaaggatacaaaattacagttaggtaggagaaataaattcaacagatctactttcagcatggtgactatatttaaagatgatgtattctttatttttttaacttttattttagatatgggggcagatgagcaggtttgttaatggcagtgagcataytacccagtaggtaattttttcaactcatgccccccgctccctaatttcctcccaactccagcagcctgcagtatctattgttcctatgcttatgtccaggggtgctcaatgtctagcccccacttgtacgttagaacatgcagtattcgattgtctaattgtgcattactttgctta

SEQ ID NO: 917348 - DNA, 841 bp, Homo sapiens
tactcattctgttttatagaatgaggtgttatccaagtctagaatcacaaataaaagcaaataaagatttttaaactaaatttgttgcaattttgtcttttgacatatggctctgtcaacctaaaataatcaaaagggtcagaatgcagtttaaacagagtttattcaaacacaaatgtggaggactacagcctgggacacacttccagcttgccttggggagtactccagagaacaaaagagaggctcaagtttttaaattaaaaaatgatgaatctgaggagggagcaattacaaaagttctttatcaaaaaatgttcattggtttacagaaataacattagttcctgattggctatacattgttgaactatagggcatatggcattttatggctcgtggaagtcattctagagtctacacagcaagtggcttcaagaagtgattatttagctcaaggggtagtgagacttgactgctattacattgtacatgcckttctgggcctgctaattgaaatgggctcatgttttttggataaaaggtgtttttctcctttctcaactcaaaaccaataagccttttaaatggcttagcaatggatgcaagaggtgtacccaaggaagttgaagaacatgcagtccctatgatccaaactcactcccaaagatagtcaaaaagaaaaaaagcaaaaaccctcattgccacaggcagtcaaggcaataaggaaagagagatgagctccctgagggatggcaatggttcgctagaacgtcagcagcaaatggagtgcctagacttccatgtatctgcacaactgactactaattctcatggccac

SEQ ID NO: 917349 - DNA, 614 bp, Homo sapiens
aggtctgcagttcagttgcggtagctctgctccacattcctttctttctgatgatatgaaggacatgtccttctcatgagattggtagaaaaacaaatgggaaaagcaaaacatgtgatctcttttattggaaacgcttggaatcagtgcactatcactttctcccttattccattgaccaaaacaagtggcatggccaagcccaacatgaatgaagcagaagaatacacttcacccagtggtatgaaatttaaagtcacatgactgagtacggattcaagaagtgaagaatgggaataataatggagtttatcacatgggataaagttagggctctaaagcagaggttggcaaacatttttggaaagagagagatagtaaatatttaggctttgtaggccctatggtttctgccacaactactcatctctaccattgtagtgcaaaggcagccatagaaagtaygtaaatgaatgaacatggctgtattccaataaaacttaatttactggcagtgaaatttgaatttcatataatattcatgtgccacaaaatattcttcttttgatttttttcagccttttaaaagtataaaactattattaatttccagc

SEQ ID NO: 917350 - DNA, 582 bp, Homo sapiens
ccagctggccattcccagtttccctagctcagaacacacattcaggtgcatctgtcatacagggtcatcctcagggtacgctaaagttattgctctcaggtgcatttaccatacaatctatagacaatgttaagtgaaaacttactgtactctggctgtgaaacagtgttgtcaatactattctattgttactactttcaacaacttggcaaaaaaacctttgatagttatttggtattgaacacacacgtctaacttgttgtccgtgtaattgcagggtctgtcagtggtaacgtgaacaggagctggggaggcatatttgtgagaagccaaatctgagtgctgtcacatttcatcctgtctgctgactaatatccacgttwgggagggaagttctccgaatgtcttgcttcttttttcatcctcaaccgtgactgtgttaccccgctctgaccgtggcatagcatcctgacatgagagtacttccagctcttcagggtattcatattgcagaagttttgagtttaaacaactgtggaaagtatattattgctaatttttgttgaattattattttatttt

SEQ ID NO: 917351 - DNA, 771 bp, Homo sapiens
ctacagccgttttttaaaatcactcttttatgcagcatccctggaaagtcatccattaacccaagagagggagcatggactcccacaaaggaagcattttgttgcccactgaacacatattgaaagcacttttctgtagtttgaaaatcttcaatctgctgcaccctttaaatcttggctggcgaagacaggacctaacagatcacattcccagagttttgctggcagtactgataaaatgaagaagccagtaaaataaaggccacattgctagtgtgtgaagttcaaggaagcctggtcaaaaatctaatgtttgttaaatggaaagggaaacagcctatcctccagcacctgctaaaaatgtaatgattttcctggcatgctttaagggaagggcaaatcatagttctgagttcaatatcatgtggccccttgagaaaggaaactgaaagcagcaaagaaaaactctaatcaggagcaagatatttgctgctggttttccctcacaacccatgccaaccagtggaacaacagctaawattaacggtttttttcctgagtgcctttgggaggcactgtgagcccaggtgagtctaagctaagcactggccaggtgcagagaaaagagactggcaggagctagggtccgtaacgtcaggcagcccacgtcggagcttagattaggagagagtaggtgacgggcctgtggaccagggatagctttggaagggggtggggaggggactgtggttataataatacaataagagc

SEQ ID NO: 917352 - DNA, 547 bp, Homo sapiens
atgtggggttgacacgttctttctctttgaggtgtccaactctgtccatttactgagtgatttgaaaagctgctagttagttttaagcatggcccagagcaagagaagtctctgcagtaggtccaggctctgtgcatgccgctctgccacgtgggccacatgacccggcagatccactggtgcctggggtgtcagtggcagacagagaccctgtgtggagtctttgccaggcccctgtaggtgaatcacrgctcaggcctttaggattttggaggaaggtcctgtcatcattcacagataacccactctccttcagagaaacagctcttgccctgcttctgggcctttgtagaaattaaacacttggcagtgtgaatctataatcccagcactttgggaggctgaggtgggcaggtcacctgaggtcaggagttcaagaccagcctggccaacatggcgaaaccctgtctctactaaaaatacaaaattagccaggtgtggtggcgagtgcctgtaataccagctacttgggaggtggaggcacgag

SEQ ID NO: 917353 - DNA, 623 bp, Homo sapiens
ctggatgaagggatatccagagagcatgaaagcattatctctgggtgtgcctgtgagggcatttccggagagactggcgattgaatccgtgggctgaataaggaagatctgtcttcacccaaagtgggagggcaccatccaatccactgagggcccaggcagaacrggaagatgaattcgtgctctcttgctctctcttcccccaccagagctgggacacccacctcctactgcccttagacatcagaactcctggttctctgggctttggaccctggaacttataccagtggcccctctgactgcgagttacactgtcggcctccctggttctcagatcttcaggcttgaactgagccacactaccagcctccctgggtctccagcttgcacagacagggcaaatcatgggacttctcagtctccatactcatgtgagccgattcccatcataaaccccctttcttccatccatccatccatccatccatccatccatccatccatccatccagctatctatctagctaccgagctagctacctgtatctttacttatctctatctatgtctacctatatctatatctctgtctacatctctatatctatctgatctatctc

SEQ ID NO: 917354 - DNA, 597 bp, Homo sapiens
gagtaattgacaagttacatttttgagatataattcacatatcatgaaattcacccattaaactatatagtttagtgctttttagtattttcacaaaatggtgcaaccaacaccaatgtctaattccagaacgtttctatcaccccctaaataagcactgtactcatgagcagtagttccccattttcccctacctcaacccctaacaaacattaatctttctgtctcaaagggttggaatattctggagatttcacatcagtggactcagaatgtataaccatttgtgcctggcttctttcacttagcacamtgttttcaaggtcggttcatggtgcagcatgtgtcagtacttcttgttatgactgaataatcccattgtatggacatagcacattttgtttatctgttgatccattgatggacattttggttcttcctagttttttggctatataaataatgctgctacaaacattcatgtccaaatttttgcgttgacatgtttttcagttctcttgggtatatacttaggagtgacattgctgaatcatctggtaacttcatatttaaatttttgaggaaccaccacagtgt

SEQ ID NO: 917355 - DNA, 544 bp, Homo sapiens
ttattaaggaagttccaaaaatattaggttggtgcaaaagtaatggaggtttttgccattaatagatgcttaccttcaaagtcagaatgttcaagtttattctctctctcctttgggcacctggacaaataaaggccaagaaaaccaaaacaaatgataaaatgagaaatgggcaaacaaccttttgttcattcagattcaaaaaaatctcttgaactggtttcaaaatatttgattcagaaaacctaaaccatgtttgtcaactgcattcttgttctcatttaaaaagaaaaagaaaaagacaaaagggcctcctatcttcccatgagtataatggtggaaattcaacctgtatgttttctgattcatttacacttakctcatcaaaatattttgtaagagctgagctctttggtggccaaagatgttttgtggtccttttcccttgcaacagaaatattgtggtttatcatcagcttacacaaattcaaaagaaggttgaggaacactcctaaatttattatctcataaggctggagtgagt

SEQ ID NO: 917356 - DNA, 591 bp, Homo sapiens
gcagccttccagagagctagagaacctaacagcaagcactacctgcctagtgttattaccagctgacccatccagaataactgtctcaacttcatagtaaaggtctttccctgcaaaagaacacctgtgaaggatggaggacgtggctatctccccaaatgtgcagttacaaatgtaaggtgtcatggattacaaataatcaaaattatgagacctccaaaatatgctaatgaagttccaacaatgtagacttatgaaatgcctaataaagaattcagaatagttctctttaggaagttcaatgaactacaaaaacatacagatagaaaagtaaataaaatttgcaaaacaataaacaaaacaagaagtttggcaaagtaatataaatggtattctaaaagccaaataaaaatcctagacatgaagaacataatgactgaataaawtaattaaaaagacagtgttgacagcaagctcaatcaagtagaacaaagaatcagtgagatgaaagacaggatatttgaaattatccagtcagagaagaaaaaaagaaaaaaaatgaagaaaatctgaagaaattatggaacacca

SEQ ID NO: 917357 - DNA, 588 bp, Homo sapiens
ggcttcttgcaccaaacagttagccaagctgtgaatgcaaaggaaaagtttctcacagaaattaagtgtgctactccagtaaacaacaaatgataacaaagtgaaacagctttactgctgatatggaataaatattaataatgttagaggtctggatagaagatcaaactagccacaacattcccttaagccaaagcctaatccagagcaaggccctaattctcttatattttatgaaggctgagaaaggaagctacagaagaaaagtgtgaagctatcagaggttgatttatgaggcttaagaaaggaaaccatcttcatcrtataaaagtgcaaggtgaagtagcacatgcttgcacttcataatataaaggtgcaaggagaagctgtaacaaggtatccagaagatctagctaagatcatttatgaaggtggctacactaaacaacagatttttcaatgtatatgaaacatccttctattagaagaaaatgccatctaggacttccatagctagagaggagaagtcaatgcttagcttcaaagcttcaaagtacaggtcttcttgttaggggctaaatgcagctg

SEQ ID NO: 917358 - DNA, 586 bp, Homo sapiens
ccaacaatgcttttagattaatttttgttgtattacatttatggtagctttttgtcatattgtatattttcagtcagtagctactaccctgatgattcctgtcatgaacacctttgaaattttttcatgttaaaaattggtccagttatccaaagatgaaaaaccattgtccacarcagtcaatgctgtccaaaagacttttccgtgatcatggaaatattccctgcattgtccaatacagtagttattagccacatgcagcacctgagcacttgaaatatggctagtgagatggaggaaatgaatttttaattttgtttggttttaactaattaaaatataaataaccacatgcagtagaaactgtcgtattgaaaacggatggcacatatctataatgtccctttgtcaggaattttctgaactcttcccctcccctgccaggttgacttgccctgcctcctgctagtttcttttcattttttttttttttaggcggagtcttgctgtgttgcccaggctggagtgcagtggcgctatcttggctcactgcaacctctgcctcccaagttcaaacaattctctg

SEQ ID NO: 917359 - DNA, 589 bp, Homo sapiens
aaaaaattagccagttgtgctggcatgcacctgtagtcccagctacttgggatgctgaggcaggagaattacttgaacccaggaggcggaggttgcagggagctgagatcatgccattgcactccagcctgggcaacaagagcaaaacttctcaaaaaaaaaaagaatatagacatgaataacttaaatacatgtcatatgaaaatattgaaaacaaaaaaattaaagattattcatattcctatcatttttagtaaaataatacaagaagtagaactatcctccatgttcatactatgatggtggttaattttatgtgtccagttgactggccacagggtacccagattcaatgttatttctgggtgtgtctgtggaggtgtttctggatsagatcagcatttgaatcagtggactcagtaaagtagacggctctgcccaatgtgagtgggcatcatccaatccactgaggttctgaatagaataaaaagtggagaaaggaagaagtcattctttttctttcctccctcacagtttgagcttgaacatcccatctcatcttctccggcccttggactgggatctacga

SEQ ID NO: 917360 - DNA, 634 bp, Homo sapiens
aaaattagctgtgtttggtagctcacgcctgtagtcccagatacttgggaggctaaggtgggaggactgcttgagcccaggagtaggtggctgcaatgagctatgatcacatgactgcactctagtatgagcaacacagcaagatcctgtctcaaaataaacaaaataaaataaatcttcgtgctatttttatatcagcatacaataatgcccccttatccttgggggatacgttccaagaccctcagtgggtgcctgaaaccacagacagtattgaatcctatatayattatgctttttcctatatagtaatgggtaggtagtgtcgcatcagtgtggataaactggacaaagggatgatggatatcctgggtgggacgaagtgaaattttatcaccctattcagtacagtgtgcaaattaaaacttatgaattatttctgagattttccacttaatatttttggaccaggttgactgtggggtaactgaaactgcagaaaatgaaactggggctgggcactgtggctaacacctagaatctgagcattgtgagaggctgaggtgggtggatcacttgaggtcaggagtttgagaccagcctggccaacatgatgaaacccagtttctaccaa

SEQ ID NO: 917361 - DNA, 595 bp, Homo sapiens
ttattgtctgagattgccgggctcaaaagtagcattaggaatgcagacctggccagttgcgggggctcacacctgtaatcccagcactttgggaggctgaggcgggtggatcacttgaggtcaggagttcaagacaggcttggccaacatggtgaaaccctgtgcctactaaaaatacaaaaattagccgggcgtggtggctggtgcctgtaatcccagctattcagaaggcagaggcatgagaattgcttgaacccggaaggcagaggttgcagtgagccaagataacaccactgcactccagcctgggcaacagagtgagactcttgtctcaataaacaaacaaacaggcraattcacttcaggtgaggggtttgagaccagcctggccaacatggtgaaaccccatctctactaaaaatacaaaattagccaggtgtggtggtgcatgcctctagtcccagctactcaggaggctgaggcaggagaattgcttgaacccaggaggtggaggctgtagtgagtcgagatcgtgccactgcactccagcttgggtgatacaatgagactccatctcaaaaaaataataaaagaa

SEQ ID NO: 917362 - DNA, 575 bp, Homo sapiens
ctgaaatcccaaattcaagaggaaacaagacacaggtcaactgattgcttttggtccatcttcatcctctccaaatgcccccaaatggccctggttcaaactcgggctgaatgtaaccagtctgtgaaaaaactgtaatgggctgactgcttgcatagttaaagcccaygatagaagggagaggcttgattgctgcaagtctaagagatttcataaagttaccactgaggaataaaaaattagtagcctcatgacacaaaactaaagaatataacaagaccaaacgttgggaaatagtcttgaaagtaattctatcttggccgggcgtgacaggatcccagcactttgggaggcaaaggtgggtggatcacttgaggtcaggagttcaagaccagcctggccaacatggtgaaaccccatctctactaaaagtacaaagaattagccgggtatggtggcgtgtgcctgtaatcccagctactcgggaagctgaggcacaagaatcgcttgaacccgggaggtagaggttgcagtgatcccagattatgccactgtactccggcctgggcgacaga

SEQ ID NO: 917363 - DNA, 776 bp, Homo sapiens
gagcaggtgtgttttgtttcccccacacaccaagcaattgtccagtgactaccaactaggtattctgtaatttagcccgattatgacaccatctactgggagttagagtcagatcccacaggttaatggtttggtcccccaagactgcctcccatttcagatgctaattgcaagccccaggttgtgacctgcgcttctgactggctggctcttagttggagattttcaccaccctcttctcagtttctattaatgcgctaaagtggctcacagaactcaaggcaacacttacttatgtttacccatttattacaaaggatattacaaaggatacagatgaacagtcagatggaagagatgcatagggcaaggtatagaggaaggggcgtggtgtttccatgtgtgccaccttccaggtcccaccacacattcagcaatctaaaacctctcccaaccctgtccttttgggtttgcatgggggcttcattacataggcatgaccaattacatcactggccattggtgcccaactcaaaatcaaccttcaggccatttstcctccctggagtccagggggtgggactggaagttccaaccttctaattacatggctggttcccctggcaacccactcccaacctgaggctatccaggagcccaccaagagttgcctcattagaacaaatatagtcccatcacccaggaaattccaagaaactggggagctctgtgtcagaaactggagtcaaagacaaaacatcaaaacaaaagattct

SEQ ID NO: 917364 - DNA, 660 bp, Homo sapiens
aatcctaaccactcaggaggctgaggcaggagaatcccttgaacctgggagacagaggttgcagtgagctgagattgtgccactgcattcgagcctgggtgacagagtgagactctgtctcaaaaaaaaaaaaaaagaggcaaatttatagcactaaatgcccacatcagaaagctagaaagatgacaaattgacaccctgacatcacaattaaaagaactagagaagcaagagcaaacaaatccaaaaggtagcagaagacaagagataactaagatcagagcagaactgaaggagatagagacacaaaaaatgcttcaaaaaatcaataaatccaggagctggtttcttgaaaaaattaataggccactcactagactaatagagaagagaagaatcaaatagacacaataaaatctgatatatgggatatcaccattgaccccagagaaatacaaactaccatcagagaataccrtaaacacctctatgcaaataaactagaaaatctagaagaaatggataaattcctggacacatacaccctcccaagactaaaccaggaagaagtcaaagccctgagtagaccactaacaagttctgaaattgaggcagtaataacctaccaaccaaaaaaagcccatgaccagatggattcac

SEQ ID NO: 917365 - DNA, 577 bp, Homo sapiens
tgattttttttttattagacttttttaggttttaatgactcagtgattcttaattgggacaatgttgcccccatccctacccctggggacatttagcaatgaactttttggttgtcacactggatgctactgattggtatctgatagctacagaccagggattctactaaatattctacgatgcgtaggacagtcccctacaacacgggagtatctgaaccaaaatgccaatagcaccaaggttgagaaagcctggaactaattcccagctccagcaaagctaataagatatgatttcttggccaggcgcggtggctcatgcctgtaatcccagcactttgggaggccgaagtgggcagatcatctgaggtcaggagtttgagaccagcctggccagcatgaggaaaccyggcctgtagtaaaaataaaaaattagccaggcatagtggtgcatgcctgtaatcccagctaattgggaggctgaggcaggagaatcgcttgaacccaggaggcagaggttgcagtgagctgagatcacaccattgcactccagcctgggcaacaacagtgaaactcc

SEQ ID NO: 917366 - DNA, 584 bp, Homo sapiens
ttccccttttcccagctccccacctggccagtgtgactatccaaagctttggaaccctctgcaaatgatggggttcagaagataattcctgggcttctctttggactttgttagcccacaaacctcccatgagccatcctgagatttggcttctcgattaaatccttcttaacgccccaaatccatgcatgcattcaacacggatcctgttttttatactatgtgaggggggaagagtgaaaggcagaaaaaggaagctttggcctatgaaggaccctagtctacctaacatgaacatggtgcagccaggacatgctggaattagragacataaaaaagatgattgtgccccaagagagagaaaatgcagacaacaataaagacagaaagagaggaggcttttagtagtagccgtggcgcttaggcaggactcaaagcacaaataggttaggtttaggtaaaagaaagacattccaggtggtcggaacggcttgggcaaatgcatggatccaagttggtccaatcagggggaatcccaggacatttgctaaagcctaggaaagagctgctttctttccctggga

SEQ ID NO: 917367 - DNA, 650 bp, Homo sapiens
acacgcgttttaacaggacccatctggctgttgtgcggagaagggactgagggtctggggtggaaacagggagaccagggaagtggctcctgccgagttccaggagaacaacccaggcggctcagagcaggatggtggcagtggtgctaggattctgggattgtgaaggtcgagccacaggatttgctccttgggaacacagagtggatgttggaggcataaaagcaacagaggggccacggatgactccacagcttggggctttaacaactggataatcattcattcattcattcatttagagatgggggtctccctatgttgcccacactggtctggaactcctgggctcatgtgatcctcctgcctcagtctcccaaattgctgggattacaggtgtgagccactacgcctggcctactrgatgatcttcaatggctcctgctatgacattaacatttttctccctcagagcccaggcggggctgggcacagagtgggcaataaaccaacactgactgaatgaacaaaccatgaataatataaggaaggaacttaagagcctccctgagctaatcctgccaagctgccaaacttacctaaaaccccgaggcttcccagagaacagtggagaatgatgccctcctagt

SEQ ID NO: 917368 - DNA, 710 bp, Homo sapiens
ttctaccagatgtacaaagacgagctggtaccattcctactgaaacaattccaaaaaaattgaggaggagagactccacactaattcattatatgaggccagcatcatcctgataccaaaacctggcagagatgcaacaacaaaaaagaaaacttcaggccaatattctcaatgaacattgatgtaaaaatccttaacaaaatactggcaaaccaaattcagcagcacatcatgaagcttatccattacaatcaagtaggctttatccctgggatacaaggatggttcaacatatgcaaatcaataaatgtgattcatcatataaacaggactaaagacaaaaaccacatgatgatctcaatacatgcataaaagtcttgataaaattcaacaccccttcatgtcaaaaactctcaataaactaggtattgaaggaacacactcaaaataataacagccaygtaggacaaacccacagccaatatcgtactgaatgggctagaagcattccctttaaaaatcagcacaagacaaggatgccgtctctcaccactcctattcagcatagtattggaagtcctggccagggaaattagccaacagaaagaaataaatggtatccaaatagggagagaggaagtcaaactatccctgtttgcagacgacattatcctatatctagaaaaccccatagtctcagcccaaaagct

SEQ ID NO: 917369 - DNA, 551 bp, Homo sapiens
ccaaacagccaataacaagtgatgtgatcaaagccataataaaaactctccaagtaaagaaaagcctgggaaccaatggcttcactgctgaattctaccaaacatttaaagaagaactaatatcaattatactgaaactagtytgaaaaagagaggaggagggcaaacttccaaacccattctatgaggccagtataattctgataccaagaccaggcaaagacacattaaaaaaaaaaaaaaaaaaaaaaaaaaaaaaacaactacaggccaataactctgatgaatattgatgcaaaaacctcaacaaaatactagcaaaccaaattcaacaatacattaaaaaatcattcatcatcaggtgggatatattgtagagattcaaggatggttcaccatagacaaataagtcaggtgatacattatatcactagaataaaggacaaaaagcatatgattagttcaattgatgctgaaaaagcactggagaaaattcaacattgcttcacaataaaagccctcaaaaaactgggtgtagaaggaacatacct

SEQ ID NO: 917370 - DNA, 551 bp, Homo sapiens
ccaaacagccaataacaagtgatgtgatcaaagccataataaaaactctccaagtaaagaaaagcctgggaaccaatggcttcactgctgaattctaccaaacatttaaagaagaactaatatcaattatactgaaactagtctgaaaaagagaggaggagggcaaacttccaaacccattytatgaggccagtataattctgataccaagaccaggcaaagacacattaaaaaaaaaaaaaaaaaaaaaaaaaaaaaaacaactacaggccaataactctgatgaatattgatgcaaaaacctcaacaaaatactagcaaaccaaattcaacaatacattaaaaaatcattcatcatcaggtgggatatattgtagagattcaaggatggttcaccatagacaaataagtcaggtgatacattatatcactagaataaaggacaaaaagcatatgattagttcaattgatgctgaaaaagcactggagaaaattcaacattgcttcacaataaaagccctcaaaaaactgggtgtagaaggaacatacct

SEQ ID NO: 917371 - DNA, 600 bp, Homo sapiens
cttataagaccatcagatctcatgagaactcattcactatcacaagagcagcataggggtaactgctcccatgattcaattacctcccactgggtccctcccaccacaggtggggattatgagaattataattcaagatgagagttggatggggacacagccaaaccatatcattctgcccctggcccctcccaaatctcatgtcctcacatttcaaaacataattatgcctttccaacagtcccccaatgtcttagcccattccagcattaacccaaaagtccaagtccaaaatttcatctgagacaaggcaagtcccttccacctataagcctgtaaaataaaaaacaagttaattayttcctagatacaatgtcggtacaggcattggatgtatacactcattctaaatgggagaaattggccaaaacaaaggggctataggcaccatgcaagtctgaaatccaatagagcagtcatgaaaccttaaagttccaaaatgatctcctttgatgccatgtctcatatccaggtcatgccaatgcaagatgtgggctcacaagaccttgggcagctccacccctgtggctttgcaaggca

SEQ ID NO: 917372 - DNA, 575 bp, Homo sapiens
ggcaacgtgcttcgtccctgttggtgtgcgtggtgtgtgtctcagtgcaggacacgctggtccacaggttcgtttattctggtttgtctgtggtctgtggtgctcaccataatcctaaccagcagctctctcatccctggtgccctactgttggtgcacctgttccacccatgtcctgccctctctccttatggaaatcttccctatcaagatccagcccaagtcccatcttctgggaagtcttttgtgaccatagtagccttccttagctgcyttttttttttttttttttttttttgagacggagtctctctctgttgcccaagctgcagtgcagtggtaccatctcagttcactgcaacctctgcctcctgggttcaagcgattctcctgcctcaagcttcccaagtagctgggattacaggcatgcactaccatgcctggttaatgtttgtatttttagtggagacagggtttcaccatattagccaggctggtctcaaactcctggcctcaagtgatccacccaagtcagcctcccaaaatgctgagattacaggtgtgagccaccacat

SEQ ID NO: 917373 - DNA, 668 bp, Homo sapiens
tttcctaaaagagggaaaatattgtttccagaaattcctgcttccagcatcccctgcttatcagaccaggtacagttaaactagaaattctctgggtactggtttttctccggacagtttttctcatgactgtgtatctccaggaccacctagcacagtgctggcttttagtagaggctcatatacttgggaatgaatgatcaattcccctactgcaactgcttctctcagaagactctggcaacctggctgagaacacaggctgccagcaagcttggggtgtcactgactgcaaagctaaacactccatcagcactagcaaatcccatgatgaattcctttctccttctttctccttgccttttgtttttaagttttgcttttggaaaatttctttttctttwcttttttttttttttttttttgagatggagtctcgctctgtcaccaggctggagtgaacagtgaagcaatctcggctcactgcaacctctgactccctggttcaagctattcatctgcctcagcctccctagttagctgggattacagacacctagtagctgggattacaggcacacaccaccaagcccagctaatttttgtatttttagtagagacggggtttcatcatgttggccaggatggtcttgatctcctgacctcgt

SEQ ID NO: 917374 - DNA, 606 bp, Homo sapiens
tgactttgtgcaaatttaaaaaacctctctgagcctcagtttttgtgtctgtaaaatggggatgaaaataacagtgccttgtgaaaagaaaaataagtgagctaatgcatgtaaagagcttagcgtggtgcttagcatattataggaactcattaaggatgatgaatattgctcttaaagtagcagaagtaacagtgtagtcagacctgagtttttttgggtttttttgctgttttttktttgtttgtttgtttttgagatggaatctcgctctgtcgcccaggctggagtgcagtggcgcaatcttggctcgctgcaacctccacctcctgggttcatgccattctcccgcctcagcctcccaagtagctgggattacaggaagccgccaccatgcccggctaattttttgtagttttagtagagactgggtttcaccatgttagccaggatggtcttgatgtcctgacctcgtgatccgcccgcctcagcctcccaaagttttgggattacaggcttgagccacctcgcccggcctatttttttttttttttccttgagacagggtcttgctctgttgctcaggctggagagcagtggtgcaat

SEQ ID NO: 917375 - DNA, 586 bp, Homo sapiens
cttaaataacacaggtttgaaatgcacaggtccaattatatgtgaatgtttttcaataaatatactggaaaaaatttttgaatatttgagacaatttcaaaaaaccagaattcattgaaataggtatgccaagaatgcataacacaaaatatatgtaggttctattttatcattacaaaaccagagcgatattttcttttctttttttttgtttttgagacggattctctccctgtcgcccaggctggagtgcagtggcatgaactccactcactgcaagctccacctcccgggttcatgccattctcccgtctcagcctcccgagtagctgggactacaggcacctgctaccacacccrgctaattttttgtattttttagtacagacggggtttcaccgtgttagccaggatagtctcgatctcctgaccttgtgatccacccgccttggcctcccaaagtgctgggattacaggcgtaagccaccacctccctactctttctacccaataaatatgaaggtctgtggaagctcagggcccttcctcactagaagcaagaagccccctgaccccttctttaaaa

SEQ ID NO: 917376 - DNA, 617 bp, Homo sapiens
caggtccaattatatgtgaatgtttttcaataaatatactggaaaaaatttttgaatatttgagacaatttcaaaaaaccagaattcattgaaataggtatgccaagaatgcataacacaaaatatatgtaggttctattttatcattacaaaaccagagcgatattttcttttctttttttttgtttttgagacggattctctccctgtcgcccaggctggagtgcagtggcatgaactccactcactgcaagctccacctcccgggttcatgccattctcccgtctcagcctcccgagtagctgggactacaggcacctgctaccacacccggctaattttttgtattttttagtacagacggggtttcaccgtgttagccaggatagtctcgatctcctgaccttgtgatccacccgcctyggcctcccaaagtgctgggattacaggcgtaagccaccacctccctactctttctacccaataaatatgaaggtctgtggaagctcagggcccttcctcactagaagcaagaagccccctgaccccttctttaaaacagatttattttgcctttgttttcatttctgcattcgttccccttcgttcagtccca

SEQ ID NO: 917377 - DNA, 596 bp, Homo sapiens
gactgctacatgatttgagagctattaatgcacagattaaaccaatgggtgcattacagcaaggtctgccatccctggcaggcatttccaagagactggcctcttgtagtaatagatcttattgttttttttactatactattacatcagcaggataggcctggatatgccttctctgtgccttctgttamtcaaagggagcctgtctcttgttatcaatggaaagttttgccccaaggcgtgcttaacagtcctacattatatcagaattttgtaggacaggcattaaaggagccttgtaatgtgtttcccactggctatgtcattcattatatggatgatattcttttggccgctcctacagatcaaatcttacatcagttattcagagaaacaaaacaggctttgactaaatggaatctcaaaatagctcctgaaaaggtgcaaaccacctccccataccagtacttaggcactattattactgaaagaagtgttcagcctcagaaagtagtcatctgtagggacagattacaaactttgaatgatttccaacaattatcaggggacattaattggctgcacccaatgctagg

SEQ ID NO: 917378 - DNA, 596 bp, Homo sapiens
gactgctacatgatttgagagctattaatgcacagattaaaccaatgggtgcattacagcaaggtctgccatccctggcaggcatttccaagagactggcctcttgtagtaatagatcttattgttttttttactatactattacatcagcaggataggcctggatatgccttctctgtgccttctgttaatcaaagggagcctgtctcttgttatcaatggaaagttttgccccaaggcgtgcttaacagtcctacattatatcagaattttgtaggacaggcattaaaggagccttgtaatgtgtttcccactggctatgtcrttcattatatggatgatattcttttggccgctcctacagatcaaatcttacatcagttattcagagaaacaaaacaggctttgactaaatggaatctcaaaatagctcctgaaaaggtgcaaaccacctccccataccagtacttaggcactattattactgaaagaagtgttcagcctcagaaagtagtcatctgtagggacagattacaaactttgaatgatttccaacaattatcaggggacattaattggctgcacccaatgctagg

SEQ ID NO: 917379 - DNA, 605 bp, Homo sapiens
tctttgttgagtctcccacaattaccgttgttcctggcccagacttcaatcccacattattcctgataccacacctgacccccatgactgtatctctctgatccacctgacattcaccccatttccccaaatttccttctttcctgttcctcacsctgatcacgcttgatttattgatggcggttccaccaggcctaattgccacacaccagcaaaggcaggttatactatagtacaagccactagcctgcctcttagaacctctcatttcctttccatcgtggaaatctatcctgaaggaaataacttctcagtgttccatctgctattctactactcctcagggattcttcaggccccctcccttccctacacatcaagctcgaggatttgccccacccaggactggcaaattagctttactcaacatgccctgagtcagataactaaaatacctctttgtctaggtagatactttcactggataggtagaggcctttcctacagggtgtgagaaggccaccgcagtcatttcttcccttctgtcagacataattcctcagtttagccttcccatctcaatacagtctcataacagatgagcc

SEQ ID NO: 917380 - DNA, 496 bp, Homo sapiens
ttaccatgaacaatagattactatctagaactaaaaagaaatgagttatcaagccataaagagacacggcccttaaatgcatatggctaagtgaaagaagccaatctgaaaaggctacactctgtatgatcccaactcaatgacaattctgggaaaggtaaaactacagagagrgtaaacagctcaggggttgccagaggatagcaggagggagggatgaataagtggaggacagaggatttttagggcagtgaagctactctgtatgatactatcatggtaaatacacatcattatacattggtccaaaccctcagaatgtacaacaccaaaagtgaaccctggacttggaatgcagggatgtgtcaatgtaggttcatcaattgtagcagacgtgccgctctggtgggggatgttaatgacaggggaggctatgcgtgtataggacagagggtatatgggaactctataccttctactcagttttgctctgagc

SEQ ID NO: 917381 - DNA, 644 bp, Homo sapiens
cctccccagcgtctcaaccagaagagaaatccaatttgtgtgaagggcttggggtgactctgtgtcgaggccacgcttccctttctgtttgtggaaggacgcgggtgctcttcttggagcaaggagaaaaggtttctttgtgcagggtctggtgaaagtgtgtctgtttagggcaggctgcagttttctttgtgaacactgtagatttttagtgtgggaaaaagggcttattacatttccctgtggctgcccgagtggggagaggtttttctgagcctagaaaggaatggccgaacaggcaaacaggcgttgkagaggagggaacatttagcagctccttctcacggagcggtgaggatctcctggttggtgttcgcatttggatgcacgtgaaacacacagaaggaaagaaagctttgctgtagtttgatggaagggagggaagtttagccttgatgtataggggtgggggaggcgagattttgttcagggggctattgggatgtttttttcctcttcgagtaaaaaaataaaatagtcacagaacccagaggaaaggttgtcatggcaacaaaagtttgaggccaggtacttgctatcaccctttcaggaccaccgtggtggagaaggcaggattttggcac

SEQ ID NO: 917382 - DNA, 786 bp, Homo sapiens
atgtttttgttttttaggagacaaggtctcactctgtcacccaggctggagtacagtggcgtgatcacagctcactgaagcctcaacctcctaggctcaagtggtcctcccaagtagccaggactacaggtacaagccaccacaaccagctaattttttttttttttttgagacagtctcactctgttgcccaggctggagtgcaatgctgtgatctcggctcactgcaggctccgccttctgggttcaagcaattctcgtgactcagcctcccaagctgggaatacaggcgtgcaccaccacgcccagctaatttttgtatttttctttttttgttttttgttttgttttgttttgtttgaaacgaagtgtcactctgttgcccaagctggagtgcagtggtgcaatctcrgctcactgcaacctccaactcccaggttcaagcgattctcctgcctcagcctcccaagtagctgggactacaggcatgcgccactgtgcctggctaatttttgtatgtttttttagtagagacggggtttcactatattggccaggctggtcttgaactcctgacctcatgatccgcctgcctcagcctcccaaagtgctgggattacagatgtgagccactgcacccagccaacaaccagttaatttttttgtttgttttttaatatatatatagagatgaggtctcactatgttgcctaggctgatctcaaactcctggcatcaagcgatcctcccacttcagcctcccaaaacgcggggattgtatgtata

SEQ ID NO: 917383 - DNA, 692 bp, Homo sapiens
tgttcctttccatgtttagtgtttccttcaggagctcctttagtgcaggcctggtggtgacaaaatctcttagcatttgcttgtctgtaaaggattttatttatccttcacttatgaagcttagtttggctggatatgaaattctggattgaaaattcttttctttaagagtgttgaatattggcccccactctgttctggcttgtagagtttctgctgagagatccgctgttagtctgatgggcttccctttgagggtaacccgacctttctctctggctgtccttaacattttttccttcatttcaactttggtgaatctgacaattatgtgtcttggatttgctcttcttgaggagtatctttgtggcattctctgtatttcctgaatttgaatgttggcctgccttgctagattggggaagttctcctggatagtatcctgcagagtgttttccaacttggttccattctccccgtcactttcaggtacaccaatcagacrtagatttggtcttttcacatagtcccatatttcttggaggctttgttcgtttctttttattcttttttctctaagcttctcttctcacttaatttcattcattttatcttccatcttccatcactgatactctttcttccagttgatagaatcggctactgaggcttgtgcatttgtcacatagttc

SEQ ID NO: 917384 - DNA, 630 bp, Homo sapiens
gatacagtgtctcataatatgtgaaaatttccaggttttgataaaaaaaaaatcatgcatcagatcaagaaccaggataatctcaaacggaatgagcaaaaacatcaacactgagctgaaaaggatgtaagaatttatctgacatagattttaaagtagctataatacaactgtttctttatgcaattataaacacacttgaaacaaatggcaaaacagaaaatctcagaaaataatagaaaacagagtagaaccatatggaaatattagatcttaaaaatacgataattgaaataaaaagggatgggttcaacagcagaatggaggggacagagaaaataatctgttaactgaaagatagaacaagagaaattayccaatcaaaacaacaaaaagaaaatagactgaaaagaaaaaaaagagactcaagcattcatggacccataacaaaagagtaacatttatgtcatcagagtgtcagaaagaacaaagaaagtgagcaaggctaaaaatatactcaaagaaagatgaaaatcctccaaatttggcaagagacataaacctacatatcaaatcaacaagatgaacaaatctcaaataagataaactgaaatgaaatccacacaaaga

SEQ ID NO: 917385 - DNA, 630 bp, Homo sapiens
gatacagtgtctcataatatgtgaaaatttccaggttttgataaaaaaaaaatcatgcatcagatcaagaaccaggataatctcaaacggaatgagcaaaaacatcaacactgagctgaaaaggatgtaagaatttatctgacatagattttaaagtagctataatacaactgtttctttatgcaattataaacacacttgaaacaaatggcaaaacagaaaatctcagaaaataatagaaaacagagtagaaccatatggaaatattagatcttaaaaatacgataattgaaataaaaagggatgggttcaacagcagaatggaggggacagagaaaataatctgttaactgaaagatagaacaagagaaattatccamtcaaaacaacaaaaagaaaatagactgaaaagaaaaaaaagagactcaagcattcatggacccataacaaaagagtaacatttatgtcatcagagtgtcagaaagaacaaagaaagtgagcaaggctaaaaatatactcaaagaaagatgaaaatcctccaaatttggcaagagacataaacctacatatcaaatcaacaagatgaacaaatctcaaataagataaactgaaatgaaatccacacaaaga

SEQ ID NO: 917386 - DNA, 587 bp, Homo sapiens
aagagtaacatttatgtcatcagagtgtcagaaagaacaaagaaagtgagcaaggctaaaaatatactcaaagaaagatgaaaatcctccaaatttggcaagagacataaacctacatatcaaatcaacaagatgaacaaatctcaaataagataaactgaaatgaaatccacacaaagacatatcataattgacttccaaaaactaaaaacaaatgaaaaatcttgaaagcagccagggagaaacaatacccggatgggcaaaaacaattcaaatgacgggccgggtgcggtggctcacgcctgtaatcccaacactttgggaggccgaggtgggcggatcacraggtctggagatcgagaccatcctggccaacacggtgaaaccccgtctctaccaaaaatacaaaaaaattagccgagcgtggtggcgggcacctgtagtcccagctactcaggaggctgaggcaggagaatggcgtgaacccaggaggtggagtttgcggtgaaccaagatcgcaccactgcactccagcctgggcgagagagcgagactccgtctcaaaaaaaaaaaaaaaaaaaaaaaaa

SEQ ID NO: 917387 - DNA, 688 bp, Homo sapiens
gtctggggaccacactttgagtagcaagaggctagagcacatctgtcctcctgtaaacagtaaataatgatgagaatccaggccttggaacccaaagatctcattcactagttgtatgatttgggagcaaaacctctcactttctgagggtattaatcacctcatttataaaccgattactgaactagagatgatctccaagttgccttcccattcattaattttaaattaattytttaaaaatgtaaataatgaaagatgaagtactgtggatttccaaggaagaagatatgcagattaaaaacataaactcagacacaaatgtttgattaaactacttaaggccatacaaggcatttttttgtttgtttgttttttgttttttagatgctctgtcacccaggctggagtgtagtggcacgatctcggctcactgcaagctccgcctcccgggttcacgccatcctcctgcctcagcctccctagtagctgggactacaggcgcccaccaccacgcccggctaattttttgtatttttagtagagacggggtttcaccgtgttagccaggatggtcttgatctcctgacctcgtgatccgcccacctcggcctcccaaagtgctgggattacaggcgtgacaaggatctttatgacattgtacacatggatcaaaatatcacaggtg

SEQ ID NO: 917388 - DNA, 688 bp, Homo sapiens
gtctggggaccacactttgagtagcaagaggctagagcacatctgtcctcctgtaaacagtaaataatgatgagaatccaggccttggaacccaaagatctcattcactagttgtatgatttgggagcaaaacctctcactttctgagggtattaatcacctcatttataaaccgattactgaactagagatgatctccaagttgccttcccattcattaattttaaattaattttttaaaaatgtaaataatgaaagatgaagtactgtggatttccaaggaagaaratatgcagattaaaaacataaactcagacacaaatgtttgattaaactacttaaggccatacaaggcatttttttgtttgtttgttttttgttttttagatgctctgtcacccaggctggagtgtagtggcacgatctcggctcactgcaagctccgcctcccgggttcacgccatcctcctgcctcagcctccctagtagctgggactacaggcgcccaccaccacgcccggctaattttttgtatttttagtagagacggggtttcaccgtgttagccaggatggtcttgatctcctgacctcgtgatccgcccacctcggcctcccaaagtgctgggattacaggcgtgacaaggatctttatgacattgtacacatggatcaaaatatcacaggtg

SEQ ID NO: 917389 - DNA, 688 bp, Homo sapiens
gtctggggaccacactttgagtagcaagaggctagagcacatctgtcctcctgtaaacagtaaataatgatgagaatccaggccttggaacccaaagatctcattcactagttgtatgatttgggagcaaaacctctcactttctgagggtattaatcacctcatttataaaccgattactgaactagagatgatctccaagttgccttcccattcattaattttaaattaattttttaaaaatgtaaataatgaaagatgaagtactgtggatttccaaggaagaagatatgcagattaaaaacataaactcagacacaaatgtttgattaaactacttaaggccatacaaggcatttttttgtttgtttgttttttgttttttagatgctctgtcacccaggctggagtgtagtggcacgatctcggctcactgcaagctccgcctcccgggttcaygccatcctcctgcctcagcctccctagtagctgggactacaggcgcccaccaccacgcccggctaattttttgtatttttagtagagacggggtttcaccgtgttagccaggatggtcttgatctcctgacctcgtgatccgcccacctcggcctcccaaagtgctgggattacaggcgtgacaaggatctttatgacattgtacacatggatcaaaatatcacaggtg

SEQ ID NO: 917390 - DNA, 688 bp, Homo sapiens
gtctggggaccacactttgagtagcaagaggctagagcacatctgtcctcctgtaaacagtaaataatgatgagaatccaggccttggaacccaaagatctcattcactagttgtatgatttgggagcaaaacctctcactttctgagggtattaatcacctcatttataaaccgattactgaactagagatgatctccaagttgccttcccattcattaattttaaattaattttttaaaaatgtaaataatgaaagatgaagtactgtggatttccaaggaagaagatatgcagattaaaaacataaactcagacacaaatgtttgattaaactacttaaggccatacaaggcatttttttgtttgtttgttttttgttttttagatgctctgtcacccaggctggagtgtagtggcacgatctcggctcactgcaagctccgcctcccgggttcacgccatyctcctgcctcagcctccctagtagctgggactacaggcgcccaccaccacgcccggctaattttttgtatttttagtagagacggggtttcaccgtgttagccaggatggtcttgatctcctgacctcgtgatccgcccacctcggcctcccaaagtgctgggattacaggcgtgacaaggatctttatgacattgtacacatggatcaaaatatcacaggtg

SEQ ID NO: 917391 - DNA, 601 bp, Homo sapiens
aaaacatcatcaggtgaggatattgcactggagctgacctcttgtggcttctaaagtttctttctttttttttttttttttgagacagagtctcactgtgtcacccaggctggagtgcattttcttgtgtccaaccaagactcacataccatctcagctcactgcaacctccacctcccaggttcaagagatgctcctgccctagcctcccaagtagctgggatcacaggcatgtgccaccacacccagctaagttttgtatttttagaagagatggggtttcacgatgttggccagactggtctcgaactcctgacctmaagtgatccacctgccttggcttcccaaaatgctgggattacaggtgtgaaccactgcacctggcctccaagatttctatttggcaaattcacatagctactttcatacttgttaaaataccgaaatgcttccataccagttagcaaaaggccaccaccctcagccctctgacaaccagcatcaccactccagaaccaggtccctcctctgcaccccccagatctctccatcatcaggttactaaagttttaaagctcagcaaagcaggagccaccaagac

SEQ ID NO: 917392 - DNA, 716 bp, Homo sapiens
cactgcagggaggctgtgcggaggaggcagacagtccccgagcggaccctttggagctccccagagcccgtcgccctgggggctgctgcaatgggtccgagtcgagttggagggggagcagagaactcgggcagagaggggccccaaggtggagctgcgaccggggcggtgccacgcttgcacatggggcctgggcgctgggccaggggcctagggctggggtcgtggttcaggggcccagggcaggaaatgggagtggtgccggcttcggggactcagccagcagtgcggctgcccggcccaccccaccgagggccctaggttcctgaacctagggaggaggctgtaagtggggccaccaggggcagtgtccctggggtmaactgtgcatcagggggaccgccaagcctgacactcccaacggccaggcctcggaaccagcgatccactcccagaggcgtccccgcaggcagggccgcttaagggggaaccacgggcaatccctgagcactggggccactggaggggctcacggcgacattacccctgccctggacaccagcccaggcccagcaagaacctggagccccggcccaggctgcgaggaggcgcgacccaggctagacgatccacagagctggtggaagccagggacaagcaggagccctgtcccttctgagttggtggggtgggagccacctccccatctcgtgcaa

SEQ ID NO: 917393 - DNA, 716 bp, Homo sapiens
cactgcagggaggctgtgcggaggaggcagacagtccccgagcggaccctttggagctccccagagcccgtcgccctgggggctgctgcaatgggtccgagtcgagttggagggggagcagagaactcgggcagagaggggccccaaggtggagctgcgaccggggcggtgccacgcttgcacatggggcctgggcgctgggccaggggcctagggctggggtcgtggttcaggggcccagggcaggaaatgggagtggtgccggcttcggggactcagccagcagtgcggctgcccggcccaccccaccgagggccctaggttcctgaacctagggaggaggctgtaagtggggccaccaggggcagtgtccctggggtcaactgtgcatcagggggaccgccaagcctgacactcccaacggccaggcctsggaaccagcgatccactcccagaggcgtccccgcaggcagggccgcttaagggggaaccacgggcaatccctgagcactggggccactggaggggctcacggcgacattacccctgccctggacaccagcccaggcccagcaagaacctggagccccggcccaggctgcgaggaggcgcgacccaggctagacgatccacagagctggtggaagccagggacaagcaggagccctgtcccttctgagttggtggggtgggagccacctccccatctcgtgcaa

SEQ ID NO: 917394 - DNA, 707 bp, Homo sapiens
cagcttcagctgtgcctcctcacagcctggggtggggaatccaggtccttgctggccctgggctggtgtctggggcaggggcgacattgccatgagctcccctccatggccctggtgctcagggctggcctggggctccaccttgcctggctcatggccctgccttgtgggggcacctccaggagtgaattgcaggttccaggactggccatcaggagtgtcaggcttagtagtcaccctgatgtggggtggaacctggggatgtggccctgggtggccccaagcagagcctcttcccgaagtgcaggaacctggtgccctcaacamgtgggtatggtggccatactgctggccagggccccgaagtggatgctgctccaacctcttgctctgggctcctgaagtgctgccaaagctccatgccccaggcctggcacccatgttccatgtgcaagcactgcaccaccctgggcccagttccaccttggggcccccttctgccagacctcactgctcctccaccagtgggcaactcatcctggacccatcgcagcagctttcagggcttccagggctcccagggctcccaggggcaggctcagggcctgtctacctcttgtccatgcccttcttgcagtggcagggagcaagagtggtgatgcggggtcaaggtctggagtggtggaggctctggtcctgggggcagg

SEQ ID NO: 917395 - DNA, 748 bp, Homo sapiens
accaggtcctcctcaaacaagggagagaaagggagtcccaagaattgggcacctggcctaataaggttcctcccaaaaggaaaaacagctaatccctcacatagaaaagctccatgtatttacaggactatgttgactccggacatggtggaggaaggagacctgatgcccctcatggttgtgccaagaaaggagggggtcctagattggagaggagaactgaaaggcccactccagagtccaggaggaggtccaccctctttcctttgacccctagaatcacctggggctcctggatggcactggccttctgaactaccagagctggggagaggaaccctgggacccatcagtactactgcaccatttggaatactggccctggacccagtgacccacatctctggggacagttcgctttccaatggtcctcactgcaaacttgacagggtcaaagtggcttccccctgctgtcctaaagtgccctaggctaccatrtttgcagcagtcagcaggtgcatctcagggactctggagtccatgagcccacaagacagctcttagaacctctgcctttttcctgtaactctcctctcttttctggacttcctcccaattcctactgcaaaagatggaggtggccactcccaggaggccctcaaaagtccatctggtcccgcagggcatttctgcagccccctcctgacttcaggggccacctgtgtaataaattcatcccctgggacca

SEQ ID NO: 917396 - DNA, 617 bp, Homo sapiens
tgaaattaatgcttccctcgtgaggccattcttcttttctgtgcctcgggtgcttggcactaagttggcaatgaaggaaatgacaagaacatttctgccacaaatttacgtacagatactaaggcacattttgtttcatctgtgctaatcttagccttcaattttatacgtttgaccactaagccaaatgctcattctacccagtaatattatctctgtggtttgcaacatgcttaacatttaacattgtacataaagamgagatacgaactatgacaatcatgaaagaaaaaacaatagaaaagactggacaccttaacaggtggtcagggaccaggtccatgggcctttggataacacaggtgtagcctcggccagataccctcagttgacccaggacctccttccggtcccacctgagggctagaccgccatgaagggaaactggattggaacaaagccaacattcccaacatctgaggatgatgggggattgacagcatcctccccagcaagcctgtcctccgtgttgtaagtctggcagccacactaggcacttttaactgactgagacccagtatttttctttcatcttcattattgtggcatttagggac

SEQ ID NO: 917397 - DNA, 620 bp, Homo sapiens
ttttggctccttggagaccggggaatcaaagatgaagatgggtatttccagtttatgggacgggcagatgatatcattaactccagcgggtgagcttggtttctgggttgggaagggaaatctgggtctttactctggctggttccagacttctggaatggcctagaggttcggtgtccagtgttctctgaaggacaggttcttctgcaggtaccggattggaccctcggaggtagagaatgcactgatggagcaccctgctgtggttgagacggctgtgatcagcagcccagaccccgtccgaggagaggtgatggggaagcagtagcctgggggtgaacacatatgaacacaagggcagtgtagtatgwtgatttaagaatagggactgtggggctgaacactctgagacccaatcttggccctgccacttactagctatgtgaccttgggtaagctacttggcctctctgtttctcagtttccccatctgtaagatgagggattgttatgagggttaaatgtgctaatatttgtaaagtacttaagtatggtgatttctaaaaaaactaaacagaactaccatacgatccagcaatcccactactgggtatttatcc

SEQ ID NO: 917398 - DNA, 620 bp, Homo sapiens
ttttggctccttggagaccggggaatcaaagatgaagatgggtatttccagtttatgggacgggcagatgatatcattaactccagcgggtgagcttggtttctgggttgggaagggaaatctgggtctttactctggctggttccagacttctggaatggcctagaggttcggtgtccagtgttctctgaaggacaggttcttctgcaggtaccggattggaccctcggaggtagagaatgcactgatggagcaccctgctgtggttgagacggctgtgatcagcagcccagaccccgtccgaggagaggtgatggggaagcagtagcctgggggtgaacacatatgaacacaagggcagtgtagtatgttgatttaagaayagggactgtggggctgaacactctgagacccaatcttggccctgccacttactagctatgtgaccttgggtaagctacttggcctctctgtttctcagtttccccatctgtaagatgagggattgttatgagggttaaatgtgctaatatttgtaaagtacttaagtatggtgatttctaaaaaaactaaacagaactaccatacgatccagcaatcccactactgggtatttatcc

SEQ ID NO: 917399 - DNA, 614 bp, Homo sapiens
agaggaaaacatgatgactaaatatcatgtggtataggatcatgaggcagaaaaaggacgtcaggtaaaaactaaggaaatctgagtaaagtatggacttgagttaataacagtgtgtcaacactggcccattagttgtaacaaatatcccacactaatctaagacgttaataacggrtaaccaagtacaggatatacggaaaccctctactatctttgcaacttttatataaatctaaagctatcctaaaattttaaagttttattttttaaaagcaaaaagttcaaaaagaatatttcttaaaagctggaatgccaaaaaagtttaataagatacttgaattaaactaacattttggggaatattagtaatgacccaaggcagaaataaaacactaaaatatatagcatccctaatttatgtgggaatgaacaaggttctcttgggaaaatgaaatacggagaactaaagtaaaatatacacacagtcatgcactgcacaatgtttcagtccacaaggaaccacatacatgacggtgatcccataagattttatgtagtacctttttaaatgtttagatatggttagatacacaaatacctaccgttgtgct

SEQ ID NO: 917400 - DNA, 755 bp, Homo sapiens
atatttcaatgtatggagctcaagagatggcagaattcttctctcgttcccttacttttcttaagacttttatcatagaaaggacaatcaaaatttattttctcaccgtctgaaagctacaagttcaagattcaggtgtcagcaggtttgtttcttctcaggcctcactccttggcctgcaggtggctgtttttccgctgtgcactcacatggttgccccttggtctgtgtgttgtctgtgtcctctctccttttatgaggacatcaatcggctgggcacggtsgctcatgccacggtggctccagcactttgggaggctgaggtgggtggatcacctgaggtcaggagttagagaccagcctggccaacatggtgaaaccctatctctactaaaaatacaaaaattagccaggcacggtggcaggcgcctataatcctagctacttgggaggctgaggcaagagaattgcttgaacccggtaggtggaggttgcagtgagccaagattgcgccactgcactccagcctgggtgacagagtgacagagcgatactctgtctcaaaaaaaaaaaaaaaacaaaaaaaaaacaaaaaaaggacagtaatcatacgggctcagggctaacacagatgaactcatttcaccttaatcacctctttaaaggccctgtctccaaatatagtcacattctgaggtattggaggttaaaacttcctataaagttctgggaaacacgattcagtccataacact

SEQ ID NO: 917401 - DNA, 763 bp, Homo sapiens
atggagctcaagagatggcagaattcttctctcgttcccttacttttcttaagacttttatcatagaaaggacaatcaaaatttattttctcaccgtctgaaagctacaagttcaagattcaggtgtcagcaggtttgtttcttctcaggcctcactccttggcctgcaggtggctgtttttccgctgtgcactcacatggttgccccttggtctgtgtgttgtctgtgtcctctctccttttatgaggacatcaatcggctgggcacggtggctcatgccacggtggctccagcactttgggaggctgaggtgggtggatcacctgaggtcaggagttagagaccagcctggccaacatggtgaaaccctatctctactaaaaatacaaaaattagccaggcacggtggcaggcgcctataatcctagctacttgggaggctgaggcaagagaattgcttgaacccggtaggtggaggttgcagtgagccaagattgcgccactgcactccagcctgggtgacagagtgacagagcgatactctgtctcaaaaaaaaaaaaaaaamaaaaaaaaaacaaaaaaaggacagtaatcatacgggctcagggctaacacagatgaactcatttcaccttaatcacctctttaaaggccctgtctccaaatatagtcacattctgaggtattggaggttaaaacttcctataaagttctgggaaacacgattcagtccataacacttttctatctatttatgttat

SEQ ID NO: 917402 - DNA, 627 bp, Homo sapiens
agttaagggagtgcttgagccatcccttccccaaccccaggccgcacagctcacagcaacaaaagtgagtccttccttctgcttagaggagaggagagcaaagagtaaaagggactttgttttgcatcttggataccagctccaccacagtaggatagggcaccagagagagttgtgaggcatcccattccaggccctgactcctggatgatatttcttgatatttcaagggaattgctgcyttgaagggaaggaccagtcctggtaggattcatcacctgctgactaaagagcccttgggccctgaataaccaccagtgataaccttggagaatgccatgggccttgggctgtgagatgtgctggcttcaggggtgactcaacacgttcttaactgtggtgggaatggtgaaagactctttctgtttgagaaaagcagatggggaaggtaaaggggactttgttttgcaccctaggcaacagctcaatcacagcgggggcagagcaattaagcagggatccctgagtccaggcctaggctcttgggcagcatttatagacctgccctgggtcagaagaggagcttgctgacctgaaggagaagtcccagacctggcaacattcacc

SEQ ID NO: 917403 - DNA, 670 bp, Homo sapiens
cccagattaagggtggatctgcctttcccagccaactgactcaaatgttaatctcctttggcaacaccctcacagacacacctaggatcaatactttgcatccttcaatccaatcaaattgacactctattaaccatcatacttccttacaatagataagcagtctgtagagagacactttgaaaccatacaaatgttctgtttcccaacaaaatttcctctaatattaagaatccattgattattcttatcggatccaatccataccacgatggttggaaaatgataagttttcaactccagtgctccccygacacttaccaactggccctcaatattctgctattagcaagagccctcctctcccacttatttatctatttatttttggtataaacccatgagtttcttttttcccagtgatttatactttattattgtactccattatttgatgctcaaatcaacctagattttcccagtggtagccccttcgagttgaatttttttcctggtgacaggtcatgataggtagatggatgtagtgcttttttattttatggcataacaatatatttcaggctcatcttgtgcccatcctgccccagctctgaaatcagccatttcaattatatttttaaattgatgtattgtagttgggtttttatta

SEQ ID NO: 917404 - DNA, 775 bp, Homo sapiens
acaaagagccagtgtgacagccttttttgggtacccgcattcagtgggtcccaagctcctgtctggcatccaagaagaattaggttgcacggacacttgaaggttggtggaggtagagaattttatgtagcaatagaaatggctctcagcagagagggatgattgagaggggacaggaagggaagataatcttccctgatgtctggctggctctggctggctcttctccaaagttaaactgtctctcctccaaagtccagccatccccctgaagtcaagtcacctctctccagtcaagccacttctctcctctactgactgagtctggggtctttacaggcacaagatggggatcctggcaggccataggtagttttggaaaaggcaatatttgattgttagaaagacattattcagaaagaaccagttgagagagagtgagcaaatagggatagaaattctcayttttgggccacgggtttcaggatttttgacttgaaggtgggattttgccagggacccacccctgtctgcctagaatttctctgcctcatgcctctatcaatacaattcttattaaaatgtataaatggttctatcaatataattctttttaaaatgtataaatggtacagataggcaagagtgtaaaggacaagcaagccagctctgagccacactgcctgggtctcagtcctggctgagagacactaggacttactagctgtgagacactaggagagctacttaccctctctgtgcataactttccaga

SEQ ID NO: 917405 - DNA, 781 bp, Homo sapiens
tggctgtgggttctggaactggctacactctttgactgtctcttggttttgtgttcagctcctcctcatgattttcatctttctgtatcctttcagcttttgccccagatagtagtcccttcattatctcagtacttgcatgtctaaaattccagaaagaaaatatgattcagctaaaaaatatctctgcttggcaggacctttaatgttaggtgctggccagccagttgatttctggtgtccctatgtccagtatgtgcctcagcctgcygagtagctgggattacagccaccaccacacccagctaattttttgtaatttttagcagagacaggttttcaccatgttgcttagactggtcttgaactcctgacctcaggtgatccgctcacctcagcctcccaaagtgcttggattataggcgtgagccacagggcccagcccacctgaggcttctttttccttcccaagccacatcaccatcctggtggaactctcctgtgaggacagccaaggcctgaactacctgcggtggggagcacctcagggtttgcccaggcaaccagccagccctggtccaaggcatcctggagcgagttgtggatggccccgtgccccaccagacagtgcgcctggaggacctggatgagagcggtgagccccaggctggggagccagtgctgcctggcatcctccgggcatcctacctggctgaggggctgggcctgggcctgccggtgacagccatccctgtccttcctgctgagggggcaggctgtc

SEQ ID NO: 917406 - DNA, 540 bp, Homo sapiens
aagaaaataaagagaaacaagaagatgagaagaagacaatacagactagaagaaagaaaaaagaacaggtgtgggaagtagaaggcctattatgataccttttatcccctccccaattcatgaaatttgaaaaagtcagagactatcacaacaaaaaagaaacaagatacacaaatagtcaccccctaagttttgttaagaataagacaatcctgcccctcacgcctggctcagtcaccagcaggaggagggcaccctccacagattgcaggagaaggggaaggactcctcctttccctaggtgcacctccactgctgccaccaaggcctggtacagtacccgcaggttcctccccatccccaggtcgggctgggccctgcagygctcctactcccccttcccagcccccagacttaatgctgataccaccactagcaccgatgccaatacaaccgctgtcgccctcaatgcagcagcccaccctacaaggctcctaccaccttgcccccgcgggcaccctcctaccactccagtcgagc

SEQ ID NO: 917407 - DNA, 544 bp, Homo sapiens
aggctgaccaccttgtgtgacaaggttggaacccaactgccacacttccctgtgtgtctccacatgtcctcaggcctgctgggggctcccttttcctggtctttcatgcagaggaaagacgtagtgtgtgttgagagccagcctggtggtgggatgtagtgactgcccagccagtggaagctgctgctcttgcctctttggaccgtccctcccctgtccaggacctcacttcatctaaacacctcaggtcaagcccagcaggaaaatgagattctcttttcctttctttttttcttttttcttttttctttcttttttttttttctcatgtrgagtctcattctgttgtccaggctggagtgcagtggcgagatctcggctcatcgcaacccctgcctcctgggttcaagggattattctgcctcagcctcccagggagctgggattacaggcacctgccaccatgtctggctaatttttgtatttttagtagagacagggtttcaccatgttggccaggctcgtctcgaactcctggcctcaa

SEQ ID NO: 917408 - DNA, 639 bp, Homo sapiens
attctgttgtccaggctggagtgcagtggcgagatctcggctcatcgcaacccctgcctcctgggttcaagggattattctgcctcagcctcccagggagctgggattacaggcacctgccaccatgtctggctaatttttgtatttttagtagagacagggtttcaccatgttggccaggctcgtctcgaactcctggcctcaagagatctgcccacctcggcctcccaaagtgctgggattatagacatgagctatcaagcccagcctagaacttcccttttcttttcttttttttttttttttttgtttgacacagagtcttgttctgtcrcccaggctgcagtgcagtggcgtgatctcagctcactgcaacctccacctcccaggctcaaacgattctcctgccttagcctcccaagtagctgggactacaggcacgtgccactatgcccagctaatttttcttttgtatttttagtagagacaggccaggctagtctttaactcttacctcaactgatccacctgcctcggcctcccaaagtgctgggattacaagcatgagccactgtgccgggccaaacttcccttttctttccatttcttggtatttggaaagtgagcagccatggaaca

SEQ ID NO: 917409 - DNA, 631 bp, Homo sapiens
aggctggagtgcagtggcgagatctcggctcatcgcaacccctgcctcctgggttcaagggattattctgcctcagcctcccagggagctgggattacaggcacctgccaccatgtctggctaatttttgtatttttagtagagacagggtttcaccatgttggccaggctcgtctcgaactcctggcctcaagagatctgcccacctcggcctcccaaagtgctgggattatagacatgagctatcaagcccagcctagaacttcccttttcttttcttttttttttttttttttgtttgacacagagtcttgttctgtcgcccaggctgcagtgcagtggcgtgatctcagctcactgcaacctccacctcccaggctcaaacgattctcctgccttagcctcccaagtagctgggactacaggcaygtgccactatgcccagctaatttttcttttgtatttttagtagagacaggccaggctagtctttaactcttacctcaactgatccacctgcctcggcctcccaaagtgctgggattacaagcatgagccactgtgccgggccaaacttcccttttctttccatttcttggtatttggaaagtgagcagccatggaacagccg

SEQ ID NO: 917410 - DNA, 603 bp, Homo sapiens
tttatttgggttgtttccagtttttgactattttaaataatggtactatgaacattaatgtacggatttttatgtggactttcaaactttatcgtggagatgacagagagatagacagacagacagacagacagacagacagatagatagatagaaccactgtgttatatagaaactatacttaacattttgaggaactgccaaattgtcttccaaagtagctctatcatattataatctcagcaatatacaaggttccaatttctccacacttttaaacacttgttgtctatctattttcatttatgacatgacccagagggaaaaaaatcaaccagaatgtgatggcaacccaaggtggaatgcagactgtgacgaatcaatctaacygtattacaaataaattatataactagactgaagtgggtgaagaagaaaggaaatgacctgagtaactgaacaatggtgttttgggccaggctcagtggtgcacacctgtaattccagcactttgggaggcagaggcagacagatcacatgaggccatgagtttgagacctgcctggccaacatggtgaaactctctctctactaaaaatacag

SEQ ID NO: 917411 - DNA, 603 bp, Homo sapiens
tttatttgggttgtttccagtttttgactattttaaataatggtactatgaacattaatgtacggatttttatgtggactttcaaactttatcgtggagatgacagagagatagacagacagacagacagacagacagacagatagatagatagaaccactgtgttatatagaaactatacttaacattttgaggaactgccaaattgtcttccaaagtagctctatcatattataatctcagcaatatacaaggttccaatttctccacacttttaaacacttgttgtctatctattttcatttatgacatgacccagagggaaaaaaatcaaccagaatgtgatggcaacccaaggtggaatgcagactgtgacgaatcaatctaactgtattacaaataaatyatataactagactgaagtgggtgaagaagaaaggaaatgacctgagtaactgaacaatggtgttttgggccaggctcagtggtgcacacctgtaattccagcactttgggaggcagaggcagacagatcacatgaggccatgagtttgagacctgcctggccaacatggtgaaactctctctctactaaaaatacag

SEQ ID NO: 917412 - DNA, 766 bp, Homo sapiens
tcctaagccataatttctaatcttgtggctaatgttagtcctatataggcaatctagtccctaggcaagaaagaggtctgctttgggaaagggccattatcatcttcattttaatctataaactataaactaagtttctccgaatgttagttcagcctatgcccaggaatgaayaaagacaacttggagattagaagcaagatggagtcaattaagttagatctcttccactgtatcagtcacaattttgcaaaggcggcttcagatttacattcaaaatggggcattcacgtggctgttggcaggaggcctcagttccttgccatgtgggcttctccatagggccccttgagtgtcctcaacacatagtagttggtgtccaccaaagtgagtgattcaagagaacaagaaaccacaaagtccttttaaatctgatctcaaaagtcacactctgtcatttctccagtatcttattggttacaagtctatttagtgtgagcccttcccacattgactacacaaaggcaggattaccaggaagatgggattactgaggacatctctgaggctagctaccatatcagtgaatatctattgaatgagtgattgaggacgtgaggacataacctggagccctatgaggaattagcctgggagtattctgttctgggtggggtcttgtcagccacacctctgcatcctccctaaccaagtattgcacagtcctggcccacagcatgcacttagtaaatgcttgctcagtgag

SEQ ID NO: 917413 - DNA, 633 bp, Homo sapiens
gagcccagatcacgccactgcactccagcctgggtgacagagtgagactttgtcttaaataaataaataaataaataaagttaaattaggctgggtgcggtggctcatgcctgtaatcctagcacttttggaggccgaggcaggcacttcacgaagtcaagagatcaagaccatcctggccaacatggtgaaaccccatctctactaaaaatacaaaaaaattagctgggtatggtggcgggcacctgtagtcccagctactcagraggctgaggcaggaggattgcctgaacctggcaggcagaggtttcagtgagctgagatcacgccactgcactccagcctggtgacagagcaagactccgtctcaaaaaaaaaaaaaaaaaaaaaaaaaaaatttaaaggattttttccagcctatagccagaaagtgacagacctgggatttgaaacttccagacttgtgcctttagctgcatgctgccctcactcccacttgggttcagttctgaagcagggtatggctcaagccactccagacctttcctgaataaaatgagacacacatcagcatctacttttgtatctgtggccacaagctcataagagactctgtctggattttggaatgaa

SEQ ID NO: 917414 - DNA, 766 bp, Homo sapiens
tcctaagccataatttctaatcttgtggctaatgttagtcctatataggcaatctagtccctaggcaagaaagaggtctgctttgggaaagggccattatcatcttcattttaatctataaactataaactaagtttctccgaatgttagttcagcctatgcccaggaatgaataaagacaacttggagattagaagcaagatggagtcaattaagttagatctcttccactgtatcagtcacaattttgcaaaggcggcttcagatttacattcaaaatggggcattcacgtggctgttggcaggaggcctcagttccttgccatgtgggcttctccatagggccccttgagtgtcctcaacacatagtagttggtgtccaccaaagtgagtgattcaagagaacaagaaaccacaaagtccttttaaatctgatctcaaargtcacactctgtcatttctccagtatcttattggttacaagtctatttagtgtgagcccttcccacattgactacacaaaggcaggattaccaggaagatgggattactgaggacatctctgaggctagctaccatatcagtgaatatctattgaatgagtgattgaggacgtgaggacataacctggagccctatgaggaattagcctgggagtattctgttctgggtggggtcttgtcagccacacctctgcatcctccctaaccaagtattgcacagtcctggcccacagcatgcacttagtaaatgcttgctcagtgag

SEQ ID NO: 917415 - DNA, 707 bp, Homo sapiens
cggggttctagttctaagtaagatagagtaagcagtctgtctctcccactggctgcaactaaaagccctggaaataatggatctgaggactctgaaaaagaaatattaacaaggctgggtgcggttgctcatgcctataatcccagaactttgggrggctgaggcaggaggatcacttgaggccaggagtttgagaccagcctgggcaacacaatgagactctgtctctagaaaaaaaaaaattttttttttttgggggtagcagcagtaacagtggtggccagaaaagcacctaaaactctgacaaagcggaatcctttcatctgtccaaagcatctgcaatctgaaaagtagaagaggggaatctccgttgccttttttctctcttcatcctgtcacctggcccaagagtacacccgccatggagggtgcgtaacaagcagggagactaaaggacccaatttctagctaaagggtcaggaaaatgaggggtcttgaaagctggagaatgtggacaggagagagcttgtgaaatagatcccataaagttgcacatgaatttgtaggttcacatgcatggacctgaccctaagcagtattccagtgaatgagaactgaactattaggcagaacacccaggtttcagactgctcactggggggcataagcttaggactgttctgatttacatggcaaaggctttgaaa

SEQ ID NO: 917416 - DNA, 713 bp, Homo sapiens
ggagtcattcctgactcttccatttccctctcatcatacatccaatctattagtaaagttgcttggttcagtcttcaaaatctatatagagcttgctccttctctactgccatccgaatctgagctaacaccaccckctggatcagtggcttaactgccaaactgatgcattctaaatttgttctactgaaatctattcctgacaaaacagacaaactggtcctttgaaaatataagtcagatcggtctgttccaagatggccaaataggaagagctctggtctgcagctcctagcatgatcgacacagaagacaagtgatttctgcatttccaactgaggtacctggttcttctcattgggactagttggacagtgggtgcagcccacggagggctagctgaagcagggtggggtattgcctcacccaggaagtgcaagggtcgggggatttccctttcctagccaagggaagctgtaacagactgtacctggaaaaacaggacattcctggccaaatactgtgcttttcccatggtcttagcaaccagcagaccaggagattctgtcccatgcctggctcggtgggtcccatgcccacagagccttgctcactgctagcactgcagtctgagatcgatctctgaggctgcagcctggcagggggagggtcgtctgccattgctgaggcttgagtaggtaaacaaaatggcc

SEQ ID NO: 917417 - DNA, 796 bp, Homo sapiens
tgccaaacttgggagtcattcctgactcttccatttccctctcatcatacatccaatctattagtaaagttgcttggttcagtcttcaaaatctatatagagcttgctccttctctactgccatccgaatctgagctaacaccaccctctggatcagtggcttaactgccaaactgatgcattctaaatttgttctactgaaatctattcctgacaaaacagacaaactggtcctttgaaaatataagtcagatcgktctgttccaagatggccaaataggaagagctctggtctgcagctcctagcatgatcgacacagaagacaagtgatttctgcatttccaactgaggtacctggttcttctcattgggactagttggacagtgggtgcagcccacggagggctagctgaagcagggtggggtattgcctcacccaggaagtgcaagggtcgggggatttccctttcctagccaagggaagctgtaacagactgtacctggaaaaacaggacattcctggccaaatactgtgcttttcccatggtcttagcaaccagcagaccaggagattctgtcccatgcctggctcggtgggtcccatgcccacagagccttgctcactgctagcactgcagtctgagatcgatctctgaggctgcagcctggcagggggagggtcgtctgccattgctgaggcttgagtaggtaaacaaaatggccaggaaactccaactgggtggagcccaccgcaactccgcaacgcctactgcctatatagactccacctctgtg

SEQ ID NO: 917418 - DNA, 796 bp, Homo sapiens
tgccaaacttgggagtcattcctgactcttccatttccctctcatcatacatccaatctattagtaaagttgcttggttcagtcttcaaaatctatatagagcttgctccttctctactgccatccgaatctgagctaacaccaccctctggatcagtggcttaactgccaaactgatgcattctaaatttgttctactgaaatctattcctgacaaaacagacaaactggtcctttgaaaatataagtcagatcggtctgttccaagatggccaaataggaagagctctggtctgcagctcctagcatgwtcgacacagaagacaagtgatttctgcatttccaactgaggtacctggttcttctcattgggactagttggacagtgggtgcagcccacggagggctagctgaagcagggtggggtattgcctcacccaggaagtgcaagggtcgggggatttccctttcctagccaagggaagctgtaacagactgtacctggaaaaacaggacattcctggccaaatactgtgcttttcccatggtcttagcaaccagcagaccaggagattctgtcccatgcctggctcggtgggtcccatgcccacagagccttgctcactgctagcactgcagtctgagatcgatctctgaggctgcagcctggcagggggagggtcgtctgccattgctgaggcttgagtaggtaaacaaaatggccaggaaactccaactgggtggagcccaccgcaactccgcaacgcctactgcctatatagactccacctctgtg

SEQ ID NO: 917419 - DNA, 611 bp, Homo sapiens
actggatggagttgaatcatagcctatttacatgaatacagggggagttaacagaggcagaacttgggagctgcttgacgttctgtggggagtgaaaaggaggaggcagattaaagaaatgtgaatttccaacagggtatgcttacaaatccccaaaattcataaccgatttgttcaaagtaaaaaataagaacaggagtctgtcatgagaaaggagaacttcatgtcagtttcaagccctgcacattggagtcagtacatgcacattcttctttttggcatccattctttgtttatatttagcagatttgaataccgtttgggtttctacccacatacatactagccttactctatcttgatgtacaggaaggtttagacctttcactagtaattctctgtratcgaatgtgaccaagttcaagggaaacgtcaattacaaaaacactgggggaaaaaatctgtatgttgcctccatggtttcttaactatggtttttgttgttgttgttgttatcgttttgttttgtttttatttttgtttgagacagagtctccctctgttgcccaggctggagtgcagtggcgcgatctctgctcactgcaatctct

SEQ ID NO: 917420 - DNA, 611 bp, Homo sapiens
actggatggagttgaatcatagcctatttacatgaatacagggggagttaacagaggcagaacttgggagctgcttgacgttctgtggggagtgaaaaggaggaggcagattaaagaaatgtgaatttccaacagggtatgcttacaaatccccaaaattcataaccgatttgttcaaagtaaaaaataagaacaggagtctgtcatgagaaaggagaacttcatgtcagtttcaagccctgcacattggagtcagtacatgcacattcttctttttggcatccattctttgtttatatttagcagatttgaataccgtttgggtttctacccacatacatactagccttactctatcttgatgtacaggaaggtttagacctttcactagtaattctctgtaatcgaatgtgaccaagttcaagggaaaygtcaattacaaaaacactgggggaaaaaatctgtatgttgcctccatggtttcttaactatggtttttgttgttgttgttgttatcgttttgttttgtttttatttttgtttgagacagagtctccctctgttgcccaggctggagtgcagtggcgcgatctctgctcactgcaatctct

SEQ ID NO: 917421 - DNA, 605 bp, Homo sapiens
acaatgtaaagcaagccatggggaagttccaactgggtggagccctcctcagctcagcaaagccactgtagccagactgcctctctagatccctcctctctgggcagggcatctctgaaagaaaggcagcagccccagtcaggggcttatagataaaacccccatctcctgggacagagcacctgggggaaggggtggctgtgggtgcagcttcagcagacttaaacgttcctgcctgccagctctgaagagagcagttctctgagcatagtgttcgagctctggtaagggacaaattgccttctcaagtgggtccctgacccctgtgcctcctgagggggagacaccttccaggaggggccaacagacacttcacacaggagagctctggctggcatctggtgaatgcccccctggggtgaagcttccagaggaaggaacaggcarcaatctttgctgttctgcggactcagctggtgatacccaggcaaatggtctggagtggacctccagcaaactccaacagatctgcagcagaagggcctgactgttggaaggaaaactaacaaagaggaagagcatcaacatcattgaaaaggatgtcc

SEQ ID NO: 917422 - DNA, 726 bp, Homo sapiens
ctaactagaataaccagtttagagaagaacataaatgacctgatggagctgaaaaacacagcatgagaactttgtgaagcatacacaagtatcaatagctgaattgatcaagcggaagaaaggatatcagagattgaagatcaacttaatgaaataaagcatgaagacaggattagagaaaaaagaatgaaaaggaatcaacaaagcctccaagraatatgggactatatgaaaagaccaaatctacatttgattggtgtacctgaaagtgacatggagaatggaaccaagttggaaaccactcttcagtatattatccaggagaacttccccaaactagcaagacaggccaacattcaaattcaggaaatacagagaacaccatgaagatactccccaagaagagcaaccccaagacacataatcatcagattcatcaagattgaaatgaaggagaaattgttaagggcagccagagagaaaggctgggatacccacaaagggaagctcatcagactaacagcggatctctcagcagaaatcctacaagccagaagatagtgggggccaatactcaacattcttaaagaaaataattttcaacacagaatttcatatccagccaaactaagcttcataaatgaaggagaaataaaatcctttacaaacaaggaaatgctgattttgtcaccaccaggcctgccttacaagaagtcctgaaggaag

SEQ ID NO: 917423 - DNA, 726 bp, Homo sapiens
ctaactagaataaccagtttagagaagaacataaatgacctgatggagctgaaaaacacagcatgagaactttgtgaagcatacacaagtatcaatagctgaattgatcaagcggaagaaaggatatcagagattgaagatcaacttaatgaaataaagcatgaagacaggattagagaaaaaagaatgaaaaggaatcaacaaagcctccaagaaatatgggactatatgaaaagaccaaatctacatttgattggtgtacctgaaagtgacatggagaatggaaccaagttggaaaccactcttcagtatattatccaggagaacttccccaaactagcaakacaggccaacattcaaattcaggaaatacagagaacaccatgaagatactccccaagaagagcaaccccaagacacataatcatcagattcatcaagattgaaatgaaggagaaattgttaagggcagccagagagaaaggctgggatacccacaaagggaagctcatcagactaacagcggatctctcagcagaaatcctacaagccagaagatagtgggggccaatactcaacattcttaaagaaaataattttcaacacagaatttcatatccagccaaactaagcttcataaatgaaggagaaataaaatcctttacaaacaaggaaatgctgattttgtcaccaccaggcctgccttacaagaagtcctgaaggaag

SEQ ID NO: 917424 - DNA, 590 bp, Homo sapiens
actagcgttgggtgacttcccttttgttcacagaatgttgcaagttgggttctctgggaagtagactccagcatggatttcataatgtttatcagggtgtaccttgggattgatgcctgtcagggggagggacagaagccggacttgacaagaaaagaagttgagctgcacagcagtcctgtcagctactgccaaacccaagggacctctggaatgttcttaaaaatttatctgtattttaatctttttagagacagagtctcactctgctgcccaggaaggaatgcagtggtgtgatcatagctcactgcaacctcgaactcctgggctaaggtgatcctcccacctcagcctcccaagtagctgggcctacaggcatgcaccaccacacccagctagtttttaggtttttgtagagatggggtcttgctatgttgcccaggctagtcttgaactcctggtgtcagatgatmctcctacctcaacctctggacctttaatggtctgtcaaagttgtcctgtgttggtcccaaatggccaggctttctattgcttcctcagtatgggatgtgcaccactgagaaggtagc

SEQ ID NO: 917425 - DNA, 576 bp, Homo sapiens
tgagtctttccactctaattacaaaaagcggaggaatgatcatgattaatacatcagctcccttcccaatctgagccaaaagacagaattacctgtaaagttctgtgctttgagatgcagatcatagagtttgtgaatgtagcgtatatacatctcctccttgttcagttcagtcttatagaagttctgtaaaaaaagagtacaggtatggatagttcctcarcaatctggcctacaattatctgccttttactctgctaaagttccatgtctggagccaagagaacggattcatttttccatgtaaatatctctaaaaatgaaataaggtggctcagtgacagtgtcagtcatttcctagcaattactggataagttggtttcttgggtttttatccctgattcacatttctttactttttatgattttttgttagtttaaatgtcaatgaacaatcagcctgttcaactaaaaaatattaaaaatacgtaacagattaatccattttttaacttggccgattgatactcaaaggacagtttctttcattttaaatttcaaagctattttgctct

SEQ ID NO: 917426 - DNA, 637 bp, Homo sapiens
acagagaatttcagaggtgagcaatatatttcctataatacaccaaaagggaagaaagcaaataaggaaagcaaaaaaatagtagaaacaccattcccaactgggagggaagcagttccagtaaacaactctgactgaaaccccaaaaactcaggaaataaatgaaaaaagcactttttaatatgattttagaaggccatggaaaatgagggccaaacctcttaattactctaaactgtctataatagaccaaargacagataagaatcctgtagcctttatgaaaaggctgagaaagacgctaatagaatacaaccccttacccctaattcaatcaagggatggctcattctaaaaaacaagtttattacacaggcagctcccaatattaaaaggaaactacaaaagcaagctataggaccaaatagcaccttagaaagtctcctaatggtgaccactttggtcttttataatagggaccagaaggaggcccaaaggaaaaagaaaaatctcaggagaaggacaaaggctctagcagcagctttgcaggcttgcaaagtccaggatccccgaggtgcatctgctagttgctatcagggtagcaggccagggaattttaaaaaggaaggcccaggca

SEQ ID NO: 917427 - DNA, 583 bp, Homo sapiens
agcaacccctgacagcccagaggaatgtcctaaacataaatgtgaagaaacagaaaatcttaagctaaaactcataaaaaataagtaactaagtaagggctattcatcttaatcccactcctacctaacctttcctctcaaagttcaccaccaaatattaaaacttctttttaactcatatttgcaagcaacttttaattatacatgggattgcatttgtaactttataaacccacaaagaagattacatcttggcaagtaaagaaataattttatatggaaattatttactatgccactcttrtggaaactgttatcatcccactactaattgcaataaaactatacactgtgtcacccacaatgtggaattctggttgtaaaattctaattgctgtaatattttgcctgattatcatccttataacaggattaataattgcaggaaagatttactcaaggttgttttggttatagcaaaagtaatagggataaaaagtaagtataaaagttttactatcactaagtttaatacgacttttttactaaaggttgataatacaatgcactttaagctaggaaa

SEQ ID NO: 917428 - DNA, 572 bp, Homo sapiens
aaatactgagaagtgtgtttactggatcatatggtagttctatttttaattttttgagaaaccttcatacggtcatagagactatactattttgcattcccaccaacagtatacaaggactgcaatttcttcatgtttttgcccatacttatcttttttttttttgataatagycatcctaagagatgtgaggtgacatctaattatggttttgatttgcatttacctgatgattagtgatggacattttttcatatacctgtgttgcccatttgtatgccttctttggagaaatgtctattgaagtttttagcccatttttaaactggattagtttttttttttgttattgagttgtaggagttccttatatattttgggtatttatgccttctcagatatatagtttacaaatattttcttccatttcataagttgccttttgctctgttgattatttcctttgctgtgcagaaactttttagactgatgtaattacatttgtctgttttttcttttgttgctgtgctattggtgtcatatttataatccttgtcaataccaatgtcatg

SEQ ID NO: 917429 - DNA, 583 bp, Homo sapiens
tgggcttaatacccatttttttttaaatttaaaaatgtatttaagaaaaatgttctgttttgagctgtgaccactaagcaattttccagtacaccaaagaattacattaaatgctagatgatttcctactttatacttcatatcatactgaacatttgccaaattcttcagtttcgtattaactagctaacatggaacattatcctgttgttcaacactagttaaaaatgaatatatcatacagcatatatgcatayaaacagtatatatatatttagatagatacagtacatataaagagtactgtatctctctatataaaaatatatatatttttcattggaaacacagagaaaatgatagtttaaaactagataaactgctagcctccaaaggagaagtatgactaatatatgagtttctgttttttgaaagttttaatataatttttgctcattgagttttaaaatttgtattatactaacttgatgacatttacagtcatctttttgaagtgagtcgaaggtattgcaaatttttcaaaattcattcaataatccaaaatatatgattgtgcactcat

SEQ ID NO: 917430 - DNA, 561 bp, Homo sapiens
agtactggaaactagaaggcaatggggcaatgccttcaccatgctaaaagaaaatgtttatgaatctagaattctactctaagtcgggggtagaattcatgcactggggtgcatgtatggtctcatgcaccctttctcagaaatgtaccagaggacatatctaacccaaacaggcaacacaccaagatttaggaagacttgtggtccagaaaacaggagagaggaaaagggtgtccctgggatgatagggaatgggaatcccaggatgacagtggttcaccagatgcacatcaacctgaaactcrttggagcaggtctgaagactccagaaggaactttttcaagaaaataacattgataaaatacccactgagtttaaatatttcagaaaagattaaaactattgtctgaccaggtacaatgcctcacacctataattccagcactttgtaggcctaggcaggaggatcacttgaggccaggagttggagactagcctcatcaaaatagcaagaccctgtctctactaaaaataattttttaaaaattagccaggcacgg

SEQ ID NO: 917431 - DNA, 573 bp, Homo sapiens
gaaaccctctaaatctattctcttaggaatttttaacttattgtcattaactataggcactgtgaggtacaatagatctcttgattttattccttccatctaactgaaattttgtgttctttgactgacatctccctgatcctcccattccccagcatctggtaaccaccattttgctctttgtttctattaattagattgttttagattccacacataactaagacgaagctgtctttctgtgttggggttatttcacgtaatataatgttcttcagattcatcaatgttcttgtaactggcaggatttcctttcctgtttttaaaaggctgaatagtattctgttgtggatatacatcacawttcctttttccatttgtctgtcaatggacacccaggttaattccatagcatggctattgtgaaaaatgctgcaacaaacaagggagtgcagttacctctttaacatactcttgtcatatcctttagatatatactcagtagttggattactggaccatacagtcctttatttttaattttttgaggaacctccaaattgtttttcataa

SEQ ID NO: 917432 - DNA, 606 bp, Homo sapiens
atgaagcttccagagaaaggaacaggcagcaatctttgctgttctacagcctccactggtgatacccaggcaaacaggatctggatggacctccagcaaactccagcagacctgcagcagagaggcctgttagaaggaaaactaacaaacagacaggaatagcatcaacatcaacaraaaggatgtccacacagaaaccccatccagaggtcaccaacatcaaagaccaaaggtagataaatccacaaagatgaggaaaacccagcacaatgcagctgaaaactccaaaaccagaatgcttctccttcaaaggatcacagctcctcaccagcaaggaaacaaaactggatggagaattaatttgacaaattgacagaagtaggcttcagaaggtgggtaataacgaactcctccaagctaaaggggcatgttctaacacaatgcaatgaggctaagaaccttgagaaaaggttagaggaattgctaactagaataaccagttcagagaagaacataaatacctgatggagctgaaaaacacagcacgagaacttcgtgaagcatacacaagtatcaaaaacactcttaagtacagaccatgatact

SEQ ID NO: 917433 - DNA, 606 bp, Homo sapiens
atgaagcttccagagaaaggaacaggcagcaatctttgctgttctacagcctccactggtgatacccaggcaaacaggatctggatggacctccagcaaactccagcagacctgcagcagagaggcctgttagaaggaaaactaacaaacagacaggaatagcatcaacatcaacagaaaggatgtccacacagaaaccccatccrgaggtcaccaacatcaaagaccaaaggtagataaatccacaaagatgaggaaaacccagcacaatgcagctgaaaactccaaaaccagaatgcttctccttcaaaggatcacagctcctcaccagcaaggaaacaaaactggatggagaattaatttgacaaattgacagaagtaggcttcagaaggtgggtaataacgaactcctccaagctaaaggggcatgttctaacacaatgcaatgaggctaagaaccttgagaaaaggttagaggaattgctaactagaataaccagttcagagaagaacataaatacctgatggagctgaaaaacacagcacgagaacttcgtgaagcatacacaagtatcaaaaacactcttaagtacagaccatgatact

SEQ ID NO: 917434 - DNA, 606 bp, Homo sapiens
atgaagcttccagagaaaggaacaggcagcaatctttgctgttctacagcctccactggtgatacccaggcaaacaggatctggatggacctccagcaaactccagcagacctgcagcagagaggcctgttagaaggaaaactaacaaacagacaggaatagcatcaacatcaacagaaaggatgtccacacagaaaccccatccagaggtcaccaacatcaaagaccaaaggtagataaatccacaaagatgaggaaaacccagcacaatgcagctgaaaactccaaaaccagaatgcttctccttcaaaggatcacagctcctcaccagcaaggaaacaaaactggayggagaattaatttgacaaattgacagaagtaggcttcagaaggtgggtaataacgaactcctccaagctaaaggggcatgttctaacacaatgcaatgaggctaagaaccttgagaaaaggttagaggaattgctaactagaataaccagttcagagaagaacataaatacctgatggagctgaaaaacacagcacgagaacttcgtgaagcatacacaagtatcaaaaacactcttaagtacagaccatgatact

SEQ ID NO: 917435 - DNA, 606 bp, Homo sapiens
atgaagcttccagagaaaggaacaggcagcaatctttgctgttctacagcctccactggtgatacccaggcaaacaggatctggatggacctccagcaaactccagcagacctgcagcagagaggcctgttagaaggaaaactaacaaacagacaggaatagcatcaacatcaacagaaaggatgtccacacagaaaccccatccagaggtcaccaacatcaaagaccaaaggtagataaatccacaaagatgaggaaaacccagcacaatgcagctgaaaactccaaaaccagaatgcttctccttcaaaggatcacagctcctcaccagcaaggaaacaaaactggatggagaattaatttgacaaattgacagaagtaggcttcagaaggtgggtaataacgaactcctccaagctaaaggggcatgttctaacacaatscaatgaggctaagaaccttgagaaaaggttagaggaattgctaactagaataaccagttcagagaagaacataaatacctgatggagctgaaaaacacagcacgagaacttcgtgaagcatacacaagtatcaaaaacactcttaagtacagaccatgatact

SEQ ID NO: 917436 - DNA, 495 bp, Homo sapiens
cagaatgcttctccttcaaaggatcacagctcctcaccagcaaggaaacaaaactggatggagaattaatttgacaaattgacagaagtaggcttcagaaggtgggtaataacgaactcctccaagctaaaggggcatgttctaacacaatgcaatgaggctaagaaccttgagaaaaggttagaggaattgctaactagaataaccagttcagagaagaacataaatacctgatggagctgaaaaacacagcacgagaacttcgtgaagcatacacaagtatcaaaaacactcttaagtacagacyatgatactatgaagcaaccacattaccaattttgcataataaccagctaacatcatgatgacagcatcaaatacatacatataaacactaaccttgaatgtaaatgggctaaatgccccaagtaaaaggaacagaatggcaagctggataaagaaccaaacccatgggtatgctatcttcaagagacc

SEQ ID NO: 917437 - DNA, 495 bp, Homo sapiens
cagaatgcttctccttcaaaggatcacagctcctcaccagcaaggaaacaaaactggatggagaattaatttgacaaattgacagaagtaggcttcagaaggtgggtaataacgaactcctccaagctaaaggggcatgttctaacacaatgcaatgaggctaagaaccttgagaaaaggttagaggaattgctaactagaataaccagttcagagaagaacataaatacctgatggagctgaaaaacacagcacgagaacttcgtgaagcatacacaagtatcaaaaacactcttaagtacagaccrtgatactatgaagcaaccacattaccaattttgcataataaccagctaacatcatgatgacagcatcaaatacatacatataaacactaaccttgaatgtaaatgggctaaatgccccaagtaaaaggaacagaatggcaagctggataaagaaccaaacccatgggtatgctatcttcaagagacc

SEQ ID NO: 917438 - DNA, 615 bp, Homo sapiens
ccatccctggggcctacagttctctaatatatgcacatattcttcttgtgttaggtgtatgtttctgatccctagggagttccttttcttgagagagtagctctgaatgaatcttttaaaaaattgtattctactcagcattttcatatttttgcaatgtagatactttcagattatcttagtctgaattcttgctggtaccacaagtctttaatagcgcatgaaaagttttcttcatatgcattatgcaaatgtttatagctatgtaatttggatttaaaaatattttctaagcaatagctatctgtatagataaaattatttatatttataaaattatgacwatttccccactgcatttttaattttttgaatatttctatcactaattccattgggctttccttatatatatatatcatctatgaataatgatattaaaagaagacaaaaagagaaaaatagaaaatacagtaaaaaagtaatggctacaaactccttaaaataatagagtttgttttctttctgttatatactccactttgcctactacagtgcttaacacacaagagctgctaaaatatctaattttcaaaaaatcagatgtacgtgctt

SEQ ID NO: 917439 - DNA, 606 bp, Homo sapiens
tattcctaggtattttattcttttgtagcaattgtaaatgggagttcattcatgatttggctctctccttgtctattgttggcgtaaaggaatgcttgtgatttttgcacattaattttgtatcctgagactttgctgaagttgcttatcagtttaaggagttttcaggctgagatgaaggggttttctaaatataaaactatgtcatctgggctgggcccagtggctcatgcctgtaatcccagcactttgggaagccaasgcgggtggatcacaagatcaagagatcgagactatcctggccaacatggtgaaaccccatctctatcaaaattacaaaaattagctgggcatggtggcgtgtgcctgtagtcccagctacttgggaggctgaggcaggtgatccacttgaacctggaaggcggaggttgcagtgagccgagatcgcaccactgcactccagcctagcgacagagcaagattctgtctcagaaaaaacaaacaaaaaaaccatgtcatctgcaaacggagaaagtttgacttcctctcttcctatttgaataccttttatttgttcctcttgcctgattgctctggccagaactt

SEQ ID NO: 917440 - DNA, 606 bp, Homo sapiens
tattcctaggtattttattcttttgtagcaattgtaaatgggagttcattcatgatttggctctctccttgtctattgttggcgtaaaggaatgcttgtgatttttgcacattaattttgtatcctgagactttgctgaagttgcttatcagtttaaggagttttcaggctgagatgaaggggttttctaaatataaaactatgtcatctgggctgggcccagtggctcatgcctgtaatcccagcactttgggaagccaaggcgggtggatcacaagatcaagagatcgagactatcctggccaacatggtgaaaccccatctctatyaaaattacaaaaattagctgggcatggtggcgtgtgcctgtagtcccagctacttgggaggctgaggcaggtgatccacttgaacctggaaggcggaggttgcagtgagccgagatcgcaccactgcactccagcctagcgacagagcaagattctgtctcagaaaaaacaaacaaaaaaaccatgtcatctgcaaacggagaaagtttgacttcctctcttcctatttgaataccttttatttgttcctcttgcctgattgctctggccagaactt

SEQ ID NO: 917441 - DNA, 696 bp, Homo sapiens
cctcattacttatgcaaatttctgcagcctgcttgaatttcttctcagaaaatgggattttcttttctatcacattgttaggttgcaaattttctgaccttttatcctctgcttcccttataaaactgaatgcctttaacagcacccaagtcacttcttgaatgctttgctgctttgaaatttcttccaccagatacccaaaatcatctctctcaaattcaaagttccgcaaatctctggggaaggcacaaaatgccacgtctctttgctacaacataacaagagtcacttttgctccagctcccaacaagtttctcatctccatctgagaccacctcagcctggaccttatcgttcatatcactatcagcatttttgtcaaagtcgtttaacaagtctctaggaagccccaaactttcccacattttcctgtcttcttttgagccctccaaactgttccaacctctgcctgttacccagttccaaagttgattccacatttttgtgtatcttttcagcagcaccccastctactggtaccaatttaatgtcttagtccattttcatgctactgataaaggtattcctgagactgggcaatttacaaaagaaggatgtttaattggacttaaagttccaggaggctggtgaggcctcacaatcatggtgaaaggcaaggaggagcaagtcacatct

SEQ ID NO: 917442 - DNA, 646 bp, Homo sapiens
tccactccagaccctgtttgcctgggtatcagcagcagaggctgcagaacagtgaacattcgtgaacagcaaatgttgctgcctgatcgttcccctgactgttttgtctcagaggggtacctggctgtgtgaggtgtcaatctgcccctaatggggggtgcctcccagttaggctactcaggggtcagggacccacttgaggaggcagtctgtccattctcagatctcaagctgygtgctgggagaaccagtactgtcttccgtgctgtcagacagggacatttaagtctgcagaggattctgctgccttttgtttggctatgccctgcccccagaggtggagtctacagaggcaggcaggctccctatgctatggggggctccacccagtttgagcttcctggccactttgtttacctactcaagcctcagcaatggtgggtaccccttccccagcctcactgccaccttgcagtttgatctcagactgttgtgctaggaatgagcaaggcgccttgggcgttggaccctccgagccaggtgcaggacataatctcctggtgtgccgtttgctaagactgttggaaaagcgcagtattagggtgggagtgactcgattttccaggtgccgtctgtcacccctttc

SEQ ID NO: 917443 - DNA, 556 bp, Homo sapiens
cagggacatttaagtctgcagaggattctgctgccttttgtttggctatgccctgcccccagaggtggagtctacagaggcaggcaggctccctatgctatggggggctccacccagtttgagcttcctggccactttgtttacctactcaagcctcagcaatggtgggtaccccttccccagcctcactgccaccttgcagtttgatctcagactgttgtgctaggaatgagcaaggygccttgggcgttggaccctccgagccaggtgcaggacataatctcctggtgtgccgtttgctaagactgttggaaaagcgcagtattagggtgggagtgactcgattttccaggtgccgtctgtcacccctttcctgggctaggaaagggaattccctgaccccttgcacttcctgggtgaggtgatgcctcgcccttcttcagctcacactcggtgcgctgcacccgctgtcctgcacccactgtccgacaatccgcagtgagatgaacccggtacttcagttggaaatgcagaaatcatccgtcttctgcgtcgc

SEQ ID NO: 917444 - DNA, 515 bp, Homo sapiens
taatgagagctagctctaaaaatccaagattaactccatctcaaataccataaataaatacttatttttctggaccaatgcttatctggagccagcatcaaacacacagctatgacagatgtcttaggacattttcctgagtaataaataaaaaamcaaaaacaaatataatgaaggacaaatactaaccctatgattcctttcttctgcccttcacttcaccagttctatgtaatatgttatcttctgtaatatccatgcacagattacacatgctattgagaggtgacagtgtgctggcagcccttgctcgctctgggcacctcctcaggccacggcgccactctggctgcgcttgaggagcccttcagccccctgctgcactgtgggagcccctctctgggctggcctaggccggggccggctccctctgtttgtggggaggtgtggagggagaggcgccggcgggaatcggggctgtgcatgcgctcgcagcccagtgtgagttccgggtg

SEQ ID NO: 917445 - DNA, 666 bp, Homo sapiens
aatgggctggagctttatatagagcatacaaggcttttcatgatccagcccatgaactgctcaggttatattagttatagtttcaaatgtttggagattttccagttatctttctgttattaatttttaatttgatcccattatgtccagagaatatactctatcatttcaattcttttaaatttgttaaggtttttttaaatcaaggtgaatattttatggacatttgaaaagaatgtgtattgcactgttattgggcaaagkgttctataaatatgttaggtcccgttggttgatggtgttcagttcttctacatcctgatgattttctctctagtagttctatcagttgctaagggtggggtgttgaaatccccaactctaattgtggatttgtctatttctctttttaactctgtttttgcttcatatattttgaagctctggtgtttggcacatacacattaaagattgctatatatttttggtggattgatttattgattttttttttttttttgagacagggtctcactctgtcacccaggctggagtgcagcacactgctgagtgtgatctcagttcactgcaacttccatctcctaggctcaagcaatcctcccacctcagtctcccaagtggctgggactataggcacgcaccact

SEQ ID NO: 917446 - DNA, 666 bp, Homo sapiens
aatgggctggagctttatatagagcatacaaggcttttcatgatccagcccatgaactgctcaggttatattagttatagtttcaaatgtttggagattttccagttatctttctgttattaatttttaatttgatcccattatgtccagagaatatactctatcatttcaattcttttaaatttgttaaggtttttttaaatcaaggtgaatattttatggacatttgaaaagaatgtgtattgcactgttattgggcaaagtgttctataaatatgttaggtcccgttggttgatggtgttcagttcttctacatcctgatgattttctctctagtagttctatcagttgctaagggtggggtgttgaaatccccaactstaattgtggatttgtctatttctctttttaactctgtttttgcttcatatattttgaagctctggtgtttggcacatacacattaaagattgctatatatttttggtggattgatttattgattttttttttttttttgagacagggtctcactctgtcacccaggctggagtgcagcacactgctgagtgtgatctcagttcactgcaacttccatctcctaggctcaagcaatcctcccacctcagtctcccaagtggctgggactataggcacgcaccact

SEQ ID NO: 917447 - DNA, 815 bp, Homo sapiens
ggatgaatgggagagaattggcagagattttaaaaagacgtataaagatggagcaaaaattccagtttctgtttggtcaacgtggatgctaataaaggcagctcttgagccatttcaaacagatgataaggcagattcagatgaggaagaggaggacaagtgtaaaaaactaacttcagattctgaatgtgaggaacagaaactggaggaaattaaagaaaagaaaggaaaactgaaaaaagtatgttttactagcccgtcggctccacttgctgaattaagtgaatggccacctcctctctctccccttaataggtgagaaaatgaattagatgaaaaacttatagctcctgtagttgcaacattaaaacctggagcaattggtggtgctatacaaaattctattcaaaaggctagagctgagggagaccttgaagcatggcaatttcctgttactataatccagcaaggaggacagaatatagctaattgggccatctttccatttaaattgttaaaggaattcaagcaagccattagtcaatatgggccaaactctycttttgtgcaaactttgttaaaaaatatggctcttgataaaaggttaataccacatgattgggatactttgaaaaaatctattcacactcaatctcagtacttgcagtttaaaacctggtgggctgatgaagctcaatctcaggcaagggaaaacccacaagcacagccacctgtgcctgtttcctttgaacagttcatgggagttggccctaattggagttgattagaaaatcaagcagtaatggaggattttg

SEQ ID NO: 917448 - DNA, 571 bp, Homo sapiens
tcactagagatacagaatctcactacagatacagaatcgaaacccatttctactgaatgggaatctgcattttaacaccctcggagattcattcatgtgctcattaaagtttgagacacacttttgttggtcacagggctggaccttggccagatattggaatcacmtggggagctttaaaaactaatgtggctgggtgcggtggctcatgcctgtaatcccaacactttgggaggccaagatgggtggatcacctgaggtcaggagttcgagaccagcctgaccaatatgatgaaacccccatctctactaaaaatacaaaaattagctggatgtggtggcaggtgcctgctgtagtcccagctactcaggaggctaaggcaggagaattgcttgaacctgggaggcagaggttgcagtgagccgagatcgtgccaccacactccagtgtgggcaacagagcaagactccatctcaaaaaaaacaaaaaacaaaaaaaaaaacagggcctaggttctacctccaaattctgatgtaattggtctgaagtttggcttggtcattgggagtt

SEQ ID NO: 917449 - DNA, 608 bp, Homo sapiens
aatttctgaatttgacaaatgagtatattgggattcattctctacttttgtgtataaaaattttcataataaaatttaaaacaacaacagtgacacatattttcaagaacccattcatataaaaagaaacaaattaaacaagttagaatggttgctgtggagggggaagaamataggagtagggaatgaagacaaaagagaaggagcaggccgggtgtggtggctcactcctgtaatccaggcactttgggagaacgaggcaggaggatcacttgaggtaagtcaggagttcgagaccagcctaggcaacatggtgaaaacccatctgtactaaaaaatgcaaaaattagcccggcatggtggcaggcgcctgtgatcccagtttctcaggaggctgaggcaggagaatcacttaaacccaggaggcagaggttgcagtgagccaagatcatgccactgcactccagcctgggtgatagagcaagactctgtctcaaaaaaaaaaaaaaaaaaaaaaaagaaagagggctgggcacggtggctcatgcctgtaatcccagcactttgggaggccgaggtgggcagatcacgaggtcaggagatcaaga

SEQ ID NO: 917450 - DNA, 749 bp, Homo sapiens
gaacatttttaaactacttagagccttataatgtcaaacaattaaaatattttcatttcaattttttgaattttaaaaatttcaaaagtgcttttatttacagactaatgtggccaagaagtatgataagggtgattgataaaagacattcaagcatgaaaccattatattaggacaaaactctgtagggaaaagtcaggtggaaataaaatttaaaaagaaaaaggtgctataaaatgtccaagttaaaaagtttatgtgtggcccacgcctgtaatcccagcactttgggaggccaagacgggcagatcatgaggtcaagagatggagaccatcctggccaacatggtaaaaccccgtctctactaaaaataaaaaattagccgggcgtggtggtgcgcacctgcagtcccaattacttggraggctgaggcaggagaatcgattgaacccgggaggcggaggttgcagtgagccgagattgcgccactgcactccagcctggcgacagagcgagactccatctcaaaaaaaaatagtttatgtgttacttgaatgaacgatgagtatcaaatcattatggcatgtaggttccattgcaggcattacaaaagttaattttcacaacatcctggtcattatatattttgtaactatttaaacttactgtgaaaaacgttataaaaatgtgcaaccctaccttctccaacctagtaaagagggaggaagggctgtgcctccctgtacca

SEQ ID NO: 917451 - DNA, 605 bp, Homo sapiens
attaaagttagttttatttagaagtcttacggaggactatagagcatggcctacagccctaaaacagttttgtcagactgttttaaatcagtgttttagcttatagtttatatataggtagtgggggttcagtatgtgcaaaaggacatcaaaatttggctgtaacagtatattggttatagattacggaggtataatcactaactctgtcagacattattgtatgtgcaacaaaaggcaaggactatggttattttatttttatggagacaggggtcttgctatgttcccctggttggtcttaagctcctggcctcaagtgaacctcctgtctcggattcccaaagtgctgagatttatagacgtgagacactgcgcctggctaggactggggccattgatcttttaaggaatatagtgattcargcaagagatgtggggctgtgggaggtgctgtgttttatcttgttttgtctttaaaactcttttcagagagctgcagataagcacagagtcagggactttgtgaaattatcctggtaagcagaaatgagcaaatggcttctgatgtttgctactttgtgtcacaagttttttcttttggt

SEQ ID NO: 917452 - DNA, 664 bp, Homo sapiens
aaaaataaaagttaccgctaactggccagccacactctggagttacaaaaccccttaacctcctgcaatcagttaacactctccactcccaccttccagtactcacagcgtctattctatagacagagaaactgaggcccagagagaaaaagtgactggcctaaggccactgcccgagggcaggggtgaatctagactcagagccagatatgttttctggggagcctacagagaagtcaccgagggcttcctggaggaggtagcaaggagacagacataaaagaaaaggaggacttggatcagcagagggaaaaggtgagggcagttttggtggagggaagcatgtgamgcttggaggtggggacatttctagacacaataattatttcacaaacatcaaggactgttgtgtgtcatgtctcctgtgctgggtgatgggcacacagggtgaagaagccagacccagtctctccttcaaatggggagcccagtgggctcatggctgtgacgggacacacagacaatggtaggagtccccaggaaattgatctgtttgaaaggggatgggtcagggcgggcttctggaggaggagggaccaccaagctgaggaccggatgatgaggaggacacagccaggcagaggtagcagaaagtcattccagg

SEQ ID NO: 917453 - DNA, 665 bp, Homo sapiens
ctcagtgagacagccctggcccagtatggtagctcatgcctgtactcccagcactttgggatgctagatgagaagatcccttgggcccaggagttcgagaacagccttggcaacatagtgataccccacttctacaaaaagtaaaaaaacaattagcaaagtgtgatggtgtgcttgtagtcccagctactcaggagacggaggcaggaagattgcttgtgcccaggatgtcgagggtacagtgaaccgtgatcacaccattgcactccaggcttagtgacaaagcgagaccctgtctccaaaaaaaaaaaaaaaagacatcttcmcttcagaaactccaacttcgctacacattgggagttcccatgcctccctccctcatgttcaataatttgctatagtggctcacagaactagggaaacatttacttatacttaccagtttattatttagtatttacttgtacttaacagtttattattaaggatattacaaagaatacagatgaacagccagatgaagagctacgtagggtgaggcccaggggaaggggcacacagagctttcatgtcccctccaggtacctcgatgtgttcttgttcacctacctggaagctcttcaaaccgccccccccttttttttttttgagacagggtctcactg

SEQ ID NO: 917454 - DNA, 665 bp, Homo sapiens
ctcagtgagacagccctggcccagtatggtagctcatgcctgtactcccagcactttgggatgctagatgagaagatcccttgggcccaggagttcgagaacagccttggcaacatagtgataccccacttctacaaaaagtaaaaaaacaattagcaaagtgtgatggtgtgcttgtagtcccagctactcaggagacggaggcaggaagattgcttgtgcccaggatgtcgagggtacagtgaaccgtgatcacaccattgcactccaggcttagtgacaaagcgagaccctgtctccaaaaaaaaaaaaaaaagacatcttcacttcagaaactccaacttcgctacacrttgggagttcccatgcctccctccctcatgttcaataatttgctatagtggctcacagaactagggaaacatttacttatacttaccagtttattatttagtatttacttgtacttaacagtttattattaaggatattacaaagaatacagatgaacagccagatgaagagctacgtagggtgaggcccaggggaaggggcacacagagctttcatgtcccctccaggtacctcgatgtgttcttgttcacctacctggaagctcttcaaaccgccccccccttttttttttttgagacagggtctcactg

SEQ ID NO: 917455 - DNA, 602 bp, Homo sapiens
ccctgtgaagtggccccgttttccttcctgtctatgcaggcagggacctggctgtgggtggtgccccgtgggcagaacccagaggctggggggctccagtgtccttacaagcacacttctcccattgcttgtgagccacatctttcctagcttccattctcctggtttcatcagatctattaggatggtgcaaaagtaactgctgttttggcttttttttttytttttttttttggatcaaaaccgcaattacttttgcactaacctagctaccttgagagtggttttgagtgggaagtaatacccatctattttctgatttattttatttatttatttatttattttaagatggagtttcgctcttgttgcccaggctggagtgcagtggcgcgatctcggctcatcgcaacctccgcctccagggttcaagtgattctcatgcctcagcctcctgagtagctgggattacagacatgtgccaccatgcccggccaattttatatttttagtagagacggggtttctccatgttggtcaggttggtcccgaactcctgacctcaggtgatccacccgcctcggcctcccaaagtgctggga

SEQ ID NO: 917456 - DNA, 564 bp, Homo sapiens
gcaagttttatggaatctaaatacagatcacatattttgggtgaaaatttagcacctgaattgtgctgtgactgtggggcatgcacacttagatttcacagatttagtaaggaaaaaaatgttacacgtttatatgtcgaaatggtattttgggtaagcatacctgctttctctgttaatgtggctcctagaaattttaaaatggcatgagtagccacattgtatttctgttggacatgcgcagatgtgcaagtatggagtttcacttcctccgtgcagcagccaccttcctctcccatgccctccacctgatgtccctattacttccctgtctctgctgctgaagtctctttctcrtcttctgtgctaataaggcctccagcctgtgagtaccacggtgcctgattatggtcttgctgcagcactgtgttggctcctccatgttaggccggtgcaggggaggggctatgctccttttctcatctgctcggggtggaggggactggactgatttgtgttactggatacctgaggaaagacctttgtccccctttgtctggcttt

SEQ ID NO: 917457 - DNA, 614 bp, Homo sapiens
tttacaggaaaagttagcctagcctgcccctgctggaatacattttaacccaacagtttttgtttgtttgtttgtttgtttgttttggagatggagtctcgctctgttgcccaggctggagtgcagtggcacaatctcggctcactgcaacctctgcctcccaagttcaagcaattatcctgcctcagcctcctgagtagctgggactacaggtgcacgccgccatgcctggctaattttttgtatattagtagagatagggtttcactgtgttgcccatggtggtcttgaactcctgaactcaggcaatmcacccgcctcggcctcccaaagtgttgagattatagacgtaagccaccatgcctggccaacccaacagttttgatcttgtccatgtcaaagttttgtttttgctacatgcttctcacaggaacattttacatttcatgaatccatccgcccagatttaacaatcagcaacatgatgtaacccacatgtaacaatggatcctttcactgtacctgagccacttgtccctccagttgctggcagcttttgcagtgaaaagatgctgcagcattttcagtgctactagtttaattagcctgctgat

SEQ ID NO: 917458 - DNA, 635 bp, Homo sapiens
ggaaaaagctccaaaagttagccttgggccgagcaaaatttggaggcatcattaaacctggcaacctcagtgttctatcatagggaccaagaggaacaggccgaaaaggaaaagcaggataagagaaaggctgcagatttagtcatgccctcagacaaaccttggcggttcaaagaggagaaaaaatggagcaggccaatcacccagcagggcttattatcagtgcagtttacaaggacactttaaacaagattgtccaaagagaaataagcygccctctcacccatgtccactatgccaaggtgatcactggaaggcacactgtcccagaggacaaaggttctctgggccagaagtccccaaccagatgatccagcaacaggatggagggtgcccggggcaagcaccagctcgtgttgtcaccctcacagagccccgggtaagtttgaccattgagggccaggaaatcgactttcttctggacactggcacagccttctcagttccactgtcctgccctggatggctgtcctcaaggtctgttaccatccaagggatcctgggacaacctgtaaccaggtatttctcccgcccccttagctgtaactgggaaaccttaattttctcacatgcct

SEQ ID NO: 917459 - DNA, 635 bp, Homo sapiens
ggaaaaagctccaaaagttagccttgggccgagcaaaatttggaggcatcattaaacctggcaacctcagtgttctatcatagggaccaagaggaacaggccgaaaaggaaaagcaggataagagaaaggctgcagatttagtcatgccctcagacaaaccttggcggttcaaagaggagaaaaaatggagcaggccaatcacccagcagggcttattatcagtgcagtttacaaggacactttaaacaagattgtccaaagagaaataagccgccctctcacccatgtccactatgccaaggtgatcactggaargcacactgtcccagaggacaaaggttctctgggccagaagtccccaaccagatgatccagcaacaggatggagggtgcccggggcaagcaccagctcgtgttgtcaccctcacagagccccgggtaagtttgaccattgagggccaggaaatcgactttcttctggacactggcacagccttctcagttccactgtcctgccctggatggctgtcctcaaggtctgttaccatccaagggatcctgggacaacctgtaaccaggtatttctcccgcccccttagctgtaactgggaaaccttaattttctcacatgcct

SEQ ID NO: 917460 - DNA, 571 bp, Homo sapiens
accatagacagtgattcttccaatggatctgggcaaagtaaattgaaaaccttctggaaaggatttaccattctagatgccattaagaacatctgtgattcatggaaggaggtcaaaatatccacattatcaggagtttggaaaaagttgattctaaccctcatggatgactttgaggggtctgagacttcagtggaggaattcactgcaggtgtggtggaaatagcaagaaaactagaattagatgtggagcctaaaggtgtgactgaattgctgcaatctcatagtaaagtctgaatagatgaggagttgatgaagaaaggaagtggtttcttaagatgsagtctacatcctggtgaagatactgtgaacattgttgcaacaacaaaggatttagaatattccataaacttagttgataaagcagtggcaggagttgagaggattgaatccaattttgaaagaagttccactgtgggtaaaatgctatcaaacagcatcacatgatacagagaaatctttcgtaaaaggaagagtgaatcaacacagcaaactacatggttgtcttatt

SEQ ID NO: 917461 - DNA, 543 bp, Homo sapiens
cgatgttaaggatatcatcataaatggcaaacatatattctgctgtgtatcaattgcccttcagttttatttatgatggtttttgacataagttgttactgttttttgtgtgttataatcaagtttgacagacttttcctttatgttttctgcatttggtgtcatgcttagaaaacccttctccatccctagtttctaaaattgttcacccatgttttcagtgtccttatggtttatttttacataaaattwaaaaaaaactagaattaattttggggtatggtatgggctaagattctaacaaatttttcccagatgggtatcatgttgtctcaacataatgatgattgattaaaaatgccatatactacattgacttttatagatctatgtcaatttctggaaattttattctgttccatcaatgtgtatgcctttgctacacatcactacagtgttttattacgtctttataatatagtttcctatctattttaatgaatctctcttcttcttaaaactttggtcaaacttgtgttttcc

SEQ ID NO: 917462 - DNA, 713 bp, Homo sapiens
ttgttttgggataaaaccatagcaggtatggaaaacagtgcccatgcactaagtccacctctgtgtgggaatcacaggactttttgagtcaggggtcataattctgagtggagtcagccggttgtcataaatgcaaaagtctgaaaagacatccctaaaggccagtcttagrgtctacaatagtgatattatctactgtagtaattggggaggttacaaatcttgtgactgccagaacaatggctggttattgtttatgcctgcatcttagcagaattcaggcccctctcataaccctagacttgtggacgtttattagttttacaaagacagtttaattttggggagggctattatcatctttgctttaaggttaaactataaactaaattcctgtcaaagttagcttggcctatgcccacaaatgaccaagggcagcttggaggtcagaagcaagatggaatcaaccttgtcagatttatcctactgccataatgttgcaaagtcattttcagggctagtagctcagaagttctctttcccattgctactgagatggcatagccttgagtatgctcatggtcttccccagaccactagacaaggctgtgaatttagcaggatcgtctttgaccatctcttaccttgcactccccattaaacttctggcttttgggctgccattggtgttaaccttgagctgttagctaccg

SEQ ID NO: 917463 - DNA, 698 bp, Homo sapiens
aggagaataagattttcatcttttactgttggatcagtacgtagcttggagactacgtccgcggttcagaaaatttataagtttgctttgcaggtagccagggattgtaatcgcctgatgagtccttccttcctgctgcacaggcaaagccagttcattgagaccaatgaagtattgcattgaggtactgcaggtattgtggtaaagtaaatacttcactgaggcttttcagtaaggaaggagtttaattgactcaaggctggccactccagagatggagttatcactcaaatcagtcttctgaaaggctcatgggttaggatttttcaattatagtttggtaggcaaggggctagagaatggggaatgctgattgttttgggataaaaccatagcaggtatggaaaacagtgcccatgcactaagtccacctctgtgtgggaatcacaggactttttgagtcaggggtcataattctgagtggagtcagccggttgtcataaatgcaaaagtctgaaaagacatccctaaaggccagtcttagagtctacaatagtgatattatctactgtagtaattggggaggttacaaatcttgtgactgccagaacaatggctggttattgtttatgmctgcatcttagcagaattcaggcccctctcataaccctagacttgtggacgtttattagttttac

SEQ ID NO: 917464 - DNA, 713 bp, Homo sapiens
ttgttttgggataaaaccatagcaggtatggaaaacagtgcccatgcactaagtccacctctgtgtgggaatcacaggactttttgagtcaggggtcataattctgagtggagtcagccggttgtcataaatgcaaaagtctgaaaagacatccctaaaggccagtcttagagtctacaatagtgatattatctactgtagtaattggggaggttacaaatcttgtgactgccagaacaatggctggttattgtttatgcctgcatcttagcagaattcaggcccctctcataaccctagacttgtggacgtttattagttttacaaagacagtttaattttggggagggctattatcatctttgctttaaggttaaactataaactaaattcctgtcaaagttagcttggcctatgcycacaaatgaccaagggcagcttggaggtcagaagcaagatggaatcaaccttgtcagatttatcctactgccataatgttgcaaagtcattttcagggctagtagctcagaagttctctttcccattgctactgagatggcatagccttgagtatgctcatggtcttccccagaccactagacaaggctgtgaatttagcaggatcgtctttgaccatctcttaccttgcactccccattaaacttctggcttttgggctgccattggtgttaaccttgagctgttagctaccg

SEQ ID NO: 917465 - DNA, 616 bp, Homo sapiens
aagttgatcccatatctttgctactgtgaatagtgctacaatagactcaagagtgccagtgtctttttgtagagtgatttactttcttttgggtatatacccagtaatgggattgctgagtcgaatggtagctttgagttgtttgggaaatcttcagactgctttccacagtggttgaattaatttacattctcacgaacagtgtgtaagcgttcctttttctccatagcatcatcaacatttgttatttttagactttttaatagtagccattctgactaatgtgaaatggtatctaaaattcatatgggaccaaaaaggagcccaataggaaaaataatcctaagcaaaaagaacaaagctggaagtattacattaytggacttcaaactatactacaatggtatagcaatccaaacagcatgatattgatacaaaaagagacatatagatcaatggaacagaatagaaaacctagaaatcaagccatatgcctgcaatcaattgatcttcaacaaagtcaacaatggagaaaggacactctattcaataaatgcaaactagatatcaaaggaacatacctcaaaataataatagccatattatgaaaaaccca

SEQ ID NO: 917466 - DNA, 587 bp, Homo sapiens
ctccttggtcactgcctcttgctgcacgggctcctgagcccacccccttggggcacaacctgccactgccacagtagctcaaccaagcagttgtgctgagaatggcacctggtgagagcctgctgtgtgccaggctttgtgctgagtgctgtacrtgtattagttcctttactgctgaccacattgtacccatttcacagagaaggagcagagaaattaagtggcttgctcaaggtcatgcagttagtaagtggcagaacagggacttgaaccaagccctctgctctgaagaccgcgtcctgaatttcttcactagagcttcctcatcaggttacccagaagtgggtcccatccaccatccaggtgtgcttggatgttagttctccaccctcgaggtgtacgctgtgaaaagtttgggagcactgctttataataaaatgaaatatattctacttcctttattttgtggtttacacggttgtcctccctctaaacttactctcaggggcttctctgtcatctgactttcctcactcttgcttcccttcctaggaaaatcctcttcccctatacctgttcccacaaat

SEQ ID NO: 917467 - DNA, 585 bp, Homo sapiens
tttctttttttttttttttttttgagacagagtctcgctctgtcgcccaggctggagtgcagtggcgtgatctcggctcactgcaagctctgcctttcaggttcacaccattctgctgcctcagcctcccaagtagctgggaccacagttgcccgccaccacgcctggctaattttttgtgtttttagtagagacrgcgtttcaccgtgttagccaggatggtctcgatctcctgatctcgtgatccacccaactcagcatcccaaagtgctgggattacaggcgtgagccaccatgcccggcccacaatttctcttacatcacagaagaatacttgttatattaggatatgaccacagtcagttgtgttttttcagatgttttctgaagcagttcctgcatcccttttccctatctggaaaaaccagtggtaatctaggtataagtagcttaggcaggctgggattttttctgtttgtctgactgagagagtctcactctgtctctcaactttagtgacactaatgctaataagtcctgataacccaataccatcagaccagcccccaacagttacttttatac

SEQ ID NO: 917468 - DNA, 585 bp, Homo sapiens
tttctttttttttttttttttttgagacagagtctcgctctgtcgcccaggctggagtgcagtggcgtgatctcggctcactgcaagctctgcctttcaggttcacaccattctgctgcctcagcctcccaagtagctgggaccacagttgcccgccaccacgcctggctaattttttgtgtttttagtagagacggcgtttcaccgtgttagccaggatggtctcsatctcctgatctcgtgatccacccaactcagcatcccaaagtgctgggattacaggcgtgagccaccatgcccggcccacaatttctcttacatcacagaagaatacttgttatattaggatatgaccacagtcagttgtgttttttcagatgttttctgaagcagttcctgcatcccttttccctatctggaaaaaccagtggtaatctaggtataagtagcttaggcaggctgggattttttctgtttgtctgactgagagagtctcactctgtctctcaactttagtgacactaatgctaataagtcctgataacccaataccatcagaccagcccccaacagttacttttatac

SEQ ID NO: 917469 - DNA, 587 bp, Homo sapiens
ttcttcagctccaagtctgagttgtatgaggggtaaagaaataagtgtatcctctttgccattgggtgtaggtgagaattctgtttcctcattaggcctccattgagatctccctggctggtagcataggggtgcctcactatgtacccttaccagagtgctgctccttatgtacccgcagctccttatatactcccgttgttactatggtggagatgtagaaggacctcattatgattgggtggtggtgaaactcctgactctccacactaggcctcctctgactccatcccagtggggatggagaagggtgccttattactattagatgaggatgggaatccagctccccagctgatctccccaacactacstgagagaggcttcattacctccatgcaataaaagtctaggctctctactcagccttttctgataccacgctgataaggaggtttgggctcctttttaaagctgcccaaaggtggaagtctaggctcctcattcagcctttgctggcataggtgggaatgggaccagggatttttctgtggtgtttgtctagtgtagagcagctattatctcga

SEQ ID NO: 917470 - DNA, 572 bp, Homo sapiens
tctgttattttttgattttttaatagtagccattctgactggtgtgaaatggtacgtcattgtggttttgatttcatttctctaatgatcagtgatgttgagcatttttcgtgcacttattggctatgtgtatgctttcttttgagacatgcaactgacccttctttctctcctgtgtaatctttttgtctgttctatgaatccttcctaccagcatgctaaaatgttatttacctttttttttaaagtgctgttgctttgacccccatccctctgtgactatccaccccattttctgttcctttatagcaaaactcctcaaaagacttctgtatacctcagctgtcctacacagcagccactagccacatatggctataygcatttaaattaattgaaattaaataaaatgtaaaattcagttcctcaatttcactggccatgttccaatcactcaatagttatgtgtggctctcggctttgccttgaggagagacaggtacagaatatttctatcatctcaggaagttctattgggctttgatagaactttaagcactgataggaacagg

SEQ ID NO: 917471 - DNA, 615 bp, Homo sapiens
cacctgagtctggtggggacgtggagaacctttatgtctagcccagggattgtaaataccccaatcagtacttggtatctagctcagggtttgtgaatgcaccaatggacactctgtatctagctactctggtggggccttggagaacctttatgtctagctcagggattgtaaatatrccaattggcactctatctagctcaaagtttgtaaacgcaccaatcagcaccctgtgtctagctcagggtttgtgaatgcaccagttgacactgtatctagctactctggtggggccttggagaacctttgtgtccacactctgtgtctagctaatctggtggggaggtggagaacctttttgtctagctcagggattgtaaacgcaccaatcagcgccctgtcaaaacagaccactctgctctaccaatcagcaggatgtgggtggggccagataagagaataaaagcaggctgccagagccagcagtggcaacccgctcaggtcaccttccacactgtgaaagctttgttctttcactctttgcaataaatcttgctactgctcactctttgggtccacactgcttttatgagctgtaacactcaccatgaaagt

SEQ ID NO: 917472 - DNA, 615 bp, Homo sapiens
cacctgagtctggtggggacgtggagaacctttatgtctagcccagggattgtaaataccccaatcagtacttggtatctagctcagggtttgtgaatgcaccaatggacactctgtatctagctactctggtggggccttggagaacctttatgtctagctcagggattgtaaatataccaattggcactctatctagctcaaagtttgtaaacrcaccaatcagcaccctgtgtctagctcagggtttgtgaatgcaccagttgacactgtatctagctactctggtggggccttggagaacctttgtgtccacactctgtgtctagctaatctggtggggaggtggagaacctttttgtctagctcagggattgtaaacgcaccaatcagcgccctgtcaaaacagaccactctgctctaccaatcagcaggatgtgggtggggccagataagagaataaaagcaggctgccagagccagcagtggcaacccgctcaggtcaccttccacactgtgaaagctttgttctttcactctttgcaataaatcttgctactgctcactctttgggtccacactgcttttatgagctgtaacactcaccatgaaagt

SEQ ID NO: 917473 - DNA, 615 bp, Homo sapiens
cacctgagtctggtggggacgtggagaacctttatgtctagcccagggattgtaaataccccaatcagtacttggtatctagctcagggtttgtgaatgcaccaatggacactctgtatctagctactctggtggggccttggagaacctttatgtctagctcagggattgtaaatataccaattggcactctatctagctcaaagtttgtaaacgcaccaatcagcaccctgtgtctagctcagggtttgtgaatgcaccagttgacactgtatctagctactctggtggggccttggagaacctttgtgtccacactctgtrtctagctaatctggtggggaggtggagaacctttttgtctagctcagggattgtaaacgcaccaatcagcgccctgtcaaaacagaccactctgctctaccaatcagcaggatgtgggtggggccagataagagaataaaagcaggctgccagagccagcagtggcaacccgctcaggtcaccttccacactgtgaaagctttgttctttcactctttgcaataaatcttgctactgctcactctttgggtccacactgcttttatgagctgtaacactcaccatgaaagt

SEQ ID NO: 917474 - DNA, 548 bp, Homo sapiens
tggtcatacacatggtactacacatttgccaaaacccataaaactttacagaagaaggagtgaaccttaatgtgtgcggatttaaaaagtagtaggtagaggaacttgggatagaatgcatagtgtgaaaaaataatccaaccacatcacaaatatatgaaatgaccttattgaggtggctgggagaaaggtgctgacctagtggagattgcaggagtacaggcagaaggaaatgttcctatgcactggaatctcrtaggtgatgttatttccagttggggtgcaggttaacaattctgaaaccactgttcatactcactgggatggaacagttaatcaaaaggagggcaggtggtgagaagcaggtttcccgctgctgcagggtagaatacagataggcaagggagaggctggactgcacgtgaggcagtgggtcagagtcagaggatgcactcgtgtttagcttaatataaatacatgtggatatagagagaaataggcatagatatttgtatcattttgtgttattatatgcacattttttttat

SEQ ID NO: 917475 - DNA, 791 bp, Homo sapiens
tcaggctggtgcccctctgagacaaagcttccagaggaagaagcaggcagcaatctttgctgttctgtagcctccattggtgatactcaggtgaacagggtctggagtggacctccagcaaactgcagtagacctgcagaagagggatctgagtgttagaagaaaaacaaacaaaaagcaatgacaacaacatcaacaaaaaagatccccccacaatactccatccaaagstcatcagcctcaaagatcaaaggtaggtgaatccatgaagatgaggaaaaaccagccccaaaacactgaaaattccaaaagccagtatgccttttctcctccaaatgattgcaaaacctctccagcaagagtgcaaaactggacagagaatgagattgaagaattgacagaagtaggcttcagaaggtgggtaataaactcttctgagctaaaggagcatgttctaagccaatgcaaggaagttaagaaccttgataaaaggttacaggaactgctaactagaataaccagtttagagaggaacataaatgacctgatggagctgaaaaacacatcacgagaactttgtgaagcatacacaagtatcaatagccgaatcgatcagacagaagaaaggatattagagattgaagaccaccttgctgaaataaggcatgcagacaagattagagaaaaaagagtgaaaatggatgaacaaagcctccaagaaatatgagactatgtgaaaagatatgggaatattggactatgtgtattgattggggtacctgaaagtgaca

SEQ ID NO: 917476 - DNA, 791 bp, Homo sapiens
tcaggctggtgcccctctgagacaaagcttccagaggaagaagcaggcagcaatctttgctgttctgtagcctccattggtgatactcaggtgaacagggtctggagtggacctccagcaaactgcagtagacctgcagaagagggatctgagtgttagaagaaaaacaaacaaaaagcaatgacaacaacatcaacaaaaaagatccccccacaatactccatccaaagctcatcagcctcaaagatcaaaggtaggtgaatccatgaagatgaggaaaaaccagccccaaaacactgaaaattccaaaagccagtatgccttttctcctccaaatgattgcaaaacctctccagcaagagtgcaaaactggacagagaatgagattgaagaattgacagaagtaggcttcagaaggtgggtaataaactcttctgagctaaaggagcatgttctaagccaatgcaaggaagttaagaaccttgataaaaggttacaggaactgctaactagaataaccagtttagagaggaacataaatgacctgatggagctgaaaaacacatcacgagaactttgtgaagcatacacaagyatcaatagccgaatcgatcagacagaagaaaggatattagagattgaagaccaccttgctgaaataaggcatgcagacaagattagagaaaaaagagtgaaaatggatgaacaaagcctccaagaaatatgagactatgtgaaaagatatgggaatattggactatgtgtattgattggggtacctgaaagtgaca

SEQ ID NO: 917477 - DNA, 592 bp, Homo sapiens
aaatagcaaagctgccctagccagactgtgtcagattggacaagtagcacatcaggatggccagtgtgagatggggaccagaacaccttcccgtgtgctggccaatgtggtcctgagaactttcacaacccaggatagcgggggatcggagaaggagtcccaagagggacaaaaatcaaacccctagtcttgaagccgagcttattttaaaaattaatgtaaacagagagttcttaaagccaactaatgtgatgactgcaaatttatagctattctaaacatattccttcacctatagtcacactcctctcccatgcrctgcacaaggaccagccctcaggataagaaagacatgagtcaacgtggcaaacggggtcaaaattgacagaaagagggcaatcatgcatgtcagtggggaataatgatgaacctggagaaaccagtattgctccagacccccctcccaaatccttgcagaaaagaatattaataaaataaaattccaaaatctgatcccagagcaataatagaacacccatgccaaacttcacagccgtggggaggatgcatgtagctgagcaatctgtggata

SEQ ID NO: 917478 - DNA, 581 bp, Homo sapiens
tgccattttaagagcctagctcccactagactgtgtcctgtcctgccactgggctgaggtgagagtcaggagcaacaaccccactccccaagcagaggagtggccatgcattttctcatgtcccaaggacaaattcccctgcctgcaattaccacctgcagtctgctgcggggctgaagtatgagtaaagattgcaaccccctatgaaagcttccaatcttgggtgcttccagaaaaagcaaccctgctctccccagtagcaggactaggactaaacacggacactgctgccctacctgtgcatgcttatagcctggggatcaccctgcccctgactactgaagtcagcacccatatataccactgggtggcccgaaggaaggtctgcccagctcagctccatccccatgacacccaagcataccatccagggrtctggggattgcccagcctagcccaccaccagtgacatctgaggacttctcctggggtctgaagtcaggtccaatcaacctactgccaccaacatagtgggcagccacccacatgcatcacctgtggctctggggacctacctgtcc

SEQ ID NO: 917479 - DNA, 628 bp, Homo sapiens
agagatctgaagttcagagaagggattcaggttggagctatccacagggtggcagccagcatgtggatcaggatggagctttgcttccaatttagagagagaatctttaggtcatggtgacagtgccatcagcacactgtaagggcagacacagcagggtagaggtaggggccatcttagagtctagaagagggagggaaatgtccctgggaggaaggggaataatagggtcaggcaggtggcaaagcgttccaggcagagagtggatgtgaggtgaagtactgtagtaatagaagtgaggtggcagtgaggccagagccagtgcttattcagctctttatgtgctcctcaggcttccatggtgacctttggtgggacctgtggagtttcagtcaagctagtgaattagcccagggacagattgggtcagtaggcagaatccctgtgcttggggtaggtgcccagtgagtgtrggttttgaatgagttaaatgttgagaagcctgtgactgacctcagtagtacaacaacaaagcagaaaagggctgagtttatctgggatctgcacatggttctggattgctgaattgacccatgaaatagagccaggaggggaagatttaataggt

SEQ ID NO: 917480 - DNA, 546 bp, Homo sapiens
ccaaacagactccatttttgtttcttcacttgcagcccccttatccccctcccttaaggacataactagtgcaagctgactccaagcacatccaggaatgcacttactgatagacactgaggcacgctgtaccagcagctcctaggaacgcactcagttaatggtacccaaagcccctgcgtttatcactttgtgataattaagcccctgcacctggaactgtttattttcctgtaaatgtttgtgtaaccatttatcttttaactttttgcctgttctgcttctgtaaaaattgcttcagctaaactccccctcccytatttagatcaaggtataaaaagaaatctagccccttcttcggggccaagaattttgagctctagctgtctctcggtcgctggcaataaaaggactccagaattagtctcagagtgtggcatttctctataactcgctcggttacaacactatagccaaagattacattcataaagatatttttacaatataggtgtcttatttaatatgactccaatctaaatggta

SEQ ID NO: 917481 - DNA, 599 bp, Homo sapiens
gactgctacatgatttgagagctattaatgcacagattaaaccaatgggtgcattacagcaaggtctgccatccctggcaggcatttccaagagactggcctcttgtagtaatagatcttattgttttttttactatactattacatcagcaggataggcctggatatgccttctctgtgccttctgttamtcaaagggagcctgtctcttgttatcaatggaaagttttgccccaaggcgtgcttaacagtcctacattatatcagaattttgtaggacaggcattaaaggagccttgtaatgtgtttcccactggctatgtcattcattatatggatgatattcttttggccgctcctacagatcaaatcttacatcagttattcagagaaacaaaacaggctttgactaaatggaatctcaaaatagctcctgaaaaggtgcaaaccacctccccataccagtacttaggcactattattactgaaagaagtgttcagcctcagaaagtagtcatctgtagggacagattacaaactttgaatgatttccaacaattatcaggggacattaattggctgcacccaatgctaggtat

SEQ ID NO: 917482 - DNA, 599 bp, Homo sapiens
gactgctacatgatttgagagctattaatgcacagattaaaccaatgggtgcattacagcaaggtctgccatccctggcaggcatttccaagagactggcctcttgtagtaatagatcttattgttttttttactatactattacatcagcaggataggcctggatatgccttctctgtgccttctgttaatcaaagggagcctgtctcttgttatcaatggaaagttttgccccaaggcgtgcttaacagtcctacattatatcagaattttgtaggacaggcattaaaggagccttgtaatgtgtttcccactggctatgtcrttcattatatggatgatattcttttggccgctcctacagatcaaatcttacatcagttattcagagaaacaaaacaggctttgactaaatggaatctcaaaatagctcctgaaaaggtgcaaaccacctccccataccagtacttaggcactattattactgaaagaagtgttcagcctcagaaagtagtcatctgtagggacagattacaaactttgaatgatttccaacaattatcaggggacattaattggctgcacccaatgctaggtat

SEQ ID NO: 917483 - DNA, 603 bp, Homo sapiens
tttaaccctattcatatttgtgtaactaatttggaatataatcaaagtgaatatccaaggaactttgtaaaggcccatttacagggagttttacattcaatgttacttttgatattaatgattcacaaagtaaaatccttaacttgaataagcagactcaagtgcttcagccctctttaaaagcttgggcagaattccagcaaggtttagggagccttaacccttggacctacttcaaacagcacctcaatgtcttttttgtgattatcggaataatgttattatgtttctgttttttgttcatagtctgtaaaatcagctggaccaccaaccggcaattgaragctgcacagcctgcaattacctttattcaattaatacaaaaacagaaaaggggggaggttggaggccgaaagaatgagggtcgtgaccaactcagtataccactggaggctatatgagcaaacagcaaactgttctcatgaatgcaggatgctggcaagctgacaactgcatctgccaccagaaggaatgctgagggcagtcataccccacgtgcagtgttccttgtggttatctataggaacatctggaggctgttgt

SEQ ID NO: 917484 - DNA, 744 bp, Homo sapiens
gtcttcacaacccacagaccaggagattccctcaggtgtgtacaccaccagggccctgggttacaagcacaaaattgggtggccatttgggcagacactgagctagttgcaggagtttttttaataccccagcagcacctggaacaccagtgagacagaactattcactctcctggaaagggctgaatccagggagccgagtggtcttgcttagcagatcccacccccacggagcccaataagctaagatccactggcttgaaattcttgctgccagtacagcagtctgaagtcaacctgggactctcaagcttagtggggggaggggtgtctgccatcactgaggcttgagtaggcagttttcccctcacagtgtaaacaaagccgggaagttcaaactgggcgcataatcyaccgcagtgcagcaaagccgctgtagccagactgcctctctagattcttcctctctaggcagggcatctctgaaagaaaggcagcagtcaggggcttacagataaaactcccatctccctggcacagagcacctgggggaaggggtggctgtggctgcagcttcagcagacttaaaccttcctgcctgccggctctgaagagaacagcagatctcccagcacagtgctcaagctctgctaagggacaggctgcctcctcaagtgggtccctgacccctgtgtgtcctgatggggagaaacctcccagcaggggtcagcagacacctcatac

SEQ ID NO: 917485 - DNA, 744 bp, Homo sapiens
gtcttcacaacccacagaccaggagattccctcaggtgtgtacaccaccagggccctgggttacaagcacaaaattgggtggccatttgggcagacactgagctagttgcaggagtttttttaataccccagcagcacctggaacaccagtgagacagaactattcactctcctggaaagggctgaatccagggagccgagtggtcttgcttagcagatcccacccccacggagcccaataagctaagatccactggcttgaaattcttgctgccagtacagcagtctgaagtcaacctgggactctcaagcttagtggggggaggggtgtctgccatcactgaggcttgagtaggcagttttcccctcacagtgtaaacaaagccgggaagttcaaactgggcgcataatctaccgcagtgcagcaaagccgctgtagccagactgcctctctagattsttcctctctaggcagggcatctctgaaagaaaggcagcagtcaggggcttacagataaaactcccatctccctggcacagagcacctgggggaaggggtggctgtggctgcagcttcagcagacttaaaccttcctgcctgccggctctgaagagaacagcagatctcccagcacagtgctcaagctctgctaagggacaggctgcctcctcaagtgggtccctgacccctgtgtgtcctgatggggagaaacctcccagcaggggtcagcagacacctcatac

SEQ ID NO: 917486 - DNA, 613 bp, Homo sapiens
tgagtgcccctcggggacagggcttccagaggaaggagcaggcagcaatctttgctgtcctgcagcctccactggtgatacccaggcaaagaggatctggagtggacctccagcaaactccagcagaccagcagaagagaggcctgactgttagaaggaaaactaacaaacagaaagcaatagcatcaacatcaatgaaaaggatgcccatgcaaaaatcccrtctgaaggttgccaacatcaaagactaaaggtagataaatccacgaagatgaaaaaaaccagcacaaaaaaaactgaaaattccaaaacccagaatgccgcttctcctccaaaggatcacaactccttggcaacaagggcacaaaaccagacagagaatgagtttgatgaattaactgaagtaggcttcacaaggtgggtaataacaaactcctccaagctaaaggagcatgttctaacccaatgcaagcaagctaagaaccttgataaaaggttacaggaactgctaactagaataaccagtttagagaagaacagaaataaactgatggagctgaaaaacacagcacaagaacttcgtgaagcatacacaagtatcaatagccaaatc

SEQ ID NO: 917487 - DNA, 613 bp, Homo sapiens
tgagtgcccctcggggacagggcttccagaggaaggagcaggcagcaatctttgctgtcctgcagcctccactggtgatacccaggcaaagaggatctggagtggacctccagcaaactccagcagaccagcagaagagaggcctgactgttagaaggaaaactaacaaacagaaagcaatagcatcaacatcaatgaaaaggatgcccatgcaaaaatcccatcygaaggttgccaacatcaaagactaaaggtagataaatccacgaagatgaaaaaaaccagcacaaaaaaaactgaaaattccaaaacccagaatgccgcttctcctccaaaggatcacaactccttggcaacaagggcacaaaaccagacagagaatgagtttgatgaattaactgaagtaggcttcacaaggtgggtaataacaaactcctccaagctaaaggagcatgttctaacccaatgcaagcaagctaagaaccttgataaaaggttacaggaactgctaactagaataaccagtttagagaagaacagaaataaactgatggagctgaaaaacacagcacaagaacttcgtgaagcatacacaagtatcaatagccaaatc

SEQ ID NO: 917488 - DNA, 530 bp, Homo sapiens
tcaagcaccttgaatcaagcaccactgtttagctttccaatgtcctcactccagaactacagggagagggtatactaacatgcctcagttggcctccagggtgaagcaaagttgtggctaagtgaacacttcctccactctactaggaacccagcggtccagtgaggtgctgkagcccacacctgaaggttcccaagagctgattatgcacatcacgtcccatgttcaatggcatcatgttggtaccctgaaatcagacatgcagggagaatttaaactccaaaaacaataagcactacaaatcaaacaataaacactgcatctgggggaaaaaaaagataaaaggtaactctaggagatactttcatttctcctatttgattggaaaatgggaggaaaggtgggctctgcaaaaagttcttctgggatgagacggggcactgagtcatccactctgggtaacctgcccggctttctcacttcctaagctggatcccgggtttctcttctgttctcctcctgccctctgt

SEQ ID NO: 917489 - DNA, 660 bp, Homo sapiens
ttgattacacagtttttaatttcttttcattcctgttccactatgaataattttacgactagcatatatcaatatttttagtaaataaaacagtaaaggtgcatgcattttagaaaaacaaatttaaatgctccagagacttccccgatgggccaagcccaccagggccctctctccagccagacccagcacctgcccactgaaggcagcctctaagcctccgaagctgagggcctgacacctccatccaagcctytgtgtgtgactgaggggggagaaacagagagaaaagaaccacttcctgcagagctggtggtggtggcggctctgagggaggagagacacccaccagaggtgaggactagaggctccttcagcaaatgtgaacgtgactcagggggccaccctgactgacagggcagtgtggccctcacggtgaccagggctcagccgcactgtcactgccattaaccaaaagccggtgatcacaggcagaagaggcctgcgagtgggacatgcccagtgggccttgtggggatggagccggtcctgctttaggggacagggtctgaagcaagagccagcaggtggcctcgacccatggattcccctgcaggtctccagggccacacccatggcagggcctccagataggatccc

SEQ ID NO: 917490 - DNA, 609 bp, Homo sapiens
tgggctggctacattagtgtgaaagaaaaataaactgccatttccaaagccactattgacttccaggtttccctctcacatgagaggtcatcactcccaccctataataagaacaaaagctgaacaaattgaaaatcaacagcttttcttagattcctcagagaattgaagtgacagggcaaactgccactcagaaaactggagaaagaaggagattaagaaaattacagctaagatcaaatcacctcatgcagaagctgctggagtcataaaccagtagaagtacttaagcagtaactccracaaactgctaaaggatgagtgtggactagcttgagaataaaaacctcctcaggtcctggtcttagggatgcttaccacactttcatgggttttcatcctcgggacccagtcttggggatgctatcacactgtcatgagttttacttccaggaaccccaccagattctcacagtaaagagccaagaaaaatctcctcctctttctgggggatggaaagaagtaatcattttaaaatatacctagattattccctccatctcaagggaagatgtcagagccttatctgacctgagagaagaaaattag

SEQ ID NO: 917491 - DNA, 556 bp, Homo sapiens
gtccatcgagctcagtgattccctgttgccacagaaagcagaaccaggctaaattcagcccacacccagcacagagggagcatttaaaccagccctagccagaggggaatcacatatctcaggggtcagaaactgagttccagaaaaccttgccaccacgggctaaagtgctctggggttctaaataaacttgtaaggcagtctaggccacaataactgcaattcctaggcaagtcctattgctgagatgggctcagagccagtggatgtggggggcacacaacctagtgagacaccagccagggtggctaaccccaggcagcacagctcacagaaacaaaagtgactcttttcctctgcttaaagagaggagatggagsagtaaagagaacattgtcttgcatcttggataccagctcaaccacagtaggagaggacactgggcagagtcaatgggcacacatttcaggccctggctcttggacatttccagacacaccctgggccagaagggaatccactgccttggagggaaggacctagtcttgtcagaatt

SEQ ID NO: 917492 - DNA, 680 bp, Homo sapiens
gaggctgaagcgagcggatcacttgaatccaggagttcgagaccagcctggccaatatggtgaaaaccccaactctacaaaaaaatacaaaaattagccaggcatggtggcatatgcctgtagtcctagctactggggcggttaaggtgggaggatcacctaagcctgggaggttgaggctgcagtgaaccaggactgtgtcactgcactccagcctgggtgacagagtgagaccctgtcttaaaaaaaaattayagatgacacaaatggaaacacattccatgctcatggataggaagaatcagcatcattaagatggtcacattgtccaaagcaatctacagattaagcgctattcctattaaactaccaacgtcatttttcacagaattagaaaaactactctaaaattcatatggaaccaaaaaagagccagaatagccaaggcaatcctaagcaaaaagaacaaagccagaggcatcacattacctgacttcaaactaatgttcaaggcgactataaccaaaccagcatagtactggtacaaaaatagacacatagaccaatggaacagaatagagagcccagaagtaaagccacacacctacagtaatctgatcttcaacaaagtcaacaaaaataggaaatggggaaaagactccatattcaataaatggtgc

SEQ ID NO: 917493 - DNA, 686 bp, Homo sapiens
cttctgcacagcaaaagaaactatcaacagagtaaacagacaacctacagaatgggagaaaatatttgcatctatgcatctgacaaaggtctaatatccagaatctataaggaactcaaacaattcaacaagaaaaaaataaataaccccgtaaaaattgctcaaaggagatgaacagatgcttctcaaaggaagacatccatgcggtcaacaagcatataaaagaaagctcaacatcactaatcattagagaaatgcaaatcaaaaccatagtgagataccatctcacaccagtcagaatggcctttgttaaaatatcaaaaaacaatacatgctggcaagagtgagcagaacagggaacgcttatacactgtgggtgggaatgtaaattagtccagccactgtggaaagcagtttggrgatttcccaaagaactcaaaacagaagttccatttgacccagcaattccattaattcctggatacatatacaaaagaaaaatcattctaccaaaaagacacctgcacttccatgttcatcgcagcactattcacaataacaaagacctggaattaacccaaggtgcccaacagtggtagactgggtaaagaaaatgtggtatatacacaccatggaatactatgcagccatgaaaaagaataaaaccatgtcatctgcagcaacat

SEQ ID NO: 917494 - DNA, 558 bp, Homo sapiens
cacattggcaggtgagatatgtggagacatggcacgtggtgaaaatgcttggcaaagtgttcaaggcaggatggagataccgtatgggcattcactggacagtgttttcatcccgtatgtttgaacaatttttaatgtgggatcaaaggtaggaaatgctctttacaaagtcatcaaaaagttttttctggaaaagcctccagcccacggtgacctaggttcttcccaccattgaattaggatgccgtctgctactgagagagccagtcatgttagtggctyaatgggcagggtgcccaggttagctgtgaacaaagtgatctctctgctgcctcactagcagagagaaaagaaaactacagaccagtgatatgtacacagagagcaatgaaaatcctcattatgatggcagactaaacccatagtgtgttaaaaatgaccacacatgtaggctaggcacagtagttcatgcctgtaatcccaccactttgggaggctaaggtgggaggattgcctgagctcaggagaccagcctgggtgacatagtgagaccccatc

SEQ ID NO: 917495 - DNA, 622 bp, Homo sapiens
gctgcctcactagcagagagaaaagaaaactacagaccagtgatatgtacacagagagcaatgaaaatcctcattatgatggcagactaaacccatagtgtgttaaaaatgaccacacatgtaggctaggcacagtagttcatgcctgtaatcccaccactttgggaggctaaggtgggaggattgcctgagctcagragaccagcctgggtgacatagtgagaccccatctctttttattaaaaaaaaaaaaaagaccatacatacacacatgcacacacaacagtggtaatggattataattcatgaaaaaagaatctatgcatccacagggacacacccatgtatataaacaaataagtggaagaaaggaatccagttctcacgttagaatcaacagggctggaaggccatcaaggaaaccccgtggcaggggcaggggttcaaagagctggtggttgtagtctcagtgtctcccaccaccacttactagttacaaaggaaaaagaatcactttctagaggcaaagctggcgacaccacccgagccaagtgatccaagttaacatcaccaggaatgggacaggccagcttcaccaccctccggatggacagcctcggta

SEQ ID NO: 917496 - DNA, 581 bp, Homo sapiens
atagaagaggaaggaacacccacacccaggctgtggctgggctggggacttggcctgctgggcattggggtggcaattgtgtttctcagcaagttgcctcaagaagcgagaatggctactgattcttctcttataggatccacacagcattcagtccttctactggcaactgaaagggacaaaacacttgcctgttcaaaaaggtcttttgccaagggggtgtggctcatgcctgtaatcccagcatttggggatgccgaggcaggaggatcaattgagcccagaagttcaagaccagcctgggcaacatagggagaccctcatctcttgtttttattaattaattacttaattatttactgactcttcattctggtctgaagggagacctcatctctacaaaaaatttaaaaattagcttggcttagtggtgcatgcctrcagtcccagctacttgggaggctgaggtgggagaatagcttgagcccaagagtttgaggctgcagtgagcagtgatcatgccactgcactccagcctgggcaacagagtaagatcttgtcaaaaaaaaaaatgtcttttt

SEQ ID NO: 917497 - DNA, 616 bp, Homo sapiens
atttatatatctaaaagtatctttatttttatcttagagttctttgaggttggaagtaattttccctcaggatattgaaggtatttctctattgcatactttattccagttagaagtttaatgccattatgatgccttatcctttctttgttgcctgctttatttatctctctgaaagtttctagtgtatgtatttttatctcttatgtggagaaatttcatgatgatacacttttgtttcagcgtgagtctttttctgtctattgtgttaaccactcccaatttggaaatttaactttatcaattctgaaacattttgtgcatgatttatttgataatttcctttatttcctttcctctcctttatttcctgtctctctttctggaactcttgttacttggatggtagacatcctggactcattgttaaattttctttttttctccttcccattttctrtttttttatttgctctactttctggagatttctttaaccacttcttctaattcttcttgacatttcttctatcttatttttaattcccaagagttttttcttgatctttgagtgtttctttaaaatttgccattctttttttcatatatatagtat

SEQ ID NO: 917498 - DNA, 605 bp, Homo sapiens
cccaaatgaattctaaactcaaataaaaatgggacttctaggaatagtgacttgagaagctggagcaacggcttccacagtttaaaaaatctggacaatattatgaaagacagcttaactgaaagcactggaacatgcccaaagacagacagaaattgagaaaaatacacccttgaaagactactgcattgggtaagaactgcaagtttgtgcctttctggcctagggctgctccctaaacccaattgkgacacaggaaaatctcagccttaatggtgttaaaaggcagatgtcaaaggttagagctgcagagatactagtaagttataggaggattttggcagtgagaaagccacacttatctgacaagttgtttcatttataccatcaaataggatgttgatgtatgtcttcttgctgacaacattctctcaatgttctgagatagtctccaatctcatattttgtgctatgctatctcttttttaaaattggaatttgttttaacaacactggctgtatcaggatatttagggaagagcagacatattaggcctttatctttaactttgatgatgggattaaaccttcctttgggaactgaa

SEQ ID NO: 917499 - DNA, 629 bp, Homo sapiens
cccaaatgaattctaaactcaaataaaaatgggacttctaggaatagtgacttgagaagctggagcaacggcttccacagtttaaaaaatctggacaatattatgaaagacagcttaactgaaagcactggaacatgcccaaagacagacagaaattgagaaaaatacacccttgaaagactactgcattgggtaagaactgcaagtttgtgcctttctggcctagggctgctccctaaacccaattgtgacacaggaaaatctcagccttaatggtgttaaaaggcagatgtcaaaggttagagctgcagagatactagtaagttataggaggattttggcagkgagaaagccacacttatctgacaagttgtttcatttataccatcaaataggatgttgatgtatgtcttcttgctgacaacattctctcaatgttctgagatagtctccaatctcatattttgtgctatgctatctcttttttaaaattggaatttgttttaacaacactggctgtatcaggatatttagggaagagcagacatattaggcctttatctttaactttgatgatgggattaaaccttcctttgggaactgaaggctgtaagagtatggagagaaac

SEQ ID NO: 917500 - DNA, 679 bp, Homo sapiens
ctcctgttcttccagcatcagaggcctcaaaacagcaggaagccagcagcagcatccgagcaggcagacgggaagcaggccaggggtgctcctagaaaaaaaacaggtgaaacaccccagaacctgccagaaccaggggagggcagcccaggtgaaaagggaagacaaggcccaagaaacaagggttaaggagcacaaggcaggtgacaaacccaagctggcctcgtcccctmcctccacctccttctgcctgggaaacactcaatgaaaagagctacatccaccaagcacatctctcaaatccaggcacgtggaagcgcacagcgaacgttactgaagtgaactaacaaacagccccgtgatgtatctttcaccaccccatttttcaaatgatcaaatggaggctctgagaaggtgaggctctgccgctgttcatctccagttcaggcctcctcgcttctgtcctggccattttgagcagcccccctggcctccacccagcccccttccggcctgccgtccatggctgctgagtggaccttcccaacacagatgcaacggtgctacttctctgcttaatacaagagtgtcctgtcgcctaggctgcaggggagtcaacatcctcagaatgatgaaccaagttcaagtccaaggggactaaaataaggggaggggagag

SEQ ID NO: 917501 - DNA, 679 bp, Homo sapiens
ctcctgttcttccagcatcagaggcctcaaaacagcaggaagccagcagcagcatccgagcaggcagacgggaagcaggccaggggtgctcctagaaaaaaaacaggtgaaacaccccagaacctgccagaaccaggggagggcagcccaggtgaaaagggaagacaaggcccaagaaacaagggttaaggagcacaaggcaggtgacaaacccaagctggcctcgtcccctccctccacctycttctgcctgggaaacactcaatgaaaagagctacatccaccaagcacatctctcaaatccaggcacgtggaagcgcacagcgaacgttactgaagtgaactaacaaacagccccgtgatgtatctttcaccaccccatttttcaaatgatcaaatggaggctctgagaaggtgaggctctgccgctgttcatctccagttcaggcctcctcgcttctgtcctggccattttgagcagcccccctggcctccacccagcccccttccggcctgccgtccatggctgctgagtggaccttcccaacacagatgcaacggtgctacttctctgcttaatacaagagtgtcctgtcgcctaggctgcaggggagtcaacatcctcagaatgatgaaccaagttcaagtccaaggggactaaaataaggggaggggagag

SEQ ID NO: 917502 - DNA, 653 bp, Homo sapiens
gtgccacacttgtacagtctacagaactgtgagccaaacctcttttcttttctttttctttttttgagacggattctcgctctgtcacccaggctggagtgcggtggcacgatcttggctcactgcaacctcagcctctccagttcaagcaattcttctgcctcagcctcccaagtagctgggattacaggcgtgcaccaccacacccagctaatttttgtgtttttagtagcgacagggtttcaccatgttggccaggttggtcccgaactcctgacctcagatgatccacctgcctcagcctcccaaagtactgggattacaggtgtgagccactgcacccygccttaaacctcttttctttataaattacccagcctcagatattcctttatagcaatgcaaaatggactaacacattgctcctccccacactccatttcaggcctccccttagacaaggtcaggcctccttgagatgctctcacaaggactacatgcaattctgctatcacacctatcacagattaacatctttgcatttatttaggtgattatttgactaataatagatgttcctcttatgtaagtactccatacaggcagagaccatgtctatttcttacccacaattttatctggcatagtgcctg

SEQ ID NO: 917503 - DNA, 597 bp, Homo sapiens
accataattagatatatagaaattatttcgtctgaacaaaagagagaaaaaaatagaaaaaaacaaataaaaagctttatggacaggtgaggtaatattttaaaatccattatgcatatacttgagagagagaaaaagagagggagtcagaaaacatatttgaggaaaaaataatgcaaaatatcagaaatttggtactacataaattaacacactgaaataatgagcaaattccaagcrgtaaaaattcaaagaaaattatgcctgaaaacattgtagtcaagatacttaaaaccaaagataaaagaaaatcttgctagtagtgagagaaatggacacattacaacaagcacaatggtttgattgcctggagctttctcattggaaagcatgtaggcctgaaacagtgaaagatattttaagctgctgaaattaaaaaaaaaaaaacaaaaaaccatcaacaccgaattctgcaaacatgaaaatatcctataagaaggaaagaaaaataaatatattttccgacggagagaaactaagatatgtgtataataaagatatataaacaatatataagtatacaaaatgggccaggcg

SEQ ID NO: 917504 - DNA, 597 bp, Homo sapiens
accataattagatatatagaaattatttcgtctgaacaaaagagagaaaaaaatagaaaaaaacaaataaaaagctttatggacaggtgaggtaatattttaaaatccattatgcatatacttgagagagagaaaaagagagggagtcagaaaacatatttgaggaaaaaataatgcaaaatatcagaaatttggtactacataaattaacacactgaaataatgagcaaattccaagcagtaaaaattcaaagaaaattatgcctgaaaacattgtagtcaagatacttaaaaccaaagataaaagaaaatcttgctagtagtgagagaaatggacacattacaacaagcacaatggtttgattgcctggagctttctcattggaaagcatgtaggcctgaaacagtgaaagatattttaagctgctgaaattaaaaaaaaaaaaamaaaaaaccatcaacaccgaattctgcaaacatgaaaatatcctataagaaggaaagaaaaataaatatattttccgacggagagaaactaagatatgtgtataataaagatatataaacaatatataagtatacaaaatgggccaggcg

SEQ ID NO: 917505 - DNA, 474 bp, Homo sapiens
cttattacaaaacagaaatcaaagctacaaacaaaaatggttttacttgtaaaatttatcaaaggttgaatgattaaataataccaccttatataattatttcacaaaatacaacgaataaaactgtatgtttgtgttatgagttcagaataaactttacaacaaacaaagcctgatgatgttatggaaaagagaaaagcacamatagatcattatcagtcatgaatgtagatgaaaaaatgctaaatagaatgttagcacataaacagaacaatatataaaaatgataaaacctgaggatcaaatatgttttatcttaggaatgcaaaagtggctaaaattttgaaaataaattatcgtaatttactatattaacaactaaagataaaaaatatgtaatcacttcagtagttgcagaaaaagcatttaatgaaatttttaataaaaagttgcagcaaaatataaatgattgga

SEQ ID NO: 917506 - DNA, 599 bp, Homo sapiens
aaacagtactaggaagtttatttttgttcctaatcttgaaaattcttatcatgaaggggtgtagtattttatcaaaggcttttgtttgtatctattgatatgattatatgaaatttcccatttattctcataatatgatgtattaatataaaaataagtgggttacagatattaaccccttgttgcattcctggagtaaatctcacttgtttrttatgtatttttttatgcagctagattttatttgtcaatatttcattaatgatttttgtgtatatgttcctgaggaatattggtctgttgttttgttttgttttatgtagaatgtctttgtctggttctggtatcaggaaaatactagcctcctacaattaatagaaaactgtttcctcttccttgaatatctgaatggttctttaaaatttgataaaattcaccactaaagccatctcggccaaggtttttttgaaagaatattttaaatgactaatttaatatcttcacttgctatagatccatttagatagtccataccttattaagtcagttttggcaatttatgtccttcttggaattgttctatgtcttctaatatttaa

SEQ ID NO: 917507 - DNA, 628 bp, Homo sapiens
aacaatcctaaatatatatgtgcccaatactagaacacccagatagaaaaaaagaaacaaaaacaccactgctggacccaagaacatattgaaaatatttaaacatcagtaaaatgacagtggggtatttcaacacctaactcacagcactaaacagatcataagacagaaaatcaacaaagaaactctggatttaattggactgtaaaccaaatgaacccaaaagacatttatagaacactgtayctatcaaccacagaacacccattattttcatgtgtgcatggaacactttcaaaaattgaacatatgctaaccacaattcaaatatcaataaacttttaaaaattgaaatcatatcaattatcttctcagaccacagttaaataaaactggaaatcaataccaagaagaactctctcacaactgttatatgcatatgtgtaaattaaacaatctgattatgaatgctctttagataaaaaatgaaattaggtagaaatacaaaattttaaaaacaaatgaaaatagagacaaagaataccaaaacgtctgagatacagcaaaagcaggactctattttatagcattaaatgtctatgtcaaaaagatgaaaagatctcaaatt

SEQ ID NO: 917508 - DNA, 605 bp, Homo sapiens
acacacaaacagtactaggaagtttatttttgttcctaatcttgaaaattcttatcatgaaggggtgtagtattttatcaaaggcttttgtttgtatctattgatatgattatatgaaatttcccatttattctcataatatgatgtattaatataaaaataagtgggttacagatattaaccccttgttgcattcctggagtaaatctcacttgtttrttatgtatttttttatgcagctagattttatttgtcaatatttcattaatgatttttgtgtatatgttcctgaggaatattggtctgttgttttgttttgttttatgtagaatgtctttgtctggttctggtatcaggaaaatactagcctcctacaattaatagaaaactgtttcctcttccttgaatatctgaatggttctttaaaatttgataaaattcaccactaaagccatctcggccaaggtttttttgaaagaatattttaaatgactaatttaatatcttcacttgctatagatccatttagatagtccataccttattaagtcagttttggcaatttatgtccttcttggaattgttctatgtcttctaatatttaa

SEQ ID NO: 917509 - DNA, 559 bp, Homo sapiens
aagtcgtgtcttatatggcggcaggcaagagagcatgtgcaggggaacctcccctttataaaaccatcaaatctcgtcagactcagtcactatcatgagaacaacccaggaaaacccacccccatgattaagttacccaccatggggtccctcccatgacacgtggggattatgggagttataattcaagatgatatttgggtggggacacagccaaaccatatcatgtacttactgcaataagtatgtaraatgattccattagctcagaaagtatctcttgtacctcattgtagtcaatgccccttccccacttccagcccatagcaactaatgaaatgatctgttttctgattctgcattatccagaatgtcacataaatgaaattataacatacatagcactttttgtctggcttgttatacttagcatattgcttttgagatttaaccatgttgttgtatgtaacagtagctcatttcttttcattgctgcgtactattctattgaatggatgtaccatcagctgatggacattaggattgcttccagtatttg

SEQ ID NO: 917510 - DNA, 631 bp, Homo sapiens
ttttagctcactttttgaagggattatttgtttttttttttttcttgctgatttgtttgagctccttgtagattccggatgctagtcctttgttggatgcatagcttgcaaatactttctcccaccctgtgggttgtctgtttactcttcttattatttcttttgctttgcagaagctttttagtttaattaggacccatttatttgtttttgtttttgtcacatttgcgtttagggtcttagtcctgaatttctgcctaagccaatgccagaagaagagtttttccaatgttatcttctaggatttttatggtttcatgtcttagatttaagtctttgatccattgggagttaatgttttttataaggtaagaaatggggacccagtttcattcttctacatgtggcttgccagttttcccagcaccattattgcatagggtgtcctttctccaatttatgtctttatatgctttgtcaaatatcagttggctgyaattatttggctttatttttgggtactctgttctgttctattggtctatgtgcccatttttataccagtaccatgctgttttggtaactataaccttgtagtataatttgaagtattgtaatgtgatgcctctag

SEQ ID NO: 917511 - DNA, 607 bp, Homo sapiens
ggctggctacattagtgtgaaagaaaaataaactgccatttccaaagccactattgacttccaggtttccctctcacatgagaggtcatcactcccaccctataataagaacaaaagctgaacaaattgaaaatcaacagcttttcttagattcctcagagaattgaagtgacagggcaaactgccactcagaaaactggagaaagaaggagattaagaaaattacagctaagatcaaatcacctcatgcagaagctgctggagtcataaaccagtagaagtacttaagcagtaactccracaaactgctaaaggatgagtgtggactagcttgagaataaaaacctcctcaggtcctggtcttagggatgcttaccacactttcatgggttttcatcctcgggacccagtcttggggatgctatcacactgtcatgagttttacttccaggaaccccaccagattctcacagtaaagagccaagaaaaatctcctcctctttctgggggatggaaagaagtaatcattttaaaatatacctagattattccctccatctcaagggaagatgtcagagccttatctgacctgagagaagaaaattag

SEQ ID NO: 917512 - DNA, 600 bp, Homo sapiens
tgtggggataaggcactaacctgggggttgggggctctccataaacccttgccttgctatctacctaaggcaagctagctaatgtctctcaatgctagtaaggttaagttccttaacacattgaaaacatgctttagttttaccttagcttggaaagccaaatttggtcaaaagtaaatataacaatatacttccatataaatcattttggaattgaattcaaattattaaataaaatattaaatttgatatatgtatttgaccatcaaatttttttaaaaagttgaatagatagtgtggtgaaggtgaaacatgagagatatacatgcttttatgataaattattttgtggtcatttaaattttcaatttagcagtgttgactgtgtttaaaatgtgaatattgacatrtaagagaaaaaatgttgataacaaaaaatacaaaacaaagcatgatagtgtgaatggcttttctgaaacctcagttgttgccttagtttcaaaaaaatttaaacaagagacaaacacaaagaagatgcagcataaagtaatttattgcaaaggagtaagtctattttaaaggttaggtgcagaataccca

SEQ ID NO: 917513 - DNA, 602 bp, Homo sapiens
ctgaaaataaattggaatctggcacctacactgattaacaggttgagcaggttaaactagacctaaatccctgtaaacaacattgaagacagaatttttaaattaaaaatatcttcaacaatttaataaacctatgggattagcaagaagagatttgtttacccatcatcaatcaatattaggttaaactagaaaactttgaatacactgtttmtaaaataaaattagtaaactatccccagagctaatctgattaaaacaagacttctgggtatttagaaacaccaaattactgataaacatatctatttttaacagatctttgatcttatatatatactactattaagtaaaacctagtactaatagatatgatttataaaatatttgtgaatatttattactgtagtaaaatatcaagaaattatttaagtctattgtctaaaaacttttcattaaaatatttggtattttaattgaatgcctgtattcatatcatacggcaaaccactcatttctttactattttgtcattttataactgaagcctgaatttgtagacatttttttaaaaaacaatcttttctcaagaaagatttaca

SEQ ID NO: 917514 - DNA, 417 bp, Homo sapiens
gctctgtcccagggagatgggcgttttatctatatgcccctgaatgtggctgctgcatttttttcagagatgccctgcccaaagaggaggcatcttgagatacagtctggtcttgctgagctgcgatgggctccatccagttcaatcttccgggtggctttgtttatactctgagggtaaagctgcctactcaagcctcagcaatggcggacgcccttcccccaccaagctcgagcttcccagrtggagcttggactgctgtgcttgcagccagaatttcaagccagtggatcttagccggctgggctccctggttgtgggaactgccaagccagaccactttgctccctggcttcagccctctttccaggggagtgaacggttctgtcttactggacttctgggcactactggggt

SEQ ID NO: 917515 - DNA, 417 bp, Homo sapiens
gctctgtcccagggagatgggcgttttatctatatgcccctgaatgtggctgctgcatttttttcagagatgccctgcccaaagaggaggcatcttgagatacagtctggtcttgctgagctgcgatgggctccatccagttcaatcttccgggtggctttgtttatactctgagggtaaagctgcctactcaagcctcagcaatggcggacgcccttcccccaccaagctcgagcttcccaggtggagcttggactgctgtgcttgcagccagaatttcaagccagtggatcttagccggctgggctccctggttgtgggaactgccaagccagaccactttgctccctggcttcagccctctttccaggggagtgaayggttctgtcttactggacttctgggcactactggggt

SEQ ID NO: 917516 - DNA, 662 bp, Homo sapiens
atgaaaaggcaatttatggaatggggaaacatatttgcaagccaggtaactataaaggattaattttcaaaatatgtatggtaatcctacaattcaatagcctaaaaagtggtctaaagacttatagatgtctctccaaagaagacatccaaataactgacaggtatataaaaatatgttcaacatcagtaatcatcaggaaaacactggtaaaaaccacacacacacctacaaaaattacctcacaccggtgagaatggttgtaaaaaaaaaaaaaaaaaagtctaggcacagtggctcatgcctgtaatcccagaactttgggaggctgaggtgggcggatcacctgaggtccggagttcaagaccagcctgaccagcctgaccaacatggagagaccctgtctctactaaaaacacaaaattagccaggcrtggtggtgcatgcttgtaatcctagctactggggtggctgaggtaggagaattgcttgaacctgggaggcgaagtttgcagtgagcttagatcgcgccattgcactccaccctgggcaataagagcgaaactgtctcaagaaaaaaaaaaaaaaaaaaaagaagagataagttttggggaggatgtggggaaattggaacttcttttgcactgttgatgagaaaacaa

SEQ ID NO: 917517 - DNA, 744 bp, Homo sapiens
atctctcctggtttaatgtagaggaagggatccaaaggcttagggagattgggatggtggagtggattagtcactttagacctaatcatcccagtgggaagggtccagaaattaacatgtctcctggtgcctggtatgcaccaattgacttggcaaatgctttttctccattcctgtccataaggcycaccagaagcaatttgctttcaactggcaaggccagcaatatacctttactgtcctacctcaggggtatatcaactctccggttttgtgtcataatcttattcagagagaccttgaacactttttgcttctgcaagatatcacactggtccattacaatgatgacattatgatgactagatccagtgaacaagaagtagcaaacacactggacttattggtgagacatttgcatgccagaggatgggaaataaatctgactaaaattcagggaacttctacctcagtaaaatttctaggggtccagtggtgtggggcctgtcgagatattccttctaaggtaaaggataagttgctgcatttggcccctcctacaaccgagaaagaggcacaaagcctagtgggcctgtttggattttggaggcaacacatttgggagtgttactctggcccatttattgagtgacccgaaaggctgccagttctgagtgggatccagaacaggagaaggctctgcaataggtccaggctgctgtgcaagctgctctgccacttgga

SEQ ID NO: 917518 - DNA, 623 bp, Homo sapiens
ggacctctccgagtggtcaaaaactgtgaagatatttgtatcccctgtgagtgctcaccaacaggtgacctcagtggaggaggagtttaataatcaagtggataggatgacccattctgtggacactactcagcctctttccccagccacccctgtcatcgcccaatagacccatgaacaaagtggccatggtggcagggatggaggttatacaygggctcagcaagatggacttccactcaccaagactgacccggctatggccactgctgagtgcccaatttgccaacagaagagaccaacactgagccctcgatatggcaccattcctcagggtgatcagccagccacctggtggcaagttgattatattggaccttttccatcatggaaagggcagaggtttgttctcactagaatggcacttactcctgatatgggtttgcctatcccgtatgcaatgcttctgccaagactaccatccacggactcacaaaatgcattacccaccgtcatggcattccaaacagcattgtctctgaccaaggcactcactttgcggttaaggaagtggggcagtgggctcatgctcatggaattcactggtcttaccatgttcccca

SEQ ID NO: 917519 - DNA, 623 bp, Homo sapiens
ggacctctccgagtggtcaaaaactgtgaagatatttgtatcccctgtgagtgctcaccaacaggtgacctcagtggaggaggagtttaataatcaagtggataggatgacccattctgtggacactactcagcctctttccccagccacccctgtcatcgcccaatagacccatgaacaaagtggccatggtggcagggatggaggttatacatgggctcagcaagatggacttccactcaccaagactgacccgrctatggccactgctgagtgcccaatttgccaacagaagagaccaacactgagccctcgatatggcaccattcctcagggtgatcagccagccacctggtggcaagttgattatattggaccttttccatcatggaaagggcagaggtttgttctcactagaatggcacttactcctgatatgggtttgcctatcccgtatgcaatgcttctgccaagactaccatccacggactcacaaaatgcattacccaccgtcatggcattccaaacagcattgtctctgaccaaggcactcactttgcggttaaggaagtggggcagtgggctcatgctcatggaattcactggtcttaccatgttcccca

SEQ ID NO: 917520 - DNA, 641 bp, Homo sapiens
catatgcatttttttaaaaaatggccatcaagtccttaggacaaaagtacagtacttattaggttatttgagcctaactctgcagtaatctgaatttttatgtatttcttttggcataggggcaccaagagatttctgacaaagggcattaaaactgagaaagtttgggaacctctgaatgctgtaggtgagtataagttcaaactcggggccccaaaggtcaagttatattaatagataattaactattttttgtttgtttgttcgttttactttttatttatttaccttttttgggacttacacatatgtccacaagtcttcatgagtgtcaaccaaagggcatatgacacaacagagcaaatcttggacagtagtaagtggcaggtgcgatgggggcatgtaggtagattcctgctcatttatcttttttytggatcactctaaggtgcgtttttttttttttttggtagtcctttgagataaagttctgcagatcacgtaagcaccttcagtaatacaatggctgtgtcttcttgaagctctcagcttcatagctttccttgactcggttttcattctcatcatcattactgtcctggtttttaatcttatcaatacactgtcatcactgtaaaatt

SEQ ID NO: 917521 - DNA, 660 bp, Homo sapiens
gaaaaggcaatttatggaatggggaaacatatttgcaagccaggtaactataaaggattaattttcaaaatatgtatggtaatcctacaattcaatagcctaaaaagtggtctaaagacttatagatgtctctccaaagaagacatccaaataactgacaggtatataaaaatatgttcaacatcagtaatcatcaggaaaacactggtaaaaaccacacacacacctacaaaaattacctcacaccggtgagaatggttgtaaaaaaaaaaaaaaaaaagtctaggcacagtggctcatgcctgtaatcccagaactttgggaggctgaggtgggcggatcacctgaggtccggagttcaagaccagcctgaccagcctgaccaacatggagagaccctgtctctactaaaaacacaaaattagccaggcrtggtggtgcatgcttgtaatcctagctactggggtggctgaggtaggagaattgcttgaacctgggaggcgaagtttgcagtgagcttagatcgcgccattgcactccaccctgggcaataagagcgaaactgtctcaagaaaaaaaaaaaaaaaaaaaagaagagataagttttggggaggatgtggggaaattggaacttcttttgcactgttgatgagaaaacaa

SEQ ID NO: 917522 - DNA, 582 bp, Homo sapiens
gtctatatgtgtcttcatgggtaaggtgagtttcttgtaggcagcggatagtttgatcacggctgtatccattctacccatctgtatcttttaagtagaacatttaatctgtttatatttaaagttaatattgatatgtaaggttttgttcctgtcatattgttgttttcaagtttttaaaataaattcattgttttattctttttgtctgtctttttgtctttgtgatttcatgagattctgttgtgttgtcaatttgattcctttctcttttgcctttgtgtaattggtttaataaaagctgtgagttttatatyaccgtgtgtttttacgatggtgaatgtctacctttaatttccatgtttaagaccctttccagaacttcctgtaggactggacttgtggtgatagattcccttattattagcttctttaggaaaaaactttttttctccttcatttattaagcttctttggccggatataaaacttttggctgacaggttttttgtttgtttgcttgcttgcttgcttgcttgctttcagcactttaaaaatgtctcttctgacctgtaatgtttc

SEQ ID NO: 917523 - DNA, 552 bp, Homo sapiens
ccaaaaaagtatcatacatacaaaaataattcaacatctaggctgggaactcgattaaaataaatattcttcatatattaaaaaagaaaccagtaagaagatttaatacatgaaaggatcctacttatagctgcaacaaaataaagacaatatgtaacaagatagcaagatatgtgcaacatatrtatgaaaaatattttaaatgctcttaagaatcaggagaagagaacttatataaaagaaaatgtacagcatgttcttggatggcaaggctcacacaacgtcagttttccctaattctataaattctgaaaagtaggttaataaatgggatgctagtcatattaaatattaaaatttttataaagctaaaataattaaataatgtggtactatcaaagaaatggataaagttctggccaggcacagtggcttatgcctgtaatcccagcactttgggaggccaaggcaggtggatcacttgaggccaggagtttgaaaccagcctggccaacatagtgaaatcccatctctactaaaaatacaaaaatt

SEQ ID NO: 917524 - DNA, 552 bp, Homo sapiens
ccaaaaaagtatcatacatacaaaaataattcaacatctaggctgggaactcgattaaaataaatattcttcatatattaaaaaagaaaccagtaagaagatttaatacatgaaaggatcctacttatagctgcaacaaaataaagacaatatgtaacaagatagcaagatatgtgcaacatatgtatgaaaaatattttaaatgctcttaagaatcaggagaagagaacttatataaaagaaaatgtacagcatgttcttggatggcaaggctcacacracgtcagttttccctaattctataaattctgaaaagtaggttaataaatgggatgctagtcatattaaatattaaaatttttataaagctaaaataattaaataatgtggtactatcaaagaaatggataaagttctggccaggcacagtggcttatgcctgtaatcccagcactttgggaggccaaggcaggtggatcacttgaggccaggagtttgaaaccagcctggccaacatagtgaaatcccatctctactaaaaatacaaaaatt

SEQ ID NO: 917525 - DNA, 591 bp, Homo sapiens
ccaatttctcccatttggaatgggtatatttacccaatgcttgtatccctattgtatcaagaaagtaactgacttgcttttgattttacaggctgataggtagaagggacttgccttgtctcagatgaggctttggactgtggacgtttaagttaatgctgaaatgagttaagactttgggggacagttgggaagggatgactggttttgaaatgtgaggacatgagatttgggaggggccaggggtggaatgatatggtttggctgtgtccccacccaaatctcatcttgaattatagcttccataatccccaagtgttgtgggagaaactggtggggstaagtaagtcatgggggtgggtttttcccatcctcttcttgtaatagtgaataagtctcatgagatttgataattttataaataggagttcccctgcacatgtgctcttgcctgccaccatgtaagatatgtcttgcttcccctttgccttccaccatgattgtgaggcctccccagccatgtggaactgtgagtccattaaacctcctttactttataaattacccagtctcgggtatgtctttattagc

SEQ ID NO: 917526 - DNA, 672 bp, Homo sapiens
atgttaggtgagctggaatgtctatatggtcccagtgtgagtgagtgagtgtgggggtgtgtgagtgtccctgccatgggatgacatcctgtccagggctggttcccacctggtgccctgagtttccagggtagtstgcagccacccgggagcctgaactggaatcagtgggttagaaaaggaatgaatgagtgaatacaaactattgtcaaataaaaatttgtaaattagacgataatcatacaaatgcacgacactgaacattgcactacaaaagcccttctcaagcctgccagatctgtcattgcttttgaactgtgtggtggtaggaggtgctgcttaagattttctgctttgtacacatttatttctcaatttaacctgccccctctatgcccaccatttctcactaatgcaccaaaaattgagtaaataattatcttgtttttattaaccttttaaaatgtatatgtagctcacatttatttcagtgtttaatattagaggtgtttgaggcctttatttagaagtttgatgatgtttttgtgaccaggaacatgccataggaacttcactcttgtttatatcaattagtcagtggtaaaactggtttcttcatatgttgttttgcttaaagtcacagtttgcaagtttatcgattacatcgaggac

SEQ ID NO: 917527 - DNA, 599 bp, Homo sapiens
gagtgtgaaagtaaagagtataaatgaaatcttttttgtggtgggatagttctggatcttgactggggtggtgataaaggaatctacacatgtgataaaatgacacagaacaatatatatatattggatgaatgctatattactggtttttatattgtattacaattctgtaagatatawccactggcgggaactgaatgaaggatacatgagacctctctgtattatcctcgcaacatcctataaatttataattatcctaaaaagtatttttaaattgtagctgagtatattagattcctggggctgccataacaaaactacacagaatggtttaaacaacagaaatctattgtctggaagctagaagtccaaaatcaaagcaccagcagagttggttccttctgatgactatgagggagaatccattccattcttctcatttagcttctggtagtctagtctgttcaatagcttgcagatagtgttctccctatgtcttcacagtatcttccctctatgcatgcttgtcatgatgtacaaatttcccctcattataaagacactgtcaggattaggtcccatcctaataaccttat

SEQ ID NO: 917528 - DNA, 604 bp, Homo sapiens
ctcaggcctgtaatcccaggactttgggaggctgaggcaggcagatcacttgagatcaggagtttgagaccagcctggccaacatagcaaaaccacgtctctactaaaaatacaagcaaattagctgggcatggtggcacacacctgtaatcctagctactcgggaggttgagccacaagaatcgcttgagcctgagaggcagaggttgcagtaagccaagactgcatcactgcactccagcctgggtgacagagtgagactccatctyaaaaaaaagaaaaagactaacttgaaagtgaagaagcttggcagtcaccaccttaagcaagtgatcaaagtgagtatcattagaaatagaataaatcaaattctgccccatagaatacaatgagtagaaaatggcatcgcttctgttattcctgccaacgatgcatatctgaatctaatggaaaggaaacggacaaatgcagatcaagacacacactacaaaacaactggcctgtcacctccaaacatgacatgggtttaagtcacagaagcaccaaggaactcttccagactgaagaagacagcagacgcatggcaactaaatgcaacgcatga

SEQ ID NO: 917529 - DNA, 753 bp, Homo sapiens
gcctcagaagtcatgctgtgtccggaatgggtgggtgtcttggtctcactgacttcaagaatgaagccgcggaccctcgcggtgagtgttacagctcttaagatggcgcgtctagagtttgttccttctgatgttcagatgtgttcggagtttcttccttctcgtggtctcgctggctcaggagtgaagctgcagaccttccccgtgagtgtcacagctcttaaggcggcgtgtctggagttgttgttcctcctggtgggctcgtggtctcgctgccttcaggagtgaagctgcagaccttcgcagtgagtgttacagcccataaaagcagtgtggacccaaagagtaagcagtagcaagatttattgcaaagagtgaaagaacaaagcttccacagtgtggarggggacccgagtgggttgccactgctggctgaggcagcctgcttttattctcttctctggcaccacccacatcctgctgattggtagagcccagtggtctgttttgacagggcgctgattggtgcgtttacaatccctgagctagacacaaaggttctccacgtccccaccagattagctagatacagagtgttgacacaaaggttctccaaggccccaccagagtagctagacacagagtgtcgactggtgcattcacaaaccctgagccagacacatggtgctgattggtgtgtttacaatccctgagctagacataaaggttctccacgtcccaccagactcagga

SEQ ID NO: 917530 - DNA, 607 bp, Homo sapiens
tctcagcagaaactctacaagccagaagagagtgggggccaatattcaatattcttaaagaaaagaattttcaacccagaatttcatatccagccaaactaagcttcataagtgaaggagaaataaaatactttacagacaagcaaatgctgagagattttgtcaccaccaggcctgccctaaaagagctcctgaaggaagcactaaacatggaaaggaataaccagtaccagccactgcaaaaacatgccaaaatgtaaagaccatcgaggctaggaagaaactgcatcaactaaagagcaaaataaccagctaacrtcataatgacaggatcaaattcacacataacaatattaaccttaaatgggttaaatgctccaattaaaagacacagactggcaaattggataaagagtcaagacccatcagtgtgctgtactcttagcaagactaataaagaagaaaagagagaagaatcaaatagaagcaataaaaaattataaaggggatatcaccaccgatcccacagaaatacacactaccatcagagaatactataaacacctctacgcaaataaattagaaaatctaggagaaatggataaat

SEQ ID NO: 917531 - DNA, 523 bp, Homo sapiens
attaaaattgctaatgaagtttcgggcaccattgtcattgataacatcttatcaggagacaggattttgagagcaaccagtctgaccaaaatttattaggcgggaatttcttcttcctagtaagcctgggagcgctatgcgagactggggtctatttcacccctgcagtctacagaccataaaagatggccacacccgggggtctgtctatagacctacccccaggtgtgtattctcttccccagggatgttccttgctgagaaaaagwattcagcgatatttctcccatttgcttttgaaagaagagaaatatggctctgttccgcccagctcaccggtggtcagagtttaaggttatctctcttattccctgaacaattgctgttatcctgttcttttttcaaggtgcccagatttcatattgttcaaacacatgtgctctacaatttgtgcagttaacgcaattatcacatggtcctgaggcaacatacatcctcctcagtttacaaggtgacaggatta

SEQ ID NO: 917532 - DNA, 576 bp, Homo sapiens
tcaagctgtagggggaggggaatttggcccaacctgggtacatgtctccttctccctctctgatttaaagcagatcaaggcagacctggggaagttttcagatggtcctgataggtacatagatgtcctacagggtccagggcaaaccttctatctcacttggacagatgtcatgctattgttagatctaaccctggcctttaaagaaaagaatgtagctttagctgaagccctagagtttggagatacctggtatcttagtcaagtaaatgatagaatgacagcaaaagaaaggaacaaattccctaccggtcagcaagccgwccccagtatggatccccactgggacctcgactcagatcagggggactggagtcacaaacatctgttgacctgtgttctagaaggactaaggagaattaggaaaaagcccatgaattattcaatgatgtccaccataactcagggaaaggaagaaaatccttttgccttcctcaagcagctactggaggacttacgaaaatatactcccatcacccaactcacttgagggccaattgatcctaaaacataagt

SEQ ID NO: 917533 - DNA, 769 bp, Homo sapiens
aagactaaaccaggaagaagttgaatctctaaatagaccaataacaggctctgaaattgaggcaataattaatagcttaccaactaaaaaaagcccaggaccatatggattcacagccgaattctaccagaggtacaaagaggagctggtatcattccttctgaaactaggccaatcaatagaaaaagagggaatcctccctaactcattttatgaggccagcatcatcctgttaccaaagcctggcagagaaccaaaaaaataagagaattttagaccaatatccctgatgaacatcaatgcaaaaatcctcaataaaatactggcaaaccgaatccagcagcacatcaaaaagcttatccaccatgatcaagtgggcttcatccctgggatgcaaggctggttcaacatatgcaaatcaataaatgtaaaaacagaaccaacgaaaaaaaccacatgattatctcaacagatgcagaaaacgcctttgacaaaattcaacagcgcttcatgctaaaaactcccaataaactaggtattgatggaatgtatctcaaaatgataagagctatttatgacaaacccacagcyaatatcatactgaatgggcaaaaactggaagcattccctttgacaaccagcacaagacaaggatgccctttctcaccactcctattcaatatagtgttggaagttctggccagggcaatcaggcaagagaaagaaataaagggtattcaattaggaaaagaggaagtcaaactgtccc

SEQ ID NO: 917534 - DNA, 605 bp, Homo sapiens
ggaagaattcactgataaactatctgagcccaggcttttcttttttaaaataatgggcttaattttaaaaaaaaatacatcctaaattattgatattttcatctcttctcctgtcagtcttggtaaattgtattttcaaagagtttgtttatttcatccaaattgtcaaatttatcagcataaatttgttttaagtttccttttattgtccttttgatgcttgtatgatctatagtgatatctcctttttcattgctgttgttgcraatttgttttgtctatttttttttcttttgatcagtcttctttagattttgatgtttttaaacaactgactttggctttattgtctttcttatatgttccttggtttttgcttttatctttatcatttctttttgtaagtttgattcctgctctctctctactttcttgaaattaacacttaaatcattgattttcaggctttttcctttctaatatggaatataagactatatatttccttctaagcaccattttagttttttcacatgatttttcaaatgtgatttttattatttaagtttaagaactaatttctgttttttttctttatcccatgg

SEQ ID NO: 917535 - DNA, 611 bp, Homo sapiens
caaaaatcctcaacaaaatactagcaaaccaaattcaacagcacatcaaaaagttaatcacaatgatcaagtaggcttcattcccgcgaggctaggttggtttgatatgagcaaatcaatgtgattccccacataaccagaattttttgaaaaaggtataatcatccaatagacatggraaaagcttttgatacaatccaacatcccttcatattcaaaaaccctcaagactaggcattgaaggaacatgccccaaaataataagagccatctatgacaaacccacagcctacatactgagtgggcaaaagctggaagcattcccttgagaattggaacaaggcaaggatgtctactcttaccactcctgtttaacatagtagtagaaggccttgccagagcaatcaggaaagataaaaaaacaaaaaagggcattcaaataggaaaatacatcaacgtatctctttttgctgatgatatgattctatacctagaaaatcctaaagactccacccaaaggctcctggaactaataagggacttcagtaaagtttcaggatacaaaatcatgtataaaaatcagtagcatttctgtacaccaataatgtttc

SEQ ID NO: 917536 - DNA, 568 bp, Homo sapiens
agctccagccatggctaataggggccaatgtgcagctcaggccattgcttcagagggtgcaagccccaagccttggcagcttacgtgtggaggatgtccaggcagaggtgtgctgcaggggcaaagtcctcatggagaacatctgctagggcagtgcaaaagggaaatgtggggggtggagacccctcacagagtccccactggggcactgcctagtggatctgtgagaagaaggccactatcctccagactccacaatgatagatctgctgacagcttgcactgtgtgcctggaaaagccacagacactcaatgccagcccatgaaaacagccaggatggaagttgtaccctgcaaagccacagagrtgaagctgcctaaggctgtgggggcccacctcttgcatcagcatgccctggatgtaaacatggagtcaaaggagatcattttggaacgttaagatttaacgactgccctattggatttcggacttgcatgggacctgtagcccctttgttttggccaatttctcccatttggaatgagtgtatttacccaatgcctatac

SEQ ID NO: 917537 - DNA, 578 bp, Homo sapiens
acaggtgtgcaccacaacacctggctaatttttgtattttttgtagagacagggtttcgccacgttgcccagactggcctcaaactcctggcctcaaatgatctacctgtctcagcctctcaaagtgctgggattacaggcgtgagccaccgtgcctggcctaaaatagtaatgtaactttccattttaggatgtatatgaataacattacttaccttttattcccagaaaatcattcttttctcaagaagaaaatcattgtctcaagaatataagatgatggttctgaaaaagcttctctgtttttggaaagagcattgatttgttccaactccttatatctgtaggcagtcattccttggatggttttattagaatgtataagagccttgaatttagctatrttttttttaaattatgtgtttcttgtgtttccgctgtcattcagacaactactgagctatttcatagcaatgaagaaagtggattttttaatgaactcgaggctcttagagctgaatcagtggctaccaaagcagaacttgccagttataaagaaaaggctgaaaaacttcaag

SEQ ID NO: 917538 - DNA, 590 bp, Homo sapiens
caagcctcatggtaacctcaaattaaaaaacatgcaacatacacatacaaaataaaaagcaagacattaaaacatactaccagagaaaatcacctacactaaaaggaaaacaggaagaaagaaaaaaaaaggaagaccagaaaacaacaaaataccaggaataagttcttatttatcaataaaaaaaagaatgtaaatggaccactcttcaatcaagagacatagagtagctgaatgaataaaacaaaagcaagacccagtgatttgttgcctacaaaaatcacacttcacctataaagatacacatagactgacaataaaggaatggaaaaatatatttcatgcaaacagaaaccaaaaaaaatgcaggagtagctatatcagacaaaatagtaattttaaatatatataccgaaaaayatataaagaaaatattattcaaacaatatagagagatagacccccaatgtaataattgctgaaggcttgaaggctccattttctgcattggagagaccatccagacagaaaatcagcaaagaaatatcagacttaatctgcgctatacaccaaatggacctgaaagaaga

SEQ ID NO: 917539 - DNA, 670 bp, Homo sapiens
ctcgatccaagtaaccttgtggtatgagccccatttggcctttgttacaagcaggtttttagaggcaaaaaagacaatgagcgggctgatacaaagttattttttaggaatcctcatcggtttacagaaatgacaatgattagtgattatctatacattgtgaactagagtgtatgggccacagtgtccagcatgtggcattcttaggttaatttacagctatttgtggtgacagtctagagtgcatacagcaagcagcttcaagcggggaagcagattgtgactgctgcctcattcccatttctctctgggactgataattccaaatggttggaattcctcagataaatttttttctttcttaaaattaatgtttttatgcttgctaacacaacatccactctgtagcctatgtaatttcaactatcaagccctactatttaatgaaatacatttcataaatttataatgccatagatagtgatttctttgatggatccgggaaaggtaaaytgaacaccttctccaaagaattaattattctagatgccattaagaatattcatgtttcatagaaagaggttgaaatatcaatattaacagaagtttaaataagttgtttccagccctcataaacgactttgaggggttcaaaacttcagtggaggaa

SEQ ID NO: 917540 - DNA, 610 bp, Homo sapiens
ggaggctgaggccggagaatcgcttgaacctgggagacctaggttgcagtgagcttagatcatgccactgcgctccagcctaggtgacagagtgggactctatctcaaaaaaaaaaaaaaaaaagttaaaatggcaacacttttatgtcatatacattttacaatggacagactacacaaaaactcattgccaaactgaagatcacatagattttctcctaagctatcttataaaactttaatagtcttagatatgacatctaggtctatgatttattttgagataatttttgtgaaaggcataaaggtcagtggctaggttcattttcttgcatgtggatgcccaattattcctctaycatttgttgaaaaggctgtcttttccccactgaatatcctttgctcctttgtcaaaaataagtggaccttatttatttgagtctatttctgggctctctattttgttcaattgatctatttgtctgttcttttgccattaccacattgtcttgattactgtacctttatagtaagtcttgaaattggtttttgtcagtcttccaactttcttctttttatgtaattttgtgtttgctattttgggattttt

SEQ ID NO: 917541 - DNA, 676 bp, Homo sapiens
agttctttttgatcatcccatcagtctcttcttcctttctaccaggtagaagtttttccagcaaagagagtttattaggagagagagccattctgaggagcgtttacataaattaagtgattaggcgacgctttgcatacggtgtgcagtaaattggcattccttcatttagcacacacttgatgtccccgtgcttgacattctgacctggaccatggttcagtcttgaaagcagatgttagcgtttgggagtcacacagtgtttcagccagctgtgtgtctgtacacaggaaaaggtcttctccctgtcaagtaaaaatagcatggtctttctgttctaccccagtggtaatgtttcctggctccagttctggtcttggtatccttcaccacggaatgttatcttctggccatctttcatgcctttgtcaatagggacttctagaatctccttctctgcaactgtcttccttccattgcagctktcacgtctatctttaggacggatggtttccccatgggcttggcactccatgcacacagattgaatttgctgaaccattccaggtcttattgatgaattactgtttgcattcaagcacctcagcagttggcacagcaggatcctgctcccttcttaacacctctgccttcacatttgtcacaaatcatattc

SEQ ID NO: 917542 - DNA, 634 bp, Homo sapiens
cgcctgtaatcccagcactttgggaggccgaggcgggcggattatgaggtcagaagattgagaccatcctggctaacacggtgaaaccccatctttactaaaaatacaaaaaattagctgggcgtggtggcgggcacctgtagtctcagctatccgggaggctgaggcaggagaatggcgtgaacctggaaggcagagcttgcagtgagtggagcttgcgccactgcactccagcctgggagacagagcaagactccatctcaaaaagaaaagaaagaaagaaagaaagaaagaaggaaggaaggaaggaaggaaggagagagagagagagagagagagagaragaaagaaagaaagaaagaaatgccgcccagcgtggtggctcacgcctgtaatcccagcactttgggaggccgaggcaggcggatcacctgaggtcaggggttcaagaccagcctggccaacacagtgaaaccccgtctctactaaaaatacaaaaattagccaggcgtggtggtgtgtgcctataatctcagctactcgggaggctgaggcaggagaatcgcttgaacacaggaggcagaggttgcagtgagctgagatcacgccatttgcactccagcctggaggacaa

SEQ ID NO: 917543 - DNA, 737 bp, Homo sapiens
gtggggcgggggccggggcccgcgtgggattaactaggaccggggcgggagtcgaccgcggccggcggggagggctagccccgctctggcgggcgggcgcgtggcaggggctcccggaggccccgagctcccgggaggcgctccggccaacttcgggccggtggggaccgggcctgggcgcggggctctgraggtgtggaaggaaagtttgggactccgttattcttccacagcgtccttcctcccgtaatatccagcctctttatcgcggggctcgggagcccttggagttgatctcgccaccattatccccccgggcgagcgcggaggacgggctggccattctggccaggccggaggtgttttccagcccggggctttgtgataactgggccgaaacccgagggtcctggagcgcggcgggtggcgggagcttgcggagcgcggcgcactcggcggccaggcatcggccagcccagcggcagccccctttctcctatttttatttttatttttggaaggagctgagaattagtcgattggttggcaggttgaattgccttctcttctatggcaatatgtgtcgtgacttttcaccttttgcctttggacaaaggtgaatggcaactgcgttggtcagtttttgttttctgttctgcggatgggttcgccgacgcagtaatcaaaattagagccactcttttggaagagcaaatcgttgttgttgcctccccagc

SEQ ID NO: 917544 - DNA, 495 bp, Homo sapiens
ggtctcaggcaatcacttatgtactttttgtcactgtagattagtttaccttttctagaatttgctatccatagaatctcttttttggcagagacgaggtctcactctatttcccaggctggtttcaaactcctgagctcraggaatccacccacctctgcctcccaaagtgctagaattacaggtgtgagcctccgcacccggctcgaatagaatcttacatattctctcttttttttttgagatggagtctcgctctgtcgcccaggctggagtgcagtggcacaatctcagctcactgcaacctccacctcttgagttcaagtggttctcatgccttagcctctcaagtagccgcgattacaggcacacgccaccatgctgggctaatttttgtatttttagtagagacaaggtttcaccatcttggccaggctggtttctaactcctgatctcaagtgatatgcccgcctcagccctcccaaagtgctggg

SEQ ID NO: 917545 - DNA, 628 bp, Homo sapiens
aaccttgactaatacactcagcaatagccaaactgttgccatgcagtaattaaggtccgttttcatgtattttcaggtaagccagggaactaactggatgtttacacttaattcctggtttttaaaatgcagacaagaaaaaaaatgtggccctcaaaaaaccatatctgtgtmccatactcatgtgttctgaacttaacctcctgtctctaaatgtataagattttgtaagttcagtttccttcacttaattgaggagaaatgtgattgtatcaataataacagtgtagtatcatgttaagccaaccatatgaaatagccaatatctgatcattctgactgtaaaaaatagcaatagcgtgtgattcaacttagtatgaaaagcactacactgaggtgggagacctgggtcatgtcttggatcttccactcacatttgtttctcatctgtagaatgaaatgggtgggactagattatctctaaattccccttcagctctagctttctattattaagcctttatgataatatataatgacttgaagaaaggatatctacatcacaaatgtggcagacggtgaaggccactgcgtggatataaaagggtctgtgggaacgttcaaaatg

SEQ ID NO: 917546 - DNA, 730 bp, Homo sapiens
gaaaaagatgcacacccaaaagccccatttgaagcttctagacagaaagccaagcatttggagagtgtctttggacagttttaaacacaactgtggaaaagaaagcagccctactcagtgtgaagatgatgagaatgaagacctttatgatgatctacttccacttaataaatagtgactttagaatccttaacacagcactcagctaccaatgccaatgaataaaattttgcatcactgttgaaatctgttcaccactccttttgtagatgttctgagttgggtaccagaagtcaattatctcattattaagatggcttctaaggtgattcatttttgtgacacataatgagtgttagttgaggtctagctgtatgctgaaaaatgctgatgaaaaatgttgtctacagagaggatagtcaacttatattaactgtgagttatactaggagctatacttaattcatttagactttatttggtcagctttttttatatttcataaaaagaagaaagattaaaaaaagaagtctttttaamtatatattctgctcaaatcaccatttccttttttttctgattcaaaggactttttcaagatctttcagggattatattttctttcaccttctatctgcattctctttcttcagccaattgattaaaaaagagatgcagagaagacacatttgcttctcatccacacatcacttccacttgctattagtca

SEQ ID NO: 917547 - DNA, 752 bp, Homo sapiens
taagctccagtggggcttggccagaaccaggggtgagtgggaagtgtgctgcagccgcaagcacaagagctgggtgccctggctttgcagggcagactcggagggggtggcctgaaagccatggttgctatttctgtggggaagtcttatgacrgcctgggacagttttgggttctgagcacagacgacatggaactcagctcgccgctgctagcagaacactgcaggtgttagatctgccttgccaagtgcatgggagcaaggtgaggcttactgtgctggctattccccattccctacacaaactcttctgtgtagcagagacagctacactttttttctggaactttacccctgtggccaaagaactgctcccctgactcccacaggggccactgcttgcccctacatggagagccagagtgctgaactgcctgacccagcccccatctggctttgcccctccacctgccctcgtagcaaatcataaaggacagaaactttcaggagctttatggttctgcccagcacctgagaaactagagtacctaccctgggtaacataaggcaagcacaaatcctattgctactactgccactggtgctgttttgtaagcaccacatcctggccagaggccaactgacatagtccattacagaatctccaggtagaataacactgtgcccagaaaggagaaatcttgtgcatgaccccatctatcaccatggtctgcaccactctggctaaccag

SEQ ID NO: 917548 - DNA, 623 bp, Homo sapiens
attttatcagacattcaaagaattggtaccaatcctactgaaactattccagaagattgagagagaaggaatccttaaataattctatgaagcaagtaccaccctgatacccaaaccaggaaaggacataacaaaaaaagaaagctacagaccaatatccctgatgaacatagatgcaaaaatcctcagcaaaatgctaactaaccaaatctaacagcacatcaaaaagataatataccatgatcaagtgggtttcatcccagggakgcaggggtggtttaacatatgcaagtcaatgcatgtgatacatcatataaacagaaataaaaacaaaaaaagattatttcttcagatgcagaaaaagcatttgataaaattaagcatcactttattatcaaaaaccctcatcaaactaggcatagaaggaacttatcttaagttaataaaagccatatatggcaaacccacagttgacattatattgaatggggaaaaatcaaaagcattcccctgagaactgaaacaagatgaggatgcccactttcactattttgtttcaatacagtactggaaatcctagccagagaaatcaggcaagagaaataaataaagggcattcaaat

SEQ ID NO: 917549 - DNA, 623 bp, Homo sapiens
attttatcagacattcaaagaattggtaccaatcctactgaaactattccagaagattgagagagaaggaatccttaaataattctatgaagcaagtaccaccctgatacccaaaccaggaaaggacataacaaaaaaagaaagctacagaccaatatccctgatgaacatagatgcaaaaatcctcagcaaaatgctaactaaccaaatctaacagcacatcaaaaagataatataccatgatcaagtgggtttcatcccagggaggcagggrtggtttaacatatgcaagtcaatgcatgtgatacatcatataaacagaaataaaaacaaaaaaagattatttcttcagatgcagaaaaagcatttgataaaattaagcatcactttattatcaaaaaccctcatcaaactaggcatagaaggaacttatcttaagttaataaaagccatatatggcaaacccacagttgacattatattgaatggggaaaaatcaaaagcattcccctgagaactgaaacaagatgaggatgcccactttcactattttgtttcaatacagtactggaaatcctagccagagaaatcaggcaagagaaataaataaagggcattcaaat

SEQ ID NO: 917550 - DNA, 671 bp, Homo sapiens
tctcacgttccaggagttcccaaataggaccaagaaaaccagaccaggcacactggggccctcaactttgacgcagagagatttctcctagtcataccacgcaaaacgagtggcatcagaaagacccccccagacggtgtcactccagggaaatttttgtcccaagtgttgagatcaaacaaaaccatcatgcccaaaactctttaaattcttctcagcactgagaagaaaaaaactacttttaaatcctcacaattgaatgcatcaacgggccacttagttctcatgagtcaggctgctcgaagagcgagcaggaaaaacaaagctgcaagggtgcctcagcaccaaagttagtccacgtttcctccaaagacatgaccatggccatatacttctgagtaactatgcagattgtttttgagacatgcaggataaaaacaagacctggttctcttgtgggtatctttgaagtccccaactttccaaagatcttctatagcaatgggtcccaaatacgcctccgccaagggktctccctgtttccctaaactatttcccaacacaccttgcatctcccaaaccaaataccagcataggtaagtcaaactgtagcccaagaaaccgagatagacagaaggagcaaaatcctaggagcaaacattttgggggag

SEQ ID NO: 917551 - DNA, 730 bp, Homo sapiens
ggtggatggatgggtgaataagtaggtggatgggtagatggatggacaaatgaatgaaaggatggatgggtgggtgcgtaggtgaaaggatggatgcataggtgaatgaatggatggatggatgatagataagtggatagattgatggatagaagggtgggtgggtggatggatggatgaatggatgtagagattagtagctgaatagatggataagtaggagggtagaatggatgaatggatggatggatgatagataagtggatagattgatggatggatagacgaatggatgaatggatggatggatagacgggtgagtgggcgggtggatggaaaaatgggtatatgaatgggtgggtgggtgsatgaatggatgaacggatatagagattagtagttgaatagatggatgagtgagagggtaggatgcatggatggatggatggatggatggatggatggatggatgatggatgggtggatggatggatggtggaaggaaagagggagtatagttcagtgggtgactacgtggcaaacagcccatcctggtgaagtatccctctccactcctcccaaatcattccaaccaccctctaccttcttcatcgcaatcctgtcccagacatgtccctataacttaatatcaagaaatgactgcgagaaaaaaaataataggaagataagaacaaagcttcaaatataaggagcctaccagacaagaaaa

SEQ ID NO: 917552 - DNA, 739 bp, Homo sapiens
ccatgaagaaaagccacagactgggagaaaatatttgtaacacagagaaggtgcttgtatccagaatagataaagaaacttttacaactcaataataaaaaggcaaacacaaggtaataaaaaaaaattgggcaaaagatttgaacagaaagtttcaccaaagaagacaaacggatagataaagaaacttttacaactcaataataaaaaggcaaacacaaggtaataaaaaaaaattgggcaaaagatttgaacagaaagtttcaccaaagaagacatacggatagcaaataagcacatgaaaagatactcaatatcattagagaaatacaaattataacctcaatgagatagcacacaccagaatggctaaagtttaaaagacagacaaaaccaaatgttagcaaagatgtgagaagaaactagaactctcatacattggtgttgggaatgcaaatggtgcaaccactttgaaaaacagcttggcattgtctgaagaagtgaaatgtatacctctwatgtaactcacccatttcagaaagatgtttaactatatgacaaattttgatttcgattttcatatggtgtacgtccataaagtttttgtccacacaaagacttgtacacaaatgttcatagtagttttattcgtagtaaccaaaaactgaaaacagctcaaatgtgtatcaacagatgaatggatagactgtggtatgtccatacagtgaaatactactca

SEQ ID NO: 917553 - DNA, 677 bp, Homo sapiens
gtgtaattctgccaacaatttggatgagcctggaaatggactattccccagatgagtctccagatgagaacacagcccaccaacatcctgattgtcatcttgtgagtcccagagcagggaacccgaatatgtcaggcctggattcccaaaacacagaaactaggagatgataaatggatgttgcttcaagccactatgtttgcaggmatttgtgatgtagtaatagaaaactatgctgagtgcactggctcacacctgtaatttcagcactttgggaggccaaggcaggcagatcacttgaggtcaggggttcaagaccagtctggccaacatggtgaaaccctgtctctattaaaaatacaaaaattaaccaggcttgatggcacacacctgtagttccagctactcaggaagctgaggcaggagaatcgcttgaacctgagaaaccgaggttacagtgagccgagatcgtaccactggactccagcctgggcaacagagctagctagactctgtctcaaaaacaaaaaacaaaaaacaaaaaaaaaaaacaacaaaaaaacgaatacagcacatttttaaagtaagaaaaagaagtgagattattttatcagcattttaaaagtatacccaaagtattatttcaacatgcaatcaatatacaaaattttaacttt

SEQ ID NO: 917554 - DNA, 663 bp, Homo sapiens
acaatgctgggtgcagtgcccggagccagccgagggttctcttgacacgtgtgcctgcccttttccatgggcttctcaaaaagtctgggacaaggccgggcccagtggctcatgcctgtaatcccagcactttgggaggccaaggcaggcggatcatcaggagttcaagaccagcctggccagcatggtgaaaccccatctctactaaaaatacaaaaaattagctggacatggtggcgtacacctataatcccagctatttgrgaggctgaggcaggagaatcgctagaacctgggaggcggaggttgcagtgagccgagatcgcgccgctgcactccagcctgggcagcagcgagactccgtctcaaaaaaaataaaaataaaaaaggaaaacaaaagtctgggacaggcaggagaaacaggccctgactcactaggaaggttctgtgatcgagcccttccatttgggcttgggcatctggcggtgggcctcctgtgtagttcaggggctgcgagggattcaaacaagagtgagctgaagcaagaagtgagacgaacactctgaggcttgggactacttgagccattgtgggccattttggctgaggacacatgtgcctcctgtttacctctgtgtcttgggttctgggctcagtgttagt

SEQ ID NO: 917555 - DNA, 663 bp, Homo sapiens
acaatgctgggtgcagtgcccggagccagccgagggttctcttgacacgtgtgcctgcccttttccatgggcttctcaaaaagtctgggacaaggccgggcccagtggctcatgcctgtaatcccagcactttgggaggccaaggcaggcggatcatcaggagttcaagaccagcctggccagcatggtgaaaccccatctctactaaaaatacaaaaaattagctggacatggtggcgtacacctataatcccagctatttgggaggctgaggcaggagaatcgctagaacctgggaggcggaggttgcagtgagccgagatcgcgccgctgcrctccagcctgggcagcagcgagactccgtctcaaaaaaaataaaaataaaaaaggaaaacaaaagtctgggacaggcaggagaaacaggccctgactcactaggaaggttctgtgatcgagcccttccatttgggcttgggcatctggcggtgggcctcctgtgtagttcaggggctgcgagggattcaaacaagagtgagctgaagcaagaagtgagacgaacactctgaggcttgggactacttgagccattgtgggccattttggctgaggacacatgtgcctcctgtttacctctgtgtcttgggttctgggctcagtgttagt

SEQ ID NO: 917556 - DNA, 663 bp, Homo sapiens
acaatgctgggtgcagtgcccggagccagccgagggttctcttgacacgtgtgcctgcccttttccatgggcttctcaaaaagtctgggacaaggccgggcccagtggctcatgcctgtaatcccagcactttgggaggccaaggcaggcggatcatcaggagttcaagaccagcctggccagcatggtgaaaccccatctctactaaaaatacaaaaaattagctggacatggtggcgtacacctataatcccagctatttgggaggctgaggcaggagaatcgctagaacctgggaggcggaggttgcagtgagccgagatcgcgccgctgcactccagcctgggcagcagygagactccgtctcaaaaaaaataaaaataaaaaaggaaaacaaaagtctgggacaggcaggagaaacaggccctgactcactaggaaggttctgtgatcgagcccttccatttgggcttgggcatctggcggtgggcctcctgtgtagttcaggggctgcgagggattcaaacaagagtgagctgaagcaagaagtgagacgaacactctgaggcttgggactacttgagccattgtgggccattttggctgaggacacatgtgcctcctgtttacctctgtgtcttgggttctgggctcagtgttagt

SEQ ID NO: 917557 - DNA, 792 bp, Homo sapiens
taccgcaggtcaagcccagcaggaaagtgagaactgctcttttctttatttctttctgtctttttttttttttttgagacagagtctgactctgtcatccaggctggattgcagttttgcgatctcggctcactgcaacttctgcctcctgggttcaggcgattcttgtgcctcagcctcccaagtagctgggactacagttgcacaccaccacacctggctaatttttgtatttttagtagagatagggtttcaccatgttggccaggctggttcgaactcctgacctcaagtgattcacccgcctcagcctcccaaagtgctgggattataggcatgagccatcgcacccagcctagaacttctcttctcttctcttttttctcttttcttttctttctttctttctttctttctttctttctttttttttttttttttttttttttgacagagtcttgctctctcacctaggctagagtggctrgagtgcagtggtgcaatcttggctcactgcaacctctgtctcccaggttcaagtgattgtcctgcctttgctcccaagtagctgggactacaggcatgcgccactatatccagctaatttttttttcctcttgtatttttagtagagatgggccaggctggtcttaagctcctgacttcaagtgatccacctgcctcagcctccctaagtgttgggattacaggcgtgagccactgtgcccagccgaactttccttttctttccatttcttggtatttggaaagtgaatagccatggagcagcca

SEQ ID NO: 917558 - DNA, 650 bp, Homo sapiens
aactgcacacagatttaatcaccaggccccgcccattcgcactggcagtgagaggcacacccctgaacctttggggttgttcactgaggacaaacgcggcagcatttagaaagtattcctcgtcccggcagtagacaaaagccacaggatttatggaaagaggaaggaaggcacagaactggggcaaggttctggttttgttctgttattttgttgtcattgttactgtttgtttttctttttttgagacagagkctcgcacttgtcccccaggcaggagtgcaatggcgcactcttggctcactgcaacctccacctcccagcttcaagcgattctcctgcctcagcctctcgagtagctgggactacaggcgcctgccaccacatctggctaatttttgtatttttagtagagatggggtttcaccatgttggccaggctggtcttgaactcctaaccttaggtgatccgcccgcctcggtctccaaaactgttgagattacaggtgtgaaccactgcgcccagccttgtactgtgtttttaaagcaggtttgttcatgcttgttagctgcaagaaaggaaactggaaggagttgagggagggagaaaagcgaatagagggacaccctggagtggaagcctccctact

SEQ ID NO: 917559 - DNA, 650 bp, Homo sapiens
aactgcacacagatttaatcaccaggccccgcccattcgcactggcagtgagaggcacacccctgaacctttggggttgttcactgaggacaaacgcggcagcatttagaaagtattcctcgtcccggcagtagacaaaagccacaggatttatggaaagaggaaggaaggcacagaactggggcaaggttctggttttgttctgttattttgttgtcattgttactgtttgtttttctttttttgagacagagtctcgcacttgtcccccaggcaggagtgcaatggcgcactcttggctcactgcaacctccacctcccagcttcaagcgattctcctgcctcagcctctcgagtagctgggactacaggcgcctgccaccacatctggctaatttttgtatttttagtagagatggggtttcaccatgttggccaggctggtcttgaactcctaaccttaggtgatccgccygcctcggtctccaaaactgttgagattacaggtgtgaaccactgcgcccagccttgtactgtgtttttaaagcaggtttgttcatgcttgttagctgcaagaaaggaaactggaaggagttgagggagggagaaaagcgaatagagggacaccctggagtggaagcctccctact

SEQ ID NO: 917560 - DNA, 565 bp, Homo sapiens
agggaggcgggaggcgggaggcgggaggcgcgaggcgggaggctgggcgagaggagccggcggggcgggggcctgggccgtcacgtgggtgcgccgcgcaggcgccgggcgggccagacgtaggcccgggggttcccggcctggccgggtagcagcgcgggggcggccctggggcggggagacagggggcggctccactccggcgctctgcggaggacagcagcgatcgccaaggctcagtgagtccccgcactagcgcggcacctggcacttggcggggccgaaccaacgaatgagcgaatttgccgagagtcgccccgtctgaatccattgactctttccttgcctcggtcctrccctcattcctcgactcacttcctcctgcccttcctcactatctccctccccgctcatatcctccctctcctttcctcattcccttcttcactctcttctctcctctcttactccccccctctcattccctccctccttcactctctcattccttcccttcctatcttacccaccattcccttcctccctcactcattcactccctccc

SEQ ID NO: 917561 - DNA, 781 bp, Homo sapiens
tgaacttcactgatctcactctctgtggtgttggaaagtcactgggatgtgtaagaggagaaggagcagcccagatgatctggcccagatgcgctggcagactccgcatgttctgctttcagggacagtggcctggctggtgcacacagtcctgtggggctcatgaggtcatgggaagcagccgagcaggaggctcagggccccatgactgctacagaagttctccgctgggcactggggtcagctggactggcttccagctggccgtggacagcctcagtttcctcatctaggtaacagagacactgcctcaccagagtgggctgcaaagggaggcagtgtcaagtcttggcaccactccagccccgccgtgggttcctgtagtgttctattatttgtttgctcagggctgagctgagactctggacctgggaaaaaggaaagccagagtaggcccagggtccccaaccccagagtgcttcagccttgggggcagctccctaaggccccaggttgaccctggagctactctgcaccctctgcccccaggtctcttgtggggtcagcgctgccaagagtagaaacacttcccccagtagyggggagtactaggagctccgtggggattaaggcttgggcaaatgcctacagaactgacctacccatggaaatatgtggttatataaaactatgtttactttcgtttttttgtttgtgttttcatatagataacaagaaatctcaagcttccgtcagtggtaagagttttcccttttgagtt

SEQ ID NO: 917562 - DNA, 797 bp, Homo sapiens
tgccggctcaagttccttgtcacgttctactcttgtgtacttggtgcattttttttttaatcatgagcttatacttgataataaattgtttttaaatgtatgagtttagaatgctcacatgagttgccttgtcatcccacttcagagactttgtcttaaaccagttctttgtcagaagttcagtggtgaagcttgatatcctgcccacgccctccccagtctggccttggcccccacatcctgtttttagcttccaaggggactggtcttctgtgtggcactagttgaaagttacagtgggggctgggcacggtggctcacgcctgtaatcccagcactttgggaggctgaggcgggcggatcacgaggtcaggagatcgagaccatcctggctaacacggtgagaccccgtctctactaaaaatacaaaaaattagccgggygtagtggtgggtgcctgtagtcccagctactcgggagactaaggcaggagaatggcatgaacctgggaggcggagcttgcagggggcgagatcgtgccactgcactccagcctgggcaacagagcgagactctgtctcaaaagaaaaaagaaaaagttacagtggattctctacttcaggatcttgttaccacctttgtcagaggccaactctccctgcccttcaccacttgcctccctggtctccctgaaactagtagtgttgtctgatgggcatttgataccccttcctgacacctttcccaaagactactgcatgattaaggccctttcagatcttcatctagtgccacca

SEQ ID NO: 917563 - DNA, 801 bp, Homo sapiens
aaactatgctcataatagatggtggtgaggggcatctggggtaaaacacaggaatgtataggttaagtatatgacaaatgtgtaggaaatagaaccagagctgttgttttataaaatgaagagaggaagtagcttgtactcttaatatagtgctattgtcattattacrtcatataactctacaatattgatttatttattgtttctcaatttgtgaaatttcacaacaaattttcagcagcaatgagctaaagatgaaagtgaatatttcatgataattaaatattgaatttttattttccaagaaactagatgacaaaaagtaatttgcacaaaatgtttgtcatttcctatccaccatgagatctctactgtatcactaatatatgaaaaccagaagacacagatcatctaaagaagcatcagccatctacctcaaaaatttattattttgagactgtgccagaaaaaaaaatttgtgtgtgcagtcatagaaaatgtgtctacatatcaacctgtgaagcataactttcatgtacatcaaaagacaattttttaaattaaatacattcagtttcaattcccaggtttcttgtgaacataagaaaatgaagcaataggttttaatgcatccactgttagcaaaagaaaaacactgtaagcagttaattaatgctgtttctttatcagtatcattaagtgcttcaaatagaaatcagttaaactcatatcaataatcattcaaatatttttcatctaattattggaatcaaagagaagtttttagttcacttcgcaaaa

SEQ ID NO: 917564 - DNA, 628 bp, Homo sapiens
aaacctaattatgctgggtaaaacgtaataaaaatatttgtttttttaaattgtagtaacatgtacacaacataaaattaaccattcttaagtgtgcagttcagtgctattaaatacattcatattagcatgaaaccatgaccactgttcagctccagaacttttccagcttccaaagcagaaacttcacacccaataaacaaaaacttccacctctttcctctccctagcccctgacaacaccattcaactttctgtctctatgaattgaattactctaatacttcacataattgaaaccatttgttcttttgtgactggcttgtttcacttagcatgttttgaaggtttatctatgttatagcatgtgtcataatttcyttccttttaaagactgaataatattccaacgtatgtacatgtcacctttagtctatccattcatccactgatggacacttggattgctttcaccttttggctattgtgaataatgcttctataaacatttgtgaacaaatatctactcaaatccctgttttcaattcttttgggtatatactgtgataatgtgttctttcattgctataaagaaagaacctgaggctggataatttgtaaagaaaga

SEQ ID NO: 917565 - DNA, 633 bp, Homo sapiens
ccactacagatagaggggtgggggtgaggcagcacaggaggcagagaggcgaggtgcccaggcagcccgaagcagggatgtgctggacgctgcccagcaggatggttccagaccgagctggaggggagttcggccggccagagcaagctgaggagctctggacggccagccccggaacccagagggctgttaggtggccaggctgtggaagaggaggggctctggcgataccttttctgttgccataggaagtctcttagacaaaatgamagctccctcaacctgtcatctcaatatctgtttctgtgagagtatttggtttttcagaaatgtatgggccagaaaaattctctcattcaacaggcatttattgagtgcctcctacgttccaggcactatgccaaagctaagtaaaacccaagagggcttttctttgaccaggatctgagtcaggactacagcatgtaagctttctattacatgtcttctaaatcaagtgaaaccagaaagaccaaaacatgcttaagagtaaagatcagacttctcgttctttgaaaacatctaacaccttagagttaatttgggcccgctcgttttccattagacaagtttcttgttcagacatttggggat

SEQ ID NO: 917566 - DNA, 485 bp, Homo sapiens
cactgttctaagtattggtggcacagcagggagcaggacatagccctgctctagcagcatcatacacatttaggagggtcagacaacaaacaaataaaacaactataaattgtggtaagtgccttcagtgcaagtagtagaagcaaaacaacccagtgttaagatgctaaagtcaggctacctggktttaagttctgcttctactgctacctgccattgggcaagttaattaatctttctaggagtcagttttcctttctatagattggaagtgatcatcaaacctactgaataggattgattgaagatttattctttccaaaaatatttattgagcaccactatgtgccaggcaccatgccaggcactaaggattaatagtgaaggtgacagacaaggttctgccctccaggaacatacatgatagcagaggaagagtcactggacaagcaaaggccatgtcggatgtgataagggctagggac

SEQ ID NO: 917567 - DNA, 651 bp, Homo sapiens
tgagccttggctttcagctccatcagctcctttaaggacttctctgcattggttattctagttatccattcgtctaattttttttttcaaagtttttaacttctttgccattggtttgaatttcctcctgtagctcagagtagtttgatcgtctgaagccttcttctctcakctcgtcaaagtcattttccgtccagctttgttccgttgctggtgaggagctgtgttcctttggaggaggaggggtgctctgctttttagagtttccagtttttctgctcttttttttccccatctctgtggttttatctacttttggtctttgatgatggtgatgtacagaagggtttttggtgtggatgtcctttctgtttgttagttttccttctaacagacaggatcctcagcttcaggtctgttggagtttgctagaggtcaacttcagaccctgtttgcctgggtatcagcgtggtggctgtagaacagcggatcttggtgaaccgcaaatgctgctgcctgatcattcctctggaagttttgtctcagaggagtacccggctgtgtgaagtgtcagtctgcccttactggggggttcctcccagttaggctgctcaggggtcaaggacccacttgaggaggcagtctgcccat

SEQ ID NO: 917568 - DNA, 611 bp, Homo sapiens
aggaaaataaagtagtattggattacaacccaaattataaaataaatatccatgagtccaaactgatataaatgaatgataaaatataaaaaatacatggggaaggagaaaagtgtcctgtaaagaagaatttcaaataattcacataggagccccactcctcaagtgcrgaccattcgtatgatttctttctaaagcgtgcagtatggagagttgagagagggtttgagaaaatagtaacttcagacagtgaagaaacttggcaaagacgacctcagccaaatgagaaaggttaatgtgaacagtaataagttatgttaattgtatgaatcctccaaatgatgtgatacaaatggcactttacctctgtgacctttctccgaaatactcataatcccagtataatcatgacaaaaacatcagacaacttccaattaagggacattctagaaaatacctgaccagtgctcctcaaactgttaaggtcatcaaaaacaagaaaggctgagaaactatctcagccaagagaagcctagagagacataattaaatgtaatgttgtattctgaatagaattctagaacaactaaaaaaggacactgggcaaaagg

SEQ ID NO: 917569 - DNA, 590 bp, Homo sapiens
gcaagccagggccaaggagagtctgagcttagacacgcctaaccctgcccccatctgatgacctttcactaccttccctggtagggaagacaaaggacatactctcttgagagctgtatggctccacccactgcctgactctagggcaagcttgtatcctccctatacaaccacagttgatgcactcttgaaagtgccacctcctggctggaggccaacgaacacaaaaccggtgsactaaacaaaaacacaagcaaggaccctcactgagtccacttcattcccctgctacctccactggagtaggtgctggtatccatggctgagaagcctgaagatggatcacatcacaggactccgtgcagacactccccagtaccaacctggagcccagtagctctgctgggtggctaaatcaagaagagcaataacaatcactgcagtctggctctcaggaagccccattcctaggggaagggggagagcctcacatcaagggagcacctatgggacaaaagaacctgaacagcagatctgagtcctagatcctccctctgacatagtctaaccaaatgagaaggaaccagaca

SEQ ID NO: 917570 - DNA, 626 bp, Homo sapiens
tctccctttcttggcactgtatgagatacaaagctcatccacaaacttctctgctgcttgcagggctgtttgcttctcagtggtagtcaaagtttgattcaaaagtaacataacatccttccaggagagttcaaatacttggtttaaattctggaaagcctctgtatacccttcagggtcatctgaaaacttaccaagatcccccctaatttgtcttaagtcctgtagaaaaaagacatgagtaaacacgtctataccttaatggggccatattcacaaggcatctcttgtagggccatgagtgaggctgggayctgcctgaaacgaggattcctaggagaggacaagcttgagagagaacctggatagggaggacatgatggaccaggagtaggactggaggggtctgatccccctgctggaggcacctctggggtttacttccctggaatttacttccctggggtttacttccctgggactgtcctttgcagcctctcctgagatgactgctaggcaggctggatctatcctacaatatcagcaaaggtccagattatcctgcaaggcaaagaaaacctgcatgtatgagacctcagaccatttgcctccatgtttacagaaac

SEQ ID NO: 917571 - DNA, 626 bp, Homo sapiens
tctccctttcttggcactgtatgagatacaaagctcatccacaaacttctctgctgcttgcagggctgtttgcttctcagtggtagtcaaagtttgattcaaaagtaacataacatccttccaggagagttcaaatacttggtttaaattctggaaagcctctgtatacccttcagggtcatctgaaaacttaccaagatcccccctaatttgtcttaagtcctgtagaaaaaagacatgagtaaacacgtctataccttaatggggccatattcacaaggcatctcttgtagggccatgagtgaggctgggacctgcctgaaacgaggattcctaggagaggacaagcttgagagagaacctggatagggaggacatgatggaccaggagtaggactggaggggtctgatccccctgctggaggcacctctggggtttacttccctggartttacttccctggggtttacttccctgggactgtcctttgcagcctctcctgagatgactgctaggcaggctggatctatcctacaatatcagcaaaggtccagattatcctgcaaggcaaagaaaacctgcatgtatgagacctcagaccatttgcctccatgtttacagaaac

SEQ ID NO: 917572 - DNA, 719 bp, Homo sapiens
gttcacctttttttacatttagtgcttctctatggtcagtagaaggaatcgtctgaatatgttcacctcttagaaatcatcagtataggtggagccaagatggcagaataggaacagctcccgtctacagctcccagcgtgagggacacagaagacgggtgatttctgcatttccatctgaggtaccgggttcatctcactagggagtgccagatagtggatgcaggacagtgggtgcagcgcaccatgcacgaactgaagcagggtgaggcactgcctctcaggaagtgcaaggggtcagggagttccctttcctagtcaaagaaaggggtgacagacggcacctggaaaatcgggtcactcccaccctaatactgcgcttttccaacaggcttaaaaaatggcacaccaggagattaaatccygcacctggctcggagggtcctatgcccatggagtctccctgattgccagcccagcagtctgagatcaaactgcaaggcggcagcaaggctgggggaggggcacctgccattgcccaggcttgcttaggtaaacagagcagccaggaagctggaactgggtggagcccaccacagctcaaggaggcctgcctgcctctgtaggctccacctctgggggcagggcacagacaaacaaaaagacagcagtaaactctgcacacttaaatatccctgtctgacaactttgaagagagt

SEQ ID NO: 917573 - DNA, 719 bp, Homo sapiens
gttcacctttttttacatttagtgcttctctatggtcagtagaaggaatcgtctgaatatgttcacctcttagaaatcatcagtataggtggagccaagatggcagaataggaacagctcccgtctacagctcccagcgtgagggacacagaagacgggtgatttctgcatttccatctgaggtaccgggttcatctcactagggagtgccagatagtggatgcaggacagtgggtgcagcgcaccatgcacgaactgaagcagggtgaggcactgcctctcaggaagtgcaaggggtcagggagttccctttcctagtcaaagaaaggggtgacagacggcacctggaaaatcgggtcactcccaccctaatactgcgcttttccaacaggcttaaaaaatggcacaccaggagattaaatcctgcacctggctcggagggtcctatgcccatggagtctccctgattgccagcccagcagtctgagatcaaactgcaaggcggcagcaaggctgggggaggggcacctgccattgcccaggcttgcttaggtaaacaragcagccaggaagctggaactgggtggagcccaccacagctcaaggaggcctgcctgcctctgtaggctccacctctgggggcagggcacagacaaacaaaaagacagcagtaaactctgcacacttaaatatccctgtctgacaactttgaagagagt

SEQ ID NO: 917574 - DNA, 797 bp, Homo sapiens
ggtctggttttgttttctgttataatagggcagcactgagttcagtgcttcatatttgctgcactctccctctcccaagtcaaagaaaggctctgtgtgccatgccaacactgccagatgatggggcaaggtgggaatctgtgatttaaawttttttttcctacctcttcagtgcctctttcagtgatatgaagtgaaaatcaggtactgtgagtactcacctgattttttattcttatgaagatgcattttctgtgtagatagttgttaaattggtgtccttgccgggggaataataagtggaaccttctatttcaccatctacctcccgcatattttttacccattttttgcaggttttcagagggaataatttaaactgacctattttccaagttttctgatttgtttttctgcctgcttaaaatttctactgttttaaatttcagttattgctccttttagtatcagaattttcatttgattcctttttataattttattttctttgctaatattcactgtttttatatcattcttctattttactttatctgtggtttcccttactctttgagcatatttagtatggttgattgtagtttttgtgtagtaagtccaatgtctacaatttctcaggggcagtcatttgtgcatagcctatactttctttttaatttgcatgcttcattttgtgtgtgtgtttgaagactgaacatattgagtattatagggggtatatctaaaagttagatccttctctttacccaggatgtgtttcgttgcttcatgtgtgc

SEQ ID NO: 917575 - DNA, 545 bp, Homo sapiens
atttctccccagaaaatgggtttttcttttctatcatatgctcaggctgcaaatttcccaaacttttatgtcctgcttcccttataaaactgaatgcctttaacagcaccaaagtcacctcttgaatgcttcgctgcttagaaatgttttccgycagatactctaaatcatctctctcaagttcaaagttccacaaatctctagggtaggggcaaaatgccgccagtctctttgctaaaatgtaacaagggtcaactttgctccagttctcaacaagttcctcatctccacatgagaccaccccagcctggattttattgtccatatcactatccccattttgagcagagccattcaacaagtctctaggaagttccaaactttcccacatttccctgtcttcttctgagcactttgaactgttccagtctctgcctgttactgatttccaaagtcacttccacattttctggtatcttttcagcaatgccccactttactggtagcaatttactgtattagttcattttcatgccactgataaa

SEQ ID NO: 917576 - DNA, 480 bp, Homo sapiens
cccattactattgtgtaggagtctaagtctctttgtaggtctctaaggacttcctttatgaatctgggtgctcctgtattaggttcatatatatttaggatagttagctcttcttgttgaattgatccctttaccattatgtaatagcctcccttgtctcttttgatctttgttcttttaaagtctsttttattagagactaggattgcaacccctgctcccctttgttttccatttgcttggcagatcttcctccatccccttattttgagcctatgtgtgtctctgcacatgagataggtctcctgaatacagcacactgatgggtcttgactctttatccaatctttatctttacctttacctttatgtttatctttatctttctctttgccagtctgtatcttttaattggagcattcagcccatttacatttaaggttaatattgttatgtgtgaatttgatcctgtcattacaa

SEQ ID NO: 917577 - DNA, 480 bp, Homo sapiens
cccattactattgtgtaggagtctaagtctctttgtaggtctctaaggacttcctttatgaatctgggtgctcctgtattaggttcatatatatttaggatagttagctcttcttgttgaattgatccctttaccattatgtaatagcctcccttgtctcttttgatctttgttcttttaaagtctgttttattrgagactaggattgcaacccctgctcccctttgttttccatttgcttggcagatcttcctccatccccttattttgagcctatgtgtgtctctgcacatgagataggtctcctgaatacagcacactgatgggtcttgactctttatccaatctttatctttacctttacctttatgtttatctttatctttctctttgccagtctgtatcttttaattggagcattcagcccatttacatttaaggttaatattgttatgtgtgaatttgatcctgtcattacaa

SEQ ID NO: 917578 - DNA, 607 bp, Homo sapiens
gctcattagttgatgcagtttcttcctagcatcaatggtcttcacaatttggcatgtttttgcagtggctggtaccagttgttcctttccatgtttagtgcttccttcaggagctcctgtaaggcaggccttgtagtgacaaaatctctcagcatttgcttgtctgtaaaggattttgtttctccttcccttatgaagcttagtttggctggttatgaaattctgagttgaagattcttttctttaagaatgttgaatattagcccccactctcttctggcttgtagagtttctgccgagggatccgctgttaggcttccctatttgggtaacccatcctttctctctcattgccctcaacattttttccttcatttctactttggtgaatctaacaattmtgtgtcttggagttgctcttctcaaggagtatctttgtggcgttctctgtatttcctgaatttgaatgttggcctgcttgctaatttggggaagttctcctggataatatcccgcagagtgttttccaacttggttccattctccccatcactttcagatataccaatcagatgtagatttagtcttttcacatagtcccatattt

SEQ ID NO: 917579 - DNA, 631 bp, Homo sapiens
tgaatagtattccattgtgtttatacaccacattttctttatccattaatatgttgatggatacttagattgattccatacttggctattgtgaatattgctacaaagaacataggagtacagatatctctttgacaaacttacttcaatttttggggggtaaataccccgaagtggaattgctggatcatatactaattctattttacttgatcgagtgtgctattgaagctttctattgaatttttcatttcagtcatcatgctttttatctatagaagttctatttgttttttaattattgcttcttctttgtcaaacttcttgctttattcatgctttcttttacaagttacagttaatatttgaaccgtatattcttatagcccactkaacttctttaaaaggattattctaattttttgtcagttatttcatagatctccatttaagatccattattagaactttatttagtttcttttagaggtggtatgagtccctgattcttcataagtcttgtgtcctttcactgttgtctgtgcatttgaggaaacagccacctcttccagcctttacaagtgttctctggcatgggcagaccttcactatctgttctagcctataattc

SEQ ID NO: 917580 - DNA, 622 bp, Homo sapiens
aatcttgctgtagactgaggtttgagaacttctactgtaagtcgatcactagagaatatcaacttcaaatttaaaagatattacagggtgagtatcccttatccaaaatgctaaggaccagaaatgtttcagattttggattttttcagattttgyagtatttatacatacataataagatatcttggggatgagacccatgtctaaacatgaaattcatttatgttttatacacatctaaacacatagcctgaaggtaattttatgaaatattttaaatattttttagcataagataaagtttggactgtgtctgactgcaacccatcacatgaggtcaggtgcagaattttccacatgtggcaatcaacgttggcactcaaaacgttttggattttggaagcattttaaatttcagattttttgattagggatgttcaacttgtattttaaattataaaaattgtggttgttatagacaatatttgtgtccctcataaaatgcatgtgttaaaatcctaactcctaatatgatggaaggaaggaaagtgaggtctttggtaggatggaggcctcatgaatgggattaatgctcttataaaagagaccctgggagccccct

SEQ ID NO: 917581 - DNA, 622 bp, Homo sapiens
aatcttgctgtagactgaggtttgagaacttctactgtaagtcgatcactagagaatatcaacttcaaatttaaaagatattacagggtgagtatcccttatccaaaatgctaaggaccagaaatgtttcagattttggattttttcagattttgtagtatttatacatacataataagatatcttggggatgagacccatgtctaaacatgaaattcatttatgttttatacacatctaaacacatagcctgaaggtaattttatgaaatattttaaatawtttttagcataagataaagtttggactgtgtctgactgcaacccatcacatgaggtcaggtgcagaattttccacatgtggcaatcaacgttggcactcaaaacgttttggattttggaagcattttaaatttcagattttttgattagggatgttcaacttgtattttaaattataaaaattgtggttgttatagacaatatttgtgtccctcataaaatgcatgtgttaaaatcctaactcctaatatgatggaaggaaggaaagtgaggtctttggtaggatggaggcctcatgaatgggattaatgctcttataaaagagaccctgggagccccct

SEQ ID NO: 917582 - DNA, 622 bp, Homo sapiens
ccctccactccaccaaaattgctatgatcaagtcaccagtttccatcacattactaaggctgttgttcagttcctcagcttattggatcaacagcattttacagagtttatcatttcatccatctgaaaataatgttttcacttggcttctaagaaatcacaacttcaggttttcctcctacatccctggacactctttcccattctccttgatggcttctcatcttcctgacctctaaatattgtagtactccagggccaagcccctgaacctattctatttttcataaactctctctcttttggtgacctcatgcagtaacacggttttgaatactatctatacactgggtatgccaaaatgtayacttcaggccaaaatcttttttctggaccctagaaaattcatatatccaactgcctactgaatatcttggatatcacacaaacaaatcaaacttaacatgttcaaaactgacctgctgagtattccctcaaacctgctcctcacacagtcttccccatctcagttaataaaacttcagctctcattctttccattgtgacctcaaccctcatgcctaattcctcttttgccttcatcctacattaactccatcaa

SEQ ID NO: 917583 - DNA, 622 bp, Homo sapiens
ccctccactccaccaaaattgctatgatcaagtcaccagtttccatcacattactaaggctgttgttcagttcctcagcttattggatcaacagcattttacagagtttatcatttcatccatctgaaaataatgttttcacttggcttctaagaaatcacaacttcaggttttcctcctacatccctggacactctttcccattctccttgatggcttctcatcttcctgacctctaaatattgtagtactccagggccaagcccctgaacctattctatttttcataaactctctctcttttggtgacctcatgcagtaacacggttttgaatactatctatacactgggtatgccaaaatgtacacttcaggccawaatcttttttctggaccctagaaaattcatatatccaactgcctactgaatatcttggatatcacacaaacaaatcaaacttaacatgttcaaaactgacctgctgagtattccctcaaacctgctcctcacacagtcttccccatctcagttaataaaacttcagctctcattctttccattgtgacctcaaccctcatgcctaattcctcttttgccttcatcctacattaactccatcaa

SEQ ID NO: 917584 - DNA, 613 bp, Homo sapiens
agacacgggactgctctctgtcctggcttttgtctcctgatgaatggctgcattttcataaatgattttaggtacagcttggtaaacacatacatccctaacagaaaatgagggctttacttttgcaggaaatactacagatggtgaaataaatgataagacagtgagagagcaacctgccaaaatagcaataaggaacctgtttctcaccgggaagttgcattatgtttttattgkttgttgttttgtttttcaagaagcagcatggtttagtgggaagcctgcttgacctccatcttttttttcccctttcttaagctgcccagttattgtatataaaataatcccagttgctgaaatgataacctacctgaaggtaattattttgattaccttcagtttctccatttgctttagttcctctttagttcccccaaaactcggggactatacttatgcatgactttgcagtttttcttaaggggtagttgtgtcacaaaatgctacaccattacaaagatttacatataagtcatctactttttttttaactgtaatcctttgtatcattatagttctcatagcaaacttttgctttctaaaatattctcga

SEQ ID NO: 917585 - DNA, 770 bp, Homo sapiens
ctgtggataaagttgtacagagccacaatgtaaacccagcctatttttccaaccacaactatcatgtaaaatattgggatgttggggcacagttagcatgcatctgtggcacattaaaaggagaagtgggtattggtagcaaaaaaaatactaaatcataatctcccaagtggaaaatcaataggcaacaccttagctgaaaactctaagtaagaagagcatattatatacaaataggaagttatttgtcaaaagaatcaactaaaagagtcaagaggggctccctctagggtgcaaaaattggaaaaggagaacagaaggctactggggctttgttttggcactctgacattttatgtatcggtaaaacctttttaaaatcaaaactaaataatattattttaaatcaratggaaatctgcgagatatagcaaatgttttgcatttaattttctatgctcactttgtacttcattgatatttaaaaattacctatattggtcttcagggacactcataccatagagaaagcatgtgggaagatatgcacgtaagtatatttgggatatgggcaagtgtgaattcgctggacctggtcctctttcctaccagtcatggaattttagagtaggaagtagtcatctgaaaagatcagctcatctaattcctttttttacatagataaagaacgtgaagcttggcttaagcaacctggccaagcgaagtatgttctttacttacttcccttgtgtaagaacaaatatgttttc

SEQ ID NO: 917586 - DNA, 751 bp, Homo sapiens
attctactgcagctgagctggtgctcaagccacatgacacagatctggccactcttctcttccttttccagaggcagaggagcttctccccatggctaccatcactactggcccatagggagtactgccactcttgtggcaaacttctctttatttttccctcctctctccttaagcagagtaaagtcagttttgttgctgtgaactgtgctgcctgaggttgggggaggggtggtgcaagcactccctcaatctctatggctggtgtctcactgtcacattccccccaagtacattggctctgagcccagcacagcctttggacttgcctaggaattgtagtcgtgtggcctacactgcatttcaagtttgtgtgtactccagcacacrttagcccatggtggtgaggcttgctgaaactgaggttccgactgctaggatttgctaggattggcaattcctctctggcgagggctggtttaaatgctccgtctgtgggcagggattggctgagttcggccagttttgctttctactctgacagggcagcactgagttgaatgcaaggtctcacaatcactgcactctctctccccataagcacacagatcctctctctgtgccatgcagttgctgccaggggatgggtgttaggaggtgttagatgtttaagactattttttctaccatcttcagtgcagcaacatgaagttaaagccagatactgtgagtgctcacctgatttttggtt

SEQ ID NO: 917587 - DNA, 559 bp, Homo sapiens
cagtatggaggttcctcaaaaaactaaaatagaaattccagcaagcccagtgctagatatatattttaaaaaaggaaactagtatattgaaggaatatctgcaatcccatgtttattgtagcactattcacaatagccatgatatggaatcaacttaacttttcatcaatgaatggaaagagaaaatgtggtatattagattggtgcaaaagtaattgctgtttttgccattayttttaataatagatacataatagaatactattcagccatgaaaaaatgaaatcctgtcatttgcaacgatatgaataaaactgaaggatattatgttaagtgaaataagccaagcacagaaagacagatattgtatattttcactcatacttggaactaaaaaaaatatattgtgtattccaaaataactagaggagtggatttggaatgttccaaacacaaagaaatgataaatccttgagctgatggatatcttaattattttgatcagatcattacacatcatacgattttatcaaaatatcacatatacttcataaataca

SEQ ID NO: 917588 - DNA, 559 bp, Homo sapiens
cagtatggaggttcctcaaaaaactaaaatagaaattccagcaagcccagtgctagatatatattttaaaaaaggaaactagtatattgaaggaatatctgcaatcccatgtttattgtagcactattcacaatagccatgatatggaatcaacttaacttttcatcaatgaatggaaagagaaaatgtggtatattagattggtgcaaaagtaattgctgtttttgccattatttttaataatagatacataatagaatactattcagccaygaaaaaatgaaatcctgtcatttgcaacgatatgaataaaactgaaggatattatgttaagtgaaataagccaagcacagaaagacagatattgtatattttcactcatacttggaactaaaaaaaatatattgtgtattccaaaataactagaggagtggatttggaatgttccaaacacaaagaaatgataaatccttgagctgatggatatcttaattattttgatcagatcattacacatcatacgattttatcaaaatatcacatatacttcataaataca

SEQ ID NO: 917589 - DNA, 741 bp, Homo sapiens
ggctagccaattattccagcaccatttgttgaatagggtcctttcctcactttatgtttttgtttgctttgtcaaggatcagttgacagtaagtatttgagtttatttcggggttctctattctgttccattggcctatgtgcctatttttataccagtgccatgctgtttgggtgactatggccttatagyataggttgaaatcagataatgtgatggctccagttttgttctttttgcttagtcttgccttggctatgggggctcttttttagttctgtatgaattttaggattgttttttctagttctgtgaatgatggtggtattttgataggaattgcactgaatttgtagattgcttttggcagtatggttgttttcacaatattgattctacccttccacgagtatgggatatgcttccatttgtttgtgtcatctatgatttctttcagcagtgttttgtaattttccttgttgaagtctttcacctccttggttaggtgtgttcctaagtatttttttttttttgcagttattgtaaaagtggttgagttcttgatttgattctcagcttagtcactgttggtgtatagcagagctactgatttgtgtacattaattttgtatcctgaaagtttgctgcattcatttttcagttctagtagctttttggaggagtctttagagttctcagcaaacagcaacaatttgacttcctttttacctatttgtatgc

SEQ ID NO: 917590 - DNA, 741 bp, Homo sapiens
ggctagccaattattccagcaccatttgttgaatagggtcctttcctcactttatgtttttgtttgctttgtcaaggatcagttgacagtaagtatttgagtttatttcggggttctctattctgttccattggcctatgtgcctatttttataccagtgccatgctgtttgggtgactatggccttatagcataggttgaaatcagataatgtgatggctccagttttgttctttttgcttagtcttgccttggctatgggggctcttttttrgttctgtatgaattttaggattgttttttctagttctgtgaatgatggtggtattttgataggaattgcactgaatttgtagattgcttttggcagtatggttgttttcacaatattgattctacccttccacgagtatgggatatgcttccatttgtttgtgtcatctatgatttctttcagcagtgttttgtaattttccttgttgaagtctttcacctccttggttaggtgtgttcctaagtatttttttttttttgcagttattgtaaaagtggttgagttcttgatttgattctcagcttagtcactgttggtgtatagcagagctactgatttgtgtacattaattttgtatcctgaaagtttgctgcattcatttttcagttctagtagctttttggaggagtctttagagttctcagcaaacagcaacaatttgacttcctttttacctatttgtatgc

SEQ ID NO: 917591 - DNA, 799 bp, Homo sapiens
ctgttggtgtatagcagagctactgatttgtgtacattaattttgtatcctgaaagtttgctgcattcatttttcagttctagtagctttttggaggagtctttagagttctcagcaaacagcaacaatttgacttcctttttacctatttgtatgccctttatttgtttttcttgtctgattgctctggctaggacttccagtactatgttgaagagaagtggtgaaagtgggcatccttgtcttgttcctgttctcagagggaatgctttcaactttttccctttaaatattatgttggctgtcggtttgtcatagatggcttttattacattaagatatgtcccttgcatgccaatttttttgagggttttaatcaaaaagggatgctggattttgtcaaatgctttttctgcatctattgagatgatcatgtgatttttgcttttaattctgtttatgtggtgtatcacatttattracttgcgtatgttaaacaatccccacatttattgacttgtgtatgttaaacaatccctgcatccctggtatgaaacccacttgatcatggtggattatctttttgatatgttgttggattcagttagctagtattttgttaaggatttttgcatctatgttcatcagggatattggtctgtatttttcttttttggttatgtcctttcctggttttggtattagggtgatactggcttcatagaatgatttagggaggattccctctttccccatcttgtggaatagtgtcaataggatcagtaccaattctttgaat

SEQ ID NO: 917592 - DNA, 645 bp, Homo sapiens
gcccaagtactatcatatgtcattgctaaaattacttcagtcaagaggatgaaaacattagaaggtttacctcctttcaatcctcagctcccatccattgttggctgacaggattattatgctgctgcttggtcagtgcattagcagaaattgttgctttcaggaagcacagcagtgaatataaaaacagagctacaagatagcagggccagtatgaacaatttatagttgaatagagagctctcaaagctggctttatggtcgtctcacaaatacattaatgatctcatctttgaggaaataatattccctgaatttctctttgcttccaaatctatattttttctttccaggagagagggtactgatcatagagaggggaaaaaaaattagcagcttgcatctaagcctctccccatacattggtaggctgcacatgatcttaagctgctatgcctgacttccaacarcagcaaacatttattgatctcatattgctagtcatgataagagtttcaaaggcaaattccttgaagaactcataatgtaactagagtcacataatgtacagagctccctctactatgatggaggtatgctgatttgtgatttcagaagagggagggagtgattgtgctcaaggag

SEQ ID NO: 917593 - DNA, 491 bp, Homo sapiens
ttaggagctgaagaccggccaggccaacacagcgaaaccccgtctccaccaaaaaaaatacgaaaaccagtcaggcgtggcagcgcgtgcctgcaatcgcaggcactcggcaggctgaggcaggagaatcaggcagggaggttgcagtgagccgagatggcagcagtacagtccagcttcggctgggcatgagagggagaccrtggaaacagagggagagggagacggtggggagacgggagagggagagggagagggagagctggatttcaaagcttcccaaattctctttcaattatgatctgggcccttgatttttcttattgctggtgaggcctggttacaaaggatttgtccgagaacatcaagctgagacttcttattgagttcgtttccttttaaaatacatatatgcagttgttctttccatagtcaaatggttaattttattttctctaaattggtaacaaagaaataattgtgaaaatata

SEQ ID NO: 917594 - DNA, 491 bp, Homo sapiens
ttaggagctgaagaccggccaggccaacacagcgaaaccccgtctccaccaaaaaaaatacgaaaaccagtcaggcgtggcagcgcgtgcctgcaatcgcaggcactcggcaggctgaggcaggagaatcaggcagggaggttgcagtgagccgagatggcagcagtacagtccagcttcggctgggcatgagagggagaccgtggaaacagagggagagggagacsgtggggagacgggagagggagagggagagggagagctggatttcaaagcttcccaaattctctttcaattatgatctgggcccttgatttttcttattgctggtgaggcctggttacaaaggatttgtccgagaacatcaagctgagacttcttattgagttcgtttccttttaaaatacatatatgcagttgttctttccatagtcaaatggttaattttattttctctaaattggtaacaaagaaataattgtgaaaatata

SEQ ID NO: 917595 - DNA, 463 bp, Homo sapiens
taattcaatttgattctgacactgtatacctggagatagcttcccatgataatctaaagacactagttgttttacctatgctgctgactgactataaatcagggttcccactgtcctctcctcgggttctattaatttattagagtggctcacagaaaactcaaggaaacacatctactsgtttactatataggatattacaaaggatacagatggagagatgcatagggcaaaacatgtgggaagggtgtggcacttctgtccactctctggggatgccattcccccggagcatttatgtgttcaactacctggaagctctccaaacacagtccttttggatttttagggaagctttattatgtaggaatgattcattaaacgtttggccattggtgatcaacttaaccttcagcttctcccccacttcctggagattgggcagtggggctgaaagtcccaa

SEQ ID NO: 917596 - DNA, 610 bp, Homo sapiens
cattctggcagttcctcaaagggttaaacataaacttaccatatgacctagtaattccacttctaggtaaatctaagagatataaaaacatttgtccattcaaaaacttctacattaatcttcatagtaacactattcttaatagccaaaaggttgagacaacctcagttttcattaacaatggataaataaaatgtagtatattcatacaataggataacattaatataagaaataaagtattgaagtatgctccaacatggattaatcttgaaaacattatgctaagtgaaaaaagtcagccacaaaggactacatattgtatgattccatttatctgaaacgtccattaaaggcaaatacatacaggcagaagttrgactggtggttgcccagggctggggatttcaggtgcaagaggaaacaactgctaatgaatatggagtttcttgttggggtgtcaagtacgttgtgaaattttttttgccacgatggttgtacaactcagtgaatatatattttaaaaaacactaagtagtaccctgtaagggaataaattgtatgttaagtaaaatatctcattaaaattgtgtcaaaattatagttctag

SEQ ID NO: 917597 - DNA, 591 bp, Homo sapiens
atttgcctaagtaactaggagccaaatgttaatcccaaagacaacagggaaaatgtctccaaagcatttcaaagctcttcacaagcccctcccatcacaggcctggaggtctaggaggaaaaagtggttatgtgggtcgggcccagggtcccagtgctatgcgcaggacttggtgccctacatcccagctactccagccatggctgaaaggggtacacctagagcttgggctatggtttcagaggattcaagccccaagccttggcagcttctatatggtgttgaccctgctggtacacagaagtgamgaattggggtttgggaacctccgcctacatttcagaggatgtatggaaacgagtggatgcccaggcagaagtttgcttcaggggcagggctctcatatagaacctctgctagggcagcatggaagggaaatgtgggtttggagtccccacagagagtccctactggggcactacctagtggagctgtgagaagagggacatcattctacagaacccagaattgtagattcactgacagcttgcactgtgagcctggaaaagccacagacactcaacacaagcc

SEQ ID NO: 917598 - DNA, 606 bp, Homo sapiens
gaggcaagagaaaaggaaactgaaggagaagaaaaagaagaacctccaagaaaattcgcagcaaagggtttagcagaagcttttgcagagcttaaaatctccttaaaaagtttgaaaacatgggccctaacactgaaagattttcatttatagagaggaatgttcatggtgcattatctgcttccaagcaaatctgtaatgaaaaccaggaacaaaccaaacaaaccatcatgaacatctttctgaagagtcacacctcctcaagaagatccccagccaggttctttaggaggtattccagagaagacattcttgtcatagaaggtgacagctctatgtgtgtttattgcttgtgaagactttccagtggtacaagaygtggagatagaaaacagagatattgattattctgtaggcctaggctaatacgggtgtttatgttctagtttttaacacaaaaatttcaaaaagtaaaaaacaattctaaggatataaaaaatatttctgtatagctgtataatgtgttttaagctatattattaaaaaagagtcaaaaagttggaaaaattaaaatgtttatgtagtaaaaaatttacaataagctaa

SEQ ID NO: 917599 - DNA, 606 bp, Homo sapiens
gaggcaagagaaaaggaaactgaaggagaagaaaaagaagaacctccaagaaaattcgcagcaaagggtttagcagaagcttttgcagagcttaaaatctccttaaaaagtttgaaaacatgggccctaacactgaaagattttcatttatagagaggaatgttcatggtgcattatctgcttccaagcaaatctgtaatgaaaaccaggaacaaaccaaacaaaccatcatgaacatctttctgaagagtcacacctcctcaagaagatccccagccaggttctttaggaggtattccagagaagacattcttgtcatagaaggtgacagctctatgtgtgtttattgcttgtgaagactttccagtggtacaagatgtggagatagaaaacagagatattgattattctgtaggcctaggctaataygggtgtttatgttctagtttttaacacaaaaatttcaaaaagtaaaaaacaattctaaggatataaaaaatatttctgtatagctgtataatgtgttttaagctatattattaaaaaagagtcaaaaagttggaaaaattaaaatgtttatgtagtaaaaaatttacaataagctaa

SEQ ID NO: 917600 - DNA, 638 bp, Homo sapiens
tctttaagtcccacaattaccattgttcctggcccagacttcaaactggcctcccacattattcctgataccacacctgacccccatgactgtatctctctgatccacctgatattcaccccatttccccatatttccttctttcctgttcctcaccctgatcacgcttgatttattgatggcagttctaccaggccttatcgccacacaccagcaaaggcaggctatgctatagtacaagccactagcccgcctctcagaacctctcatttcctttccatcgtggaaatctatcctcaaggaaataacttctcagtgttccatctgctattctactactcctcagggattattcaggccccctcccttccctacacatcaagctcgaggatttgctcccacccaggactggcaaattagctttactcaacatgtccggagtcagawaactaaaatacctcttagtctaggtagacactttcactggacaggtagagtcctttcctacagggtctgagaaggctaccgcagtcatttcttccgttctgtcagacataattcctccgtttagccttcccacctcaatacagtctgataacagaccagcctttattagtcaaatcagccaagcagttttt

SEQ ID NO: 917601 - DNA, 593 bp, Homo sapiens
tgtccctgcaaaggacatgaacccatcctttttatggctgcatagtattccacgatgtatatgtgccacattttcttaattcactctatcattgatggacatttgggttcgttccaagtctttgtcattgtgaacagtgatgcaataaacatatgtgtgcatgtgtctttatagtagcatgatttataaaccttttggtgtatacccagtaatgggatcactgggtcaaatggtatttctggttctagatccttgaggaatcaccatactctcttccacaatggttgaactagtttacagtcccaccaacagtgtaaaagtgttcctatttctccatatcctctccagcatctgttgtttcctgacatyttaatgatcactattctaactgccgtgagatgtggttttgtggattgtggttttgatttgcatttatctgatgaccagtgatgatgagcattttttcatgtgtctgttggtggcgtagatgtcttttttgagaagtgtctgttcatatcctttgcccactttttaatgagttttttttttctcgtaaatttgtttgagttctttgtagattctggatattagcc

SEQ ID NO: 917602 - DNA, 621 bp, Homo sapiens
ataaggaaaatgtggcacatatacaccgtggaatactatgcagccataaaaaggatgagttcatgtcctttgcaggggcatggatgaagctggaaaccatcattctaagcagactatcacaaggacagaaaaccaaacaccacatgttctcactcataggtgggagttaaagaataagagcacatggacacagggcagaaacactacacaccatggcctgtcagggggtagggtgctcggggagagataacattargagaaatacctaatgtgaatgacttgttgatgggtgcagcaaaccaacatggcacatgtatacctatgtaacaaatctgcatgttgtacacatgtaccctagaacttaaactataataataaaaaaaagagttgagaaatattacaaccaataccatggaaatacaaaacatcattaaagaccactatgattaccttcacatgcataaactagaaaacatagctgagatggataaattcctgaaaatatgcaacacccctagattaaaccagaaacaaatagcaactctcaacagacaaataacaagcaacaggattaaatggtaattaaaatgttaccaacaaatatagtccaagattagatgg

SEQ ID NO: 917603 - DNA, 590 bp, Homo sapiens
aactggaactctcatacattgatggtgagagtattaaattgatacaaccggctgggtacagtggctcacgcctgtaatcccagcactttgggatgccaaggcagacggatcacctgaggtcaggagttcaagactagcctgattaatatggtgaaaccccgtctctactaaaaaaaatacaaaaattggctgggcgtggtggggggcgcctatagtcccagctactcagcaggctgagacaggagaattgcttgaacctgggaggtggagcttgcagtgagctgagatcatgccacggcactcttgcctgggtgacagagcaagactccatctcaaaaaaataataataaataagtaaataaataaataaacaaattggtrcaaccactttagaaaagtgtttggcagcctctatgaaagctaaacacatacctagcctatgatctaacaattccactcttaggaacatagccaagagatatggatacatattctcaccaaaagacattaagaagagtgttcttataagttttttataagacttactcaaagccaggtgtggtggcatgtgtctgcagtcccagctactc

SEQ ID NO: 917604 - DNA, 590 bp, Homo sapiens
aactggaactctcatacattgatggtgagagtattaaattgatacaaccggctgggtacagtggctcacgcctgtaatcccagcactttgggatgccaaggcagacggatcacctgaggtcaggagttcaagactagcctgattaatatggtgaaaccccgtctctactaaaaaaaatacaaaaattggctgggcgtggtggggggcgcctatagtcccagctactcagcaggctgagacaggagaattgcttgaacctgggaggtggagcttgcagtgagctgagatcatgccacggcactcttgcctgggtgacagagcaagactccatctcaaaaaaataataataaataagtaaataaataaataaacaaattggtgcaaccactttagaaaastgtttggcagcctctatgaaagctaaacacatacctagcctatgatctaacaattccactcttaggaacatagccaagagatatggatacatattctcaccaaaagacattaagaagagtgttcttataagttttttataagacttactcaaagccaggtgtggtggcatgtgtctgcagtcccagctactc

SEQ ID NO: 917605 - DNA, 563 bp, Homo sapiens
acaggcatgcgctaccatgcccagctaatttttgtattttttgtagagacggggtttatgccatgttgcccaggttggccttgaactcctgagttgaagcaatctgttctcctcggtctcccaaagtgctaggactagagacatgagccactgcgcctggctctccagtttataatttttgaccttgtttgttcttgtttgtccttttttgagcaaaacatgggagatccttatttagtatagtgatcatttagtgatcatacaagttacaatattttaatcttatttatcatttgctcattgyttttatttttggtttattttactatatgtgttattattatttatagacaaaaatgtttattatttctttgaagccttatggcttcttatcttgcttaggaaattgcccctcatattccactaagcctgtacaaatcttacttggatttccttcaaacatttttattattccatttttaaatttaatctccttaattaacctgaaaattatttggtatatggtaatgactagaagtctaattttcttttcttactgaaga

SEQ ID NO: 917606 - DNA, 672 bp, Homo sapiens
tttggaaaatagtttggtattatcagtaaaaaacaaacatttgtgtattttatgaatcagaatttccactcctaggcataacacccccaaataaacaatgaatatgtacaccaaaagacatgcacaagaatactarcagtagtatcatttgttagaatcccaaatattcatcaacagtagaacagagaaagtattgtatgtttatacaatagttcatagcaattaaattgaataaactacagattttgcaacaatatgggttaagtacacaaacataatattgagataaagaaattggtcacaaaagagtacctattgtgtgagtccattaatgtagaattcaaaatattccaaactaatctctggtattagaaatcaggatattggttaccttttggggggttacaacaggaagcgatctggacaggcttctgggatactagctgcgctttatttctggaactagatgatgattacacaggtgtgctcatttagtgatgactgaactgtacagttattagccacttattggtatgtatgtgttccagttatctattgctttgcaacaaatcatctccattgcagtgacgtgaaacaagaacagtcatttatcatttttatgaatctgcaatttgggctgggcttagtagggacagtttgtctctgttcctt

SEQ ID NO: 917607 - DNA, 592 bp, Homo sapiens
ccccaaataaacaatgaatatgtacaccaaaagacatgcacaagaatactaacagtagtatcatttgttagaatcccaaatattcatcaacagtagaacagagaaagtattgtatgtttatacaatagttcatagcaattaaattgaataaactacagattttgcaacaatatgggttaagtacacaaacataatattgagataaagaaattggtcacaaaagagtacctattgtgtgagtccattaatgtagaattcaaaatattccaaactaatctctggtattagaaatcaggatattggttaccttttggggggttacaacaggaagcgatctggacaggcttctgggatactagctgcrctttatttctggaactagatgatgattacacaggtgtgctcatttagtgatgactgaactgtacagttattagccacttattggtatgtatgtgttccagttatctattgctttgcaacaaatcatctccattgcagtgacgtgaaacaagaacagtcatttatcatttttatgaatctgcaatttgggctgggcttagtagggacagtttgtctctgttccttgctt

SEQ ID NO: 917608 - DNA, 658 bp, Homo sapiens
tgtttgctccgcccttgagccccatgactacgtccactgcctgctgttcagatttgctcagcccttgagccccatggcccctcccactgctccgctccccccagtcccgccctcattcactgggctctctattcccctccctccctggcctggcagagctggacctgcagcggacgctgagtttgcaggcgccacctgtgaaggaggggccactcttcatccacaggaccaagggcaagggccccctcatgtcctcctccttcaagaagctctacttctccctcactaccgaggccctcagcttcgcgaagacgcccagctccaaggtgggtaaggagggaggccggcaagtggggctctgagaggccggcaagtgrggcacctgtccccttccttggagcccacttgaggtacccccggggtcagagaagaaagccaggtgtgtggcatctgtactgcttgtcagaacctaggagggccgggcacggtggctcacgcctgtaatcccaggactttgggaggccaaggcgggtggatcacttgaggttaggagtttgagaccagcctggccaacatggagaaaccccgtctctactaaaaatacaaaaaatcagccgggtgtggtggtgggtgcctgtagtcccagctactcgggagg

SEQ ID NO: 917609 - DNA, 650 bp, Homo sapiens
atttttcacctgatttattttctgatttcaacctccttgttttcattaaccttttccttaagtccacctcagccactcattcttcgattatacacaagactttgtttgccattaccagcaaccacaccactttggggatctcagatgtaagcatcttgctctcgcgctgcctcccatttttccttgcttactcctagcatttctcctgttaccaactccagcaacttggaccccactggaacctccagtataatttattctatcagttcccaatctttttgttctctctctcctctttccccagcttaacctccatggtctatcacatatatcctctttgtatacaccyttagcagccttgctcctcatcttctgttgtcaaatccacaagtgtttctcagctacctgcctactctgtgccagtattctcgctgttaagcatggcttaagaaaaacacaaaaccacagtgtctgatctcactttaaatttatgaaccaaatctcaagtgagccctcagtatttcttggaacagatattcctagtattccttctgtatttccctagtccaatccatttattctcctattctctgagatgactagttcttcttctctatttggctcaacccccaagcaccacctcttccatc

SEQ ID NO: 917610 - DNA, 827 bp, Homo sapiens
tgatgggcttccttttgtgggtaatccgacctttctctctggctgcccttaacattttttccttcatttcaactttggtgaatctgacaattatgtgtcttggagttgctcttctcgaggagtatctttgtggcattctctgtatttcctgaatttgaatgttggcctgccttgataggttggggaagttctcctggataatatcctgcagagtgttttccagcttggttccattctccctgtcactttcaggtacaccaatcagacgtagatttggtcttttcacatagtcccatatttctggaaggctttgttcatttctttttactttttttctctaaacttctcttctcacttcatttcattcatttgatcttcaatcactgatactcttccttccagytgatcaaatcagctactgaagcttgtgcatgcatcatgtagttcttgtgccatggttttcaactacatcacatcctttaaggacttctctacactttttattctagttagccattcgtctaatcttttttcaaggtttttagcttctttgtgatgggttcgaacttcctcctttagcttggagaagtttgatcatctgagccttctctcaactcatcaaagtcattctccatccagttttgttccattgctggcaaggatctgcgttcctttggaggggggaggcactctgatttttagagttttcagcttttctgctctgttttttccccatctttgtggttttatctacctttggtctttgatgacggtgacatgcagatggggttttagtatggatgtcctttctgttcgttagttttcct

SEQ ID NO: 917611 - DNA, 626 bp, Homo sapiens
cctcctgcttatatctcattagccacaatttagacacaagtaccctgagctgcaaaagaagtgcagttcaggataactgaacttggaaatgtaattttcattttaggtagctttatacccaaccacactttattattattgaagaaatggaggatggatattgtgtgcaactggactagactagttgcactgggacctggtgaggacagacacctctgctgagccctcagcatataaccatcccytgctttccatctgtccaggttccaacagtacttctgctcctttttttggcagtagtggatgtgtcctagtgcttggtttctctgcaggccttttagggagaaatagctgaatttgttacagtataacttactttttatgttgatctgtttccttccctaatgtaaataggtctaatgctagttgtactttcttttttttttttaactttctctcttttctgggccggacatgtgcttatctaacatttggttctagatttatctaatggggacttcagttgtgagagataagtcagtaggttttggtctgccaaaagcaaccattgtccaaaaaatcttggccgccctcacctttctgagttagataatcttaactggctt

SEQ ID NO: 917612 - DNA, 603 bp, Homo sapiens
catttatatgatgtcaagaacaggcaaaaccaatctagaggtacagaggtcagaatagtggtgccctgttctggtggggtggcaggagttactgcctatgagtgagacaggataattcccttcacccactttgtgrgagggaactggagtggctcatttatctcagcccactactggccactcctcacaagagggagcatgcaagcaagtgagggtgggaactggagcgaatgaatattggaactggccagttgctcctctatggcaggagcaggctctgtgcggccccacagcagcatccaagtatattacaaccagtgttctttcagctctgccacccagggacagcaaagtgccaactagctcactggagggtcagggtggtagcccctgccctcttggcacccgggatcttgtcgagagtccaggaacaatcaggtcacaggaacggattgaaaaggtaatgaatgtggaggattttactgggcaatggaagtggctctcagtgggatggggagttggaaaggggatggtgtgagaagaaagcgatcattccctgaaaccgggacatctccggctgggcctctctctaaagctgcacag

SEQ ID NO: 917613 - DNA, 739 bp, Homo sapiens
cacttcacatgtgatcactgttggtggtagtgctacaggttttagccataatcaaatagaatattgataaaatctattttggctgattcttataaggctgattctttccttatagaagaaaaattgcatggttatttctatcattaaatatgttgcattatcaagtatattcttttttttttttttttttttttttttttttgagacagagtcttactctgtcgcccaggctggagtgcagtggcatgatctcggctcacttcaacctctgcctcctgggttcaagtgattgtcctgtcttagcctcccgagtagctgggattacaggtgtgyaccaccatgcccagctaatttttgtatttttggtaaagacgggatttcgccatgttggccaggctggtcttgaactcctgagctcagatgatccacctgcctcggccccctaatgtgctgggattacaggcatgagctaccatggtcagcctcaaatatattttcttattatgaaaaaacttccatcttaactaggcattgatgagaatagaaacatttgctttcaaggtacatgtctgttgccttgaagaattctcctcagactagcctttggctcagtatgtttcaaaccttgtttctcctccactacccacagactttggtgccagagaccataggacatggtcatattgtgaaatgacctctgaatcccaggtaagtcagcacagtgctggtggaagtgaat

SEQ ID NO: 917614 - DNA, 626 bp, Homo sapiens
aactaggcattgatgagaatagaaacatttgctttcaaggtacatgtctgttgccttgaagaattctcctcagactagcctttggctcagtatgtttcaaaccttgtttctcctccactacccacagactttggtgccagagaccataggacatggtcatattgtgaaatgacctctgaatcccaggtaagtcagcacagtgctggtggaagtgaattcctggaggccatttctacacgggggtagccaggcataactatgttaaggggtttctcaatctgggcacttttggcatttggagccaggcaattctctactgcagggggctgtcctgtgtattgtaggatgtttaatggtatccctaggcttccatccactggatgtcagtagcaacatccctctcccccatattgtaacaacccaaaatgtctccaggcatcgatgagtgtcccctgggggataaaatcatccctaatcgagacccactgatrtatatgtaaccagtgaaccccatatagagcttataaaacccaaatgaactcaacatccccttagccagatctcaaaaatgcccatggtcactccattgccacctgacacgagaactgtgatgggtgaggtggaag

SEQ ID NO: 917615 - DNA, 616 bp, Homo sapiens
actattattgcaatcaaatttcaccttctgtgtattgcaatgaaatttcaccttctgtttattcaagtatcaattatttattattttcaacaacaatcaactagattaacattattttgtgaccatatcattacttcccctcaaagcgttgcatagcataagtgttcccagaattmtttatgcttacctaaagtgatcggatatttaaaagaaccaaggtatcattaacaaaaaattcagccttctaaattatttgcataataagctcccaaattaattctatcttgaagcaatggagacactttctgatcaattaaaaatcatacatgtttgccctctaaactgacagcaaagtagctgatatgctttggaaaattcctgtgccccaaaataacttcttctcttgttaccaaattatctgaaatctcactacttaatggattctttttggttaaccatggtattaaccctatgattttttaaagtttttaacatggtataatggaaattttcaaatgcatacagaattagagagaatggtataagggaccactatatactcatcacccagcttcattaaccatcaactcaaagccaacttctttcatctgtgctc

SEQ ID NO: 917616 - DNA, 589 bp, Homo sapiens
tatatacccttaaccttaatcacctccttaaaggtcctatctccaatacagttagatggtgggagttaaggcttcatcatatgaattctgagggacataactcagtctgtagcatggctgagtaatattccattgtatgaaggtatcacatctcacttatccattaatcaattgatgggcatttgaattgtttccactttttggctattatgaataatgctgctatgaatattcatgtacaaggttttgtgtactcatatgcttgcttttttttttttttttgagacagggtctggctctgtcacccaggctggagtgcagtggcacgacctcggctcactgcaagctccacctcccaggctcaagggattctcccacttcagcctcccaagtagctaggattacaggcacctgccaccacgccyggctaatttttgtatttttagtagtgacagggtttcactatgttggcccggcggtgttgaactcctgacctcaggtgatccgcccgccttggcctcccaaagtgctgggattacagatgtgagccactgtgtctggccggccttgttgaagacttcagagttga

SEQ ID NO: 917617 - DNA, 645 bp, Homo sapiens
catcttcccaatatttatgtgttggagggccccgggcctcattctttggcctcttctcatctgtgctcactcctgggtgatctcctccagtcccatggctttaggtcaagtgtacacgccgatggttcctgtaattctgtgtacagtccggtcttmcctactgagtgctcactcacagatccagtgctgcttcggcagggacagacgcatgtctaaaatatctaataagcctcttgaattcaacgtgcctaaaataggaactcttcattttgccctatttcatcctatcaaaattgcttcccccatgggcttctccatttccaaaactggtaccagttgttcaagtgagagagctgagagtatccctgattcttctctccacatcacatcagtctctcaataagttctactaggggaccctcagaatacatcctaaatctgacctcttctcacactcccatcaggactgccctagtcccagcccaggcccccttgtctctccctgatctccttaggtggcccttgcctgtctcccacttccacccttgccccactgggggctgttcgccagagtgatctcttacaaagagacatcaagcatgtcaatcccctgtcaaaactctccaatagctttccatcacaacc

SEQ ID NO: 917618 - DNA, 665 bp, Homo sapiens
ggactcaggcatctctgcactctcaagggcccaggaaggcccccctatgccgctgcaggctcagaagtgcttgttcccactgtctggtctctccccgctctctgcacccactttgatctcagagcaaagttgaggctgagcccrtgtgctgttgcaacatggccaggtgtgtgcaaactgggggcagcactgtcacaccagccccctgcctcctcgaccccctccagacttcgggcaccagtaagcatgacagcgaagctgaccggggcattgagggcagttcacgctggccttcaagcgtcccttagcacaaagtaatagttataggaggcagacagtctcccaggcagaaaagggcaggtccctggtgaagctctaccttcaggtcggggaaggcctgaagcctgggggtcgggctcccagtcccacagactggagtgggaatttatagtcctttatctgggcttctcatagccaccagatgaaccaatcagcatgcacttcctcccctctgaagcccataaaaccccgaacacaggagactggagagacgccatgacaacctgccagcagagaggagctacccactccagggtctcctctctgctgaaagctgaacactcctcaagacaccttggtggggcgaaagagctgtaacacaaaca

SEQ ID NO: 917619 - DNA, 665 bp, Homo sapiens
ggactcaggcatctctgcactctcaagggcccaggaaggcccccctatgccgctgcaggctcagaagtgcttgttcccactgtctggtctctccccgctctctgcacccactttgatctcagagcaaagttgaggctgagcccgtgtgctgttgcaacatggccaggtgtgtgcaaactgggggcagyactgtcacaccagccccctgcctcctcgaccccctccagacttcgggcaccagtaagcatgacagcgaagctgaccggggcattgagggcagttcacgctggccttcaagcgtcccttagcacaaagtaatagttataggaggcagacagtctcccaggcagaaaagggcaggtccctggtgaagctctaccttcaggtcggggaaggcctgaagcctgggggtcgggctcccagtcccacagactggagtgggaatttatagtcctttatctgggcttctcatagccaccagatgaaccaatcagcatgcacttcctcccctctgaagcccataaaaccccgaacacaggagactggagagacgccatgacaacctgccagcagagaggagctacccactccagggtctcctctctgctgaaagctgaacactcctcaagacaccttggtggggcgaaagagctgtaacacaaaca

SEQ ID NO: 917620 - DNA, 556 bp, Homo sapiens
ctcctcacttctcagacggggcggctgccgggcggaggggctcctcacttctcagatgggacggccaggcagagacgctcctcacctcccagacagggtcgcggccgggtagaggcgctcctcacatcccagacggggtggcggggcagaggcgctccccgcatctcagacgatgggcggccgggcagagacgctcctcacttyctagacggaatggcagccgggaagaggcgctcctcacttcccagattgggcagccgagcagaggggctcctcacatcccagacgatgggcggccaggcagagacgctcctcacttcccagacggggtggcggccgggcagaggctgcaatctcggcactttgggaggccaaggcaggcggctgggaggtggaggttgtagctagccaagatcgcgccactgcactccagcctgggaaacattgagcactgagtaaacgagactccgtctgcaatcccggcacctcgggaggccgaggctggcggaccactcgcggttaggagctggagaccagcccggccaacacagcgaaa

SEQ ID NO: 917621 - DNA, 604 bp, Homo sapiens
aaggtggttgaggtactgcctggttttatacattttagggagacagaagttacaggcaaagacataaatcaataatgtaagtaacacatttgtccagcccagaaagatgggacatctcaaagggaagggggccttccaagtcatgattggattcaaagattttctgattggcaattgattgaaagaattaagctttgcctcaagagttgaagtcagcataaggaaatcattgaattaagtaagtagggttgtggaagccaaggttcttgttatgtagataaagcctctaggtaaggggcttcagagataatggatagtaaatgtctcttaaaaggtgtcagactcttagtaaaatctctcctggatcaagaagatatgtggaaggggaaagggattctctacagaatgcaaattttccccataagagatggctttgcagggccatttcaaaatawgtcaaagaaaatgtattttggggtaaaatactgagatttccttcagggcctgctgtcatgtgatgttacgtcagagtcaagttggagtttagtatgttattgctacaaagagtctgctttgtcagtcttataatctttgttttaatgtt

SEQ ID NO: 917622 - DNA, 604 bp, Homo sapiens
aaggtggttgaggtactgcctggttttatacattttagggagacagaagttacaggcaaagacataaatcaataatgtaagtaacacatttgtccagcccagaaagatgggacatctcaaagggaagggggccttccaagtcatgattggattcaaagattttctgattggcaattgattgaaagaattaagctttgcctcaagagttgaagtcagcataaggaaatcattgaattaagtaagtagggttgtggaagccaaggttcttgttatgtagataaagcctctaggtaaggggcttcagagataatggatagtaaatgtctcttaaaaggtgtcagactcttagtaaaatctctcctggatcaagaagatatgtggaaggggaaagggattctctacagaatgcaaattttccccataagagatggctttgcagggccatttcaaaataagtcaaagaaaatgkattttggggtaaaatactgagatttccttcagggcctgctgtcatgtgatgttacgtcagagtcaagttggagtttagtatgttattgctacaaagagtctgctttgtcagtcttataatctttgttttaatgtt

SEQ ID NO: 917623 - DNA, 645 bp, Homo sapiens
agcactttgggaggccaaggcgggtggatcacctgaggtcaggtgtttgagaccagcctggccaacatggtgaaaccccgtgtctattaaaaatacgaaaaaattagccaggcatggtggcaggcacctgtagtcccagctactcgcaaggctgaggcaggagaatgacatgaacccgggaggcggagcttgcagtgagccgagatcatgccactgcactccagcctgggcaacaaagtgagactctgtctcaaaaaaaaawtaaaaataaaaaataatagccaggtgtggttgcacacacctgtaatcccagctacttgggaggctgaggcaagacaatcacttgaacctgggaggcagaggttgcagtgagctatgatggcgccattgcactccagccggagcgacagcaagactctgtctcaaaaaaaaaaaaaaaaaaaaaaaaaggaaaaagaaaaagacttgaaagaggtgaggatgtctggaggaagagcattctgaaccaagataacagccggtgcaaaggctctaaggaggctgtgtgactgggacggctgaggaatagaaagaaggctggagaggaggaaggcagagagtaacaggggatatcacatggtgatgggggctagattgggtgggctg

SEQ ID NO: 917624 - DNA, 645 bp, Homo sapiens
agcactttgggaggccaaggcgggtggatcacctgaggtcaggtgtttgagaccagcctggccaacatggtgaaaccccgtgtctattaaaaatacgaaaaaattagccaggcatggtggcaggcacctgtagtcccagctactcgcaaggctgaggcaggagaatgacatgaacccgggaggcggagcttgcagtgagccgagatcatgccactgcactccagcctgggcaacaaagtgagactctgtctcaaaaaaaaaawaaaaataaaaaataatagccaggtgtggttgcacacacctgtaatcccagctacttgggaggctgaggcaagacaatcacttgaacctgggaggcagaggttgcagtgagctatgatggcgccattgcactccagccggagcgacagcaagactctgtctcaaaaaaaaaaaaaaaaaaaaaaaaaggaaaaagaaaaagacttgaaagaggtgaggatgtctggaggaagagcattctgaaccaagataacagccggtgcaaaggctctaaggaggctgtgtgactgggacggctgaggaatagaaagaaggctggagaggaggaaggcagagagtaacaggggatatcacatggtgatgggggctagattgggtgggctg

SEQ ID NO: 917625 - DNA, 669 bp, Homo sapiens
agcaggggtctttaatccccattggcctggggctgggagtggtttgggtaagataacaccatgctggtctccagggtggggaagtgccaaaggccaggaaccctgctttctttctttctccccgtttgttcattttctttctttctttttctttctttctttctctttctttctttctttctttctttctttctttctttctttctttctttccttccttccttctttctttcttttytttctttctttttctttctctctttttctctctgtctccttccttccttcctttcttcctttctctctctctttctttctttctttctttttttttttttttttgatgtagtcccgctctgtcacccaggctgaatgaagtgcagtggcgtgatctctgctcactgcaatctccacctcccaagttcaagctattctcctgcctcagcttcccaagtagctgggatttacaggtgcctgccaccacacctggctaatttttttttttttttttgtatttttagtagagatagggtttcaccatgttggccaggtcagtcttgaactcctggcctcaggtgatccgcctggctcagcctcccaaagtgctgggattataggcatgagccaccgcgcccggccaacccttgctttcttgataatttctttgag

SEQ ID NO: 917626 - DNA, 554 bp, Homo sapiens
agctggccgagtgccgcatctagttatgggacacctgtgttgtctgtcttcacactgctgataaataaatacctgaggctgggcacggtggctcacgcctgtaatcctcgcactttgggaggacaaggcagatcacttgaggttaggagttcaagaccagcctgaccaacatggtgaaatcccatctctactaaaaatacaaaaattagacaggtgtggtggagggcacctgtaatcccagctactcaggaggctgaagcaggagaatcacttgaaccggggaggcagaggttgcactgagccaagatcatggcactgcactccagcccrggcaagagagagagactctgtctcaaaaagaaatacctgagactgggcaatttacaaaagaaagaggtttaatggagttacagttccatgtagctggggaggcctcacaatcatggcagaaagcaaagaggagcaagtcacatcttgcatggatggtggcaggcaaagggagagcttgtgtccggaaactccagtttttagaccatcagatcttgtgaaaccca

SEQ ID NO: 917627 - DNA, 554 bp, Homo sapiens
agctggccgagtgccgcatctagttatgggacacctgtgttgtctgtcttcacactgctgataaataaatacctgaggctgggcacggtggctcacgcctgtaatcctcgcactttgggaggacaaggcagatcacttgaggttaggagttcaagaccagcctgaccaacatggtgaaatcccatctctactaaaaatacaaaaattagacaggtgtggtggagggcacctgtaatcccagctactcaggaggctgaagcaggagaatcacttgaaccggggaggcagaggttgcactgagccaagatcatggcactgcactccagcccgggcaagagagwgagactctgtctcaaaaagaaatacctgagactgggcaatttacaaaagaaagaggtttaatggagttacagttccatgtagctggggaggcctcacaatcatggcagaaagcaaagaggagcaagtcacatcttgcatggatggtggcaggcaaagggagagcttgtgtccggaaactccagtttttagaccatcagatcttgtgaaaccca

SEQ ID NO: 917628 - DNA, 742 bp, Homo sapiens
agctcctcccaggctctggttgtcatggacatggctggagcagcagcaggtcccaggccaggctgggaggggtggggaacaaggtcttgcatttactgagtctctgccacaggcctgggcctgacctggaggttctgcggacaccaactaacaggccccgtcctcccacccctcctcactcggcaaattcatactcatgccaggcatggcccggcgcccactccaggcatctctctgaccccgcatgcctgccctgggacccctccctaccgcccagcctcactggggtccagtatccatcagtacagtagcccaggctgctctggcccagagagggcgggagcccctgcaggacaacacagcaatgagtcccagacgcaccccaaaccgaaactcttggccccagagtcagctcatgttctctgagaccagggactatttttatctggtgcctgaggccagcgggacaggctaacaggtgccccagcccctcccaggcctctgctctcatggggtctccctctgggccaccctgacttgccattctgggcacccacatcctgctgcgtgaccctgtgagtctacaggctcrggccccagcagcagaaccatcctggctctggtcgtgacaggccggggcaggggaggagggtcccggttgtggttgggggtcttctgatcctgacacagagtaccctgccttgtcccactaactctgttcccataggacagatgaggaaac

SEQ ID NO: 917629 - DNA, 600 bp, Homo sapiens
actacaggcgcgcaccatcacacccggtaagttttcaattttttttgagacggagtctcgctctgtctcccaggctggagtgcggtggcgcgatctccactcactgcaagctccgcctcccgggttcacgccattcccstgcctcagcctcccgagtagctgggactacaggcgcccgccaccgcgcccggctaattttttttgtatttttagtagagatggggtttcaccgtgttagccaggatggtctcggtctcctgacctcggaatccgcccaccttggcctcccaaattgctggaattacaggcgtgagccactgcacccggactaatttttgtatttttttttcagtagagacagggtttccctatgttggccaggctgctctcgaactcctgaccgcaagtaatccatgtgatccgctcgccttggccacccaaagtgctgggatcccaggcgggagcccctgcaatgcattcattcctgctgtttaaagccactgtatttggggtcatttgtttctgtggctctggcaggctcatacactcggaactgcctgctcccacaccgtcatgcagagaaacctgacgcctctgctc

SEQ ID NO: 917630 - DNA, 568 bp, Homo sapiens
ggacctgcctgggtcctgggaaaactcactactctgaagggaaggacacaggcctggctagctttgccatctgctgattgcagagcctcagagtcttgagtgaacatagggagtagccagggggtggttacagaaggccgtgggtgagacccagtgctgtgttggcttccagtgtgacccagcatagtcacagggtcatggtggccacaggggtgctmatgtcactccacccccagctctaggtggcccaaaacagacacagagagagactctgtttgtttcagagaaagtaagagaagagaactagagtctctcccttgtaatccggagaattctccctgatcttgttcagggccatcaaggcagtatctctatgagtgtccaagaaccacagcattactggtcttggagtgccctctaaagcagactaagctttgataataacatccaagtcctttcaaatattgagaaagccttcccaagatggatgggtacaaatgtgtccagactgagaagacagcagtaaatacctaagtgttcaatgcccaaatacagacgaacatctgca

SEQ ID NO: 917631 - DNA, 591 bp, Homo sapiens
acagaggcagagtagatttaaccagatttgaagtttttcctgttgaatacaatggtgggagtgttttgaggatattgcaaaggaataattgtcctgatggaagatgggatataagttgcataaggagagacattagcacatgcagcacacgacagaaagagaaaaggcatgtggtcggtagatggaaggtctctgtgggactggagaattgatggtaataaygtaacagagggtgagatgaaaaggtctgaagtggtggtcagaaagtagggtggccatattttttcctttgtcccataactgtatcagtctgttcttatgctgctaataaagacatacccaagactgggcaatttataaaggaaagaggtttaattgactcacagttcagcatggctagggaggcctcacaatcatggtggaaggcaaaggaggagcaaagtcacgtcttacatggcagcaggcaagaaagcttatgcaggaaaactcctacttataaaaccattggctctcatgagacttattcactaccaggagaacagtatgggggaatttgacctcatgattcaattatctccacctggtcccacc

SEQ ID NO: 917632 - DNA, 610 bp, Homo sapiens
gttaatgggaatagcatcgaatgtataaattgctttgggcagtatggccattttaaagatattgattcttcctatccatgagcaaggaaagtttttccatttatttgtgtcaattctgatttttttttgagcagtgttttgtagttcctcttgtagagatcttttcatttaccatgttatctatattcctaggtatttttttttttttttggcagttgtgaaagggagacatgcatgaggccaacaagcatatgaaaaaaagctcaacatcattgatcattagagaaatgcaaatccaaacgacaatgaaataccatctcacrccagtgagaatggccattataaaaaagtcaaaaaataacatgctggtgaggttatggagaaaaaggaacagttacacactgttggtagaagtgtaaattatttcaaccattgtggaaaacagtgtgatgattcctcaagacagaaataacattcaaccaaacaatcctattactaggtatatatatacctaaaggattacaaatcattctgttataaagatatatgcacgcatatgttcattgcagcactattcacaatagcaaagacatggaatcaatccaaatgc

SEQ ID NO: 917633 - DNA, 842 bp, Homo sapiens
ataatcagttgggttccctcctattgtttttgataagggccaggcacagaaattaacaattaggaggtgctagatatggctcttttggagatggttggggtgagataagtggttatatggccctagtttttcttttcaaaatttaaggcatttcattatgtgttttgggaaatacacattgaatttccatggctgttaaaatttctggatgtagataacatcttgcattacatattgtgtactcaaycattgacttagaaaggaatggtagtaaaattaatccaaaacataaaataatcccaaacaggctttatttaatgatggaatggaaagtagcagcttggtgtagtggctctcagatagaaaggtaactcattcagaagctgggctgtgaagacctcttgcaggtgttagacatgaccaggttagcttcatctctttcactgaatgcctcatgtaatttcactccaagttgagaatgggtaatgctgactctgaagtggatagagagcattgtgcaggtgagagaggccaggttaccaaggcctgctcatggcttcaagaatgccattttttttcttggcttatgtgatttctcaggttctaccccaaccagtgcaaataactaggtaaggaaaaaagaaagtagacatagctcccggttgcttctcttgttcttcaacaaaatccacctaaaatttggtcaatgcagtctatgtggaactgagaatcctctaggtcacaggagcttagagcaggaacaccctgcttttttattattaggctgagtgaacatgtgagaatgttggcatttatgggcccacctactaccatgtgaagga

SEQ ID NO: 917634 - DNA, 596 bp, Homo sapiens
gtatttttagtagagatggggtttcaccatattggccaggctgttctcaaactaccgaccttgtaatccgcccgcctcggcctcccaaagtgctgggattacaggcatgagccaccgtgcccggcccagaatatacactcttctcagcaccacattgcattttttctaaaattgaccacatagttggaggtaaaacaaacactccttagaaaatccaaaagaacagaaatcataacaaacagtctctcagacacagtacaatcaaattagaastcaggattaagaaacccactcaaaaccgctcaactacatggaaactgaacaacctgctcctgaatgactactgggtaaataacaaaactaaagcagaaataagtaagtaagttatttgaaaccaatgagttcaaagacacaacataccagaatctctggcacacagctaaaactgtgtttagagggaaatttatagcactaaatgctcacaggagaaagcaggaaagatctaaaatcaacaccttaacatcacaattaaaagaactagagaagcaagagtaaattcaaaagctagcagaactcaagaaataactaagagcaga

SEQ ID NO: 917635 - DNA, 639 bp, Homo sapiens
aatgtccccgcctagtttcgacaataagagtatttttaacaggttgaattaaaacaaaggtttaacgctgtgagatgaatttacacatcacaaagcattttcacagatagcttcttcctagtttctattttgtgatattcagtttctcactacaggcctcagtgggttaaggaatgtcactttgttgtttccagagaaagagtgtttttaaccccttgaatcaaagcgaaggtttaactctgtgagatgaatctacaaatcagaaagggttttcacacgtagcttgtttctagtttttatccggggatatttggtttttcacaataggcctcaasgaactcagaaatgtccctttgtagattctacaagaagaggacttctaatttggtaaatccaaactcaggttccatttggtgagatgcatttacacatcacaaaacattttcacagatatcttgtttctagtttttatcatggcatattcggttttatattgtaggcctcaatagactcagaaatattttttcacagattctacagaaaaagtgtttactaactgttgaattaaaacaaaggttcaacactgtgagatggatctgcacatggcaaaacatttttacagttagcttgtttctaatt

SEQ ID NO: 917636 - DNA, 620 bp, Homo sapiens
aaaaaaaaagaagaaggaaggagaggaggatgaaggaaggcatcgtgaaggcgggagagcttagttctgattctagtcctagttttgggagattttccccttcagggtggctgaatatccacgtgcatttacatgaaatgctgtgaagattcttctgtcatgaagcctgaactgacatatataaccattttttttttttttgagacagagtctcactctgttgcccaggctggagtgcagtggcatgatctcggctcactgcaacatccacctcccaggttcaagtgaccctcctgcctcagcctcccaagtggcccacgccaccatgcctggctaatttttgtattttcagtaaagacggggtttcaccatgtaggccgggcyggtctcaaactcctgacctcaggtgatccacccacccaccttggtctctcaaagtgctgggattacaggcataagccaccgtgcccggctaggcacttataatcttaacttactcactataatggaatggatttcaaaacctggagaagctatatcagtacaacctaacgcctttatcagagaagggtgcggttggctgcaaaaattagctcaagacctctcccatcccaggatgt

SEQ ID NO: 917637 - DNA, 587 bp, Homo sapiens
ccacctcggcctcccaaactgctgggatcacaggcgtgagacaccgtgctgggccctgctgcaggtattaataatggattccttctcactgcagcatggtatctcagcatgggggcaccccagcctgtgcattcacccactgcagggcacctgggcggtttgagtttctggcctttgtgaataacactgctatgaacagacacatacaggtttttgtgtgaacagaagtcttcattwctctgatatgaccgccatgagtgcaagtgctcagtcctctggtcgttgcatgttgagttcgttaagaaactgctgaagtgttttccagaacacctgtggcattctccagtctccccagccatgcgtaagtgatccagtgtccttccctgcatcctcaccggtacttcatgctggcgctatttttaatgtcagccattctgataggtgcgcagtgatgtctggctgtgggcttccctggcggctgatggcgtttgtcatcttttcgtgtgcttacctgtcatttgtccattctcctggtgaaacgtcttttcagttctgctcatttcctaactggacggtttgtttccttg

SEQ ID NO: 917638 - DNA, 453 bp, Homo sapiens
agctctgtctctccttcctcaccagcatgggcctgtgcaccacctggatccctggtagccacatgagagcgggcaagagtcccagctactttgagagattctccactctaggcaaccaaggactcaggcagtcgatayttctattcatgtagaaaggtgcccctgggatagtggaccagctttggggctcaggatgtctgaactctggcccagctctatcacttactggcagtgcgatggtacactgccctccatggcagattagaagcaagtgtctgctcctcagccctcactcccatgggcagagtacaattcccaggtccttgatgttgaccagtaagatttagcagatgtaccagcaggcttgaattgtacttgcctgtttctgtttatcctcttgtacttctggtatcaccatgagaattaagctggttccaggagaaggatgcaaga

SEQ ID NO: 917639 - DNA, 789 bp, Homo sapiens
taaagtctgtgaggagaaagtcgcctctgtgccccggagttcagaggtctaaggcgagtcctgaggaagaaaacgtagttgatggggcagagcagaaggggctggaggtggggtggagggagagggcattggacagaaggcctgggagacttggtgggggaygggcagccaggccgggaccctggggagtgcctcaccccgagcgagcggaagaccatctgggcttcccctagcccagaaagggtggattggcttcacctctgctggccatcacctctacatgccttggaactaaccttgtatattattattattgtcgttatttaagtattaaaagtattttttgaggtgagctgaatgagaccctttgctagagctggcacagggaggaaggtcgtcctggagggagggtagacactgtggagggaagggagacctgtgtcaggagagctgagaccacctctctgcccctcactactcttgtaatctttaggagtgtaaataatccccctaaggtggggacaggaccccagtccctgctgtgcgcaatagattatgatgatcaaaataaataatcagtgaatgtggatgggaaatctaagtaattgttaaaaccctgtgatgcttaaattttcactcacagaaatgtgtaggctaggagttttaagaggaatggttagtaattataggtatagttcagttttaaaaaatgtttgtaagagtgacaaagatagaatgaacacagttccagatcatggactgttcatcgtgtagtgagggatggtacaa

SEQ ID NO: 917640 - DNA, 685 bp, Homo sapiens
agacaatgtgctctctctctctctgcccccacactaagggtgcactccttgttcatctccaggacggtgtcagcaaatgctgcctggggcatgctggtgatcactgtgtcactttgggtcaggaaacacattctggagaggacaaagcaagtgaacaggccttgtacgctgagtggaaggccttttatctccaaaaaatcaaaccagagaaattaaaaaatatcttgaaacaaaagacaagggatacacaaatataaaaacttgagggttccagggaccagagggcttctgcaccttagcctgtttcctgctttgctaaatgagcagatgtgtgatgtgctctctttggtcccatmgcttcctattgtgattcctccaccctgggcacttgctctcatcctgttctgccggctgctgcctcactcaacaaaacctgtcgacttcgactaaggtcaagattcatgggtcgaccttagtaccacctgccattggccccacgaccatgccctgtgccaccacccaggccccagagcccagggcacagcaggttcaccctgaggacatctgaacaggtcttttttcacaagaggacagaagaaaggatagcgacactgagctccaatgccgtgaagaggagcatcacagacaggatcctctgaaatgcaggatgcacgaggtctgtgct

SEQ ID NO: 917641 - DNA, 647 bp, Homo sapiens
cagtgatgaccctcatctatcacccttgactgatggctgctgagttaggcatccataacggtgggattataatagggaaagcggagtcttcctttgaggacttttcaggactctacttgtcatctccattttccactttactaagttattagtcatattttaccttttattatctattctatttcctcactgttactttcagatcaagaatttataagttggtcttccccttccaacttttctggtttccgctactgtgattgctaatcttgttgggaacctctgtcctaaccactttccctggtactgctttttctgttctgttatatttgcttttcgtttttatgttttgtatctgtttttctttccaggtaaaagtttcctggtttagggaaagtgggaactggggatggaaaagaggtsgtgattaagtcttgctttttttttcccccctccagctcttctgttagaaatagtatctttgttttcctttgctgttcctcaatcccctactcttcaccccttgttttcacctattttgcgagaacccatccagatcccccttcccttcttcccctgccggcccagttatggcagagaacgatgtggacaatgagctcttggactatgaagatgatgaggtggag

SEQ ID NO: 917642 - DNA, 770 bp, Homo sapiens
agacctgagctggtccttagcaaggccagctaagttgcctcataatatgtactatattcctagtattcttattaccactggtaaatccactctcccttgtctcatccttggggtcttgaggagttccctaaggactgttgactatagaagaagaaatttgaatatgctttgaatacccaaaagtgtactttgcagcattacagcccttttyaggaattgtcataaagaagagtggaaaggaaagtacctccagcaggaagattttcaatcagaccatctggaagttcattttgcctaaagaaatatcttattgttagatcctcatcaatgcatgggtagtgactaatagtttgctcaggtattcaatgacttcaaaggaacaagatgggaaggtttgtgataaggagctttaaggataaggtgtgaaccactaatgtggcatattaggtatctacgcctactctcatgctaacaaaaaatgggttatcaaaagataaaatacatcataaaagcactgagaggctttcacatcagtgaaaactgtctaataaatatcaggaagctctgaatttacttttatcctgagctcatttgctcaatgtagacaagttaagctttagtttccatggcctcataaggaatttggaataggaggcaagtctcaagtagcactcaaagtgggaaatctcctaggatgatctcctccattttgctgggacccctaagttcagttcctcggtgtaagagaaatgccccatgctcaaaggact

SEQ ID NO: 917643 - DNA, 751 bp, Homo sapiens
ccccacacagagttcctattagggcactgcccagtggagctgtgagaagagggccacggtgctccaaatctcagaatggtagattgaccaacagcttgcactgtgcacctggaaaagccagatactcacgcctgactgtgaaagctggctgcatagattaaattgaaagttgttgcctcctttaatttctaaaaggtatgtgtaaaattgatgttatttctaaattatttgttagatacrtttcatcaatgaagccttctggacctggagtttcctatatgagaaggattttgattacacattcaatttctacaatcaatatatgactggccacattttctatctcttctcaggtcagttttcataagttttctctctcaaggaaattgttcatttcatttgcttgtcaaacttattgacatgagattatcaatatttctttttgagatctagagagtgtgcactgatgttcgttttttcttgacattgttaatgtgcatctttttgtcttgatcagtctagctagaaatttataaagtgtactgatttttccccatagaaccaatatttgggttcattaattttctctgtctttctgcttcattttttccatttaattattattttcttccttctccatgctttggtttaatttgtttttctttgtttcttatagcagaagctaatttactaatttgagacctaccttctttcttaatataggcatttaagggtattggttttttctcta

SEQ ID NO: 917644 - DNA, 751 bp, Homo sapiens
ccccacacagagttcctattagggcactgcccagtggagctgtgagaagagggccacggtgctccaaatctcagaatggtagattgaccaacagcttgcactgtgcacctggaaaagccagatactcacgcctgactgtgaaagctggctgcatagattaaattgaaagttgttgcctcctttaatttctaaaaggtatgtgtaaaattgatgttatttctaaattatttgttagatacatttcatcaatgaagccttctggacctggagtttcctatatgagaaggattttgattacacattcaatttctacaatcaatatatgactggccacattttctatctcttctcaggtcagttttcataagttttctctctcraggaaattgttcatttcatttgcttgtcaaacttattgacatgagattatcaatatttctttttgagatctagagagtgtgcactgatgttcgttttttcttgacattgttaatgtgcatctttttgtcttgatcagtctagctagaaatttataaagtgtactgatttttccccatagaaccaatatttgggttcattaattttctctgtctttctgcttcattttttccatttaattattattttcttccttctccatgctttggtttaatttgtttttctttgtttcttatagcagaagctaatttactaatttgagacctaccttctttcttaatataggcatttaagggtattggttttttctcta

SEQ ID NO: 917645 - DNA, 568 bp, Homo sapiens
acttccaggaatcaagcagtcaatctgtcatgcacagtgacctgaataagaggaaatttagagaaatctcaggaaagttgctatgctctatgtttgatgaggcagttctcagaaaaacagggttggggaggagcaggggttcaagatctcagattcaggaggcatgggggactcagcagagcccttgggagctgctggtgaaagaaatgagttattggtaggaacctctgaattccacccagtcgcgtggaggaaacaacctccaatacagcatgacctcacttagagtgtaaaaaggttaactggtagaagcagacagtattaatacaatggtggttaccaaagtctgggcgtggtgggcatggggatgggttggtcaaaggatacaaagtttcagttacttcaaggasgaatacttcaagagatctgttgtaccttctggtgatttgttagtaatggtacactgtgttcttgaaaattgctgagagagtagattttaagtgttctcaccacaaaacacgaaaaccaaataaacaaaactaaaacagcctgaaatgtattgaggcta

SEQ ID NO: 917646 - DNA, 595 bp, Homo sapiens
ttaaaggccaactgcaaagaacactgagcgaggctctgtgtaataaaaatctataaaacaatgtgtttaaacctaagaattctactgctttccaattccttccctctgctccttttcctaacctcctgcttctccagcccttccctctgtccctttcayccctcaggccctcctctccccttagtccccaccaccctgtcacttctaaattgtggctctagcattgtcccattacctgctatgtgactgttctctccacagtggtcctgctcctgtgagtcagagtgtgtcatttcctcacctaaaacactccagtggctccacctcggtcttgtgaagcttctagaatgtcaggcacgtgagcatatgagggcatacctggttcatcttaggcactaaattaatttttgttgactgaatgaatgaaatatgaatgtattaaattgcatcacagaaagttataaaatgtaaaacactgaaaaattaagaaatattttattttatgtaactagtgtgcatatcaattcatccgagtctgttgagcctgtgtatgaattttataagattgcataacaaattatcacaaacattgact

SEQ ID NO: 917647 - DNA, 587 bp, Homo sapiens
aaaaaaattagccgggcatagtggcaggtgcctgtaatcccagttacaagggaggctaaggcaggagaattgctggaactggggaggcagaggtttcagtgagctgagatcataccactgcactccagcttgggaaacagagtgagactccgtctcaaaaaaaaaagattctcactttggatctaacgacactcggaagttgaaattggaaggatagagaaggatattcatgaaaatagtaactaagaatttttaatgatctctcatagggttctatgtgttggctgggttcagatgatggcctgagagtgttacatggtccagggattgaaatggaaggaaccagatgcaggcaggatggttaacagcagtgcccagaactgacacaagcatacttctgccrtattctattgggtagcgcaaatatcagatctgcttatgtttaaagagtggagagaccttacctcttgatgagggagtggtgggtcaaactaaagaaaagcaagtgtgatggaagatatttagatatttttgcagctgtctttggaaaatacatgcaatccaaaacatcctgtctgccagaaagg

SEQ ID NO: 917648 - DNA, 587 bp, Homo sapiens
aaaaaaattagccgggcatagtggcaggtgcctgtaatcccagttacaagggaggctaaggcaggagaattgctggaactggggaggcagaggtttcagtgagctgagatcataccactgcactccagcttgggaaacagagtgagactccgtctcaaaaaaaaaagattctcactttggatctaacgacactcggaagttgaaattggaaggatagagaaggatattcatgaaaatagtaactaagaatttttaatgatctctcatagggttctatgtgttggctgggttcagatgatggcctgagagtgttacatggtccagggattgaaatggaaggaaccagatgcaggcaggatggttaacagcagtgcccagaactgacacaagcatacttctgccgtattytattgggtagcgcaaatatcagatctgcttatgtttaaagagtggagagaccttacctcttgatgagggagtggtgggtcaaactaaagaaaagcaagtgtgatggaagatatttagatatttttgcagctgtctttggaaaatacatgcaatccaaaacatcctgtctgccagaaagg

SEQ ID NO: 917649 - DNA, 857 bp, Homo sapiens
tctaccctcgagtgtttgtttcattcctttcctccctgtttccccaccccaaccaccaaactcattgctccattcttccaatataactctatatcagggcaccactgagttcaacgcaatgtgtcacaatcgctgtgttctccctctcccaagtgcatgattctccacactgcagggctgctgctggaggatggggctggggcggcattggcaattcgggacaacatcctacccttctcagtgtttctttcagttatatgaagttaaaaaccaggttttgtgaatgctcacataacttttgtttctagtgaaggtgattttgtctttttttaaatgtagatagttgttagattggtatctttgttgcagggggacggttagtgaagtcttctatctagccatcttgctccacccctctccctaaaaaatttttaaatttctttcctaatgtcttcattgacccaccaggcattcaggagcatattgtttaatttctatgtgtttgtatagtttccaaaattcctcttgttattratttccagttctattccattgttgtcagagaagatgtttgatattatttcaattttttgaatgttctaagacttgttttgtgaccaaatatttggcctgtctttgagaatgatccatgtcctgagaagaaatatgtgtattctgcagctcttggatgaaatatgctgtaaatatctattagatccatttaatgtatagtgcagatcaagtccaatgtttctttggtgcttttctgtctaaacgatctgtcctatgctgaaacgggggctgctgaagtctctggctatgattgtactgagatctatctttctctttagctctaa

SEQ ID NO: 917650 - DNA, 857 bp, Homo sapiens
tctaccctcgagtgtttgtttcattcctttcctccctgtttccccaccccaaccaccaaactcattgctccattcttccaatataactctatatcagggcaccactgagttcaacgcaatgtgtcacaatcgctgtgttctccctctcccaagtgcatgattctccacactgcagggctgctgctggaggatggggctggggcggcattggcaattcgggacaacatcctacccttctcagtgtttctttcagttatatgaagttaaaaaccaggttttgtgaatgctcacataacttttgtttctagtgaaggtgattttgtctttttttaaatgtagatagttgttagattggtatctttgttgcagggggacggttagtgaagtcttctatctagccatcttgctccacccctctccctaaaaaatttttaaatttctttcctaatgtcttcattgacccaccaggcattcaggagcatattgtttaatttctatgtgtttgtatagtttccaaaattcctcttgttattaatttccagttytattccattgttgtcagagaagatgtttgatattatttcaattttttgaatgttctaagacttgttttgtgaccaaatatttggcctgtctttgagaatgatccatgtcctgagaagaaatatgtgtattctgcagctcttggatgaaatatgctgtaaatatctattagatccatttaatgtatagtgcagatcaagtccaatgtttctttggtgcttttctgtctaaacgatctgtcctatgctgaaacgggggctgctgaagtctctggctatgattgtactgagatctatctttctctttagctctaa

SEQ ID NO: 917651 - DNA, 781 bp, Homo sapiens
aggaaataaagcttgctctgcttaaggctcacttttggtttcatgtattggctctgcgactcccagtgaggaaagatcccaccttctgcagctaccaagatttttggtaacaagaagagtgattatttttcattttcataagtgttgttcttgcaaaattttgcaagcatcattcttggctcatagcatacattctcttatgtacttatttttaaatttttaacttttattttagatacagggggtggccaggcgcggtggctcacgcctgtaatcccagtcgggagttcgagaccagccttatcaatatggagaaaccccatgtctactaaaaatacaaaattagctggaggtggtggcgcatacctgtaatcccacctactcaggaggctgaggcaggagaatcgcttgaacccgggaggcagaggttgcgatgagccgagatcacgccrttgcgctccagcctgagcaacaagagtgaaattgtctcaaaaaaaaaaaaaaaaaaaaccagaaaaaaatagatacaggggttacatgtgccggtttgttacatgggtatgttgtctgatgctgaggtttggggtatggatcctgtcactcaggtagtgaacatagtacccacaggtagtttttcaacccacgtccccaccctctccactctagtcgtctacagtgtctgttatacacatgtttatgtctatgtgtgctcagtgtttagctcccaattataagtgagaagatgcagtatttggttttctgttcctgcattaattcactt

SEQ ID NO: 917652 - DNA, 637 bp, Homo sapiens
ccaccctccctaaaggtaagatttattgaaataccgaattgtagaattgcctctgcttactgacagtactaaatctagagcaataaaataaaatagaatttctcaactgtgttatctgtattttctttttttccttattctcatgctctggcatctgagtcctcactgattgtgaggactcccctcccaagactagtctattcctacagatactaaagggattgaccgcaaatgcgcctttcttatgcaaactaaccaaaccagagcccaaactyagaatgagttctttttttctggctgtcacatggccccgatactcccagtcaatattctcctgtcttaataatctgagagacaggtatcagacaactagagacaatccctatgcctcagagtcaccaagattattcagactcatcaatactgaacatgtctacactgcttaccctgccttgctcattcattcccctaaaaaccacattagaggctctcgcccatgctttcccctcccgttgccacttgaccagccttggtgctgcctgttgtgctgtgcttcctatgtcagtgggtaataaactcttttttcagtggcatagacctctctgtgtcatcattcagtcataactactaattaatt

SEQ ID NO: 917653 - DNA, 733 bp, Homo sapiens
aaagggattgagttcttgatttgattctctcttggtcgttgttggtgtatagcaatgctcctgatttgtgtacattgattttgtgacctgagactttactaaatttgtttatcagatctatgggtcttttggatgagtcttagtattttctaggtatacgatcatatcatcagtgaacagggacagtttgacttcctcttttctaatttggatgcccattatttctttctcttgcttgattgytctggctagaacttgcaatactgtgttgaatagaagtggtgcacgtgggcatccttgccttgtttcagtccttggaggaatgctttcaacttttccccattcactatgatgttggctgtgagtttgtcatatatgactttcatgactttgaggtaagtcccttctatgcctattttgttgaaggtttttatcataaagcaatgctagattttatcaaatgctttttctgcatctattgagataatcatatgattgttgtttttaattctgtttatgtggtgtatcacatttattgacttgcatatgttaaaccatctctgcatccctgggatgaaacccacttcaacatggtgtattatttttttgataggctactggatttggttagctagtattgtgttgaacatttttgcatgtatgttcattggggatatttgtctgtatttttcttttttgttatgtcctttcctacttttggcattagggtgat

SEQ ID NO: 917654 - DNA, 733 bp, Homo sapiens
aaagggattgagttcttgatttgattctctcttggtcgttgttggtgtatagcaatgctcctgatttgtgtacattgattttgtgacctgagactttactaaatttgtttatcagatctatgggtcttttggatgagtcttagtattttctaggtatacgatcatatcatcagtgaacagggacagtttgacttcctcttttctaatttggatgcccattatttctttctcttgcttgattgctctggctagaacttgcaatactrtgttgaatagaagtggtgcacgtgggcatccttgccttgtttcagtccttggaggaatgctttcaacttttccccattcactatgatgttggctgtgagtttgtcatatatgactttcatgactttgaggtaagtcccttctatgcctattttgttgaaggtttttatcataaagcaatgctagattttatcaaatgctttttctgcatctattgagataatcatatgattgttgtttttaattctgtttatgtggtgtatcacatttattgacttgcatatgttaaaccatctctgcatccctgggatgaaacccacttcaacatggtgtattatttttttgataggctactggatttggttagctagtattgtgttgaacatttttgcatgtatgttcattggggatatttgtctgtatttttcttttttgttatgtcctttcctacttttggcattagggtgat

SEQ ID NO: 917655 - DNA, 743 bp, Homo sapiens
tttgactcggaaagggaactccctgaccccttgcgcttcccaggtgaggcaatgcctcgccctgcttcggctcgcgcacggtgcgcgcacccactggcctgcgcccactgtctggcactccctagtgagatgaacccggtacctcagatggaaatgcagaaatcacccgtcttctgcgtcgctcacgctgggagctgtagaccggagctgttcctattcggccatcttggctcctccaacccaaatattttttaagtagctgctcagtaaacagtcactgaaggaattaattggccaggcacggtggctcatgtctatagtcccaaggcttttggaggccaaggcacaaggattgcttgagcctaggagttcaagaccagcctaggtaacatagcaagaccctatctctacaaaaaaaaaaaaawaataatgttaaaaaataggaagatatgtgggaactaaaacagaacaggctgaggagggccagagactactggcagtgagttggccccgggtgatggcaatggaggtggtaagaagtgctcagattctatatatggcttaaatgtggagcagacaggattggttgatgaattggatgtggagtaggaaagaaggagaggaatcaaggatgactccaggtttggggtctgagcaatgggaaggatggagtggccagttaatggcagtggcaagaccacggaaggagcagggtctgtgtcgagagagtgaatatcaggagt

SEQ ID NO: 917656 - DNA, 647 bp, Homo sapiens
accatttataaggctagaaaaggcctgtattctaatctgagttcttccactgccctactgtgtgacctcagaaaagcctcttcatctctctgagcttctatgtctttacctgtaaaaatgaagaaaactgggctcagtggttgctaagatccctgctgtaaatgacaggaattctggggatctatagaaccccaaagtaattcctggggaccccagacatcactcctgtagcgacttcagcttcaactgtggcttgccttagtgaacatttgtgactacctagaacagcaaacacttagcttagcgatggagattaatctgtattcagagtcaggygcagtggttcatgcctataatcacaccactttgggaggccaaggcaggaggatcgcttcagcccaggagttcaagaccagcctgggaaacatgacagaaccccaccatctctaccaaaaaaaaaacacaaaaattagccaggtgtggtggcacatgcctgtagtcccagctacttgggaggctgaggtgggaagattgcttgagcctgggaggcagaggttgcagtgagctgagattgtgccactgcactctagcctggacgacagagcaagattctgtctcgaaaaagaaaaaaaatctgtattcagaac

SEQ ID NO: 917657 - DNA, 647 bp, Homo sapiens
accatttataaggctagaaaaggcctgtattctaatctgagttcttccactgccctactgtgtgacctcagaaaagcctcttcatctctctgagcttctatgtctttacctgtaaaaatgaagaaaactgggctcagtggttgctaagatccctgctgtaaatgacaggaattctggggatctatagaaccccaaagtaattcctggggaccccagacatcactcctgtagcgacttcagcttcaactgtggcttgccttagtgaacatttgtgactacctagaacagcaaacacttagcttagcgatggagattaatctgtattcagagtcaggcgcagtggttcatgcctataatcacaccactttgggaggccaaggcrggaggatcgcttcagcccaggagttcaagaccagcctgggaaacatgacagaaccccaccatctctaccaaaaaaaaaacacaaaaattagccaggtgtggtggcacatgcctgtagtcccagctacttgggaggctgaggtgggaagattgcttgagcctgggaggcagaggttgcagtgagctgagattgtgccactgcactctagcctggacgacagagcaagattctgtctcgaaaaagaaaaaaaatctgtattcagaac

SEQ ID NO: 917658 - DNA, 776 bp, Homo sapiens
aggctgagacctgctgaactgcattcccagtgagttagccattctaagtcacaggatgagataggaaatcagcacaacatacatgtaacaaagaccttgctgataaaacaggttgcagtagagaagctggacgaaacccatcaaaaccaagatggcaacargagtgacctctggtcgtccccactgcttttaaaatgcaattataatgcaatagcatgctaaaagacacatgacaatttataaatgccatgacaacttatagatgccatggcaatttatagatgccgtggcaacatccagaagttaccctatatggtctaaaaaggggaaaaatcctcagttctgggaatttcccacccctttcttggaaaactcatgaataatccaccccttgtttagcatatagtcaagaaataaccataaaaatgggcaaccagtggcgcatgccactgctcagttatttctttactttttaaataaacttgctttcactttaccctatggattcacctcgaattctttcttgctcgaaatccaggaaccctcttttggggtctggatcgggagccctttcaggtgacatgatgattgggattcagtgcctctctgttcggttgactcttttttagacagatgtgacccatagaaaatttttctctactaaacgaaaatctttggtcctttaaatcttagcgactggtattaattctaacatctaacattgccaaactcaggttttattccttcttccatatgacatgtcttcatgttataga

SEQ ID NO: 917659 - DNA, 714 bp, Homo sapiens
catggttaagaccagtgtggccaggcacattggctcatgcctgtaatcctagactttgggaggccgaggggggcagatacaaggtcaagagattgagaccatcctggccaacatggtgaaaccccatcactactaaaaatacaaaaattagctgggcgtggtggcgcacacctatagtcccaggtactcggaaggctgaggcaggagaatcgcttgaacctgggaggcagaggttgcagtgagccgagatcgcgccactgcactccagcctggcaacagagcaacactccatctcaaaaaacaaacaaacaaaaacagtgaattccatgagcatgagcccactggcacacttctttagctgtaaagtgagtgccttggtcagaggcaatgctgtgtggaataccatgayggtgggtaaggcctttggtgagcccatgcatggtaatcttggcagaagcattgcatacaggataggcaaacccatatcaggagtaagtgtctattccagtgaggacaaatctctgccctttccgtgatggaagaggtccaatataatcaacaaggtagctggctgatcaccctgaggaatgatgtcatatcaagggctcagtgttggtctctgctgctggcaaattggacactcagcagtggccatagccaagtcagccttggtgagtgaagtccacgttgctaagcccatgcataacttccatc

SEQ ID NO: 917660 - DNA, 714 bp, Homo sapiens
ggaatataacaattcttactcacctttggaattttgcacctactcttccaaatgcttgagaaaagatcctccttcgcttcactcagataattccaattcatttttttcttatctcagtgttgaatgtacttctcccaggcaacatttttctgaccctcaaaacatgtatgytctgatccttgagttcctcattacatatgtgattctaccaaatgtatgaaattgtaatcttatgctgacttctctgtgccttctcttttgtgagctttccgtcctgtctgtaaggaccatgcccttctcaaccttgtatccctagtgtataacacttgatagatgcagaatatgtttagttgttcattgaattaacacatcagataataaaagggatgtgtgcatttgctggaaataagagtagtaatgagtgagcacttctaatgaattttacttataagagaaagattggcaataaataatagaaatggagaggaaagaccacagataaaaaggaaaataacaacagctattccgatgtatcttcctttccaatatggcttccaggtcatattgctgatattgttgatattctgtctctgttccaagaaaatcccattataagaattttgacgggagcagagcaggccttagggagaggggaaattcttcttcaaattacactttttaaagcttaattatgaaagtaattttcctcaggaa

SEQ ID NO: 917661 - DNA, 609 bp, Homo sapiens
aaaaatgaaaatatactcataactaaaagcaactttatgttttttaaatataagattttaagcacctcatttagaaaccccactgctataaagttggcataaaatttcacaaaacaaatactttgagagaggaggaaaatgaatgacataatctgaagtccacagtgcacatgaggtggaaatttcttttcatttttattccaatttggatttgttttgggaaagacatttataatttatataatagctgattatcttattatcaatgccaaaaggaataggcctaacaccagaagatacagacgtgttacatcttctttgttagaatgaaagcttacatatttttcacttgatgtcccatcatatgaaatctgtccaatttattagaatataaactcgatsacggcaggatcttttttttttttttttttgagacacagtcttgctctgtcactcagcctggagtgcagtggtgtgatctcggctcactgcaacctctgtgtcgcaggttcaagcaattctcatgcctcaggctcctgagtagctgggattacaagcatgcgccaccatgcccagctaatttttgtatttttagtagatacagggttt

SEQ ID NO: 917662 - DNA, 621 bp, Homo sapiens
tttagctccagatcgactgcaagaacaaaccagcaatcctgagaggatccacagactctctgaaggaagcagactgctcctgcaggacccaggagacccccaaatactgtgagtgccccaactgcagtgccacaactgcagaagtgggaaagggagaccctcctctcccgaacacacacccccactggagaagccgaagatctgtttgtgggagaagtttcygactttacctgaagctgagtcaagttagagagccgagcgaaaaacaggggtagaggaagcggcagaaaggccctgggagctcgctgggtgcccctgcagcccattcctgcctggcaccacagggatccactgagagggtggccagagatgcagggggtaaaactccacagggagaaggaatgctctagccgaaatttgtaccaatttgaacagggtgagaaacctcctggccagaactcaggggagggcgtgaatccagtatgcagacttcactcgtaggggaagaactaaagcccttttctttcacagctgtgaggcagatagccttgggcaagttttcaagcctatctctcccttttcctggaaacagactcagggctgttggtgggacatggtggg

SEQ ID NO: 917663 - DNA, 621 bp, Homo sapiens
tttagctccagatcgactgcaagaacaaaccagcaatcctgagaggatccacagactctctgaaggaagcagactgctcctgcaggacccaggagacccccaaatactgtgagtgccccaactgcagtgccacaactgcagaagtgggaaagggagaccctcctctcccgaacacacacccccactggagaagccgaagatctgtttgtgggagaagtttccgactttacctgaagctgagtcaagttagagagccragcgaaaaacaggggtagaggaagcggcagaaaggccctgggagctcgctgggtgcccctgcagcccattcctgcctggcaccacagggatccactgagagggtggccagagatgcagggggtaaaactccacagggagaaggaatgctctagccgaaatttgtaccaatttgaacagggtgagaaacctcctggccagaactcaggggagggcgtgaatccagtatgcagacttcactcgtaggggaagaactaaagcccttttctttcacagctgtgaggcagatagccttgggcaagttttcaagcctatctctcccttttcctggaaacagactcagggctgttggtgggacatggtggg

SEQ ID NO: 917664 - DNA, 621 bp, Homo sapiens
tttagctccagatcgactgcaagaacaaaccagcaatcctgagaggatccacagactctctgaaggaagcagactgctcctgcaggacccaggagacccccaaatactgtgagtgccccaactgcagtgccacaactgcagaagtgggaaagggagaccctcctctcccgaacacacacccccactggagaagccgaagatctgtttgtgggagaagtttccgactttacctgaagctgagtcaagttagagagccgagcgaaaaacaggggtagaggaagcggcagaaaggccctggragctcgctgggtgcccctgcagcccattcctgcctggcaccacagggatccactgagagggtggccagagatgcagggggtaaaactccacagggagaaggaatgctctagccgaaatttgtaccaatttgaacagggtgagaaacctcctggccagaactcaggggagggcgtgaatccagtatgcagacttcactcgtaggggaagaactaaagcccttttctttcacagctgtgaggcagatagccttgggcaagttttcaagcctatctctcccttttcctggaaacagactcagggctgttggtgggacatggtggg

SEQ ID NO: 917665 - DNA, 623 bp, Homo sapiens
taataatgctggcaagtacttgttcttctagtgggagctgtccccgaagtctgggactgtggttcgtttatctttgcaaccctggtcgcttgcacctggtaggccctcaatggaggcttacggtttatcaggacagaaagacacgtaaacagatacacacagtgaaaagtgccataatagaggtcagtgttgacaatgaacatgcaggcattggggtcagacactgtgcttgaccctacagggccctatagggctgagacaaggatcaagcatgatcccgtcccgggttacatcctccagtctaggaggagaggtggagagcaacaaccacaatacaaggccaaagaggggaagggagtggatgccagggaagcagaaacaaggcatcccctaaagggcacataactctggtyattaatcaggggctgcttcaaggagaagtaatgtctgaacttggacttaaaggggggatgtgtatgtttgaatgagcagacatgggatagaaagacatcccaggagaaggcaatggtgtgagcaaaggtaggagacagaagggcaaaaagcatgtctgggagggtccaaagctaggagatggcgtggcccagagcccaggagcagagtga

SEQ ID NO: 917666 - DNA, 777 bp, Homo sapiens
cactttggagaccattggtttagaggattgagtgaaatattgctcatgaaatgtgttataagctgtaaagtgctatttaagtggtacataataataatttaggtcgagtgcagtggctcacacctgtaatcccagcactttgggaggcctaggcaggtgggtcacctgaggtcaggagttcgacaccagcctggccaacatggtgaaaccccatctctactaagaatacaaaaaattagctaggcatggtagtgggcacctataatcctagctacttgggaggctaaagyaggagaatctcttgaacctgggaggcggaggttgcagtgagccaagatcatgccactgcactccagcctgggtgacagactaagactcccagactctgtctcaaaaaaaaaaaagattcaaatattacattaaaatgttacataataatggcccaccataataatgtctactatattccagacacttattattgttattcccattttacagataaggaaaaaaagacacagagagatcgaggtcacaaagctagtaagttgcaaggccaggattaggcccatcgtctgtcagactccgaagccagtgctctaaaaatctctcagggatcagagtcttgtacaatatcattggagaatcaaggcagaggtaactgaaggatggattgtaatgctcctcctcacccaggcacaaagcccaaatcttccaccgtccacagagtctcacttaagggatggcggttctgtttagtgtccttcccagggattg

SEQ ID NO: 917667 - DNA, 730 bp, Homo sapiens
tcaggagttcaagaccagcctggccaacatcatgaaaccctgtctctactaaaaatataaaatcagctgggtgtggtggtgcatgcctgtagtcccagctacttgggaggctgaggcaagagaatcgcttgaacctgggaggcagaggttggagtgagccgagatcgtgtcactgcactccagcctgggtgacagagtgagagtccatttaaaaaaaaaaaaaaagaaagaaaagaaaagaaaaagaaaaatagagaggggagaagagaggtgttgacattttaaatagggggttagggaagcccactgagtaggtggctttgcacagtttggagcggggtgagggcgggagccatgtggatatctctagagcaatggtcctcagtgagtaattttgctcccctatgggccatttggcaatttctagagacattttttacttgttacaaatatcccaatgtttttggttcagttgagctactcgcctctagtgtgtagaggccakagatgctgccaaacctcctatagtacccgggacagcccccaaaacaaagaattgtctggtccaaaatgtcagtagtgtcactgttgagaaaccttgccctaagggaaaaatgctccagaagttaaaaaattcttattctcacaaccacactgtgaagcaggtattgtcacatccattttacaagtaaggaaactgaggctcagggagtccgagtgacttgctcag

SEQ ID NO: 917668 - DNA, 592 bp, Homo sapiens
ccctattttgatgctgtggaaagaccattaattttgaaatcaaacagatctagttttgaatctcaggcccactatgttatatctctgtgatcatatggaagtgtcttaatccattcagatctcagatttcatatttttaaatggcagtaataacagcctcatggagtattggccatggaacagaatgtttcaggggccaaaagaatttctctgagagtgtgataagcatttgtaacctctagaaagcaataaacaccaaaaaaagaacagaaaggtttagggaggtcctagataaactaaccagtagtaatgtgctgaaccaaaataaaataaatattattccagggaatgggaatatttgaaagcaagttgtatayaatatggaatgatatttctcaaggaaagatatagaaggcccttggcttgaatcatttcacattgaatcaaagtaaagcaaagtaaaatctattttgaggagcaatctttccctggctaggagactaaggagatgagctaataaaggctttgcatctgtctttttttctaagctgggaatggaaaagtcttctggatgcacatcttcctggagtct

SEQ ID NO: 917669 - DNA, 644 bp, Homo sapiens
cctaacaagagtcagtctgttttgttacagctttgaagactggaattgagttgtctccagttgtgaatgtcctggcatcttcttccaatagaaggcagttttctttaaattgacagggttgtttagtgtatccaccttcttcaatgatcttagctagatattctggataccttgctgtagcttccacatcagcacttgttgcttcacctttcactttcatgttatggagatggcctcttcctttaaatctaataaaccaacctctgctagtttcaaagttttcttctgcagctttctyaacactcaccaccttcacagagttgaagagagttaggtccttgctctggtttaggctttgttttaagggaatgttgtgacttgtttgatcttctatccagaccagtaaagcttaattcttgttagcaataagactgttttactttcgtatcattcttgtgttcactggagtagcattttaaatttattttaagactttttcttctgtattcacaccttggttaactgtttggctcaaaaagcctagtttggcttttctcacctttcgatgaggttactttcagtaagctgattagtctcagtaaatgtaattatttctagcttttgatttaaaatgataaaggtat

SEQ ID NO: 917670 - DNA, 644 bp, Homo sapiens
cctaacaagagtcagtctgttttgttacagctttgaagactggaattgagttgtctccagttgtgaatgtcctggcatcttcttccaatagaaggcagttttctttaaattgacagggttgtttagtgtatccaccttcttcaatgatcttagctagatattctggataccttgctgtagcttccacatcagcacttgttgcttcacctttcactttcatgttatggagatggcctcttcctttaaatctaataaaccaacctctgctagtttcaaagttttcttctgcagctttctcaacactcaccaccttcacagagttgaagagagttaggkccttgctctggtttaggctttgttttaagggaatgttgtgacttgtttgatcttctatccagaccagtaaagcttaattcttgttagcaataagactgttttactttcgtatcattcttgtgttcactggagtagcattttaaatttattttaagactttttcttctgtattcacaccttggttaactgtttggctcaaaaagcctagtttggcttttctcacctttcgatgaggttactttcagtaagctgattagtctcagtaaatgtaattatttctagcttttgatttaaaatgataaaggtat

SEQ ID NO: 917671 - DNA, 776 bp, Homo sapiens
ttattgtagctttaaagcccagagggacaagggcagaaaaggaatgtgtagagggcctaactgtgaaataaatgagaagtgtaaacactgatccagaaaatgcttgcactaaggagccaggaatagaggggtaggtggtagttagtgccttcctctgaaggcagtgatcttatttccaccattcccttccccccaccccacccagttcttttccaaactaaatttctccagtttccagaacccctcaccacccccatttattccacttctgttcaggtcaacaatttcaaaatggaaatagtttcaatgtgcctctaactttgatagtcatagatgaacactgcaaaaaaaaaaacaaaattccagaactatattaggcaaagaatgtaaaaatcagccagagkccaggcgcggtggctcaggcctgtaatcccagcactttgggaggccgaagcgggcggatcacaaggtcaggagatcgagaccatcctggccaacatggtgaaaccccgtctctaataaaaatacaaaaattagctgggcgtggtggcgcatgcctgtaatcccactcgggaggctgaagcaagagaattgcttgaaccagggagtcggaggttgcagtgagccgagatcacgccactgcactccagcctggcgacagagcaagactccgtctcaaaaaaaaaaatcagccagaatcccagaaaagtttaacacttggggtatgttcatccaacaacttccatgtacatacacaaacatgaattcttatttta

SEQ ID NO: 917672 - DNA, 721 bp, Homo sapiens
agtgggcctatttcgatattggaggcaatacactcctcatttgggtgtgttactccagcccatttattgagtgacctgaaaggttgcaagttttgaatggggtccagaacaggagaaggctctgcaataggtccaggctgctgtgcaagctgctctgccacttgggccatatgaacagcagatccaatggtgcttgagttgtcattggtagataaggatgctgtttggagtctttggaaggcccccataggtgaatcacagtggaggcatctaggatttcagaccaaggccctgccatcttctgcaggtaaccattcttcttttgagagacagctcttggcctgttactaagcattggtagaaactgaatgtttgactataagccatgaagtcaccatgtgacctgagcttcctatcatgaactgggcactttctgaccaatctarccataaagtgggtagtgcacagcagcattccatcatcaaatggaagtggcatatacatgatcaggcttcagcaggtcctgaagtcacaagtaagttacatgaggaagtggctcaaatgcccatcgtctccactcctgccatcctgccttctctcccccaacctgcactgatggcctaatgtggagttccctatgatcagttggcagaggaagggaagactagggcctagttcatagagggttctgcaccatatgcagacactgtccaaaagttga

SEQ ID NO: 917673 - DNA, 599 bp, Homo sapiens
tgtacactaataccactgttggctcttactctcaggctgattcctgggcctccacatagtttgctcagatgtcagatgcctttagtagcagtggtggaccagttggatgagcaagttcttgggccactgggcagatggtgtgatatggatgatcacagttgcagtggcaagatgattctttgggttctgagcagtatacattggtattggcaatggctgtggtsggctgagtgggctagtttccaggcctgcaggtgacacttataagtgggtgacacctgagttggtagcagctaggagtgtaggcccagtctcaagctgcctgaagaagtgcttaggtgtccaaggtggtggattgggtttggcaaccccccaggaccttgggctatgttctgtgtgttgtggtgggggaaaacctaagctgggcaggcttgtgctcagacctctcaatggtgacagtaggcaccagttgtggtggacaggggcagggtgatccttctaccccaggaagaatgctcagttgaggggcagtagcagctgcactgatatcctgccgctggagggggagaggctggtctctgtggccacagccttggctg

SEQ ID NO: 917674 - DNA, 795 bp, Homo sapiens
gcattcctgcacccgaagcctgggacaggtgtacgcttatgtgctggcagcggttggcggggggggtgtcgccaaagagcggggatgctgagaatggtccccttgctgggctgcaggtggggagggatgcctccgggattcccagagtcactggtggcatgtgccccccgctgccctgcccagtgccccgccctggggaccctgtagtgagtgcagcagccacagcccacccttgttgggggctgtggtcttagggtggggacatcagcctgagggtcattattggaggtggggccagaatgtggctcccgaatgactctttttttttttttgagacgcaatcttgctctgtcacccaggctggagtgcagtggcacgatctcagctcactgcagtctccacctcccaggttcaagcagttctctgcctcagcctcccaagtagctgggattacaggygtctgccaccacacccagctaatttttgtatttttagtagagatggggtttcaccatgttggccaggctggtctcaaactcctgacctcatgatccacccaccttggcctcccaaagtgctgggattacaggtgtgagcaactgtgcctggccggctcctgcatgactcttagcccaggtgcagcccagcaagcattagcgtgtggagagcccagcgggcattagtgtgtggagagggcatggctagtataggggctagcgagtagagcatgctgtgtcgtctttcctgtagagctggagtgacctgctcaggtgggaagtttggagagactccagc

SEQ ID NO: 917675 - DNA, 768 bp, Homo sapiens
aggtgagcactaatattagtcccattttctcagtggggaaactgagactagaaatcatgtaactaggccaggcatggtggctcatgcctgtaatcccagcactttgggaggctgagacagggcggatcacctgatgtccggagttcaagaccagcctggccaacayggtgaaacccatctctactaaaaatacaaaaattagctgggtgtggtggcgcatgcctgtaatcccagctactggggaggctgaggcagtatattcaattgcttgaatccaggagtggaggttgctgtgagccgagattgcgccactgcactccagcctgggtgacacagtgagactccgtctcaaaaaaacaaaaaataaaaagaaataatgtaactgtatgaaaccaggtcagttccactcaaagacagtgacctttcctctatccactgtctctgagatctttaagcaacagctctctgggaaggtgacttaggctacctaccagtcattggttaaactctcaatcagaaggaccactgtctggaggctggagctcagggacggtggcacattcatctccgcccccagcacctccctagcgcaggggttggcacctggcatctggtgggtgttcagcatctgcttgccaaatgagctgaatcacaaggattctgcagccaatggtgtcaagactgtgctgagaatgtgcagtgtggctctgacaaggacagcatcctcccccatctccagtggcaggtgacacaaaagccacttgtgga

SEQ ID NO: 917676 - DNA, 546 bp, Homo sapiens
ttttttgtatttttagtagagatggggtttcatcatgttggccaggctggtctcgaactcctgagctctgatgatccacccacctcagcctcccaaagtgctgggtttgcaggtgtgagccaccgcacctggcccatgctgccttctttcagtgctttgtgccagccgtgctctgtcctgcctcaggacttttgcatgtgctgtgtgctgttgtctctcctagaacatacttcactstcctctttgcttcctgaactcgtatttatccttcagatttcaactcttttcctcagcaaagcctcccctggcctctgccaaggttaagaggtctgtgaaaggctcagctagcaccaggcacctctacttgggagcgcttgtcacagtggtgattctacatttgtccctgtaattattgtccacctccgcaaccagacttactgctccaaaagggtaggacccgcaaacatcttgttaactgctgtattaccagcagcaagccccatgcctggcacattgcaaattctctaaatatttgctgaatgaaga

SEQ ID NO: 917677 - DNA, 547 bp, Homo sapiens
gtccctggcttgaaggtgggatttcaccaaggatacgcccctttctgcccctaagcctatctgccttctgctgccatcaacatatcatccatgacgcacaggctgttcatgctgagggttgcctgaaggcctatgccaatcctccctcagtcccccccttggcctccttcccatgctcatttgtgcccaaagtccagagggagccaaggcagcaggggctagcatgtcagagccacccctgagagcactcacatccaactgkgttgcaacagcacctggggttggctacaactctggtccaaaattggagtaggtgccgggagtggggagaggccagacagtgggaacaggcactttcgagccttcaggggtgaaaggctttctggtccctggagagtgcagggatactggggtctggagctgtggctgggcatctgtgactgagcttgggagtgtgggctcctgccccaccaacttggtggcgggtggggctctcgcctgttcctggctcccactggacctatgtagtaaatagctgcacctctcc

SEQ ID NO: 917678 - DNA, 633 bp, Homo sapiens
gaagggcagggctgctgccttctcttagtccccaagatcacagggaggccgcctgggcagccacgatttgggcagctacagttgcatccggaagggtggggctcctgcctgctcccagctcctgctggctccctggagcatgcagctcagccacacctccactgcagccagcatcttggtggtggctgctccaggtgggccaccactgctatcaatactatttccaaatttcaagcatgtgacttgagataattaaatactttacaaaattcrcctcaagataatttgtattttagaagttttgctgttttactagataaaataagaacaaagatggttcatgaaaattcttaaaattaattatagattcaaaaatattttttctggccaaatggtgtttaaaattgttattctttacatatcagggcaattcaaaaatgttgcttctggaaaattatcctctttttttggtagcttcatagattgctaagctcatttatagagcttttggttcagttggtctggggtggagcctgagaatttgcatctctagcaagttcccactacaatgaattcttctgtctataggtcataataacaaaatcctcttatactgctataatagggaaattt

SEQ ID NO: 917679 - DNA, 633 bp, Homo sapiens
gaagggcagggctgctgccttctcttagtccccaagatcacagggaggccgcctgggcagccacgatttgggcagctacagttgcatccggaagggtggggctcctgcctgctcccagctcctgctggctccctggagcatgcagctcagccacacctccactgcagccagcatcttggtggtggctgctccaggtgggccaccactgctatcaatactatttccaaatttcaagcatgtgacttgagataattaaatactttacaaaattcgcctcaagataatttgtattttagaagttttgctgttttactagataaaataagaacaaagatggttcatgaaaattcttaaaattaattatagattyaaaaatattttttctggccaaatggtgtttaaaattgttattctttacatatcagggcaattcaaaaatgttgcttctggaaaattatcctctttttttggtagcttcatagattgctaagctcatttatagagcttttggttcagttggtctggggtggagcctgagaatttgcatctctagcaagttcccactacaatgaattcttctgtctataggtcataataacaaaatcctcttatactgctataatagggaaattt

SEQ ID NO: 917680 - DNA, 599 bp, Homo sapiens
ccagaatgagatagcactacacacctatgagaatgactaaaaccaacaatactgagcataccaaatctcagcaaggatgtggaaaaactggtaaatttgtacgctgctggttttgaatggaaagtggtgcagccactttagaaaacaattcagcaagttcttcaaaattagacatgtacctagtgtacaatccagcaaattttactcctatttatttacttaagaaaaccgaaagcctttgcccatagcaaagcttgtacacagatgtttttagcattcttagtgagggctaaaaaactggaagcaacctaaatgcccatcacaggtaaacaggtaaacaaatggtggtagatacatacactggaatgctactcggctctcaatccaaaggagtgaattattgataacgtgcaacaacagtgatgaytctcaaaataattacatgaagtgaaagaagtgagacaaaaaaaaaactacatgttgtgcaattccacttatgtaaagtctaggaaatgcatagtgatctatagcgatggaatgcaggtcagtgattgcctcagatagggctgagggcagcagtgagcagtggggattacaaa

SEQ ID NO: 917681 - DNA, 622 bp, Homo sapiens
tgtctactaaaattacaaaaataaaaaataaaaattagcagggcattgtggcgcatgcctgtaattccacctactctggaggctgaggcaggagaatcgcttgagcccaggaggtggaggttgcagtgagctgagattgcaccactgcactccagcctgggccacagagtgacactcttgtcggaaaacaaaacaaaaagwctccttagattaaaactggattccagcctcggttccactggtcaccattcaagtactttgcatctctaagtctctgtttctttaacttcaaagggaagttagcattttccttacagaggtgctgaggattaaatgagaagagggtatgagatttgaggctggggaaggaggcatggggttctaggaaagggaggcagtcacttaggcctggagtaaggggacaggggcctgggcaggcgacagagccccacagtgctgttgctaccctgttaatgggcccagaatctggaagccagccaccacatgccctcacacccagggtcttcctgcaggtggagctgaagagccaagaggctcagagtctgcagcagcagccagaccattacctgggtcacctgcagcagtacgtggccacctatca

SEQ ID NO: 917682 - DNA, 536 bp, Homo sapiens
atggctcactgcagcctcgatctcctgggctcaagcgattctcccacctcagcctctggttgctggaaccataggcatccaccatgtgtacctaatttttgtatatttgtagagactgggtctcacttatttgcccagattcattttaaccttttctacgtgtgcaatacaagtgtgcattaaggatatccacaaggctgtgtaaccctctccgcgaccattcccagagctttcctaatcagaaaactgtaaccattgcacagtaattgcccttccctgaactcccagcccccggcgagcggggctyatggctgaataacactgcactgcatgtgcagactacattttgtttatccacttatccctccagggtccttgggttgtttccaccctctggctgctgtgaatagcgctgctgtgaacatgggtgtaatgcgcttgcttcagttcctgcattcagcccttctgggtatatactgaggagaggaattgctggggcgcatggtaattctatgtttagggttttgaggatccac

SEQ ID NO: 917683 - DNA, 568 bp, Homo sapiens
gtaaatggcacttatgtgtaatggctaatacgtagtttcttgcccagccacgtgtcttctctgtatttcctcacaattgcagccacacttcctctcagtggtctgaaagtgtgagctttccccactagaatgctggctgcaratcttggcttagcagtcccaggctgcacaccgctgtcctgcagtgaactcaggctttatgttccctcccaaccttggaagcatcaggggaagagaccttggcagtggctatggcagagggcctttcacttgtctcttcaccccagagatatgcagagctgctgccaatcagtgtgatattcctgggggctggggagtctgttgtgggcccaagctgggggactctgcctgttgacaggcagaggatgtgggggactcatggggaagacagactagcctcttctccttagggaggctgtgacttgctggaggtgtgagtaaagcatttagggtctttgttccttccccagtttgagggcagcaagggcagtaccactgcagcagcagtggcagaggggctttcagttgcctctgggaactccacctc

SEQ ID NO: 917684 - DNA, 581 bp, Homo sapiens
ataagtaacaaggaagtgaatgttaatagccaagacaatggggaaaatgtctccagggcatttcagagatcttcaaggcaacccctctcatcacaggcctgaaggcctagaagggaaaaatggtggcccagggccttactgctttktgcagatttgggatatggcaccctgcataccagccactccagctccagccacagctaaaaggggccaaggtacagctcaagccatggcttcagagggtgcaagccccaagccttggtggctttcacatgatgttgggtctgtggatgtttagaaggcaagaattgaggttttggaacctctacctagatttcagaggatgtatgaaaatgcctggatgtccaggcagaagtcttctggagccctcatggagaaccccctactagggcagtgtggatggggaaatgtgattttggagctcccacacagagtccccactggggcactgtctagtggaactgtgagaagagggccaccatcctccaaaccccagaatagtagatacatctacagccacaggcactcaacactagcctatgaaggcagttgcaggggct

SEQ ID NO: 917685 - DNA, 604 bp, Homo sapiens
gcgcagcatgtactcagcaggcgctcagcaggcactcagcaggcacacagtgtatactcagcaagtgcttagtaggtgcacagtgtgtactcagcaggcactcagcaggcacagtgtgtactcagcaagtgcttagtaggtgcacagtgtgtactcagcaggcgctcagcaggcacagtgtgtactcagcaagtgcttagcaggtgcacagtgtgtactcagcaggtgcttagcaggcacacagtttgtactcagcaggcgctcagcaggcacacacaacagtgtgtactcagcaagtgcttagcaggtgcacagtgtgtactcagcaggcactcagcaggcacagtgtgtactcagcaggygctcagcaggcgctcagcaggcacagtgtgtactcagcaggcactcagcaggtgcacagtgtgtactcagcaggcgcacagtgtatactcaccgggcgctcagcaggcgcagtgtgtgctcagcaggtgctcagcagatgcgcagtgtgtactcatcaggttctcagcacatgcacagtgtgtactaagcaggtgctcagcaagtgcagtgtgtacttagcaggcacttagcaggcgcacag

SEQ ID NO: 917686 - DNA, 646 bp, Homo sapiens
tctggccttattctggctgctgggggtaaatgcagaggaaggaagaacagaaacaggtccaggtggtaatctctgggaggaaagcacaaggtttttccttcccccttgttaaagcctctgtgttttgccctagtttccagcagacatttccagcataacagaagcagtgcctagtgagagtgagccccctgctcttcaaaacaacctcttgtctcctcttctgaccgggacagagtcaccatttgatttggaacagcagtggcaagatctcatgtccatcatggaaatgcaggtaggattgtcggaaccgggcacaaacctattggattttgcacagattgkcttagcactcagttgcttttccatctccaaggagagaaagtgtaatactttccctgaatcatagagaagtggggacaatgagaagaaacctgtccaggtgtgtccttggggcaatgggagctggagacaggtagggtttgggttaaataaaactcaggactcagccttccaaatcagggcctgcctcctgggtgtgccttcttcctttccttcaggcagataggcacttggctgaatgcttccaaggttgtgcgttaataatagctgacattcacatggtgcttcacagccatcgttcgctcac

SEQ ID NO: 917687 - DNA, 600 bp, Homo sapiens
tctcccattcaatgggttgcctgttcactctgatgatagtttttttttgctgtgcagaagctctttagcttaattagatcccatttgtcaattttggcttttgttgcaattgcttttggtgttttcatcatgaagtccttgcccatgcctatggcctgaatggtattgcctaagatttctttttgggttttttatgattttgagttttatatttaagtctttaatcaagacttttctgcatatggctagccagttttcccagcaccatttattaaatagggaatccttttcccaattcctatttttgtcaggttcatcaaagatcagatggttgtagatgtgtggtggtatttctgaggtctctattctattccatygtatgtcagtaccacgaagttttgcttattgtagccttgtagtatagtttgaagtcaggtagcatgatgcctccagctttgtttttgttttgtttttttttttttttttttgcttaggattgtcttggctataagggctcttttttggttccatatgaaatttaaagtagtttttgctaattttgtaaagaatgtcaatggtagtttaatgggaacagaattg

SEQ ID NO: 917688 - DNA, 661 bp, Homo sapiens
ctgaattataacagataaataaagaagagctggtaccatttctactgaagctattccaaaaaactgaggaggaggaaatcctccctaattcattctatggggccagcatcatactgacacacatactttttaatayagtttgccatcttttctttggtattgtttgtattttctttctacaagtttttttaagcctgttagatttgggttaggattgcattgaatctatggatttacttaggggtaactgacagcttaacaatattgagtcttgtgacctatgaacacattatttctccttttagttggttctactttaactcagtgatatcttgtagttctccttttatagatctttcgcatctttaaaaaatatatccctaagtatttgataattttgatgatactgtaaatggtattttttatttgaatttcaagttgtttgttgctagtatatagatgtagaattgatttttgtatattgaccttgtatcttgcaacttgactaacttattggttctgtatcagttctagaagtgtttttacagattccattgcatttctatattaacaattacactgtctgtgaataacaacaggcttacttgtttctttccataatagatgtctttcctttttctttgttgcgctggaaagaacc

SEQ ID NO: 917689 - DNA, 605 bp, Homo sapiens
gagctgttttccatattctttgctgataatgcaaaaggaacctttaaaacaaacagctccaagtcaccacacatcctacaagctgaaagggcccatgtggtccacacagatgctccagccacacaccaagccctgctgcagagtaattggttcycacagctatcagaggtgagagccagccgactgcctgtgccttcacaaatggccaggctgagctagacggtttatgggtccagggccaatcatcgggataaattagctgtcaggaagtaaaagcagctctagggaaatggctaggtctgtctaaaatctctgattttcttcacactaggcgcagtttatccttgaatggtgcttgctcatgctgtccaggagacaaggactctgggttaaagtataggattcaggactctaggtctaaatagacccaggtgttaaatgcccaagattatcgaccaaagtagaaaaaagatgtagggattagagattcaggaaaagctatttcctctaagattttcatggttctgaatggagcatctggggagaaaattcatttgggggttgggttgctaagaggccaagagaagggaaaatggaaaggacgc

SEQ ID NO: 917690 - DNA, 554 bp, Homo sapiens
atttggttttatgttcctgcattagtttgctaaggataatggcctccagctctatccatgttcccacaaaagacatgatcttattcttttatatggctgcatggtattccatggtgtatacgtaccacatgttctttatccaaagtgtcaatgatggacatttaggttaattccatgtctttgctatcgtgaatagggctgcagkgaacatttgcgtgcatgtgtctttatggtaaaatgatttacattcctctgggtatatacccagtaatgggattgctgagtcaaatggtagttctgctttttggcagtttcctctttgaggaatctgcagatgtaattaaggtttctaaccaaatgaccataagatggggaaagtatgctggattatccaggtggacccaatgtaagcatagtggccttgagatagaagagggagagagacaaaaggcgagggtcagaggaagagctgactatggaagaaaagcaagctctgaaagctgcaaggttgctggctttgaagatggaggaggggccaagagctaaggaataca

SEQ ID NO: 917691 - DNA, 554 bp, Homo sapiens
atttggttttatgttcctgcattagtttgctaaggataatggcctccagctctatccatgttcccacaaaagacatgatcttattcttttatatggctgcatggtattccatggtgtatacgtaccacatgttctttatccaaagtgtcaatgatggacatttaggttaattccatgtctttgctatcgtgaatagggctgcagtgaacatttgcgtgcatgtgtctttatggtaaaatgatttacattcctctgggtatatacccagtaatgggattgctgagtcaaatggtagttctgctttttggyagtttcctctttgaggaatctgcagatgtaattaaggtttctaaccaaatgaccataagatggggaaagtatgctggattatccaggtggacccaatgtaagcatagtggccttgagatagaagagggagagagacaaaaggcgagggtcagaggaagagctgactatggaagaaaagcaagctctgaaagctgcaaggttgctggctttgaagatggaggaggggccaagagctaaggaataca

SEQ ID NO: 917692 - DNA, 685 bp, Homo sapiens
atcaaattaatgaaatgaagcaagaagagaagtttagagaaaacagaataaaaagaaatgaacaaagcctctaagaaatatgggactatgtcaaaagaccaaatctacatttgattggtgtacctgaaagtgatggggaggatggaaccaagctggaaaacactcttcaggatattatccaggagaacttccccaacctagcaaggcaggccaacattcaaattcaggaaatacagagaacaccacaaagatactcctcgagaagagcaatcccaacacacrtaattgtcagattcaccaaggttgaaatgaaggaaaaaatgttaagggcagccagagagaaagattgggttacccacaaagggaagtccatcagactaacagcagatctctcggcagaaactctacaagccagaagagagtgggggccaatattcaacattcttaaagaaaagaattttcaacccagaatttcatatccagccaaactaagcttcataagtgaaggagaaataaaatcctttacagacaagcaaatgccaagagattttgtcaccagcaggcctgccttacaagagctcctgaaggaagcactaaacatggaaaggaaaaactggtaccagccactgcaaagacatgacagattgtaaagaccactgatgctaggaagaaactgcatcaacta

SEQ ID NO: 917693 - DNA, 747 bp, Homo sapiens
tgggactataggtgtatgccaccacacgaggataattttaaaattttttcaaaatagaggcgggatctcagtgtgttgtctaggcaggtatcgaactcctgggatcaagtgatcctcccaccttggcctcccaaagtayggggattacaggtgtgagctaatgcacccagcctaatttttttattttttgtagagacagggtcgcactatgttgcccaggtggggggccaaaggttttcagaataagaagaggggatgaagtcctctgggggtgaaaagctttattcttttttattattattattttgagacggagtttcgctcttgttgcccaggctggagtgcagtggcgccatctcggctcactgcaaccttcacctcccagattcaagcaattctgctggcctcagcctcccaagtagctgggattacaagcgtctgcaaccacgcccagctaattttttgtatttttagtagagacagggtttcaccatgttggccaggctggtctcaaactcctgacgtcaggtgatccacccgcctcggcctcccaaagtgctgggattacaggtgtgaggtaccgcgcccggccaaaagctctattctttgaaagattccatatacagaaccttcagtcagattctcactgtcttttctaactaaaatcccaaagccctttccctccaactgtgtttgggggaagtattcctcgcataacacatcaggggaccagcctctggagagggg

SEQ ID NO: 917694 - DNA, 747 bp, Homo sapiens
tgggactataggtgtatgccaccacacgaggataattttaaaattttttcaaaatagaggcgggatctcagtgtgttgtctaggcaggtatcgaactcctgggatcaagtgatcctcccaccttggcctcccaaagtacggggattacaggtgtgagctaatgcacccagcctaatttttttattttttgtagagacasggtcgcactatgttgcccaggtggggggccaaaggttttcagaataagaagaggggatgaagtcctctgggggtgaaaagctttattcttttttattattattattttgagacggagtttcgctcttgttgcccaggctggagtgcagtggcgccatctcggctcactgcaaccttcacctcccagattcaagcaattctgctggcctcagcctcccaagtagctgggattacaagcgtctgcaaccacgcccagctaattttttgtatttttagtagagacagggtttcaccatgttggccaggctggtctcaaactcctgacgtcaggtgatccacccgcctcggcctcccaaagtgctgggattacaggtgtgaggtaccgcgcccggccaaaagctctattctttgaaagattccatatacagaaccttcagtcagattctcactgtcttttctaactaaaatcccaaagccctttccctccaactgtgtttgggggaagtattcctcgcataacacatcaggggaccagcctctggagagggg

SEQ ID NO: 917695 - DNA, 747 bp, Homo sapiens
tgggactataggtgtatgccaccacacgaggataattttaaaattttttcaaaatagaggcgggatctcagtgtgttgtctaggcaggtatcgaactcctgggatcaagtgatcctcccaccttggcctcccaaagtacggggattacaggtgtgagctaatgcacccagcctaatttttttattttttgtagagacagggtcgcactatgttgcccaggtkgggggccaaaggttttcagaataagaagaggggatgaagtcctctgggggtgaaaagctttattcttttttattattattattttgagacggagtttcgctcttgttgcccaggctggagtgcagtggcgccatctcggctcactgcaaccttcacctcccagattcaagcaattctgctggcctcagcctcccaagtagctgggattacaagcgtctgcaaccacgcccagctaattttttgtatttttagtagagacagggtttcaccatgttggccaggctggtctcaaactcctgacgtcaggtgatccacccgcctcggcctcccaaagtgctgggattacaggtgtgaggtaccgcgcccggccaaaagctctattctttgaaagattccatatacagaaccttcagtcagattctcactgtcttttctaactaaaatcccaaagccctttccctccaactgtgtttgggggaagtattcctcgcataacacatcaggggaccagcctctggagagggg

SEQ ID NO: 917696 - DNA, 647 bp, Homo sapiens
gccaccacacgaggataattttaaaattttttcaaaatagaggcgggatctcagtgtgttgtctaggcaggtatcgaactcctgggatcaagtgatcctcccaccttggcctcccaaagtacggggattacaggtgtgagctaatgcacccagcctaatttttttattttttgtagagacagggtcgcactatgttgcccaggtggggggccaaaggttttcagaataagaagaggggatgaagtmctctgggggtgaaaagctttattcttttttattattattattttgagacggagtttcgctcttgttgcccaggctggagtgcagtggcgccatctcggctcactgcaaccttcacctcccagattcaagcaattctgctggcctcagcctcccaagtagctgggattacaagcgtctgcaaccacgcccagctaattttttgtatttttagtagagacagggtttcaccatgttggccaggctggtctcaaactcctgacgtcaggtgatccacccgcctcggcctcccaaagtgctgggattacaggtgtgaggtaccgcgcccggccaaaagctctattctttgaaagattccatatacagaaccttcagtcagattctcactgtcttttctaactaaa

SEQ ID NO: 917697 - DNA, 593 bp, Homo sapiens
ccaggttcaagtgactctcctgcctcaacttccctagaagctgggattacaggcacacactaccatgcctggctaatttctgtatttttagtagagacgggatttcaccatgttggtcagtcttgtctcgaactcctgacctcaratgatccatcctcctcagcctcctggagtgagccacggtgcctggcctggaaagaggtttttaaaggttagaggacacgagggcctgtttttaagctgagaggaggaataattattgaagatatgaaagagaatggggacagggacagagcaagttctcagaggacaccagcacaggtggctaagatccgagctgcttcctgcagcgtcaccacaccggcgacccatgctgaggcttcctcaatgaaaatccccaccttttttctacatgaactgctgcaagccacagttgcccatctgatatttgcatgcctgtgagtttcagatgtaactacaagaatttacacttatcctaattacgtttcataaactgtctttatgatcatctgttctggtacaacgaccaagaaaacattcagtgggtggtttggcaagttctgttttgaatc

SEQ ID NO: 917698 - DNA, 584 bp, Homo sapiens
cccaggttcaagtgactctcctgcctcaacttccctagaagctgggattacaggcacacactaccatgcctggctaatttctgtatttttagtagagacgggatttcaccatgttggtcagtcttgtctcgaactcctgacctcaaatgatccatcctcctcagcctcctggagtgagccacggtgcctggcctggaaagaggtttttaaaggttagaggacacragggcctgtttttaagctgagaggaggaataattattgaagatatgaaagagaatggggacagggacagagcaagttctcagaggacaccagcacaggtggctaagatccgagctgcttcctgcagcgtcaccacaccggcgacccatgctgaggcttcctcaatgaaaatccccaccttttttctacatgaactgctgcaagccacagttgcccatctgatatttgcatgcctgtgagtttcagatgtaactacaagaatttacacttatcctaattacgtttcataaactgtctttatgatcatctgttctggtacaacgaccaagaaaacattcagtgggtggtttggcaagttct

SEQ ID NO: 917699 - DNA, 630 bp, Homo sapiens
cccaggctggagtgcagtggtgcgatctcggctcactgccagctccgccacccaggttcatgccattctcctgcctcagccttccgagtagctgggactacaggcgcccgccaccatgcccggctaattttttgtatttttagtagagagggggtttcgccgtgttagccaggatggtctcgatctcctgatgtcgtgatccgcccgcctcagccgcccaaagtgctgggattacaggcgtgagccatcgcgcccggccaagcaccattttattttcttaagattcctagtctctttgwaagaggttacagtcataaatttacaaagtttcttttttgttgttgttgttttttgggaaggagtctcgctctgtcacccaggctggagtgcagtggtgctatcttggctcactgcaagctccgcctcccaggttcatgccattctcctgcctcagcctcccaagtagctgggactacaggcacccgccaccacgccctgctaattttttgtgtttttttagtagagacagggtttcactgtgttagccaggatggtctccatgtcctgacctcatgatccacccgccttggcctcccaaagtgaaatttacagaatttcaaagcctagcac

SEQ ID NO: 917700 - DNA, 428 bp, Homo sapiens
tggtaaagaaccctgttttgtcatattaccagagctgattttctggctccttctcatttgggtrggctttgtcagggggaaggtctagggctcaaggttcctttcgtcccacagggtgtttccttgatgtagtgctcttcccctttttctagagatctggcttcctgagagccaagctgtagagattgttatctctctactggatctagcctcccagcaagtctaccaggctctgggctggtactgggggttgtctgcacagagtcctgtgatgtgaaacacctgtgggtctctcagccatggattctggcacttgctccaggtggatgtggcagggggtataatggactctgtgagggtccttagttttgattagtggactatttttgtgctggttggcctcctgccaggaggtggcactttcaaga

SEQ ID NO: 917701 - DNA, 428 bp, Homo sapiens
tggtaaagaaccctgttttgtcatattaccagagctgattttctggctccttctcatttgggtaggctttgtcagggggaaggtctagggctcaaggttcctttcgtcccacagggtgtttccttgatgtagtgctcttcccctttttctagagatctggcttcctgagagccaagctgtagagattgttatctctctrctggatctagcctcccagcaagtctaccaggctctgggctggtactgggggttgtctgcacagagtcctgtgatgtgaaacacctgtgggtctctcagccatggattctggcacttgctccaggtggatgtggcagggggtataatggactctgtgagggtccttagttttgattagtggactatttttgtgctggttggcctcctgccaggaggtggcactttcaaga

SEQ ID NO: 917702 - DNA, 458 bp, Homo sapiens
ttggagaaacagtgtaaaacggcagtgtaaacaagagcagggcatgtatgagtagttgagaatggagaacaggagtatgactagacagaaaatagtagggatgacaagttttttgggggcacagtctaagttggtccggtgtctggaatgagactggggcctaataaaaaggagctcaaatgggctgtaccttgtagcatgccgaggacaggtctgacttctaagaagggaaagtggtaaaagtattgtccagtctttttaagttggtggctgagcttggtgaggtstgtttttaaaagacctttagtccgttctacttttcttgaagacagaggaccgtaagggatataaaggtttcactgaatactaagagcctgaaaaactgcttggctgatttgactaataaaggctggtctgctatcagactgtatagaggtgggaaggctaaactgaggaat

SEQ ID NO: 917703 - DNA, 726 bp, Homo sapiens
tgattctctaacctcttcaagtctttgcttcaatgtcaccttcccagtggtgccttccctggctcctctaccttaatggcaacccccgccccactgcaaactccctccaccagcacttcttgtcttcctttcctgctctttattttcttccatagcatttatcaccttctaatatactagtatttcattcattttcttgtttctttttgttttctctaccataatgtcagtgtgacagtgcagaatttttgtctgttttgttccctgctgtttccccatgcctagaagatgtccagaatatggtaggtacttaaaaagtaattgttgaatgaatagcagccgaggtattaggaaaaattaaaaagtttttttttttttttgagactctcactctgttgcccaggctggagtgcagtggcataatctcagctcactgcaacctccacctccagggttcaagtgagtctcctgcctcagctccctgagtagctagaactataggcacctgccaccacacccgactatttttatatttttagtagagacaaagtttcactaygttggccaggctagtctccaactcctgacctcgtgatccgcccgcctcagcctcccaaagtgctgggattacaggcatgagctaccgtgcccggccaaaaaaatattcttaagaagaacactagcacagtgactcactcataataggacatccgtatgtgctggttc

SEQ ID NO: 917704 - DNA, 570 bp, Homo sapiens
tatgcacacttatgtttattgtgacactactcacaatagcaaagacttggaatcaacccaaatatccatcaatgatagactggattaagaaaatgtggcacatatacaccatggaatactatgcagccataaaaaaggatgagttcatgtcctttgcagcgacatggaggaagctggaaaccatgattctgggcaaactatcacaaggacagaaaaccaaacaccgcatgttctcactcatacttgcgaactgaacaatgagaacacttggtcacagggtrgggaatatcacacaccagggcctgtcgtggggtcaggtgtggggggagggatagcactgggagaaatacctaatgtaaatgatgggttgatgggtgtagcagaccagctgtatatgtatacttatgtaacaagcctgcacgttgtgcacatgtaccctagaacttaaagtataaaaaatattcaggaaaaaaattaaaaataacaattccacagtaaaaaaatgcaaataaataaataatacagtataacaactatttatgtagcatttacattgtattaggtattata

SEQ ID NO: 917705 - DNA, 570 bp, Homo sapiens
tatgcacacttatgtttattgtgacactactcacaatagcaaagacttggaatcaacccaaatatccatcaatgatagactggattaagaaaatgtggcacatatacaccatggaatactatgcagccataaaaaaggatgagttcatgtcctttgcagcgacatggaggaagctggaaaccatgattctgggcaaactatcacaaggacagaaaaccaaacaccgcatgttctcactcatacttgcgaactgaacaatgagaacacttggtcacagggtagggaatatcacacaccagggcctgtcgtggggtcaggtgtkgggggagggatagcactgggagaaatacctaatgtaaatgatgggttgatgggtgtagcagaccagctgtatatgtatacttatgtaacaagcctgcacgttgtgcacatgtaccctagaacttaaagtataaaaaatattcaggaaaaaaattaaaaataacaattccacagtaaaaaaatgcaaataaataaataatacagtataacaactatttatgtagcatttacattgtattaggtattata

SEQ ID NO: 917706 - DNA, 707 bp, Homo sapiens
gttatgcatgggcttagcaacgtggacttcactcaccaaggctgacttggctatggccactgctgagtgtccaatttgccagcagcagagaccaacactgagcccttgatatgacatcattcctcagggtgatcagccagctaccttgttgattatattggacctcttccatcacggaaagggcagagatttgtcctcactggaatagacacttactcctgatatgggtttgcctatcctgtatgcaatgcttctgccaagattaccatgcatgggctcaccaaaggccttacccaccrtcatggtattccacacagcattgcctctgaccaaggcactcactttacagctaaagaagtgtgccagtgggctcatgctcatggaattcactgtttttgtttgtttgttttttgagatggagtgttgctctgttgccaggctggagtgcagtggcgcgatctcggctcactgcaacctctgcctcccaggttcaagcgattctcctgcctcagccttccgagtacctgggactataggtgtgcgccaccacgcccagctaatttttgtatttttagtagtgatggggtttcaccatgttggccaggatggtctcaatctcttgaccttgtatctgcccccctcggcctcccaaagtctaggattacaggcatgagccaatgtgcctggccacactggtcttaaccatg

SEQ ID NO: 917707 - DNA, 777 bp, Homo sapiens
atgtaacactgtcctcaggaacaaaataaagcgtcattatgcccattttacagaaagaaagctgagtcaaaaaatgttaagcaaatcatttaaaatatcacattaactcagtgactgagctggaaccaagtatgccaaaatttccaatgatcagagattattttttgctcctagctaacccattattctctttgttgaatttagtggcataagaagtgaagaatggaatgagtatggtcagaaatacattttgttctcattttaaacttttgttttccagataaaatgaagtgtctacatagtatgggtatctcaccacttagaacgtatccaagaattttttttatttttataaggctagcgaggaggttgtctggcataygacagcactcactgaggttttgctattgtctttggaaagagggctgtaaccacaagagccaggcaagatccagacatggagaaattcagaaagttgccgtgagacctcatgccttgtgatctgtctcataggaatctctaagcatcacctcttcagcagaacacttgtgtcctcataaattatttatttcagagcctacttacttctgagataaaggtgatcggcccaaagtcatagaatttagacaatgaatgatcttaaaaagtagcaagtatgctatctcattttgcagatgagaaagctgtgatttcagagaggagcagtagcttatcaaaggccgtgcaagtcaatttgtgacaaagtgtaaaccagacaaaaggttatcacaaggctca

SEQ ID NO: 917708 - DNA, 590 bp, Homo sapiens
cattccaaatgggagaaattggccagaacaaagtggctacaggcctcatgcaagtccaaaacccaaaatgatctcctttgactccatgtctcacatccaggtcacactgatgcaagaggtggcttttcatggtctttggcagctctgcccctgtggcttggcagggtacagcctctctcctggctgctttcacaggctggtgttgagtgtctgtggcttttctgggcccatggtgcacgctgtcagtggatctaccattcattctggggtctggaggatggtggccctcttctcacagctccactaggcggtgccccagtggggactctgtttgggcgctctgaccccacatttcccttctgtactgccctagcagaagttctctktgagagccccgcccctgcagcaaacttctgcctgggcatccaggcatttccatacatcttctgaaatctaggtggaggttcccaaaccccatttcttgacttctgtgtatttgcaggctcaacaccatgtggaaactgccaaggcttggggcttgcaccctctgaagccacaggcaagttctaccttggcccctttcagccatg

SEQ ID NO: 917709 - DNA, 641 bp, Homo sapiens
gtagaaagtagagatgcaggtttgccatgttggccaggctgatctcaaactcctgggctcaactgcctcagcctcccaaagtgctgggattacaggcatgaatcaccatgttcggtcatcttttgttttttgactttttgccattctgactggtgtaagatggtatctcactgkggttttaatttgcatttctctggttagtgatgttgattttttcgtatgttttttagccacttgtatgtcttcttttgaaaaatgttcatgctctttgcccatgttttgatggggttgtttttctgttgttgtttgagtaccttgtagattctggatcttagctctttgttggatgcatagtttgcaaatattttctctcacttccaggttgtctgtttgttgattatttcttttgctgcccaacctcagcactttcaacactttgtgccaaatgactcttcgtcgtgggggctgtcctgtagactggaggataaatttagcagcactcctggcctctatacactaggagtcagtagcatctctgccactgccttaccaccccctgccagttgtgacaaccaaaaatatctctagaattaccaaatgtctcctgtttggggggacaaaactgcctctacttagttaaa

SEQ ID NO: 917710 - DNA, 589 bp, Homo sapiens
tttattacaattagatcttatgctgtttgtctaattatacttctgcactactgtccacttcatcagactagcataaaaatatacaggttgtcctgattctttgggtctgtatttttgaaagctcttgtgtcaagtttattattgtcgacgaaaagagtcaaactctgtaaaatatttgactgttcagtcaaatattcattctgagccaaatacgagtgaccctggcccatgacacagccccaggggatcctgacaacatgtgcctgaggtggtcaggctacaattcgtttttatgtattattgggagacataagacatcaatcgaaacatgtaagatgtacattggtttggtcaaaagctaaaagccccacacgaagtgggggcttcgaggtcataggtggattcaaagatttttctgattggtaaytggttgaaagagtttatctaaagacctggaatcaatagaaggcagtgtctgggtgaagataaggagttgtggagaccaagatccttattatgcagatgaagcctccagttagcaggctttagagagaatagattgtaagggtttcttatcagactttaaaag

SEQ ID NO: 917711 - DNA, 568 bp, Homo sapiens
tcccctgctcagtgcccttgcacttgctgtttgttctgcctggcccactcttcctgctcgttgtcatgtggctggattcttttaacatgttagatgtcagctcacatgccaccgttctgggcaggctgtccctgatcactccctggaaagtaggcctcctcccctggctagctgggttagtgccasttactatgtcaaatctccttcctttatagcgtttctcacaatctatacctatcttgtttgcaatagcattttgtttatctcccactggaacgtaagtcctagaggacagctttgacttcagtatcactctagctcaagcacctaggacagtgaccaatgcttcatagatgctccaccacgactgctgaatgttcaaggagccaagctagtaggaacaaaactgctgatggggtgcctggcaggtgtgtagcctgggtgggctctccaggtggaagggagcaaaggtgctgaagaggataagtgtgggcttcagaaggaagacacctttccaatagagcttgctttttttgtgcttgtctactgccttgttctctgatttctc

SEQ ID NO: 917712 - DNA, 568 bp, Homo sapiens
tcccctgctcagtgcccttgcacttgctgtttgttctgcctggcccactcttcctgctcgttgtcatgtggctggattcttttaacatgttagatgtcagctcacatgccaccgttctgggcaggctgtccctgatcactccctggaaagtaggcctcctcccctggctagctgggttagtgccacttactatgtcaaatctccttcctttatagcgtttctcacaatctatacctatcttgtttgcaatagcattttgtttatctcccactggaacgtaagtcctagaggacagctttgacttcagtatcactctagctcaagcacctaggacagtgaccaatgcttmatagatgctccaccacgactgctgaatgttcaaggagccaagctagtaggaacaaaactgctgatggggtgcctggcaggtgtgtagcctgggtgggctctccaggtggaagggagcaaaggtgctgaagaggataagtgtgggcttcagaaggaagacacctttccaatagagcttgctttttttgtgcttgtctactgccttgttctctgatttctc

SEQ ID NO: 917713 - DNA, 778 bp, Homo sapiens
agctgccacctcatcccaaaagccttctcagagccctacctgcagcctaaagtcatctcccaactctcacccagtggctcctgtgtgacccctcctgtgtctggtcagaggctccctgttcttttggaagctcgccgaagacctcgcagactctccttctccattgcctgagtgggcagagcgttggcagccctagcctggaggggctgggtcctcctctagtgccactccaaggcagggcttccgctccccgcctgccccctctaggccaggttggagggcagcagcagggcaggctgggcagggggcccacctggtcccacagcccctggcctagcaggctgctgtggtctcttggcctccagggccatgggggtggcaggtgccactaggctgtcggtaaagatcagcaggccaggcacagtggctcaagcctgtaatcctagcactttgggagggtgaggcaggcagatcgcctgaggtcaggagttcaagaccagcctggccaatatggttaaaccctgtctctamtaaaaattcaaaaattagctgggcctggtggcacatgcctgtaatctcagctactggggaggctgaggcaggagactcacttgaacctgggaggtggaggttgcagtgagccgagatcgtgccactgtactccaacctgggtgagagagtgagattccatctcaaagaaaaaaaaggctaggcgcggtggcttgtgcctgtaatcccagcactttgggaggctaaggtgggtggatcacaaggtcag

SEQ ID NO: 917714 - DNA, 621 bp, Homo sapiens
tacagcacttcaacctgggtaacagagctagactctgtctcaaaaaaaaaaaaaaaaattcagttgatcacatatgtgcatgtctatttctgaactctgctatgttccattataagtccatacttacgccaatactacactgccttgattattttagttgtatagtaaatcatgttagtaggtaatttaagtcctccagstttgttcttgttttccaaaactgttttggctattcttcatcctttgatttttgagacagcatctcactctgtcacccaggctagagtgcagtggtgtgatctccgctcactgcaacctccgcctcctgggttcaaacaatactcctgccttagcctcccaagtaactgggattacaggtgcgtgccatcatgcctggctaattttgtatttttaatagaggcagggtttcaccatgttggccatgctggtcttgaactcctgacctcaagtgatccacccgcctgggcctcccaaaatgctgggattacaggcgtgaggcactgcacccggcctgattttctatatagatttaagaattggcttgtcaatttcaacaaaaagtctcctgggttactgaatgggattgcattgaatctatac

SEQ ID NO: 917715 - DNA, 598 bp, Homo sapiens
cttggcttctcctactgtatctttgttacaagccctccgcaatccacagaactctctctccttccttccacctgtcagcttctctgcttctgagataagaaccatttctgtaacaccaatacttaagaaagacatgcattatgtggtgtaatcaaacctgatgctttcagatcatctacttacatcttcaacatggataagataaacaaaacaaatgcatctaaacttctgggcaatccagttgatttttaaatgtaagaatggaattccaaacacaacacattcagctatatgacagaaagtaaatctatggatatggtattttttgaaggatcttttcaacaaaagaaatgcttacataattaaaatatatatatatatatayacacattaggaaagatggactaactacaacccaagtagagaaagtatgaacaaggcctgctggacagttatacaaccttgcactcaacaactgttctcttcaatcacatggaacgtgtgcaaaaactgcccatatactgggccataaagcaaatttcaaaggactgaaattatgccaagtatattgtctgactccaaggcaattatactagaa

SEQ ID NO: 917716 - DNA, 707 bp, Homo sapiens
attctaccacaggtacaaagaggatctggtaccattccttctgaaatgattccaaacaatagaaaaagagggactcctccctaactcattttatgaggccagcatcatcctgataccaaaaaccagcagagacacaacaaaaaaagaaaatttcaggccaacgtccctgttgaacatcgatgccaaaatcctcaataaaatactggcaaaccgaatccagcagcacatcaaaaagcttatccaccaccatcgagttggcttcatccctgggatgcaagtgtgtccggaattggtgggttcttggtctcactgacttcaagaatgaagctgcggaccctcgtggtgtgtgttacagttcttaaacgtggtgtgtccggagtttgttccttctgatgtttggatgtgttcagagtttcttccttctggggggttcgtggtctcgctggctcaggagtgaagctgcagaccttcgcggtgagcgttacagctcttaaggcrgcacatctgcaattgtttgttcctcccggtgggttcgttgtcttgctggcttcaagagtgaagctgcaggctttcacagtgagtgttacagctcataaaggcagtgtggacccaaagagtgagcagcagcaagagttattgcaaagagcgaaagaacaaagtttccacactgtggaaagggacctgagcgggttgccactgctgattca

SEQ ID NO: 917717 - DNA, 596 bp, Homo sapiens
tggggtacttaaaatatctacatcatgagtttgtacttataattaaaacaatgtataaaaagtgcttagaagagttctgatcactcaacactcaatcaataataattattattaattgttattgtctcattcacaaagttcttcctatctactagttgcaaacatcccttaaaaacctagtgcagatttttaagccagcatgcaagagttaaatgtagagtatttatcataggtgatgacaccatgtagtttacaaataaattgtcatcttctacacagtgtaagagtttgttaggtgtgtcttgatttgtttgctttctgtactttatattaatctttttttttttctttttgagacagagtctcgctctgttgccaggctgcaagtgcagtggtgcaatcttggttcactgcgaactccacctcccaggttcacaccrttctcctgcctcagcctcccaagtagctgggactacaggtgcccaccaccacgcctggctaatttttttgtatttttagtagagacggggtttcactgtgttagccaggatggtctcgatctcctgacctcgtgatccgcctgtcttggcctcccg

SEQ ID NO: 917718 - DNA, 525 bp, Homo sapiens
tgtggttttaccaattctcctgatgtggcaagggagcctctgagaggttacacttcctgtccaaatgttcctgcaaattataaatatctatctcccaacgtgctgcatacgtttgatgagatctcatgttgggacaaagatgagagtaacatgaactttaagccacatctttgctgcctgattttagaaagataaaattcacacattttgccttaaacagaaccagtaagccttgcagatgttctgtaagaaatgtctttgtccccacattatgccaatttgctgtttaatgtctctcctgtgatagatcatgmccgtattcattcttgccccgggacagatcctaagatctcctcccaccctgctttagagagatgccctgttggggcaaaaagctctcaaactgtgggagatttctgctcagaaatgggaagagggagaaaaagaagctgggagctctcacccagggcatcaaaggcaggcagcacatcgaactccaccccctccccgagctggagcgaactc

SEQ ID NO: 917719 - DNA, 598 bp, Homo sapiens
aacaaatccacaaatttacagccaactgattgagaaagcaccatgaacacacattagggaaaggatactctcttcaataaatggtgttgggaaaactggatatccatatgtagaagaatgaaactaggcccccgtctgtcatcttataaaaaattaactaaaaatgggttaaagagttaaacataaggcctgaaatgataaaattaatagaataaagcagaagagtaatgcttcatgatattggtctatgcaagtattttgtggctaagacttcaaaagcacaggcaacaaaaacaaaaaatagacaattgggactatattaaatgaaaaagcttctgcacatcaaagggaacaatcaagagtgaaaagacaagctgtagaatgggagaaaatatttggaaactatttttccaacaagggtttaatatccagaatatacaaggaaygtgaacaactcaacagcaaagaaaacaacccatcccattaaaaagcagccaaagggcctaaatagacatttctcaaaagaagacatacaaaatggccaatgggtatatgaaaaaatgcttgacatcactaatcactagggaaatgcaaatca

SEQ ID NO: 917720 - DNA, 637 bp, Homo sapiens
ctgatggatgtttgtggttgcaggaatctaacctaggtctcgactccagttttgtccatgtggggcagtgatggcaggggtagtggtggcattagcagtagcagtggctgctctctggcctctgattcggctacagtggtctaatattgaaaccaatagtccagtggtggcctctgccttctgctcctccagcctttccagtgatttagataaaatccctttctgcctaagattcctagagtgctttctgttttctgggctgaaccttgactagtgtggacactgttgttggmcttgaggtcaggagagcctcctggatggacctggtgggccttgctctagagggcagagagaaacaggctgagcacggttgtttggccactggctcagtttaggctgtggggatgcagaatctcagcatgttaggagagaaaacagggacccaataaaaattcaggaaggcaaactgagccacagcatcaagatgtgtaaactaggggaggagtgcagcataaaaggtgaagaaaaggaggcctctcatgaagaggcatccaattaggtgtccaacaagagggtccccatagcatgcatgtcccaactccctctgtctgtgtctgtggcagacaaagtaagccaa

SEQ ID NO: 917721 - DNA, 737 bp, Homo sapiens
ccgccatgcccagctaattttttgtatttttagtagagacggggtttcacggcgttagccaggatggtctcgatctcctgacctcgtgatccgcctgtctcagcctcccaaagtgctgggattacaggtgtgagccactgygcccagcctcatcaggggatttttaacctttccatttctctactgtgggtccatgccaatgtccagatgtatttatttgtctagaattggatgttcttgtaaaaagagcggtcgaaggaatggcctcctagctgatttccaggattctaatcttcatggtctaagctgtaggtttccaaacatggatactggttagagtcaccataaggcatctaaaacctacccatgcatgtgacttcccctaagaatgtctgatttgattggtgtgtggtatgtcctgggcactggtttttaaaaaatgcttccaagaaaaatggtaattttgcagtggagcaatcttagcccagtgctcaaaattaacatccccagtaatcagtgacatggacatcttagggcatcctaatatgatggatgaataacgcgcagcatcacctctgtggtattcttgcccaaagtgcataacctgagtttaattatgagaaaaaattagaaaagcctaaactgagggttattctacaaaataactcgccaatactcttcaaaaatgttaaggtcatgaactctaaagaaattttcggcactatcccagattaaag

SEQ ID NO: 917722 - DNA, 533 bp, Homo sapiens
tgccaggcctgattctaggaccccaaggacccagcagtgaattagccagaaacaaaattccttgcccccgtgtggctgaccttcaaacacaccgtgcgaccttggggctgtggctttgctgctgtgggcctcggttttccacatctggaaatggaatgatgttcaygcacacctcacgggaagttagggtggtcaagcagcccccagaaaagcctgggccagagtgggtgtccctaagtgttagctgacattagatgctctccccttcggccttttttctttttgagatggaggctcactctgtggcccaggctggagtacagtggcatgatctcagctcactgcaacctccgcctcctgggttcaagcgattctcctgcctcagcctcccgagtagctgggaccacaggcatgcaccaccacacccagctaattttttgtacttttttccttttgtagagatgtggtttcaccatgttgcctaggctggtcgcaaactcctgggctcaagccatcctcccacctcagccacc

SEQ ID NO: 917723 - DNA, 555 bp, Homo sapiens
aacttgctgccctaagtaatatcctcttccaagaaaaggcaaggtgttcggacaaggagggtgagtgttacaaggtgaagtaagaatattagcaagaactaaatcatgtgcttatgcaggccttgatactccctctgaaagttataccaaattttttatatatatatatatatatatatatatatatatatatatatataacgtatacttatatatatataatgtatgtttatcaatgagttctctgaaacaccaacttttgtatcattgtaactgcctcttctatctcctttcttttcctcctttcttattccctttcaaatgtaccatacttgagcttttatgctacacctggtttttacatagaaaaggaatttaatgagagtgtgcctgtcactgyacaaagaatattcccatttgatctttacagctaccttcttttttttttttctgagacggagtctcgctctgtcgcccaggctggagtgcagtggcgtgatctcggctcactgcaagctccgcctcccgggttcacgccactctcctgcctcagcc

SEQ ID NO: 917724 - DNA, 548 bp, Homo sapiens
ctgatatttctctcacttcttgtatcccacacaaaccctgtgctctggtcagaagggcttcccacactctgccctcagcctgggatctgtctatcctcacacctccccatcccgcaatcaggaatgcccttatcctgggctaatccaaatcctagcctagccttcaaggctcagctcaagtcctccttcctctaaaatgtctacaacaatcatgcctacactgarctatagttaaatttcagagcagcaagggcatctacagatcattggcccaaccctcaaaattctaccgaacagaaaactggggcctggagaagacagaataagggctatgcctagaacccaagtccatagcattcccttgatgagcttcccatgaactttgtagttctttatttcacctgtccatgtcacagattgtgagactgtctgtgaggacgatgacttttgtatctctttatcctccactgtgcttagcacagagccctgggtcacaggtggctcaggaaatagaatccttaatagccaaagactcaggaaggtaacag

SEQ ID NO: 917725 - DNA, 548 bp, Homo sapiens
ctgatatttctctcacttcttgtatcccacacaaaccctgtgctctggtcagaagggcttcccacactctgccctcagcctgggatctgtctatcctcacacctccccatcccgcaatcaggaatgcccttatcctgggctaatccaaatcctagcctagccttcaaggctcagctcaagtcctccttcctctaaaatgtctacaacaatcatgcctacactgagctatagttaaatttcagagcagcaagggmatctacagatcattggcccaaccctcaaaattctaccgaacagaaaactggggcctggagaagacagaataagggctatgcctagaacccaagtccatagcattcccttgatgagcttcccatgaactttgtagttctttatttcacctgtccatgtcacagattgtgagactgtctgtgaggacgatgacttttgtatctctttatcctccactgtgcttagcacagagccctgggtcacaggtggctcaggaaatagaatccttaatagccaaagactcaggaaggtaacag

SEQ ID NO: 917726 - DNA, 801 bp, Homo sapiens
ataataatctagtaagggttatatctgatttcttgaggcctcattagcaaccaaaagttgcatttaaaaattacaaaagcatatctccatcgagaaatggcctttttatgttgtctacttttttcccagaggttccaataagtaacaatcacagcacaaatcattaagtatggggacttgttctgttgatagtattcatgtgtttaaatttcatctggcccactggctgcaaaaagcaaggaagttgtgtctcatgaatatctgtctatatttgcggcctgccctgatcagggtatccttcttgtcatttaagaaatcataagcatataatattttataccagcttaatgtatacatccacatgtaacagccagaaaacataaagctatgcaaaatgaaaaattcccccagttttgcttgcaaatttattcaagtccttagcaatacattcagtctttacagagttaacagtatagctgcccaggggmtcctgggagatccacctagaatgcaactcctgtcccttccttggggccccttcctgggggccctaaagtagcggctaggctaaaggaaaggctgtttcccctgctagtttatctaaagttttgctccagccctgggaattgaatatcctttgttgctctcttggaagagagagaaacacaaactttttacattttttggtccgcccaagcccacctttgggactgtttgggtctttttcccgcccacctggaggagaaaactaaaatcaagggagttaccagaaccacactcctaccccctctcagtttagca

SEQ ID NO: 917727 - DNA, 607 bp, Homo sapiens
ttatttgcataaactgcagcaagaaaaattatttttcacatagaccttttaaactggctttgatggaactttgttccacagcaggaatctcagataagactttaaagccaagcccagtcatggatttgtaccatcaaatacctatgtgttgggtgaatttctctcctcttgaggttccaagacaacttggggttccgttggctccataagtcaagtttgatttcttaaaggaaagcacaccattccagtcaaagccttggtaaaatgatcagttttttcaattgtgayctgttacaaaagaaatcagatttttattccacttatccaaataactatattgccatagattaagaatacttacaaatagttttcaaattctggagaaaatcagctagagagaaacaaatatgctcaaattttgttcatgggagtatactaaattgttaaaagctgtcaatagttcaaaagaaaagtttccttgactctgaaaaacaaaacaaagaattagcaatattttaagcaaaaagtcaaaagatcacttcagtctcctattagttcagttaatgcagttaattcctgtcctgcttgatattaatgagcagtttag

SEQ ID NO: 917728 - DNA, 637 bp, Homo sapiens
ctctatttttaggtttttgaggaacctgcataccgttttccataatggctgtattaatttacatttccaccaacaggacacaagggttcccttttcttcagatcctcaccagcgcttgttatctttcatcactttcataatagccaatccaacaggtgtgagataactcattgtggttttaatttgcatttccctggtgattagtgacgttgagcatttcttcatgtacctgttggccatctgtgtctccttttttttgagatggagtttcactctgtcacccaggctggagcgcaacagttcactgcaacttccaccttccaggttcaagtgattgtcctgcctcagcctcctgagtagctgggattacaggcgtgagccaccatgcccaactaattttttktatttttagtagagatggggtttcaccacattggccaggctggtttcgagctcctggcctcaggtgatctgcccgcctcggcctcccaatgtgctgggattacaggtgtgagccaccgtgcccagccctgtgtctccttttgaggaatgtctattcaggccctttgcccattttttagattgggttgattttttgctgttgagttgtgtttcttcaccccattatatatactgc

SEQ ID NO: 917729 - DNA, 637 bp, Homo sapiens
ctctatttttaggtttttgaggaacctgcataccgttttccataatggctgtattaatttacatttccaccaacaggacacaagggttcccttttcttcagatcctcaccagcgcttgttatctttcatcactttcataatagccaatccaacaggtgtgagataactcattgtggttttaatttgcatttccctggtgattagtgacgttgagcatttcttcatgtacctgttggccatctgtgtctccttttttttgagatggagtttcactctgtcacccaggctggagcgcaacagttcactgcaacttccaccttccaggttcaagtgattgtcctgcctcagcctcctgagtagctgggattacaggcgtgagccaccatgcccaactaattttttttatttttagtagagatggggtttcaccacattggccaggctggtytcgagctcctggcctcaggtgatctgcccgcctcggcctcccaatgtgctgggattacaggtgtgagccaccgtgcccagccctgtgtctccttttgaggaatgtctattcaggccctttgcccattttttagattgggttgattttttgctgttgagttgtgtttcttcaccccattatatatactgc

SEQ ID NO: 917730 - DNA, 805 bp, Homo sapiens
atttatattcccttgggcatttacccagtaataccattgctgggtcaaatggtatttctgcctctaggtctttgaggaattgccacactgtctctcacaatggttgaactaatttactctcccaccaacagtgtaaaagcattcctttttctccacaacctcaccagcatctgttgttttctgactttttaataatagccattctgacttatgtgagatagtatctcattgtggttttgatttgcatttctctaattatcagtaatgtcgaggttttcttcatatgtttgttggctgcctgtatgtcttctttcaagaagtgtctgttcatgtcctttggccactttttaatgggtttttttttcttgtaaatttatttaagttctttatagatgccagatattagacctttgtcagatggatagattgmaaacattttctcccattatgtgggttgtctgtttactctgaggatagtttcttttgctgtgtggaatctctttagtttaattagatttcatgtgtctatttttgcctttgttgcaattgcttttggtgtcttcatcatgaaatctttccctgtgcctatgtcctgaatggtgttgcctagattttcttctgggtttttttttttcataattttgcattttacatttaatctttaatccatgttgagttgatttttgtatatggtgtaaggaaggggtccagtttcaattttctgcatatggctagccagttaattctcccagtaccatttatgaaatagggaatccttttcctattgcttgtttttgacaggttt

SEQ ID NO: 917731 - DNA, 686 bp, Homo sapiens
gtgcttatcagggctccaactttaacaccttcagggcaaatcagttggcaaactgtacaggttcagaatattcagagtctttcaaatttgcaagttcagaatgctgggttatcccaacaattaaccatcaccccagtgtcttcaagtggtggcacaactcttgctcagattgctcctgtggctgttgctggtgccccaataactttgaatactgcccagcttgcatcagtgcctaaccttcagacagtgagcgttgccaacctgggtgctgcaggtgttcaagtgcagggagttcccgttacaatcactagtgttgcaggtaagttctgacatctttttaagtaccttttaaatagtttttcataacaattattgcttttctctcctaattctwaggtttgacgtagacctctgaagtaaacacacaatcataaggaaccagaaatagcaatattatactaacaaacatagctctgtagtaatcaatgtgacatgttcacttttgtagattttataataatgtgttaaatttgttagttttttaaaaagtattgttttatgggacagagctttctgattagaatcataattgccttctgtaatttagtggtcttatttgagtacattccagctcttcagaaagaaccctagtcgaaatgatatttatctcttctttgagggaaagt

SEQ ID NO: 917732 - DNA, 542 bp, Homo sapiens
cattgtaggccgggcacggtggctcacacctgtaattccagcactttgggaggccaaagcaggtgaatcacctgaggtcaggagtttgagaccagcctggcaaacatggcaaaaccctgtctctactaaaaatacaaaaaaaattagctgggcatggtggcacacgcctgtcatcccagctactagggaggctgaagaagaagaattgcttgaacccaggaggtggaggttgcagtgagccgagrtcgtgctactgcactccagcctgggcgacagagcaagactccatctcaaaaaaaaaaaaaaaaaaaaaaagcattgtatttcaggataatgttaagccatgccaatagatttttttattgttgttttattgtgcattatttattatatttttcccaaagtgaagaagccaagctggtatatatactaatctgagtgatgaagtctaagctatataacatgaatgaataaagtaataatatcttaaatgtctttttatgattacagtgacagtatgtagtaatcttgggtggttttgc

SEQ ID NO: 917733 - DNA, 709 bp, Homo sapiens
cttatctgtgtttccttgctgtctattttgtctactagaacccttggcacattaatcatagttgttttaaattcccagtctgattattttgacatgcccaccttatctgggtctgtttgtgatgccttctctctctcttcaaacagtcttttagtatgccttgtaatttttttcttgatacccagacatgaagtacttgggkaaaagaactgttttaaataagcctttagcaatatggcagtaaggtatggggaggggaatcattctatagacctatgcttagatatcagcccccatcagcagatgtgctaatcaggatcccctgacaccacctcccttaggtggaacaggatgactagagctggcaagagttgggtattttctttttccagtgaaactgtaataaaactccagtaggttaggttctggttcaattgtttctcctcatttggagtctttcattgttctctcctgcctgattgctctggctaggtcttctagtactatgttcaatagcagtggtgagagtgggcatccttgtgtggttccacttcttaaagggaatgcttctagcttttgcccattcagtatgatgttggctgtgggtttgtcgtagatggttactattttgaagtatgttccttcaatgccaaatttgttgagggtttatgacatgaagggatgttgaattttattgaaagcccgttct

SEQ ID NO: 917734 - DNA, 648 bp, Homo sapiens
cctcccaggcaggaatcactagacacccccatgctcctaaccactgggtcttctttcctctcttccccaactaggggtggccgtcatgctggggctaaaccacacctccatgtctgaattcatcctcgtcggcttctctgccttcccccacctccaactgatgctcttcctgctgttcctgctgatgtacctgttcacgctgctgggcaacctgctcatcatggccaccgtctggagcgagcgcagcctccacacgcccatgtacctcttcctgtgcgtcctctcagtctccgagatcctctacaccgtggcyatcatcccgcgcatgctggccgacctgctgtccacccagcgctccatcgccttcctggcctgtgccagtcagatgttcttctccttcagcttcggcttcacccactccttcctgctcaccgtcatgggctacgaccgctacgtggccatctgccaccccctgcgctacaacgtgctcatgagcccacggggctgcgcctgcctggtgggctgctcctgggctggtggctcggtcatggggatggtggtgacctcggccattttccaactgactttctgtggatcccatgagatccagcattttttatgtcatgtgccacctctgttgaagttggc

SEQ ID NO: 917735 - DNA, 592 bp, Homo sapiens
tctgtagacgtctgagtttgtaactcctactttgtaccaacatcactgattccagagaagaccttcttttcatgaagaagatctgttttaagaaataaagatttcttgctggccatggtagctcatgcctgtaatcccaatactttgggaggccatggcaggtggatcatttgaggtcaggagttcaagaccagcctggccaacatagtgaaaccctgaatacaaaaattatccaggtgtggtggcacatgcctgtaatctcagctactcaggaggctgaggaaggagactyacttgaaatcaggtggcagaggttgcagcgagccaagatcatgccactgcactccagcctgggcgacagagtgagactccatctcaaaaaaaaaaaaaaaattcatatgtaaaagtaaaaactaaagcaagatgccaggtgtggtggctcatgcctctaatcccagcactttgggaggctgaggtgggcggatcacttgaggtcaggaatttgaaattagcctggccaaaacagtgaaacctcatctctactaaaaaaaatatatatatattagctgggagtggtggcggagcctgtaat

SEQ ID NO: 917736 - DNA, 582 bp, Homo sapiens
gactgaggcaggaggaaaaaaaagaactaaaggaagatgacaaaaattggcccagaattttccctgtcacaaaaatcttaaaaaaaaaaattattccaacagtggactcactcttaaccttctctaactgagcttttgaaargtaaaccccggccaggcacagtggctcacatctgtaatcccagcactttgggaggccgaggcgggcggatcacttgaggtcaggagttcgagaccagcctggccagcatggtaaaaccccatctctactaaaaatacaaaaaaaattagccaggtgtggtggcgcatgcctgtagtcccagccaccaaggaggcttaggcaagagaatggcttgaaaccaggaggcagaggttgcagtgagctgagatcgcgccactgcaccactccagcctggcaacagagcaagactccatcggaaaaacaaaaaaaagaaagaaagaaaaggtaaaccccaaaccagccaacagactgtttcttccacagagtgaaaaatccagaaagataccaccaccaattctatccctatagaacccaaaggaagagtggtaccagtggatgca

SEQ ID NO: 917737 - DNA, 574 bp, Homo sapiens
aaaaaaaaaagaaagaaaccctgtctctactaaaaattaaaaaaaaaaaaaaattagccagtgtggtgattgtcaggcctctgagctgaagctcagctattgtaacccctgtgacctgcacatatacacccagatggcctgaaggagccaagaagtctggggcagccgaaaaaccacaaaagaagtaaaacagccagttcctgccttaactgattaaccaacattacaacattccaccattgtgacttgtccctgccccaccttaaccgatcaatcaactytgtgacattcttcttctggataataagtcttatgatctccccaccatgtaccttgtgacctcctcctctgctaacaatagctgaccatcttttaccgtaattttccattacctacccaactcctataaagcaaccccttccccatctcccttcgctgactcctttctcagactcagtccacctgcacccaggtgaattaaaagctttattgctcaaaaaaaaaaaaaaaaaaaaaaaatatatatatatatatatatgaactattagctggccatggtggcacacacctgtag

SEQ ID NO: 917738 - DNA, 574 bp, Homo sapiens
aaaaaaaaaagaaagaaaccctgtctctactaaaaattaaaaaaaaaaaaaaattagccagtgtggtgattgtcaggcctctgagctgaagctcagctattgtaacccctgtgacctgcacatatacacccagatggcctgaaggagccaagaagtctggggcagccgaaaaaccacaaaagaagtaaaacagccagttcctgccttaactgattaaccaacattacaacattccaccattgtgacttgtccctgccccaccttaaccgatcaatcaactttgtgacattcttcttctggataataagtcttatgatctccccaccatgtaccttgtgacctcctcctctgctaacaatagmtgaccatcttttaccgtaattttccattacctacccaactcctataaagcaaccccttccccatctcccttcgctgactcctttctcagactcagtccacctgcacccaggtgaattaaaagctttattgctcaaaaaaaaaaaaaaaaaaaaaaaatatatatatatatatatatgaactattagctggccatggtggcacacacctgtag

SEQ ID NO: 917739 - DNA, 584 bp, Homo sapiens
attcaagaactggttccaccacatataagctgtgtgaccttgggcaagtgaactctctagtttcaagttcctcatctataaaatgggataacagtgtctccttgggttgttgtgaggattaatggtgcacagaaacagcacagcacagtgtctggcacacagtatgccctcaratacaaatgtcttcactacccaataggtattccctcctcccttgccccaattttttgaaagtcgcaatgtacccagcaaaacacttacatttcccaatctcccttgtagctgaggatgatcatataacatagctttggccaataagatataagcataaattgctaggcggagtcctccaggaaagtctttacaagaaggcaagcttagctaacccttctcttcttcctgcctgggatttagactttgctgaattgcaaagtgataaaaataaggatgcaagtcatatgctaaaaagctgggtagaaggtgataaaaagcccatgtccctgattgcatcacagtgctactgtaccaacctactgactacccctggattcctgctatgggagaaaactaaaatccaatttgat

SEQ ID NO: 917740 - DNA, 584 bp, Homo sapiens
attcaagaactggttccaccacatataagctgtgtgaccttgggcaagtgaactctctagtttcaagttcctcatctataaaatgggataacagtgtctccttgggttgttgtgaggattaatggtgcacagaaacagcacagcacagtgtctggcacacagtatgccctcaaatacaaatgtcttcactacccartaggtattccctcctcccttgccccaattttttgaaagtcgcaatgtacccagcaaaacacttacatttcccaatctcccttgtagctgaggatgatcatataacatagctttggccaataagatataagcataaattgctaggcggagtcctccaggaaagtctttacaagaaggcaagcttagctaacccttctcttcttcctgcctgggatttagactttgctgaattgcaaagtgataaaaataaggatgcaagtcatatgctaaaaagctgggtagaaggtgataaaaagcccatgtccctgattgcatcacagtgctactgtaccaacctactgactacccctggattcctgctatgggagaaaactaaaatccaatttgat

SEQ ID NO: 917741 - DNA, 717 bp, Homo sapiens
cctttatcaggttgaataaactccctctaatcctagtttgttcttatcatgaaacggtgttggactttgtcaaatgcttttctgcatctgttattgagatgattatgtttgccctttattctgataatgtagtatrttacgttaattgattttttagatgttaaaacaaccttgtattcctagggtaaattccacttggttatagtatatatttcttttctttttgtttttttttttttgagacggagtctcactctgtcgccctggctggagtggagtgcagtggcgcaatctcggctcgctgcaagctctgcctcccgggttcacgccattctcctgcctcagccacctgagtgctgggactacaggctcccgccaccacgcccggctaatattttgtatttttagtagagacacggtttcactgtgttagccaggatggtcttgatctcctgaccttgtgatccacccgcctcggcctcctaaagtgctgggattacaggagtgagccaccgtgcctggcagtgtatatttctttttatatgttgctgaattattatggaaaaaacctcagtttcttttgcaccaacctaatagatttgccagtacagttgtctgtcagcatctgtggaggatttattttaggactccccatggataccaacatctgcagatgctcaagatccttatataaaatggtatattatttgcatatag

SEQ ID NO: 917742 - DNA, 606 bp, Homo sapiens
gtctgtcgacccctgcttgggggtatctcccagtcaggaggcacgggagtgagggacccacttgaggaggcagtctgtcccttagcagagctcaagtgctatgctgggagatctgctgctctattcagagccagcaggcaggaacatttaagtctgccaaagctgtgcccacagctaccacttcccccaggtgctctgtctcaggaagatgggagttttatctataagcccctgactgggkctgctgcctttctttcagagatgccctgaccagggagaaggaatctagagaggcacattggctacagtaggtttgctgagctgtggtgggcttcacccaatccgaacttcccccagcagctttgtttacactgtgaggggaaaatcgcctactcaagcctcaataattgtggatgttcctctccccaccaagctcaagcatcccaggtcgacttcagactgctgtgctggcagcaagaatttcaagccagtggatcttagcttgctgggctccttgggggtgggatccactgagcaagaccacttggctccctggtttcatccccctttccaagggagtgaacggtttcgtctcactggagttcc

SEQ ID NO: 917743 - DNA, 806 bp, Homo sapiens
aaatcttatatatagacttctacttttggtcaagatggaatacctgtcactctatcctcctgcctgaagcaactaaaaaactgaacaacgtaggtaaaacaatgtcacttaagacacgggccatcaggcactgaagaacagtaactgctgaccraacatgaaacaaaagaggtaagccctgccgctgccccagaatttatttcctgaacaacatttctaggccataatgcaagggaggggaaacccagaccagagtccaccaatttttccagattttaagagacagaggcaagagtcagggaggctaaagggctacagttcaatctttcataaactctcccaagaatagacaaagaggaaacaacttccagctctttccacgaggacatttttacattaacaccaaaatctgacaagggtatgaaaagaaaggaaaattatacaccacctctctcttgaatacagatgctaaaattctaaatgaaatattgcagccgggcgcagtggctcactcctgtaatctcagcactttaggaggctgaggtgggcggatcacgaggtcaggagatcgagaccatccgggcgaacgcggtgaaatcctgtctctactaaaaacacaaaaaaattagctgggcgtggtggcaggagcctgtagtcccagctactcgggaggctgaggcaggagaatggtgtgaacccaggaggcggagcttgcagtgagccaagatcacgccactgcactccagcctgggcaacagagcgagactctgtctcaaatgaaaaaaaaaaaaaagaaagaaatattg

SEQ ID NO: 917744 - DNA, 591 bp, Homo sapiens
tacaatgttctatccatacttaggttcaaagaaataatttctgatgcatcttcctaatttatcaaaagaaacattttaacagccttaaagtgacaacactaaaatcctctaacacattaatcatagaaaatgacataaaatatgttctaaaagagctataagtgcaaattcaattttctatagacattttaaaatggatcaaggtagcttcatttcatcttgaatttatattacagtagataggaatctttgacttttatcattttcagttggcatacacaatcaaagcaatacatggaaatggatttctcatgcttgagtaaccagacgttctcctttcttakaactgttttccctacttgctgttttgaaattctaggctattattttagataagtttatggtagctgttgtaacagaaagacccctgaagctcaatggctttatacaacagaagcttattttgggcccacatgaattccaactggtgacaggtgtgaggatgggcttctgctccatttagtcatccaagaatctctactaaacggattctgacatatttaactcttggtttctaagatatccatattg

SEQ ID NO: 917745 - DNA, 575 bp, Homo sapiens
ccgggttctttcataatgttttcaaggttcataatggatgaaccttattttcaaggtttataatggtgtcattatggctgaaccttgaaatcattatgacaagtgaaagaagctagtcacaaaagaccgtggtagcaaggttcattcatgctaccatgttgtagcatctatcagtgctycattttttttcattcctttttatggtcaaatagtattccattgtatagatataacacatttcatttatctttggctactatgaatgatactgttataaacattcatgtacaagtttttgtgtggatatatgctttcattcctcttgggtatatacctaggagtggaattgctggtcatatggtaactcagtgtttacatgtttgaggtgctgataaatcattttctaaagtggctgccatgtcttacattcctaattaccagtgtatgggagttctcattcctccaccttttcaccaatacttacagtagttccttatctgtagttttgattttctgttgtttcagttacttatggtcaacacggtccaaaaatattaaataaaaaatttccagaa

SEQ ID NO: 917746 - DNA, 620 bp, Homo sapiens
ggttaaaacacaagtgtcgattgcttttctgtatgccagcaacatgtgaatttgaaattaaaaacagaatatcttttacattagcactcaaaaaataaaatgcttttcatataaaacaaagtacatataagatctgtatgaggaaaactacaaaattctgatgaaagaaatcaaaaaactaaatgaagagatatttcatgttcctggatagaaagactcaacatagtcaagacgttagttttgtccaacttgatatatggattgtggatattgacaaactgatctcaaagtttatatggaggggcaaaagrcccagaatagccagaacaatgttgaaggacaagaacaaagtcagaagactgacattgcccaacttcaagacttactataaagccatagtaatcaagacagtgttttactggtgaaagaacagacagatagatcaatggaacagaatgaagagccaagaaatagacccatataaatatgacaaaagagcagaggcaatacaatggagtaaagacaacctcttcaataaatgatgctaggaccactggtcatccatgtgcaaaaaaatgaatgtagacatagacttttcactcttcacaaaaattaactga

SEQ ID NO: 917747 - DNA, 609 bp, Homo sapiens
atgacaaaagagcagaggcaatacaatggagtaaagacaacctcttcaataaatgatgctaggaccactggtcatccatgtgcaaaaaaatgaatgtagacatagacttttcactcttcacaaaaattaactgaaaatgtgtcactgacatacatttaaaatgcaaatttataaaattcctagaagataacatatgaaaaaatctagatgaccttgggtttggtgataatggtgataactttctagatataacatcaaaggcacaacccataaaagaaataattgattaagtacatgctatggtttggatatttgtcccctcaaacttcatgttgaagtttggttcctgatgttggggatggggcccatgggaggtrtttgggtcatgggggtgaatccttcatgaatagattaatgccctctcttggggtaagtgagttctcactctgtaagttcctatgaaagctgactggtagaaagagcctggcacttccccactctctcttgcttcctctctcgccatgggatctttgcacacattggttcccctttgccctcaccatgaatggaaggaacctgaggccctcaccagaagccaagcagatttca

SEQ ID NO: 917748 - DNA, 591 bp, Homo sapiens
tgccgcacggcccccctcctctgctcacagatctcgctgcagcaggcagagctgcagtccctgcgggaagagctgcagaggcagaaggagctgcgggcgcaggaagaccctggggaggccctgcacagtgccctctcagaccgggacgaggccgtgaacaagtaagcctcaagccattgaccaccgccccagcgccctctgggccctcctgggctcctgattcctcttctgatacgggttatgatccccactcccacccaggggccccctgacctccttgatctaggtgtttgcagccctcctcccgcccgggtmcagaagtcccccgccaccccggctccctgaggccctagcgccctcaaacgcgtcttctgctcctgcccgcctagggccctggagctgtccctgcagctcaaccgcgtctcgctggagcgagactccctgtctcgggagctgctgcgcgccatccgccagaaggtggcgctcacgcaggagctggaggcctggcaggtgaggggcggggcccgtgtgcggggcggggcaaggggcgggaccggcgctgagccgaccacggcctcccgcaggacgaca

SEQ ID NO: 917749 - DNA, 644 bp, Homo sapiens
gctactttttgtatttttagtagagacggggtttcaccatgttggccaggctggtctcaaactccagaccttgggtgatccacccgcctcggcctcccaaagtgctgggattacaggcgtgaggcaccacagtcagccacaaatacacttaattgatctcagataaaaactactgagggaaggtcagtaatcgttttagcccctaatctrttagaactttatcctgagtagccttgaggatgggttagctgattctttccaccagttcccaccatccacagtgttagaaaaaacaaggcattgtctcagtttaggacaaaggcatggctggcaaccaattccagtctctcgtattctgaattttttctttaactcttctactttgttgacgtaagctttagctttcatgggatcttccctggcagcccctttcagctaattccagggatctcacttggctttgcccttgaagtccaccatcctgggccgttctgtctttatgttgcctacagtcgctcgtttgtagtggccgtagaggaaccgcatctcatcatctgctggcttggtcttaaagtgcttaataccctgcacatcttttttttttttttttcttcccagctcaagtgattctcctgcctcagcct

SEQ ID NO: 917750 - DNA, 656 bp, Homo sapiens
cacaacgcccggctaatttttttgtatttttagtagagacggggtttcaccgtgttagccaggatggtctccatctcctgacctcgtgatccgcccgcctcggcctcccaaagtgctgggattacaggcgtgagccaccgcgccctgccaggtctataaacatttttaagtgtacagttcagtggcattaagtatattcacattgttgtgtagtgattaccaccatctgtctccagaactgttatcatcttacaaacctgaaactctttatcagttaaataactccccattagccccgtcctggcccctggcaaccagcagtttcttttctgtctttatgaatttgactactctaagtgcctcgtataggaggaatcatatagtgtctgtctttttgggtctggcttctttcactcagcataatgtcctccatgttcatccatgttatagcgtgtcagaattccattcctttttaagactaaacaatattatacataggaaagcmggttagttttacatttatctttagtattcagcaatttaccacattgctttgacatagtaagtacaatcaggatttgtttcattaaattgggttaatctacttgaagggctggggtggagaatggggtctaggaagaattctgtggtactca

SEQ ID NO: 917751 - DNA, 770 bp, Homo sapiens
taacaattcccacctcctgccagccacgtgacctaacatacgcgcaggttccagagattaagatgtagacctgctgggtgcggtggctcacgactgtaatcccagcactttgggaggcctaagcaagtggatcacaaagtcaggagatcgagaccatcctggctaacacagtgaaaccccatctctactaaaaatacaaaaaaaaattagctgggcgtagtggcgggtgcctgtagtcccagctacttgggaggctgaggcaggagaatggtctgaacctgggaggcggagcttgcagtgagccgagatcgcgccactgcactccagcctgggcgacaaagcgagactccgtctcaaaaaaaaaaaaaaaatgtagaccttctgggagggccattattctgcgtaccacacacatgttttagctcamctaatgcacaagaacctaagatgtgggacctgttatgaccattttacagaggggtacaccatgtcccagagatgtcaagtgcattgtccaaagtcccacagctaaatcggacacctagggttctacaggtgtctggctccacaacatgtgtccttaaccactgtttaaccttttggctaagaaaacatgagtgtcaggcatctcaaaaaaatgtagactaaaaatatttatgcaccccaggtgatcacagcccctcactttcctgggacaaccctggtttgcacctgtagcctccttgacactcggaaaatgctccggtgggcagtaaatatgccccccacca

SEQ ID NO: 917752 - DNA, 473 bp, Homo sapiens
aggcttggcctgggatgccccagagaacaggacagatggagcaggggcaggcatttagggagcagtgacagaacgagttgatgaggatggagggaggccacgaggggaaagcacccagtgtagtgtcgcgtgcaccagcactgccctgggagatgcctttagctgggcccagggaaggagcaggtgtgtggggaggagctccctgcagggggagtggtgttaggttggcggcccccaggtcagggwggagctgacagagtccgtgtggggagcatggagggcgctgaggacttgggccgaagtgaccctggtgagggtggaccctgctgggctgtgggttccgttgagggcggttggcatcccctgggaaggctccaggctgggagggactctgtccccctctggtggacagggagggaaatgtgaacggcagcaatcccaggccaggctgcatgttttattccacatggatc

SEQ ID NO: 917753 - DNA, 561 bp, Homo sapiens
cagtctctttagaaaaagagagatatatatatacagaatatctattattttaaaagtaaaaagaaaaaaaaacagaggttggcaaggatgcagagaaaagggaaagcttatacactgttggtggggatgcaaattagtacaacctctagggaaacagatggcaatttctcaaagaactaaaaatagaactgccctttgatccagcaatcccactgctgrgtatatacctaaaggaagagaaatcattatattaaaaagacatccacacttacatgtttatggcagcactattcactatagcaaagttatggaatcaacttatgtgtccattagcagatgattggatgttaaaatatggtatacaagctgggtgcggtgatttccccctgtaatctcagcattttgggaggtcaaggaagtcgaattgcttgagtccaagagtttgaaaccaacctgggtaacatggcaaaaaccccacctccactaaaaaaacaaaaataattcgcgttttttttttttttacaggcaggcacctgtaatttcagctattcaggaggccaa

SEQ ID NO: 917754 - DNA, 561 bp, Homo sapiens
cagtctctttagaaaaagagagatatatatatacagaatatctattattttaaaagtaaaaagaaaaaaaaacagaggttggcaaggatgcagagaaaagggaaagcttatacactgttggtggggatgcaaattagtacaacctctagggaaacagatggcaatttctcaaagaactaaaaatagaactgccctttgatccagcaatcccactgctgagtatatacctaaaggaaragaaatcattatattaaaaagacatccacacttacatgtttatggcagcactattcactatagcaaagttatggaatcaacttatgtgtccattagcagatgattggatgttaaaatatggtatacaagctgggtgcggtgatttccccctgtaatctcagcattttgggaggtcaaggaagtcgaattgcttgagtccaagagtttgaaaccaacctgggtaacatggcaaaaaccccacctccactaaaaaaacaaaaataattcgcgttttttttttttttacaggcaggcacctgtaatttcagctattcaggaggccaa

SEQ ID NO: 917755 - DNA, 561 bp, Homo sapiens
cagtctctttagaaaaagagagatatatatatacagaatatctattattttaaaagtaaaaagaaaaaaaaacagaggttggcaaggatgcagagaaaagggaaagcttatacactgttggtggggatgcaaattagtacaacctctagggaaacagatggcaatttctcaaagaactaaaaatagaactgccctttgatccagcaatcccactgctgagtatatacctaaaggaagagaaatcattatattaaaaagacatccacacttacatgtttatggcagcactattcactatagcaaagttatggaatcaacttatgtgyccattagcagatgattggatgttaaaatatggtatacaagctgggtgcggtgatttccccctgtaatctcagcattttgggaggtcaaggaagtcgaattgcttgagtccaagagtttgaaaccaacctgggtaacatggcaaaaaccccacctccactaaaaaaacaaaaataattcgcgttttttttttttttacaggcaggcacctgtaatttcagctattcaggaggccaa

SEQ ID NO: 917756 - DNA, 561 bp, Homo sapiens
cagtctctttagaaaaagagagatatatatatacagaatatctattattttaaaagtaaaaagaaaaaaaaacagaggttggcaaggatgcagagaaaagggaaagcttatacactgttggtggggatgcaaattagtacaacctctagggaaacagatggcaatttctcaaagaactaaaaatagaactgccctttgatccagcaatcccactgctgagtatatacctaaaggaagagaaatcattatattaaaaagacatccacacttacatgtttatggcagcactattcactatagcaaagttatggaatcaacttatgtgtccattagcagatgattggatgttaaaatatggtatacaagctgggtgcggtgattyccccctgtaatctcagcattttgggaggtcaaggaagtcgaattgcttgagtccaagagtttgaaaccaacctgggtaacatggcaaaaaccccacctccactaaaaaaacaaaaataattcgcgttttttttttttttacaggcaggcacctgtaatttcagctattcaggaggccaa

SEQ ID NO: 917757 - DNA, 570 bp, Homo sapiens
tttttttttttttttttgagttggctctattgcccaggctggagtgcagtggcgtggcgtgatcgcagctcactgcaacctctgccttccgagttcaagcaattctccgacctcagcctcccgagtagctgggattacaggtgcctgccagcacacccggctaatttttgtatttttagtagagacgtggtttcaccatgtgcgccaggctggtctcaaactcctgacctcgtgaccacctgcctcggcctcccaaagtgctaggattacaggcrtgagccactgcgcccggcctggactgctgtcttgctggtcactgtatccccaccacctggcacatcgcctggcatcagtaggggtttaattaatatttgaattcatgaacaaaagactttttaagtctgctttttaaccaaatgaataaatcccaaagataccatattcagagaaagaagctggacataaagtgtacactctgtaggattccatttatatgaagttttagattcagcaagggttttcctcaaggtacagttagtaaatgctttcagccttgtgtgctgtgcagtt

SEQ ID NO: 917758 - DNA, 598 bp, Homo sapiens
ggtgtcttttttttttttttgagacagagtctcactctttttgcccaggctggagtgcagtggtgcaattttggctcattgcaacctccgcctcctgtgttcaaacgattctcctgcctcagcttcccaagtagctggaattacatacacacaccgccacacccagctgatttttgtatttttagtagagacagggtttcactatgttggccaggctgctctcgaacttccgacctcaagtgaacttcyaaccacccgcctcggcctcccaaagtgctgggattacaggcatgagccaccgcacccggccaaataaggtctctttaaatagaaacacctaaaacaaggttatgtcttgattcgttgacaaaagggctgtgaccacaggctcacagaaacctaatcctgtatttccccatgagccatggttcagcgttcactgattcagtgtgcgtggtggctttatggaccattaccgcaaataacaggaattaactgtgtttgcaaaggtgtgggcagctagtagggaaacctcaaaggatagctagcataatatccacatgccagtgattgcggggagccttttccacctgtgggt

SEQ ID NO: 917759 - DNA, 807 bp, Homo sapiens
cctgagtctggtggggacgtggagagtctttatatctagctcagggattgtaaatacaccaatcagcaccctgtgtttagctcaaggtttgtgagtgcaccagtcaacactctgtatctagctgctctggtgagggcgtggagagtctttatgtctagctcaaggattgtaaatacaccaatcagcactctgtgtctagctcaaggattgtaaatacaccaatcggcactctgtatctagctcaaggtttgtaaacacaccaatcagcaccctgtgtttagctcaaggtttgtgagtgcaccagtcgacactctgtatctagctgccctgatggggacgtggagaacctttgtatctagctcagggattgtaaaygcaccaatcagcgccctgacgaaacaggccactcggctctaccaatcagcaggatgtaggtggggccagataagagaataaaagcgggctgcccgagccagcattggcaacccgctcgggtccccttccacactgtggaagctttgttctttcgctctttgcaataaatcttgctactgctcactctttgggtccacgctgcttttgtgagctgtaacactcaccatgaagatctgcagcttcactcctgagcccagcgagaccacgagcccaccgggaggaacgaacaactccagacacgccaccttaagagctgtaacactcaccgcgagggtccaccgcttcattcttgaagtcagtgagaccaagaacccaccaattccggacacaagactatgaggtagaaatgtattaggaattgaaatgaacttt

SEQ ID NO: 917760 - DNA, 629 bp, Homo sapiens
tgacatggcctagagaatcctgctatgtggatttatatatacatttccatttactgcttgaataaaaatataaacaatttgagtgtttattcttggaaaacattgtactaggtactggggagttacaaaaataagcatatttgtattctgaatgagatcactgaamtattgctgataaaaaatacaggaacacaatgaagagaaaccgtgaaacgcactggggtgctagcaatgttttgctgtagggaggcaacaactccttgtgcccccatgcaccacgtcttcaatactcatcaattccaaaagaggagtgtaaatgtggtgttggccgggcgcagtgactcacgcctgtaatcccagcactttgggaggcggaggtgggcagatcacctgaggccgggagttcgagaccagcctgaccaacatggagaaaccctatctctactaaaaatacaaaattagtcgggtgtggtggtacatgcctgtaatcccagttacttgggaggctgaggcaggagaatcgcttggacctgggaggcggaggttgcagtgagccaagatcgcgccattgcactccagcctgggcaacaagaatgaaactctgtctcaaaaaaaaaaagtggtgttac

SEQ ID NO: 917761 - DNA, 751 bp, Homo sapiens
atcatattgttcatccccaaaagtacctaacactgcttcagtaaaatttggttcagttgaattcacttgatcattcagcatattaatgtgatgacttttgtatttgagagacagacatggtttaaaagtacaaagaaccccagttgcacctctccttacctcaggagctggggtatatcaatctctctaagccttggtttctcattaataaaaatgcaataacattctttgtccagcccatctcttggtgtcactgggtgggtcaaatgaggtaaatctctaaaatacctttgtaagatattattattctttgttatgtgtgtctctgcagtgcggcatatccaaaatattttttgttttcaggttctttgtgacaatattaattttttcctatatttatccscagtgaatctttgctttgtttgtgaagtcatatcctccaagtactaccttacagcattctcactgtttccattccatgcatgctaaatttggtcacttctctagtggtgtccttctagcagaagaaggatttgaggcttcctctttatataattacttatttcagatatgaaacaaggtcagagagaaagtagagccatctcatacatcttctgcagaggcctttagcattcagtaatccaaggtcatcagcaagaaggaagagaaatggggtaggggacttgggtgggttccctgcctccctcacacgattattttgtaaatggatgtaaaagtaccctgtaaactg

SEQ ID NO: 917762 - DNA, 683 bp, Homo sapiens
gaattttttcaataaaggctgccccaacggtgccggcctctcctgcctccccttccacctctgccaccccggagacagacccaccctcctgctcctgctcctcagccctcaatatgaacacaaggacacaggccttcatcgtggccacctccactgtgtgaacagcaaacaggatttctccttttattttttttccttttttttttgagacagagtcttgctctgtcgcccaggctggagtgcagtagcgcaacctcggctcactgcaacctccgcctcccgggttcaagtgattctcctgcctcagcctcccaagtagctgggactacagttgtgcaccaccacaccyggctaattttttgtatttttagtagagacggtgtttcaccacgttggccaggatggtctcaaactcctgacctcatgattcgcccgcctcggcctcccaaagtgctgggattacaggcgtgagccaccgcgcccagcctgtcctttattttttttgagatggtgtgtcactgtgtcgcctgggctggagtgcaatggcgcaatctcggttccctgcaacctccacctcctgggttcacgagattctcctgcctcagcctcctgagtagctgggattacaggtgtgcgccaccacgcccggctaatttttgtatttttgtagagacagggtttca

SEQ ID NO: 917763 - DNA, 683 bp, Homo sapiens
gaattttttcaataaaggctgccccaacggtgccggcctctcctgcctccccttccacctctgccaccccggagacagacccaccctcctgctcctgctcctcagccctcaatatgaacacaaggacacaggccttcatcgtggccacctccactgtgtgaacagcaaacaggatttctccttttattttttttccttttttttttgagacagagtcttgctctgtcgcccaggctggagtgcagtagcgcaacctcggctcactgcaacctccgcctcccgggttcaagtgattctcctgcctcagcctcccaagtagctgggactacagttgtgcaccaccacacccggctaattttttgtatttttagtagagacggtgtttcaccacgttggccaggatggtctcaaactcctgacctcatgattcgcccgcctcggcctcccaaagtgctgggattacaggcgtgagccaccgcgcccagcctgtcctttattttttttgagatggtgtgtcactgtgtcgcctgggctggagtgcratggcgcaatctcggttccctgcaacctccacctcctgggttcacgagattctcctgcctcagcctcctgagtagctgggattacaggtgtgcgccaccacgcccggctaatttttgtatttttgtagagacagggtttca

SEQ ID NO: 917764 - DNA, 712 bp, Homo sapiens
gggagaatcgcttgaagccggccttggagattcatttcttcgccttgctattgttcttcgtctcctgcatcatcagttttcttcctgtcttaggtgaagagattgaggtgaggcaggagaatagggtctgcaggcagggaacataaagctgattcacgctgacttcttagaactaaataaaatggacacatttcagctatgacaggaaatattttcttcatttacatatggcgttcactgagtaagtgactgagcaacttcacttcatcttcttcatttacatagggtgtacaccaattaaccaatgggagcctctagagggtayttaaatcccagaaaattctgtaacggagttcttgagcccctatgctcacgctggctcccaccctgtggagtgtacctttgttttcaatacatctctgcttttgttgcctcattctttccttgctttgtgcattttgcccatttctttgttcaagatgccaagaacctggacaccttcaacaagtaacacaggtgcctgtgatttattgaaggaagactcttaggagagtggtgggtatgatagggcagaggaagaaaaagtgaaacaagtatgtagtcagtggaggctccatggggaggtctggaatgtgaaggtctggaacaagaggcagcctcctttctgcccagggcaattcttctggacgagggggaagctgtgtgagtgttt

SEQ ID NO: 917765 - DNA, 651 bp, Homo sapiens
aactggctggaatggcagaaatagaatttagaatgtggacaggaacaaaaatcatcaagattcaggaggaggatggcaaaacccaatccaaggaaaataaaaatcacaataaagcaatgcaggagctgaaagacaaartagcctgtataaaaaagaatctaatgtatctacagagctgaataacagaatgcaagaatttcacaatgcaatcacaagtattaatggcagaataaaccaagctgaggacagaatctcagaacttgaagactggttctctgaaataagacagtcagacaaaataaagaaaaaatgttaaaaaggaatgaacaaaaacctccaagaagtataggatcatgtaaagaggccaaatctactaatcaatggcatccctgaaagggaaaggaggaaaggaaacaacttggaaagtatatttcagaatatagcccatgacaacttccccaaccttgctagataggccaacagtcaaattcaggaaatacagagaaatcctgcaagattctacacaagaagattatccccaagacatgtaattgtcagattttccaaggtcaaaatgaaagaatgttaaaggcagctacagaaagaaagggcagatcacctacaaaggaatccccatcaggctaacagtga

SEQ ID NO: 917766 - DNA, 617 bp, Homo sapiens
gtcaatgaacattatttccatttatcctcatttatttggaaacccttcacccttcctttgttttgatcaaaagtcacagcctttctctaagctgcttatttcttaaaatccatttaattcataaaaagaaatacaaatggatatactgccatataggatagactggcaggactcaaggttttatacaattaatgttgattatttctctaaaagtacwgctcttattgtttcctcttgctgaaactaaacactcttcagactcaatttatatcacattattctactgttacttaatctttttgagcatctgaagacattgtactttccattcctccttctagataactcttgaggctaactcttacagagtaattatagcttttttggttaaaattgcttttcttggggtttgaggatatagtctcacatctattttgtaaatgacatattagcagatttaagttcattattcttaagaatgtttatacatagaggccgggcatggtggctcacgcctgtaatcctggcactttgggaggcgcaggcaggcagatcatgaggtcaggagatcgagaccatcctggctaacacagggaaaccctgtctctactaaagat

SEQ ID NO: 917767 - DNA, 582 bp, Homo sapiens
catgagccctcctctctcctctctcaaccctggtgctctgatgtccaaggaaaatttatccatgtcacttttgtttgtcttaattcaggtttatggctcctttgcatcattctggattgagaaatgaggccaaatgcgaactaatggaaaaaagtaaggctgatgagttcatttagaaatgaactgttccaacaacgttcttcttgacatctctcaagagggccagccgttcagggtgcactttgcggcctccacagctctgctccttgctggaaacatcccccttctgtgtcctccacttgcccaagtctgacctgtgccttcaaggcacttaacatgcagttgttgttgaaatatctcaaggtgactatacctcccctttgcagctttttgtgacaaccaccaattagagamagtgatggcctccttctgagtgcttgcctgctggtcagaaccaggctgagctgatgcttggtaaaatatagctgcctgggccccatccagcctattgaattagaatctccaggaagaaggctgttttatttttaattttgttttcatctcatgcattcagctttttct

SEQ ID NO: 917768 - DNA, 582 bp, Homo sapiens
catgagccctcctctctcctctctcaaccctggtgctctgatgtccaaggaaaatttatccatgtcacttttgtttgtcttaattcaggtttatggctcctttgcatcattctggattgagaaatgaggccaaatgcgaactaatggaaaaaagtaaggctgatgagttcatttagaaatgaactgttccaacaacgttcttcttgacatctctcaagagggccagccgttcagggtgcactttgcggcctccacagctctgctccttgctggaaacatcccccttctgtgtcctccacttgcccaagtctgacctgtgccttcaaggcacttaacatgcagttgttgttgaaatatctcaaggtgactatacctcccctttgcagctttttgtgacaaccaccaattagagacagtgatggcctccttmtgagtgcttgcctgctggtcagaaccaggctgagctgatgcttggtaaaatatagctgcctgggccccatccagcctattgaattagaatctccaggaagaaggctgttttatttttaattttgttttcatctcatgcattcagctttttct

SEQ ID NO: 917769 - DNA, 586 bp, Homo sapiens
acaggcgcccgtcaccacgcccagctaattttttttttttgagacggagtttcgctcttgttgcccaggctggagttcaatggcacgatctcggctcactgcaacctctgcctcctgggttcaagtgattctcctgcctcagcctccsaagtagctgggattacaggcatgtgccaccacgcctggctaattttgtatttttagtagagacggggtttctccatgttggtcaagctggtctcgaactcccaacctcagatgatccgcccacctcagcctcccaaagtgccagcattacaggtgtgagccaccctgcccagcctaattttgtgtatttgtagtagagacgaggtttcgccatgttgcccaagctggtcttgaactactgacttcaggtaatccacccacctcagcctcccaaagtgctgggattacaggcataagccaccatgtctggccttgataatgttttaatgagatgtacaacagtccgctgcatagagcaaatgctcagaactatttttgtcttccttcatattgctacttcctgatttctgtctgttttgtattttcctattttattata

SEQ ID NO: 917770 - DNA, 552 bp, Homo sapiens
gatgtacaacagtccgctgcatagagcaaatgctcagaactatttttgtcttccttcatattgctacttcctgatttctgtctgttttgtattttcctattttattatacatttcttggtttgtaaattttctcaaatcctttgtagaaaaagataagctttgattttttttttttttaaatcccattacccacctggtggcrtaacaaagccgagtgtaggatagcaaaagctgcaggcatcttcttgatcaaagtaaaatctgctcatggactaaaaaagtattacgttctttcttccaactaagtaatgccagtttctataacctcatcttatatactttaatgaagcttccttcaagggctgtgtatttcgcttacaatttttgattccttggtgtagaggccatttttaagagtcattttctctattatagacatgcctttgtctgctttcttttcatttctgagatggcactcactcacggctttatattccaagacagaaatgctattaatgacttagttagataaaaactgacagagcagaatc

SEQ ID NO: 917771 - DNA, 579 bp, Homo sapiens
tgacataagaacctcttggggccaggcgcggtggctcacgcctgtaatcccagcactttgggaggccaaggtgggcggatcacgaggtcaggagattgagaccatcctggctaacacagtgaaaccctgtctctactaaaaaatacaaaaaaaaaaattagccaggcgtggtggcgggcgcctgtagtcccagctacttgggaggctaaggcaggagaatggcgtgaaccygggaggcggagcttgcagtgagctgagatcccaccactgcactccagcctgggcgacagagcgagactccatctcaaaaaaaaaaaaaaaaaaaaaggaacctcttggaggaatttgatcccagagttgacagtaattggagaaaactgattgtaaggaaagagcttggaatttcaatgaaagaaagaaaccagcaaatacaaaaagaaaaagtagaggacctggttgattgggatagtttgaatgggccacaggaaagaagaaagacatccttaaatgcaaccttacaagtctctatttgtgccagaacccgtcctccactggtgaactataagaaccctccttcaa

SEQ ID NO: 917772 - DNA, 703 bp, Homo sapiens
caatgtaggtatttcaaagaagttgtgtgtgaaatgaatttctgtaatctgaatactccaaacaggccaaagaagccttgttatttaaagaaattctgtaagcaaatatttttaactgaaaaagtaaggaaactcctgtttcagaaatcatkttgtatattttgcttaaagtgaggcacacttgtattaaactaaggaaaaaaaatcagcgaatcgggttctactgtttacattatgtataatttccaatgacataagataagtgaagatgcctaaactgatttgtgtttaattcagcacacagctcaatctgccaacaaagagttttcatttggcatttgcaaacacattatcatttagatagcaccaccaaagcagcttcaatgttgcaacttgaacatcattaaagagactacaatttttgggggggcaatcaattaggtatccacttaaggtaggcattaagcattcctaattctaattaattgattctaaatgatcattttttaaagcacaaactttttggtcctgtaaaaaatgtggtggttaattgtagctttaaaaagctggacgacattttaatgttcaaaatagaagttaaatattttgtaaaatgatagtaatgaccaaaaaaaaagaaactatatttatgatttagtgcctctataatcttgtttatatcaccaaatacaagtcacaactg

SEQ ID NO: 917773 - DNA, 684 bp, Homo sapiens
aattggaactcacactggccaaagtggagcagctcttgggggccccctgctgggccaagtgtgacctctttagtttctgcatggcagggctcatggagggttccagcatcagggtcatggcagccagggcggtgggtgagtgaacaccaggggtgcaggctggggctatttaccaactagtacaggagatttgagtattttgacaatgggtccggccataatggtgtggactggctcagtatcagctctactcttaggtaataaaaaaaaatcctctggtcttgtctagggccaagccactagttaaaattttatctcatgcaytagtcaaaatgcaaatctttaggccgggcgcggtggctcacgcctgtaatcccagcactttggcaggccgaggcgggcggatcacgaggtcaggagatcgagaccatcctggctaacacggtgaaaccccgtctctactaaaaatacaaaaaattggccgggcatggtggcgggcgcctgtagtcccagctactcaggaggctgaggcaggagaatggcataaacccgggaggcagagcttgcagtgagccgagatcgcgccactgcactccagcctgggcaatagagcgagactccgtctcaaaaaacaaacaaacaaacaaacaaaacaaacaaaacaaaacaaaacaaaaatgcaag

SEQ ID NO: 917774 - DNA, 668 bp, Homo sapiens
cgtcacccctttctttgactcggaaagggaactccctgaccccttgcgcttcccaggtgaggcaatgcctcgccctgcttcggctcgcgcacggtgcgcacacacactggcctgcgcccactgtctggcgctccctagtgagatgaacccggtacctcagatggaaatgcagaaatcacccgtcttctgcgtcgctcaccctgggagctgtagaccggagctgttcstattcggccatcttggctcctcccccaactcaaacttttttataaactcagtgtccctctccctggaaactgaaactcagagggaagatgtgggagaagaagctgttcgaaagttaccatctgtccttcaaatgggaataatggttaaggaggtcaattgttctggactattgagtatccgcaaaggcagatgtgagtgtactccagttagtttccaatacttccaaaaactgaaatacaaactatgtatttaactatgacagggacacttgggctcatgaaaatgtccagtgtcataattgattttggctggtgtatcgttgtttttagagacaaggtctcactatgctgctgaggctggtgtgcagtggctattcataggagagatcatagtgcactatagcctcaaacttctgagctcaagtgatcccctagcctcag

SEQ ID NO: 917775 - DNA, 550 bp, Homo sapiens
cgctacatcgctaatcaccccaaatgcattcttaaatcaaatttaaaacacggtcatatttgtttaaatgatctatctatgaaattaacttctcgggatggtaaacaatagttctgtacatagactcccttcagatctaccaataattgagaactgaagttcatatttctgtacaagcccatgaytggccttgagagaagaaaaatgtagaataaacacccatcacaatatttggaaaacattctgtgctttcgtgtagtaattactcatcttgtttccacagttttattagaaaaaaagatattttttccccctgttgcatgaaaacacttcttaccagagatggtaaggacttcccagaaatttcttactagcttaaaaaaattttttttaacttaagttgtatatacgtgttagaagagtagacatacaacacttctctttaaaaaaaaaaacaaaaacaaaaccaaaaaaaaaaaccataactcttggctaggggtggtggctcacgcttataatcctagcactttgggaggccaaggcaggcaga

SEQ ID NO: 917776 - DNA, 550 bp, Homo sapiens
cgctacatcgctaatcaccccaaatgcattcttaaatcaaatttaaaacacggtcatatttgtttaaatgatctatctatgaaattaacttctcgggatggtaaacaatagttctgtacatagactcccttcagatctaccaataattgagaactgaagttcatatttctgtacaagcccatgactggccttgagagaagaaaaatgtagaataaacacccatcacaatatttggaaaacattctgtgctttcgtgtagtaattactcatcttgtttccacagttttattagaaaaaaagatattttttccccctgttgcatgaaaacacttcttaccagagatggtaaggacttcccagaaatttcttactagcttaaaaaaattttttttaacttaagttgtatataygtgttagaagagtagacatacaacacttctctttaaaaaaaaaaacaaaaacaaaaccaaaaaaaaaaaccataactcttggctaggggtggtggctcacgcttataatcctagcactttgggaggccaaggcaggcaga

SEQ ID NO: 917777 - DNA, 667 bp, Homo sapiens
attttattttatgcttagaaacaaaaggatttctgtccatgtgacccagacttttggctttctatcccttctacagggaccagtaaacagtccattcagtgttctttttgccttttttatttcctaacagtcaccacatagacacatacataggttctaagccccgtattctggacaaccttaacttcccactaggcttgagcactgttgtccctttagttctgggcaggcgaactgggtcagcagagaacagcaggtgagatgtgcacagtaaacacttccacagtgcttgccacacacccagcatgttcaaggcgctttaatgtgctaactcaatccttgatacaatcctaggaagtggaccggattatttccgttttagagatgaggagactaaagcacagagaagtggggtgatggggccaaagccaggctgagcagcagtactgagactcaagcccacrtgtcccttcttgagggctgcttcacatcagcctgtgacacaggaaatatgacgccacgcaaatgtgatggatggggactgctgggactgctgaatgcaacctccactttacaaccaggattggagttaaaacaaaaaacaaatacacacacacacacacacacacacacacacacacacacacacggtgtaacaacaggaaga

SEQ ID NO: 917778 - DNA, 446 bp, Homo sapiens
gcagccgctgttggtacaagaggaataaatgcctagtcttctacctactgtatctactcctaaggatactgagggtgtgatgtggtcgggagaaaccctggaggccatcagaagagcaggggatattcaagcctaagatgggaagaatgggtagacaccacttcattctgctatctgaagggctgtctttgtcagaggcagcctcaagagcagaactagaatcaaayggtgaaaagctaggaggatttgggctcagaaaaaaaaaaaagaaagactttaaaaaatgtattataaaatctggccgggcgtggtggctcacgcctgtaatcccagcaatttgggaggccaagatgggtgaatcacgaggtcaggagttcaagaccagcctggacaagatggtgaaaccccgtgtctactaaaaatacaaaaattagccgggtacagtg

SEQ ID NO: 917779 - DNA, 592 bp, Homo sapiens
tggagtgtcccagggctcagttcctccctgatttcatcaagtcttatggctttaaactccatcacatgtagacagctcccaaatgtacatctccaggccatccccagcctctctcctaactccacatttgcatctccgacagcctacttgacaactctacttgaatttgtaatgggcatctcgcacttaacatgtccaaaatcactccagaataccattccccagcccaaactgcaatctttcccatcttagtaaatagaaagtccttttttgtttttccaattgctcaggccaaaagcacttggactgggccaggagcagtggttcacacctgtaatcccagcactttgggaagccgaagtgggtgaataacttgaggtcaagaccagmctggccaacatggcaaaaccctgtctctactaaaaaatacaaaaattagccaggcgtggtggcacgtgcctgtaatctcaactacttgggaggctgaggcaggagaatcgcttgaacccgggaggcaggggttgcagtgagccaagatcatgccactgcactccagcctgggtgacagagtaagactccgtcttcccccaaa

SEQ ID NO: 917780 - DNA, 623 bp, Homo sapiens
aaccctctcctttgatccatttgatcccttctgccatctgccatgctgtttgaacttttctccttaacttagtttgagccagtgctgtttctaggcttccaagagccattctagcaccttctcctggggtccttgccagggggtaaaatcctgcatcacaggagcacactcctattcaatattctttcctatcaagctctatgttttgatcctcatcctcagaatccagtcccatctctactctcctgaatcctgccagcacatgttggcaagttcctgcagctcctccagggtacagtctcattccttcctcagcagcaggtctggcgcatccctggccggttttgttgtgacttgatagctatttgtctggtggccaggagggaggtgcatttcatcttgcaaagcagaggccctgcrctatcttcaagcatgaggggagttttagcccttaacagtgggcagggggccgcttctgcaggcccagtaggttcagtggaatctggagattcaagatttttttagtgcattgacccagatgtgccatcccaagtctctgagttctgatccttctctactggggtatgacctgacagagcggacgtgctctgattgagaatcca

SEQ ID NO: 917781 - DNA, 742 bp, Homo sapiens
cctgcagctcctccagggtacagtctcattccttcctcagcagcaggtctggcgcatccctggccggttttgttgtgacttgatagctatttgtctggtggccaggagggaggtgcatttcatcttgcaaagcagaggccctgcactatcttcaagcatgaggggagttttagcccttaacagtgggcagggggccgcttctgcaggcccagtaggttcagtggaatctggagattcaagatttttttagtgcattgacccagatgtgccatcccaagtctctgagttctgatccttctctactggggtatgacctgacagagcggacgtgctctgattgagaatccaacctctctgaagctgcattacccttataatgaagcttcgggctgatccttagctttttctgccctccagctacagagtctctatatgctgccaagagactttcacactttgtctcaaactgatgattaagwactctcaaactttcattgtcttcctttaagcattgctagccccagagccatctgatttcacagtccttatattactagttcactcaaacctctcaaatgcctgggaatttgcttccaccagtgcctcccttccatcagtttcccatcattcctgcacatccccagtgaaagtttaaacaagtacaccacgctagaatgccaggggcaattattgctccaccttccagctccaaacacctattttagaatctgcttcctaaaaa

SEQ ID NO: 917782 - DNA, 657 bp, Homo sapiens
caaccaaaaatgcactaactccctccccaaaagagtatgcaacgtcctcaggtgatgcttatgcctctcgatagcctgcaacttaaatactatgatgtaaagttaacaatacagtcatgtaccatataatgaccttatggtcaagaacaaaacttatatacaacaatggtcccataagattataatactgtatttttactctaccttttctatatttagatatgtttagatatacacatactgacaagtgtgttacaactgcctacggcattcagcatagtaacatgctatacaggtttgtagcctaggagcagtaggctgtaccatatagcctaggtgtgtagtaggtgtaccatccaagtttgtgtragtacactctacaatgtttgcataacaatgaaatcacctaatgatgcatttttcagaacatatccctgtcattaagcaacacatgactatacttaaatactatgataaaaagtcaataagaggataagagagggaagaaatgagatattttctaaatatacacacacataaacaaacatattcataacaaaataaggatgaaatattcataacaattaaaaatcctggtttctggaactggtcacatgatcatagctggtgcttacagctaccttctactaccattct

SEQ ID NO: 917783 - DNA, 565 bp, Homo sapiens
atttcttagaggctttgtttgtttctttttactctaaccctgtcttcttactttatttcattaatttgatcttcaatcactgataccctttcttccacttgatcgaattgtctgttgaagcttgtgcatgcatcaygaagttcttgtgccatggttttcagctccatcaggtcatttaaggtcttctctacactgtttattctagtttgccattcgtctaagcttttttcaaggtttttagcttccttgcaatgggtttgaacatgctcctttagctcagagaagtttgttattactgaccttctgaagcctatttctgtcaactcatcaaagtcattctttgtccagctttgttccattgctagtgaggagctgcaatcctttggagaagaggcactctgggttttagaattttccacttttctgttctggtttcttcccacctttgtggttttatctaccttttgtctttgatactggtgacctacagatggggctttggtgtagatgtccattttggtgatgttggtgctattcctttccattggttagttttccttctaac

SEQ ID NO: 917784 - DNA, 565 bp, Homo sapiens
atttcttagaggctttgtttgtttctttttactctaaccctgtcttcttactttatttcattaatttgatcttcaatcactgataccctttcttccacttgatcgaattgtctgttgaagcttgtgcatgcatcatgaagttctygtgccatggttttcagctccatcaggtcatttaaggtcttctctacactgtttattctagtttgccattcgtctaagcttttttcaaggtttttagcttccttgcaatgggtttgaacatgctcctttagctcagagaagtttgttattactgaccttctgaagcctatttctgtcaactcatcaaagtcattctttgtccagctttgttccattgctagtgaggagctgcaatcctttggagaagaggcactctgggttttagaattttccacttttctgttctggtttcttcccacctttgtggttttatctaccttttgtctttgatactggtgacctacagatggggctttggtgtagatgtccattttggtgatgttggtgctattcctttccattggttagttttccttctaac

SEQ ID NO: 917785 - DNA, 565 bp, Homo sapiens
atttcttagaggctttgtttgtttctttttactctaaccctgtcttcttactttatttcattaatttgatcttcaatcactgataccctttcttccacttgatcgaattgtctgttgaagcttgtgcatgcatcatgaagttcttgtgccatggttttcagctccatcaggtcatttaaggtcttctctacactgtttattctagtttgccattcgtctaagcttttttcaaggtttttagcttccttgcaatgggtttgaacatgctcctttagctcagagaagtttgttattactgaccttctgaagcctatttctgtcaactcatcaaagtcattctttgtccagctttgttccattgctagtgaggagctgcaatcctttggagaagaggcactctggkttttagaattttccacttttctgttctggtttcttcccacctttgtggttttatctaccttttgtctttgatactggtgacctacagatggggctttggtgtagatgtccattttggtgatgttggtgctattcctttccattggttagttttccttctaac

SEQ ID NO: 917786 - DNA, 656 bp, Homo sapiens
aagtaatagtgcagtgcaatagggagtatcaatgcaaaaattcttgaattctacattccaagttagctctccagagcaaattgactcaggccaaatacattttctctatgacactttctataacaaggtaggcagtatatttcctaagatattagattgtttctttttaaacttctaattaaatcacttagaaaaccatattgcagttgtccattgtatgtcaatatccctgattcaatggtratcttgaggacacagattgtatattttttttaatctccagagacatgtaggcatgcaataaatggtctgccttggacttaccttacactaaaacccttgacactagaagtgggtgatttaaaaagaaacaaataaaaagtaaaaaataaataactcagagaaactctttaccttcattcatagttttcatttgactgttcaagaggaatatctaaggtcttatgatagtaaaattttcttattctttagaaagtctgactgtatctattttagaagccctatagtctatagtagtttttgataactatatgaattaatggatgaatgaatttccaaaaaattattgaaaactggatttttaaattaacatgagagaccagtaaacatttgtgtttgtttaaccaaaaaaaaaa

SEQ ID NO: 917787 - DNA, 617 bp, Homo sapiens
ttagctaaccaaatccaacagaatatcaaaaatataatacaccatgatcaagtgggttttataccagggatgcagggatggcttaatatatacatgacaataaatgtgatatgtcacataaagagaattaaaaacaaaaaccacatgattatctcaatagatgcagaaaaagcatttgataaaatttaatatccctttataataaaaaacctcaaccaaatagacatagtagaaacttatctcaaagtartaaaagacatatatgacaaaccaacatcatattgaatcaggaaaagttgaaagcatttcccctgagaactggaacaagacaaggatgcacactttaaccacttctattgaacctagtactggaagtcataggcagcgcaatcaaacaagagaaagaaacaaagggcatccaaatttgaaaagaggaaatgaaactgtcgctaatcaccaatgatatgattgtatacctagaaaactctaaagtttcgttcaaaaagctcctatatctgataaattcagtaaagtctcaagatacaaaatcaacgtacgtgaatcagtagcactgctttacaccaacagtgaccaagctgagtatcaaatcatgaact

SEQ ID NO: 917788 - DNA, 902 bp, Homo sapiens
ttgcccaggctggtctcaaagccctgggctcaagcgatcctcctgccttggcctcccaaagtgctgggattacaggcatgagccactatgcctggcatccttccctttcttatcttgaatttctttgagtttcctcaaaacagctattttgaattctctgtctgaaaggtcacatatctctgtttcttcaggattggtcctgggtgcgttatttagttcatttggtgaggccatgtttgtctggatggtattgatgcttatagatgttcttaggtgtctgggcattgaagagttagatatttattgtagtctttacagactgggcttgtttgtgcttgtccttgggaaggctttctagatattcaaaaggacttgggtcttgtgatataggttgtgtctgctttagggggcccaaagctcagtaattctgtggttcttgcagatttgtagaggtatcgccttgatggtcttagacaagattcagtagaattctctggattaccaggcagagattctaattctcttctcttaccttttcccaaacaaatggaaactttctgtctgttttgagccacctggagctgtgcataggctgatacaagcatccctgtggccaccaccgctaggactgcactgggccaggcctgaagccagcatagcactgggtcttgcccaagacctgcygtaaaaagtccctggctaaggcttatgttcactcaaggccctggggctcgataatcagcagatggcaaagccagccaggcttttatccttcccttcagtgtggcaagtagccccaggccccgggcatgtccacaggtgctgttcgggagccagggactagagttgaaaaccttagaagtctacctgttgttctatcgtactgcagctgagctggcact

SEQ ID NO: 917789 - DNA, 588 bp, Homo sapiens
cctcgttgattttaatagtcacctcatacatgtccacagtgaattccagatctcctttaaaacttgtcttcctacctcagtgaatagcaattccatgttttcagttgctcaggcccaaaactttggaatcgtctctgactcctctattctctttcacattctacttctcatctgtcagcagaagatgggttgtagaattctgaagacttctcaatgggctgaccaccactatctgggtccaaggcatcaccgtctctcacctggagtgtgcagcaggctcctagctggcctcaccacctccaccttgctccctacagcrtcttcttagtacacagctaggagtcctgttaaaatgtcagctcatgccacacatctgctcaaaaccctccaaaagcttcctctcattctgagtaaaagccaagtaagtccttagaaggacttatgcaacctctcccaatctgacctcctcccctcctcctctcctctttgactttgtcttctgctacctcctccctccttccctctgccctagtcataggggtctcctccttgctgttcctcaaaccttccaggcccaatccacccttg

SEQ ID NO: 917790 - DNA, 763 bp, Homo sapiens
gctgagctgggaggagtttggggccaggagtttgaaaccagccagggcaacatagtgagaccccgtctctaaaatgtaaaaaaaagaaaaagaaaaaaaacttgatgctggcccagagaaggagggatccaaacagaggtcaggccagagcttcaacggcacagcctgttctccttactgactgtggaaatactgccttctgttttgccagtatttctgtttataagattttttcacatgtatgacttcaatcacataacaacacttattcccattaaacaggtggcaaaactaaggttcaaagaggtgatgtaacctacccaaggttgtacaactaagggggaagaaccaggattcacaaccaagtgtgtctggctctttagccactgctatggtgccacacaacaatcttccaaggaattgttgtccccttttataggcaggcaagccagcactcagattcactgggccaaggttatcattaaagggcagagtcagtatttgaacacmggcccctctgctctactgcctcatagcaaccttattctttcttactgaagcagctattttttcaactttaagaaccaagccatgattcccttctgagaggggcctaattctgagaagggggcggtggttgcacagacgggtctcggttggccagtgagttcactggcaccttctcactgcttggtccaggctctgaagtctgctggccctgggagccccgggagccgggagattgggaggacagcaggaagaa

SEQ ID NO: 917791 - DNA, 571 bp, Homo sapiens
tgagactgagatgtagagagtaggaaggcagataaggcatcagccatgtgcaaattttccctgtagcactttgaagtctttgagtttgccatagtttttaaaattagactatatagtcaattagagatcattattacatgttttttttttcatagtgctcttggttgctcctcagataaaatgaccatccatatggcaatagcctcacccaaggccagatggcttattgcagggattgggaaccaacaatcttttgcttaaagaggcacttaaattttttcaaaatgacacagccctaggaaaaatctttttatggaatatctccaacttccctstttgcaagcacctccctgttctctatgaatagcctatttcctcaagcctcttccacacccactcagtttgcagcctctgtttagacttgcgttgtgctgactatcaataaattcttcctaaggtgttttttacagtgggcttattagggtgataacctatacagaaaattctttgactattccttccgctgacaaaaacctgttgcttgggggtaatgaagcaggcttctgtcacc

SEQ ID NO: 917792 - DNA, 673 bp, Homo sapiens
atttttttctttttagggatgaggtgttgctatattgtccaggctgtcttgaactcttggcctcaagagatcctcctgccttggcctcccaaagtgctggtatgaaggcatgaaacatcatacctgactgattctgaatatttcaaactgtacatttaaaatccaactcaaatggcatggcacaccctgctgtgaaagcaacacactccaggcagaatcctagaaagctctgagcactcagcataatcctaattgtcatcaggtctgtaaccactgctgtttcttcacaaagtcactatttgagccattttactcaaagttgactgaatttcaagaaaggtatgagacacaatcactatcacttgtattagttttcatttgaatatcatactgtccataaattgttagccacagggtgggaggaagtatgtgggggccagtttgtgcgcacatagctgccattcgtggttcagttctccatgctaagaaarggagaacaaactagaactttctgtgctgattcggttaatactttctctgtagatgactcagaaccttcctgataatatttacttataattttctacaggagcttagaatctgtatctgttttatgaaaatatccattggtttcataattatcctgcaacctgataaattatcttaaattgat

SEQ ID NO: 917793 - DNA, 542 bp, Homo sapiens
gaggggtagagtcttctctaaactcccccagggaaagggagactccctttcccagtctgctaagtagtgggtgtgtttccttgacactgaggctaccactagaccaaggtctgcttggcaacaggcatcttcccagattctggcgttacckctagaccaaggagccctctagtgcccctgtctgggcataacagaaggctcgcactcttgtcttctggtcacttctcactgtgtctcctcagctcctatctctgtatggcctggcttttcctaggttatgattacagagtgatgattactctaatgttggaataaaaagtaattcctaccaactaatgattaatgatattcacatataatcatatctaagatctgtatctggtataactattcttttatattttatgatactggaacagctcatgccctgagtctcttgcctcagcacctgggtggcttgccgcccacaagtgggcacctccattggacacagtaggttttgaaatccttgtttatcctctggggtctgggtcttggcttac

SEQ ID NO: 917794 - DNA, 542 bp, Homo sapiens
gaggggtagagtcttctctaaactcccccagggaaagggagactccctttcccagtctgctaagtagtgggtgtgtttccttgacactgaggctaccactagaccaaggtctgcttggcaacaggcatcttcccagattctggcgttacctctagaccaaggagccctctagtgcccctgtctgggcataacagaaggctcgcactcttgtcttctggtcacttctcactgtgtctcctcagctcctatctctgtatggcctggcttttcctaggttatgattacagagtgatgattactctaatgttggaatwaaaagtaattcctaccaactaatgattaatgatattcacatataatcatatctaagatctgtatctggtataactattcttttatattttatgatactggaacagctcatgccctgagtctcttgcctcagcacctgggtggcttgccgcccacaagtgggcacctccattggacacagtaggttttgaaatccttgtttatcctctggggtctgggtcttggcttac

SEQ ID NO: 917795 - DNA, 586 bp, Homo sapiens
tattatgtagcattcgacggctcattaaattaaaacagggaatgagaacaatgagtctgaaaatgtaactttaaaagcgccactgtacatttgaacaaacaattgtgttaaatatgctgctaatgtcagccgttgggtggactaaatgatatcttatgtaaaaatttgagggtgacatgatatatctgtcactctattacgctgctctcagaaactacttcatgtgaaattctgatgataccatcatcctgccaagtgaaagaggcaggcataagcatggacaaattaagaggggtaagagcctgattttgatgtggaaacgtgttctgacaayttgagaaaagcttttcacagtgtgaagttgtcaacttcttatcctggttttcaacttgagtgtctgtagttatggtgtcaaacatattggtgagctctgagtgactcatacttcagatacgagggttttcccgtgaaatttaccttgagctttccacctccagcttataaggcttcaggaacagagcagattttattcttactgattcaataagagaaaactggatgggaggaactagaagaattcagggtc

SEQ ID NO: 917796 - DNA, 654 bp, Homo sapiens
gaagctcagctgctccattttgcagatgtgaaggctgagcccagaatgggcagtgatcttcctcgcagagttgcacagccagtcagtgtgaaagccagaactagaatccagtctcttgacacccatcccagtgctccctcccagctctgctcctgacycgggacagtcacacccacctccgagccttggttgacccatttgtaaaatcagtctcttggccttgacagcctctcaggttcctttctgcctcctcatcatgccattctctgatacatgaagtgggagagggacacagatttccagaatttactcagtttgttctttctggggggcggatgcaaatggagactgcaggcaaggcccattgagatctctacactcattcatccaacaagtactaatccaccatctgctgggtactgggctcacaaggaggtgggtactccttggtcctgaaggcagtggagaaaggcttccactcgtggaagggtgttgaaagtgatgtgcccaggctgggtgcagtggctcacacttgtaatcccagcactttgggagaccaaggcaggtgggtcacctgaggtcaggagttcgagaccagcctggccaacatggtgaaaccccatctctactaagaatacaaatattagccaggca

SEQ ID NO: 917797 - DNA, 790 bp, Homo sapiens
atcaagacgcggagaccagtagtggccctgaatggctgggcacactgatatttattgcatacaagacaaggggcgtagggtcaggagggtgaatcttctaagtgattgacaaggtgaagcaagtcacgtgatcacagcacagggggcccttccctcttaggtagccgaagcagagagagagaaggcagcatacgtcagcgttttcttctatgcacttacaagaaagatcaaagactgtaagactttcactattccttctaccgctatctactacaaatttcaaagaggaaccaggagtacgggaggaacatgaaagtgaccattggagcacagcaccacaaggaggggtttaggcctccggatgactgcggcaggcctagataatatccagccttccacaagaagctggtggagcagtgttccctgactcctccaaggaaaggagactccctttcgcagtctgctaagtaacgggcgccttcccagacactggygttaccgcttgaccaaggagccctcaagctgcccttatgcacgcgttgacagagggctcacctcttgccttctaggtcacttctaacaatgtcccttcagcacctgaccctctacccgccagttattcctaggttatgttagtaacgcaacaaagagtaatattaaaagctaatgattaataatgtttataataatgattgataattgtccatgatcatctctatatctaatttgtattatgactattcttattctaactattttctttattatactgaaacagtttgtgtcttca

SEQ ID NO: 917798 - DNA, 799 bp, Homo sapiens
accactactaccaagacacggagaccggtagtggtcccgaatgactgggcgtgctgaaatttattgcgtacaagacaaggagggcagggaaggagggtgaatcttccaagtgattgacaaagtcaagcaagtcacgtgatcataggacagggggcccttcccttttaggtagcggaagcagagagagaacgcagcatatgtcagcgttttcttctatgcacttataagaaagatcaaagactttaagactcactatttcttctaccrctgtctactacaaacttcaaagaggaaccaggagtacgggaggaacatgaaagtggacaaggagcgtcatgaccattggaacacagcaccacagggaggggtttaggctgcgggtaggcctagataatatccagccttccacaagaagctggtggagcagagtgttccctgagtcctccgaggaaaggagactccatttcgcggtctgctaagttacgggcgccttcccagacactggcattaaccgcttgaccaaggagccctcatgcggcccttatgcaggcgtgacagagggttcacctcttgccttctaggtcacttctcacattgtcccttcagcacctgaccctctctactcgtcggttattcctaggttatattagtaatgcaacaaagagtaatattaaaagctaatgattaataatgtttatattaatgattgataattgtccatgatcatctctgtatctaatttgtattatgactattcttattctaactattttctttattatactgaaacagtttgtgc

SEQ ID NO: 917799 - DNA, 719 bp, Homo sapiens
taatatccagccttccacaagaagctggtggagcagagtgttccctgagtcctccgaggaaaggagactccatttcgcggtctgctaagttacgggcgccttcccagacactggcattaaccgcttgaccaaggagccctcatgcggcccttatgcaggcgtgacagagggttcacctcttgccttctaggtcacttctcacattgtcccttcagcacctgaccctctctactcgtcggttattcctaggttatattagtaatgcaacaaagagtaatattaaaagctaatgattaataatgtttatattaatgattgataattgtccatgatcatctctgtatctaatttgtattatgactattcttattctaactattttctttattatactgaaacagtttgtgccttcagtctcttgcmtcggcacctaggtaatccttcgcccacatctggggacagtcctcatgtgttcctaagctcagcctcgagggtcctgggctggtcacctcaccgcatctgcactgtgtctctagatccagactccacgggaagggcttgggatgcctagcacaaaggatgcctggtgtgacaaacatccctccattccctggactgcagctcagcaaaaggtccaggtggtgccatgccaatttactgtccctttgagatgagcccatagggccttgtggggggcgagtgtgaagctgggcgcctgg

SEQ ID NO: 917800 - DNA, 780 bp, Homo sapiens
tgaaagctctcaagatgagatcatcctgggtttgtcaggtgggccctaaatccaatgttgagtgtccttataacagacagaaaaaaggagacacagaggtgaggagaaggccgtgagaagacagaggcagacagtggagtgatgccgccgcaagccaaggaatgcctggagccaccagragctggaaaacacagggaaagattcttcctcagaccctttggaaggggcatggccctaccgacattttgactggaaacctctggcctccagaacggtgaaagaacacatttctgttgttttaagccacccagtttgcagtactttgctatggcagccatgggaaagtcatacagttggcaaatgctacattgtttcactccttctgagtaggcttagtgctcattagcacattcagggctctgaaaagtcctgcaacaaagaaagcagtttgacaacaggtgctggcaaggttgcagagaaacgggaatgcttttacgctgttggtgggaatgtaaattaattcaaccattgtggaattcctcaaagatctagaaccagaaatatcatttgacccagcaatcccattactgggtatatgcccagaggagtataaatcattctgttacaaggatacatgcacgcctgtgttcattgaagcactatttaagacatggaattaacccaaatgaccatccatgatagactggataaagaaaatgtggtacgtatacaccatggaacactatgcaatcgtaaaaaggaacgagatcgtgtccttta

SEQ ID NO: 917801 - DNA, 780 bp, Homo sapiens
tgaaagctctcaagatgagatcatcctgggtttgtcaggtgggccctaaatccaatgttgagtgtccttataacagacagaaaaaaggagacacagaggtgaggagaaggccgtgagaagacagaggcagacagtggagtgatgccgccgcaagccaaggaatgcctggagccaccagaagctggaaaacacagggaaagattcttcctcagaccctttggaaggggcatggccctaccgacattttgactggaaacctctggcctccagaacggtgaaagaacacatttctgttgttttaagccacccagtttgcagtactttgctatggcagccatgggaaagtcatacagttggcaaatgctacattgtttcactccttctgagtaggcttagygctcattagcacattcagggctctgaaaagtcctgcaacaaagaaagcagtttgacaacaggtgctggcaaggttgcagagaaacgggaatgcttttacgctgttggtgggaatgtaaattaattcaaccattgtggaattcctcaaagatctagaaccagaaatatcatttgacccagcaatcccattactgggtatatgcccagaggagtataaatcattctgttacaaggatacatgcacgcctgtgttcattgaagcactatttaagacatggaattaacccaaatgaccatccatgatagactggataaagaaaatgtggtacgtatacaccatggaacactatgcaatcgtaaaaaggaacgagatcgtgtccttta

SEQ ID NO: 917802 - DNA, 780 bp, Homo sapiens
tgaaagctctcaagatgagatcatcctgggtttgtcaggtgggccctaaatccaatgttgagtgtccttataacagacagaaaaaaggagacacagaggtgaggagaaggccgtgagaagacagaggcagacagtggagtgatgccgccgcaagccaaggaatgcctggagccaccagaagctggaaaacacagggaaagattcttcctcagaccctttggaaggggcatggccctaccgacattttgactggaaacctctggcctccagaacggtgaaagaacacatttctgttgttttaagccacccagtttgcagtactttgctatggcagccatgggaaagtcatacagttggcaaatgctacattgtttcactccttctgagtaggcttagtgctcattagcacattcagggctctgaaaagtcctgcaacaaagaaagcagtttgacaacaggtgctggcaaggttgcagagaaacrggaatgcttttacgctgttggtgggaatgtaaattaattcaaccattgtggaattcctcaaagatctagaaccagaaatatcatttgacccagcaatcccattactgggtatatgcccagaggagtataaatcattctgttacaaggatacatgcacgcctgtgttcattgaagcactatttaagacatggaattaacccaaatgaccatccatgatagactggataaagaaaatgtggtacgtatacaccatggaacactatgcaatcgtaaaaaggaacgagatcgtgtccttta

SEQ ID NO: 917803 - DNA, 609 bp, Homo sapiens
ccctacaggttgggagccctcatggctgctgtcccggggccacctggtccccctgattcagccgccttacctctggacagaagcacactgaggagaacaaccaggagaagcaggatcagagacaccaccgggcagagatacttccaggtctttttttattttttattttattttgtttttgttttttttttttttttccgagacggaatcttgctctgtcgcccaggytggagtgcagtggcgcaatctccgctctctgcaagctttgcctcctgggttcacgccattctcctgcctcagcctcccgagtagctgggactacaggcgcccgccaccgcgcccggctaattttttgtatttttagtagagatggggtttcaccgtgttagccaggatggtctcgatctcctgacctcgtgatccacccgtctcagcctcccaaagtgctgggattacaggcgtgagccaccgcgcccggcatttccaggtcttgtcatggggcttctgtgcccgttgccctgggtggaaaccaggtcagcttcccctcccttcagggatacccactctcttttccttagatgcccgagactcctctcaggctgcagggaa

SEQ ID NO: 917804 - DNA, 609 bp, Homo sapiens
ccctacaggttgggagccctcatggctgctgtcccggggccacctggtccccctgattcagccgccttacctctggacagaagcacactgaggagaacaaccaggagaagcaggatcagagacaccaccgggcagagatacttccaggtctttttttattttttattttattttgtttttgttttttttttttttttccgagacggaatcttgctctgtcgcccaggttggagtgcagtggcgcratctccgctctctgcaagctttgcctcctgggttcacgccattctcctgcctcagcctcccgagtagctgggactacaggcgcccgccaccgcgcccggctaattttttgtatttttagtagagatggggtttcaccgtgttagccaggatggtctcgatctcctgacctcgtgatccacccgtctcagcctcccaaagtgctgggattacaggcgtgagccaccgcgcccggcatttccaggtcttgtcatggggcttctgtgcccgttgccctgggtggaaaccaggtcagcttcccctcccttcagggatacccactctcttttccttagatgcccgagactcctctcaggctgcagggaa

SEQ ID NO: 917805 - DNA, 621 bp, Homo sapiens
cattggacctaaaggatgagagagaggtggcctcagaagaaccagggcttcccaggcagaaggaaccatgtgtgcaaaggacctgaggcagaaatagcttgatatgaaggagaaccagaaaggaggccatggtgagtgaatgggacagccaaagagatgaggctggaagtcttgtgagaccatgctgggaatctgaattttattctaggtgaggtgagcagtcataggaacactattcagcaggatggtgccacaatctgatttcagytttaagtccactgtgggtaatatatggagaatgaaatgtagggctaagacaggttatattttcccagatggccacaatatctcccaccctacatccacttgtacaatgtcaccttgacatgcctcccatgtagagaggtataatctgtgccccctttccttgaatctggtggcagaagtgacacagcatgacactcaaggctgggtcagaagagatgcaacttcttccttgttcacttttagagggctgggtggctgtctaagaagtctgactaccccaagaccaccatgctggaaggaaacccgaaccacacggagaggcctgtgtagctaccctggtccacagccccagca

SEQ ID NO: 917806 - DNA, 685 bp, Homo sapiens
ctcctgttcttccagcatcagaggcctcaaaacagcaggaagccagcagcagcatccgagcaggcagacgggaagcaggccaggggtgctcctagaaaaaaaacaggtgaaacaccccagaacctgccagaaccaggggagggcagcccaggtgaaaagggaagacaaggcccaagaaacaagggttaaggagcacaaggcaggtgacaaacccaagctggcctcgtcccctmcctccacctccttctgcctgggaaacactcaatgaaaagagctacatccaccaagcacatctctcaaatccaggcacgtggaagcgcacagcgaacgttactgaagtgaactaacaaacagccccgtgatgtatctttcaccaccccatttttcaaatgatcaaatggaggctctgagaaggtgaggctctgccgctgttcatctccagttcaggcctcctcgcttctgtcctggccattttgagcagcccccctggcctccacccagcccccttccggcctgccgtccatggctgctgagtggaccttcccaacacagatgcaacggtgctacttctctgcttaatacaagagtgtcctgtcgcctaggctgcaggggagtcaacatcctcagaatgatgaaccaagttcaagtccaaggggactaaaataaggggaggggagagatacgg

SEQ ID NO: 917807 - DNA, 685 bp, Homo sapiens
ctcctgttcttccagcatcagaggcctcaaaacagcaggaagccagcagcagcatccgagcaggcagacgggaagcaggccaggggtgctcctagaaaaaaaacaggtgaaacaccccagaacctgccagaaccaggggagggcagcccaggtgaaaagggaagacaaggcccaagaaacaagggttaaggagcacaaggcaggtgacaaacccaagctggcctcgtcccctccctccacctycttctgcctgggaaacactcaatgaaaagagctacatccaccaagcacatctctcaaatccaggcacgtggaagcgcacagcgaacgttactgaagtgaactaacaaacagccccgtgatgtatctttcaccaccccatttttcaaatgatcaaatggaggctctgagaaggtgaggctctgccgctgttcatctccagttcaggcctcctcgcttctgtcctggccattttgagcagcccccctggcctccacccagcccccttccggcctgccgtccatggctgctgagtggaccttcccaacacagatgcaacggtgctacttctctgcttaatacaagagtgtcctgtcgcctaggctgcaggggagtcaacatcctcagaatgatgaaccaagttcaagtccaaggggactaaaataaggggaggggagagatacgg

SEQ ID NO: 917808 - DNA, 607 bp, Homo sapiens
gtgtgcgccgctacacctggctaatttttgtatttttagtagagacagagtttcgccgtgttggccagggtggttttgatctcctgacctcaggtgatccacccgccttggcctcccaaaagtgctaggattagaggcatgagccactgcacccagcctctttttttttctttgattttatggttcaactaggtgagttcaagatccatggttttaagtaccattcctaggtcaatcattctgaaatttatatctccagcccctgacttgtcctctgtagaactctagatttgtgtaactgtctacctcatttggatgtttgataagcaactcaaaatgagcacaaattgagaactctcaatttatcaccstatatctgttccccactttcccatcccctcatcatccccaatatttacccgcctaaataattggcaccatcagcccagttacataggccaggtcaggagtcatccttgattcctctcattctcccatatcccagtcaatagttcctactggctctatctccaaaatacatcctaaagccaaacctgacccttcttgccatctcactcctgtaatcctagtctaagccaccatctaa

SEQ ID NO: 917809 - DNA, 564 bp, Homo sapiens
tgtttaaaataatagctttattgagatataactcacttaatatgaaatttacccttttaaagtatactattcagttgtttttagtatattcagaggtgtgtgaccatcactaccaccaagtttcagaacactttcatcaccccataaagaaaccctgcacccattagcagagtttctaattggcagggtttcacatttcccstaatattagtgattttttaaaaagacagttttggagaagtatgaaaaactaaaagaaaagtaaggaattataagtaacaagggtatattatgctttcaaagggaactaggagagagaggtaaataggaagaggtggtatcagaatggctgtttaaaatgggaaaggccatagactgaagggaaggattcggggaaaaagactgagaggcacagagacagaagatatatactcgctcacaaactggatacagttgaacaggatacaatcagaaacacagatggaggggtttgacttggaaaggaagagacaccttaggggactatcatgacaaaagtaagaaactactaagtcaataactaaa

SEQ ID NO: 917810 - DNA, 585 bp, Homo sapiens
ggtggcggctgagccttgcttcactcacttcccacctttctccctctttatgggattcttaacagcacactcatggagatttttaaggagtgtgttccctgcaaaatctcaataccaagtgatgatttccgtaagtttccataagttggtaagttccaagcctttcctccaagggggcatggtcatccctatagatacaggacatkaatggcaagcaacgctgatgctgggcagggaatatgtactcgctctgagaaaactgtgagggaattacacgactctgcagtggagaacactggagaaaaagggggccaaaaagataagaaaagagagaacaagagagagagagagaacaaaaagaagcaactgaaagtctatcaataggcagcttgtacatcgatacaggagaagaccatgtcatgcagctattacaaagaaaaaggagcaggatccttggtgcccagttgttgaagattgttcactctctgtgtacctggggctgtgttctatgccctgagaaccagatgagtgggagaaacacaagtgcagcgaagcccgatcagaaacacaaaactctttggaaag

SEQ ID NO: 917811 - DNA, 604 bp, Homo sapiens
aattctgcaaatctttattgagtgccaactatttgctgggcacaggctaggcactgattctgctggttctgagaaacataaatggtaccatagggaggtgtttcctcctaagtggcaggaggatgtttgctgggagttaagtgaaccaattcctcctctgcttacaccacgtgggggtaggtccagaactcaggccttgggaacatatgctgtgctctcttctacaggcgctgtgtggaagaaccaatagcagttgttaaatagctgtggaatttcctccacaatccacatagtgatgtgtctccaaggagctctgggtcatgaggccaatgtatgaaatcttcactgaagttctagggaaaagaaaaccaagaagaattaattatgtttgggggatgaaataagccagaaaaatgtcccaggaaattttttgcaagttcagagaacaatacccacgggccccakgcacatatcctcatggttatgtaaccaggaggccagaagatctttccactttcacagagatactgtgccaggaggtggccttccaaacaaggcttctcaatcgagaatgattttaccccacaggagacttctggcaatg

SEQ ID NO: 917812 - DNA, 565 bp, Homo sapiens
tttgtgtgccaacctaaggagcacagattttattatagagagatggaagcccttagagatttttaagcacagaagtggtctggccagttctgtactttaaataaataacagtaccagtgttggcagtgtcagcatgcaaggatctgatctttcaatgaaaacttaagaggactcgcatatagmcatggaaaaccattagagtttgtatcagttcaggtaagatgatggggactcaacatactatgagataacactgtggaaatagcatgttatcactcaagtacagcaagcggcatgttatcactcaagtacaaggagactcaagtacaataaaaattattattcaagtataattaaaaaatcaagcaaactatgaggaaattctaaggagctatccttaataagctaaaggaaaattataaataaaccaactactcacaaagtttattcattcactatatacacaggagttcaaattcccaccatagatcaggcacttttccagttgctgaggaaacagagtaatgaaaacagaccaaatccctgccttcatggagcttacatt

SEQ ID NO: 917813 - DNA, 565 bp, Homo sapiens
tttgtgtgccaacctaaggagcacagattttattatagagagatggaagcccttagagatttttaagcacagaagtggtctggccagttctgtactttaaataaataacagtaccagtgttggcagtgtcagcatgcaaggatctgatctttcaatgaaaacttaagaggactcgcatatagacatggaamaccattagagtttgtatcagttcaggtaagatgatggggactcaacatactatgagataacactgtggaaatagcatgttatcactcaagtacagcaagcggcatgttatcactcaagtacaaggagactcaagtacaataaaaattattattcaagtataattaaaaaatcaagcaaactatgaggaaattctaaggagctatccttaataagctaaaggaaaattataaataaaccaactactcacaaagtttattcattcactatatacacaggagttcaaattcccaccatagatcaggcacttttccagttgctgaggaaacagagtaatgaaaacagaccaaatccctgccttcatggagcttacatt

SEQ ID NO: 917814 - DNA, 726 bp, Homo sapiens
caggtataggacgtttctgtaatcagagaaggttcttttggacggcactgagctagagagatggtgatgtcattcatcgagctattgatggttgtggtgggacaacagtagctgccagaaagcgctgtttattagaaatatgagccacatatgtaattaaaaaatttttagtagccacattaaagagtaaaaagaaacaattggattttataacttatttaacacagtatgtccaaaatatgatttacaacacattaaaacatttaaaaattattgatctatttacataattttttttwatttttttgagacaggctcttgctatgttgcccaggctggtctcgaactcctgggctcaagtgatccatccgcttcagcctcccaaagtgctgggattacaggtgtgagccaccatgcccggccacattattttttaatactagctctttgaaatcaattgtatactttcatagtatatcttaattgaaatactaatttttttgttctttcgttattttcaaatgcttagttttatcagaaatatttcatctgtatttatatctgtaaatcataaaatttacagttgaaaaagtagatttatatgcccaggttattccaaacatgcttaaaacttttccagtaatggaattaagtatcggtttttaaagtttcaattcccgtgaaataagaataaaaattcagttcctcggtctcactagccacctt

SEQ ID NO: 917815 - DNA, 726 bp, Homo sapiens
caggtataggacgtttctgtaatcagagaaggttcttttggacggcactgagctagagagatggtgatgtcattcatcgagctattgatggttgtggtgggacaacagtagctgccagaaagcgctgtttattagaaatatgagccacatatgtaattaaaaaatttttagtagccacattaaagagtaaaaagaaacaattggattttataacttatttaacacagtatgtccaaaatatgatttacaacacattaaaacatttaaaaattattgatctatttacataattttttttaatttttttgagacaggctcttgctatgttgcccaggctggtctcgaactcctgggctcaagtgayccatccgcttcagcctcccaaagtgctgggattacaggtgtgagccaccatgcccggccacattattttttaatactagctctttgaaatcaattgtatactttcatagtatatcttaattgaaatactaatttttttgttctttcgttattttcaaatgcttagttttatcagaaatatttcatctgtatttatatctgtaaatcataaaatttacagttgaaaaagtagatttatatgcccaggttattccaaacatgcttaaaacttttccagtaatggaattaagtatcggtttttaaagtttcaattcccgtgaaataagaataaaaattcagttcctcggtctcactagccacctt

SEQ ID NO: 917816 - DNA, 595 bp, Homo sapiens
atcttcctgcctcagcctcctgagtagttggaattacgtgcatgcatcactgcaccaaactcttcttatcgttttatatctattttatattttcatttcattttgtataatagcctctagcctaattactatatttccttggatggttttagttatgatttttctatttttgtttcatctactatggtttcaatctctgtaatcttttgcttttgtctaccatttttcctaagctctgagagatcacttttcatctgtctgttgacttatatcatctttagatatgtctcttcttttttctatttctctatctccctccaccattttccttgtgagagagatgtytaaatgtgttttgtgaatgctttgacactgtgaagagctgttataaagaactgtaattagtctgaaccttcctcctgtaattttccatttgatatacagaacagtatttgcttacattctttcttctcctctcttttaatccagcaaagatcatatgctagttcctttttctaaaagaaaaattacacctcctttttgaatggaaccagctatttgctgagagttgaggtgtggtgggggcagctggggt

SEQ ID NO: 917817 - DNA, 776 bp, Homo sapiens
tactaatttcagagcttttaccactcactttgtaggtcacaatggcttccatttgttgcatatcctaaagaagcgggtgtgtagctggtcatgatttgagtgaccacatttactttgattaattatttgccctttatgtgggtctcttgctaaatgcaaaatttactatgacgtggtacaattctactctggtaccagcagagtaaaaacaatcacactttatctctgacctcgatgaccacagcaattgtatccttttgcagtgtgattcscacccagttctctggggcagcggtcaagagcatgtgttttggggttgggcgagtcccagctcagcagctaacttggtgggtgacctcaagaggctcagtttcctcttctgtaaagtggggtaatgacagtagctgctctgggcattgctctttctgtctcagtgtctatctgggctgctctgctcatgtccgttgcctgcttggcttttgtgggcatttgtgttatgccccagctctactgggggttcccaagctggcatttcccccagtcactcagcagtatcaccattgcttccccaaagcatcttcctatccccaggaagctggtatgctggatattatcgccccaccttacagaaaagattattgctggcccagggtcacctaggaaattggtagcagcatccaggacttttgactctgagttcagtgcccgtcacagtggcctcggatgccctcttagcacttagttgcaggttccttgagggatgggcttaagatctg

SEQ ID NO: 917818 - DNA, 607 bp, Homo sapiens
tttaatttgggtatttgtctattttgtgtggtataatacttctgcatatattccaaacattagacccttatcaaatatattatttgcaaatattttctcccatttgtggattgtccttttactttcttggtggtatcccttgaagcacaaatgtttttaatttctataaagtacaatttatctatttttctttgttggttgtgctttaggtgtcatatctaagcaatatttgctgagtctgaagtcatgaagatttatacctaagttttctttaaagagtttaatggtttgagtgcttaaatttatgtctttgatatattttgaattaaattttgaatgtggtgtgaggtatggacccaactttgttcttttttatgtggatatccggttatcccagcatcatttgttgaaaaaactattmtttcaccattgaattatcttgaaatccttgttgaaaatcaatctgctgaaaatgagagaatttatttctggaaagtcaattctaatcaggaagtgtgagccttccaactgttatttatccagattgctatggctattctgcctctttcatctccatatgaattttaacactagcttgtgtacttct

SEQ ID NO: 917819 - DNA, 607 bp, Homo sapiens
tttaatttgggtatttgtctattttgtgtggtataatacttctgcatatattccaaacattagacccttatcaaatatattatttgcaaatattttctcccatttgtggattgtccttttactttcttggtggtatcccttgaagcacaaatgtttttaatttctataaagtacaatttatctatttttctttgttggttgtgctttaggtgtcatatctaagcaatatttgctgagtctgaagtcatgaagatttatacctaagttttctttaaagagtttaatggtttgagtgcttaaatttatgtctttgatatattttgaattaaattttgaatgtggtgtgaggtatggacccaactttgttcttttttatgtggatatccggttatcccagcatcatttgttgaaaaaactattctttcacyattgaattatcttgaaatccttgttgaaaatcaatctgctgaaaatgagagaatttatttctggaaagtcaattctaatcaggaagtgtgagccttccaactgttatttatccagattgctatggctattctgcctctttcatctccatatgaattttaacactagcttgtgtacttct

SEQ ID NO: 917820 - DNA, 638 bp, Homo sapiens
gcaagaccaaagccaagggcaggcggtggagggggtttgctgctgtactccacttgtgtgactcccgggctttcctttgggatctcatgcggctgctcttcaccttggcgttcaccatgataccggagccagcgtcccttgaaatgatgttcagcttcatgaatggctgactcagtgtccccttggatcactttaagtaaaattgtattttctttgttgttatcaaaactccagttttgttcaggtatctgcccccctgcagacccagccccagctcaggaggtgggaggtggtcagggtaagtgcatcagagcgtggtcttccctggtagccgttattggtctaggggtaagcacgtgacctaaatggaggcggcaggggaagtccgcgatgcacgtgtgaccatgcgggggactagcctgaggatgaaactaaggcacagtgagggggtgaacgaaccygggacctcagaggtctcgctgagctgccgtcttacaacacttaggggccaccgtcctgtggactttcagttgggctaggaacgtcacttttctcattaacatagtttgtattttaaacttcttagctgataccagtggggaagccaggaggaatgacaaacttgaagtcatggaatt

SEQ ID NO: 917821 - DNA, 648 bp, Homo sapiens
caaagaggttactgggttctggctcagctattaataaaatggtatattcattcctactctgtacttgtcactttgtgtgtgtgaaaaataaggcagcatttgagcatttctggtctcttgctataaaacaatcaaacaccatccaactctcagctatattgccttagagcattccaggttgaattaacgatgtgcttaattgtagctgttgcaaattcatatactggtttgcagcagtagggctggacacttacaaatgagcctggctattaactgaccagtgattctaacactttaatgtgcatacgcatgacttakaagctctccctaaaatgcaggttctgattccggaggttgggatgacaccctggattctgtgtgtctaataagcttcatgtgttggtgtccttgctggtggttcgtggaccacaagttgagcagcttgcatctagagtttctctgccgctatgaagcttctgctccttctcctggagcatccacctgcacaggaaaggccaggccttttcccagcagaagctcatgcgacccactgggctctctgggtgtgcactgagggactctaggcctcgacatcaggtcccggctccagatcctgcagtggctgcaggtcagaatcatagccatagc

SEQ ID NO: 917822 - DNA, 625 bp, Homo sapiens
ctccctcctttagccaagggaagccgtgaaggactgtgccatgagaaaaggtgcactccatcccagatactacgcttttcccacagtcttcacaacctgcagaccagcagattccctcgggtgcctacaccactagggccctggrtttcaagcacaaaactgggtggcaatttggacagacaccaagctagctgtaggagattttattcataccctaatggtgcctggaatgccagtaagacagaactgttcactcccctggaaaaggggctgaagccagggagccaagtggtctagctcagcaaatcccacccccacggagaccagcaagctaagttccactcagcacagcagtctgaagttgaccagggatgctcaagcttggtggggggaggggcgtccgccattactgaggcttgagtaggagatttttccctcacagtgtaaacaaagccaccacgaagtttgaactgggcagagcccactgcagcttggcaaaccaatgtagctagacggcctctctagattcctcctcactgggcagggcaactctgagagaaaagcagcagctcccgtcaggggcttatagataaaactcccatctccctgggacagagcacctggg

SEQ ID NO: 917823 - DNA, 580 bp, Homo sapiens
acaatagagcactccaatagcatacttgatcaaacagaagaaataatctctgaacttgaagataggtagtttgaaagtgcctagtcaggtaaaagaaaagcaaaacagtgaagaaagcctacaagacttacaagataccattaaataaacatcaaaaaaaccaaaatatgatatgggagtttcagaaggataaaataagaaaaaatacatagaaaacctatttaataaagtaatagctaaaaactttccaaatcttgggagagatgtggtctagatccagaaaaaggaaaaatcctcaagtggatcaacccaaaaatgtccttcctgaggcatattatggtcaaattgtcaagtcaaagacaagaaaattctaaaaatagcaagagaaaagtgtcaagtcacatacaagggaataattattagactaacagaagagttatttgcagaaaccttacaagccaggagaaaatgagataatcaaagtgatgaaagaaaaaaaattgtcagccaagaatactgctatacttggcaaakctgtgcttcagaaatgaggaagaaatagtttttcacagacaaaaac

SEQ ID NO: 917824 - DNA, 622 bp, Homo sapiens
ctcaccatccccttcactgtttcctattgtttgtattttgataatctcacaagctcactacaaactttcactatttaaaaagtgctctgttaagcaatgagaagtcacatgcacattagagagctgatttttgaaactgagagttggctgtgggtgccggcattggcagtgtagatgtggaagcaggtacctgcccggggggagcagggctggtccatgcacagttctatgggaaggatttgaggacttctctgtgagaggtgccatcacattttaattaccaccaagcttgcttggcaatgcgtcctttcttggcaacatgtgaaaaaataattttgcaaactggaaggcmgactggtggttgaattcttctttgaaaaagagactctgtggtgcccagagggaaatgatattttaagcttgccacagggctccatgttgcactgagaaagacatttctccatgctattttgtgctccacaaagcactgggaaagtcaaggcacacatgagaacaaaactttcgcagtggggagtaatttgagattacatccttgggcctgaaggaaaaccttgagatgaccatagtttgtactgattcccttttcccaggctcctgtgct

SEQ ID NO: 917825 - DNA, 622 bp, Homo sapiens
caaaagacacatgcacttgtatgttcatcacagctattcataatagcaaagacaaggaatcaacccaggtgcccatcaatggtggattaaataaagacaatgtggtacatatgcactatagaatactacacagacataaaaggaacaaaattatgtcctttgcagcaacatggatccagctagagaccataatcataagtaattaacayaggaacagaaaactgaatactgcatgttcccagaagtgggagctaaacattgggtatgcatggacataaagatgagaacaatagacaatgtggactaactggggagtaaggactgaaagactatctattgggtactatgctcactacctaagttataggatgcatgctccaaacctcagctacacaatgcacccatgtaacaaacctgcatgtgtactccctgtatctaaaataaaagtcaatatttttattattttattttattttcatttttatttatttgtttattaatttatttattttgagatagagtctcactctgtcacccaggctagagtgcagtggcatgatcttggctgcttgcaaactctgcttcctgggctcaagcgactctcctgcctcaacctgccctg

SEQ ID NO: 917826 - DNA, 754 bp, Homo sapiens
cctaccgcccaccccctacgaaccccccagggaaggagtcttaagtgtaggagttgcagccacattttcagggccactgagaatcctgtctgtgcattcagattcctgggattctgacatttatctcaagagcaaacctcttccctaacctggtccccaaactctttttatgagaagatgttaagcaattggcctctaatgtcagactgacctgactttgtcacctgctagcatagcgaccttggtcaagtggtttaacctttgtaagccacagcttcctccaatgcaaaaacaaagctaacaataatacctacctaattgggttgaacaaggaggaggaggagggaaagagaagaaagaaaataatagataaatggccgggcacagtggctcacacctgtaatcccagcactttgggaggctgaggcaggtggatcacttgaggtcaggagttcgagaccagcctygctaacatggtgaaaccccatctctactaaaaaacaaaaattagctagttgtggtggcgggcacctgtaaacccagctactcaggaggctgaggcaggagaatcacttgagcccaggaggcggaggttacagtgagccaagattctgccactgcactccagcctgggtgacagtgagactctgactcaaaaaaaaaaaaaaaaaaaaggaaataatacataaaaactgctgtacccagtgcctggtacagaataagtgctcaaaatatgaaagtatttccactcctt

SEQ ID NO: 917827 - DNA, 701 bp, Homo sapiens
gaaatctttaaaccaaatgtgtcattattctgtctttgacagttccctcccacactgagcagggctgagctgtgtacctgatagattgctgtagaaatgatggaatttggccagacgagatggctcatgcctgtaatcccagcactttgggaggccaagacaggtggatcatctgaggtcgggagtttgagaccagcctggctaacatgaggaaaccctgtctgctaaaaatacaaaaattagctgggcatggtggcacatgaatcctaactactcgggaggctgaggcacaagaattgcttgaatctgagaggcggaggttgcagtgagccgagatcacgccactgcactccagcctgggcaacagagtgggactccgtctcaacaaaaaaaaaaaaraaagaaagaaagaaaagaaaaaagaaatgatggaatgtgactcagaaagcttcactgtaagataccaccacttcctccctgctcactgggatcacttatggcgggaagccaactgccatgttgtgaggatgcttgagcaggccctgtgaggaagaactgaagcctcctgccaacagcgagcacagacttgccaactatgtttgacaccttggaagcagatcctcctgtcccaatcaaaccttcagatgactgcatccccgatgggtatcttgactgcaacctcatgagagaccctgagtcag

SEQ ID NO: 917828 - DNA, 606 bp, Homo sapiens
ccaccacacccggctaatttatttagtatttttagtagagatagggtttcactatgttggccaggctggtcttgaacttctgacctcaggtgatccatccatcccagcctcccaaagtgctgggattacaggcatgagacaccacgcccggcctagccactgagatttttgaggctatttgttattgcagcaaaacttaatgagagcttactactacaccctctcatcttcctcaatctctcctcaaagctgcctcaaaattwaaaaaattcttttatatactcatgtgatactttctcgctttaggccaagtgaaaataaaggcatcttcataaacatttgctttttttcttggttcatgatatgactgtacaaactgcacttgtgtatacggctttaaacccagacttcaggcagggggaacagtcagtgcaaaggcccccaaggcagggacgtcaggagtccatgtggcttggtcagagtaagaaggtgggagagtggtagggagtgaggctcatggagtgagaggtgggcagtgtggacctgagcatgggccccagagaaggtgcagtttcaggacagaagcacaaggtggcaccgtgacac

SEQ ID NO: 917829 - DNA, 847 bp, Homo sapiens
gttggggaggctgaggtggtaggattgcttgacctgtgaggctgagctgcagtgtgccaagatctcactactgcactccagcctgaacaacagagcaaggccctgtctcaaaacaaaacaaaacaaaaaccagataccatttcatacacactagaatggttataatatagaaaaaacactaacgtcaaaaaagactacagcaggttctcaaataatgttgtttggttcatcatgattcggttttaatgaaataagggaaaaaaaacccatattgcaaagatgtgcrtaagaggttcacaggcatgtctaaattgtccatgtctgagtgagtgtgcgtgtgtgcatgagggcatcctgcaacaggacggtgtcctgttcaaggctggttccagcctggttccctgagttgctggaataggctctcaccatccaagagcctgaactggaaaaagcaggttggaaaatgaatggatgaatacaaattatcagaaaataaaaatctgtaaagtctatgatcataggacaaatgcatgaaaacacaggatatgatataaaagtgctcagaaagcctgccatatttgttattatttctctccctctactttttaaaggaacagggtctcactatgttgccatggttaagagtgcaatggctatgcagtcttaaccataatgcactacagcctcaaactcttgggctcaagagatcctcctatttcagcctctcatggagctgggactacgtgcgcacatcaccgccatttcttttttaactgtggtggcagaaagttctccttacaattttcactttgtaaagatttcttctttgatttgaccaaccaccaat

SEQ ID NO: 917830 - DNA, 603 bp, Homo sapiens
gagatgggaccctctgtaaaaactgacagattaaaatgagaaaaacagaaaagtttaaaaacatgtataccttatggatacatgggagatactcagggcaaaatgagtaaatctccaacaggtggctttcaattcaagcataaatactatgttgaacttaaagaaagaagatttgaggtgcagtagtggggagttagccagcaaaagcacagtagacaagggtaaggtttgttatacagacttaagtccatgcagtctccattgataagactctttagtgatttagttatccttctcttcttggtgttgagagaggtagcttttgaatggggatttcctttatagrtgtaaatttcccttacacaagggtaacttctactctgttttcagaacttcctttgttagcatttttttttttcaaaataatcagcttggaataattcttaagcaaaagggacatattttggggtggcatattctggtttcctaccattatattttggggtggcatattttggtcttatacactgtgttccaccggcaatgaaaagagttcttgtttttcctccagcaatttgtcattttttaaagagtttagcagtt

SEQ ID NO: 917831 - DNA, 668 bp, Homo sapiens
ctaaaactgttatacttctacaagaaaatacaataacaaatctttttgatttggagttacgcaaaaattacttagatacagcataggcatgatccataaaagcaaaaactgataaattgatcttcaggaaaattaaaaacttctgctcttataaagacattatgaaaagaattttttttaaagctacaaagtgggagaaaacattttcaaaattttctcagcaaaccaccaaaaataagagaataaaccaagaaagaagaagatggaagttccatgaatcaaggcrcaaatccagggaagaggctaaggattttcccaggataccggaagacagaagtcccaggaaggcagttttgagagggcctagagagcagccactccacgtgggagctggaaggcagagacttccagaagagacgcctccatgaccagcaatatctgccacaaaacctgctgtgttttgaacatactgagagatttttcagttcaaggggaattagtgctagtgtgacggttaatttcatgtgtcgaattggccaggccacagtgcccagatatgtggtcaaacattattctggatgtttctgtgactgtatctttggatgcaattgacattaaatctgcggactttggccaaagcagattgacatctcacaggagtgggcctc

SEQ ID NO: 917832 - DNA, 668 bp, Homo sapiens
ctaaaactgttatacttctacaagaaaatacaataacaaatctttttgatttggagttacgcaaaaattacttagatacagcataggcatgatccataaaagcaaaaactgataaattgatcttcaggaaaattaaaaacttctgctcttataaagacattatgaaaagaattttttttaaagctacaaagtgggagaaaacattttcaaaattttctcagcaaaccaccaaaaataagagaataaaccaagaaagaagaagatggaagttccatgaatcaaggcgcaaatccagggaagaggctaaggawtttcccaggataccggaagacagaagtcccaggaaggcagttttgagagggcctagagagcagccactccacgtgggagctggaaggcagagacttccagaagagacgcctccatgaccagcaatatctgccacaaaacctgctgtgttttgaacatactgagagatttttcagttcaaggggaattagtgctagtgtgacggttaatttcatgtgtcgaattggccaggccacagtgcccagatatgtggtcaaacattattctggatgtttctgtgactgtatctttggatgcaattgacattaaatctgcggactttggccaaagcagattgacatctcacaggagtgggcctc

SEQ ID NO: 917833 - DNA, 637 bp, Homo sapiens
ttgaaaggctttgccctgtgcagctctctcctttctggaatatttcctttctatttgtaactcttctggcagccccaaactttgtatctgacaccttgatccattaagactttaagttatccttaagttctaaccacctcatggctcatactgacagaggagtatcttcagaagaaaagccatataaacatgtatgtgtcctctttgtttttgtttttttgttttgagacagagtcttgttctgttgcccaaggtggagtatagtggcatgatcttggctcactgcaatctctgcctcccaggctcaagtgattctcttgcctcggcctcctgagtagctaggattacaggcatgcaccaccatgcctggctaattttttttttgtatttttartagaaactgggtttcaccatgttgcccaggctgatctcgaactcctgtcctcaagtgatctgcccaccttggtctcccaaagtgccaggaccacagctatgagccaccatgcctggcccatatatcctctttgttttttaacccccaagattctgatccccttcactttctatctgcttttggccaccatcctatgccttcaaatatttattttccatattttgtttagaatttattgctgtt

SEQ ID NO: 917834 - DNA, 646 bp, Homo sapiens
gggaatcaggtaaggctggcccaggagcatgggcagaaacccagccctgagggtttctgccctcactcacacaggtggcctgaggacccccaccccagcccatcctctgagcctccagcctgaacaaaggctacgacccaggcgctccttagcatccccaccaccgggcctggctctctgagcgctccccacaactcggggccctgcgcctcccccttggctttcctgtcctcaacsctatccccctttctccttcccaccaggtccctgtctcccagtcagactccattcctctcggtctgaccttagtcaaggggcagctcctggagaggctgtgctcacccatgcgtggagcggctctgccaggccccgggtgcaaggacccagaggaaagagcagccctgtggccccatgcaaagccaagtccgccaccatcccaggaggcccgctgccaccaaggccaagcggtgacagggtggcaccagccctgcggggagcctgtgacctgcaggttacctgttcccacacactcgctgggccccagcaaggcgccacgctccaggccggtgcaggtaagaggtcctttgtgcacgaacaaagccatggccgatgccaacaggccctttggcctgacccctggcccacc

SEQ ID NO: 917835 - DNA, 776 bp, Homo sapiens
aacagcaacaacaaacaatgacaggctttgtcttcccctctgaggctgtgttttgattaaaagataacttacactgtatttttttttaacgtaaaaagaaatatcagaagcagttgaggggccaggaagtgggtcttctagggatgaagtggcattctgctagatggcttttttttttttttttttgagacagggtctcactctgtcacccaagctggagtgcagtggcacaatgatggctcactgcagcctcaaactcccaggctcaggggatcctcccaacacagcctctcgagtagctgggactattggcatgtgccaccacactcagctaatttttgtrttttttgtagagacagggtttcaccatgttgcccaggctggtctcaaacacctgaggtcaagtgatctgcccacctcaccctgccaaagtgctgggattacaagcatgagcaactgtgcccagcgtgctcgatggcttatgtgttgtatgcctactttttgttgttgttgttgttgagacagagtcccccttcatcacccaggctggtgcagtctcggtcactgcaacctctgctttctgggttcaggtgattttttgcttcagcctcccaagtagctgggaccacaggcgtttgccaccatacccggataatttttgtatttttagtagagacagggtttcaccatgttggccaggctggtctcgaattcctgacctcaagtgatcagcctgccttggcctcccaaggtgctgggattacaggcatgagcca

SEQ ID NO: 917836 - DNA, 589 bp, Homo sapiens
tcactgctggaccagtgtctgtgaggaactgaaagcttggattggaccagtaccttttaaaatttggtcactgcaggcaccaggaagccataccttctccatgctgacctgatgcagacataaatgtgtgtgtctgtataaccgaagtgaaagtttaaaggaaccacacttaaacgctctgattttttaattctatttttttttctttctattamaactggtggttggccaggtgcggtggctcacactggtaatcccagcactttgggaggctgaggtgggtggatcacctgtcaggagtctgagaccagccatggtgaaaccccatctctactaaaaatacaaaaattagctgagcgtggtggtggggcctgtaatcctagctacttgtgaggctgaggcaggagaattgcttgaactcgggagatggaggttgcagtgagctgagaatgtgccattgcgctccagcctgggcgacaagagtaagactccgtctcaaaaaaaaaaaaaaggctcatggtcatgacccactaaaccgattctataactgtcacaagccatacttgggttcagaaggtgaattggggct

SEQ ID NO: 917837 - DNA, 495 bp, Homo sapiens
cttaatattttaatgtaagccttaatatttattttgggatctaataaagcagcttagatttttaggtataattggggtttatttttcacggttttttcttttgcctcaaaaatgacatttatttaaagaaaaaaaatgacaaattgtccatcccttgactcccttccctyccctgccctgttcctcccaactgccccttggattgaaccctggccggggctaggtagcaggacagcccttctcagatgaagtcagcaacactgatgggtgtcttcttaacagaggggctgtcagaggccttaatgtctcatggaatagttgttttcaaagtgccatatacttgatgacttataaacacatttattcagatacatgagtacctcctgtgtcagacagtatgttctgtgctaacagggcctccatttggtctcatagacctggggatgagcgagacacagccctttgttcatgctgctcatgatctaaattgatgtt

SEQ ID NO: 917838 - DNA, 597 bp, Homo sapiens
caaggataatttgacgtcttcctttccaatttggatgccctttatgtccttctcttttctgattgctctagctaggacttgcagtactatgtcaaataacagtggtgagagtgggcatccccgtcatgttctaaatctcagaggaaaggctttcagtttttcccatttggtaagatactagctgtgggtctaccatacatggcttttattatgctgaaggcattccttctatcctctgttctatgggtgtttttattatgaagtgatgttagattttatcaaatgctatttcaacatcagttgaaatgatcatatgtttttcatccttcattctgttcatatgaagtatcacattgattgattattgaaccatcaatatcttacatatattgagccatccttgcatcctgaggataaamcccaattggtcattatgaatgatctttccaatgcattgttcaactcggtttgctagcattttgttgaggatttttatatcaatatttatcagagatattgacctgtagttttcttttttggatgtatcttatgctgggtttcatatcagagtaactggccttgtagaattagattaga

SEQ ID NO: 917839 - DNA, 585 bp, Homo sapiens
gctattaaaaattaagctggtagaaacatgcatgtatcagcctttgtaacactttcttttctctcatgtaaatatttagttgcagaatgattgcatcatattcaaagtgtatacttaactttcaagaaattgccacaccgttttccaaagtagtttgccattttaagcatccatcagcattgttgaaagttttagttgctccatatggttactaacrcttggtataatcagtcagtaattttcatttcagccattttactagctgtgtaatggcatctatatatggttttaatctgcatttccctaatgactaaaatgttgagcatcatttttctgtttatttgccattcttacatcttttttggtcaatggttgttaagatatttgtctcatttttaaaacaccgttatcagatatatgatttgcaactatattgtcctagtctgtaggttgtatttttcttttttaaactgtgcctttgaaagtgcagaagattttggttttgataaaatccagtttaacaatttattctttcataaatcatatttttgaaatcatatctaagaagattttgtgtaaccaaag

SEQ ID NO: 917840 - DNA, 440 bp, Homo sapiens
tgaacccaagaggcggagctggcagtgagccaagattgtgccactgaactccagccagggcaacagagcaagactccatctgaaaaaaaaaaaaaaaaatcttggccgggcatggtggctcacacctgtaatcccagcactttggaactccaaggcaggtggatcatgaggtcagaagatcaagaccatactgaccaacatggtgaaaccccatctctactaaaaatacaaaaattagctgtgtgtggtggtgcatgcctgtaatccyagctactcaggatgctgaggcaggagaatcacttgaaccagggagtcagaggttgcagtgagccaagatcatgccactgcactccagcctgggcaacagagcaagactccgtctcaaaaaaacaaaacaaaacaaaacaaaacaaaatcctcttagtcatgaaaagccaagc

SEQ ID NO: 917841 - DNA, 565 bp, Homo sapiens
atcacaggcccagaggcttaggagggataaatggtttcctgggccgggtccagggcccaactactctgtgcagccttaggacatggagccctgtgtcccagtcactccagccatggctaaatggggccaacctatggttcaggctattgcttcagaggatgtaagcctaagccttactggtttccacatggtgttgggcctgcgggtgtgcagaagacaagatttgaactttgggagcctctgtctagatttaagaggatgtatgaaagtgcctggatgtccaggcaaaagtctgctgtaaaggtggaaccctcatggagaacctctactagggcaaatgcagagagaaaatgtggagtggagctgtaagaaaagggccatcatcctccagcccccagaatagtagctccacagyttgcactgtgcacctggaaaagccacagcactcaatgccagcccatgactattgggggaaccctcccccaatatttcaacgtaggttctttctattttccataagtgtcagccatctgagaaataaagagaaagagtacaaagagaggaa

SEQ ID NO: 917842 - DNA, 733 bp, Homo sapiens
cacatcgctgacaacagctcttcttccttcagaagtttgttttctgccattctgccagaacacctagcatgctttctctttttatgttatttatactagaaggtgaggaacctgcctttatgttctgaactatgcatgatagaggacccaattaaaaaaaaaaaaactctttcagaattccaagccaaagcttcaaggccagaagcagctagatgtaaataagggcagggatttttttatgcagagaaacaactcacttaaggtcatacaacaagccagtaaagacaatacattttcttattcttaaacttagccatcatctcataaggccaattggatcccagtactccttcatccagtgaattatcagcagagaatcacttcatttagtgacttgttcattttatttatttattttttttgagacggagtctmgctctgtcacctcgcccaggctggagtgcagcagtgcgaatctcggctcactgcagcctccacctccaaggttcaagcaattctcccgcttcagcctcccgagtagctgggattacaggtgcgttccgccacacctggctaatttttgtatttttagtagagatggggtttcaccatgttggccaggctggtctcgaacttctgacctcaaatgatccacctgccttagcctcccaaagtgctgggattacaggcatgagccaccgcgcctggccaacttgttcattttaaatgtaag

SEQ ID NO: 917843 - DNA, 736 bp, Homo sapiens
attgctcacaaagcttcagatttggccggggtgggtggctcacacctgtaatcccagcactttgggtggctgaagtgggtggatcacctgaggtcaggagtttgagaccagcctggccaacatggcgaaaccccatctctactaaaaatataaaaattagctgggtgtggtggtgtgtgcctgtaatcccagctaytcgggaggctgggctggagaatctcttgaacccaggaggtggaggttgcagtgagctgagatcatgccattgcactccagcctgggcgacaggagtgaaactctgtctcaaaaacaaaccaaccaaccaaccccaaaacttcagatttgggagcatttccgattttggatttttgggttagggatgctcaacccatattcgctctcccatgtccctgcacacgctgtgccatggggcatcctttcctgccgtcctggctccctgtctgacttctcttattctctccaggttgagtttgaattgcctcctgtgtgacctgggcccagcatctgtgccgcactgtggtggtcttgctgcagggtgcaggcctatcctcactaagtcccacttagcatctctagttaagacttgaataaaacacgattataaagtgtgcagatccacagattgacccagctcttgtttgctccctgtctggttcctccagcatcgtatctatgaagaaagtggctgaaatgctctggctagaggatggtctcc

SEQ ID NO: 917844 - DNA, 573 bp, Homo sapiens
cttactccccagtgtgatggtatttggaagtgaggactttgggaagtgattaggttatgaagatggagccaatgggattagtgcccctattcccttactaaagagatcgcagggagctcacttgtgatttctgctatgtgaagttgcagcgagaagatggctatctgtgaaccaggaagtgagcttttaccaaacacttaatctgctggtgacttgatgctggatttcccagcttccagaactgtgagcaataaatacctgttgtttataaaccatacrgtctatggtatttttgttacagcagcctaaacagactaagacatgccctttcttctaaggtcacttcgggaaactcactgggccaatctgaaagcagtagagcactaaatagcatttccactagcatggatcatgccttttgcttctaggtccatgctaatggacattttgatagaaggctgttgttatgctagcagccattcctgatggcaccccaaacatgccattcctctccaccctccatttcctacccatctggaataatttctcctgtgaagttgaagcacattttca

SEQ ID NO: 917845 - DNA, 485 bp, Homo sapiens
actacccttattttcattaggaataatttatgtgataggattacctgtatgtcaagcctgactagtctaagagatgcccagataggtagtaaaacataatttctgaatgtgtccagaagagattagcatttgaatccayagaatttgagaaaagaagatccaacctcaccagtgtgagtgaggatcatgcagtcccttgagggcctgagtagaaccaaaaggtagagaaagggccaggcatggaggcttatgcctgtaatcgcagcactttgggaggccaagggggcagatcacatgaggtcaggagttcaagaccagcctggccaacatggtgaaaccgagactctactaaaaatacaaaaattagccggacatagtggtgcacacctgcggtcccagctactcaggaaactgaggcaggagaattgcttgaacctgggagtcagaggttgcagtgagcggagattcaaccactgcactccagc

SEQ ID NO: 917846 - DNA, 485 bp, Homo sapiens
actacccttattttcattaggaataatttatgtgataggattacctgtatgtcaagcctgactagtctaagagatgcccagataggtagtaaaacataatttctgaatgtgtccagaagagattagcatttgaatccatagaatttgagaaaagaagatccawcctcaccagtgtgagtgaggatcatgcagtcccttgagggcctgagtagaaccaaaaggtagagaaagggccaggcatggaggcttatgcctgtaatcgcagcactttgggaggccaagggggcagatcacatgaggtcaggagttcaagaccagcctggccaacatggtgaaaccgagactctactaaaaatacaaaaattagccggacatagtggtgcacacctgcggtcccagctactcaggaaactgaggcaggagaattgcttgaacctgggagtcagaggttgcagtgagcggagattcaaccactgcactccagc

SEQ ID NO: 917847 - DNA, 543 bp, Homo sapiens
gaggccctgtctctttagaattaaaaaatgtttaataatttaaaaaaaaagtacacgggaaaatgctcctaatattaaatgataaaatcaagttatgcaactacatattcaatatgctgtcaattttgtgaaaagaagaaaaaattatgtaatagaaaacagtctgaaacaagatgtacaactaaatatttatgtatktttttgactagaggaattattatctcttcatatttttctgtgttttccaggcctttctttggtatacttgtattcctttttatataagggggaaaacaacctacttgaaaaagcaacaacaaaataataacagcaaaaacctattggtgggagcctgagtcagtatttctctactcatgagtttactcagtgtttacctgagtgtttacatttttttccgataaaatacattcttgattcctgctgttatttagctcatggattatttctgaaaaactaaccaaattaaggcagctctgcagttatcctccactcccgcttaccacttaggagtttgctccatct

SEQ ID NO: 917848 - DNA, 439 bp, Homo sapiens
gatccattgctggtgagctggtatgatcttttggggctgctaaagaaccttgttttgtcatactaccagaattgttttcctgtttccttctcatttgagtagacgatgtcagagagaagatctggaatacaagggctgctgttcacattattttgtcccacagggtgctcccttgatatggtgctctcccccttctcctaggaatggtgcttcccaagagacaaastgtagttattgtttctgctcttctaggtctaaccacccagcagagtagcggactccaagctgaaactggagaatgtctgcaatgagtcttttgatatgatccatcttcaggtcttgcaactgtggataccagcacctgctgcagtggagtcagcaagggagtgaagtggactctttgagagtccttggttgtattcttgtttagtgtgctggt

SEQ ID NO: 917849 - DNA, 613 bp, Homo sapiens
gaatcccttgtatgtgctgtgtcatttctgtctttggtttttgtcagtttatgatgtgtggatcttcttcatttggtactacctatagtttttaagctccttggatgtgtagattagtgcatttcatcaaatttaggaattttttttgacaattttttttaagtattcttgttgcaccttttattcttttctttgattctggaacttccattatgcatatgttggtatgcttagtggttttctacaagtcctttaggctctgttmaatttttttttctgttctccagactagaaaattttctttgccctatctccaaatttactggttctttttgtcttctcttatctgctgttgaacccctctagtgaattttccttttcagttattcttaagatctgtagtctggtcctttttataattgctatctctttctatttgtaaaatatagaaatttctgtaatatttatatctccttattgatataactcctttttggtgagaaaggattttatagtgtaggtttttagacatgttttcagacatattttctttttagtacattgaacatatttaaattagctgactttaagtctttgtctagtaaattcactc

SEQ ID NO: 917850 - DNA, 584 bp, Homo sapiens
caattaaatagaagactctcaaagttctaaaagcataaatgatccagagaaagggagtggtgtccagaaataccaggaggtgggaattccagttgcactagaaggcggcctggttggaaccaggagacagcccctatgccaggctgagggacccgccctccactgtaccaaactcttcagctagaaccacaccacacacacaccaccaccaccaccaccaccccgcccggctcgggtgagctggggcacgggrgagcctgcgaaatagcaaagttgtgcaaagcaggaggaaaccccagtgagagaggcaggctcagaaagtgcatcaccagatgaacaaggacccaaatgggggagcattctaaatacatttcattttacagtatcactctctctctctctggattgcacactgggctggtgatgggaaggaaaacagggacagaaaaatgggcactgcggtgttaagcgtcgtagagatccagcgaggatgaggatgaggggctagagagaagtggggagagggcactgatctctggcaccagaagcttgagcagggggaggggattggggtgtggagggca

SEQ ID NO: 917851 - DNA, 573 bp, Homo sapiens
cactcttcaaagcctgcctctccacgcatcctccctcctaactccatcccaatgcccaacagctctttgctaagcagatgcctttatttacagacaaagaagtaaacaggcaaaaggaagaggcttgtccaaggtcatgccacagactgaactctcactgggaggacagttcagggtcctgatacccaatctaaggcagcagctttgtagcacatcaggatgggggcaggtcatgcctggccatgttcacttccagaacgattatagctttaacaacatttttttttttttgagatggaatctcgctctgttgcccagactggagtgcagtggtgtgatctcggctsactgcaacctctgcctcctgggttcaagcgattctcctgcctcagcctccggagtagctgggattataggcatgagccaccatgcccggctaatttttgtagttttagtagagagggggttttgccattttggccaggctggtcttgaactcctgacctcagttgatccacctgcctcggcttcccaaagtgttgggattatgggcatgagccaccacgcccagcc

SEQ ID NO: 917852 - DNA, 777 bp, Homo sapiens
ccctgtgccctccatggtggtcaccttggccagccagcctggtgtggttgcatccttttgcccttgtgcctcagtgatccaaggctctctcctctccacccagccctgcagtgtgaagggggacaggtatatgaggcctgtggccccacrtgtccccccacctgccatgagcagcatcctgagcccgggtggcactgccaggtggtggcctgtgtggagggctgcttctgccccgaggggactctgctgcacggtgtgtagagtgacaaagggcagaggggaggggcactgagactgggaaggggccactgtgcccttttgctctgagccctgcactctgtgacctcaggaggagcctgcttggagccagcttcctgcccctgtgagtggggccgcaactccttcccgccggggtctgtgctgcaaaaggactgcgggaactggtgagtggggaggtcatcttgggggggacctattgaaggagcactgggccaagcccagcctgtggctgatcccaggacgctgtgtgctcagcacgtgccaggaaggtcaatggcattgtgggggtgacggtggccactgtgaggagcttgtgcctgcctgtgcagagggagaggccctgtgccaagagaatgggcactgtgtgccccatgggtggctttgtgacaaccaggacgactgtggcgatggctctgatgaggagggtgagtgtctttgcccatgcgtggaagcgacagggttggtcagtccttgcacatgtaactgaatttcctgggg

SEQ ID NO: 917853 - DNA, 713 bp, Homo sapiens
ggtcactttaagggtctccagaaaaatgacacattcatacctggttccattagcaacaccatttgaagtttaatggccgctaagcaagaataaacaattagggttattagaagatgcacatcaaaatgaaacaagggggtaagggcagctcaaaaaaaccccaaggctgctgaaatgcccagaaaactggtggctatagttatgcctgccaagatstgggggcatggggcttggctctggttagctcccttggtcttattttccataacaaagaaacttctgggttatgggcaccccatttattcttaccaccttgcaggctttgcaggataattgtccagaactagactattgatctagatctttatattacccatctgtctgtttcttctgagatacagccagagatcactggttggttcacggggataaacagggttagtctagaatgtaggcaaaaacctaaaaacaacagatgagacgagaatttaataacaagtatatggtaagcattgaaacataatttttctctctctagtccccatttttgtcaaaaacaaatcatgataggactaagttgcttgtaaaataaaccttagtcttatacttggcctgattatttgcgtaaagtgcagcatgagtaattgtttttcacacaggcctttaaatcggctttaatgacaccctgttccccacggaatctcagataagac

SEQ ID NO: 917854 - DNA, 656 bp, Homo sapiens
tgcactccagtctgggcgacagagcaagacactgtctcaaaacatacatatatacatacataaataaataaataaataaataaatctttatttcattggttttgtcccacatgtagccttccacaacttttaaacaagagattctaattcactggtcccattaggggttattcgccttgaaccaactggctagattgtgggtaatagcgagggtgatcatcccgtagaattcaaactcggatacttttaagagtgaagatatccactgttaacaagtacagcaggcataaattggggctgtttgaggcaaaccaggacctatggtcaccttggtgatggcagatcagttcctatgttaatatacgcgatctgtatgaccgactagaagcctcttacgttgcaacatctgatagggctctcggaaggagttcatttgtttgtgcctcttttggcagaaaagtcrttaatgagaacctcagtttcctggtcagtcaaataggggattctggaagagaagcgggagtgtagctctagcgaccctcctgatgctgctctgtttcaggcctgtgttgtaaagtgctctgagcgcaagaaaacaccagcagccccgcagaaagccacagcaccccccagaggactagagtctcctctctgtg

SEQ ID NO: 917855 - DNA, 821 bp, Homo sapiens
atattttttttaatatgctaagagtttaaaaaaaaatgcagttcaagaccagcctggccaacacgtcaaaaccccatctctacaaaaaatacaaaaattagccaggtgtggtggcacacgcctataatcccagctactcgggagactgaagtgggaggattgattgatgtcaggaggtcaaggctgcagtragctgtgactgcaccactacactccagcctgggtgacagagcaagaccctgtctcaaacaacaacaacaacaacaaaaaaaaaaacaaatgcagaggtcaggaagtggctagatagggatgcagaagctcaaagctgcacagtccctggtcccacccacttgtcttagagatagggatgctaatgcccagggaaggcagggccctgctcgggcctctctgtcccacaacaacattcttaattttgtccccgcctcacttgctatcttcaagcctcctcttcttaattgcagactccatttcgggaattgctgcttcgtagaaggaagctagtctgtgcaggcacacacagggaaaatgttggattagttcataaataccacacttcataagaacatcaaagcaaaccccagggagtgggaaggcccatttctttttccacacaattttctccagggaccccttggttcttccctgagctcaccccagactgacccactagggctggtcccaggaacagctcataagaagtgacctatagccatgtccctcattcagatgggcaactgaggcccagataggctcatactaacagaggaatcagaaggccactcggaacccactgaagtttg

SEQ ID NO: 917856 - DNA, 785 bp, Homo sapiens
gtttccactgatggaggaacaggaagaagaggagccttgacatttatctcaagcgccagcagcttctcttggatcaggaagacataaaagtccaatgtcatcttcaatttgtgcaggctccccttggagttgcagagccagtgaagtgaagtagaacagttaaaaaaacacccggggaagtgataaatcacagagagagattgcatatgcgggaaaggtgtctcccacaattaaaacaagtggccagagcctccctggcracctctggtctgcattgccagccctgaagatggctcctaaattacttaagtttaataggtagttaatatagccaaccctccttatgaccccagtgggctgaatggctctgcttgctttaggaactgggcgttgtatggtagagcatcttggccttgacataaaaggtagcatactggctccccagccctgaaccttccctgctagagcaaggcaggggtgagagggggaaggaaagaaaaaggagtggggagtggggtggggagcaaggattaacagggagcagtagcagcaccagatgtgggcatagcacactgggaagaaattgcagtggcgatctgaactcttcctctccgcctcctggctctgtggaagcccagggaaggcattaggaactgcaggctgctcttagtgctcctcccggatgggacaccttgggctcatccctgaaggccactcctaccactctcacacactgagttcctggtgtctcgtaactgttgagagcttagttttcttgcttgttt

SEQ ID NO: 917857 - DNA, 564 bp, Homo sapiens
gtggatggataacaaataaaatctactaaaattagtcttaatttcttccagccccagtacataaaagattgttacaaaaggaatctgcactatgactgttgaaagtagagtttttattgttgctattgttattataatagctgctcacatttgttcagaacctccctgataaattcatcataatctacattgctggagcagaagaggatcccaaagagaagaggaagtgccactgctgacatgcaaaattatcttaggtgatacttgaaacctggtattgaattacactgaatcaaatactgaggaagttattccttttccraggttctttcaatctgtctgggtgtatgagaacaactctcactttggtgctaacacatatttatgtccctttatgacacctgcaaatttaacttcccttgtaaacacagagagcatatggctcaggcttggagcctttatcagacaacagaatctagacagggtttaacagtcatttttttttttaaggcaaacaatacaggttctctattgctggtggagacacaaagattcctttttaaa

SEQ ID NO: 917858 - DNA, 780 bp, Homo sapiens
gaggctgaggcaggaaaattgcttgaacctgggaggcagaggttgcagtgagctgagatcgctccactttactccagcctgggcaaaagagcaaaactccatttcaaaaaaaaaaaagaaaaagaaatgctcatagcagcactattcctaataaccacaaactgtaagcctcccaaatgctcattaatagaatgaataaactgaggtatattcatgaatactgtacagatatgagactgaattaattacaactacacacaacaatatggatgaacctcacataggtaacctcacataggtaacagaccaaaagcttatccagagggtttctatttatataatgttcaaaacagatacaactgaactgtcatatgcaaaaaattgaatctcaatctttaccttaatactaaaaccccaaatgaatcacagacttaaatgttaagatcctaaaactcctaaaagtcaatctagcagaaaatattagtgaccctaggcttggcaaagatttcttaggcacaacacacacacacacaaaacaaacaaacaaaaacactgaaaaaaaatttcaatmaactgtatttcataaagatctatgatctgggtactattccatatacgtatcttcaatgaaaatactaacaaaaattaaataaagaattgagtgatgagaagacaacacaatcaaccactatgtcatctcattaaggaacaagtacacctctacaaggagagaaagaaagccaacagtggcagagcaggagttggaaaagggaaaaatag

SEQ ID NO: 917859 - DNA, 522 bp, Homo sapiens
tgttataaaaatcaagtgagacaaatatgtaaaatacttactacacaacacattacaggcacccattaaatatcaattcctttaaaaatctctatatttctatagaaaactatggtttcttgattaacccacattctagatctttacatattctttcacttgtaaaaaagtacacatgtaacatgttgaatatcaatgggccataattaaatggtagtaaaataaaaattaagatcctacaataattttcttgatactaaaaatattaacatagatatgtcatgttttttgaaaagttgttccacaaaaacatcttcagtcctctgattataacgttgttcmacaggaggctgaaaactacatactatttgttttttcttaacatgtatgtggtagatctggcatatgcataagcatttgaaaatttaaaatgtttacctattctacatgattatgattatgaaatggtttgacaaaagggtgtttaattgtgttactcacgaccgtgatgcctaacaaaga

SEQ ID NO: 917860 - DNA, 648 bp, Homo sapiens
gtatagctgtgtgtgtatacacacacatacataggtataggtatgaacaatgaatttataaattccttgactgttgcctcagttgttcctaaaattttatagtaataattacttacatttcaggtcctcctactaaattgttagtacgttaagaatctgggtctttgttgtgttcactctattaatctagcacccaacaaaatttaagtcataccatggatgacaaatgaatgatcatcaatgagtaaacatttaaaaatgcatccactgtgagttacagaaacagtttattttatgctgtacacatttttttaataagtagaaaaaagtatatttccttttcgaaaaaaacatttcactgcagatatcgttacagcagtggctttcaaacttttggtttggggaaacatatccactttaatattactgattatctcaaggaktttttctttatatgtgttacaactatgtatattttccatgttataaattaaaattgggaattaaaaatatttattaatgcatttaaaataatcttattccatgttaaaataaataatactttattaaaaataactatttgataagcaaaattcatgagaaggggaatgctgttttaaatttttgtaaatcggcttaatttggact

SEQ ID NO: 917861 - DNA, 648 bp, Homo sapiens
gtatagctgtgtgtgtatacacacacatacataggtataggtatgaacaatgaatttataaattccttgactgttgcctcagttgttcctaaaattttatagtaataattacttacatttcaggtcctcctactaaattgttagtacgttaagaatctgggtctttgttgtgttcactctattaatctagcacccaacaaaatttaagtcataccatggatgacaaatgaatgatcatcaatgagtaaacatttaaaaatgcatccactgtgagttacagaaacagtttattttatgctgtacacatttttttaataagtagaaaaaagtatatttccttttcgaaaaaaacatttcactgcagatatcgttacagcagtggctttcaaacttttggtttggggaaacatatccactttaatattactgattatctcaaggagkttttctttatatgtgttacaactatgtatattttccatgttataaattaaaattgggaattaaaaatatttattaatgcatttaaaataatcttattccatgttaaaataaataatactttattaaaaataactatttgataagcaaaattcatgagaaggggaatgctgttttaaatttttgtaaatcggcttaatttggact

SEQ ID NO: 917862 - DNA, 625 bp, Homo sapiens
cctgagactcaaggagaagctgtatcaccttttttttttttttttgagacagtctcactctgtcgcccaggctggaatgcagtggcgtgatcttggctcactgcaagctccgcctcccgggttcgtgccgttctcctgcctcagcctcccgagtagctgggactacaggcgcccgccaccatgcccagctaattttttctgtatttttagtagagacggggtttcaccacgttagccaggatggtctcgatctcctgacctcgttcgtgatctgcccgcctcggcctcccaaagtgctgggattgcaggtgtgagccacagtgcctggcctgtatcaccttttataaccccaactttgggagtcctatagtgtcatttatgccagggtcacaagcctacsaaggttcgagttgagggaacatagatcctatcacttgatggaggactctctacatcaaattgtaagaagagcaagtagactggaaggtgttgctgtggcaagaggacagttcatattaaaatcagttattggccaggcatggtggctcatgtctgtaatcctagcactttgggaggctgaagtgggaggattgcttgaagccaggagttcaggaccatcctaggc

SEQ ID NO: 917863 - DNA, 618 bp, Homo sapiens
gaggagtcaaactatatttctagtaaatatggatttatttggatttctttagtatcattcactcattcaacaaatactcattgagcacctgctatgagccaacttctgttttagacattggagaaacaagataaacaaaacagacaatgcccctgcttgatggggctaatgagagaaggctagtgataaatattttctgtctgataagtgccgtggagaaaagtgaggcaggataagagagttaaagagctagaatggtgggaacagagaatcttgttattttatagaggaaagcctcctgagtaaggtgacatttaagctgaatcatgaaagtaatgacagaagaaactgcagctttctagaggaagagacttccaggaagagagagcttcaaagtggaarcctgcctggtatttcaaggaacagtaaggtggccagcatggcaggggcaaggggaagagctgggagacagggccagaaagaaaaccagaaccagattacgtggcatcataatgtgaaaatatgtagttcaaaattaagctgctagaactgtaaaacactttgagccttaaggaaatgtgatcatgggacctgagtcacataaacaggcagctataa

SEQ ID NO: 917864 - DNA, 610 bp, Homo sapiens
gtctgcatcacctgaatggcaagtctcagcttttcacttgagtaaactactttaaactgtgttctaatcatttcaattattttgggttgcaagcaagtaagacctttagcctttattctcaatgagaaggggaatcactgcagagttttgaatacaagagtgatgtcatctgaattgtgttatagaaggatttatctggctgctgttttsggaatagatgattgagaggtggggctaggagaccggtgaggagaccactgacatcatctgagtgagaagcgagtatagcttccaccgtggtggtagtggaggaaacggtaaaataaggccagacttttcaagttttctgaaggtggaaccaatggaatttaagtcaaattggacatgggttatgaggaaaagagagggcatgagaaagatggagctggcatttacagatgtaggaaaggctgagagaggaacgggtctgtggagagaagaccaggagttcactttggacaggagagtgttgagatatatccaggtagagttggtcgaatgtcagcatctggggctcaggagaaaaatccagccgagagacgtaagctgagaggcaccagcatgaggatgc

SEQ ID NO: 917865 - DNA, 632 bp, Homo sapiens
gaaattccagaagtttttattgaattaaggacacatttgtctgaagaagccagcaaagttaacgactaatttgaaaataattataagcgcagtagattagaagacatgtatgcaatggaattgctgttcaatcaccagtatttttgctgagaaattcatggtcagtatatgagtgcatgcaraatggattttagcataaccagaacaacaaagaagcatgccacagaaaatagaaacatttaattgggaatgctcacgtcaaagtatatagaatcacagaagaatttcaaaaagaccaatgccatgtagactatgaatgtgaacatagtctccaaggaaagccatgctctaaaagaacaaaagcagctattcaacacgatgcaaggcttcaaaaaatagttaacgataatcaaagttggccagcttttatggattacctctgggcaactgcccacaacttagtcctgtaatacactttttcatatgtcaaatattctttttagttttttttgcatttcttctcctttgtttttcttgttttaattttttccactattttatattgtcagcattattttttacaataactatactgtgtatttcatcttcattcccaatactggaggaataaa

SEQ ID NO: 917866 - DNA, 745 bp, Homo sapiens
gattcagatccttcccactaaggtcaacattacccaggctcttggaggcaaccactcctcattgattatttgcacatgagataaacctgtttgttttaccatattgaaggactaacagaatcacaaactgtaactcaagtgcttttccagtgaagagtgaaataggaaagaacgaaaataacatatatctaccccctcctcctcttcctttagcttgggttcatcattacctccatttctccattttatttttgtttcctttttattggcaccacccaagtataygtgtgtgtgtgtgtgtgtgtttgatattaaaactttagggaaagaaacagctctcttaaaaatgtcagcaacttcaattcattgctttttaaatatcctcgttaataatttacacccttggttaaaatattcaatcatctacttaatatatagtgcttagctttgtttttattttattttttgagacagtcttgttagctgtgttgtccaggctggagtgcagtggcccaatcttggctcactgcaacctccacctcctgggttcaagcaactctcatgcctcagcctcccgagtagctgggattacaggtgcccaccaccacgcccagctaattgtgtttttagtggagatgggctttcaccatgttagccaggcaggtctcaaactcctgacctcaagtgatccgcccgtctcggcctcccaaagtgttgggattacacgcgtaagccatcgcttcca

SEQ ID NO: 917867 - DNA, 764 bp, Homo sapiens
gttaataatttacacccttggttaaaatattcaatcatctacttaatatatagtgcttagctttgtttttattttattttttgagacagtcttgttagctgtgttgtccaggctggagtgcagtggcccaatcttggctcactgcaacctccacctcctgggttcaagcaactctcatgcctcagcctcccgagtagctgggattacaggtgcccaccaccacgcccagctaattgtgtttttagtggagatgggctttcaccatgttagccaggcaggtctcaaactcctgacctcaagtgatccgcccgtctcggcctcccaaagtgttgggattacacgcgtaagccatcgcttccagcctagtgcttagctttaatgtgaatcagtgttagcatacacattcagaattctttcaacctcaaaccacaaaacttaattatgtatcatggaaatacaaatcagaacaaaaatctattgactgtgagcccacataacataatttttgtttcctgaaaacaaaagtatgcaagtggatgaggccttttaagggaatcttgtggcttctcagtccttgctgttctsaatttgtgattatccacagaaatgcccaacaggtgattgtaaagatactggtaattctccactcttatctgattgcacctacattttgcttgttgctcattctgcataacatctaaatgctgcgtgacacttaaaccctttagtagtcagccaaaagtaggaacgagggcgtgtttatg

SEQ ID NO: 917868 - DNA, 657 bp, Homo sapiens
acaggtggtacatcacctgggtgagcagtgcagagatatgtcacaaggtccctgtaggcagagcctagacaagagttatataacctgggtgataagtgcagtgatatgtcacaatgccgtgtagccaaagcctagacaaatgtttcatcacctgggagatcagtgcagagatatgtcacaatgtccccagtaggcagagcccagaaaagagttggatcacctcgggatcagtgcagagatacgtctcaatccccctgtgggaacagcgtagacaagagttaaatcaccttgcttatcagggcagaggtatgtcaaaatgccagtgtaggcagagcctactcaagtgttacatcacttaggtgatcagtgcagagatatgtcaaaataccccctgtaagcagagcctagacaagagttacatgacctaggtgatcagtgaagagatacacagcaaagcccctgtaggcagagccttgacaagtggtatatcacctgggtgaccattgcagggatatgtcasaaagcaccctgtaggcagatcccagacaagggttacatcacctggttgatcagtaaagagatatttcaaaatgcaacagcaggcagagcataagcaagagtcccatcaccagggtggtcagtgcggaaatatgttgc

SEQ ID NO: 917869 - DNA, 630 bp, Homo sapiens
ttttagtatctgtaggatctatagtgataactcttcactccttatattctaacttgtgcctagttaggcacaactcttactaattagttatctattgctgcataagaaattacctgaaacttaatgtcttcaaacaacaacaagaatttattatctgtgataggcagacttctaagatgtttcccatgatctcgatgtcttggtgttatgctctgtatgatctcttccttttttagtgtggatgggatcactgcccaaacttttggatgaaatcgagtgagtgtaggtaggatctgtgacttgtttctaactgacataatattgcaaatgtgatgtgttgttacttctgggatatgtgtgtgtgtgtgtgtgcgcacagaagaaaggagagrgaagaggagaggaggaggaggagaaagacatacattaggatatgagatagacatatagctggcatgcacacaagattctccttgctgatttgaggaagtgtgtgaccatattgaggaagcccaacagcaggtggtgtctaggacctgagggtggcctccagccaatacccaataaaaaacatatctacacaatcatacagacataaggaaatgaattttgtcaacaacatgaatgagc

SEQ ID NO: 917870 - DNA, 630 bp, Homo sapiens
ttttagtatctgtaggatctatagtgataactcttcactccttatattctaacttgtgcctagttaggcacaactcttactaattagttatctattgctgcataagaaattacctgaaacttaatgtcttcaaacaacaacaagaatttattatctgtgataggcagacttctaagatgtttcccatgatctcgatgtcttggtgttatgctctgtatgatctcttccttttttagtgtggatgggatcactgcccaaacttttggatgaaatcgagtgagtgtaggtaggatctgtgacttgtttctaactgacataatattgcaaatgtgatgtgttgttacttctgggatatgtgtgtgtgtgtgtgtgcgcacagaagaaaggagagggaagaggagaggaggaggaggagaaagacatacattaggatatgagatagacatatagctggcatgcacacaagattctccttgctgatttgakgaagtgtgtgaccatattgaggaagcccaacagcaggtggtgtctaggacctgagggtggcctccagccaatacccaataaaaaacatatctacacaatcatacagacataaggaaatgaattttgtcaacaacatgaatgagc

SEQ ID NO: 917871 - DNA, 727 bp, Homo sapiens
ccacattttctttatccagcctatcactgatgggcatgcgggttgggtccaagtctttgctattgtgaatagtgctgcaatagacatacatgtgcatgtgtctttagagtagaattatttttaatctttggggtatgtattcagtaatgggattgctgggtcaaatagtatttcttgttctagatccttgaagaatcaccacactgtcttccacagtggttgaaataattgacactcccaccaacaatataaaagtgttcctatttctccacatcctctccagcatctgttgtttcctgactttttaatgatcaccgttctaactggcgtgagatggtatctcattgtggttttgatttgcatttctctaatgttcagtgatgatgagcctttttttcatatgtttactggctgaatagatgtcttcytttgagcatatccttcacccactttttgatgaggttgtctgttcttttctcataaatttgtttaagttccttttagattctggatattagccttttgtcagatggagagattgcaaacattttctcctgttctgtgggttgcctgttcactctgataatggtattggaagttctggccagggcaatcagacaagaggaaaaaataaagggtattcaaataggaaaaaaggaagtcaaattgtctctgcagatgatatgattgtatatttaggaaaccaaaacgtctcagccccaaatct

SEQ ID NO: 917872 - DNA, 811 bp, Homo sapiens
atgcttcattcacatcagtttttcttttttggaaagctgtgtttgctggtgtagttattttgtaaaagaacctgagagacccctatggtatatcatgtgaaactagatttagaaaaaaggaatcaaataatgcatttttagagtactaaacagataactgccaataatggtgacaatcatgacatatgtatatatatgtattatgtcgtattggttggttatttataagaaaagaagtctctagtgattyagaaactttagtttattttcataggaatctgattacacattatttcactgatgtgtatgtttttgcaaaagtggacgaagagacggtgagaaggccgaactgctgaatccaggaaatgtaaaaacatcaggagtcttcatgagcataaacaaaatgattttttaaattataactcttagattaagtgaactcacttcagatgcattcagaatatttgcataaaggatgatttgatttttggctgttccaggaactactggaagcaggaaacagtgatagaattgggataaaccacagtgactcattattcctctttgttactattgggcaccagaggtatatgttttgttgatattggttattcaaatgagataaacgtgaatatgcatacattggctttgtttttcaaggaggtattggataaaatagcaacttaataaaaattctctagagaataacatgataatttaaccagactattttagaagtgaaaataatgttgaattcattacttgactcccaaatggttattttcaaggaatattggcgtgatttccagat

SEQ ID NO: 917873 - DNA, 576 bp, Homo sapiens
tttttagtagagacggagtttcaccgtgttagccaggatggtctggatctcctgaccctgtgatctgcccggctcggcctcccaaagtgctgggattacaggcgtgagtcaacacaaccagccttgagttaatcaactttttatattattggtaaggcttccagtcaacagtaggctattagcagttaagtttttggggattcaaaaattatacttggatttttgactgcacgtgggtcagtgcccctcatctttgctttgcctaagggtctactatatttgtttccccttgtaggagaggatgatatctccttgcctgttgawgtcacaagctttggccaatcaactgagagccaaagtgatagaagtatgaaagtccaaggagaagcttcaaagccattgtgttttctgccatttccctttctcttctttcacataacatttacacaaaagaggggctgctgcttcattctaggttctggaatgacctaggaattcaacctgagtagatcctcaaccatcccacaaaggacgcgggatctgagtgagaaataaatgcttgctgctaactgctaa

SEQ ID NO: 917874 - DNA, 657 bp, Homo sapiens
agccccaccttcaagccagggatggcctgaagtcttggggccaggctgtcagttcctggtggagtcccccacacagagtgagaacttgtgctttttcctggccttgcccatggccgcccatggaccaatcaacacacacctcctcccttctgagcccataaaactccccgaactcagctagactcaaacagacgtcagaactaccagcttcagttaggagatacccacttcggggtttcctggactcattggaatgacctgcctgtggaaaggagctacccacttcgggtctcctaagagctgttctgtcgctcaataaagcttctctccaccttgctcaccctccagttgtccgcatacctcattcttcctggacatgggattgaaagagctgtaacacaaacaggtttgaaacggctcccccaacgcctgcttgccacgttgcgggctatgaggagrgaagtgctgcaggccttcaggaagcccagacctagggttaccctttttggggctctgcagttcctgccatctccaagtttccaggtgccaccgcattccgctagctcagacacagttgcccacagcagaatctgcatgtggtgcatctggtccagctacacagcctcacacagagctggcacctggatttgcccaccc

SEQ ID NO: 917875 - DNA, 591 bp, Homo sapiens
ggctgaaaagggaaaataacttgagcatggaagattgaggctgcagtgagccaagatcacgccactgcagtccaacctgggctacagagcaagaccctatctcaaaaagaatttttttttttgtttaaaaaacatstcttgtaaatttgtttgagttcattgtagatcctggatattagccctttgtcagatgagtagattgcaaaaattttctcccattctgtaggttgcttgttcactctgatggtagtctcttttgctgtgcagaagctctttagtttaactagatcccatttgtcaattttggcttttgttgcccttgctttttgtggtttagccatgaagtccttgcccatgcctatgtccagaatggtattgcctaggttttcttctagggtttttatggttacaggtctaacatttaagtctttaatccatcttgaattaatttttgtataaggtgtaaggaagggatccagtttcagctttctacatatggctagccagttttcccagcaccatttattaaatagggaatcctttcaccattgcttgtttttttcaggtttgtcaaagatcagatagttgtag

SEQ ID NO: 917876 - DNA, 487 bp, Homo sapiens
ggtggctagaatataggcaggcagaaaaacgggaaaggagagactggcctagcctccaatcctacatcttgtctccagcgctggaggcttcccacccttaaacaccagactccaagttcttcagttttggaactcagactggctctccttgctcctcagcctgcagacggcctattgtgggatcttgtgattgtgtgagtcgatactgaataaactcctctctctctctctmtatatatatacattccattagttctgtccctctagagaaccctgactaatacaccaaccatcccagtttggtcaggactatcgtggttttagcagtgaaagtcctgcttcctgggaggtccatccattactggcaaattgacagttagggatccttgtgctctcccccatcaccattcccagccagctatatcaaaagggtcccccggctttggatcatggttctcaagctcaaggctgcattggtattatctgc

SEQ ID NO: 917877 - DNA, 600 bp, Homo sapiens
gaaatgtatctcccacaatatgcaaaaatcaaaatagactaaagaattaaacctaaaacctcaaactgtgaaattaccacaagaaaacatttggaaaaatctctaggacattgccttgggcaaagattttttgagtaataccacataagcagaggcaaccaaagcaaaaatggataaataggatcatatcaagttaaaaagcctatgcacagcaaaggaaacaatcaacaaaatgaagagraaacccacagaatgggagaaaatacttgcaaactacccatttgacactcttgtcagagtgtctgagattaataaacataacacataagaggctcaaatactgtgtaggaaaaaatctaataatctgatcaaaaatggcaaaatatttgaataaacatttctcaaaagatgacatacagatggcaagaaggcatttgaaaaggtgctccacattattcatcatcagagaaatgcaaatcaaaactaccaggagacatcacaccaccacagttaaaatggcttatctccaaagacaggcaataacaaatgctcattgaagaaatatctgcatgctcatatttgctacagttctgttcacaa

SEQ ID NO: 917878 - DNA, 758 bp, Homo sapiens
gccaaggaaccaaataaaaaactgataacttggaattcgtcaaaattaaaatcttgcatgtatcaaaggacaccatcaagcaagtgaaaagacaacccacagaatgggggaaaatatttgcaagtcatgtattggataagggacttgtaagcagactatataaagcactcttacaactcaacgacaaaaagacaaataacccaattaaaatgtgggtggaagaatggaataacattactccaaggaagagaggcaaatggccaatgagcacatgaaaagatgctcaacatccttagatatcagggaaatgcaaatgaaaacctcagtgagacattgcttcacacccactaggatggctagaacaaaaacaacaagcagaaaatcacaagtgctcatgaagatgtgcagaaatcagaatcctcagaycctgctgatgggaatgtaaaatggtgcagacactctggaatagtttgacagttcctcaaaaagttaagcatggagttcctctgtgacccaattctgctcctaggtatatgccagagagaactgaaaatacacattcacacaaaaggcattatttataatagtcaagaaattgaaaaaacccaaatgcctatcagtgagtgaatggataaacaaaatatggtctatccatacaatggaatattactcagccataaaagggaaggaagttctggtatatgaccaggctcctagaccatagatttggggactccagagcaggactcgttcatagg

SEQ ID NO: 917879 - DNA, 567 bp, Homo sapiens
gtgcctcaggcctataatcccagcactttgggaggccaaggggggcagatcacaaggtcaggagatcgagaccatcctggctaacccagtgaaaccccatctctactaaaaatataaaaaattagccaggcatggtggcaagcgcctgtagtcccagctactcgggaggctgaggcaggagaatggcataaacccaggaggtggagcttgcagtgagccaagatggtgccactgcactcyagcctgggcaacagagagagagactctgtcttaaaaaaaaaaaaaaaaaaaaaaagaaacatcaaagtcaaacttctgaaaactagagattggattaagttaagtttgtacttaatccaaggagattaagatccaagaaaaaatactgaaaacagctagataaaaacaacagtttacttacgagagaaaagcaattcaaatgacagcagatttctcatcagaaaccatggaggccagaaggaagtggccttttttcacatgctgaaagaaaagaactgtcaactcaaattcctatattgagtgaaataatcctttaagaatgaaaag

SEQ ID NO: 917880 - DNA, 421 bp, Homo sapiens
ctaccttattttgtttttaactgacaaatagtaattgtatatgtttatggagtacaatgtggtgttttgatacctatatacattgtggaatgatcaaatcaggctagttagcatatcctgtattagtttattgttgctgtaacaaattatggcaaacttagaacttcaaacaccacaaatattctcttaaagttctgtaaagttggaagttcgaaatgagtcttgaaggggytaaaccaaagtgtgggcaggactagtgccttctggaggctccagggaagaatttgttccttgcgtcctccctccagcctctagagcaagcttgtccaacccacagcccaggatggcttgaatgtggcccaagacaaatctgtaaaccttcttaaaacattatttttttgaggttttaatttttttagct

SEQ ID NO: 917881 - DNA, 608 bp, Homo sapiens
catcatcatcatcactgcacatagtcacaggttagaggttgcaggcatgcaaaactgtatctttagtcattgtcttccaagcattggcaacagcatgtatggcatctttcatgctaaactctttttgcaaaccttccacacccacacctcttgtcactgctgctagcatgctgttcaggaaagtgtttttatatttactcttcattgatctaaggataccctggccacatggttgaattaataaagtcacattttggggaaagtagatggcataaacatttttgatgagaatttcagcaggagggtgaatagaacagttgtcacgtgtaacaaaatcttgcagtcatcctccagtttagcttccctgcagtgagcatgaacttctggtacaaaacattggarcaccaatcagaaaatatgtccctggtgatctgtgcacttttgttagcataataatagtctggtaagaaatccactcccttaaaatagtgaagacataagcttttgcctgtcacagcaagtttacaatgtgtttgtgtgctgcattagcatatcccagtacagttattctgtccttggcatccttaattcctataggggctttctca

SEQ ID NO: 917882 - DNA, 603 bp, Homo sapiens
ttagacttggaaaaagcttttgataaaatctaacatcgtttcatgattaaaaaaccctcaacaggctagaggcatcaaaggaacatacattaaagtaatgagccatctctgagaaacccacagccaacgtcatgctaaacaggcaaaaactggaagcattccccttgagaacaagacaaggatacccactctcaccgagaatccccactctcaccactcctattcaacatagtactggaaatactagccagagcagtcaggcaaragaaagaaagaaagacattcagataggaaaagaaaaagtcaaactatctctctttgcagacgatatgattctatacctagaaaactctaaagactctgctaaaagactcctggaactggaaaatggctttagtaaagtttcaggatacaagattaaatgtacaaaaatcagtagcatttctacacaacaattatgttaaaaattagagccaactcaagaatacaatcccatttacaatatccacaaaagaataaaatacctgggaatacgaccaaggagatgaaagatctctacaaggagaactacagaacacttttgtaagaaatcacagggccagg

SEQ ID NO: 917883 - DNA, 464 bp, Homo sapiens
tatagagaggagcaggcctgcagccccaacccagtctgctcagtaccagagtccaggccccaggtctgggctgctggggaacagggccctgtttgcagaaggcagcgggtgggcccatgttcagctccaggatgctccctgaccacagatgggcacacgcagtgaaacacagctagcacacatgggcagtcctgccgggcatccatgtcagtgtctgttctgatgggccgaagctgtgaacagttttgaacgtcatccttgggggtgtggagtrgccgaggtcatgcctgctgctggcagggcggaggctggctctgtgtctctgtctgtagcaggggctggagcctcatactgcaccacagtctcttggccgttttgcccaaggatagccaattctgggcagagtccagcctgggtatcttgaacccatgttgtgccctgtctggtcctggcatcccctctgc

SEQ ID NO: 917884 - DNA, 709 bp, Homo sapiens
aggtctctgtgagtcaggctgttctggttgcagctttgactctgctgtcttttatggtaactgcgtccaccttgcctttggggattgagtgctgcaatcacttggccccggcccctgtagtgtgcctatgtcacttacccyctttatacctcagtctcctcctctgtaaaatgggcatcctaatagcacccacccccagggctgctgtgaggtatagatggattagcatattgaaagtaatagaagagagtccaaagcccatgtgtcgttatcagaattatttcatgacaggggagagctggaggagagaggaaggtgctgagcagacccatgtgctctcccaccagtgtttcctgagcacctactatgtgctgcccactgtgagagctgttagggttgaaatagggagcacagcagggtagggtccgccatcaggagcttagtggagagaccattgtgcaacatggttccagtgcttggggtggagaagctcagggagttcaggggcctaggatcctgggcagaatcatggaaaggacacagcctccccagcctctcctgcctccactgcctccctggcctcctctgcttccctggcctctcctgccttcctggcttccccttccaccccagcatccccagtctcccctgtctctcctgcttttgaggtgggccaggagctgctggtgctcagcctgtcctggactct

SEQ ID NO: 917885 - DNA, 603 bp, Homo sapiens
ccagttgggattgatggagccgggacatgcaccaaggcttttgctctcaggcacacagagtccttgggccacgaatgttgaagccctacctgagatttctactgagatcagtgtagggattcaatgtctcagaatcatcccatcctccagggcccacaagtccatgacctttgcctctacccccgaccctgctgacctgaaatgtggcccctgctttcatttccgggagcatacaacacttacaccaagcattgatgggttttattgacttcatttgagacgtggagccatggagagggtcccatgatccttgcttggtgttggccaattcaytgaattctctctttgacttcacccttcccttttctactcacctcctctgtcatggattgctcggggaattctgagccctagttcctttgttttgcagataaccttcactcgtctctgcaacgaatcccaaaagtatgtagttgaggtgactgcaaggtgcttgacacgcaagagactccacaaatgggattcggcctctggaaagtggtggtacttccagatttatgtggatgttactttgtttttccctataaaatatattctttaaac

SEQ ID NO: 917886 - DNA, 603 bp, Homo sapiens
ccagttgggattgatggagccgggacatgcaccaaggcttttgctctcaggcacacagagtccttgggccacgaatgttgaagccctacctgagatttctactgagatcagtgtagggattcaatgtctcagaatcatcccatcctccagggcccacaagtccatgacctttgcctctacccccgaccctgctgacctgaaatgtggcccctgctttcatttccgggagcatacaacacttacaccaagcattgatgggttttattgacttcatttgagacgtggagccatggagagggtcccatgatccttgcttggtgttggccaattcactgaattctctctttgacttcacccttcccttttctactcacctcctctgtcatggattgctckgggaattctgagccctagttcctttgttttgcagataaccttcactcgtctctgcaacgaatcccaaaagtatgtagttgaggtgactgcaaggtgcttgacacgcaagagactccacaaatgggattcggcctctggaaagtggtggtacttccagatttatgtggatgttactttgtttttccctataaaatatattctttaaac

SEQ ID NO: 917887 - DNA, 556 bp, Homo sapiens
ttgggcagttgcgaggcaagtcatcaatggggtatggagattttccaggtgggtgtggttgaaggcagggaagaacgagttcaggagcacattacaagaagaaggtgactgtaaggtccaggctgagcaggaaggtaaagcaagaaggaaacatgaggttgtgaagagaagtttagagggatgaggaggcaggagagrtgaacagttgcaggatgtagctagagtggcgatgttagatcttggggccagagaactttacaatgattatgaagatcaaagggcattagaatcaagctataaagagccactgtttgatgttgggatgtgaggatgctgcaggtggatgtctgcacgttgatggtgagaacatggtcaccctggccctgctgggtctttgctaaagagactgtgctctgttcttggggccgttttcatcacctgattagagcagtggtccccacatggtgttctttggaccatctgtataaaatgttcataggtcaaggataaaatggaaaaacagagaaaatgtcacagaaatgtgcccattggtgaa

SEQ ID NO: 917888 - DNA, 394 bp, Homo sapiens
aaggaaaactaacaaacagaaaaggcatccacactaaaaccccatctgtacgtcaccattatcaaagaccaaaggtagataaaaccagaaagatggggaaaaaaacagagcagaaaaactagaaactctaaaaatcagagtgcctctcctccaaaggaatgcagctcctcmccagcaatggaacaaagctggacagaaaatgactttgacgagttgagagaagaaggcttcagacgattaaattactccgagctaaaggaggaagttcgaacccatggcaaagaagttaaaaccttgaaaaaaaattagacgaatggctaactagaataaccaatgcagagaagtccttaaaggacctgatggagctgaaaaccaaggcacgagaactacgtga

SEQ ID NO: 917889 - DNA, 394 bp, Homo sapiens
aaggaaaactaacaaacagaaaaggcatccacactaaaaccccatctgtacgtcaccattatcaaagaccaaaggtagataaaaccagaaagatggggaaaaaaacagagcagaaaaactagaaactctaaaaatcagagtgcctctcctccaaaggaatgcagctcctcaccagcaatggaasaaagctggacagaaaatgactttgacgagttgagagaagaaggcttcagacgattaaattactccgagctaaaggaggaagttcgaacccatggcaaagaagttaaaaccttgaaaaaaaattagacgaatggctaactagaataaccaatgcagagaagtccttaaaggacctgatggagctgaaaaccaaggcacgagaactacgtga

SEQ ID NO: 917890 - DNA, 793 bp, Homo sapiens
tgtggttttagttttgtataggaaatcttatatgtttaatcttcattagaaaaggttctaaaaaaataaacacctttaaattttggaatcattaaatatttttgtacaataaaaggttaaatggagattaagacaaagaatacaaagtacaaaatgatatgtaaaagttattacatacctctgtattcatttattactcatacagtgtctgtatccaaaaaggatttgctgcgatttacaataaaagacaaacatgagacacaggacacacctttagaaacagggcaagaagkgccaaagagagaagtttaagataatttaaaaaatctaatccaaggaatgctacaggtttggaacaaaacttactgaaacagcagtgttccctgacacccctcgcaggacatgccacaggggtgtgattctgtgttcaggccgctgcaagctcaaaacccttattggacagggagcacacatacgggcaggtgcaggaactggggtgagaacttttgggctccagccccatggcagcatctaggggtgggtgcctgcgactcctgaagccccagtgttacagtgctcttttagctctgccatccgcagatggcttaagtgctagcctctcagtgccccccttgtcacacaggctcttgtttggagtccaggaagaatcaggtcacacatggacttgaatgatgaatgtgggggttttactgaatggtggacgtggctctcaatgggatgggtggggaactggaagggggatggagtggaaagatgatcttcccctggagtt

SEQ ID NO: 917891 - DNA, 793 bp, Homo sapiens
tgtggttttagttttgtataggaaatcttatatgtttaatcttcattagaaaaggttctaaaaaaataaacacctttaaattttggaatcattaaatatttttgtacaataaaaggttaaatggagattaagacaaagaatacaaagtacaaaatgatatgtaaaagttattacatacctctgtattcatttattactcatacagtgtctgtatccaaaaaggatttgctgcgatttacaataaaagacaaacatgagacacaggacacacctttagaaacagggcaagaagggccaaagagagaagtttaagataatttaaaaaatctaatccaaggaatgctacaggtktggaacaaaacttactgaaacagcagtgttccctgacacccctcgcaggacatgccacaggggtgtgattctgtgttcaggccgctgcaagctcaaaacccttattggacagggagcacacatacgggcaggtgcaggaactggggtgagaacttttgggctccagccccatggcagcatctaggggtgggtgcctgcgactcctgaagccccagtgttacagtgctcttttagctctgccatccgcagatggcttaagtgctagcctctcagtgccccccttgtcacacaggctcttgtttggagtccaggaagaatcaggtcacacatggacttgaatgatgaatgtgggggttttactgaatggtggacgtggctctcaatgggatgggtggggaactggaagggggatggagtggaaagatgatcttcccctggagtt

SEQ ID NO: 917892 - DNA, 793 bp, Homo sapiens
tgtggttttagttttgtataggaaatcttatatgtttaatcttcattagaaaaggttctaaaaaaataaacacctttaaattttggaatcattaaatatttttgtacaataaaaggttaaatggagattaagacaaagaatacaaagtacaaaatgatatgtaaaagttattacatacctctgtattcatttattactcatacagtgtctgtatccaaaaaggatttgctgcgatttacaataaaagacaaacatgagacacaggacacacctttagaaacagggcaagaagggccaaagagagaagtttaagataatttaaaaaatctaatccaaggaatgctacaggtttggaacaaaacttactgaaacagcagtgktccctgacacccctcgcaggacatgccacaggggtgtgattctgtgttcaggccgctgcaagctcaaaacccttattggacagggagcacacatacgggcaggtgcaggaactggggtgagaacttttgggctccagccccatggcagcatctaggggtgggtgcctgcgactcctgaagccccagtgttacagtgctcttttagctctgccatccgcagatggcttaagtgctagcctctcagtgccccccttgtcacacaggctcttgtttggagtccaggaagaatcaggtcacacatggacttgaatgatgaatgtgggggttttactgaatggtggacgtggctctcaatgggatgggtggggaactggaagggggatggagtggaaagatgatcttcccctggagtt

SEQ ID NO: 917893 - DNA, 547 bp, Homo sapiens
aataaagtttaggtctacagtaatagaaacactcactttgtatgccccttgatgtgatgcactgagaagcatacagtatcacttacgcattattcctgccaaaaatgcataagctaaatctgagcctgaggaataaccagacaacacccaaattggtgtttattctacagaataaatggctgtactcttcaaatatatcagtgttgtgaaagataaagaaaagccgaggacttattttacattaaagaagtctaaagagacatgagaattaaatgtratacatggtccagaattggatcttagacttgaaaataaaatgaatgctaagaagaacattttgaggacaattgtagaaatttgagtaatgtttgttaattaattcgattatagtaataaatcagttaaatgttctaatgttgaaaattgcctgtaattatgtcaataaaatgtcttcttttgaaatacatactggaggatttagaggaaaggaggcataatgtctggtagttattctcaaatgattcaataatatttatgtggtgagaga

SEQ ID NO: 917894 - DNA, 623 bp, Homo sapiens
aggaggcataatgtctggtagttattctcaaatgattcaataatatttatgtggtgagagacagataaagacaggcacagtgacaatgataaatgtgcaaaaatgttaacaattggtgaatcttggtgaatattatacagaaggtctttgtattgtttttgcaattttccttaagtttgaaagcattttaaaatgaaaagttaaaaactttaggttaaaatatgagtttgaagcaattgctcttatcactgtgtagcaatgtacactaaattgatcaggtctgccaatggcctttttttttttttttttttttttgaggcggagtctcgctgtcgcccaggctggagtgcagtggcactatcttggctcactgcaagctctgcctyccgggttcacgccattctcctgcctcagcctcccgagtagctgggactacaggtgcccgccaccacaccggctaattttttgtatttttagtagagacggggtttcaccgtgttagccaggatggtctcgctctcttgacctcgtgatctacccgcctcggcctcccaaagtgctgggattacaggcgtgagccaccgcgcccggtgccaatggcctttttaaaagcatcaccagct

SEQ ID NO: 917895 - DNA, 596 bp, Homo sapiens
catccacggagcagagccgggagctgcccagtcaaggggcctgtgaaacaggccttagtgactccaggtaatgcggcccagtgggaagagcatgtgctctggagtgaggcagaccaggttcagatcccctcctacctcataaagccggcttgattacatgagatctgtcatctctgaagctcaggatcctatctgtaggatacgcctcatggcatctattagctctaaagatatctttatctaatgtgcctgcaggcatasagtaggcaccccaaacacagaagcacttactaataccattatctctactaaggtcttctagaaatagtagatgattccaaatagaagtagatgattctgtgaccaacacagaatacttggcaccaggatataaagatgagtaagacccaggctctgctctcagagagctcacaatccagcactgggaaacaggtaggatcaaaagagtacaatccggccaggcatggtggctctcatctgtaatcccagcaccttgagaggccaaggcaggtggattacctgaggcctggagttcaagaccagcctggacaacatggtgaaaccctatctctact

SEQ ID NO: 917896 - DNA, 459 bp, Homo sapiens
cctctgttcctggtcacagtcactgtggctgcagcttcctgctgctgtccaaggctactgttctccctgtcgagtctaagccatcagtttagtcaaaacagttttagggacagttttatttgtattgacacagcatacttgttaagagcacatactttgaaatctggaagacccgagttcacatccccactctgccgttacaagctgtgtgatcttgagtaagttaatgaacctctctgagcctcagttgtttttttgttgttgttgtttctttccttttttttgagttggagtctccctctgtcgcccaggmtggagtgcagtggtgcgctctcagctcactgcaagctccgcctcccgggttcacgccattctcctgcctcagcctctcgagtagctgggactataggcacccgccaccacgcctggctaattttttgtatttttagtagagacagg

SEQ ID NO: 917897 - DNA, 567 bp, Homo sapiens
atagacattcacattgcctattgtggggtacaggaagatgttgagatagaactgagtagaatgctctctttcagataactaaatgaatttcacaacaccctacaaatggaaagattgcctgccatcttggagacttacagctccttttacaaagagcagagacaaaaagaatctacatcaagtggagcttttttcccccacaaagaaatactcatttctcagtgcataggggaataaattagccacagtgccctgttcaggtagacttcagattagctcgasaccactccactatagataattaaccttcgtacccaaattagcagtgaaataagccagttattagttttcataatgaacaaaattgagtattttgaaaaagttaaacccctagagcttaaattaaaataagcatctgggagaaatccctaaagcatacttcaattcattaatactacaaattccacagcagattgaactgacaatgtgccttctctaaaggaaattgagtccctcaaataatcatttggattgacctcagagactgattctatttgatgcccagaa

SEQ ID NO: 917898 - DNA, 576 bp, Homo sapiens
aaagtcaccagctgcattagccccttacaagagagtcagcctgtccttggaagctttgaagccagtcattggcttctctctagcgagaaaagtcctagatggcatcttcttccaatagaaggctatatggtctacattgaaaatctgttgtttagtgtagctaccttcatcaatgatcttagttagagcttctgaataacttgctgcagcttctacgtaacacttaactgcttcaccttgcactttcatgttatgaagatggcctctttccttaaactcatgaaccaacatctgctagctttgagcttttcttctgcagcttcctccctttctcagccttcatagcctaatctcatctggattagaytttggcttaagggaatgttgtggctggtttgatcttctatccagaccacaaagctttcttcatatcgccaataaggctattttgcttaatcattcatgtgtcccctgaagtagtgcttttaatttccttcaagaacttttcctttgcattcacaactggtattaattaggaaatactttattgctaaaaaatgctaatggtcatctaag

SEQ ID NO: 917899 - DNA, 580 bp, Homo sapiens
ctctctctttctccacacggtttctcctcgtggtctcagcatgtagctaaattaggctcctgtacatggcagctagattgcaagtgcaagtgtgccaagagtggggaggcaggagcggccagtcctcttacgggctaagcctaggaccggcacaacatcacttctgctacactgggttggttaaagcaatcacagagctagccctgattcaacagaagaaataaaccccacctcttgatgcagggtgtggggagggagtgatacagatayttgcagccatctttaatacacccaagtggtcacggatggcctccacaagcaggtgacatttgatctaagacctgaaggaaaaggagacagccagttaacaggcaagagtaggaggaaaatatttctgacaagagggaacaacatgtgcaaagattattaagcagggagaagcttgaggagttgaagggcttataaggagctaagttgtggcaggagcaatgtggcaaggggagagtggcctgtgatgaggtcaggaggcaggcgggtggggacaacagaaaaatattgggtacagatttagggacccatt

SEQ ID NO: 917900 - DNA, 678 bp, Homo sapiens
ccagtcacctctcccccagccctgggcatgacaaccagaattgtctccagactttgccaaatgtccccggggaggaaaattgcctgtggttgagagctactgctctcaggagacaatcaggagattttgtttctagaccattgttggttttcagggctgactgtcctcagctctgactggaacgtgacaaaaactaaccttctgtctttcctcagactacgccatctccaagtccgaggtcctctcccagattgaacaagggaaggagccctgcaactggcgccgccctgrccccaagattccagatgttcctgtggaccccagtccaggtaagggctgggagaaggccagggaggcatcaggtattttgtgggaaacagagatggaaaggccaggaagggtgtgatctttccagagagagtcgaggagaaacatgaaacttacaggttttatgtcttgaattttttatagttgagttttaatctctaacttagtcagctaatgctccagaaacgaacactttctatcagggaaacaggtgacaaacctattcttttaggaagagacaaaggcagggcacaggttgaggggagggagaggaggacactgagagggaaggcaggagcatagtggacccttgaacaacacaggggccaggggcgccagcccccagtccca

SEQ ID NO: 917901 - DNA, 577 bp, Homo sapiens
ctgtggcccacagaacaaagttggaattcccaatcatctcatacgaacagactcttgagtctaatcccccacctccaagccttgggccacagtcacagagtgggctgtaattcacgtgcagccgcagagctacaggagtttggtcgtaggggcagcactgcagagcctctgtctcccttgttagagtagctgagccaggcttttggcctataaggttgaagcaagggtgtgagtgagccctgcgtgggagcaattctccaggggaaacatctgccctccatgggaatgctgtgtgctgtgatgtgtctccccaggtctggccaccactccagtgcaccaaactgctgctgtgggaaggagccaggagagtgatarcttggggtaccattccccatctgtttctggggagcctgctgcagtactactctctggtctgccctggaaaaacccagaagcatactgcatcacagcttgagaaattacatctatagggggagcagggagctagataccaagaataccaagaatatgagggatacccgtggaactggtgctgggagaagttatccagccaggt

SEQ ID NO: 917902 - DNA, 697 bp, Homo sapiens
gagcttttatcatgcctgggccccaccctggatgctctgatttaattggtctggtgtgaggcctgggaaatggcactttcatggactcttcaagtgattctaatttatatctggggttaagaaccaccactttctagcctcagcatttgctgatttcagaaaataatgaaacctttaccctagtgtctaataaggaagaagttaaaacgtagacacctatttaaaatgtcgtagtggggggcggttccaagatggccaaataggaacagctccagtctacagctcccagcgtgagcaacacagaagactggtgatttctgcatttccatctgaggtaccgggttcatctcactggggcttgttggacagtgsgggcaggacagtgggtgcagcccaccgagcatgagccaaagcaggttgaggcatcgcctcacctgggaagctcaaggggtcagggaattccctttcctagccaagggaagcggtgacagacgccacctggaaaatcgggtcactcccaccccaatactgcgcttttccaacggtcttagcaaacggcacaccaggagattatatcccgcacctggctcggagggccccacgcccacggagcctcgctcattgctagcacagcagtccgagatcgatctgcaaggcggcagcgaggctggggtaggggcgcccaccattgctgagg

SEQ ID NO: 917903 - DNA, 728 bp, Homo sapiens
cctgcaggagcacagaacgctctgctggcagggctgggcagcagcctgagtccaggaaggctgggacttgtttggattctggaggccaggtgtcagtagtacagtgatgaacgggcatttctaggaagaagtcttaggccccacacatggtgaggaatcaggaaggagactgccttgcacaaagacaggatacaagaagggctgagctcttccagaaggagtgaagagaagacaggaaaaagaaaaccagtcccgagaatccctagccacgggctgagtgactggggtttaatgggccctgaattcacagtctttattgggtctgaaaaactacaggcaacttatttcatgttgcagttggatgtgtagtgctataggctcctggccaaatgaaaatcctccccagactgcatcaggaactatgcttcaaagaatgcctatcgatagagtttggacaagtacaataagcctgggagaaacagtgcagcgtggataccaatggtgtggattctgaagtcagacagcctggcttcaaggcctacccmactagaagaccttgggcagattactgcccttccctttcttcaactttgttactgtgaaatgtgggtaataagagtgtctacttgatggattgttgtgtagattgaatgagttaatctgtgtaaagcactgaagacaggactggcacgtagtaacttctgtatactgtttgctgaacagttaaa

SEQ ID NO: 917904 - DNA, 607 bp, Homo sapiens
ttttacaatcctataaacaatgtataagggttaaaatgtatctacttcttgccaacacttccaattttccattaagaaaaaaactgtcggccgggcgcggtggctcgtgcctgtaatccaagcactttgggaggccgaggtgggcggatcacaaggtcagcagatgatcgagaccatcctggctaacacggtgaaacctcgtctctactaaaaacacaaaaaattagccggccatggtggcgggcacctgtagtcccagctactcgggaggctgaggcaggagaatggagtgaacccgggaggtggagcttgcagtgagccgagattacaccactgcactctagcctgagcgacggagtctcgtctgtctcaaaaaaaaaaaaacaaaacaaaaaacaaaaccacaaacaaacaaactaaaaaacctgtcatcctagtgagmgtaaagaggtaccccactgtggtattgatttgcatttccctgatggctaattatgttaagcattttctcaggtgtttattgcccgttttttttatcttctttggaaaaatgcctattaaaatcctttgtccattttaaaattaggccatttgtctttttattgtt

SEQ ID NO: 917905 - DNA, 580 bp, Homo sapiens
agcttagaggacatcaagcagcaaaacaaaacaaaacaaaacacaaactctacatctagttatgatattcaaactactgaaaaagaagggacaaataaaaaatatttaaggaagccagaggaaaaaaagacatattgcctacagaggagcaagataagaaatatagcagacttcttggcagaactcatgcaaacaagaaaacagtggaattacatcaaatgttkaaagaaaaacatctcaatacaggattctacacccagtaaaaatatcctctaaaagtgaaggagaaagaaagacttttcagacaaaaacaaatctcatggaatttactgccagtagacatactcttcatgaaacattaaagaaaattcttcaggcaaaaggagtatgatataggtcagagactgggataaatacgaagacatgaaaagcatcataaatggaataaaggaaggtaaattaaaattatttatttttaagttctctaaaagattactgactggttaaagctgtaatagtaaaaatatctggtgtgttgatactgtatgtaaaagtaaaatgtatgacaataatagtagaa

SEQ ID NO: 917906 - DNA, 580 bp, Homo sapiens
agcttagaggacatcaagcagcaaaacaaaacaaaacaaaacacaaactctacatctagttatgatattcaaactactgaaaaagaagggacaaataaaaaatatttaaggaagccagaggaaaaaaagacatattgcctacagaggagcaagataagaaatatagcagacttcttggcagaactcatgcaaacaagaaaacagtggaattacatcaaatgtttaaagaaaaacatctcaatacaggattctacacccagtaaaaatatcctcyaaaagtgaaggagaaagaaagacttttcagacaaaaacaaatctcatggaatttactgccagtagacatactcttcatgaaacattaaagaaaattcttcaggcaaaaggagtatgatataggtcagagactgggataaatacgaagacatgaaaagcatcataaatggaataaaggaaggtaaattaaaattatttatttttaagttctctaaaagattactgactggttaaagctgtaatagtaaaaatatctggtgtgttgatactgtatgtaaaagtaaaatgtatgacaataatagtagaa

SEQ ID NO: 917907 - DNA, 682 bp, Homo sapiens
aatccaaatgtataagcaagcacttattccatttaatctgatctttcattgaggatacaatatctctgaaggtaaggcagacaatttctatctggagaaaaaaaatcttaaagcacattttacattaaaaaccactgaagcataatgggctaagctgcacatggacccaatttcaacatctgccaaaattatcagtaaatttaagacttgttctaattttctcagtcattattttaaactccagtagtaccaggacctgatttaatcagtgagtgaggcatatagcattcaggtcaagtagacacgcatacaaatattttttgattcctttcattctcatcccttgaaggccctttgtcaccaagggtaacagtgcttgggttctaaaattatttctccttccaaaccatgccatcataaagtgctttaagatggtaagaaaaygaatgaaactactgaagaactaaatatggaaacacaaaagtaatttatgtccatcagtagccttatttttttcatctttaccccttgatttttattccatttcttccccagcccctgcatgtaacataatgccttagcatctaatgtaatacctaatataatggcttagcatgtagtgacttaaacttagtagcaatcaaaacacatatttgaaaaatgcattggctttattgaaata

SEQ ID NO: 917908 - DNA, 787 bp, Homo sapiens
ctcgtgccggtaatcccagcactctgagaggcagaagtgggcagatcaactgaggtcaggagttcaagaccagcctggccaacatagcaaaaccctgtctctactaaaaatacaaaaattagccaggtgtggtgcctggctaatttccacgcccggctaatttttgcatttttagtagagacggggttttgccatgttggttaggctggccttgaacttctgaccttgtgatccacccacctcagcttcccaaagtgctagcattacaggcatgagccaccacccccagccctcttctgcctgatcttagaggaaaaaccttcagtctttcatcattaaaaaaaaaaattatttttcgagacagagtcttcctctgttttccaggctggagtgcagtgatgtaatcgtggttcacagcagcctcaaactcctgggctcaagtgatcctcctgtctgagcctcctgagtaactaggactacaggcatgcaccactacaccaagattttttttggtagggtcttgctttgaccttcctttgaccttgctttgacccttgatttgaccttgctttgacagtgtcttgtaatgttgcccaggcttctcttgaactcctgggctccagtgattctaccacwttggcctcccaaagcagtgggattatgagcatgaatcattgagcctgccagccttctgtcactgaggatgatataaactgtggggttttttggttgtttttgtttttgagacgaaatctcactctgtcgcccaggctggagtgcaatggca

SEQ ID NO: 917909 - DNA, 586 bp, Homo sapiens
tcatatctcatggttgttttaatttgtatatccctaatgtatattgagtatcttttcataagcttatttgccatccgtctatctctttggagaggtgtctatttagatcttttgcccaatttgttcattgagaggcttttaaaaaaatcttaacttgatgggaattttattagaattccattaaaggaagatttaacatctcagtaatattacaccttcaaattcattaatatagaatatctctcaatttacttatatctatgatttcttcattcaatgttttgcagtttctgcattcagatggtattcatacttagttagaattatatctacaagtatttcatttctggcactattgtaaatgtattgtttaattttaagttccartgttcactgatggtgtatagataagaaagtggcttttatatattcactttataatctgtgaccttgctgtattaacctattggttgcagaaattattgcgtagattatttgaaatttctgcataggcaatcatgtcatttccaaataaaaacagcttttttcaatatgcataccttttctttcttattttagtgctcta

SEQ ID NO: 917910 - DNA, 723 bp, Homo sapiens
tcccaaatttcacctttattatgtttcaaaacacaattatgccttctcaacactttcccaatgtcttagcttatttcaccattaactcaaaagtccaagtctatagtcttatctgagacaaggcaagttccttctacctatgatcctgtaaaattaaaagcaagttagttacttcatagaaacaatggagatacaagcattaggtaaatacacctgtgccaaatgggagaaattggtcaaaacgaagggactacagggcatgctgatgcaagaggtgggctcctatggccttaagcagctctgcctctgtggctttgcagggtgtggtccaccctcctggctgctttcatgggctggcattgagtgtctgtggcttttccaggtgcatgatggtccaagctgtcagcgaatctaccattctggggtctggaggacgrtgaccctcttctcagagctccaggggcagtgtcccagtggggactctgtgtgggggctctgaccccacatttttcttttgcactgttctagcagaggttctccgtgagggctccactcctgcagcaaacttctgcctggacatccaggaatttccacacatcctctgaaatctaaatcttgacttctgtgtacctgcaggcccaacacccacatgtaagccatcaagccttgggtcttacaccccctgaagcaatggtctgaactgtacattggccccttttagcc

SEQ ID NO: 917911 - DNA, 628 bp, Homo sapiens
ttattttgttatatactcatgctattgcaggtatcaatatctcatttgattttataactgagtagaatcatattgcatgcatatacacaatttatttatatctttacttgttgagggacattcggactgtgtccagtcttggttcagtagaaataaagcttctatgaacacttgtatattaatatagatatctttgtatgcaaatatatttttttctcttagttaaataactaggaatgsactggttgaatcacatggtatggtaggtacatttacattttagaaaattctgtcaacttcttttccaaagtgtctgtatcattttatatttctaccacaatgcgttaatctcccagctcttccacgtccttgccagtggttatatatttgtttttaaactttagctattctaacaggtatgtagtagttactcattgagcttttaatttgaatttgtctactgacatgattttgagcatcttttcttgtgcttttaaattttatttttaaatgacaaataataattatgaatatttattgggtacaatgtgggttttgttttgttctgttttgtttttgagacaggacctcagtgtcacagaggctggcatgcaattgtgagatcaca

SEQ ID NO: 917912 - DNA, 628 bp, Homo sapiens
ttattttgttatatactcatgctattgcaggtatcaatatctcatttgattttataactgagtagaatcatattgcatgcatatacacaatttatttatatctttacttgttgagggacattcggactgtgtccagtcttggttcagtagaaataaagcttctatgaacacttgtatattaatatagatatctttgtatgcaaatatatttttttctcttagttaaataactaggaatggactggttgaatcacatggtatggtaggtacatttacattttagaaaattctgtcaacttcttttccaaagtgtctgtatcattttatatttctaccacaatgcgttaatctcccagctcttccacgtccttgccagtggttatatatttgtttttaaactttagctattctaacaggtatgtagyagttactcattgagcttttaatttgaatttgtctactgacatgattttgagcatcttttcttgtgcttttaaattttatttttaaatgacaaataataattatgaatatttattgggtacaatgtgggttttgttttgttctgttttgtttttgagacaggacctcagtgtcacagaggctggcatgcaattgtgagatcaca

SEQ ID NO: 917913 - DNA, 565 bp, Homo sapiens
tgacgttgtagaacagaggcaaaccactgttgctgagccctctctgaatttccaaagcacagaatccatgtgcataataaaatggttgcttatactattaaagttgggatttttattacgcagcagtagtgattggacatatccccaaagaattaatgaagcacttgtgtgaggtaaattcccagagcctagacactacccccatgcttgtttatgtgttacayagtggtcgaggctaaactttacaaccaagcctgtgttaacttggttgtcatagtgcttttcacaaatgtcatatgtttgaagagtaggagaaattgcttttataaaattccatgagactaacatcctcaaataaatcacatggcaaaggtacagattttggtcttttaaaatattatatctgttaggctgccagatcaaaacctataaatagcaactctcaaacagcaaagtatatgaatttgagtacatagatttttataacatcaattttaattattcagaagttttcttttcttttcttttgtatttgctgtgatcaaggtagagatggataatggac

SEQ ID NO: 917914 - DNA, 642 bp, Homo sapiens
ttgtaataagtacagataagaaaaatatagtgttacgagagcatacattagggaaactaaatttgaatggaggaggcagaaggatacctttgaggatgtgacatttaataaaatacctgattatgtgtaggttacagcttgaattctctgaaaactattttttaaggggtaaacttaaagtcaccatgaatatgtaattgaatacatattttctacaataaataattattttattatgcttcatatcgttgttcagtttttgtattaaagtcctatatgttattaatcrtggctgggtgcggtggctcactcctgtaatcccagcactttgggagactgaggcgggcagatcacttgaggccagttgttcgagaccaggctggccaacatggtgaaaccccgtctctactaaaaatacaaaaattagctggatgtggcagcacatgcctgtagttcctgctactcgagaggctgaggcaggagaatcacttgaatccaggaggtggcagttgcagggagacaaggtcatgccactgcactcgagcctggaaaacaggacgagactccatctgaaaaaaaattatgtatgttagtaatcataatatacatgcctatgtacctagacattatatacatacgagt

SEQ ID NO: 917915 - DNA, 642 bp, Homo sapiens
ttgtaataagtacagataagaaaaatatagtgttacgagagcatacattagggaaactaaatttgaatggaggaggcagaaggatacctttgaggatgtgacatttaataaaatacctgattatgtgtaggttacagcttgaattctctgaaaactattttttaaggggtaaacttaaagtcaccatgaatatgtaattgaatacatattttctacaataaataattattttattatgcttcatatcgttgttcagtttttgtattaaagtcctatatgttattaatcgtggctgggtgcggtggctcactcctgtaatcccagcactttgggagactgaggcgggcagatcacttgaggccagttgttcgagaccaggctggccaacatggtgaaaccccgtctctactaaaaatacaaaaattagctggatrtggcagcacatgcctgtagttcctgctactcgagaggctgaggcaggagaatcacttgaatccaggaggtggcagttgcagggagacaaggtcatgccactgcactcgagcctggaaaacaggacgagactccatctgaaaaaaaattatgtatgttagtaatcataatatacatgcctatgtacctagacattatatacatacgagt

SEQ ID NO: 917916 - DNA, 582 bp, Homo sapiens
ttgcaatgacgattaaaggctgtgggccagaagcaacacaggtcacttctgtaccatttccttggccaaagtaaatcacactactgtggaatgttagtctgcttgggctgccacagcaaaataccacagacctaacagcaggaacttattttctcagagttctagaggctgaaggtctccaatcaaagtgccagccaattccattgctggtgaagccactcttcttggccatgtsttcctcttcttaaacaccactggtcctactgaattatagttctgcccttgtgacctggtttaaccttaattactgcctgaagattctatctgcaaatatggtcacatgcaggattagggattcaacatgaatgtgagaggacacgattcaattcatagcattctgcactccccagattcatgtccttgtcaggtgcaaaatatattaactccatccctaaagctccaacattttaaatcattacagcatcaactctaaggtctaaagtccaaagtctcacgtaaatggtatctgaattagatagggatgagagtcaaggtactattcatcttgaagcaaaattgctc

SEQ ID NO: 917917 - DNA, 579 bp, Homo sapiens
gtgtctatcagctcttaaaattttctgaaatctttatcttgaaaaccttctcccctcaccttttattttgggtgatggacatatccacaatctcttttgtgattttcttgattggctctcttgtaaatcctgtgaagtcaggcacmacaactgaacagttttctctagcaagaatgtattgctttggccttaatggctttcatggattttcctgtaacaacaaatgcctcttcaatggtgtagtccttccagacattcataatactctctccatcagagtttcttgacaatcttttccatggggtactgtgtgtaatgagccttaaaggcccctatgctccctaatctaaaggcagcgttagagacattgtgtttgggtgcaagtagaccactttaatgttttaggtgttgaattcatggggttctgggtggccaggggcattgattaatatcaaaagaacttcaaaacgcagtcccttaccggtaaggtacttcctgacttcagggacaaagcatagatgcagccaatccagaaaaagcgttcatattgtccaggacttctttttgtacaaccaaaag

SEQ ID NO: 917918 - DNA, 657 bp, Homo sapiens
agaagctggacagggctcaagtttctgatgttgatggaggaagactcacaagggatctgagggcaaacggaaaactgggcctggctgcctgctttcatcttccagatgagcaacaagagaagagaagagaagaggagaagaagaagagaagagaagagaagagaagagaagagaagagaagagaagagaggagaggaggagagragaggagaggagaagagaagagaagagaagagaagagaagagaagagaagagaagagaagagaagagaagagaaaagaacccccagatcttctgcaaaaggcagaggaaaataatagggacaatatacgtgagaatgctcctcacctgtgacaagaccttgcacctggcctgccagccctctagttagccagccctctagttagccagccctctagttagctaccagtggaatcaagccgagggtcaacatttgcagccgtttggcccaggagcttcatcagcagataaattggatttattctggaggccataaatttttttaaaaagtgttgggaatattggaagaactttatcatgattccacttagtggaccaaggtcaagtactcaactcagtctcttcaagaaggaagtagcagacatagggcacccatgacagaaagggaggcagat

SEQ ID NO: 917919 - DNA, 581 bp, Homo sapiens
ggaagggattgcacttgccttacctcagataagactttggactgtggacttttgagttaatgctgaaatgagttaaggcatggggggctgttgggagggaaggcatgattggttttgaaatgtgaaaagacatgaaatttgagagaggccaggggcagaatgatacggcttgctctgtatccccaaccaaatctcatcttgaattgtaatacccattatccccatttgtcaagggagagagaccaggtggaggtaactaactatatcatagagcggtyctcccatgctgttctcatgatagtgagtgagttcacaatgagatctgctgggtttttttctttgtttgttttgagatggattcttgctctgtcagtaagcgggatctcagcttactgtaacctctgcctcctgggttaaagcgattttccttcctcagcctcctgagtagctgcacgcaccaccatgcccagctttttgtatttttttgtagagatgaggttttgccatgttgggaaggctggtcttgaacgtctgaccacaaatgatccatccacctcggcctcccaaagtgctaggattat

SEQ ID NO: 917920 - DNA, 564 bp, Homo sapiens
ggtacatatggagctagcacatctcagagcccatcgcccatggtgtactgcttgggtatcattgttggctattcagggcccagaggctctttagtcagcaggtaatgaatcctgtcaggtctctattgcgacagggcagcattgmgttcaatgtgaagtcccccagttgctgtgctttcccttttccaagtgaacagatttctccactttgtgtggtgcctgctgggtgatggggaagggatggcacaagcactcccttaaccatcctgactggtacctcattaggatgcattcccctgccccctaccaccacccagtctactgtctatgttcccagcccagaattagaacttgtttaggaattacagtccttgtagcctagactgcccttcaagtttacttagggcccgagaataatccagcccttggtggcaaggcttcctggaaatcaagctccagcaattggggtggatgattcccctctggctagggccagtccaaatgctcccgcggtgggcggacgtcagctcaatacagcctggtcctgctttctgctatgtcagg

SEQ ID NO: 917921 - DNA, 558 bp, Homo sapiens
ttatacagattgataggctcctctacttaccttcaagatgctttccaattgatggtgattgatggtgactagccttgagactttctcaggaaagtcaaatacatctatattcttttggggtatgatagagtgtgtgtgtgtgtgtgtgtgtgtgtgtgtgtgtgtgtgtgtgtgtgtgtagagggggtggggaaggtgcttcatcttttggtgacatcttagaagtgagggagagaatcagccaaaatatttcccaatgggaaatggacttctttcrgacatctgagttttgatcctggttctagtttaagccattaattttctaagtgactggagagtaaatataatataattattctaagactgaggctaaataggatgttcactttgaggacagcaaaaatgccagtctcttcaagatctaagaggtaggcatcaagtttctgggcatagatctttttactgaagtaagagtgcttgaatgatatcttactcaaaggtactgtctggaggcagccttggttgtgagatgaagacattactcaatttttgttgact

SEQ ID NO: 917922 - DNA, 629 bp, Homo sapiens
cttatcagttcttctggaagcagttgtctctattactcccagatgtccagcaggctgtgtgttccagagccattcagcccagagtgacacaggaacagaccaggagagggggactgagttgctcccaaagtcctgccacaggacctccaattccatgcacaagggcagctcagcctctgtcacttgcagccaagacatcctaactagtggtggcccaatggtgccatctcaccacggcaggcttgacacacttttaaagttgtatttcctacaattctgttgtttttccccaggamttgctacagaatttgcagggccttgtgaatgtgaaaatgtagggtctcaagttcgataattattaagaatttcctgatagtgacagcagagcataaaaccaaaggcagagcccatccaagcctggggccctgtgagagtgaatgcgtcacacacacatgaagccagccctgaccttgattcttgttttgcttttgttttaagacagggtctcactctggttgcccaggctggagtgcagtggtgaggctcactgcagccttgacctcctgggctcaggtgattctcccaccttagcctcctaagtagctgggattacaggtgtgtgtcaccac

SEQ ID NO: 917923 - DNA, 432 bp, Homo sapiens
agcccctctgggagaagttggcaggagcagggatgtcctggtttgtccgtggggccgtgaagctctgggtggctaagggtggcaccatggtcagacaggtcacacaacaggatcccaccctcaccttaccaagcctgacagccctccccrgccccatcccctgcagcacctgctccctgcatctccctgcaacacacccgctactgcccttaggcccacaggcccatttcacatagggaaaaccgaggcctggccccagcagcacccaccgttgctgagggccaccaccagccagatggtatccaagtcagagatgttgtggctgctgaactggcctagaggctgctccagcgtgaaggtggacagggtgagcctccccgccagggtgtcgtttgagagctggggcacatagctgatgtgctctggggcagc

SEQ ID NO: 917924 - DNA, 432 bp, Homo sapiens
agcccctctgggagaagttggcaggagcagggatgtcctggtttgtccgtggggccgtgaagctctgggtggctaagggtggcaccatggtcagacaggtcacacaacaggatcccaccctcaccttaccaagcctgacagccctccccagccccatcccctgcagcacctgctccctgcatctccctgcaacacacccgctactgcccttaggcccrcaggcccatttcacatagggaaaaccgaggcctggccccagcagcacccaccgttgctgagggccaccaccagccagatggtatccaagtcagagatgttgtggctgctgaactggcctagaggctgctccagcgtgaaggtggacagggtgagcctccccgccagggtgtcgtttgagagctggggcacatagctgatgtgctctggggcagc

SEQ ID NO: 917925 - DNA, 432 bp, Homo sapiens
agcccctctgggagaagttggcaggagcagggatgtcctggtttgtccgtggggccgtgaagctctgggtggctaagggtggcaccatggtcagacaggtcacacaacaggatcccaccctcaccttaccaagcctgacagccctccccagccccatcccctgcagcacctgctccctgcatctccctgcaacacacccgctactgcccttaggcccacaggcccatttcacatagggaaaaccgargcctggccccagcagcacccaccgttgctgagggccaccaccagccagatggtatccaagtcagagatgttgtggctgctgaactggcctagaggctgctccagcgtgaaggtggacagggtgagcctccccgccagggtgtcgtttgagagctggggcacatagctgatgtgctctggggcagc

SEQ ID NO: 917926 - DNA, 498 bp, Homo sapiens
gtaaaggcttcctgggggctgtagtccggcgtggtctgcactcggatgatgatcttgtgctccaaggggtgggggactttgtagccagcaaatagcacttgcgggtcctttaggtcacactgtctgaggtccagggacagacagtgtgagggtctagcctcatgcccaagctgggtagcagccagmtcagagcagaagaacagactttctagccaaaaatcccccccaactttttttcccaaaagtcttcaaggaaagtaacacttttaggaagatacctcatgtggggacaccctacccccgccacacacacacaccctgcatccatgaggttgaaggacccgagctggaaacagattccagcaacctcttcccaccgggcaccgcagtgctggcaaagagatctcccaggcagtgaatgtccagccagtgttcagtgactcagacccaaaaagcccacaaagagcctccacgcagcaaataaaggcagcaggagag

SEQ ID NO: 917927 - DNA, 498 bp, Homo sapiens
gtaaaggcttcctgggggctgtagtccggcgtggtctgcactcggatgatgatcttgtgctccaaggggtgggggactttgtagccagcaaatagcacttgcgggtcctttaggtcacactgtctgaggtccagggacagacagtgtgagggtctagcctcatgcccaagctgggtagcagccagatcagagcagaagaacagactttctagccaaaaatcccccccaacttttttycccaaaagtcttcaaggaaagtaacacttttaggaagatacctcatgtggggacaccctacccccgccacacacacacaccctgcatccatgaggttgaaggacccgagctggaaacagattccagcaacctcttcccaccgggcaccgcagtgctggcaaagagatctcccaggcagtgaatgtccagccagtgttcagtgactcagacccaaaaagcccacaaagagcctccacgcagcaaataaaggcagcaggagag

SEQ ID NO: 917928 - DNA, 498 bp, Homo sapiens
gtaaaggcttcctgggggctgtagtccggcgtggtctgcactcggatgatgatcttgtgctccaaggggtgggggactttgtagccagcaaatagcacttgcgggtcctttaggtcacactgtctgaggtccagggacagacagtgtgagggtctagcctcatgcccaagctgggtagcagccagatcagagcagaagaacagactttctagccaaaaatcccccccaactttttttcccaaaagtcttcaaggaaagtaacacttttaggaagatacctcatgtggggacaccctacccccgccacacacacacacyctgcatccatgaggttgaaggacccgagctggaaacagattccagcaacctcttcccaccgggcaccgcagtgctggcaaagagatctcccaggcagtgaatgtccagccagtgttcagtgactcagacccaaaaagcccacaaagagcctccacgcagcaaataaaggcagcaggagag

SEQ ID NO: 917929 - DNA, 477 bp, Homo sapiens
ttgaatgtaaagagttcaaacttcccaattaaaatatatagccttgtttagccgggcatggtgccacatgcctgtaatctcagctactcaggaggctgaggcaggagaatcacttgaacccgggaggtggaggttgcagtgagccaagatcatgccactgcactccagcttgggtgacagagtgagactctatctccaaaaaaatmcaattaaaaaaatatatatatacacacacataatacccttgctgagtgggttagaaaaacaagatccaggcgaggcatggtgactcacaactgtaatccccatgctttgggaagctgaggcaggaggatgtcgcttgagttcaataccagcctgggcaacagagcaagaccactagctctaaaaaaaaaaaaaaaaagctgggcctcgtggcatgtgcctgtagtcccagctactcgggaggctaagacatgagggttgtttgagttcagg

SEQ ID NO: 917930 - DNA, 665 bp, Homo sapiens
gaaggcgcgaaccctggacctaccatcgtctttggtgcgctccaggatgaggggcgtgctggggaccccgttcccgatgcgggtgaacgccagcacctggagctcgtagagcacgaacttgcgcaggcctgccagcagggccgactgcgtgtggttccctcgcacgatgtggctcctgggctcgggatccaggtctttggcccggaacaggatctgtggtatcgacacagcacgagggttatcaggaggygggtgccaggagggaccgccgtggcatggggcaggcccccttcgtgaatcaaggcccagccaactgtgctttctccctgaggatggctgtgtgcagggcttctggatctaatttgtccatgctggcatttggggaggaaggtggttgtaaagtgactgcgctccaggggagcttgagttagtgcccacggcttggcgagcctgctgcctggtcataatctgcaagatctgagggcccaactgcagccatgccaaccacagccactaaaacaaagactcgattatgaacacagacaacactctgcttcctgccacaggagccagcagccccctgggttttccagccatggaagctggtttcctgccccagaagacctgctgtcctcacacagaccgggagctctggcctccttggg

SEQ ID NO: 917931 - DNA, 769 bp, Homo sapiens
tactttttttttttgtaagagacaggatctcggcagggcgcggtggctcacacctgtaatcccagtactttgggaggctgaggcaggtggatcacctgaggtgaggtgttcgagaccagcctgaccaacatggagaaaccccatccatattaaaaatacaaaattagccgggcgtggagatgcatgcctgtaatcctagctactggggaggctgaggcaggcgaattgcttgaacccaggaggyggaggttgcagtaagcctagactgcaccatggcaacaagagtgaaactccatctcaaattaaaaaaaaaaaagagacaggatctcgctttgttgtccaggctggagtacagtggtgtgatcatggcttactgcaacctggatctcctaggctcaggtgatcctcagccttagcctccaaaatcactaggattacaggcataagccaccattcccagacacacctcactttctaatactattaaaaaatgtgattaggttgggcaccgtggctcacgtctgtaatcccaacactttgggaggctgaggcgggcagatcacctgaggtcaggatttcgagaccagcctggccaacatggtgaaaccccgcctctactaaaaatacaaaaattagccgggcgtagtggcaggcgcctgtaatcccagctactcaggaggctgaggcaggagaatcacttgaatgcaggagacagaggttgctgtgagccgagattgtgccagtgcactccaacctgggtgacagagtg

SEQ ID NO: 917932 - DNA, 769 bp, Homo sapiens
tactttttttttttgtaagagacaggatctcggcagggcgcggtggctcacacctgtaatcccagtactttgggaggctgaggcaggtggatcacctgaggtgaggtgttcgagaccagcctgaccaacatggagaaaccccatccatattaaaaatacaaaattagccgggcgtggagatgcatgcctgtaatcctagctactggggaggctgaggcaggcgaattgcttgaacccaggaggtggaggttgcagtaagcctagactgcaccatggcaacaagagtgaaactccatctcaaattaaaaaaaaaaaagagacaggatctcgctttgttgtccaggctggagtacagtggtgtgatcatggcttactgcaacctggatctcctaggctcaggtgatcctcagccttagcctccaaaatcactaggattacaggcataagccaccattcccagacacacctyactttctaatactattaaaaaatgtgattaggttgggcaccgtggctcacgtctgtaatcccaacactttgggaggctgaggcgggcagatcacctgaggtcaggatttcgagaccagcctggccaacatggtgaaaccccgcctctactaaaaatacaaaaattagccgggcgtagtggcaggcgcctgtaatcccagctactcaggaggctgaggcaggagaatcacttgaatgcaggagacagaggttgctgtgagccgagattgtgccagtgcactccaacctgggtgacagagtg

SEQ ID NO: 917933 - DNA, 769 bp, Homo sapiens
tactttttttttttgtaagagacaggatctcggcagggcgcggtggctcacacctgtaatcccagtactttgggaggctgaggcaggtggatcacctgaggtgaggtgttcgagaccagcctgaccaacatggagaaaccccatccatattaaaaatacaaaattagccgggcgtggagatgcatgcctgtaatcctagctactggggaggctgaggcaggcgaattgcttgaacccaggaggtggaggttgcagtaagcctagactgcaccatggcaacaagagtgaaactccatctcaaattaaaaaaaaaaaagagacaggatctcgctttgttgtccaggctggagtacagtggtgtgatcatggcttactgcaacctggatctcctaggctcaggtgatcctcagccttagcctccaaaatcactaggattacaggcataagccaccattcccagacacacctcactttctaatastattaaaaaatgtgattaggttgggcaccgtggctcacgtctgtaatcccaacactttgggaggctgaggcgggcagatcacctgaggtcaggatttcgagaccagcctggccaacatggtgaaaccccgcctctactaaaaatacaaaaattagccgggcgtagtggcaggcgcctgtaatcccagctactcaggaggctgaggcaggagaatcacttgaatgcaggagacagaggttgctgtgagccgagattgtgccagtgcactccaacctgggtgacagagtg

SEQ ID NO: 917934 - DNA, 603 bp, Homo sapiens
ggacgaataggaatcaaccgtggggagggaggggccacccaggagaatcccagtccacggagtaagggagggtggcatgctgagtgccaggcagaaggcctggcccaggcggtgctccctaagtgagggtgcaccctcacttacatccttccaggatagttcctcttcacatccttccaggatagttcctcgcctaggcgttttctccctcagtttgggggtagtggtttttagggccccgtgtgagagtgagaaggctcaagggtgccactaccccaaaaccaarggggcaaggggcagaccccaactgtaccaggagcaaggagctgctttaatttactcctcccaacatgtctattagacgttttaccaacgaggaagatgggctcaaagcccaaggtcacatgggggtggatggccaaggcagggttggaacccaggtctggcagatgcccttgccatgccctggggtgccccaactctgaccacaatgagcccttccagctccttcccagcccaaaactaaaccctgaggcagagtgactgggccacgctcagacgtccctgactctatgccctacctctgtccctctgagactccca

SEQ ID NO: 917935 - DNA, 600 bp, Homo sapiens
gctctcccgaggtgggtgggcctctgctggggctggctccccctgatgcccaagggaggtggcaccgggctacaggcggacgtcatgcacctggggtgaaggggtgctgagggcactcttgggtggaggagaggcccaaggggtggactcagtgggaactgacacccttcctgtctcagcggggacccctcatgctctccgcccgtcagtctttccccactgcctcagatgcagcctcaacttcccaatctggcgctcaaagccctgcagatctatcctcgtcagcttccctggcccttccccccatcccctcctctaaatgtcccycgctccacttgcccagggtgctgggcttattccagacaggagctcagccgccatgacccacggtggcacacaccctgacctgacgtaaatgaccttcttctctttttctatctggcagactcctgcacctcctcaggtggcccagccctgcctcaccttctcagggatgctggcttggaccccacccaagagaacagttggcatctccatcacctagcccaggccactgtcctgagctaatcaggagctactcatgggctctcttccctagaa

SEQ ID NO: 917936 - DNA, 559 bp, Homo sapiens
ggggaccccagcggcttgccactgctggctcagacagcctgcttttatcctcttatctggccccacccacgtcctgctgattggtagagccaagtggtctgttttgacagggcgctgattggtgcgtttacaatccctgaactagacacaaaggttctccacgtccccatcagattagttagatatagagtatagacacaaaggttctccaaggccccaccagagcagctagataaagagtatggattggtacactcataaactttgagctaaacacagggttggtgtttttacaaamcttgattggtgtgtttacaaaccttgacctagatacagagtgcggattggtgtatttacaatccctgagctagacataaaggttctcccaggccccaccagaccagctagatacagtgtggattggtgcactcacaaaccctgagccagacacagggtgctgactggtgtgtttacaaaacttgagctagatacagaatgccgattggtgtatttacaatccctgagctagacataaagattctccaagtccacaccagac

SEQ ID NO: 917937 - DNA, 559 bp, Homo sapiens
ggggaccccagcggcttgccactgctggctcagacagcctgcttttatcctcttatctggccccacccacgtcctgctgattggtagagccaagtggtctgttttgacagggcgctgattggtgcgtttacaatccctgaactagacacaaaggttctccacgtccccatcagattagttagatatagagtatagacacaaaggttctccaaggccccaccagagcagctagataaagagtatggattggtacactcataaactttgagctaaacacagggttggtgtttttacaaaacttgattggtgtgtttacaaaccttgacctagatacagagtgcggattggtgtatttacaatccctgagctagacataaaggttctccmaggccccaccagaccagctagatacagtgtggattggtgcactcacaaaccctgagccagacacagggtgctgactggtgtgtttacaaaacttgagctagatacagaatgccgattggtgtatttacaatccctgagctagacataaagattctccaagtccacaccagac

SEQ ID NO: 917938 - DNA, 725 bp, Homo sapiens
tttctttcttctagctgttcaattctattactgagactttccagagcactttgcatatctaaaactgtgtccaaagtttcctgaattttttattggattttctttaagctatcgatttccttgaatatttcttcttcttgtatcattttttggactcccttgcattgggcttcacctttctctggtgcctccctaattagcttaatgactaacctcctcaattctttttcaggtaaatcagggatttcttcttggtttggatctattgctgctaaactagtgtgatttttggggggtgttgaagagccttgttttgtcatattaccagggttggttttggggttccttctcttttgtgtagrctctgtcagagggaaggtctaggcctaaaggctgttgttcagattcttttgtctcatgaggtattctcttgatgtagtactctccccattttcctatggatgtggcttcctgtgagctgaactgcagtgattattgtctctcttctgggtctagccactcagtgagtctacacagctcaaggctggtgatgggggttatctgcatagagtcctgtgatatgaaccatctatgggtctctcagccgtggataccggcacatgttgtggagatagcagagggggtgcaatggactccctgagggttcttagctttgggggcttaatgctctatctttgtgctggttggcctcctgctgggaggtg

SEQ ID NO: 917939 - DNA, 478 bp, Homo sapiens
gaaggtcttgctatgttgcccaagctagtctcaaactcctggtctcaagccatccttccacctcagcctcccaaagtgctgggattacaggcgtgagccactgtgcctggttcttcttatatattcttaaagactcgcaggtcatctaatcgtaggttgtttcttcgctggccttgggctygggtgtgctcatgttccaacttcctgtggtcactcttagctctaagtaattaccgagctttcttcctttccacaaaggacgctccagatttggcaactagcaaaggtcaggggggttgggtttcttcagcaagaatgacactggctgcctctcctgctacctctgggctgggcaggtggcagctgcccccactggcagggtgcccaccacactcacctgccaacacagatgtgcctgcatctgagggctgtccaagaacaggactccctatttcttcaggaggggccaactgcaacc

SEQ ID NO: 917940 - DNA, 620 bp, Homo sapiens
ttggttcatcagttcatctgaatgcaaactctaaaaagtattgcaaagaccagtcttaggtttcacaataacatgactcctgaatgctaagttattacagaagagcaaactagggaaaaatagtgggttcttgttttaccgtacctgcatcttagcaacttttggttgtcacaaaagaagttacatgactaaggatcattgttcttaagaaaagaagtttattaatcttgttggacagcctgcctgggactaggagaggaaggtagtgaattattagtgactactgtctgttgaaatgactgtacatgtaatcatgcataaaggatgaaaaggtcagagagaaaggaaaaaatatataacaaacatcttatgattgagttmtcccgggttcaagagattctcctgcctcagcctcctgagtagctgggactacaggtgtgcaccaccacgcccggctaattttggtgtgtgtgtgtgtgtgtgtgtgtgttttgagacggagtcttgctctgtagcccaggctggagtggaatgtcacgatctcagttcattacaacctctgcctcctaggttcaagtgattcttctacctcacccttccagagtgctaggatttcaggc

SEQ ID NO: 917941 - DNA, 774 bp, Homo sapiens
tcagtgatcaataaaatcagcaatgttagccgggaatggtggcttatgactgtaatcccagcatttcaggaggctgaagccggaggatcgcttgagcccaggagtttgagaccagcctgggcaacatggtgaaaccctgtctctactaaaatatacaaaaattagccaggtgaggtggcatgtgcctgtagtcccaggtactcaggaggctgaggtaggaggatcactgatgtatgtgtgtatacacacacacatgtatttgtagattgggggtccccaagaccacccttaggtttgacaccttgctagaagaactcagagaatgtattaaaaactattatgctcatggtcatggtttattacagcaaaaagatacagattaggatgggcgyggtggctcatgcctgtaatcccagcactttgggaggctgaggagggaggatcacttgaggtcaggagttcgagaccagcctgaccaacatgatcaaaccccaactctactaaaaacccaaaaattagccgggcatagtggtgggcgcctgtaatcccagctacttgggaggctgaggcagaagaatcgcttgaacccaggaggcacagattgcaatgagcctagattgtgcctctgtactccagcctggatgacagagtgagactcagtctcaaaaaaaaaaaaaaaagatacagattaaaatgagctagggaagagacacatggggcaggccgggcacaggagagtttcatgtatggaacctctagttgtcgcctcccagt

SEQ ID NO: 917942 - DNA, 725 bp, Homo sapiens
ataggcccctgccaccacacccgtctaattttggtattttttcgtagggatgggttttcgccatgttggccaggctggtctccaactccttacctcaagcgatccacctgcctcaccttcccaaagtgctgggattacaggtgtgagacacagtgcctggcctgttttctgttttgttttttttttttttttagacggagtctcacgctgttacccaggctggagtgtaatggtgcaatctcagctcaccgcaacctcygcctcccaggttcaagtgactctgctgcttcagcctcccaagtagctgggattacaggaacgcaccaccatacccggctaattttttctatctttagtagagatggggtttcatcatgttggccaggcttgtctcgaactcctgggctcaattgatctgcccacctcggcctcccaaagtgctgggattacaggcatgagccacggcacccggcttttttttttttttttttttttttttttgagacaaggtcttgttctcttgcccaggctagtgtgcactggtgtgatcatggctcactgcaacctttgtcttccagcctcatgcaatcctcccaccacagcctcctgagtaactggaactataggtgtgcaccactacatctggctaatttttaaaatacacctgcattttcttttcattgtacccctagcactgtgtggcacctgtcacatagtaggtgtgc

SEQ ID NO: 917943 - DNA, 607 bp, Homo sapiens
acagttgcatgccaccatacccagctaattttttattttttgtagagacgagggggccttgctatgttgcccaggctggtctcaaactcctggcttcaaataatcccccatcttggctacccaaagcactgggtttacaaacatgagctrctgtgcacagcctatttccaccttcttattaactgatttttattcgcttcattttttatgccttttcttctttccctaaatttcccttcttcttcctcactcccagcagacaactttgcatcttatttcacagagataaaagaagcaattagaagataacttccacatgccccccacaacatctagctacttcactgcatgagggacccatctataaccctttcttctattgaggataaactgctcattctcctagccaaggccagcttcaccacttatccactaaataccatctcttcttgcctacccaatgaccttgctcaaacaattctctactcttttaaatcatcaatctttcaatctctgctggatcattcccataaccatacatatataggattgtttttccattttaaaataactttttttctggactctatcttctccttcagctacc

SEQ ID NO: 917944 - DNA, 607 bp, Homo sapiens
acagttgcatgccaccatacccagctaattttttattttttgtagagacgagggggccttgctatgttgcccaggctggtctcaaactcctggcttcaaataatcccccatcttggctacccaaagcactgggtttacaaacatgagctactgtgcrcagcctatttccaccttcttattaactgatttttattcgcttcattttttatgccttttcttctttccctaaatttcccttcttcttcctcactcccagcagacaactttgcatcttatttcacagagataaaagaagcaattagaagataacttccacatgccccccacaacatctagctacttcactgcatgagggacccatctataaccctttcttctattgaggataaactgctcattctcctagccaaggccagcttcaccacttatccactaaataccatctcttcttgcctacccaatgaccttgctcaaacaattctctactcttttaaatcatcaatctttcaatctctgctggatcattcccataaccatacatatataggattgtttttccattttaaaataactttttttctggactctatcttctccttcagctacc

SEQ ID NO: 917945 - DNA, 556 bp, Homo sapiens
aatagcaaaaagccttctgagctttatatatataatgtatataatataatatatatttaatataatatataatatataatcccaatgttcaacatgagatttgagtggggacacagagcgaaaccatctcattctgccccggcccctcccaaaagtcatgttcttctcacatttcaaaacacartcatgcctcccgaacagtcccccaaagtcttagctcattccagcattaactcaaatgtccaagtcaaaagtctcatctgacacaaggcaagtccctcctgcctataagcctgtaaaataaaaaacaagttagttgcttccaagatacaatggcagtacaggcattgggtaaatgctgtcattccaaggggagaaattggccaatggggctataggtcccatgcaagtctgaaacccagcagggtagtcgttaaatcctaaagctccagaataatctccttcggctccatgtctcacatccagggcacactgatgcaacgggtgggctcccacagccttgggcagttccacccctgtggcttggcagggtaca

SEQ ID NO: 917946 - DNA, 556 bp, Homo sapiens
aatagcaaaaagccttctgagctttatatatataatgtatataatataatatatatttaatataatatataatatataatcccaatgttcaacatgagatttgagtggggacacagagcgaaaccatctcattctgccccggcccctcccaaaagtcatgttcttctcacatttcaaaacacaatcatgcctcccgaacagtcccccaaagtcttagctcattccagcattaactcaaatgtccaagtcaaaagtctcatctgacacaaggcaagtccctcctgcctataagcctgtaaaataaaaaacaagttagttgcttccaagatacaatggcagtacaggcattrggtaaatgctgtcattccaaggggagaaattggccaatggggctataggtcccatgcaagtctgaaacccagcagggtagtcgttaaatcctaaagctccagaataatctccttcggctccatgtctcacatccagggcacactgatgcaacgggtgggctcccacagccttgggcagttccacccctgtggcttggcagggtaca

SEQ ID NO: 917947 - DNA, 620 bp, Homo sapiens
ataccctttctaatgaagtgagaaaacaacagtcttctgtaacactcaacttggtaaacagatcctaaaccaaagttacttccattttaaaaggttatattcctgagcagatctttcgaattgtaggcagaatctctaatttctagcattcaaatgtgatgataaggaagttgggttagaatcagcatatctcagccaggataggtggctcacgcctgtaatcccagcactttgggaggccaaagygggtggatcacgaggtcagaagattgagaccatcctggctaacgtggtgaaaccccatctctactaaaaatacaaaaaattagccgggtgtggtggcgggcacctgtagtcccagctactggggaggctgaagcaggagaatggcgtgaacctgggaggcggagcttgcagtgagctgataccacgccactgcactcagcctgggggacagagcgagaatccctctcaaaaaaaaaaaaaaaaaaagcatatctcatgaatctgcactgggtcttccttagctcttccagctatccttctctctgcatcgggctcaccattctgatcctcctctttggttaagttttctcttggaagaacctttctttctccag

SEQ ID NO: 917948 - DNA, 775 bp, Homo sapiens
gccatggttagaaggttggagctttcagcaccttcctacaccttggggaagggagacgggctggagattgggttaatatgcctctgtaatggagcctccgtgaaacccctcaaaggtgggattgggggcttctggttggtgaccacctggtggtgcggggagggtggcatccagtgagggcacggtgctctgcgccctccccacagcttggcctgtgtgcctctccatctggctgttcagctatatcmtttgtgatagactttaaaataaacctgtaaatagaaatgtttccttgagttttgcaaaatgttatagcacactattgaacccaaagagagggtcatgggaactcttgatttatatagcctgtcggttgggagaatgagaagccctgtcttgcgactggcatctgaattgggggcagtcttgtgggactgaggctttacctgtggaggctgatgccaactccaggaagatagcatcagaattgaattgaattggaggacacccagttggggtccccagagaagtggagaattgcttggggcagaaaatccacacttttggtgtcagaggtgtgtaagagtgtagagaagaaatggaatgttttcctgtttccatttttctttcttctgaggggaacgtcttggacacctgtgctgattagctcttggctgttctagggcagagagctctccaccatgcacaccccagcccatgagactgactgtaggctgtgggagcacagggtccacatctgtgtccccagtcccca

SEQ ID NO: 917949 - DNA, 488 bp, Homo sapiens
ccagagagaccaagccatggttagaaggttggagctttcagcaccttcctacaccttggggaagggagacgggctggagattgggttaatatgcctctgtaatggagcctccgtgaaacccctcaaaggtgggattgggggcttctggttggtgaccacctggtggtgcggggagggtggcatccagtgagggcacggtgctctgcgccctccccacagcttggcctgtgtgcctctccatctggctgttcagctatatcctttgtgatagactttaaaataaacctgtwaatagaaatgtttccttgagttttgcaaaatgttatagcacactattgaacccaaagagagggtcatgggaactcttgatttatatagcctgtcggttgggagaatgagaagccctgtcttgcgactggcatctgaattgggggcagtcttgtgggactgaggctttacctgtggaggctgatgccaactccaggaag

SEQ ID NO: 917950 - DNA, 775 bp, Homo sapiens
gccatggttagaaggttggagctttcagcaccttcctacaccttggggaagggagacgggctggagattgggttaatatgcctctgtaatggagcctccgtgaaacccctcaaaggtgggattgggggcttctggttggtgaccacctggtggtgcggggagggtggcatccagtgagggcacggtgctctgcgccctccccacagcttggcctgtgtgcctctccatctggctgttcagctatatcctttgtgatagactttaaaataaacctgtaaatagaaatgtttccttgagttttgcaaaatgttatagcacactattgaacccaaagagagggtcatgggaactcttgatttatatagcctgtckgttgggagaatgagaagccctgtcttgcgactggcatctgaattgggggcagtcttgtgggactgaggctttacctgtggaggctgatgccaactccaggaagatagcatcagaattgaattgaattggaggacacccagttggggtccccagagaagtggagaattgcttggggcagaaaatccacacttttggtgtcagaggtgtgtaagagtgtagagaagaaatggaatgttttcctgtttccatttttctttcttctgaggggaacgtcttggacacctgtgctgattagctcttggctgttctagggcagagagctctccaccatgcacaccccagcccatgagactgactgtaggctgtgggagcacagggtccacatctgtgtccccagtcccca

SEQ ID NO: 917951 - DNA, 676 bp, Homo sapiens
tatacacgtgccatggtggtttgctgcacccatcaacccgtcatctacattaggtatttctctgaatgctgtccctcccccagccccccacccaccgacaggccctggagtgtgtgatgttcccctccctgtggccatgtgttctcattgttcaactcccacttatgagtgagaacatgtggtatttggttttctgttcctgtgttagtttgctgagaatgatggtttccagcttcatccatgtccttgcaaaggacatgaacccatcctttttatggctgcatagttttccatggtatatataagccacattttctttatccagtctatcattgatgggcatttttgttggttccaagtctttgctatcgtgaacagtgctgcaataaacatacgtgtgcatgtgtctttatagtagaatgatttataatcctttggatatatacccagtaatgggattactgggtgaaatggtatttctggttctagaaccttgaggaatcaccacactrtcttccacaatggttgaactaatttacactcccaccaacagtgtaaaggcgttgctatttctccacatcctctctagcatctgttgtttcctgacttttaatgattgccattctaactggtgtgagatggcatctcattgtggttttggtttgcgtttctctaa

SEQ ID NO: 917952 - DNA, 824 bp, Homo sapiens
tctaatcacttggtctttctggtgaccagccccctcctgaggctataagtggggctcatctcattagcataaactcaggttatccaaaaggactcattataaataacaaaagacactctatcactcaggaaattctaagtgttttaggagctctgtgctagtgtacaaagaccaaatgtayatatatttttgtattacaccataggaaaagatatgctgcagcacgttactgcactatgcatgaataaatatccctcaagaagatagtcacattcaaattaaattaaaataattatggaaactgaccaggtggttgaaatgaaaaaaaattaaatgtgattggtattattttattttattttctgagacagggtctcactctgttgcccaggctggagtgcagtggtgtgatctcttactgcaacctccgccacgtgggctcaagcaatcctcccatctcagcctcccaagtagctgcaactataggcatcaccatcatgcccagctaacttttatattttttatagagatggggtttcaccatgttgcccaggctggagatgtgattggttttaaatagatattacttttgttttaaaaataatttaattgcaagttttacaatttaattgttaataataggttaactgcaagaaataaaaataaaattctaagcccccaactgactgaatggatcctctcttgcccatgggaaccccagagaaaccctggaagacagaattaatggccacaatgggaagggagatcagaaatacctcattataccccctcccttactaatagctattaggttttattctgta

SEQ ID NO: 917953 - DNA, 824 bp, Homo sapiens
tctaatcacttggtctttctggtgaccagccccctcctgaggctataagtggggctcatctcattagcataaactcaggttatccaaaaggactcattataaataacaaaagacactctatcactcaggaaattctaagtgttttaggagctctgtgctagtgtacaaagaccaaatgtatatatatttttgtattacaccataggaaaagatatgctgcagcacgttactgcactatgcatgaataaatatccctcaagaagatagtcacattcraattaaattaaaataattatggaaactgaccaggtggttgaaatgaaaaaaaattaaatgtgattggtattattttattttattttctgagacagggtctcactctgttgcccaggctggagtgcagtggtgtgatctcttactgcaacctccgccacgtgggctcaagcaatcctcccatctcagcctcccaagtagctgcaactataggcatcaccatcatgcccagctaacttttatattttttatagagatggggtttcaccatgttgcccaggctggagatgtgattggttttaaatagatattacttttgttttaaaaataatttaattgcaagttttacaatttaattgttaataataggttaactgcaagaaataaaaataaaattctaagcccccaactgactgaatggatcctctcttgcccatgggaaccccagagaaaccctggaagacagaattaatggccacaatgggaagggagatcagaaatacctcattataccccctcccttactaatagctattaggttttattctgta

SEQ ID NO: 917954 - DNA, 622 bp, Homo sapiens
cttatcagttcttctggaagcagttgtctctattactcccagatgtccagcaggctgtgtgttccagagccattcagcccagagtgacacaggaacagaccaggagagggggactgagttgctcccaaagtcctgccacaggacctccaattccatgcacaagggcagctcagcctctgtcacttgcagccaagacatcctaactagtggtggcccaatggtgccatctcaccacggcaggcttgacacacttttaaagttgtatttcctacaattctgttgtttttccccaggamttgctacagaatttgcagggccttgtgaatgtgaaaatgtagggtctcaagttcgataattattaagaatttcctgatagtgacagcagagcataaaaccaaaggcagagcccatccaagcctggggccctgtgagagtgaatgcgtcacacacacatgaagccagccctgaccttgattcttgttttgcttttgttttaagacagggtctcactctggttgcccaggctggagtgcagtggtgaggctcactgcagccttgacctcctgggctcaggtgattctcccaccttagcctcctaagtagctgggattacaggtgtgtg

SEQ ID NO: 917955 - DNA, 478 bp, Homo sapiens
ataactcagctgcagccttcaactcctgaactcaaacaaccctcatgtcttagcctcccgagtagctgggactacaggcacatgccacgaggcccagctttttttttttttttttagagctagtggtcttgctctgttgcccaggctggtattgaactcaagcgacatcctcctgcctcagcttcccaaagcatggggattacagttgtgagtcaccatgcctcgcctggatcttgtttttctaacccactcagcaagggtattatgtgtgtgtatatatatatttttttaattgkatttttttggagatagagtctcactctgtcacccaagctggagtgcagtggcatgatcttggctcactgcaacctccacctcccgggttcaagtgattctcctgcctcagcctcctgagtagctgagattacaggcatgtggcaccatgcccggctaaacaaggctatatattttaattggg

SEQ ID NO: 917956 - DNA, 564 bp, Homo sapiens
gggtggggacttggagaacttttctgtcttacaagaggattgtaaaatgcaccaatcagcactctgttaaatggaccaattggcactatgtaaaatggaccaatcggcactctgtaaaatggacccatcagaaggatgtgggcggggacaaataagggactaaaacctgggcattccagccagtagcagcaacctgctagggtccccttccacactgtggaagctttgttctttcgctcttcacrataaatgttgctactgctcagtctttgggtctgcaccacctttaagagctgtaacactcaccacaaaggtcgttggcttcattcttgaagtcagcaagaccacgaacccactgcaaggaagaagctccagacatatctgaaagaacaaactctggacacaccatccttaagaactgtaacactcactgagaatgtcagcggcttcattcttgaagtcagcgagaccacgaacccaccagaaggaagaaactctggactcattaacacacacagttaaaggctgacatgaagtgacttgagtatttttgtcatcttccac

SEQ ID NO: 917957 - DNA, 653 bp, Homo sapiens
taatgtaacagatttctttaggagtttttttaatacatattggaccacttaagcatatctggtataaacattagtaggtttaggatttttgcagcatttcttataacgtacattggcttttggtgctgtctttgtctgattttggttagtggattatgttagtcttacagttgaacattctgttttggtctctatctctccctatatgtacatatttttgagtattgctttggcttatagcatttctagttttaaatgtgctttctttgcccagtttttatgtacaattttcattttaattttctctttagcccaaatagtgtttttcttaattaccccaaggtaagaagttcacttgaattttctttttttttttttttttgaggcagagtctcgctctgtcgcacaggctggagtacagtggcacaatcttggctcaccaaaaatctccacctcctgagtccaagtgattctcctgcctcagcctcccaagtagctgggattacrggcatgtgccaccacgcccggctaatttttgtatttttagtagagacagggttttaccatgttggtcaggctggttgcgaactcctgacttcgaaagtgatctgcctgccttggcctcccaaagtgctgggattacagacgtgagc

SEQ ID NO: 917958 - DNA, 488 bp, Homo sapiens
ctagtagttggaactctaggtgcacaacaccacactggttattattattattttttaattttttatagagacaggttttcaccatgttgcccaggctggtctcaaactcctgagtttaagcaatcctcccaccttggcctcccaaagtgctgagattacaggcatgagccactgcatccagcatgcacgtctctttcattgactgtttctgrgatgtatccttcacaatgaaccagtaataggaaatgaactggccagatgtggtggctgacatctgtaatcccagcactttcagaggctgaggtgggaggatcacttgagaccaggaatttgttgtggccagcctggccaacacaacaagaccccatctatacaaaaaaaaaaaaaaaaagaaactagccagatgtggtggtgcaggcatgtagcctcagctactagggaggctgaggtgggagaaccactggagcccagacaatcaaggctgcaat

SEQ ID NO: 917959 - DNA, 818 bp, Homo sapiens
ccaaaaatgtatatcacaacacccaagcttcatacacctggaaagccttcccaaagacaggtacaaagaagcccagactatgaagactacagtaaatacctaactcttccacacccagaaaccaatgaacatccataagcatcaagaccagcaagaccagaaaaacatgacttaaccaaatgtattagtccattctcacactgctataaagaactacctgagaatgggtaatttatgtagaaaagaggttggatcggctcacagttctgcagggtgtacaggcttctacttctgggaaggcctcagaaaattcacaaycatgatgaaaagcaaaagagaaataagcacatcttcatatggctagcaagagagagacagggagcaaagggggtggtgttacacacttacaaacaaccagattttgtgagaactgtatcatgagacagccctaaagggatggtgttaaaccattacaatccaatcacctcccaccagaccgcacctccaacactgggaattataattcaacataagatttgggtgaaaatacagagccaagccatatcgttctgcccctgcctcccccaccgaatctcatgtccttttcacatttcaaaacacagtaatgacttcctaacagtctcccaaagtcttaactcattccagcattaactcaaaagtccaagtccaaagtcacatctgagacaaggcaggtcctttccacctatgagcctgtaaaatcaaaaacaagatagtcacttccaaaacacaatggaggtataggcattgggtaaatgctccctttccaaaaaggagaa

SEQ ID NO: 917960 - DNA, 818 bp, Homo sapiens
ccaaaaatgtatatcacaacacccaagcttcatacacctggaaagccttcccaaagacaggtacaaagaagcccagactatgaagactacagtaaatacctaactcttccacacccagaaaccaatgaacatccataagcatcaagaccagcaagaccagaaaaacatgacttaaccaaatgtattagtccattctcacactgctataaagaactacctgagaatgggtaatttatgtagaaaagaggttggatcggctcacagttctgcagggtgtacaggcttctacttctgggaaggcctcagaaaattcacaaccatgatgaaaagcaaaagagaaataagcacatcttcatatggctagcaagagagagacagggagcaaagggggtggtgttacacacttacaaacaaccagattttgtgagaactgtatcatgagacagccctaaagggatggtgttaaaccattacratccaatcacctcccaccagaccgcacctccaacactgggaattataattcaacataagatttgggtgaaaatacagagccaagccatatcgttctgcccctgcctcccccaccgaatctcatgtccttttcacatttcaaaacacagtaatgacttcctaacagtctcccaaagtcttaactcattccagcattaactcaaaagtccaagtccaaagtcacatctgagacaaggcaggtcctttccacctatgagcctgtaaaatcaaaaacaagatagtcacttccaaaacacaatggaggtataggcattgggtaaatgctccctttccaaaaaggagaa

SEQ ID NO: 917961 - DNA, 631 bp, Homo sapiens
ttttactccttagagggtgtcggtccattgtttgcaaagccctagccttaaatgagttatactcagttatatgagagctttagaagactccaacaatagagagcagccctggattcactctccctacccacgctggccccatcctgccccataccatgtattcagactgtacctggaccacaaactgggcctgactttgagtagacatttgagagctttctacagttttgggagtcccagaaggttccagactgaacttccagctcccttctcagagtatagctgatttggatcataaatctgtggacatggaactggaagggactttcttttttttttgtctttgagacagagtcacactctgtcgcccaggctggagtgcwgtggcatgatcttggctcactgcaacctccacctcctgggttcaagcgatcctcctgcctcagcccccctagtagctgggactacaggcgtgtgccaccatgcccagctaatttttgtacttttagtagagacggggtttcaccatgttggccaggctggtctcaaactcctgagctcaagtgatccacccgtcttgccctcccaaagtgctgggattacaggcgtgggctactgcacccggccagga

SEQ ID NO: 917962 - DNA, 569 bp, Homo sapiens
cacaactaccagcccaaagtgagtactgccaggccagtaccaatgttcacttaaagccccaggactgttcagtcagactctgatgaatgctgccaggcctggggcccactcttcagggcaatggtctccgctctggccgagggcaggtccagaattgctctccaagagcctaggcctggctccaggaccccaagatcctgcttgctgctctatcccactgtggctgagctggcacctaaggtgtaagacaaagtcctcttactttccctycttcttttttcaagcagaaggagtctttctccatagctaccactatttggaacatgctgagtctcacctgaagccagcacatctcagagtctcactcaaggcccatggcatactatttgagtatggctgatggttatttagggccgaagggctctttagtcagcaggtgatgaatcctgcaaggactgggtccttttattcaaggcaccaagttcccttctggtccaagttgtgtctagaaatgtcatacaggagctagagtgattttgatttaggctaaagtttaaggcttaccacct

SEQ ID NO: 917963 - DNA, 589 bp, Homo sapiens
tacttcggctttccagcagaagtaactgcagctctggcatgcgggaggtaagacccccatacatacccctaggaaagaggctaaatcaaggaggctgagcagtgacagtctgcaggccccacttccaccacacctcacaggatagacccactgtcttggaattccagccagcygccagtagcagcattgcatctccctgggatgagctccgtgggggcagggcaggcgatctgcaatctttgctgtttgggtgaccttgtcagtccttccagccttccggctttggaaaggacaggcccacctgaggtggaagggatcccgcagtacagcatagctgttactgaaaaacgtggccagactgctttcttaagcaggtccccaatcctgttcctgcttattgggtagtatctcccaaccggggcctctagccaccctgctggtgttctccacccgacagagatttgaagactctctggggtggagctcccagagggagggatgggcctctatctatgctgtttgagcaacttagctgttccagccttcaggatttggagtgtccaagccaaccgggcaaaagggatccccc

SEQ ID NO: 917964 - DNA, 698 bp, Homo sapiens
tataacaaagcaaaaagtcatgggggagagatgctctgccgcaagcactcatgacaaaggattgttcatctttgtgtaactgctgtctttctcaagaatctatattattatctttaaagcaaacttactttttttttttttttttgagatggagtcttgctctgtcgccaggctggagtgcagtgatgcgatcttggctcactgaaacctcccactcctgggttcaggcgattctcctgcctcagcctcctgagtatctgggattacaggtgcgcatcaccacgcccagctaattttgtatatttttaggagacacggggtttcaccatgttggccagcatggtctcgatctcctgacctcatgatccacctgcctcagcctcccaaagtgttgggattataggcatgagccacagcacctggccttttttttttttaaatatactttaaattctgggatacaygtgcagaatgtgcaggtttgttacatagatatacgtgtgccatggtggtttgctgcacctatcaacccatcatctgcattaggtatttctcttaatgctatttttttttttttttttctgggatggagtgtcgctttgtcatccaggctggaatgtagtggtgcaatcttgactcactgcaacctccgcctcccaggttcaagtgattctcctgcctcagcctcctgagtagcc

SEQ ID NO: 917965 - DNA, 698 bp, Homo sapiens
tataacaaagcaaaaagtcatgggggagagatgctctgccgcaagcactcatgacaaaggattgttcatctttgtgtaactgctgtctttctcaagaatctatattattatctttaaagcaaacttactttttttttttttttttgagatggagtcttgctctgtcgccaggctggagtgcagtgatgcgatcttggctcactgaaacctcccactcctgggttcaggcgattctcctgcctcagcctcctgagtatctgggattacaggtgcgcatcaccacgcccagctaattttgtatatttttaggagacacggggtttcaccatgttggccagcatggtctcgatctcctgacctcatgatccacctgcctcagcctcccaaagtgttgggattataggcatgagccacagcacctggccttttttttttttaaatatactttaaattctgggatacacgtgcagaatgtgcaggtttgttacatagatatacgtgtgccatgktggtttgctgcacctatcaacccatcatctgcattaggtatttctcttaatgctatttttttttttttttttctgggatggagtgtcgctttgtcatccaggctggaatgtagtggtgcaatcttgactcactgcaacctccgcctcccaggttcaagtgattctcctgcctcagcctcctgagtagcc

SEQ ID NO: 917966 - DNA, 688 bp, Homo sapiens
ggtctcaaactcctggtttcaagtaatccgtccacctcagcctcccaaagtgctggaattacacaggtgtgagccaccatgcccaggcaggcatgtgactatttttggccaatagaatatacggaagtggcattgccagttcraagcctgggtgttaagagattgggccttaagagattccacttattctcttggaactctcgcagctgttatgtgaacaagcctgggctatcctgcctaagagaccactggaacagggactagttatcctagctgaagctgtcctagtcagtcaccagctaatccaatagctgaccacagatacatgagtaagcccaactgagaccagaaaaatctttagctgagcccaggctaaagtgccaatccatgaaatcttgagctaaaaaaacggttgctgttttaaggcactaagttttggggtggtttgttatgtagcattgttgtggcaattgataactgatacactgttttattcagtgtaattaatgctgactgctgtaacaaaccaaatatctcagtggtttaacccaatcagagtttatttctcacccctgcaaagtctgatacaggttggggctctcccagggagctcttttccaagcagtgaccttgcccccgaatcctgcctccaccccaggctttccctggaatctattcctgaatcctc

SEQ ID NO: 917967 - DNA, 619 bp, Homo sapiens
gtatatccatacaatggaatcttatccagtcataaaaaggaatgaagtacaaatagatgctgctacaacacagatgaaccttggaaacattatgctaaatgaaaagtgccaatcacaaaagaccacacattgtacaattctctagatatgaaatgtatagaatatgcaactctatagccaggcctggtggcaggcatctgtagtcccggctacgcagaaggctgaggcaggagaatggtgtgaacccgggaggcggagcttgcagtgagccaagattgcgccacygcactccagcctgggcaacagagcgagacttcgtctcaaaacaaaacaaaacaaaacaaaacaaaagaatatgcaactctatggagacataaagtagattagtggtttataggggatgggggagagaggaaggcagaatgacttacaggatttctttttgggatgatgaaaatgttctggaattagatagtggtgacggttgcacaactatggatatactaaaaaacattgaactgtatactttaaatggatgcattgtatggtatgtgaattgtatcttaaaagttctgtttccaaaaaaaaagtcagatggggctgtacttatctgaaggct

SEQ ID NO: 917968 - DNA, 822 bp, Homo sapiens
cagcacagaggctcctcaaaaaaattaaaaactgaactaccatatgatccagcaattctacctctaggtatgtacccaaataattgaaagcaaggtcgcaaagaaatagctatacatcaatgttcacagtagcagtattcacaatagctgaaacatggaagcaatccaagtttgcatcgacagatgaatggataagcaaaatacatacaacggaaaatcattttatcttaaaaaggaagaaaaattctcacatatgctacaacataaatgaacctcaagaacatcatgttaggtgaartaagtcagtcaaaggaagacaaatactaagctgggtgcagtggtgcccacacataaccccagctacttgggaggctgaggcagaaagttcacttaaacccaagagtctgacaccagccacacggttaggcctcatcttcaaaaataaaaaggacaaatactgtatgattctacttatatgacgtacttagagtaaacaaaatcatagagacagaaagtggaatagtggttggcagtggctagggggaagaagaaatagggagttattgtttaatagacacagagtttcacttttgcaagatgaaaacagttctggaggtagatggtggtgatgtttctagaacatgaatgtacttaataccactgagctgtacatttaaaaaaatggttacgatggtaaattttatatgaatttcactacaatttaaaaaactgggcccaggtacggtggctcatgcctataatcccagcactctgggaagccaaggcaggcggatcacttgaggtcaggcgttcgagaccagc

SEQ ID NO: 917969 - DNA, 643 bp, Homo sapiens
ggtttgagagcagacaaccagtctgaccaaaatttattaggcgggaatttcctcgtcctaataagcctgggagcgctatgggagactggggcttatttcatccctacagcttcgaccataaaagatggccgccccccagaagcagccattttagaggcctaccctcagggacgcattctctttctcaaggatgtcccttgctgagaaaaagaattcagcaacatttctcccatttgcttttgaaagaagagaaatatggctctgttccacccggctcaccggcagtcagagtttaagattatctctcttgttccctgaacattgctgttatcctgttctttcaaggtgcccagatttcatattgttcaaacacacatgctctacaatttgtgcagttaacgcaatcatcacagggtcctgaggcgacatacagcctcctcagcttacgaagatgatgggattaagagattaaagataggcataggaaatcacaagggtattgrttggagaagtgataagtgtccatgaaatcttcacaatttatgttcagagattgcagtaaagacaggcgtaagaaattacaaaagtattaatttgggaaactaataaatgtccatgaaatcttcacaatccacgttcttct

SEQ ID NO: 917970 - DNA, 609 bp, Homo sapiens
acaacttaataggaaaataaaatctaataatctgatttaaaatgggcagaagacttgaatatctcaaaagaagacatacaaatggcaaaccaatatataaaagagttctcagcatcactaatcagcagaggaatgcaaatctgaactacaatgagatatcatcttaccccagttaaaacggctttcatgcaaaagacaggcaatarcaaatgctggcaaagatgtggagaaaatgaacccttcatgcactgttgatggaaatgtaaattagtacaaccaccatggagaacattttgtaggttcctccaaaaaactaaaaatagaactaccatatgatccaggaattctcttgctaggtttatatccaaaaaaaagggaaatcagtatattgaagagatatctgccctcttatgtttattgcagcactcttcacaatagccaagatttggaaaaagcctaagtgtccattaatagatgaatggataaagaaaatgtagtgcatatacacgaatgaaatactattctgccataaaaaagaatgagattctgtcatttgcaatatcatggttggaacttcaggccattatgttaagtgaaataagtcaggca

SEQ ID NO: 917971 - DNA, 783 bp, Homo sapiens
gggtatttggtggaagaaatttctaagcagcaaagcattcaagaggtgacttggttgctgttaaaagcattccgttttataagggaagcagagcataagagtttggaaaatttgcagcctgatgatgcgatagaaaagaaaatctgatttttggaggagaaattcaagctggctgcagaaatttgcattagtaatgagaagccaaatgttaatccccaagacaatggggaaaatgtctccagggcatgtcagaggtcttcacagcagcccctcctatcataggcccagaggcctaggaggaataaatggttttgtgggcctggtccagggtccctgtgctgtgtgcagtctacggacttggtgctctgcatcctggccactctagccatgactaaaatgggccaatgtacagctcaggccatggcttcagagggtgcaagccccaagccttggcagcttccacatggtgttgagccagtaggtgcacagaagtcaagaactgaggtttgggaacctccacttagatttcagaggatgtatggaaatgtctgaatgcccaggcagaagtttgctgcaggggcaggtctctcatggagaacttctcctagggaagtgcagaagggamatgtgggggtcagagccctcacacagcatccttactggggcactgcctagtggagctgtgagaagagggccaccatcctccagacctcagaatggtagattcacctacagcttgcactgtgttcctggaaaagctgcagacactcacttttcagccca

SEQ ID NO: 917972 - DNA, 759 bp, Homo sapiens
ccagacatactgcaaacagcttctgctgtgggctgcagcatctggatgaggggaacaccgtggctcctcaaagctcggagatgcaaggaactacagagccccacagcatgtcacagccctggcttggagagcctcgaggtctgggatcctagaaggaccacagctctttcctcctccttgtcacctgcagcagggcaagcaggggtgggagggctggagggagatgtttcagcccatttgtattacagctctttcagtccatcccactccaactgtggctcctgggctggcctggccctgcaactacttcccattgcatggggtggctgcccagcaccagyggagggcaggagggctaccatgttacagcctcttttgttcctgccagcatcttggtgagctggccagagaagttatagctcttttcactcctgctgttaagcagatcccaagttcttgtcccacatccgggaagaacaaggttacttggacaactggagggtaagcaaggtggagaagaactttcttgggtgactgaacagctctcagtgaagaggaaacctgaagtggagagttcctacctacaggcggttagtcccaaccagtgcctgactctggcagagtctggggtttttatgggctcagaatggaggaaatgcatgctgattggtccacgggcaggaggaggtatgtgccaattggttcatgggaggacatggaaaaagcatcacttgattggctaaaaggcatcaaagaagt

SEQ ID NO: 917973 - DNA, 564 bp, Homo sapiens
tgattggctgggagtccagagagagcaaatgcagaaagcaaaatgggtctttttctgtgagctgggaccaacttttcctctgctgccttatacatcagaactccaggatagctggcttttggactcaagaacttacatcagcagtccctgcaggtctcgaggctgttagcctcaggctgagagttacaccatccgcttccctggttttgaggccgtcagatttggacacagccaccctaccagcgggatcccacaggtctccagcttttggagagtggcctgtcrtggcacttctccgccaccataattgcatcatatgtttatgtagataaatagatatcctattagttctgtctctctggagaacagtgactaatacaaatttggtgttagaaaaagtaaatataattccttcttactttatttcttccaacacagtggaagagatctgtgaaattttcccttgcaaaaaggctcttataaattaagcatatgtagctctttaatggggaaggacaaaactgttaaagctaattattattggtactgcaaaagcagaaattg

SEQ ID NO: 917974 - DNA, 664 bp, Homo sapiens
attgtgcccacccagattaagggtgggtctgcctttcccagcccactgactcaaatgtcaatcttctttggcaacagcttcacagacacacccaggatcaatactttgtatccttcaatccagtcaagttgacactcagtattaaccatcacaggcacgctagttatgttcgccatcttgatttcacaccacaacctcagtatttttattatttctattttacagatgaagaaagtaacaatcatagcaatcaggtaacttgcccgaagttgtcaaatagctcattattggtagaggaaggattcaaaaagatcttttytaattttttttctgctgagtcagtctccttaatctaccttgactgcccctggagaggcacaactgccttcctcacccagcattctgagaactttggctgtgaagacaaatagcccctgggccctgcttttcctaaagccccaccggttcccaccgtgaccatgatcccgtgccctaactagactgtctctcttacaaagcccaggatgatgagaatttcaaatactcttgaagaaagtggctgaagcctgaccttcctagtgctaagacctgaggctttagctgtcaaccctgcttctgtttggggtcatttgctgacacttgccattaactccttcctgtacgg

SEQ ID NO: 917975 - DNA, 570 bp, Homo sapiens
agtataagtacatcccatgcaatattcaggatgtactaatactaaaaaattattcattgctctgtagagtacaacgaaagcccggacatctcacagaataaacaaaaatagttcttaaaagttgaggaagcatcaatactgtacataattctacttcratatttatatgcctctaacacccactaaggttcttcaggaatgttctcagctctctgagacgggattttctcacctttctctctcctggtcattcaggagtccccaaagcttcttgtcaaccctagatattatcagagattctctaaggctccttctcatgcttgttggttctaagtgcaactctgttgagaccacagacctctctagaaagaggctgctggatttgaggctcctccattcaaagggccaaccctttcctgagattccaccgcttctgagcgctccagcagtcgctgccttgcacatggttggacctccccagtacaacgttgaacacagcagtgacagcagatgtccttgtttcatttgcaatctcacagagaaagctttcaatatttcttttttcttttt

SEQ ID NO: 917976 - DNA, 592 bp, Homo sapiens
caagcccttccttgacgtggcatctgggggtgcatctctgtgtctaccacgttttggggtgaacttgacaacgtgattttaaagttcaacaagagggatcagtaaacaagaagagccaacacatttttgaaaaaggaaaatattgagaagggatttgttctgtccaktggtttcttttttcttttctccttttttttttttttttaattttactttaagttctgggatacatgtgcagaacgtacaggtttgttacataggtgtacatgtgccatggtggtttgctgcacccatcaacctgtcatctaggttttttgttgttcctggtttttttttttttttttttgtgagatggagtcttgctctcttgctctgtcgaccagtgcagtggcacaatctcggctcactgcagtctccacctcctgggttgaagcaattctcctgcctcagcctcccaagtagctgggattacaggcacataccaccacccccagctaatttttgtatttttcgtagaaacagggtttcaccatgttgtcccggctggtctcgaactcctgacctcaggtgatccaccctcttctgcctccca

SEQ ID NO: 917977 - DNA, 592 bp, Homo sapiens
caagcccttccttgacgtggcatctgggggtgcatctctgtgtctaccacgttttggggtgaacttgacaacgtgattttaaagttcaacaagagggatcagtaaacaagaagagccaacacatttttgaaaaaggaaaatattgagaagggatttgttctgtccattggtttcttttttcttttctcctttttttttttttttwaattttactttaagttctgggatacatgtgcagaacgtacaggtttgttacataggtgtacatgtgccatggtggtttgctgcacccatcaacctgtcatctaggttttttgttgttcctggtttttttttttttttttttgtgagatggagtcttgctctcttgctctgtcgaccagtgcagtggcacaatctcggctcactgcagtctccacctcctgggttgaagcaattctcctgcctcagcctcccaagtagctgggattacaggcacataccaccacccccagctaatttttgtatttttcgtagaaacagggtttcaccatgttgtcccggctggtctcgaactcctgacctcaggtgatccaccctcttctgcctccca

SEQ ID NO: 917978 - DNA, 545 bp, Homo sapiens
cctcagcctggacctcattgtccatatcactatcagtattgtggtcaaaaccattcaacaagtctctaggaagttccaaactttcccatgtcttcctgtcttcttctgagccctccaaactgttccaccaacctctgcctgttactcagttccaaagttacttccacatattcaggttatctttgtagcagtatcccactctgccagtgccaattctctgtattcgtccattttcacactgctataaagaastccccaagactgggtaatttataaagaagacaggtttaattgactcaccattccacatggctggggaggcctcaggaaacttacagtcatgacagaaggtgaaggggaagcaaggcacatcttacatggtggcaggtaagaaagggagcaatggaggaagtgccactttaaaaaccatcagatattgtgggaactcactcactatcatgagaacaacatggagggaaccatccccatgatccagtcatctcccatcatgtccgtccttcaacatgtggaaattacaatttgag

SEQ ID NO: 917979 - DNA, 607 bp, Homo sapiens
tgcccttaatttctttctcttgcctgactgccctgtcgaggccttctaatactatgttgaaaatgagggttagagagggcatgcttgtcttgtgccagttttccagcttttgtctattaagtataatgttggctgtgggtgtgtcatagatagctcttattattttgaggtatgttccttcaatatctagtttgttgagagtttttaacatgaaggatgttgaattttaataaaagccttttcaacatctgttgagataatcatgtgcttcttgtctttagttctgtttatgtgatgaatcacatttattgatttacgtatgttgaaccaaccttgcatcccagggataaagcctacttgattgtggtagataagtttttctgttctgctggattcrgtttgctagtattttgttgagaatttttgcatcaatgttcgtcaaggacattggcctgaagttttcttttgtgtgtgtgtgtttctgcaggtatggtaactggatgatgctggcctcgtataatgagttatggaagaatcactctacctcaattcttaacacatagtttcagtagaaatggtaaccgctcttctttgtacatctggtgaa

SEQ ID NO: 917980 - DNA, 626 bp, Homo sapiens
gtttacctaatcaagcctgggcaatggcatgtgcccctcccccagcctcgctgccgccttgcagtttgatctcagactgctgtgctagcaatcagcgagactccgtgggcgtaggaccctccgagccaggtgcgcgatataatctcgtggtgcgccgttttttaagcccgtcggaaaagcgcagtattcgggtgggagtgacccgattttccaggtgccgtccgtcacccctttctttgactgggaaagggaactccctgaccccttgggcttcccaagtgaggcaatgcttcgccctgcttcggctcgcacaaggtgcgcgcacccactgacctgcgcccactgtctggcrctccctagtgagatgaacccggtacttcagatggaaatgcagaaatcacctgtcgtctgcgtcgctcacgctgggagctgtagaccggagctgttcctattcggccatcttggctcctcgatcctgagtgagtttcttagtcctgagttctaatttgattgcactgtggcctgagagactgtttgttatgagttctgttcttttgcatttgctgaggagtgttttacttccaattatgtggtcaattttagaataagtgtgatgtggtggtgag

SEQ ID NO: 917981 - DNA, 605 bp, Homo sapiens
ctgataagcaacttcagcaaagtttcaggatacaaaatcaatgtgcaaaaatcacaagcattcctatacaccaataacagacagagagccaatcatgagtgaactcccattcacaattactataaagagaataaaatacctgggaatccaacttacaagggatgtgaacgacctcttcaagaagaactacaaaccactgctcaacaaaataaaagatgacacaaacaaatggaagaacattccatgctcatggataggaagaatcaataacatgaaaatggccatactgcccacggtaatttatagattcagtgtcatccccatcaagctaccaatgattttcttcacagaattggaaaaaactactttaaagttcatagggaatcaaataagggcccrcatagccaagacaattctcaggaaaaagaacaaagctggaggcatcattgctacctgacttcaaactatactacaaggctacagtaaccaaaacagcatggtactggtaccaaaacagatatatagacctatggaacagaacagaagcctcagaaataacaccacacatctacaaccatctgatctttgacaaacctgacaaaaac

SEQ ID NO: 917982 - DNA, 599 bp, Homo sapiens
agcaacttcagcaaagtttcaggatacaaaatcaatgtgcaaaaatcacaagcattcctatacaccaataacagacagagagccaatcatgagtgaactcccattcacaattactataaagagaataaaatacctgggaatccaacttacaagggatgtgaacgacctcttcaagaagaactacaaaccactgctcaacaaaataaaagatgacacaaacaaatggaagaacattccatgctcatggataggaagaatcaataacatgaaaatggccatactgcccacggtaatttatagattcagtgtcatccccatcaagctaccaatgattttcttcacagaattggaaaaaactactttaaagttcatagggaatcaaataagggcccgcatagccaagacaattctmaggaaaaagaacaaagctggaggcatcattgctacctgacttcaaactatactacaaggctacagtaaccaaaacagcatggtactggtaccaaaacagatatatagacctatggaacagaacagaagcctcagaaataacaccacacatctacaaccatctgatctttgacaaacctgacaaaaac

SEQ ID NO: 917983 - DNA, 604 bp, Homo sapiens
ttaaaaatttttattttgatttaagttttgggatacatgtataggacgtgcaggtttgttacataggtaaatgtgtgccatggtggtttgctgcacctatcaacccatcacctaggtattaaaccctgcgtgaattagccatttatcctgrtgttctccctccccttgcccccacccgacaggccccagtaagtgttgttcccctccctgtgtccatgtgttcttattgttcagctcccacttatgagtaagaacatgcggtgtttggttttctgttcctgtgtttgtttgctaaggatgatggcttccagcttcatccatgtccccctgcaaaggacatgatctcattcctttttatggctgcataatattctgtggtgtatatgtaccacatttgctttatccagtctatcattgatgggcatttagtttgattctgtgtctttgttattgtgaatagtgctgcaataaacatatgtgtgcatgtttccttataatagaatgatttatattcctttgggtatatatccagtaatgagattgctggaacaaatggtgtttctggttctagatccttgaggaatcgtcacattgtcttccacaa

SEQ ID NO: 917984 - DNA, 601 bp, Homo sapiens
tttggagtttgctggatgtccactccagaccctgtttgcctgggtatcagcagcagaggctccagaacagcggatattggtgaacagaaaatgttgctgcctgataattcctctggaagtttcatctcagaggagtacccggccgtgtgaggtgtcagtctgcccctactggggggtgcctcccagttaggctactcggrggtcagggacccacttgaggaggcagtctgtccgttctccgatctcaagctgcatgctgggagaaccactactctcttcaaagctgtcagacagcgacatttaagtctgcagaggtttctgctgccttctgtttggctatgccctgcccccagaggtggagtctacagaggcaggtgggcctccttgagctgcggtgggatccacccagttcgagcttcccggccgctttgtttacctactcgagcctcagcaatggcaggcgcccctcccccagcctcgctgccgccttgcagtttgatctcagactgctgtgctagcaatgagcgaggctccgtgggcgtaggaccctccgagtcaggcgtgggacataatctcctggtgtgctgtttgctaagaccat

SEQ ID NO: 917985 - DNA, 554 bp, Homo sapiens
gtggctcatttaatctgccgactctgtcccccagttatttaatggaggctctaccttagatgcaacacactgaggaaaccgcggctcaagttttccttgcctcgctcatgaggtggtggttacatgctgaagaggcaagccgagagcaccttaggctgctgcaccccactctgccaaggcctcagcccatagaaaggggttgccaytcaggcagaagcttgccaccgtccccaccttgtctctagagctcttgctcaaagattttgccttggaggaggaacaggctacaaaacaggtagctcctaatctcttcccaaagggattgacttcatttgcaacagagtgtaaagttcaaagctaagagtgctctcaagaacagtggacgttgtcatacaaggcagttgagatttgtggatctaatgaagataaagcatggcctgtaagctggatagttttcaggagaaaaccaggaaataagatggctggtaagagcactcctggtatcagaacaaatatcagacgtggacctcaaaaactattccttcaaataaacc

SEQ ID NO: 917986 - DNA, 603 bp, Homo sapiens
gagaggagagggaagagttgggaggactttgtcttgcatcttggataccaactcagccacagcaagatagggctccagtcagagtcaacaggcccctgttccagccctagttcccaaatgacatttctagacaaactgtgggccagaagggaacccactgccttgaaggaaaggaccccatcctgccagcattcatcacccgctaactgaagagcccttgggccytgaataaccaacagcaatgcacaggcactacattgagggccatcatgagcctctgagacttgctggcttcaggtaccaacaccaccacgggggctagagcaccaagcaggttcttgaggttccagattccaggacttgacagcatttctggacctgccccaggccagaggggagcccactgccctgaaggatgagtcccagaccaggcagcattcaccacaagctaacttaagagaccttgggccttaacggaacattgatggtagtctgtcagtgctccttgtggccaggggtggcagtggctgtggagtgaggctcctttgcctttggaaaggggagggaaaagcaggaaggactaggtcttatggtttcagtgcc

SEQ ID NO: 917987 - DNA, 590 bp, Homo sapiens
actgctggaaaagatcccttcactactggcaagtggtcccctgaacttttcattttcagtgtcactgcaatgaatgagtgggtccttctctggcctctgtgagctcttcaccttccccaccctgccacaggcaatgcttttctctctctcctttccctttcttatcttttctattactcagggtgaccatcttgcccagggacgtgttgaaattcctagtcagaagytggattaaagatgacgggagccatctaaggacaaatttaagccttgccagtttaatattgggtgctaagcagagtagctgatgtctatgtttcgtcacacatattttactctggcccaaacagaaaaagataattttcctttgtgttgcggcttggccccccaggtctatggtgcagcgaggtgggtcactagggccacttagggaaacggaacacagaagcctggcatgctggcaaacaggtaacaatttcttaccagtcagactcctggcctctctctctctctctctgtgcaaacaggttgaataaatggtaaaaatcactgttactctcctgtaaagtttaaattaatcagaaaaagca

SEQ ID NO: 917988 - DNA, 590 bp, Homo sapiens
actgctggaaaagatcccttcactactggcaagtggtcccctgaacttttcattttcagtgtcactgcaatgaatgagtgggtccttctctggcctctgtgagctcttcaccttccccaccctgccacaggcaatgcttttctctctctcctttccctttcttatcttttctattactcagggtgaccatcttgcccagggacgtgttgaaattcctagtcagaagctggattaaagatgacgggagccatctaaggacaaatttaagccttgccagtttaatattgggtgctaagcagagtagctgatgtctatgtttcgtcacacatattttactctggcccaaacagaaaaagataattttcctttgtgttgyggcttggccccccaggtctatggtgcagcgaggtgggtcactagggccacttagggaaacggaacacagaagcctggcatgctggcaaacaggtaacaatttcttaccagtcagactcctggcctctctctctctctctctgtgcaaacaggttgaataaatggtaaaaatcactgttactctcctgtaaagtttaaattaatcagaaaaagca

SEQ ID NO: 917989 - DNA, 590 bp, Homo sapiens
actgctggaaaagatcccttcactactggcaagtggtcccctgaacttttcattttcagtgtcactgcaatgaatgagtgggtccttctctggcctctgtgagctcttcaccttccccaccctgccacaggcaatgcttttctctctctcctttccctttcttatcttttctattactcagggtgaccatcttgcccagggacgtgttgaaattcctagtcagaagctggattaaagatgacgggagccatctaaggacaaatttaagccttgccagtttaatattgggtgctaagcagagtagctgatgtctatgtttcgtcacacatattttactctggcccaaacagaaaaagataattttcctttgtgttgcggcttggccccccaggtctatggtgcagcgaggtgggtcactagggccacttagggmaacggaacacagaagcctggcatgctggcaaacaggtaacaatttcttaccagtcagactcctggcctctctctctctctctctgtgcaaacaggttgaataaatggtaaaaatcactgttactctcctgtaaagtttaaattaatcagaaaaagca

SEQ ID NO: 917990 - DNA, 614 bp, Homo sapiens
cactccagcctaggcaacagagagagagagatcctgtttcaaaaaaaaattattattattataattatatacactaaatataattactaaaaaaccctttagatagggatttacaagacccattgctaaggatgatctggctctaagagtatgttgtgccctaagatatcagctaataatagtaagtaagcataatttataaataaatatacacttataaggacataggcttaaattttggggatcatggagcaagagcatctccttctgtgtgtcaggtatctaataagatggactgtaccctggtgagcatgatgtcatggatatagcgacacctgtctctgtctttcttctctatagcaaaccaccccacgggcctcttctctgggtcaacactgccagattctagtattttagattccctttcctagagttcatgttgagcatcaggattcygtgttgcactctgtctttactatcttagtcacactctgattgttctgctttagatctaaaatacctttggattgtaaataatactttgacagatacaggtttaatctattatgttttgattttgctgaggtctaaataagaggggacactgtcacatg

SEQ ID NO: 917991 - DNA, 650 bp, Homo sapiens
agttttttacaaaactaaacatcctctaaccatataatccagcaatcagactcttgggtatttacccaaaggagtagaaaaattatgtccacataaaaacctgcatatgtatgttgataggtttattcataattgtcaaacatggcaacarccaacatattcttcagtagatgaatggataaactgtgatacatccatacaatggaatattattcgtgctttccagtctgaaaaaaaagaaatgagctttccagtcatttacaaaatggaggaaatgcaaatgcttattagtaagtgaaggaatgcaacctaaaatgtatatataccgtacaattccaactatatgatattctggaaaaggcaaaactatggagacaataaaaggatcagtggcttccaaagagtaagaggaaagaagggatgaacaggaagagcacaaaggatttttaagacaatgaagctattctgtgtgatactataatggtacatacatggcattacacatctgtcaaaacctatagaatgtataacaaaccaagaatgaacgctaacataaactatggatgataatggtgggtgataatggtgtgtttatgtaggtttatgaattgtaacaatatactattctggtacgggatgttgatggtaag

SEQ ID NO: 917992 - DNA, 565 bp, Homo sapiens
gggaccagcgccaaaaactctgagttactttccccaggtgctaatcaggtgacaagcacagtggacagcctcgacagccatgacctggaaggggtacagattgacttcgatgccatcatagacgatggggaccactccagcctgatgtcgggggccctgagcccaagtatcattcagaacctttsccatagctcctcccgcctcaccacgcctcgggcgtccctcccattcccagcgctgtccatgagcaccaccaacatggctatcggggacatgagttctttgctgacctccctagcggaagaaagcaaattccttgcagttatgcaataggctttaggaaaaaaagactgcaaccaacggaaatcaataggagttgaagagattaaactgactttgttttggctgtttttttagttctgtatgtattttagcaatctcatctcacctaactgagatgtgtttcaattatattccttttatggaaaaggactctgaaaaaccctaaagtattctagggagaaactgtcttccatttcagttttgaatcagtattgttacactc

SEQ ID NO: 917993 - DNA, 596 bp, Homo sapiens
ctgtctcaaaaaacaaacaaaacaaaacaaaacaaaataaaacaaaacaaaacaacaggatttaggccgggcatggtggcttgtaatcccagcattttgggaggccaaggcaggtgaattgcttgagtccaggacttccagaccagcctaggcaacagggtaagaaccttgtgtctactaaaaatacaaaaattytggccgggcgtggtggctcatgcctgtaattccagcactttgggaggcagaagcaggcagatcacgaggtcaggagttcgagaccagcatggccaacaaggtgaaaccccatctctactaaaactacaaaacttagctggcgtggtggcagtcacctgtaatcccagctgcttgggaggctgaggcaggagaatcacttgaacccgggcggcagagattgcagtgagctgagattgtgccactgcactccagcctgggtgacacagtgagactctgtctcaaaaacaaacaaacaaaaaaaccaaatttagctgggcatggtggcacatgcctatagtcccagctacctgcaggggctgaggcgagaggatcacctgggcccaggaagttgaggatgcagt

SEQ ID NO: 917994 - DNA, 562 bp, Homo sapiens
aaagccctgccactgctttatcaactgtctataatattctaaattttttgttgtcatttcaacaatgttcaccacatcttcaccaggcatatattccatcttaagaaaccactttgtttgctcattcgttagaagtaactcctcatctgttaaagtttcatcatgacgttgcagcaatccagtcacatcttcgggctccacttctaattccagttatcttgctttttccaccacatctacagttactttctccactgaaacccctcaaagtcgtccatgaagcttggaattaacttcttccaaactcctgttaatgttgatattttggccacctcctgtgaatgaagtgctgatgaatcctttccagaagatattcaattrattttgctcagatccagcagaggaatcactatctacagcagctattgctttacaaaatatatttcttaaatatgaaaatttgaaagtcgaaattcttccttgatctatgggctgcataatagatgttgtgttagcaggcatgaaaacaacattcatcttgttgcacatttccactggatct

SEQ ID NO: 917995 - DNA, 724 bp, Homo sapiens
tgcctgcatatcatacagagccatctgtgaacctggccctggtcttctcttcctctgtcaactgatcatagggagctccccatgaggccatcggtgcgggctggggaagagaaggcagggtggcagcagtggagaccacgggcatttgagccatttcctcatgtaacttacttgtgccttcacarccttcttgagcttgatcacgtatatatcacttccatttgatgatgaaatgctgctgtacatgacccattttatggctagatgggtcagcaagcaccaagttcatgataggcaattcaggtctcatggtgacttgatgacctgtagtcaaatgttcagtttccaccaaagcctagtaacaggccaagagctgtatctcaaaaggagagtagttatctgcagaagttgatagggccatcctccaaaatcctagaggcctccactgtgattcacctatgggagcctgccaaaggctctaaacagcattcctatctgccactgacctccagcaccattggatctgctgggtcatatggcccaagtggcagagcagaacagcttacacagcagcctggaactgttgcagagccttctcccgttctgggccccactcaaaactggcagcctttcaggtcacttgaaacatgaggcagagtaacacacccaaatgaggaacacgttgcctccaaaatccaaatagacccactaggtgttgtgcctc

SEQ ID NO: 917996 - DNA, 714 bp, Homo sapiens
gcctagtaacaggccaagagctgtatctcaaaaggagagtagttatctgcagaagttgatagggccatcctccaaaatcctagaggcctccactgtgattcacctatgggagcctgccaaaggctctaaacagcattcctatctgccactgacctccagcaccattggatctgctgggtcatatggcccaagtggcagagcagaacagcttacacagcagcctggaactgttgcagagccttctcccgttctgggccccactcaaaactggcagcctttcaggtcacttgaaacatgaggcagagtaacacacccaaatgaggaacacrttgcctccaaaatccaaatagacccactaggtgttgtgcctctgccttggttgtagaaggggccaaatgcagcaacttatcctttaccttagaaggaatatctcgacaggccccacaccactggacccctagaaattttactaaggtagaagttccctgaattttagtcagatttatttcctatcctctgcatgcaaatgtctcaccaataagtccagtgtgtttgctacttctcgttcactggatccaatcaaaataatgtcatcaatgtaagggaccagtgtaatatcttgtggaagcgaaaagtgatgaagacctctctaaataatattatgacacaaagcgggagagttggtatatccctgaggtaggacagtaaaggtat

SEQ ID NO: 917997 - DNA, 586 bp, Homo sapiens
atgcatgcacaaaaagaaagcacctgtcagttaggaggcagaaagcagaaacaaggagaacatctaggccagagactttactggggtttctgcaggaaaggcagggcagagttaatggcctagggttggttattttgaataattctggtgggctttgggttatagagatggtctttacttttctggtacctagcccttagatgatttaaggcaggggaaatactggtttcrtgtgtgagagttagataagaaggtggctgagaggtacagactctggatttgtagatttgtgtcttagtccatttgtgctgctataacagaacatcccagactgggtaacttataaataacagaaatttatttctcactgttctggagactgggaagtccaagatcaaggcaccagcatctggtgaggctttcttgctatgtcctcacatagcgggaggcagaagggcaaaaagcaggatgaaccctctcatgacactttataaaggcacctgatcctattcatgagggaggagccttcatggcctaatcacgtcttagtggaccaccacttaatactatcacattggcaacaact

SEQ ID NO: 917998 - DNA, 619 bp, Homo sapiens
caggaggctgagtcatgagaattgcttgaacttgggagacagaggttgcagtgagtcaagattgtgccattgcactattgcctgggcaacaagagcaaaactccgtcaaaagaaaaagaaaaagaaaaaagaaagagagagagagaaagaaagaaaggaaggaaggaaagaaggaaggaaggaaggaaggagccaggccaaaaatgaaggggctcaggttaggaaggtgacaayagggtgaggagaggtgcacagatttcagagaaatataaaaggcaacatggcgagacttggtgatgaatcggactgggtagggggagggataagaaggagtctctggtttctgctggtgcagtgggaggaaaccggtgcccgacccagaggacgaatgctggtgaggctgcaggtttggtgcggggacaggagggctggcttggacaagctggtctgagctgcttgtgagccagatgttgagacatcagccacagaaccctggcccaccttgacagtctcaccgctgagtatcagacaggactgtcaggtcaatcagttttaacggtccatcttggccaagccctggagtcctcacgggggatggaaaggtgacaggctcttttcc

SEQ ID NO: 917999 - DNA, 488 bp, Homo sapiens
tcagccattctgtctcttaatgggaaaatttaatccatttacattcaaggttattattgttagataagtacttctgccattttgttcattattttttccttatcttgtagattccttatttctttcttcttctcttgctatttacctctgtggtttggtggttttytgtggtgctaagctttattttctcattctcatttgattgtctgcagtacattatttgtttgtgattaccacaggctaacataaagagtcttgtagttagaattgactattttaagatgatggcaacttaactttggttgcataaaattactctagacagttttccttccccctaaaatttatacttttgttcacttaatttacttctttatctgtggtgtgttcctttgccattaattgtaattcttggttttgaccatttgacattaaacgttcatactagaggattgaaagacgtatcatatcactggaaatattaggaa

SEQ ID NO: 918000 - DNA, 488 bp, Homo sapiens
tcagccattctgtctcttaatgggaaaatttaatccatttacattcaaggttattattgttagataagtacttctgccattttgttcattattttttccttatcttgtagattccttatttctttcttcttctcttgctatttacctctgtggtttggtggttttctgtggtgctaagctttattttctcattctcayttgattgtctgcagtacattatttgtttgtgattaccacaggctaacataaagagtcttgtagttagaattgactattttaagatgatggcaacttaactttggttgcataaaattactctagacagttttccttccccctaaaatttatacttttgttcacttaatttacttctttatctgtggtgtgttcctttgccattaattgtaattcttggttttgaccatttgacattaaacgttcatactagaggattgaaagacgtatcatatcactggaaatattaggaa

SEQ ID NO: 918001 - DNA, 488 bp, Homo sapiens
tcagccattctgtctcttaatgggaaaatttaatccatttacattcaaggttattattgttagataagtacttctgccattttgttcattattttttccttatcttgtagattccttatttctttcttcttctcttgctatttacctctgtggtttggtggttttctgtggtgctaagctttattttctcattctcatttgattgtctgcagtacattatttgtttgtgattaccacaggctaacataaagagtcttgtagttagaattgactattttaagatgatggcaacktaactttggttgcataaaattactctagacagttttccttccccctaaaatttatacttttgttcacttaatttacttctttatctgtggtgtgttcctttgccattaattgtaattcttggttttgaccatttgacattaaacgttcatactagaggattgaaagacgtatcatatcactggaaatattaggaa

SEQ ID NO: 918002 - DNA, 540 bp, Homo sapiens
ggcccctatcatgtcctttcttatttccttatattggccaaacacttgtgctccaaatggtgacacagaaggaaatccctgccttattcatcaggaagctgaaggtagaatgtgttggtaaaacacgcatgtatcaagaagtaaaataaaaacaacagarttagtttttggcagtgtttcctctgttctggtcagaaagaaatacataggaatgtaacagctatgaaatacaaattgtgtaacttcagtgattatgcaaacaagttaaatgcttttaaatttgcatttaaaactggcattgcacgagttaacaataacagaaaaaaacataccaataattacatttttaatttttctttacttggaacattaaaaatactgtgacaattcaagaggcaaggaagagaagggaaaggagggcagggaagcagtgggaaggaaagggcaaaacattttgttttagtaccttggagggcacttctttcctgttttttgaataaatggctccacattctaatttcgcacagggtcccacagcca

SEQ ID NO: 918003 - DNA, 633 bp, Homo sapiens
caccgtctgagtattgtggtatttgtgtgcaagaaaccattattttacttcataatggccccaaaggacaagagtggtgatgctggcaatttggatatgccaaagagaaagctgtaaatttcttcctttaagcaaaagcgaaagtttctgacttactgagaaaaaaattagatgctgaggttgctaagatctgcagtaagaatgaatcttctatccatgaaatttcaatgaagaaaaaaattgtactggctttactgtcacatctcaaactgcagaagttatggccacagtgagtgctaggggcttagttaaggtgaaaarctcattaaatttgtgggtggaagacacaaagggaaacgctgagactgacagctatccggttctgtattttccttggtttcaggcatccactgggggtgttgaaacagatgccccaccaggaaggcgaggctactgtaatagcttatttttgttatttttaaatgaattatttttaaaatttcccagttttgatttcaagtacaatacgtatcaatagataaagctgataaggcccacacaaataaaagttctttgggggccaggagcggtggctcatgcctgtaatcccagcactttgggaggctgaggcag

SEQ ID NO: 918004 - DNA, 597 bp, Homo sapiens
ttttgaccaatcatgtttctccacaactagtcacttctttcatcacactttgcataaaaacagttctcccagatctttgggtcttcatttctgaaggctcccatgtcacataaaactgtgactaaatcaatgtattatggctttctcttatgtgaaaggaaaataaatactcaggaccccaattcactctgccaaaagaaaaaactaagctgaaagctgagtcatgcaagaagctgcctttccttttgttcctaactggacagctacagataacaggttacgtatctccacagatagctactctatgttctccttatcttatgtaaaatgctgctttactgaacacgagaagaatacataattggctattcccctacctgctccttttctcttgcaacatgtggattaccataccctcccacccacttttcccmtttaaatactggcacccttaaattcatctttggagaaagtcatagaccacagactgttcctgtgattttctattttttgttccgtgcattgtccttaaccttggcaaaataaagttctaaattgagacctgtctcagatactttttggcttatacttgttaat

SEQ ID NO: 918005 - DNA, 595 bp, Homo sapiens
aggattgcttctaaaaatgtatttagtatttatttgggaatcatttcagtttagacactttcattttcaaaaaagcaacagcccaacttacattacagtaaacactatcgaaagtttttcatttaagttaattatactttttaaaagtttaatttatacaaaataaatacaaggaaggaaatgctacctctccacctgttgagggttcaatatccgagtatttggagtcacaaacaatgtctcccactccctgggcctggccagatgtgatgttaggaaaggaagtggcacagtcttttgcaaaatatttgaacactttccagttgtgtccatagtctgtggaacgttcaactaacattgcagcaggccgaaaagtctaggaaaaatgagtaaaagttggcacatttcacaaaggcagattttattatcaacttcagattgaatatttrtattttctaattccatttttaaaaactttaggtgtatctttttgttgtttgttttgttttgtttttgagacaggatctcactctgtcgcccaggctggagtgcagtggcatgatctcggctcactgtagcctcaacttcccaggcc

SEQ ID NO: 918006 - DNA, 643 bp, Homo sapiens
aaactaaccatcacaatgatcaaggctatttttatcctttctttcagcattgtttgtggattttccctcaaaaatcccaggtttccttgtttatcctttatgttagtccattttcacactgctgataaagacataccccagactgggcaatttacaaaacaaagaggtttaattggacttacakttccatgtggctgaggaaacctcacaatcatgtctcacatggatggcagcaggcaaagagagagagagtttgtgcaggagaactcctcattttaaaaccatcagatctcatgagacttattcttcactatcataagaatagcatgggaaagacttgccctcatgattcaattatctcccaccaggtccctcccacaacacatgggaattcaagatgagatttggttgggaacacaggcaaatcatatcatccctcatctcccagattctaatacccatagtatcctacccacccccttttctgattctatttcccacttcctcacttcctgaaacaacttcaatgtacttgtaggaactctttattcatcagcagcaaaatttctttatgcttggcttctcttctgaatgtttcctttctcttctttctctccctgaaagttgactctcccctgaggac

SEQ ID NO: 918007 - DNA, 699 bp, Homo sapiens
aatgagataccaccgaacaaggcagcaatttcacacaagcaagttaacatacttcctttttaaaaagctccagggaaatctgaaattgcaagtaaagggattaagagaagagatgctaagagaaacccttgacttttctctaaaccactacataatttcactagaacaaactctttaagccatgaggattacaatttcctgttataagagccatttcaataaaaggtttgctgattactttgaaaagttaaaaaaaataaagtaaaaaaacaagtaagtgaaaactgattgctcccatgacatgaactgcttattgagttttaatgtctttctcttctgtaggtttcaggtggaattagtcaaaaccaaacgtggattaacagcataagaggtaaataagtacatatcttgaaaaattagaagacacatcccccctgagatgtgtctctcagagttagaagtcagagtctttcctattaacagattatgttagtattgttaatataagttaagactaatgtgtaaataatctgtcaaaatacaaggaaaaaaaagmagcttagtagctacacaactctgcttatttttgttggtatttgaaagcaccaacctctctagttctatattagactctctgttattggtttgtgggattctttgtctttaagactgctccttccaccttgctttcacttactc

SEQ ID NO: 918008 - DNA, 803 bp, Homo sapiens
cgttcctggcgagggcctcctcctggctcacagatgtcctcacgtggtggagagagggagaaagagccctctctcttttccttgtcttacagggccacagacctattgatcaggaccccaccctcatgaccttatctaaccccagttacctcccaagaccccrtctccgaatccggtcatgctgggtttagaacttcaacatatgagtttggggaagatgcagttcagtccacagcagctttgctacttgctagaatttgtaacccccccaaaatgaataatcttggagattttgcggtcgtttgcaggcatgcttagaatggtaaaacggtaaaacatgtgtcactgggccaggcgtggtggttcacgcctgtcatcccagcactttgggaggctgaggccggtggatcacttgaggtcaggagtttgagattagcctggccgacatgatgaaacccgtctctaccaaaaaaatacaaaaattagccaggcatggtggtgcacgcctgttgtcccagctactagggaggctgaggcaggagaatcgcgcgaacctgggaggtggaagttatagtgagtcgagatcgcgccactacactccagcctgggtgacagagtgagactctgtctcaaaaaaaaaaaaaaaaaaagtgtcaccagacgtgcgtatccccagatgatagcaagcaaggagatactgagacttcctctcatcctgtggacagtgtcctttttgcagtctctcgagtgccatgtttttcaaatttctgtgcttttgctggtgatttcactatgtaagatga

SEQ ID NO: 918009 - DNA, 803 bp, Homo sapiens
cgttcctggcgagggcctcctcctggctcacagatgtcctcacgtggtggagagagggagaaagagccctctctcttttccttgtcttacagggccacagacctattgatcaggaccccaccctcatgaccttatctaaccccagttacctcccaagaccccgtctccgaatccggtcaygctgggtttagaacttcaacatatgagtttggggaagatgcagttcagtccacagcagctttgctacttgctagaatttgtaacccccccaaaatgaataatcttggagattttgcggtcgtttgcaggcatgcttagaatggtaaaacggtaaaacatgtgtcactgggccaggcgtggtggttcacgcctgtcatcccagcactttgggaggctgaggccggtggatcacttgaggtcaggagtttgagattagcctggccgacatgatgaaacccgtctctaccaaaaaaatacaaaaattagccaggcatggtggtgcacgcctgttgtcccagctactagggaggctgaggcaggagaatcgcgcgaacctgggaggtggaagttatagtgagtcgagatcgcgccactacactccagcctgggtgacagagtgagactctgtctcaaaaaaaaaaaaaaaaaaagtgtcaccagacgtgcgtatccccagatgatagcaagcaaggagatactgagacttcctctcatcctgtggacagtgtcctttttgcagtctctcgagtgccatgtttttcaaatttctgtgcttttgctggtgatttcactatgtaagatga

SEQ ID NO: 918010 - DNA, 624 bp, Homo sapiens
ttatataatacccagtttccgtgcacatttgctgaaaacatctatctttctatgtattttctgttcacaatatttgtcagaacttcagtgtatttaagctgggtactatgttttttgccaaaacaaaccatatgaagacacaccctttggtaggaaccccratatttggtatgcattaagcattattgttgttatgtttataatttaccatgtattttctggtaattaaagatggcattttatttaatatggctaaggttatagttgtaagaactagctaaaatatattcaaatccttttaaagctctgtgttagtctgttcttgcactgctataaagaaatacctgagactagtaatttataaggaaaagaggtttaattggcttatggttcttcgggctgtacaagaatcatggctagggacacctcagaaaattttcaatcatggcaaaaggtgaaggggaagcaggcaggtcttacttgactgagcaggaagaagaggcgaggggtgctacacgcttttaaacaactaggcattgtgacaactcactctcacgagaacagagccaaaagggaaatccacccccatgatccaattatttcccaccagaccccacctccaac

SEQ ID NO: 918011 - DNA, 622 bp, Homo sapiens
gtgaggtactgtgctgtgaggaacagtgcattctggcccagacactatgcttttctcatggtcttcacaacccacagactaggagactcccctgggtgcctacaccaccaagattcccttggatttcaagcacaaaactgggcagctatttgggcagacactgagctagctgcaggagtttttttcataccccagtggtgcctggaacaccagtgagacagagccattcactcccttggaaagggggctaaaggcagggagccaagtggtctagctcagcggatcccacccctgcagagcccagaaagctaagctccattggcttgaaattctcactgccaccacagcagtctgaagtcaacctgggaygcttgagcttggtggggggaggggcatctgccattactgaggcttcagtaggcggttttcccctcacagtgtaaacaaagccacctggaaggtccaactgggtggattccaccgcagctcagcaaagctgctgtagccagactgcttctctagattcctcctctctgggcagggcatctctgaaagaaaggcagcagccacaatcaggggcttatagataaaactcccatctccctgggacagagaacctggg

SEQ ID NO: 918012 - DNA, 750 bp, Homo sapiens
gtcctgggctttttttgtttagtaggctattaattactgcctcaatttcagaaattgttattggtctattcagggattcgacttcttcctggcttagtcttgggagggtgtatgtgtcgaggaatttatccatttcttctagattttctagtttatttgcatagaggtgtttatagtattctctgacggtagtttgtatttctgtgggatcagtggtgatatcccctttatcattttttattgtgtctatttgatccttctctcttttcttccttattcgtctcactagtggtccatctcttttgttgatcttttcaaaaaaccagcttctggattcattgatttttttgaagggtattttgtrtctctatctccttcagttctgctctgatcttagttatttgttgtcttctgctagcttttgaatgtgtttgctcctgcttctctagttcttttaattttgatgttagggtgtcagttttagatctttcctgctttctcttgtgggcatttagtgctataaatttccctctacacactgctttaaatgtgtcccagagattctggtatgttgtgtctttgttctcattggtttcaaagaacatctttatttctgccttcatttcgttatgtacccagtagtcattcaggagcagattgttcagtttccatgtagttgtgtggatttgagtgagtttcttaatcctgagttctaatttgattgcactgtggtctgagagacagtttgtt

SEQ ID NO: 918013 - DNA, 545 bp, Homo sapiens
aatggaaattcttcctggtccaagtccagtggtgtttacaactaattgatcacaaccagttactgatttctttgttccttcatttccactgcttcacttgactagcctaaataataatattaataacaataatgatttttaaatctcctgtaatgggccaggtgcagtggctcacgcctgtaatcccatcactttgggaggctgaggtgggcagatcacgaggtcaggagttcgagaccagcctggccaaaacrgtgaaaccccgtctttactaaaaatacaaaaattggctgggcgtggtggcgcactcctgtactcccagctactcagaaggctgaggcaggagaatcacttgaacccaggaggcagaggtttcagtgagctgaggtcgcgccactgcactccagcctgggcaatagagtgagactttgtctcaataaataaataaataaataaataaaaataatctcttggaatgcacaaccaaattttgaagaaagaaagaatatgctagaaaagaggagagacagaagcaatccagtaag

SEQ ID NO: 918014 - DNA, 545 bp, Homo sapiens
aatggaaattcttcctggtccaagtccagtggtgtttacaactaattgatcacaaccagttactgatttctttgttccttcatttccactgcttcacttgactagcctaaataataatattaataacaataatgatttttaaatctcctgtaatgggccaggtgcagtggctcacgcctgtaatcccatcactttgggaggctgaggtgggcagatcacgaggtcaggagttcgagaccagcctggccaaaacggtgaaaccccgtctttactaaaaatacaaaaattggctgggcstggtggcgcactcctgtactcccagctactcagaaggctgaggcaggagaatcacttgaacccaggaggcagaggtttcagtgagctgaggtcgcgccactgcactccagcctgggcaatagagtgagactttgtctcaataaataaataaataaataaataaaaataatctcttggaatgcacaaccaaattttgaagaaagaaagaatatgctagaaaagaggagagacagaagcaatccagtaag

SEQ ID NO: 918015 - DNA, 650 bp, Homo sapiens
gcttaggctatgtcggttagtggaggttgtggtgagatcttgctggcgatgaagatgccaggtggcccagtcctcaagccccagtggtgttagtgtaagctgagcatgactgtccttgggccccagagtgttgtatactggcatcagtgttagtgagtccaggcaagcctattcttgggcttctaggattcttgctcaggtgccattagtggtagcagtgagccagttaagagagtgtgttcttgagtccctggcaagcaggtgtggcttgggcaatggcaatggcagtggcagggcaaccttctggctcccaagtggtatgcattggtgttgttagtggttgcagtgggctggtcaggccagtcactaggccagcagatggtgtgtgctgcttagtgctagttgtggtggtagtrgcaggttgggtgggcctgacctcaggtacccaggaggaattcctaggtgccaatggcagtggatggggctgggtgatacccatgtctctgatggcatgcttgggcactgggagggacagagctggactgggcagacctggcttcagggtcactggtggtgtgtgcaggcactggctatggtagtcaggggcagggtgatcccaggatgcaggtggaatatttgagtggggaaag

SEQ ID NO: 918016 - DNA, 650 bp, Homo sapiens
gcttaggctatgtcggttagtggaggttgtggtgagatcttgctggcgatgaagatgccaggtggcccagtcctcaagccccagtggtgttagtgtaagctgagcatgactgtccttgggccccagagtgttgtatactggcatcagtgttagtgagtccaggcaagcctattcttgggcttctaggattcttgctcaggtgccattagtggtagcagtgagccagttaagagagtgtgttcttgagtccctggcaagcaggtgtggcttgggcaatggcaatggcagtggcagggcaaccttctggctcccaagtggtatgcattggtgttgttagtggttgcagtgggctggtcaggccagtcactaggccagcagatggtgtgtgctgcttagtgctagttgtggtggtagtggcaggttgggtgggcctgrcctcaggtacccaggaggaattcctaggtgccaatggcagtggatggggctgggtgatacccatgtctctgatggcatgcttgggcactgggagggacagagctggactgggcagacctggcttcagggtcactggtggtgtgtgcaggcactggctatggtagtcaggggcagggtgatcccaggatgcaggtggaatatttgagtggggaaag

SEQ ID NO: 918017 - DNA, 784 bp, Homo sapiens
ccctgcactccagcctgggcaacaaagcaagaccccatcactatataataagagtaaagagggccaggtgcggtggctcacgcctgtaatcccaacactttgggaggctgaggcgggtggatcacttgaggtcaggagctcgagaccagcctggccaacattgggaaacccagtctctactaaaaatacaaaaattagccaagtatggtggcgcacccctgtaattccagctactctggaggctgctgaggcaggagaatcacttgcacctaggaggtgaaggttgcagtgagccaagatcatrccactgcactccagcctgggcgatagaatgagactctgtctcgaaaaaaaaagaaaaagagtaaaagagtaaagaggttctttgaagactagcatcttctgtatttaaaaaaaaaaaaaaaaaaaaaagctgttgagtagggcctgtggggccttcttattcacagactttgtgaaatccattccagaaactctgagttgcttccggattctcagatgtgctagagatgtactccgaaagccttgcaggccacggctctgtgtggctaaaagtactgagcactcccaccaaagcaggcctggaacccgcacgagggctccgctggcctgtgaggcccaaagcactaaggatgccagggagtgcgaggcaggcaggctcctaatcccacagagcttacagtctggaaagcctctagacaatgttcaggtacaaaaacgtcatgtcgaaggacatgcttctgtcactcttacgtccatgcgt

SEQ ID NO: 918018 - DNA, 738 bp, Homo sapiens
agctctccatgcgggaggactctgaagtgatcactcatgagggacacttaggagtcaacagaggattaggtagacttgataaaggtcggtgcttgggataagaaagcttggttttgggccaggcgctgtggctcccgcctgagatcccagcacgttgggaggctgaggcaagaggattgcttgaactcaggactttgaggctgcagtgagctatgactgcaccactgcactccagcctgggtgacagagcaaaactctgcgtcaaaagaaaagccaaggctgggcacagtagctcatgcctgtagttccagctactcgggaggctgagacaggagaatcgcttgagcctgggaggaagagggtgcagtgagccragatcgtgctactgcactccagtctgggtgagagagtgagacgctgtctcaaaaaaaaaaaaaaaaaaagaagaagagaaaaaagaagggtcagaggtcaggaaggagaacctggggagggtgtgtgggaagaatggagaaattcaggctgggtgcagtggctcacacctgtaatcccagcactttgggaagccaaggcaggcggatcacgtgaggccaggagtttgagaccagcctggccaacatggtgaaacccccgtctctactaaaagtacaaaattgagctgggcattatggcaggcacctgtaatcccagctacctgagaggctgaggcaggagaataactggaatccgggagataga

SEQ ID NO: 918019 - DNA, 738 bp, Homo sapiens
agctctccatgcgggaggactctgaagtgatcactcatgagggacacttaggagtcaacagaggattaggtagacttgataaaggtcggtgcttgggataagaaagcttggttttgggccaggcgctgtggctcccgcctgagatcccagcacgttgggaggctgaggcaagaggattgcttgaactcaggactttgaggctgcagtgagctatgactgcaccactgcactccagcctgggtgacagagcaaaactctgcgtcaaaagaaaagccaaggctgggcacagtagctcatgcctgtagttccagctactcgggaggctgagacaggagaatcgcttgagcctgggaggaagagggtgcagtgagccaagatcgtgctactgcactccagtctgggtgagagagtgagacgctgtctcaaaaaaaaaaaaaaaaaaagaagaagaraaaaaagaagggtcagaggtcaggaaggagaacctggggagggtgtgtgggaagaatggagaaattcaggctgggtgcagtggctcacacctgtaatcccagcactttgggaagccaaggcaggcggatcacgtgaggccaggagtttgagaccagcctggccaacatggtgaaacccccgtctctactaaaagtacaaaattgagctgggcattatggcaggcacctgtaatcccagctacctgagaggctgaggcaggagaataactggaatccgggagataga

SEQ ID NO: 918020 - DNA, 736 bp, Homo sapiens
catctatctcccggattccagttattctcctgcctcagcctctcaggtagctgggattacaggtgcctgccataatgcccagctcaattttgtacttttagtagagacgggggtttcaccatgttggccaggctggtctcaaactcctggcctcacgtgatccgcctgccttggcttcccaaagtgctgggattacaggtgtgagccactgcacccagcctgaatttctccattcttcccacacaccctccccaggttctccttcctgacctctgacccttcttttttytcttcttctttttttttttttttttttgagacagcgtctcactctctcacccagactggagtgcagtagcacgatcttggctcactgcaccctcttcctcccaggctcaagcgattctcctgtctcagcctcccgagtagctggaactacaggcatgagctactgtgcccagccttggcttttcttttgacgcagagttttgctctgtcacccaggctggagtgcagtggtgcagtcatagctcactgcagcctcaaagtcctgagttcaagcaatcctcttgcctcagcctcccaacgtgctgggatctcaggcgggagccacagcgcctggcccaaaaccaagctttcttatcccaagcaccgacctttatcaagtctacctaatcctctgttgactcctaagtgtccctcatgagtgatcacttcagagtcctcccgcatggag

SEQ ID NO: 918021 - DNA, 736 bp, Homo sapiens
catctatctcccggattccagttattctcctgcctcagcctctcaggtagctgggattacaggtgcctgccataatgcccagctcaattttgtacttttagtagagacgggggtttcaccatgttggccaggctggtctcaaactcctggcctcacgtgatccgcctgccttggcttcccaaagtgctgggattacaggtgtgagccactgcacccagcctgaatttctccattcttcccacacaccctccccaggttctccttcctgacctctgacccttcttttttctcttcttctttttttttttttttttttgagacagcgtctcactctctcacccagactggagtgcagtagcacgatctyggctcactgcaccctcttcctcccaggctcaagcgattctcctgtctcagcctcccgagtagctggaactacaggcatgagctactgtgcccagccttggcttttcttttgacgcagagttttgctctgtcacccaggctggagtgcagtggtgcagtcatagctcactgcagcctcaaagtcctgagttcaagcaatcctcttgcctcagcctcccaacgtgctgggatctcaggcgggagccacagcgcctggcccaaaaccaagctttcttatcccaagcaccgacctttatcaagtctacctaatcctctgttgactcctaagtgtccctcatgagtgatcacttcagagtcctcccgcatggag

SEQ ID NO: 918022 - DNA, 572 bp, Homo sapiens
acagtggctcacacctgtaatcccagcactttgggaggccaaggcagatggatcacttgaggccaggagttcaagaccagcctgaccaacacggcaaaaccccatctccgctaaaaatacaaaaattagccaggcatggtggtgcacacctgtaatcctagctactcaggaggctgagacacaagaatcgcttgaacccaggaggcagaggttgcaaggaggtgagatcacaccactgcactccagcctgggcaatagagtgaggctctgccttaaaacaaagaaaaatgattttgggggatgatggggtgtcactatgttgaccaggcttgtctcaaactccttgcctcaagcaatccacccacctcagcctcccaagtagctggaactacaggcgcatgccaccacgcctggctartgtgtgtgtgtgtgtgtgtgtgtgtgtgtgtgtgtgtgtgtgtgtgtgtgtgtagaaacaaggtcttactgtgttgtttaagctgctctcaaactcctgggctcaagtgatcctcccacctcggcctcccaaagcattggaattacaggtgtga

SEQ ID NO: 918023 - DNA, 739 bp, Homo sapiens
ctaccccaactggtagaaagaagagggtggatctgaggcatttaaaaatattgagattggccaggcgcagtggctcacacctgtaatcccagcactttgggaggccaaggcgggcagatcacctgaggtcaggagttggagaccagcctggccaacatggtgaaatcccatccctactaaaaatagaaaaattagccagacgtggtggcgcgtgcctgtagtcccagctactcaggacgctgaggcagaagaatcacttgaacccrggaggcagaggttgcagtgaaccaagattgcaccactgcactccagtctgggcgacagagtgagtccccatctcaaaaataaataaaaatattgagattgagagagacaaagtaaagggaacaaggaaaagtgggatagtttcttctttggagatgtctctagtcgaagattttgttcttaggattgtggatggctcagaagggtaagataccttcactaggtatattctgagctcctgtgtgcatcgatggaagtcactttctcacgagtcattcagtagtgaccactagagggggatgatggaaggggaatctattttttggatcctttttttgcaaagcatactgctggctgagcgcagtgactcacgcttgtaatcccagcactttgggaggttgaggtaggaggattgcttgaacccaggagtttgagatcagtcctggctatatagtgagaccccatctctgcaaaa

SEQ ID NO: 918024 - DNA, 555 bp, Homo sapiens
cctagtccagcactccctccccaccaccatttcccaggacttcccaggacagagacaggtaaaagcaagttgtacagaatcgttctgattgtaagaatggcgtatcttcagcctaggcggcatagcaagacctcggctcactaaaaaaaaataaaaataaaaaattagccatgtgtggtggcacgtgcctgtagtcccagctacttgggaggctgaggtgggaggactgcttgagtctaggasttcaaggatctagtgaactataattgcacaactacactccagcctgggcgacagagtgggactccatctcaaaagaagaaaacacagagaaagagagagagagagagaatggcatatcttcattgtacaagtcttgggaaatacagaaaccaaggagaaaatagaaactatcagtagttccaccacccaaagacaaccactttgaacacagtatggtatttccttgcaggcttttttccatgtgtccgtaggtacatagagttaaataaccaggaacatgctgctggaggaggtctgttgctgtttttactc

SEQ ID NO: 918025 - DNA, 652 bp, Homo sapiens
agaaagcaaattaaaagaattttgacaggcaactgcctatagtagccatttaatccaagtatggtaatgtgaatattcaacatttctgtattaactcatattccctgaagtactattagccgttttgtttcacctgtatttctacttcagatgtaatggaatttaaggcactctaaaatatattctacttaacctttattttaagaagccaagaaaagctttgaacatgaaagggcccatttctggtcctggaatgttacaacttgccattattttttgagaagcagtgccaaaatgtaccatgtaatttgattaagcacaaataaaatttttttcatgttcaggttggaataatagattaaagtgctatgccattaaaagcaatgcttctttccctgtgtatcttacatttctgaaagtgatattaacgacctcgaacgcagctttttactacagctcttaaattcacttaatccctgccaattcttacaggcwcaccatagcgttttctttagccattctaacataaccaaatcttgagatctagctttatttttaggtatttgtggcagaaaaaaagtgcttacttatttaacgctgtttatatatcaaatcttaaaagtcacccctttaaatgacaggaacttactac

SEQ ID NO: 918026 - DNA, 771 bp, Homo sapiens
cccggggaaccactaccaccaagttgtggagactggtagtggccccaaatgccaggctgcactgatatttattggatacaagacaaaggggcaggataaggagagtgaaccatctccaatcataggtaaggccacgtgggtcacatgtccactggacagggggcccttccctgcctggcagccgaggcagagagagagaggagacaaasagagaaacaacctacaccattattagagacttttagtactttcactaatttgctactgctatctagaaggcagagccaggtgtacaggatggaacatgaaggcagactaggagcgtgaccactgaagcacagcatcacagggagatggttaggcctccagataactgcgggcaagcctgacaatgtcaggccctccacaagaggtggaggagcagagtcttctctaaactcccccggggaaagggatactccctttcccgggatactccctttcccggtctgctaagtagcctgtgtttttccttgacactgaggctaccgctagaccacggtccgcctggcaacgggcgtcttcccagacgctggcgttacctctagaccaaggagtcctctggtggccctgtctgggcataacagaaggctcgcactcttgtcttctggtcactcctcactgtgtcccctcatctcctatctctgtatggcctggtttttcctaggttatggttatagagcaaggattattataatattggaataaagagtaattgctacaaactaatga

SEQ ID NO: 918027 - DNA, 748 bp, Homo sapiens
agaataatcctctctgtgaactccttgcaaagatgatatgaggctaagagaatatcaagtccccaggtctggaagaaaagtagaaaagagtagtactattgtccaatgtcatgaaagtggtaaaagtgggaaccagtgtgctttgaaaccaaattagaaacacattccttgggaaggcaaagttttctgggacttgatcatacattttatatggttgggacttctctcttcgggagatgatatcttktttaaggagacctcttttcagttcatcaagttcatcagatatttgagtgcccactctgtgcccaaataaatatgagctggggattaaatacgaataagacatggtttctgccatcaaagatggctggtgggagagagagatacacccttattaagtgctttgtgttagtttattcatagctattgttatatatgtcaaggcaagagaggaccagagcaggacagaggcaatgggtattgaagttgaaggggtacatttgataagagagtcggtattgagaagtttaaatttgtgaatttgaaggctgcgtgggtgtggcaggtaagggaaatgaggtatctgggaaggcttgagtgtaggcaaatttattcatcccaagtcaaactcttgatctctctcacgaaaactatgaccccccctggttgcccctgacctctcaatgttggaacaagccacaaccgtggagttatccttgatgactccccattcattatcccttct

SEQ ID NO: 918028 - DNA, 748 bp, Homo sapiens
agaataatcctctctgtgaactccttgcaaagatgatatgaggctaagagaatatcaagtccccaggtctggaagaaaagtagaaaagagtagtactattgtccaatgtcatgaaagtggtaaaagtgggaaccagtgtgctttgaaaccaaattagaaacacattccttgggaaggcaaagttttctgggacttgatcatacattttatatggttgggacttctctcttcgggagatgatatcttgtttaaggagacctcttttcagttcatcaagttcatcagatatttgagtgcccactctgtgcccaaataaatatgagctggggattaaatacgaataagacatggtttctgccatcaaagatggctggtgggagagagagatacacccttattaagtgctttgtgttagtttattcatagctattgttatatatgkcaaggcaagagaggaccagagcaggacagaggcaatgggtattgaagttgaaggggtacatttgataagagagtcggtattgagaagtttaaatttgtgaatttgaaggctgcgtgggtgtggcaggtaagggaaatgaggtatctgggaaggcttgagtgtaggcaaatttattcatcccaagtcaaactcttgatctctctcacgaaaactatgaccccccctggttgcccctgacctctcaatgttggaacaagccacaaccgtggagttatccttgatgactccccattcattatcccttct

SEQ ID NO: 918029 - DNA, 748 bp, Homo sapiens
agaataatcctctctgtgaactccttgcaaagatgatatgaggctaagagaatatcaagtccccaggtctggaagaaaagtagaaaagagtagtactattgtccaatgtcatgaaagtggtaaaagtgggaaccagtgtgctttgaaaccaaattagaaacacattccttgggaaggcaaagttttctgggacttgatcatacattttatatggttgggacttctctcttcgggagatgatatcttgtttaaggagacctcttttcagttcatcaagttcatcagatatttgagtgcccactctgtgcccaaataaatatgagctggggattaaatacgaataagacatggtttctgccatcaaagatggctggtgggagagagagatacacccttattaagtgctttgtgttagtttattcatagctattgttatatatgtcaaggcaagagaggaccagagcaggacagaggcaatgggtattgaagtkgaaggggtacatttgataagagagtcggtattgagaagtttaaatttgtgaatttgaaggctgcgtgggtgtggcaggtaagggaaatgaggtatctgggaaggcttgagtgtaggcaaatttattcatcccaagtcaaactcttgatctctctcacgaaaactatgaccccccctggttgcccctgacctctcaatgttggaacaagccacaaccgtggagttatccttgatgactccccattcattatcccttct

SEQ ID NO: 918030 - DNA, 569 bp, Homo sapiens
gaggcagctgcagaaccatggactcacagtcaaaaggcttagatgctcccacactgtaacttaccatccctatggcttagggcaagacactaaaccctggactctcagttttcttctctgcaaaagagtggcagttgtccctatctcattaggttgttataaagtgctattttccatcataatagcaaataggggacaaagsggtggaacaaaggacccagcaaatatgattgggggaaaaaaaagcgagaaacccagcatatttagggcccccagggagaggcagaccaccctaggtgtatgagtggggaaggaggcactcagaaatatggtttggaatgagcatgagtcttgtgatcatctggaggacagaaggaaagcatacttcctgagtacctactgtgtgcagggactgtgctagacactttcgagtacatttttttaaaaaagtatttatttcaataggattttagggagcaggtggtgtttggttccatgaataagttctttagtggtgatttctgggattttggtgtacccatcactcaagcagtgtacactgtacccaa

SEQ ID NO: 918031 - DNA, 757 bp, Homo sapiens
gttggctgggctaataacaaaagcattgtattgaggaagtttaggcatgaattttatcactccctagacatttctaagcaatagaaagggaggcattactatgaagttttaaaacgcatactactttgaaattatcamgtaagaatagtcacaagggaacccagtaagactgcaatttctccttgttttacaccacaggactgaaaagggagttgaaggagattaattacattccctgctaatcaatgcaaagacatatttttctgcttctccatctcataatttttatttcatctagtttgggcttttttagggttgccagatgtcccagtttcagtgggacaatcctgcgttttgaaggtacgtcccatctgctcttgaaaatatttctgttcactgatctctcatcgactgtagggtttttagagctgccagccagagtacggctgctggaaagaggatgataaattattgtaacactataaaaaaaaaaatcactcacatctaccgctaccccacctcagcaatgctgtgaattaattctgcaagaatgtttgtcatgaaaggtgaatctccacgtctccatatgggaatttgaagctcttttcacaatggctttgagaagatgctaccaggcaggaaagaatgcatggaatgagtcctggactagtcctcagaacatctggctctgccattttcctgaaaagtaacagtgggccagttacttaagagattgttttctgagcacctactctct

SEQ ID NO: 918032 - DNA, 588 bp, Homo sapiens
ctttgttgagtctcccacaattaccattgttcctggcctggacttcaatccagcctcccacattatcccagataccacacctgaccctcatgactgcatctctctgatccacctgacgttcaccccatttccccacatttccttcttccctgtttctcaccctgatcacacttggtttattgatggcagttccaccaggcctaatcgccacacaccagcaaaggcaggctatgctatagcacaagccactagcctgcctcttagaacctctcatttcctttccattgtagagatctattctcaaggaaataacttctcagtgttccatctgctattctactactcctcagggattattcaggccccctcccttccctacacwtcaagctcagggatttgcccctgcccaggactggcaaattagctttactcaacatgccccgagtcaggaaactaaaatacctcttggtctaggtagacactttcactggataggtagaagcctttcccacaggatctaagagggccaccacggtcatttcttcccttctgtcagacataattcctcagttcggccttcccacctct

SEQ ID NO: 918033 - DNA, 588 bp, Homo sapiens
ctttgttgagtctcccacaattaccattgttcctggcctggacttcaatccagcctcccacattatcccagataccacacctgaccctcatgactgcatctctctgatccacctgacgttcaccccatttccccacatttccttcttccctgtttctcaccctgatcacacttggtttattgatggcagttccaccaggcctaatcgccacacaccagcaaaggcaggctatgctatagcacaagccactagcctgcctcttagaacctctcatttcctttccattgtagagatctattctcaaggaaataacttctcagtgttccatctgctattctactactcctcagggattattcaggccccctcccttccctacacttcaagctyagggatttgcccctgcccaggactggcaaattagctttactcaacatgccccgagtcaggaaactaaaatacctcttggtctaggtagacactttcactggataggtagaagcctttcccacaggatctaagagggccaccacggtcatttcttcccttctgtcagacataattcctcagttcggccttcccacctct

SEQ ID NO: 918034 - DNA, 588 bp, Homo sapiens
ctttgttgagtctcccacaattaccattgttcctggcctggacttcaatccagcctcccacattatcccagataccacacctgaccctcatgactgcatctctctgatccacctgacgttcaccccatttccccacatttccttcttccctgtttctcaccctgatcacacttggtttattgatggcagttccaccaggcctaatcgccacacaccagcaaaggcaggctatgctatagcacaagccactagcctgcctcttagaacctctcatttcctttccattgtagagatctattctcaaggaaataacttctcagtgttccatctgctattctactactcctcagggattattcaggccccctcccttccctacacttcaagctcarggatttgcccctgcccaggactggcaaattagctttactcaacatgccccgagtcaggaaactaaaatacctcttggtctaggtagacactttcactggataggtagaagcctttcccacaggatctaagagggccaccacggtcatttcttcccttctgtcagacataattcctcagttcggccttcccacctct

SEQ ID NO: 918035 - DNA, 588 bp, Homo sapiens
ctttgttgagtctcccacaattaccattgttcctggcctggacttcaatccagcctcccacattatcccagataccacacctgaccctcatgactgcatctctctgatccacctgacgttcaccccatttccccacatttccttcttccctgtttctcaccctgatcacacttggtttattgatggcagttccaccaggcctaatcgccacacaccagcaaaggcaggctatgctatagcacaagccactagcctgcctcttagaacctctcatttcctttccattgtagagatctattctcaaggaaataacttctcagtgttccatctgctattctactactcctcagggattattcaggccccctcccttccctacacttcaagctcagggatttgcccctgcccaggactggcaaattagctttactcaacatgcccygagtcaggaaactaaaatacctcttggtctaggtagacactttcactggataggtagaagcctttcccacaggatctaagagggccaccacggtcatttcttcccttctgtcagacataattcctcagttcggccttcccacctct

SEQ ID NO: 918036 - DNA, 540 bp, Homo sapiens
taaataaaaagaaatctcagcaaagaaacaacatataaagaagaaataaatggaaattttaaaactgaaaaaatgcaagaaatacaattttttaactcaacagcagaataaagaaaagaatcactgagctagaagatagaacagtagaaactatctaatctaaacagagagaaactagactgggatttaaaaagctacgaagcgctgggcgaggtggctcaagcctgtaatcccagcactttgggaggccaaggcgggcggatcacgtggtcaggagatcgrgaccatcctggctaatacggtgaaaccccgtctctactaaaaatacaaaaaaattagccaggtgtggtggcgggcgcctgtagtcccagctactcgggaggctgaggcaggagaatggcgtgaacccaggaggtggagcttgcagtgagccgagattgtgccactgcactccagcctgggcgacagagcgagactccgtctcaaaaaaaaaaagccacgaagctcaggggcatgtgttgtgactcttaacaaaagatc

SEQ ID NO: 918037 - DNA, 586 bp, Homo sapiens
ccaattaaaccccttttttcttcccagtcttgggtatgtctttatcagcagcatgaaaatggactaatataccatataacctggcaatcccactcctaggtataaactcaagagaaagaaaatatatgtccactaaaacactagtgcacaaatgttcatagcagcattattcatattgtaaccacccaatgggttcaccttgcccactgcctagacagactcaatttatcaagacagatagagaaagagtaatacacacaaagccagctatgcaggagaccagagttttattattactcaaatcagtctcccgaagcatttgggaatcaaagtttttaaagataatttggtgggtgggggaaggacagtgatttgagagcgctgatttgttgggtcagagakgaaatcatgggaagttgaagttgtcctctggtactgagtcaattcttaggtgagggccacaagatcagatgagccagtttatcaatctgggtggtgccaagtgatccatcaagtgcagggtctgcaaaatatctcaagcactgatcttaggagcagtttagggaaggtcagaatcttgtaacct

SEQ ID NO: 918038 - DNA, 586 bp, Homo sapiens
ccaattaaaccccttttttcttcccagtcttgggtatgtctttatcagcagcatgaaaatggactaatataccatataacctggcaatcccactcctaggtataaactcaagagaaagaaaatatatgtccactaaaacactagtgcacaaatgttcatagcagcattattcatattgtaaccacccaatgggttcaccttgcccactgcctagacagactcaatttatcaagacagatagagaaagagtaatacacacaaagccagctatgcaggagaccagagttttattattactcaaatcagtctcccgaagcatttgggaatcaaagtttttaaagataatttggtgggtgggggaaggacagtgatttgagagcgctgatttgttgggtcagagagkaaatcatgggaagttgaagttgtcctctggtactgagtcaattcttaggtgagggccacaagatcagatgagccagtttatcaatctgggtggtgccaagtgatccatcaagtgcagggtctgcaaaatatctcaagcactgatcttaggagcagtttagggaaggtcagaatcttgtaacct

SEQ ID NO: 918039 - DNA, 602 bp, Homo sapiens
acttataagtgagaacatgcagtatttcgttttctgttcttgagtttattcgtttaggataaggatattgcatccatgttgctgcaaaagacacaattttattcttttttttctggctgcataatattccatggcatatatgtactgtattttctttagtctactgttgatgggsgtctaggttgattccatgtttttgctattgtaaatagtatcactgcaatcttaaagaacaaaaacaaagacaaaagctgttgaaggatctgcttgcttagaggcatctgttgaaggaactgtcttgctttggaggcaatgtttcaggcttcaaattgaaggcaatgagaccaacaaaaatttaagcaaggctatatcagatatgaagaaacttgtaatgacctggattggagaccagacacagaagcatatccttctcagcaccatgaaaattatggccaaagcaaaaagtttgtgatgttgaaagaaaaggctggacctgatcacaatgttgaatttgctgccagctctgggtggtttaaacaattcaagaatcattattcattgcatcatgtaaaaatgagcagtgagtctgcgagtgctgatgt

SEQ ID NO: 918040 - DNA, 583 bp, Homo sapiens
ggtgtgctgcacccattaactcgtcatttacattaggtgtatctcctaatgctatccctccccactccccctacctcatgacaggccccggtgtgtgatgttccccttcctgtgtccaagtgttctcattgttcaattcccacctatgagtgagaacatgaggtgtttggttttctatccttgtgatagtttgctgagaatgatgaggtgaaaccccttctctactaaaaaaactacaaaaattagctgggcgtggtracacgcacctgtagtcccagctacttgggaggctgaggcaggaaaatcacctgaacctgggaggtggaggttgcagtgagccaagatcaggccactgcactccagcctgggcgacagagtgagtctctgtctcaaaaaaaaaaaaaaaaaaaaaaaaaagaataaggtttaaaggaggtgctggatttatttccattaactttaagggagatttaaaaattctaggttgtttggtttaacaaaacctcttttaccttttttaaaaatttaaatgagtttccaatgtttaccttctagttagaacgtaaataatgagtatcatctc

SEQ ID NO: 918041 - DNA, 618 bp, Homo sapiens
aaaaaaaaaaaagaaaggaaggagaggaggatgaaggaaggcatcgtgaaggcgggagagcttagttctgattctagtcctagttttgggagattttccccttcagggtggctgaatatccacgtgcatttacatgaaatgctgtgaagattcttctgtcatgaagcctgaactgacatatataaccatttttttttttttgagacagagtctcactctgttgcccaggctggagtgcagtggcatgatctcggctcactgcaacatccacctcccaggttcaagtgaccctcctgcctcagcctcccaagtggcccacgccaccatgcctggctaatttttgtattttcagtaaagacggggtttcaccatgtaggccgggcyggtctcaaactcctgacctcaggtgatccacccacccaccttggtctctcaaagtgctgggattacaggcataagccaccgtgcccggctaggcacttataatcttaacttactcactataatggaatggatttcaaaacctggagaagctatatcagtacaacctaatgcctttatcagagaagggtgcggttggctgcaaaaattagctcaagacctctcccatcccaggat

SEQ ID NO: 918042 - DNA, 742 bp, Homo sapiens
tccatctcaaaaaaaaaaaaaaaaaaaaagaaaggaaggagaggaggatgaaggaaggcatcgtgaaggcgggagagcttagttctgattctagtcctagttttgggagattttccccttcagggtggctgaatatccacgtgcatttacatgaaatgctgtgaagattcttctgtcatgaagcctgaactgacatatataaccatttttttttttttgagacagagtctcactctgttgcccaggctggagtgcagtggcatgatctcggctcactgcaacatccacctcccaggttcaagtgaccctcctgcctcagcctcccaagtggcccacgccaccatgcctggctaatttttgtattttcagtaaagacggggtttcaccatgtaggccgggccggtctcaaactcctgacctcaggtgatccacccacccaccttggtctctcawagtgctgggattacaggcataagccaccgtgcccggctaggcacttataatcttaacttactcactataatggaatggatttcaaaacctggagaagctatatcagtacaacctaatgcctttatcagagaagggtgcggttggctgcaaaaattagctcaagacctctcccatcccaggatgtacatccctttgcaatgtgactatcccatgcttcttttctagaagtaaagtctgtttctctgccattttgttattattttttgagacagagtcttgctctgttgcc

SEQ ID NO: 918043 - DNA, 624 bp, Homo sapiens
cacgccaccatgcctggctaatttttgtattttcagtaaagacggggtttcaccatgtaggccgggccggtctcaaactcctgacctcaggtgatccacccacccaccttggtctctcaaagtgctgggattacaggcataagccaccgtgcccggctaggcacttataatcttaacttactcactataatggaatggatttcaaaacctggagaagctatatcagtacaacctaaygcctttatcagagaagggtgcggttggctgcaaaaattagctcaagacctctcccatcccaggatgtacatccctttgcaatgtgactatcccatgcttcttttctagaagtaaagtctgtttctctgccattttgttattattttttgagacagagtcttgctctgttgcccagtggagtgcagtggcatgatcatggctcactgcaacctctgtctcctgggctcaagcgatcctcctgtctcagcctcctgagtagctgactataggcatgcatcaccacgcctgcctaatttttgtattttttgtagacatgaggtttcaccatgttactcaggctggtctcgaactcctggactcaagcaatttgcctgccttggcctccca

SEQ ID NO: 918044 - DNA, 637 bp, Homo sapiens
tgcacaagataagactatgatgaaaaatgtttattagtcttattaatttcttcattcatgtattcactcaatcacttcatatagttggtcggtgatttagatatacacccattcttgaatgaaggtggcaatcacagggtgtatgccaatgcatagaattctagagttccttctccttgagtacttcagtttcaagcagaatacaggtgaaaaaatgcaacagaaaccatcaaatgttattwaagagagctataaaaattgcagtggaagtccaaaaaatggagtgacttatctatcatgcaaacttggggaagatgagattgtctctatttttgaattttactacaaagggcatgtacaaattttgattatcttcataaaacagaacatttaaaaaaatgtatttgcagtagacgtttgggttgtttttacttctgacatccaaaatgtaagttttctcctcatatcaaccaattctgcattctctggacaccaaccgggtattctacaattcaattccattcaattctgatatggtctacctggagttagtatcagatcctgttagttaagaggtcaggcacacaacactggtcccacttcagatgccagtcacaagtttcacttatcacccata

SEQ ID NO: 918045 - DNA, 599 bp, Homo sapiens
aagatcataccagctcaccagcaatgcatccaaaccaagaagaaatctctggattgccagaaaaagaattcagaaagtcgattagtaagctaatcaaggaggcactagagaaagatgaagtgcaacttaaagaaatcaaaaacatgatacagaatatgaaaggaaaatgcttcagtgaaataggtagtataaataaaaaacaaccacaacgtctggaaatcaaggacatacttagggaaatgtaaaatgcactggaaagtstcagcaatagaatcgaacaagtagaagaaagaacctcagcgctcaaagacaaggctttccaattaacccaatttgccaaagacaaagaaaaaagaattctaaaaaatgaacaaaaccttcaagaagtttgggactggtgttcctgaagaagcggagaaatctaaaagtttggaaaacctgtttgagggaataaatgagaaaaatttctccagccttactggagagctagacatccaaatagaagaagctcaaagaacacctgagaaattcattgcaaaaagatcattacctaggcatatagtcatcagattatctaaagtcaagatgagggaaagaat

SEQ ID NO: 918046 - DNA, 620 bp, Homo sapiens
gagaaacagtgtaaactggcagtgtaaacaagagcagggcatttatgagtagttgaaactggtgaataggagtatgactagacagaaaatagtagagatgacaagattttgggggcacagtctaagttggtctggtgtctgggatgagactggggcctaataaaaaggagcgtctatacgggagctcaaatgggctgtaccttctagcattctgaggtcaggcctgaattctgagaagggaaagtggtaaaagtatcgtccattcctttttaagttggtggctgagcttggtgaggtgtgtttttaaaagaccattagtctgttctacttttcctgaaaactgaggactgtaagggatataaacgtttcactgaataccaagagcctgaaaaactgcttggytgatttgactaataaaggctggtctgttatcagactggatagaggtgggaaggctgaacagaggaattatgtctgacagaagggaagaaatgactgtggtggcctcctcagaccctgtaggaaaggcctctacccatccagtgaaaatgtctacttagactaagaggtattttagttatctgactcggggcatgttgagtaaagccaatctgccagtc

SEQ ID NO: 918047 - DNA, 662 bp, Homo sapiens
caggggctgggtcacgtgggcccttgaggccatgttaaggaatctagattctaagaggtcacaagctattgggggtggtttaggtaggaatataatctgattttcaaagggataattctgcatgctgagtggagaatcaattctaaggggatagaaatgatagttaagaaattagaaaagacagggccaggtgcggtggctcacgcctgtaatcccagcactttgggagactgaggtgggtggattacgaggtcagaagatggagaccattctggctaacmcagtgaaaccccatctctactaaaaatacaaaaaaattagctgggcatggtggcgggcgcctgtactcccagctactcgggaggctgaggcaggagaatggcgtgaacccgggaggcagagcttgcagtgagccgagatcgcgccactgcactccagcctgggtgacagagtgagactccgcttaaaaaaaagaaaaagaaaaagaaaagaaaagaaataagcaaagacagtcctgcagaggtttagacaagggtggatggtggctttggactagggagtgaagctgggaaaaggatggatttgggttgctttttttttatggtagagcaattaagacttgctgggagattagataggtgattccacgcttaccaaacaac

SEQ ID NO: 918048 - DNA, 560 bp, Homo sapiens
tgccccaccttccactagactctcttccagcttcttccatttctgggcctgtcctacaattagctccatgatgagagatgccagcatctcctccaggatacatacatcaaggtcagaggcagcaagaactgatctgagtttcagtccaacctcacaggttcccacttctgcttktaggttccagctttttcctgtttctcaaagtttacatctgtcatggactgcaattcatgtccctgcaaaattcttatgttaaagccccaatcccaatataactgtccttggagatagcgccctttacagaagtaattaaggttaagcgatgataaggtagggtctcaatcggataggatgagtgtccttataagtgaagacactggagagcctgttctctccacatgtgcacaaagaagaggtcacgtgagcacacaacaagagggcactgcccacagccaggaagtggggaatcaccagaaaccgaaccctgcaagacactgattttggacttccagcctctggaagtatgagagaataaatgtgtgttgtttaagccacctagt

SEQ ID NO: 918049 - DNA, 560 bp, Homo sapiens
tgccccaccttccactagactctcttccagcttcttccatttctgggcctgtcctacaattagctccatgatgagagatgccagcatctcctccaggatacatacatcaaggtcagaggcagcaagaactgatctgagtttcagtccaacctcacaggttcccacttctgcttgtaggttccagctttttcctgtttctcaaagtttacatctgtcatggactgcaattcatgtccctgcaaaattcttatgtkaaagccccaatcccaatataactgtccttggagatagcgccctttacagaagtaattaaggttaagcgatgataaggtagggtctcaatcggataggatgagtgtccttataagtgaagacactggagagcctgttctctccacatgtgcacaaagaagaggtcacgtgagcacacaacaagagggcactgcccacagccaggaagtggggaatcaccagaaaccgaaccctgcaagacactgattttggacttccagcctctggaagtatgagagaataaatgtgtgttgtttaagccacctagt

SEQ ID NO: 918050 - DNA, 598 bp, Homo sapiens
gctgccccaccttccactagactctcttccagcttcttccatttctgggcctgtcctacaattagctccatgatgagagatgccagcatctcctccaggatacatacatcaaggtcagaggcagcaagaactgatctgagtttcagtccaacctcacaggttcccacttctgcttgtaggttccagctttttcctgtttctcaaagtttacatctgtcatggactgcaattcatgtccctgcaaaattcttatgttaaagccccaatcccaatataactgtccttggagatagcgccctttacagaagtaattaaggttaagcgatgataaggtagggtctcaaycggataggatgagtgtccttataagtgaagacactggagagcctgttctctccacatgtgcacaaagaagaggtcacgtgagcacacaacaagagggcactgcccacagccaggaagtggggaatcaccagaaaccgaaccctgcaagacactgattttggacttccagcctctggaagtatgagagaataaatgtgtgttgtttaagccacctagtctatggtaccgtattatgcagcaggtgccaactgag

SEQ ID NO: 918051 - DNA, 770 bp, Homo sapiens
ggaattcccgatccacaaaatcatgagtgatgatagggaaacagtttactgtgttaagccgttagatttggggatagtttgctatagagcatacataaacagaacagcaagtatgaggagctgtacacctcccacctgcctcccgcccccccccccaaaaaagcgataggactgatagttagagaaggaaaaggttaataaaggctgaaattgttggggaaaggtatagaaaaaggaagaaaccggaggctgagggagcagaaaagggaggctttgcacaggcagcttggggaaggccaggaaagtggatggaagcagggctctagctcaggtagggatgtacatgtatgtgtgaagagtggggtgtgggaaggagggaaatggttaagagactcttaacaaggagagctactgtaatgacacaggcaagccactttggctctccgtgaatattatgtgccttgtggccattgggtagccgtcagtagttagcggcaggtggtgatggtrgagttaatgggaagggggtggttgcaagctctacctctagcaacgtcactactaatgggatgagatcaagcagcctgtcacttaaaaacagacaaacacgacaaccctacagcctgtctgtggttcccaagaggtcttctccacccttgagggcactgaccagtacctggcagcacatgctccatttaacccccaggcctgtgtctgagccaggtggcaggatttcccatgaagcaaggagagagacacagggtcaaggg

SEQ ID NO: 918052 - DNA, 651 bp, Homo sapiens
ggcagacctcccctttgctgttctcatgaaagtgagtcagttttcatgaaatctggttgtttaaaagtgtgtagcacttccatctttgtgctcttttcctccttctgcagatatgtaagacatgacttcgtcctctttgccttccactatgactgtaagtttcctgaggcctccccagccawgcttcctgtacggcctgtggaactgcaagtcaattaaacctcttttctttataaataacacattcccagctatgtctttatagtagtgtgagaatgaactaatacccatgttctatattttttattcctttttcccattccaaggctgcgaggcaagaacctgaatcaagtctttctccctctgctccagtcacgagagccacatacctctacttaggaccaatttcatattctctgttactgaagttccgcttctttccctctggaacataactttctggagggaagattcagttctcatctctgaatcactcctggtcctctacatctgctctgcatgggacagaagtagagaatagaaaagatcatactcattccttaaaaaaatatttcagggcaatgagagagcctttcacagtctcccagagctctggagagaagtgcattttcagatggaacaagaagggtg

SEQ ID NO: 918053 - DNA, 651 bp, Homo sapiens
ggcagacctcccctttgctgttctcatgaaagtgagtcagttttcatgaaatctggttgtttaaaagtgtgtagcacttccatctttgtgctcttttcctccttctgcagatatgtaagacatgacttcgtcctctttgccttccactatgactgtaagtttcctgaggcctccccagccatgcttcctgtacggcctgtggaactgcaagtcaattaaacctcttttctttataaataacacattcccagctatgtctttatagtagtgtgagaatgaactaatacccatgttctatattttttattcctttttcccattccaaggctgcgaggcaagaacctgaatcaagtctttctccctctgctccartcacgagagccacatacctctacttaggaccaatttcatattctctgttactgaagttccgcttctttccctctggaacataactttctggagggaagattcagttctcatctctgaatcactcctggtcctctacatctgctctgcatgggacagaagtagagaatagaaaagatcatactcattccttaaaaaaatatttcagggcaatgagagagcctttcacagtctcccagagctctggagagaagtgcattttcagatggaacaagaagggtg

SEQ ID NO: 918054 - DNA, 651 bp, Homo sapiens
ggcagacctcccctttgctgttctcatgaaagtgagtcagttttcatgaaatctggttgtttaaaagtgtgtagcacttccatctttgtgctcttttcctccttctgcagatatgtaagacatgacttcgtcctctttgccttccactatgactgtaagtttcctgaggcctccccagccatgcttcctgtacggcctgtggaactgcaagtcaattaaacctcttttctttataaataacacattcccagctatgtctttatagtagtgtgagaatgaactaatacccatgttctatattttttattcctttttcccattccaaggctgcgaggcaagaacctgaatcaagtctttctccctctgctccagtcacgagagccacataccyctacttaggaccaatttcatattctctgttactgaagttccgcttctttccctctggaacataactttctggagggaagattcagttctcatctctgaatcactcctggtcctctacatctgctctgcatgggacagaagtagagaatagaaaagatcatactcattccttaaaaaaatatttcagggcaatgagagagcctttcacagtctcccagagctctggagagaagtgcattttcagatggaacaagaagggtg

SEQ ID NO: 918055 - DNA, 651 bp, Homo sapiens
ggcagacctcccctttgctgttctcatgaaagtgagtcagttttcatgaaatctggttgtttaaaagtgtgtagcacttccatctttgtgctcttttcctccttctgcagatatgtaagacatgacttcgtcctctttgccttccactatgactgtaagtttcctgaggcctccccagccatgcttcctgtacggcctgtggaactgcaagtcaattaaacctcttttctttataaataacacattcccagctatgtctttatagtagtgtgagaatgaactaatacccatgttctatattttttattcctttttcccattccaaggctgcgaggcaagaacctgaatcaagtctttctccctctgctccagtcacgagagccacatacctctacttaggaccaatttcatattctctgttactgaagttccgcttctttccctctggaacataactttctggagggaagattcagttctcatctctgaatcacycctggtcctctacatctgctctgcatgggacagaagtagagaatagaaaagatcatactcattccttaaaaaaatatttcagggcaatgagagagcctttcacagtctcccagagctctggagagaagtgcattttcagatggaacaagaagggtg

SEQ ID NO: 918056 - DNA, 593 bp, Homo sapiens
attgagctatcattacctggttactggtggttctcttctattaaactataatataattgtgggtatcgtagtcactattgtatctccagttgttatcatagcgcctactctataggagatacataacaaatatctgctgaatagacatcctctcacccaccagattacaagttctatgagacagaaactggtcatatttattttactactcatagtgtctgtaatagccttcaaggatagtcaccatctattcctccctccctatatgcacgtgcctccttcttgcaagagatgcattttatttctcctccccttgacactgagctagtctttttttctttatttcttctaaaaaacaaaacaaaartacgggatacatgtgcagaacatgcaggtttgttacataggtatacatgtgccatgttggtttgctgcacctagtgacctgtcctcttaagttacctcccctcacccctcaccccacaacaggccctggtgtgtgttgttcccttctctgtgtccatgtgttcttattgttcaactcccacttatgagtgagaacatgcggtgtttggttttctgttcctgtgttt

SEQ ID NO: 918057 - DNA, 642 bp, Homo sapiens
aatttggggtgggtggaagaggggacctatgagaactctatgtacttttggttcaattttttctgtaaactgaaaactgctccaaacaaatattaattaaaattttaaaaggttactggacccagattctagacatgtctctgactttgagcaaatcacagcctctctgggtcttatggaccaagagattagtgcgtgacccgctaccataggacatcctatgactggaataatgtatatttgtccaacttactcttttcattgaagagtgaaagagagatggagggtgcttgggcctcaggctcatgaatgtaagccctgagggtttctgggtatttgcagcagtggatcaggatccatgagatcacttccctctagcacatgaggtcactttgcakttaggggccccaataccaatgtgtttgtggtgtggtcctggtttgtttagaatggttaccaaatcccaacttcttcaaacattttttaaagtgatgattattttgcggcatgatagaaactgacacccacaaaatgtgttgactttaatgaagtagatgtgagaattaaaacatcttcctttccacacccagcttctgagcttgtgtgctgagctgcctgacagaaagttggcctctgcaggcc

SEQ ID NO: 918058 - DNA, 773 bp, Homo sapiens
ctgtggataaagttgtacagagccacaatgtaaacccagcctatttttccaaccacaactatcatgtaaaatattgggatgttggggcacagttagcatgcatctgtggcacattaaaaggagaagtgggtattggtagcaaaaaaaatactaaatcataatctcccaagtggaaaatcaataggcaacaccttagctgaaaactctaagtaagaagagcatattatatacaaataggaagttatttgtcaaaagaatcaactaaaagagtcaagaggggctccctctagggtgcaaaaattggaaaaggagaacagaaggctactggggctttgttttggcactctgacattttatgtatcggtaaaacctttttaaaatcaaaactaaataatattattttaaatcaratggaaatctgcgagatatagcaaatgttttgcatttaattttctatgctcactttgtacttcattgatatttaaaaattacctatattggtcttcagggacactcataccatagagaaagcatgtgggaagatatgcacgtaagtatatttgggatatgggcaagtgtgaattcgctggacctggtcctctttcctaccagtcatggaattttagagtaggaagtagtcatctgaaaagatcagctcatctaattcctttttttacatagataaagaacgtgaagcttggcttaagcaacctggccaagcgaagtatgttctttacttacttcccttgtgtaagaacaaatatgttttcttg

SEQ ID NO: 918059 - DNA, 763 bp, Homo sapiens
gggagcagcatgtatacaacttgcaggaaccaaagtggaaaatagggaccaaatcctccaaatacctaaaatctgtatttggattgctaattgctgcttctgaccacagaggtacagacaaagatatgagtggccatttccccattgttgcaaacccctctttctctagctagagtgactttcacaggatttraaagaccagtaccctctcatccctttctttatttttctttttccaacttttggagccagacatgaaacactaagatactgagaaacaactacatatacagggaaaattggaaagggatcatgcatgtttagagaaaactgcagactcagaaaggcctgaaaatattttaagtttacacctcaagctaatcattggcacaaatacagtcaatgacaacccaaaaagcaaaacaatgaacaactttttaaaaagcaaaccctgaggaagagggagaatctgatttgctattagataatttatgaggttacaataattagataaattattagattcaaatacccacttttcaacaataaattacatggcatacaaagaaacaggaaatatggcacatgccaaagaagcagaaactgtccctaaaaatgacatgatgacaaatctaccagacaaaggctttaacaaaaatgtcttaaagattctcaaataactgaaggaagatgtggagaaagtcaagaaaacaaggtatgaataagttcaaatattaataaagacaaaacttaaaaagaaaac

SEQ ID NO: 918060 - DNA, 654 bp, Homo sapiens
agattatgtcttttgccataacatggatggagctagaagccattattctcagcagactaatgcaggaacagaaaaccaaatactgcatgttctcacttataagtgtgaactaaatgatgagactcatggaaccaagaggggaacaacacacactggggcctacttgagggttgagggtgaraggtgcaataggagcaaaaaaataactattgggtattatgcttagtacccagatgaagaaatcataattaccacaaaacccatgacacaattttatctgcatgtgtaccactgaacctaaaataaaaggaaaaataaatcaaagaaaaaaacaaatctcaattctgttccaagatggctgaataggaacagctctggtctgcagctcccagtgtgatcaacgcagaagacagtgatttctacatttccaactgaggtacctggttcatctcattgggactggttggacagtgggtgcaggccaaggagggcgagctgaagacctgggaagtgcaaggggtcgggagattaccctttcctagcaaaggcaaaccatgacagactgtacctggaaaatttggacacaaccaaccaaatagtgtgcttttccagtggtcttagcaaatggcaccccaggagattacatcttgcacc

SEQ ID NO: 918061 - DNA, 767 bp, Homo sapiens
tgtcctccatgttgatcattccaagggtcaatcctgagtcctcatcttacctgaccagcagcattttatgacacggatcattccctcctcctggttgcaccctctacacttggttgccaggacagcataccctcttggttttcttctgtttcttctcagtatctggctgatttggcctttactgtctaacctctcagtgttggaatgcccaggctctgtcctgagcctgtttttcttctctctccacactcactttcttaaaaatctcatctgtttcctgggccataaatgccacctctaatctgaaaactcataaatgtatttctccaactcaagcctctctcttgaactcctgactcacatatctaactatctagtcaacatctccactcgaatatctactgggtatctcaaactgaatagatctcatagagaattccagatcttacttttctaacctacctcatctgcagccttcatggtaactgcatcctttcatctgctcaggtcaaaagtcttagagttagctatgaatcytctctctctgccacatctcacatccagtctgtcaagagttcctgttgggttctcccttcaaatatatgcagtatctgaccacccaccacttccttggttactgccctgttctgaaccaccatcctttctcacctggcctaacccaataacctcctccctatctctcttcctctaacttaaactccatagtccattctcaaaacagcagccagagtgagcttcataaatgt

SEQ ID NO: 918062 - DNA, 589 bp, Homo sapiens
ttaacagctcagaactgttttctatgtctaaatttcaggttaacgatatcagccaaaatctatcttctcatacctattctcaaaggaacggtcttacaaaactaataatctggtcgagtgcggtggctcacacctgtaatcccagcactctggaaggcagaggcaggcggatcacctaatgtcaagagttggagaccagcctgaccaacatggtgaaaccccgtctctactaaaaaatacaaaattagctgggcatggtggggcattcctgtaatcccagctacttgggaggctgaggcatgagaatcacttgaactcgggaggcggaggttgcagtgagacaagatagcaccgttgcagtgagacaagatagcaccattgcactccagcctgggcaataagagctaamctccgtctcaaaaacaaacaaacaaaaaaaaaaaattcctgctttttctttgcctaaatttttatcaaatattttgaacagaagccacatgtatttctacactacaagaaaagcataagttcagaaataagtaatcataccccctagtcaaacttaactataggaaggaaggacaggaca

SEQ ID NO: 918063 - DNA, 600 bp, Homo sapiens
ttacaaatgatatacctgataagggattaatatccagaatatataaagaacccctatgaatccacatcagcaaataactgaattaataaacggacaaaggatttgcataaacatttctccaaagaagacatacagatggccaatgtgcccatgaaaagatgctcaacatcactaatcactaaggaaatgcaaatcaaaaccacaatgggatatcatctcacactcattaggatgtctactataaagtaaaacacaaaataacaagtgttggagaggatgcagraatatcagaaatcttgtgactgttggtgggaacgtaaaatggtgcagctactataaaaaacagaatggtggttcctcaaatattaataatgaaattaccaatataatccagcaattccacttctgggtgtatgcccaaaagaattgaaagcaagtactcaaacagagaaaagatagaagcaactcagtatccaacaacagatggatggataaacaaaatgtggtatatacatacaatggagtattattcacccttcaagaagaagttaattctgacacaaactataacatggatgaacctttaggggtctatgctaa

SEQ ID NO: 918064 - DNA, 740 bp, Homo sapiens
tccagctccagctccagccctggctcaaaggggccaaggtactgctcaggccactgcttcagagggtgcaagccataagccttggtggcttgcacatggtgttaagcctgtgggtgcacacagtgcaagagttgaggattcagagtctccamctagatttcaaagcatctagaaaagcctgagtgtccaagcagaaacctgctacaggtgaggagacctcatggaaagcctttactagggtagtaaagaggggaaatttggggttggcgaccccacacagagtccccactggggcactgcctagtggagctgtgataggagggccactatcctccagactaaggaatggtagatccactgacaatttgcaccctgtgcctggaaaatcaacagagactcaactccagcccatgagagcagctttgggagccaaacgctgcaaagccacagggaaagagctgctcaaggccttgggagaccaccccttacactagtgtgccctggacatgggacatgaagttaaagaaggctattttggagctttaagatttaactacttccctgctggattttgaacttggctggggcctgtagcttctttcttttggccaatttctgcctttgggaatgaaaatgattacccaatacctaactccattgcatcttggaagagactaacttgttttatattttacaggctcataggtaaaagggacttgtcttatttcagatgacacttt

SEQ ID NO: 918065 - DNA, 740 bp, Homo sapiens
tccagctccagctccagccctggctcaaaggggccaaggtactgctcaggccactgcttcagagggtgcaagccataagccttggtggcttgcacatggtgttaagcctgtgggtgcacacagtgcaagagttgaggattcagagtctccacctagatttcaaagcatctagaaaagcctgagtgtccaagcasaaacctgctacaggtgaggagacctcatggaaagcctttactagggtagtaaagaggggaaatttggggttggcgaccccacacagagtccccactggggcactgcctagtggagctgtgataggagggccactatcctccagactaaggaatggtagatccactgacaatttgcaccctgtgcctggaaaatcaacagagactcaactccagcccatgagagcagctttgggagccaaacgctgcaaagccacagggaaagagctgctcaaggccttgggagaccaccccttacactagtgtgccctggacatgggacatgaagttaaagaaggctattttggagctttaagatttaactacttccctgctggattttgaacttggctggggcctgtagcttctttcttttggccaatttctgcctttgggaatgaaaatgattacccaatacctaactccattgcatcttggaagagactaacttgttttatattttacaggctcataggtaaaagggacttgtcttatttcagatgacacttt

SEQ ID NO: 918066 - DNA, 595 bp, Homo sapiens
taaaaaaagtacatcccttaattaaaaatactttattgctaaaaaatgctgacacagaaacacaaagtaagtacatgctgttggaaaagtagcacggatagatttgtagcagggttgccacaaaccttcaatttgtaaaaaacgcaacaccggccaggcacggtggctcacgcctctaatcccagcactttgggaggcccaggcgggcggatcacgaggtcaggagatcgagaccatcctggctaacacggtgaaaccccatctccactaaaaacacaaaaaattagctgggcgcagtggtgtgcctttgtagtcccatataccggaggctgagacaggagaatggcgtgaacccgkgaggcggagcttgcggtgagccgagattgtgctactgcactccagcctgggtgacagagcgagactctctctcaaaaacaaacaaacaaacaaacaaaaaaacacaacacctgcacagcacaagaaagctgagcatagtaaaacgaggagctttgcctgtgttcttaggagtggaattgctgtgtcatatgggaactctacgtttaaccttgtgactgttagccttagactgccagac

SEQ ID NO: 918067 - DNA, 785 bp, Homo sapiens
cttcacctctcaatcccccctctaaacaggacaccccaactgctgctaggaattgggcgatgcccactctagctacttcctgctggataggggtaaagaaggggccctgcagtggtagtgtcctccagaggggaattctataggccagccaaagcgacaatggtccggtttttaaagccacrataactcggggttgagagggtagcggggaacaaaccaaaaccacaggaggttttttctttcagatggggaacacacaggcatcaacaggctcacccttgaaatgcatcctaagccactgggaccaatttgacctgcaaaccctgaaaaagaggcggctcatttttttctgcactatggcctggccccaatattctctctctgatggtcaaaaatggccacctgagggaaatataaattacaatactatcctgcagcttgaccttttctgtaagagggaagacaaacggagtgaaataccttatgtccaagctttcttttcactgaaggataatccacaactatgcaaagcttgcaatattggggaggaggacctctcagcttacccccatatcctagccttcctacagctccccttcctattaatgataagcctcctctaatctccaccacccagaaggaaacaagcaaagaaatctccaaaggaccacaaaaactcccaggctatcggttatgtccccttcaagctgtagggggaggggaatttggcccaacccaggtacatgtccccttctctctctctctgatttaaagcagatgacagt

SEQ ID NO: 918068 - DNA, 584 bp, Homo sapiens
aagacccccatctctacaaaacaagcatggtggcatgtacccgtaggcctagctccttgggagacttaggtgggaggatctcttgaacccagtagcttgaggttgcagtgagctatggatatgccactacactccagcctgggtgacagaatgagattctgtctccaaaaactaaaataaatacaaagctgaacactcaagaaagaaagttaaataacyaggtgcctgaaacacaaagggaaccaagaccactacagtacctgtgaattcaagcttcatttgctctagaaggtaggggacaaggggaaaaaaaaaaaccttccctgaggaattaataaccatgagcctgtgccttatgtgagcttaaggtttacttttagaacaatatgatagaggatatacgataaagttagtatttttaatgtgtatgtgtatttttacacatttaaaatgtgtaaaagaagaaatgcaagaataaacaagagtgaatgaaataagaacaggtagaaatgcaaaacaatcaaacttccagaaattataaataaaacttagtgaataagttaaacggcagattcgacacagcc

SEQ ID NO: 918069 - DNA, 578 bp, Homo sapiens
ggctgaggtgggagaatcgcttgagcctgggaagttgaggctgcagtgaaccaagattgcaccactgaactccagcatgggcaacaggagtgaaaccctgtctcaaaacaaaactaaactaaactgaaactaaaaataaaaataaatggaaacaacagcaacaacaacaaagcttaaagagaacacattcagaagaagagtggagaaatatgaagaggggaagtaatagtaaaaacaaaagtccagacaggtaaatctactgctatgttagggtaggatatttgctgaaatcaggttgactgaaaggtgtgtgtgttttgagcctggggtctgaggggccacacgagaagtatttcttcagaaaggtgaagttgagaatctttgtcaattcacattctgccgacacctscagaaagctctttggttcctctttctgctgagacatggccatttcccctcctgctggacaacaggatgcctggactcccttcgtcgatgttgcactcagctcctagcttcacctctgcctcagtgcttctccctggaggaactttgagctgcctattgaggggcatgtg

SEQ ID NO: 918070 - DNA, 729 bp, Homo sapiens
gtaaatggaaaatttactgctagggattttagtaaacttgtaatgagaaaaaaacaggaattttaattcacagctttgcatttgtggctattgcatgtggatgtatgatgaaaactgatgtgcaatgttatgtgcctataatttcataaatgctagaagggtcayctcaatcaggaaaagctgcaaagaaaaagtgttaatgaaacacagctcccttgcttttttgccacaggcgggtggattggaatttatactcttggtattggaaacaaggctcagtaatggatgatttttttttttttgccataattttgcctactggagactctggaaaagggagccaatctccaaatgaagacacacttctggggttttcaaagcaggtttcgggggttagggagttgtgcggttttgtttgtttttgccaataagctcttgtgaaatcagatttctgacccttagaggctgatgattttctagcctgacatgcatatttttgcaagggtcaatttgaacaatctggcctaacagggtaaaaaagtccttaggaacagccttgcctgttacttggacttgaaacacaggtatctggcctacagcgtcttagctttgctgccgctgctgaagaaaagcctctaacttttttgaatactgaattcacagatcctaattccctggacctgaatgaaacctgatactgccggctacaggctatttcaatttcagcac

SEQ ID NO: 918071 - DNA, 699 bp, Homo sapiens
atatttttgcaagggtcaatttgaacaatctggcctaacagggtaaaaaagtccttaggaacagccttgcctgttacttggacttgaaacacaggtatctggcctacagcgtcttagctttgctgccgctgctgaagaaaagcctctarcttttttgaatactgaattcacagatcctaattccctggacctgaatgaaacctgatactgccggctacaggctatttcaatttcagcactgagctgtgctgaactgcaagtcggcacaggctcaacgaacagaactcagtctctggaactgccacaaatttaagacatccctgtggggtcacagctataaaacatcatggatgctagctgaccatctgggtcacctgcagatgccctagagaaaaaggcttgttctctgatgggaccattagaaatggagctgctgatggactcgatatttctgatacgggatacaagagcctgattgcattcctaacttttgattctagccaaaggctgcaatttagggaagggcacaccacagggtatgtgacccctctgcccacccctgatagatcagactctcagggatgtctcaaggctgttgacttgtgttccactttccaggttagttgcagtttgcaacagtggaccgatagcctgactttacttcccttgcctttctcctgttgtacacaacttggtaag

SEQ ID NO: 918072 - DNA, 578 bp, Homo sapiens
gcattaccctaaaacaaaagcaggcagacattgcaagaaagaaaaactgaccagtatgtctcatgaatgtaggtgcaaaaatcctcagcgaaatattagcaaatcaaatccaacaatacatttaaaaaattacacaacttggcaaggcgcagtggcttacgcttgtaatcccagcactttgggagaccaaggcggggatcacctgaggtcaggagttcaagaccaggctagccaacatggcaaaaccccgtctctactaaaaatacaaaaaattagccaggcatgatggtgtatacctgtagtcccagctacttgggaagctgaggcaggagaatcgcttgaacccrggaggcagaggtttcagtgagctgagattgcgccactgcactctagcttgggtgacagagggagactctgtctcaaaaaaataaataaataaaaaataaaaaagtatacaccttgacctagtgggatttattccagatatacaaggctagttgataatcaattaatgcaattcattataccaacagtataaagacaaaaatatcattcgaacatatcaatagatgcagaaa

SEQ ID NO: 918073 - DNA, 578 bp, Homo sapiens
gcattaccctaaaacaaaagcaggcagacattgcaagaaagaaaaactgaccagtatgtctcatgaatgtaggtgcaaaaatcctcagcgaaatattagcaaatcaaatccaacaatacatttaaaaaattacacaacttggcaaggcgcagtggcttacgcttgtaatcccagcactttgggagaccaaggcggggatcacctgaggtcaggagttcaagaccaggctagccaacatggcaaaaccccgtctctactaaaaatacaaaaaattagccaggcatgatggtgtatacctgtagtcccagctacttgggaagctgaggcaggagaatcgcttgaacccgggaggcagaggtttcagtgagctgagattgcgccactgcactctagcytgggtgacagagggagactctgtctcaaaaaaataaataaataaaaaataaaaaagtatacaccttgacctagtgggatttattccagatatacaaggctagttgataatcaattaatgcaattcattataccaacagtataaagacaaaaatatcattcgaacatatcaatagatgcagaaa

SEQ ID NO: 918074 - DNA, 583 bp, Homo sapiens
cacttgaggggccataatctcgaagagcaaggaggtactgagaagtaaacactaccctccaactttgttctcaaaacattgccaggttcttaaaccacacaggggagagtgctgtgcatctaaacagaaagatgctaaaaagtagatcaaagttcaaagcgctctcaaggtgctgagaaggcaaaaaatgtggagtaggagtttgccaattctaaatgtgagagcatctaatgatgtagcctgaaatatatatgaagcaaaactgagaactaaaaagagacatagacaattacacacacatmgagaaaaacttgagcacccattttttttttatgaaataaataaggagttattaccagatgggtgctctgggattcaagaccaggtttgtctgaccccagacctgagacacaataactctgagcattactttgccaagtttacatcatcttcacctcttgaacctacatcgttctctaagttggatttcctttgcttgattttcattttgtgttttcgagatcactctcagtgagtggttcatcatcacatcctaaataacctattttatagttcctgacat

SEQ ID NO: 918075 - DNA, 583 bp, Homo sapiens
cacttgaggggccataatctcgaagagcaaggaggtactgagaagtaaacactaccctccaactttgttctcaaaacattgccaggttcttaaaccacacaggggagagtgctgtgcatctaaacagaaagatgctaaaaagtagatcaaagttcaaagcgctctcaaggtgctgagaaggcaaaaaatgtggagtaggagtttgccaattctaaatgtgagagcatctaatgatgtagcctgaaatatatatgaagcaaaactgagaactaaaaagagacatagacaattacacacacatagagaaaaacttgagcacccattttttttttatgaaatamataaggagttattaccagatgggtgctctgggattcaagaccaggtttgtctgaccccagacctgagacacaataactctgagcattactttgccaagtttacatcatcttcacctcttgaacctacatcgttctctaagttggatttcctttgcttgattttcattttgtgttttcgagatcactctcagtgagtggttcatcatcacatcctaaataacctattttatagttcctgacat

SEQ ID NO: 918076 - DNA, 648 bp, Homo sapiens
agtttgtggggggagggcatgggcagcctggcacatgtccatgtgggccgctgtgctggagctctctgctggtcagacactgtctgccagcacaggcactgtcatgcaggccccaggaggtacctcccctctgggctgcgctgaaagcaggtgcatccaggctggggcctcaggagaggccagcagactgaaggatgctcagatcagaccagctccctctcgggcaggtccaccctgcagagttcatgtctgacagttcttcataaattctcctytgggagcaagttgagcctaggggaacaggcattcctgctcatgctccactacagatgttcccgcaccaaatcctctgggctctgcactggctggagttctgcccctaccatttctctaagcagctctcgttgccagctcaagtgtctgtggtggtcatgggctttccttctgctgggattccagaggcctgtggcaagagcgggctgttccttgcctattcaattaacccattccctcagagtcactgggaccaggaacaagtcatggtatgcacggtagccccatacatggttctcagcttccttcctcttcagccccgcttctgtatctttcttccatctgctctcaatgccttccctctgaagatctgct

SEQ ID NO: 918077 - DNA, 878 bp, Homo sapiens
ctgctttctcaaataccagaggaagcagaatggtttacagtcctggatattaaggatgcctttttctgcatccctgtacatcctgactctcaattcttgtttgcctttgaagatccttcgaatgcaacatctcaactcacctggacttttttaccccaagggttcagggatagcccccatctatttggccaggcattagcccaagacttgagccaattctcatacctggacactcttctcctttggtatgtggatgatttacttttagcttcctgttcagaaaccttgtgccatcaagccacccaagcactcttaaatttcctcgctacctgtggctacaaggtttccaaaccaaagacccagctctgctcacagcagkttaaatacttggggctaaaattatccaaaggcaccagggccctcagtgaggaacatatcaagcctatactggcttatcctcatccccaaatcctaaagcaactaagagagttccttggcataacaggtttctgctgaatatggattcccaggtatggcaaaatagccagaccattatatacgctaattaaggaaactcagaaagccaatacccatttagtaagatggatacctgaagcagaagcagctttccaggccctaaagagggccctaacccaagccccagtgttaagcttgccaacagggcaagactttacttcgtatgtcacagaaaaaacaggaaatagctctaggagtccttacacaagtctgagggatgagcttgcaacccatggcatacctgagtaaggaaattgatgtagtggcaaagggttggcctcattgtttatgggtagtggcggcagtagcagtcttagcatctgaagcagttaaaatgatac

SEQ ID NO: 918078 - DNA, 736 bp, Homo sapiens
ctaacccttatactctgctttctcaaataccagaggaagcagaatggtttacagtcctggatattaaggatgcctttttctgcatccctgtacatcctgactctcaattcttgtttgcctttgaagatccttcgaatgcaacatctcaactcacctggacttttttaccccaagggttcagggatagcccccatctatttggccaggcattagcccaagacttgagccaattctcatacctggacactcttctcctttggtatgtggatgatttacttttagcttcctgttcagaaaccttgtgccatcaagccacccaagcactcttaaatttcctcgctacctgtggctacaaggtttccaaaccaaagacccagctctgctcacagcagtttaaatacttggggctaaaattatccaaaggcaccagggccctcagtgaggaacrtatcaagcctatactggcttatcctcatccccaaatcctaaagcaactaagagagttccttggcataacaggtttctgctgaatatggattcccaggtatggcaaaatagccagaccattatatacgctaattaaggaaactcagaaagccaatacccatttagtaagatggatacctgaagcagaagcagctttccaggccctaaagagggccctaacccaagccccagtgttaagcttgccaacagggcaagactttacttcgtatgtcacagaaaaaacaggaaa

SEQ ID NO: 918079 - DNA, 614 bp, Homo sapiens
tgcagtactgcactgttttaaatattaaagtattatagcatatattaatatttagtaaggctaacctcctattactgctctaccttttcagagttttcctgggtattttcttttttcactgtcccttgtgaacttcagamtcaatttgttttgttccacaaaaacaacatattgatattttaattgtaattacctttgatttgtaagctaacttagagagaatgatgtctttacaatattgacttttactatccacatacattgtatagcttctcaaagtttcaaatcttcttttatttctttcatgaatattgggaagcctttctctcatatgtttttctcgtttcaaattattttttctatgtaattcatcttttttgtggcttctcaatcttcatttggactaattagttgctgatgaatacatgaaaactactgattactaacttatgtgtagtaatttttcagatgggaatttttttcttattgaataaagcccagacttgtttctctgtttgtttgtttgtttattgagatggagtctcactctgtcacccaggctggagtgcaatggcatgattttggctcactgcaacctctgcctcccaggttca

SEQ ID NO: 918080 - DNA, 622 bp, Homo sapiens
agacaaagggggagaagggggtagtgccacacacttttaaaccatcagatctcatgagaactcactcatgagaacagcaagggggatatctcgtcctcatgatccaatcaccttccactaggtctctccctcaacattggggattacaattcaacatgagattgtgtggagacacagagccaaaccatgtcattccaccccagcccctcccaaatctcatgtccttctcaaatttcaaaacacaatcatgccttcccaacagtcccccagactgttaactcatttcagtattaattcaaatgtccaagtccaaagtctcatgtgagacaaggcaagttgctttggcctacgagcctgtaaaataaaaaacaagttaagctactctcaagatacaatgaggayacaggcattgtgtaaatagacccattccaagagagagaaatcagccaaaacaaaggggctacaggccccatgtaaatccaaaaccagcagggcagtcactaaatcttaaagcttcaaaatgatcttctttgactccatgtctcacatccaggccacactgatgtaacggatggtctcccaagaccttgagcagctttgcccctgtggcactgcagggtac

SEQ ID NO: 918081 - DNA, 618 bp, Homo sapiens
aactctattttgtgtacactcatcatggagttacttattttgggaattgagtatcctatgaaattcattatcaagtttattatagaaatattttatctttgctggttttttttagaattacaaaagttaaaaaatttttttccatatgttttgcttacacaataaggatatttgtgttatgtctacataaaaaagaaacgagttgttaaaaagagggaaaatagtcattatggtggttgatttatctatatgccactaaacaattggtttggcagacttctcttaattgattcaattatcattataaaatatggtcttaatatctacttgataattaatttccgactcaaaaccccaccttccctgcctttagaaatctgctaatagaaatgaagtttcaaaaataagtrtcagtgaaattgaagaatctggagtccagatgaaggaaatagagccagttcatgtaatgaagttctaattcattcagctttaagactatacaaaatttgggttcctcaattcttttttttttttttttttttttttgagacacagtttcactctcgttgcccaggttggggtgcagtggtgtgatctcagctcactgcaacctccacc

SEQ ID NO: 918082 - DNA, 607 bp, Homo sapiens
ggctattgtgaagagtgctacaataaacatgggattgcagatatttctttgacatactaatttccttccctttggatatgtacctagcggtaggattgctggaacataaagtagttctattttagtttttttgagaacctccataatgttttctataatggctttattaatttacattcctaccaacagtgtataagagttcacttttctccacagccttgccagcatttgttattttttgtctttttwaaaataggtgtgagaaaatatcttattgtggttttggtttgcatttgcctgatgattagtgatgttgagcattttttcatatacctgttggccatttctatgtcttcttttaagatgtctgttcagcttatttgcttattttttaatcggattattattattttttgctattgagttgtttgagttctttgcatattctggctatcaattccttgtcagatgaatagtttgcaaatatttcctcccattctgcaggttgtctcttcactctgttgattgtttcctttgctgtggagaaggtttttttgtttgatataatctcatttgtttatttttgcttttgttgcctgtgcacaaa

SEQ ID NO: 918083 - DNA, 557 bp, Homo sapiens
aaaatcgttgaacttgctgccctaagtaatatcctcttccaagaaaaggcaaggtgttcggacaaggagggtgagtgttacaaggtgaagtaagaatattagcaagaactaaatcatgtgcttatgcaggccttgatactccctctgaaagttataccaaattttatatatatatatatatatatatatatatatatatataacgtatacttatatatataaaatgtatgtttatcaatgagttctctgaaacaccaacttttgtatcattgtaactgcctcttctatctcctttcttttcctcctttcttattccctttcaaatgtaccatacttgagcttttatgctacacctggtttttacatagaaaaggaatttaatgagagtgtgcctgtcactgyacaaagaatattcccatttgatctttacagctaccttcttttttttttttctgagacggagtctcgctctgtcgcccaggctggagtgcagtggcgtgatctcggctcactgcaagctccgcctcccgggttcacgccactctcctgcctcagcc

SEQ ID NO: 918084 - DNA, 447 bp, Homo sapiens
tcagtgagaagcagcctaagctgttttggcatcagggagaaaggtcagggccgggtgtggtggctcatgcctgtaatttcaaccctttgggaggctgaggctgacagaccacctgagatcaggagttcaagaccagcctgaccaacatggtgaaaccacatctctactaaaaatacaaacattagctgggcttggtggcacatgcctgtagttccagctacctgagaggctgagacaggagaatctcttgaacccaggaggcggaggttgcagtgagccgagatcacgccactgmattccagtccgggtgacagagtgagactccgtctcaaaaaaaaaaaaaaaaaaaaagaagaagaagaaataaaaaagaaaggtcagggcacatgtaatttagaatattccagcacatttactatggtggagagaggacatcaagagttcctg

SEQ ID NO: 918085 - DNA, 658 bp, Homo sapiens
aaatctagttctgggttcactgccttctcacttgtcccctcgcccctagtaactttctgttcctcaccatccgcagtggcacctccgatgctttcagccaggagaacctagggtttgtgtgctgtggggaccaggttgctcctagggtggacaaatagaaggagatggttttatcgccaccttggaatgtgtgtgtgttttcagacagactctcgctctgtcacccaggctggagtatgtaccatggtgcgatcatagctcattacagcctccaactccttcttcagtgtccagagtagcaggggctaatttttttttaattttttaattttttttttgagacagtctctgttgcctgggttggagtgcagtggcgcaatattggctcactacaacctctgcctcctgggttcaagtgattttcctgcctcagcctcctgagtagctggaattacaggcacctgccaccatgcccagctaattttttgtatttctagtagagacggsgtttcatcatattggcccggctggtctcaaactcctgacctcatgatttgcccaccttggcccccaaagtgctgggattacaggcatgagccaccgcgcccagcagcaggagctaatttttaagaattttttgtagcaacaagttgttgct

SEQ ID NO: 918086 - DNA, 573 bp, Homo sapiens
tattgattggaatagtttcacaaggaatggtaccagctcctccttgtacctctggtagaattcggctgtgaatctgtctggtcctggacttttcttggttggtaggctattaattattgcctcaatttcagagcctgttattggtctattcagggattcaacttcttcctggtttagtcttggttggatttctaaattagaatgagatacggttttagagggcaactggtaacaattataaaaatgaaaatttaggtaatcatcctaaaatttaagagttattgcactaactcttgtttgtcaacatgtttcagatttccaaaggaaatgaacccacaggggcygtcagtgagtagggtactcaaaatattatgacatattgcttgtgagaatggacctatacggtggggaagacagacataacacagtggtgtactggagttggctggaactagatcacaagagctggttgttatattttcagaaattttcccagccagttgtttaaccattggtggcttgaaaaactccacaaatcagggatctgttttctttctttcttgttactttttt

SEQ ID NO: 918087 - DNA, 573 bp, Homo sapiens
tattgattggaatagtttcacaaggaatggtaccagctcctccttgtacctctggtagaattcggctgtgaatctgtctggtcctggacttttcttggttggtaggctattaattattgcctcaatttcagagcctgttattggtctattcagggattcaacttcttcctggtttagtcttggttggatttctaaattagaatgagatacggttttagagggcaactggtaacaattataaaaatgaaaatttaggtaatcatcctaaaatttaagagttattgcactaactcttgtttgtcaacatgtttcagatttccaaaggaaatgaacccacaggggctgtcagtgagtagggtactcaaaatattatgayatattgcttgtgagaatggacctatacggtggggaagacagacataacacagtggtgtactggagttggctggaactagatcacaagagctggttgttatattttcagaaattttcccagccagttgtttaaccattggtggcttgaaaaactccacaaatcagggatctgttttctttctttcttgttactttttt

SEQ ID NO: 918088 - DNA, 596 bp, Homo sapiens
aggtttctgagcctcagttttctaaactgccaaaatagtgtaaatttgttgagagtatcaaaaggattagtgtacaagtttgtcaagaatctgacacaagcctggagacgtggtggtagctaaataaatacttgctgttaattatattatctggtgactttttgaaacctytgggtatttgggcgattgagaaaaacatcctttctctgtctctcacaaacacagcacactcacacagacacactcacaaaaggctctttgctcctcatctttctgaatgtttaactcttttccactgatgtcctatcaccaagctggttcctaacatttgtgcagccccagactagagtacataaggagactcatatactatatagtcttttaatagcgttagtgaagtgaaattgattacacaataaactgtccgtgattgattttgatattgtatatacccatgtatacctccatgaaaacatcgtcacagtcaagattgggaacatatcaaatacactccaaagatccccctctgcccctttgtgagtctaccctcccaccttccaactctacccaccccccagccccaggcaacctttgct

SEQ ID NO: 918089 - DNA, 663 bp, Homo sapiens
caagccctgtggcccacacatatttatagacttttcagcaataaaggtgatattttgacttttttttttttttttttttctgagatagagtctcactctgtctgccaggctggagtgcagtggcacgatctcggctcaccgcaagctccgcctcccagtttcacgccattctcctgcttctgagtagctgggactgcaggcacccgccaccacgcctagctaaatttttttgtattttttttagtaaacacggggtttcaccgtgttagccaggatggccttgatctcctgacctcgtgatccacccacctcggcctcccaaagtgctggaattaaaggcgtgaaccaccacacccaggctttttttttttttttttttttgtgatggsgagtctttctgtgtcacccaggctggagtgcagtggtgcgatcttggctcgctgcaacctccgtctcctgggttcaagcagttctcctgtctcaccctcccaagtagctgggattacaggcacacgccaccatgccccagctaatttttgtatttgtggtagagacctggttggtcaggctggtcttgagctcctgacctcaggtgatccacctgcctcggcctcccaaagtgctgggattacaggcgtcagccaccgtgccaggcccacattt

SEQ ID NO: 918090 - DNA, 735 bp, Homo sapiens
tgagctatgatcacaccaatgcactccagctctgggcatcagagcaagactgtccctaaaacaatttttttttttttttttttcagacagagtcactgtgtctcccaggctgcagtgcagtggtgcatcttgggtcactgcaacctccacctcctgggttcaagcaattctcgtgtctcagcctcccaagtagctggaactacaggtgcatgccaccacgccaggctaattttttgtatttttagtagaggcggggttttaccatgttagccaggctggtctccaactcccgacctcaggtgatcctcctgtgttggcctcccaaagtgctgggattacaggcatgaaccactgagcctggcctctaaaaaaaaattttttttttctttttgagacggagttttgctcttgttgcccaggctggaatgcaatggcgtgatctcggctcacggcaaactctgcctccggggttcaagtgattctcctgcctcagccttcctgagtagctgggattacaggcatgcgccacgatgcccagctaattttgtatgtttagtagwgacagggtttcttcatgttggtcaggctggtcttgaactcccgacctcaggtgatccactcgcctcggcctcccaaagtgctgggattacaggcctgagccactgtgcccagcctaaaaaatttttaagtaaaaataaaaaataaatgttttccataagaaaagaaatcatactg

SEQ ID NO: 918091 - DNA, 583 bp, Homo sapiens
aagaatgtttagcctctgaaatgtacctagtatgaagacatcccacaaggagagttgtgatcttcctcaatctccccaaacagactaaaggttataggaaaatagatttcttctatctgattctaaggcgtaaggatgataagaaccacccacattctggctgggcgtggtggctcacgcctgttatcccagcactttgggaggccaaggcgggtggatcacctgaggtcaggagttcgagaccagcctgaccaacatggcaaaaccctgtctttyaccaaaaatacaaaaaattagctgggcatggtgccgggcacctgtaatctcagctactcggggggctgaggcaggagaatcacttgaacccaggagatggaagttgcagtgagctgagatcgtgccactgcactgcagcctgggcgacaagagtgaaactccgtctcaaaaaaaaaaaccgcccacattccaagcagcgttgttacactgtttttctcatttaatcatatcaccaatcccatgcagtaggtttgactacattgaatttgtatacttgaggaaacaaagggtcacagaaaataaataa

SEQ ID NO: 918092 - DNA, 715 bp, Homo sapiens
gtgatacctggaagcaaggcatgttcaacatggaggctccttcttcccttttctttgtcaacatgtgtgcagtaaagaagcagacaacctggggccggccagacagaggattcatctgcataacaaaagattaggatggggtggccagcttcttcccaagctatgtaaatggcacacctggtccgaccaatcttttgggccctatgtaaatcagacactgcctcctcaagctagtctatgataccccatgcatttcacctcagaacctgaagacgcactccagagcccctctctatttgcaggagaaagagcttttctccttcttttgcytattaaaccttcactcttaacctcactgcttgtggtccatgtccttgatttccttggtgtgaggccacgaaccttgggtgttaccccagacaaacaatgccatttcattactacccaggacatgggagactgattacaccagggggacactgtcaggcctctgagcctaagctaagccatcatatcccctgtgacctgcacgtacacatccagatggccggttcctgccttaactgatgacattatcttgtgaaattccttctcctggctcatcctggctcaaaagctcccctactgagcaccttgtgacccccactcctgcctgccagagaacccccctttttcctttacctacccaaatcctataaaacggccccacccctat

SEQ ID NO: 918093 - DNA, 798 bp, Homo sapiens
cttcccacttcttctccagcctgactttcctttcacatgtagtgaattgtgggtttcacttcctgcagtttcagttacctatggccaaccagggtccaagaaaattaaatggaaaattccagaaataaacaattcataagcttttgttgttgttgtttttgaaatggagtcttattctgtcacccaggctggagtgcagtggtgcaatctcagctcactgcaacctctgccttccaggttcaagcaattcttctgcctcagcctcccaagtaacctcctgagactacaggcgcccgccaccacacctgtctaatttttgtacttttagtagcgatggggtttcaccatwtcggtcaggctggtctcgaactcctgacctcaggtgatccactcgcctcggcctcccaaagtgctgggattacaggggtgagccaccgtgccttaaattgcgtgtttgttctgagtagtgtgctgcaatatctcatcatcccatttgttcagtgctatctacctgggagcacaaataaccctttgtcagtgtattcacgctgtctacactacctgcccactagtcactcagtagccgtcttgattatcagattggctgtaacagtatcaccatgcgtgtgttcaagtaatgcttattgtacttttattacagcacattgttataatagttctaatttattattgtgaatctcttactgctcctaatttataaactttctcagaggtatatatgtataggaaaaatcatagtgtgtctaggggtcagtgctatttaaggtttcaggcacc

SEQ ID NO: 918094 - DNA, 732 bp, Homo sapiens
ccggggcagggacacctagcccggtgcgtctgcatgccctggcagggttccagcagcgagccctgtgccacgcgctcactttcccttccctgcagcggctcgtctactccatgtgctccctctgccaggaggagaatgaagacatggtacaagatgcgctgcagcagaacccgggcgccttcaggtacagggcgtgcgccagggtcgtggagggggggatggggtgaactgctctcttacccagcattggggctgtttctcttgcaggctagctcccgccctgcctgcccggccccaccgaggcctgagcacgttcccgggtgccgagcactgcctccgggcttcccccaagaccacgcttagcggtggcttcttcgttgctgtaattgaacgggtcgagatgccgacgtgagtgagtgggggcatgcttgggaggcgcaggatggtactggcacatctaacatctacayttctctagctcagcctcacaggccaaagcatcagcaccagaacgcacacccagcccagccccaaagagaaagaagagagcaaaaagctgcagccggtgcttgcacaccgccttgcacatagcagaggctccgggctcactccttcctggtgggaaaggaagatgcctgtcctctccgtggaagaccctgggccctcaccgcaggcagcagtttgcgttttgaaaggttattgggtcccttcctcgggctgtgttcttgctgg

SEQ ID NO: 918095 - DNA, 557 bp, Homo sapiens
caccccaccttaaaacggacacatcctaatctttggaagttgagaatacgttactttacatggcaaaaggatatttgcagatgccatcaaaataagcaccttgagctagggagcgtatcgtgggttattcatgtgggtccaatctaatcacatgccttcttgaaatcagcagaggtttctcattccctcgctttcagagagaaatgtgactgtgggagaggatgggagagatacaactaaattggctttgaaggtggaggaaggggaccrtcagccaaggaatgtgggtggcctctagaagctgtgaaaagtcaggaaatagattcttctctagagactccagaaaggaatgtagctctgctgatacctatattttggccagcaagacctgtgtctggtttataacctatagaaatgtaaaatggtaaatttgcattgttttaagccactgagtttgtgataatttgttacagcagcaataggacaccaatgcaggctggaatgataagaaagaaacttccatgaaaatgatggcacagctttgtttgtaattggag

SEQ ID NO: 918096 - DNA, 645 bp, Homo sapiens
agaattaaccacaccctagtcacaatgagcacactgagagcccagatcttgttttctagtactattctgcagtaagaagaactagagctccttggagaaatagctgattctagaggtagggcaggacatatccaagataagcctggaacatcagtagagccagaaygtaaggaaatgctcaaaatacaagcaaacaaaattacaaaaactaacagacacaatgatggggatgggtcaaaggaacactggcaccaacggaaagaactcccaatggccaaagctggaacaatttgaataagaaaataaagctaactagattataacccaaagtataaaacaaatacccatgagtccatactgctataaagaaatgattggatcaataaataaatgagagctagtagacaaatctcccatgcagaagaattcaaaataatttaggtagatactctgcccacaaggaagcaggatctagtaacatcctttcagagagtacagtatgaaaatgctggaaatcaagtaatgctcagtggagaaagcaagaaacaccagttcagccaggtgatcaaggtcagtatcagcagtgatgtcatgttttatctgcaccattgatacaagatgataagagtggcactttacctctga

SEQ ID NO: 918097 - DNA, 659 bp, Homo sapiens
actcatctagttgtaaatttataacagaaggctttgaccgtatgtaaattatacctcaataaagctaattttaaaaaacaacgcatgacagtgacaacctcctgcctcaggacacgtcattcttgttacctggaatgccttccccttcttgcaccttttgagcctggctcccaatcctaaatttccaaatcattctttttctacttccttggaattgtaaaatttcattactayaaaatttttggtccatgttaacatgttgctttttataattttgctggtttcatcagcgcatatctgacattaaaccaatccattgatgattataccactatccttaattattattattgatggaaataaatatcttcagtgcacacactataagacatgactcatggctgggcacgttggctcacacctgtaattccagcactttgggaagctgaggcaagcggatggcttgagttcaggagtttaacaccagcctgggctgtaacatggcaaaaccccatctctacaaaaaattaaaaatttagccagacatggtggcatgcacctgtagtgccagctacaagggaggctgagaggtgggaggattgcttgagcccaggagatcgaggctgcagtgagccaagatcatgtcactgcactccagc

SEQ ID NO: 918098 - DNA, 734 bp, Homo sapiens
tcttttaaagtgctatatgatggtcatttgaagcaaggaaaatctgacaaactgtctcagccaagaggaacctaagaagacaaagcaactcaatctaatacggtatcctggatgggaaccggaaacagaaaaggggcattagataaaagctgaggaaatctgagtagaggatggaccttggctaatagtaaygtatcagtagcagttcattcattgtaacgcatgtaccacacctgtgtaagatgttcctaatgggggaactgggtgtgggggatatgggaactccctgcactatcatcacaatttttctgtaaatctaaagctgctctaaaagaaaatgcttactaaaaaaaaaaaaaaaaagaaagaaaaagaaaaaaatgggaggctgaggtgggcggatcacaaggtcaagagatcaagatcatcctgaccaacatggtgaaaccctgtctctattaaaaatacaaaaattagctgggcgtggtggtgggtgcctgtaatcccagctactcaggaggctgaggcagcagaatcgtttgaacgcaggaggcagaggttgcagtgagccgagatcgcaccactgcactccatccagcctggtgacagagcagaactccgtcaaaaaaaaaaaacaaaaaacacttctgccagcctgctgtgtcattgattgttactgaagaacagaaaggaccaccacagttgaacctgctaaaagttagaaaatcaacaga

SEQ ID NO: 918099 - DNA, 621 bp, Homo sapiens
tccccagtacttagccaagggcctggcatattaggtgcacaaatatttcttgaatgactaactgggtcacttttatctggctctccctgcaccaagataaggctcagatcccaaacaaatcccccatcttgctctaatattccagggtgacagccctgttccttcagagacagctagtgctcagaaggcagagcgaagctggaaggacacagatgtgggaacagatcattcctgggtgtgtattccttgcacatgtgtatctttctagatattggcaaatacatatatatatatatatwttttttttttttttttttttttttttttgagatggagtctcgttctgttgcccaggcaggagtgcagtggcatgatctcagctcactgcaacccccgcctcgtgggttcaagcaattctcctgcctcagcctcctgagtagctgggattacaggcacctgccaccacgcctggctaattttttttatttttagtagagacagggtttcaccacattggtcagcctggtctcgaacttctgacctagtgatctgcccacctcagcctcccaaagtgctgggattacaggcgtgagccaccgcgccgggcctggaaaataattt

SEQ ID NO: 918100 - DNA, 759 bp, Homo sapiens
acttcaggtataccttgggctcccacttcagagcatgcaagccataagccttggaagcttccatgtggtgttaagcctgtagaaatacagaatgcaagaatgaaggaaatcttggtttggcatctgccagctagatctcagaggatgtatggaaaagcctgggtgcccaggcagaagcctgctacagggttggagcccccawagagaaactccagggcaatgctgaggggaaatgtggggttggagcaccctacacagagtccatactagtggagctgtgggaagggtccaccaccctctagaccccagaatggtaggtccacttgcagcttgcaccctgagcccagaaaagctgcaggcactcaactctaacccacgagagcagtcacatgggctgtgcccaggaaaggcacagggatgaagctacccaaggccttgggagcccatcccttgcaccaggatgcaagatacagagttaagaattatgctggagctttaagatttaatgcctgccctgctgggtttcagacttgcatggggccttgtaccctcttctttttgccaatttctcccttttggaatgggaatgtttactcaatgcctgtacaccactattgcatcttggaagtaaataatttggttttgactttgcaggctcatggatggaagaaacttgacttcagtttcagatgagactttggactttgaacttttgagtgagttgatgctagaatgctttaagattttgaagaactttgg

SEQ ID NO: 918101 - DNA, 810 bp, Homo sapiens
agctgagattgcaccaccgcactccagtctggacggcagagtgaaactctgtctcaaaaaaaaaaaaaaaaaaaaaaacacacacacacacacatacatatattggaaaatgaacagaactctaaagaaaattaacacattcacaattatcgatgtcaatatatctgtatcagaaactactacatcaagaagacaaaggaagacttgatgtctgttcttatatatccatgaacaacctttccattgtttttttcaagcatacagaacagttatgtttactgactacaaagaccacataattgatattgtactgaatatattctttgactaccatacattaaaataggaaaccattttttaaaagtaatcaataaaaaacccctattcttttaataggtacatttccaagaagtagttaaaaaaggaatcatgtcaggaggtctgaaatacttagaatcacacaacaatcacagcaatatatgtgagatagagatttatatgctagaaaaaacaaaaagttgaaaaatcartgaattaaacatttgactcaaaaagttagtaaaagagaaaacctaaacaaataagacattgtaataagaagaaattaaataaaaaaagaaataataaggaaggtaaacaaaagtagtgcatatatgtttaattaattaattaattattttttgaaatggagtcttgttctgtcacccaggctggagtgcagtggcagaatcttggctcactgcaacctctgccacccaggcttaagcgattctcctgcctcagcctcccaagtagccgggactacaggca

SEQ ID NO: 918102 - DNA, 474 bp, Homo sapiens
tcctttcttccagccgatcgaattggctattgaagcttgtgtatgctttacgaagttctcatattgtggttttcagctccattaggtcatttaagctcttctctacactgtttattctagttagccattcgtctaaccttttttcaaggtttttagcttcctcgtgatgggttagaacgtgctgctttagtttggagaagttwgttattaccggcctttgaagcctacttcggtcaacttgtcaaactcgttatccatccagttttgttcccttgctggcgaggagttgtgttcctttggaggagaagaggtgttttggtttttagaattttctgcctttctgctctggtttctccccatctttgtggttttatccacctttggtctttgatgttggtgacctatgtatgggattttggtgttgatgtcctttttgtttatgttgatgctattcctttctgtttgttagttttc

SEQ ID NO: 918103 - DNA, 551 bp, Homo sapiens
aaaagggcatttctgtatgagacatttacttactacatcctcccacctctttgctccaatagtaatttgtagcccctctattagagcagtaattgtggcagactcaatcagtgacttgcctctgcacaagctagtaagttgcacgtctttttcaactttgtagcacccacctaatggcagtatattttaggagccctgctagggcagagtatacctatatggtcaaatcaatgagatgcatatattaggaaataggagtaaatcatgttatttttgattcaatgtaaagaaataatggtctctaaggatgcagagtgagaaaatatcactcactaagtaaggtttagcagtataattttccaatacatttcttttttttattatttttttatttttttattatyatactttaagttttagggtacatgtgcacattgtgcaggttagttacatacatatacatgtgccatgctggtgtgcttcacccactaactcgtcatctagcattaggtatatctcccaatgctatccctcccccctccccccacccc

SEQ ID NO: 918104 - DNA, 551 bp, Homo sapiens
gaatccttctctgagagtcgataatcttgcacttagatgtgggacatgaggataaaaagaggagtcatagatagttctaagacttctgcattggcagaaggtgaggggaccacagccttaaatataagtctctcgaatgactttaggcagttccttgtcccttcctctttcctttccttcggctttctttctgtccctcctttcttccttagtctgtgcattctcctcactcattctgtaaatatttcctgagtgcacaacaaatgcctgctacttccacaggaaaacagcacagaaccrgtccctcctctcttagctttttttttttttttttttttttttttttttgagacggagtcctgctctgtcgcccaggctggagtgcagtgatgcaatctctgctcactgcaagctccgccttccaggttcacgccattctcccgcctcagcctcccaagtagctgggactacaggcgcccaccaccacgcccggctaattttttgtatttttagtagagacggggtttcaccgtgttagccaggatggtcta

SEQ ID NO: 918105 - DNA, 635 bp, Homo sapiens; identical to SEQ ID NO: 917458

SEQ ID NO: 918106 - DNA, 635 bp, Homo sapiens; identical to SEQ ID NO: 917459

SEQ ID NO: 918107 - DNA, 581 bp, Homo sapiens
cgctgtccccgttggacatggccggacgcatggatttccgaagccatctctccatctggcagctttattaacccaattccagggatcgagtgattgacgtgtttgcttatcggctcctcctgtctctccagggacgggtgcccaggtgcccccaccccacctccatcggcccagggggagaggggacaccagatcccccccacagccccgagaccaacgcgcrcacgcacacacacacacacactcacagtgactcccgctcaggggctcttggtggctggatcaattcaagtggatctttggagaacatgatgggccaatgtctaacaaaatttaaaatgtgaactcaggccaggagtggtggctcacgcctgtaatcccagcattttgggaggccgaggcgggcagatcacccgaggtcaggagttcgagaccagcctggccaacatggtgaaaccccgtctctactaaaaatacaaaaattagccgggtgtggtggtgggtgcctgtaatccaagctactcgggaggctgaggcaggaggatcccttgaaactgggaggcagaggttgcagtgagctg

SEQ ID NO: 918108 - DNA, 581 bp, Homo sapiens
cgctgtccccgttggacatggccggacgcatggatttccgaagccatctctccatctggcagctttattaacccaattccagggatcgagtgattgacgtgtttgcttatcggctcctcctgtctctccagggacgggtgcccaggtgcccccaccccacctccatcggcccagggggagaggggacaccagatcccccccacagccccgagaccaacgcgcgcacgcrcacacacacacacactcacagtgactcccgctcaggggctcttggtggctggatcaattcaagtggatctttggagaacatgatgggccaatgtctaacaaaatttaaaatgtgaactcaggccaggagtggtggctcacgcctgtaatcccagcattttgggaggccgaggcgggcagatcacccgaggtcaggagttcgagaccagcctggccaacatggtgaaaccccgtctctactaaaaatacaaaaattagccgggtgtggtggtgggtgcctgtaatccaagctactcgggaggctgaggcaggaggatcccttgaaactgggaggcagaggttgcagtgagctg

SEQ ID NO: 918109 - DNA, 799 bp, Homo sapiens
tttgtgccaattctatcgagctttagaagctgaggacactcccaagtggaccaagacacatacacatgagaccactacttctcacgctttttggactcatcttaataggttttgcatgggaacccgatacgtttacacgtacacacaagtatcacatgcagaaatcaaagtttcaggacaggacggttactgtatgtgcctgcactctggtctcttctagtttcttttcctttttcttacctagcataaccattaaattgaattcacaacccacaaagaggtcacagcctgaggactggaaaacagtgaactagacaacctcagcgctctggcgcttccagaaaaccgcgtgtcactgcagcatcctccgcatcatccagcaaggagggaggtgactgtcatccccatttacaagggaggagacagagcagggggctctagatgggccgccccatgaagtcagccagtcagcccaagcacctggactcggatctcccaaacctcatgcgatttctactccatcgcactgcctttccacgtggctttcaaagtcattgctaagccttgtttccatgatgccacactcaagttttaggtgaaaatctattacgaaatggaaactttttttggaaactatactgctgcagaaaatgygcacactgtctagagtctttgttccgggtgcagtgggcgggagggaagaacctacaacatacggtctataggatagctgctttttcaaagtgagtgggggtgctggaggtacaactagaactgtcattgaacagtcatttgctgc

SEQ ID NO: 918110 - DNA, 739 bp, Homo sapiens
tgaaaaatgaaattggcagattgatgaaatagcactgaatccataaattgctttgggcagtatggctattttaacaatattgattctttttatccatgagcatgaaatgtttttccatttgttttggtcatctctgatttctttcagcagtgttttgtaattcttgttgtagagatctttccactscctggctagctttattactaggtattttattctttttcttgactattgtgtatgagattgcattcttgatttggctctcagactggacattcactgtatattattggtacatagaaatgctgatttttgtacattgattttatatactaaagctttactgaagttatcagttctaggagcttttgtgcagagactatggggttttctaagtatagaatcatatcctctgcaaagagagatagtttgacttcctctcttcctatttggatgccttttatttcattctcttgcctgattactctggctaggacttccagtactatcttgaataggagtggtaagagtgagtatcgttgtcttgttctgattcccaaggaaaatgcttccggcttttgcctgtctggtataattttagctgtgagtttgttatagatggcttttgttgttgctttgagacaaggttcttgctctgtcacccaggctggagtgcagtgatgcaatcacagctcactgcaacctctgccctcctgagctcaagtgcctcccacctcag

SEQ ID NO: 918111 - DNA, 646 bp, Homo sapiens
gagcatgaaatgtttttccatttgttttggtcatctctgatttctttcagcagtgttttgtaattcttgttgtagagatctttccactccctggctagctttattactaggtattttattctttttcttgactattgtgtatgagattgcattcttgatttggctctcagactggacattcactgtatattattggtacatagaaatgctgatttttgtacattgattttatatactaaagctttactgaagttatcagttctaggagcttttgtgcagagactatggggttttctaagtatagaatcatatcctctgcaaagagagatagtttgacttcctctcttcctatttggatgccttttatttcattctcttgcctgattactctggctaggacttccagtactatcttgaataggagtggyaagagtgagtatcgttgtcttgttctgattcccaaggaaaatgcttccggcttttgcctgtctggtataattttagctgtgagtttgttatagatggcttttgttgttgctttgagacaaggttcttgctctgtcacccaggctggagtgcagtgatgcaatcacagctcactgcaacctctgccctcctgagctcaagtgcctcccacctcagcctc

SEQ ID NO: 918112 - DNA, 626 bp, Homo sapiens
gctacttgggaggctgaggcaggaaaatcgcttgaacctgggaggcagaggttgcagtgagccgagatcatgccactgcactccagcctgggtgacagagtgagactgtgtctcaaaaaaaaaaaaaaaaaaaaaatgcctcagttttgttaagaggaaaaagcaaatcctaagttacagtggaacttatgaacaccctagcctagagatttaatttagtgatgaaaaggtacagagagagtctttcaagaaaggacctagtctgctcgcgttctctctctctctctctctatatatatatatgtatatgtgtgtgtacatatggaccacttcaagctacacacacacacacacatatacacgtgtatgaatatatatatatggctataagtggtgcgacttgcaggkactccctttgttcacctttgtaaagatgttattgccagttcagtgtgtatttctatagtatatatgtaaacaatttgtcatccttttgttgctgcttttgaaactagttcatggcttcagtgggggagagatttaaataatatgggtttataatttctgcattattaaatgcagataacttgtgattaaagagtatgttattggaatcatgtttgcct

SEQ ID NO: 918113 - DNA, 626 bp, Homo sapiens
gctacttgggaggctgaggcaggaaaatcgcttgaacctgggaggcagaggttgcagtgagccgagatcatgccactgcactccagcctgggtgacagagtgagactgtgtctcaaaaaaaaaaaaaaaaaaaaaatgcctcagttttgttaagaggaaaaagcaaatcctaagttacagtggaacttatgaacaccctagcctagagatttaatttagtgatgaaaaggtacagagagagtctttcaagaaaggacctagtctgctcgcgttctctctctctctctctctatatatatatatgtatatgtgtgtgtacatatggaccacttcaagctacacacacacacacacatatacacgtgtatgaatatatatatatggctataagtggtgcgacttgcaggtactccctttgttcacctttgtaaagatgttattgccagttcagtgtktatttctatagtatatatgtaaacaatttgtcatccttttgttgctgcttttgaaactagttcatggcttcagtgggggagagatttaaataatatgggtttataatttctgcattattaaatgcagataacttgtgattaaagagtatgttattggaatcatgtttgcct

SEQ ID NO: 918114 - DNA, 608 bp, Homo sapiens
ttcaccaaaagagactccccattacttggtttcagaccctggaagtcttttgaaagaaaatacatccaactttaaataaaagtttcttttaaaacatcaaaggcaaatatgaacaatttgggagattatcaactagtgccaataaaatctctttaaggtagtatacacatacaaatcattatttwaaaaaaaaagatatttataaagactataaaagaaagtctccaaatcattatctaaaaagttttttcaggccaggcgtggtgactcacgcctgtactcccagcactttgggaggccaaggcaggagtagcacttgaggccaggagtttgagaccagcctggtcaacacagcaaaaccccatctccactaaaaatacaaaaattaagtggagcttgcagtgagcccagatcatgccagtgcactccagcctgggcaacagagtgagagcctgtttaaaaaaaaaagaagaagtttttccatgtatactttatgttatatacacacccccgccaccagcaaagcatgtgccatgtgcttgaattaaccttcatgtcttatgattataaaatgttaactgtgttgatactcacttggatcttcttac

SEQ ID NO: 918115 - DNA, 608 bp, Homo sapiens
ttcaccaaaagagactccccattacttggtttcagaccctggaagtcttttgaaagaaaatacatccaactttaaataaaagtttcttttaaaacatcaaaggcaaatatgaacaatttgggagattatcaactagtgccaataaaatctctttaaggtagtatacacatacaaatcattatttaaaaaaaaaagatatttataaagactakaaaagaaagtctccaaatcattatctaaaaagttttttcaggccaggcgtggtgactcacgcctgtactcccagcactttgggaggccaaggcaggagtagcacttgaggccaggagtttgagaccagcctggtcaacacagcaaaaccccatctccactaaaaatacaaaaattaagtggagcttgcagtgagcccagatcatgccagtgcactccagcctgggcaacagagtgagagcctgtttaaaaaaaaaagaagaagtttttccatgtatactttatgttatatacacacccccgccaccagcaaagcatgtgccatgtgcttgaattaaccttcatgtcttatgattataaaatgttaactgtgttgatactcacttggatcttcttac

SEQ ID NO: 918116 - DNA, 590 bp, Homo sapiens
gaatgtgagacaaagaaatggagacagtgaatacagacaagtctttccaaaagtctggcaacatagaagggaggaaagctagatggagttaaggagaagtatcaagagatcttctgctgttgagatggaagaaatcaaacatgttcaaatgttgatggaggaaactatttgagagatcagttgaatatacgagagagaagagatacttgataatataacacagcaaagtttgggaaaagatgagaaccagatggaaggatagagaaagaatagcttctctattagaacaggtggggcagaggagagagatggtaatagaaatagtgagtcttaacttcttagcaaaaagttaagatcgttccatccatctgacagagcttcaattttctctaggaaggagaaagtgaggttggccataagagaaaggactggrgaagtttgaggaaagtaaaaaaggaaagaaatactatcgttctggagaatgaagaacaagctgatctgacaaaaggatgtgaggcaagaattggggctcacttaagttgagtggtcaagaagtcacagtggtaccaacctgcgttagagtcacctcc

SEQ ID NO: 918117 - DNA, 749 bp, Homo sapiens
atgcttggtccagtttcacagaataaagaaagagtaaaagaagttaagattcattggccgggcgtggtggctcacgcctgtaatcccagcactttgggaggccgaggcaggtggatcacgaggtcaggagatcgagaccatcctggctaacacggtgaaaccccgtctctactaaaaaatacaaaaaattagccaggcatggtggtgggcgcctgtagtcccagctactctggaggctgaagcaggagaatggcgtgaacccaggaagcggagcttgcggtgagctgagatcacaacactccactccagcctgggcracagagagagactctgtctcaaaataaaaaaaaaataaaaaataaagaagttaacattcactgggtctagatgccaggcacaatgttacaaggaattctcctctaactctcttaggtttagtattgaatttccaatttcagatccataggtagcaagagttcaaggatcttatctgtctgttacccactgtctcaaagtgtttagcacagtaggggcgccacaactgtttgctgaatgaacagatgaaaaaaaaaatcaaggctcaaggatggtaaatttcccaaagaataataaaatgggctcaaacatcacctcagctccatttcacctgaggtcccttaaatgaatgcttttgtaggctgccaaggtgggaatcaaccctgtctgtcttccccgcagcagctttgctcaggagatatccatcaccagcc

SEQ ID NO: 918118 - DNA, 749 bp, Homo sapiens
atgcttggtccagtttcacagaataaagaaagagtaaaagaagttaagattcattggccgggcgtggtggctcacgcctgtaatcccagcactttgggaggccgaggcaggtggatcacgaggtcaggagatcgagaccatcctggctaacacggtgaaaccccgtctctactaaaaaatacaaaaaattagccaggcatggtggtgggcgcctgtagtcccagctactctggaggctgaagcaggagaatggcgtgaacccaggaagcggagcttgcggtgagctgagatcacaacactccactccagcctgggcaacagagagagactctgtctcaaaataaaaaaaaaataaaaaataaagaagttaacattcactgggtytagatgccaggcacaatgttacaaggaattctcctctaactctcttaggtttagtattgaatttccaatttcagatccataggtagcaagagttcaaggatcttatctgtctgttacccactgtctcaaagtgtttagcacagtaggggcgccacaactgtttgctgaatgaacagatgaaaaaaaaaatcaaggctcaaggatggtaaatttcccaaagaataataaaatgggctcaaacatcacctcagctccatttcacctgaggtcccttaaatgaatgcttttgtaggctgccaaggtgggaatcaaccctgtctgtcttccccgcagcagctttgctcaggagatatccatcaccagcc

SEQ ID NO: 918119 - DNA, 620 bp, Homo sapiens
tggcaaattagctttactcaacataccctgagtcagataactgaaatacctcttagtctaggtagatactttcactggataggtagaggcctttcctacagggtctgagaaggccaccacagtcatttcttccattctgtcagacataattcctcagtttagccttcccacctcaatacagtctgataacagaccagcctttattagtcaaatcagccaagcagtgtttcaggctcttagtattcagtgaaacctttatatcccttacagtcctccatcttcaagaaaagtagaatggactaaaggtcttttaaaaacacacctcaccaagctcagccamcaacttaaaaagcactggacaatacttttaccactttcccttctcagaattcaggcctgtcctcagaatgctacagggtacagcccatttaagctcctgtatagacgatcctttttattaggccccagtctcattccagacaccagaccaacttagactgtgccccaaaaaacttgtcatccccactatcttctgtctagtcatactcctattcaccgttctcaactactcatacatgccctgctcttgtttacactgccggtttacactgtttttccaa

SEQ ID NO: 918120 - DNA, 701 bp, Homo sapiens
aagagggttagccatgctttctccactttctcacttctattcttatgcccccttccatccagcttgcatctctgtcactccaaaaaccactcgacaaagttgacaatgacttctatttggcaaatggcaatggacagatctttccctgtctcatcttgccctctcagaaacattcatgacagtgaatcactcttgtccctctttgcttctttgtcccatattatccttgcttttcctcctacctctcagtctagttggttcttcctcctctgtaaaatcaccagatggatgggcccatctcctttccatttctttccttagaagatttcatcaattctcatggttaaaattatccatgtgctgataatgtcaaaatatatttttcatttcagattagtcctctgagttccagactttaatatctgactacttacttgtcatctgtactttgatgtatcacaaaattaaatgtctcctctttcccatcaatarctaattgtccatcaaccatcgatcatatccatctctgtaaatgacaccacactctgcctgaaccaaaaatctatcttaaatctacccatctgtctcgacctccactgccctcctggcccaagacagatcttcctggttccatctttgaccctttccatctttgctccggagcaagagtgatcttaaaatgtaaatcagagtggcatatt

SEQ ID NO: 918121 - DNA, 650 bp, Homo sapiens
tcagaacacaatttttcttttcttttcttttttttttttttgagacagaatcctgccctcttgcccaggctggagtgcagtggcgtgatcttggctcactgcaagctccacttcccgagttcatgccattctcctgcctcagcctcccgagtagctgggactacaggcacctgccaccacgcccagctaattttttgtatttttagtagagaccggatttcaccrtgttagccaggatggtctccatctcctgacctcatgatccatgcgcctcggccttccaaagtgctgggattacaggcgtgagccactgcacccagcccataatttttctttacccttgtattttctaaattttcttcaaccaatatggttacttcagcaactaaaactgaaacaacaataaatgctaataaataatgctaacaaaaattaaaacaattcctctcaaaaacaaacttgtggccaggtgtggtggctcaatgtctataatcccagcactttggaaggctgaggtgggcagatcacttgagtccagaagtttgaaaccagcctgggaaacatggcaaaaccccgtctctactaaaaatacaaaattagccaggtgtggtgatgcatgcctgtagtcccaggtactcaggaggcgagtt

SEQ ID NO: 918122 - DNA, 650 bp, Homo sapiens
tcagaacacaatttttcttttcttttcttttttttttttttgagacagaatcctgccctcttgcccaggctggagtgcagtggcgtgatcttggctcactgcaagctccacttcccgagttcatgccattctcctgcctcagcctcccgagtagctgggactacaggcacctgccaccacgcccagctaattttttgtatttttagtagagaccggatttcaccgtgttagccaggatggtctccatctcctgacctcatgatccatgcgcctcggccttccaaagtgctgggattacaggcgtgagccactgsacccagcccataatttttctttacccttgtattttctaaattttcttcaaccaatatggttacttcagcaactaaaactgaaacaacaataaatgctaataaataatgctaacaaaaattaaaacaattcctctcaaaaacaaacttgtggccaggtgtggtggctcaatgtctataatcccagcactttggaaggctgaggtgggcagatcacttgagtccagaagtttgaaaccagcctgggaaacatggcaaaaccccgtctctactaaaaatacaaaattagccaggtgtggtgatgcatgcctgtagtcccaggtactcaggaggcgagtt

SEQ ID NO: 918123 - DNA, 575 bp, Homo sapiens
ccctgaatatggtgggcctagttggactggcaccttaaattctgacaaatatatccagccatacaatgctaagagctttattcatttcataaatatttcagaaggcgattatagctaaatgatttttaaaaccacacaaaacctaagtttatccttttattaagagaaactctttataatggagagttttaaacataagcaaaagttgatctaagagaatagtgaacctctatatgcacattacttaataccaacaattatcatcaatcactttggcaatacagtctcatctatccctttatatttcaaagtaaatcccaracattgtatcattttattcacaaatatttcactatatcgatagatgagaaaaaacgcattctttacctcttattttaaggaatatattaatacactataatttttcattgttattgtttgaaaaattaaatattgcaataacttaataaaagccataaatgcaagagcatagtaattaagacaactgaaaagaatatacctgaaagggaaacattttccttcatttttctgccttctctttctataagtactta

SEQ ID NO: 918124 - DNA, 575 bp, Homo sapiens
ccctgaatatggtgggcctagttggactggcaccttaaattctgacaaatatatccagccatacaatgctaagagctttattcatttcataaatatttcagaaggcgattatagctaaatgatttttaaaaccacacaaaacctaagtttatccttttattaagagaaactctttataatggagagttttaaacataagcaaaagttgatctaagagaatagtgaacctctatatgcacattacttaataccaacaattatcatcaatcactttggcaatacagtctcatctatccctttatatttcaaagtaaatcccaaacattgtatcattttattcacaaatatttcactatatcgmtagatgagaaaaaacgcattctttacctcttattttaaggaatatattaatacactataatttttcattgttattgtttgaaaaattaaatattgcaataacttaataaaagccataaatgcaagagcatagtaattaagacaactgaaaagaatatacctgaaagggaaacattttccttcatttttctgccttctctttctataagtactta

SEQ ID NO: 918125 - DNA, 575 bp, Homo sapiens
ccctgaatatggtgggcctagttggactggcaccttaaattctgacaaatatatccagccatacaatgctaagagctttattcatttcataaatatttcagaaggcgattatagctaaatgatttttaaaaccacacaaaacctaagtttatccttttattaagagaaactctttataatggagagttttaaacataagcaaaagttgatctaagagaatagtgaacctctatatgcacattacttaataccaacaattatcatcaatcactttggcaatacagtctcatctatccctttatatttcaaagtaaatcccaaacattgtatcattttattcacaaatatttcactatatcgatagatgagaaaaaacgcattytttacctcttattttaaggaatatattaatacactataatttttcattgttattgtttgaaaaattaaatattgcaataacttaataaaagccataaatgcaagagcatagtaattaagacaactgaaaagaatatacctgaaagggaaacattttccttcatttttctgccttctctttctataagtactta

SEQ ID NO: 918126 - DNA, 643 bp, Homo sapiens
atcttctagaatctttatggtttcaggtcttagatttaggtctactcagccataaagaggaacgaaataatggcattcgcatgcaccttggatagaattggagactattattctaagtgaagtaactcaggaatagaaaaccaaacatcatatgttctcacttatatgtgggagctaagatataagaatgcaaaggcataagaataatacattgacattggggactcaggggaaagggtgagggatggtgaggaataaaagactgcacattgggtacagtgtaaactgctcgggtgatgggagcaccaaaatctcagaaatcaccactaaagaacttattcatctaaataaatgccacctgytccccagaaatctattaaaattaaaaatttaaaacaaaaacaaagatacgtgtaggaaaaaatattctgatttatagggtcaatgtttttctgtcatgagtcaagtataagtaaaatgttttcaaaacaaaaacattagtttgggctcagcagaaaagtctactgagttgcactggataattagatgttacagattccctgttgtgcacaagtgtggtgtgctcagagtacatcacacttggcacacactggttgaatgctagaatcacctgaggagcttt

SEQ ID NO: 918127 - DNA, 745 bp, Homo sapiens
ggagtaggggctaccaagagcatgtggctctgggcctccctgggagagtcactcagcggcaggagaactgagtgggacacatcagggagtgtctgtctcatggacgcctgttggcctgcagcctggagagggggcctgaagtgtgtgttccatgctcttgacccccaggaagcactcgcctctgttgaaagcctcgtgccgcagagcgcgattgctgtcccgggtggacggccatcacgggctccttgctccggcgatgycagcgctcctggtgttgtgtgtggctggctcccccttgtctcagccctgggcttagagcaggccaggtgctcaggcagtggttttgttgcttgaaggggggtgtgtacctggctgcagcctgtggagagcgtgagtggctggcagaagcaaaggcgggctcttgggagatgagagcaggcagccggcctggaggcttccatggggctggtcagctcctgctggctcttcctggcacaaatccacgctgggctgggtgccttggctcacacctgtaatcccagcactttgggagcctgaagtgggaggatcgcttgagcctgggagttcaagaccagcctgggcaacactgtgagaccctatctctatttttaaaaataaaaatataaagataacccttcctccaaaaaaaaaaaaaaaaacccaaactcatggtggaccttgggatgagcgggggcgcttgtggggcagaactgggtgtggttgc

SEQ ID NO: 918128 - DNA, 627 bp, Homo sapiens
cctcaaacccagacccccttccttgtgaccctgatgggcttacctgaggcctggggacagtgggggcccaggagagcacctcttcctcagaagacagttctgggctgcacctgctggggaggaagagacagacttgtctgcctgggaaagtcccagccacagaactggctgggcacccccactctccagagtggctcagagccacgcctgcggccccctgcagcactcctcagggggcctccgaattgggactgggatctgggggtggccacctccgaggaggagcagaggcagggaaagagcaggagcggccggaggacccatgagcttacctagtccaagagaccagccagggggtgcccagcagcccyggtggacagtgggaggcatccgcacagggtgcaggacaggcaggcctctcacagagatccagcctggctgggaggatggggaagctgacgtcacagcagcaaggaggcgcacagtgacttggcacggtgactcggcctgtcatcgcatgactaaagttcacgcagccctggcagggccctggatggcaggtgctatgagccggggaaagggtttccttcctttcagactcagttccctccaaagggcactgtctgc

SEQ ID NO: 918129 - DNA, 627 bp, Homo sapiens
cctcaaacccagacccccttccttgtgaccctgatgggcttacctgaggcctggggacagtgggggcccaggagagcacctcttcctcagaagacagttctgggctgcacctgctggggaggaagagacagacttgtctgcctgggaaagtcccagccacagaactggctgggcacccccactctccagagtggctcagagccacgcctgcggccccctgcagcactcctcagggggcctccgaattgggactgggatctgggggtggccacctccgaggaggagcagaggcagggaaagagcaggagcggccggaggacccatgagcttacctagtccaagagaccagccagggggtgcccagcagccctggyggacagtgggaggcatccgcacagggtgcaggacaggcaggcctctcacagagatccagcctggctgggaggatggggaagctgacgtcacagcagcaaggaggcgcacagtgacttggcacggtgactcggcctgtcatcgcatgactaaagttcacgcagccctggcagggccctggatggcaggtgctatgagccggggaaagggtttccttcctttcagactcagttccctccaaagggcactgtctgc

SEQ ID NO: 918130 - DNA, 639 bp, Homo sapiens
gccctagggtggaggtgctatgaccaagccctttttcaggctattcctccccctgaagatcagggtgactaggaagatgacagggcaggaaccaaggccccatgacctgtccctgaaggctagacagccaacaggaacatcaggggatttggccctgctaagtggctgaattccatggcagtcagccgggaggggtctaaagtggagagccatagggctctgtcccctgccctgctcagcagtttcctctctgcctgagagcatataagacatgcatgttctcactcataggttggaattgaacaatgagaacacttggacacaggaaggggaacatcacacactggggcctgtggtggggtgaggggaggggggagggatagcattargagatatacctaatgtaaatgacaagttaatgggtgcagcacaccaacatggcacatgtatacatatgtaacaaacctgtacgttgtgcacatgtaccctggaacttaaagtataattttatatataatactatatatatttataatatattataatatattatataaattacataaatataataattatataatatattatataatatattatatatatatatatatgacatacaggattcacagcagc

SEQ ID NO: 918131 - DNA, 598 bp, Homo sapiens
atctccagaaacctcagaggtttctcgtgtaaccttccagatgtattttatgcatgtacaaggaaatgtgtgtgtatatatatatatatatattttatgtgtgtgtgtgtatatatattttgttccttttgtcttactactttttactgtccttcatttttttatggctgcaaatattcctttgtatggaaatataagcaatttaatttacctgttctttcccctgttgatagacctttgggtttctttcaatttttttttttttttttgagacagagtctcgctctgtcgcccagtctggagtgcagtggcaygatcttcgctcactgcaagctccgcctcctgggttcacgccattctcctgcctcagcctcccgagtagctgggactacaggcgcccgccaccacgcccggctaatttttttgtatttttagtgagacggggtttcaccatgttagtcaggatggtctctatctcctgacctggtgatctgcccgcctcggcctcccaaagtgctgggattacaggcgtgagccaccgcgcccgactttctttcaatcttttactgtgaatagtacaatgaatcacctggtatat

SEQ ID NO: 918132 - DNA, 570 bp, Homo sapiens
ttcaatagaggaagaaatagtttttttcaacaaagagcgctggggcaactggatgtctatgtgtaatctttgtataatatcatttacaaaaattaattacaaatgaaacaaagatctaaatgtaagagctaaaacaataaaactcttagaaggaaacataaatgtgaatctttgggaccttgtattagtcagggttctctagagggacagaactaataagatatatgtatatataaaagggagtttatcaaggagaattgactcacacaatcacaaggtaaagtcccacgataggccgtctgcaagttgaggagcaaggaagccagtgttggatcagtctgagtcccaaaacctcaaaagtagggaagtcaacagtgcagccttcagtctgtggccaaaggcctgagasctcctggaaaaccactggtgtaagtccaagagtccaaaagccaaataacttaaggtccaatgttcgagggcaggaagcatccagcacgggagaaagatgaagtccagaagacccagcacgtctgctcttccatcttctcctgcctgctttattctagtctc

SEQ ID NO: 918133 - DNA, 706 bp, Homo sapiens
taccattcacatttctgtcagcattctggtcatgactacttaactgatctccagggagttccaagcttcccctagagtttttgtcctctaagtcctcacaagaatctaggctttttaaggtcttgtcctccaaattcttccaacctctgcctattagttcctacccagttccaaagctgtttccatattttcaagcattcattatcagcaacaccccactccaggtacaaatttttratcttagtctgttttctcttgtttataagggaatatctgaaacagggtaatttataaagtgaagcgatttatttcttatagttatggagactgagaagtccaaagtcaaaggcttttatctactaagaactttctttctcatgaggaatgtctacagtagagtccaaacacaatgtagagtatcacatgcaaaggggcttagtgtgctaacatgctagttcagatcactcttcctctctttataaagctatcagttaccctcctatgataacccattaatctattaatctatgagtggattagtccattaatccacatgagggacaagctctcatgatccagtcacctcataaaggtcccacctctcaatattgccacactggggattaaatttcagcatgagtcttggaggggacaaatatgcaaattgtagcagtagtaaaccactgtgaatctaaccaaacagtgg

SEQ ID NO: 918134 - DNA, 706 bp, Homo sapiens
taccattcacatttctgtcagcattctggtcatgactacttaactgatctccagggagttccaagcttcccctagagtttttgtcctctaagtcctcacaagaatctaggctttttaaggtcttgtcctccaaattcttccaacctctgcctattagttcctacccagttccaaagctgtttccatattttcaagcattcattatcagcaacaccccactccaggtacaaatttttgatcttagtctgttttctcttgtttataagggaatatctgaaacagggtaatttataaagwgaagcgatttatttcttatagttatggagactgagaagtccaaagtcaaaggcttttatctactaagaactttctttctcatgaggaatgtctacagtagagtccaaacacaatgtagagtatcacatgcaaaggggcttagtgtgctaacatgctagttcagatcactcttcctctctttataaagctatcagttaccctcctatgataacccattaatctattaatctatgagtggattagtccattaatccacatgagggacaagctctcatgatccagtcacctcataaaggtcccacctctcaatattgccacactggggattaaatttcagcatgagtcttggaggggacaaatatgcaaattgtagcagtagtaaaccactgtgaatctaaccaaacagtgg

SEQ ID NO: 918135 - DNA, 549 bp, Homo sapiens
cctgatcagacaggggcaagggctgagtctttagtatagttacttctctagttacttctctcaaatgcacttatcttactgttctttttttttttttttttcacttataagttgctgctcttcttatgcagagaaatcatgaggtagagaaaaaggccaggagtgttattctcataaaaattcctccccatagaactataagactagtggggagcttgattcttttaatagtaaccagtattttctrtctggaaacatgttcttatctctctgtctttttaatacagcaccttaactaagaaagctcttgcccttggtctctgttcacttatttttccagctatgtaacaaaaatcttttcattggtagcttccactatgcctacaggtcacacattctttcttctaagatagctttgattactatttctagtctatcggttctgatctattatcttatttattatcatttctcttatggttttaaactcttgatttttaaaatatgttgacttttggccgggtgcggtggctcatgcctgtaattcca

SEQ ID NO: 918136 - DNA, 624 bp, Homo sapiens
agggtctgcaaaatatctcaagcactgatcttaggagcagtttagggagggtcagaatcttgtagcctccagcttcatgactcctaaaccataatttctaatcttgtggctaatgttagtactacagaggcaatctagtccccaggcaagaaggaggtctgctttgggaaagggctgttacggkctttgttttaaactataaactcagtttatcctaaagttaggtcagcccaggaatgaacaagggcagcttggaggttagaagcaaggtggagtcggttaagttagatctctttcactgtctcagtcataattttgcaaaggtggtttcaatgcccggctcaccttcctatttttgtagagacagggtatcactatgttgcacaggctggtctcaagcaatcctcctgccttgatctcccaaagtgctaggattacatgcatgagccactgcacctgggttaaaatctctgttccattagcttagtggtcagctaatgactgtacaaaaatttcttaatacctagaaccgcaaattctcctagtctttgccagaggcatttgtgtaggggcacactttgaacacacggccagtcagtttacaactctggcttagccttcaac

SEQ ID NO: 918137 - DNA, 731 bp, Homo sapiens
tgatccatcaagtgcagggtctgcaaaatatctcaagcactgatcttaggagcagtttagggagggtcagaatcttgtagcctccagcttcatgactcctaaaccataatttctaatcttgtggctaatgttagtactacagaggcaatctagtccccaggcaagaaggaggtctgctttgggaaagggctgttacggtctttgttttaaactataractcagtttatcctaaagttaggtcagcccaggaatgaacaagggcagcttggaggttagaagcaaggtggagtcggttaagttagatctctttcactgtctcagtcataattttgcaaaggtggtttcaatgcccggctcaccttcctatttttgtagagacagggtatcactatgttgcacaggctggtctcaagcaatcctcctgccttgatctcccaaagtgctaggattacatgcatgagccactgcacctgggttaaaatctctgttccattagcttagtggtcagctaatgactgtacaaaaatttcttaatacctagaaccgcaaattctcctagtctttgccagaggcatttgtgtaggggcacactttgaacacacggccagtcagtttacaactctggcttagccttcaacttcctacttctgcaaattctcaagatcaaccagaggtgagaactctgggccttctcaggtctttcctgagtatgtgcacaatgctgggcatg

SEQ ID NO: 918138 - DNA, 639 bp, Homo sapiens
acatggagaaaccccatctctactaaaaatacaaaattagccgggcatggtggtgcatgcctgtaatcccagctactcgggaggctgaggcaggagaattgcttgaacctgggaggtggaggttgccgtgagccaagaccrtgccattgcactccagcctgggtaacaagagtgaaactctgtctcaaaaacaaacaaaaaaactaattaaaaatctttgcatctcccttgcacagtaattcctgctttgcctatgtatttttgtgtcctgaggcagaaaagagagaggaaaacattgggcacccacaattccagttcaggctgggaagagaagacttctattagctagagtctgccaccagacccagctccctgctagcacactcaatggctccctccttcccctttaagggtccttatctgtatggtattaggttgacgcaaaaagaattgcggtttttgccatttcaaagtaatagtaactctatcaagaagaatttaagattctgctcatttctgcatttaaaaatctggctctgtgaaattttgcaggagaaatgggttctatttttaaaggggctgattctttctttcttctgatcattttcaagtgaaatttgaatgaaatagagcagtttt

SEQ ID NO: 918139 - DNA, 639 bp, Homo sapiens
acatggagaaaccccatctctactaaaaatacaaaattagccgggcatggtggtgcatgcctgtaatcccagctactcgggaggctgaggcaggagaattgcttgaacctgggaggtggaggttgccgtgagccaagaccgtgccattgcactccagcctgggtaacaagagtgaaactctgtctcaaaaacaaacaaaaaaactaattaaaaatctttgcatctcccttgcacagtaattcctgctttgcctatgtatttttgtgtcctgaggcagaaaagagagaggaaaacattgggcacccacaattccagttcaggctgggaagagaagacttctattagctagagtctgccaccagacccagctccctgctagcacactcaatggctccctccttcccctttaagggtccttatctgtatggtattaggttgacgcaaaargaattgcggtttttgccatttcaaagtaatagtaactctatcaagaagaatttaagattctgctcatttctgcatttaaaaatctggctctgtgaaattttgcaggagaaatgggttctatttttaaaggggctgattctttctttcttctgatcattttcaagtgaaatttgaatgaaatagagcagtttt

SEQ ID NO: 918140 - DNA, 666 bp, Homo sapiens
aagacacaagcacaacaaatttagcttaaagatcttaattggtttttatttgtgattctagaattgggcaccacttccttctgtaaaacagaatgagtgttcccacgagctgagcagaggaggttggttttatattcagaaaagagctggggaaagcagaaacaaaatgtggactgctatttcaaagttaaaagaccgggcacggtggctcactacctgtaatcccagcacttagggaggccgaggaaggtggatcacttgaggccaggagttccagaccagcctggccaacatagcgaaaccccatctctattaaaaaatacaaaaattagctgggcgtggtggcacatgcctataatcccaactactcaggaagctgaggcaggagaatcacttgaagctgggaggtggaggttgcggtgagctgagatcttgccagtgcactcactctagcctgggyggcagagggagactccatctaaaaaaaaaaaaaaaaaaaaaaaaaagttaaaggttaggccaggtgcagtggctcacacctgtaactcctagcactttggaaggccgaggctggaggatcacttgaaggccggagctccagaccagcctgggcaacacagtgagaccgcgtctctacaacttttttttttgaaattagctgggtgt

SEQ ID NO: 918141 - DNA, 563 bp, Homo sapiens
tagtgccagcactttgggaggccgaagcgggtggatcacctgagtttaggagtttgagaccagcctgaccgatatggtgaaaccccgtctctactaaaaatacaaaaattagccaggcatggtggtgtacacccgtagtcccagctactaaggaggctgaggcaggagaactgcttgaacccaggaggcagaggttstagtgagctgagatagcaccactgcactccagccaagggacagagattcgtctcaaaaacaaagttacaccctactctgttttaaaagttttctcatttctcttctctttctccaccttcctgcaatacattcataagacctgactcacctgtctcataattcctactccacggtaaaaataaaacattatgatatgctccatgtgttagttcattttcatactgttataaagaactgcctgatactgggtaatttataaaggaaataggtttaattgactcacagttcagcatggctggggaaggtcacagaaaacgtacagtcatggtggcaggtgaaggggaagcaagacaccttcctcacaa

SEQ ID NO: 918142 - DNA, 563 bp, Homo sapiens
tagtgccagcactttgggaggccgaagcgggtggatcacctgagtttaggagtttgagaccagcctgaccgatatggtgaaaccccgtctctactaaaaatacaaaaattagccaggcatggtggtgtacacccgtagtcccagctactaaggaggctgaggcaggagaactgcttgaacccaggaggcagaggttcyagtgagctgagatagcaccactgcactccagccaagggacagagattcgtctcaaaaacaaagttacaccctactctgttttaaaagttttctcatttctcttctctttctccaccttcctgcaatacattcataagacctgactcacctgtctcataattcctactccacggtaaaaataaaacattatgatatgctccatgtgttagttcattttcatactgttataaagaactgcctgatactgggtaatttataaaggaaataggtttaattgactcacagttcagcatggctggggaaggtcacagaaaacgtacagtcatggtggcaggtgaaggggaagcaagacaccttcctcacaa

SEQ ID NO: 918143 - DNA, 563 bp, Homo sapiens
tagtgccagcactttgggaggccgaagcgggtggatcacctgagtttaggagtttgagaccagcctgaccgatatggtgaaaccccgtctctactaaaaatacaaaaattagccaggcatggtggtgtacacccgtagtcccagctactaaggaggctgaggcaggagaactgcttgaacccaggaggcagaggttctagtgagctgagatagcaccactgcactccagccaagggacagagattcgtctcaaaaacaaagttacaccctactctgttttaaaagttttctcatttctcttctctttctccaccttcctgcaatacattcataagacctgactcacctgtctcataattcctactccayggtaaaaataaaacattatgatatgctccatgtgttagttcattttcatactgttataaagaactgcctgatactgggtaatttataaaggaaataggtttaattgactcacagttcagcatggctggggaaggtcacagaaaacgtacagtcatggtggcaggtgaaggggaagcaagacaccttcctcacaa

SEQ ID NO: 918144 - DNA, 719 bp, Homo sapiens
gccaggcgcagtggctcatgcctgtaatcccagcactttgagaggccgaggcaggcggatcatgaggtcaggagatcgagaccatcctggctaacacggtgaaaccccatctccactaaaaatgcaaaaaattaaccaggcatggtggtgggcgcctgtagtcccagctactcgggaggctgaggcaggagaatggcgtgaacccaggaggcagaggttgcagtgagccaagaccacgccactgcactccagcctgggcgacagcacgagacaccatctcaaaaaaaaaaaaaatatgtagagatacatagtctttatcccagagattctaatctaggagttctggagttcacagcaggaaactgaatttttaaaaagctctttattagttaaggtaagttttagaaagaatcaaattccaaggtgtcagtagattagcacaatagaaattaatttcttgttcrtaggatggctcatggtgaggttggtaggaggcttctccacatgcagtcattcagtgacccagactatttccatcagtggctctcccatatgctagggtttcatagtcatccgcatccaccaagtagaaggggaaacagcatggaggagcactatgggaacttgtaatggaccagactgaaagtagcatgaattttcttttttcctctcattctgttaaggagatctcagtcacagggtgacagctacctacaagg

SEQ ID NO: 918145 - DNA, 577 bp, Homo sapiens
ataatgtatacatgtacatgcatgtatatatacatacatatatgtatacataacatatatacctataaaacatgtacgtatatacatgtaacgttaatatatgtactttttaaagtaaaaatgtttatgtgtgtatgtatagtacatatatacatataaaacaagtacatatatgcatataacatatatatgtacatgatttttcaaggaaaaagcatattatgggctgcttctgacttgcctggggaacatgactggttgtgtttgttttatcgggctggttatattggtgtctaaatataggaccctcaawcatgtttgaacagtcatatgacgtacggttagatatcaagtctgtggcctacctctgaactgatgtatttatgtatttagtgacacaataaaagcagatttttcttttccaaagaactctgcactttaacccttggaatgttaaacattttggtccagatttaatttttactactgaataaaactttctacttttttattctaaagacacaaggtatctttagaaagagacaagaggctgggcgcggtggctcacacttgtaat

SEQ ID NO: 918146 - DNA, 577 bp, Homo sapiens
ataatgtatacatgtacatgcatgtatatatacatacatatatgtatacataacatatatacctataaaacatgtacgtatatacatgtaacgttaatatatgtactttttaaagtaaaaatgtttatgtgtgtatgtatagtacatatatacatataaaacaagtacatatatgcatataacatatatatgtacatgatttttcaaggaaaaagcatattatgggctgcttctgacttgcctggggaacatgactggttgtgtttgttttatcgggctggttatattggtgtctaaatataggaccctcaaacatgkttgaacagtcatatgacgtacggttagatatcaagtctgtggcctacctctgaactgatgtatttatgtatttagtgacacaataaaagcagatttttcttttccaaagaactctgcactttaacccttggaatgttaaacattttggtccagatttaatttttactactgaataaaactttctacttttttattctaaagacacaaggtatctttagaaagagacaagaggctgggcgcggtggctcacacttgtaat

SEQ ID NO: 918147 - DNA, 665 bp, Homo sapiens
caaaagcattgaaatcaggatctcaaaaagatacttacacttccacgttcactgcaacattattcacaatagccaagagttagaaacaatccaaatgcacatcagtggacaaatggataaagaaaatgtggtatatacatgcaatggaatactattcagtctttagaaagaaggaaatcctttcatatgccacaacatagatgaacttggaggacattaagctaagtgaaatgagccagtcacagaaggataactactgcatgaatccacttacaggaggtatctaaaatcgtcaaattcatagaagcaaaaagcagaatggtggttgtgggggctaggggaaggggaaaatgggaagttgctgttcagtgggcatagtttcagycacacaaaacaaaaacttctaaaggtctgctgtacaacaacttgcaaatagctaacaatattgtattgtacactggaaaatttattaatagggtagatctcatgtgttttttatcacagctcttctaatgggaaaatggggaaaggcatgagcagaaaattcataaaattagaccaaaaaatggcaattaaacatatgaaaaatgtttaccctcactcatcattacagaaatgaatttcaagtacactcagatactatttctttcctgaaaagtaagaaa

SEQ ID NO: 918148 - DNA, 665 bp, Homo sapiens
caaaagcattgaaatcaggatctcaaaaagatacttacacttccacgttcactgcaacattattcacaatagccaagagttagaaacaatccaaatgcacatcagtggacaaatggataaagaaaatgtggtatatacatgcaatggaatactattcagtctttagaaagaaggaaatcctttcatatgccacaacatagatgaacttggaggacattaagctaagtgaaatgagccagtcacagaaggataactactgcatgaatccacttacaggaggtatctaaaatcgtcaaattcatagaagcaaaaagcagaatggtggttgtgggggctaggggaaggggaaaatgggaagttgctgttcagtgggcatagtttcagtcacacaaaacaaaaacttctaaaggtctgctgtacaacaacttgcaaatagctaacaatattgtattgtacactggaaaatttattaatagggtagatctcatgtgttttttatcacarctcttctaatgggaaaatggggaaaggcatgagcagaaaattcataaaattagaccaaaaaatggcaattaaacatatgaaaaatgtttaccctcactcatcattacagaaatgaatttcaagtacactcagatactatttctttcctgaaaagtaagaaa

SEQ ID NO: 918149 - DNA, 681 bp, Homo sapiens
acagcagtggcagagagacacaacccccaggcaatcactgaggctgcgggtttctgctctttgggagaatgaccctcgggtgagacagtagtccttgggcacacaggcagacctgtcctcgagatcacggggggcacggctttgggggaactcacccgaacaccgtacgggcaggcctgaggctgggatgccgcactgctttccccggactccgtctgctgtttctgcatcctggtaggccctgcgtgtagcatggtgtcccgaatctgttttgtcgaccccctggattggtcaggctggagcctcgaccccgacgcactgccacggagggctcctgctttgycaaggctcagggaatcgtcctcagccaaccgttggagtcaccgtcacgggagaatgggctcgtgcctcccgcatgcgcattgcccaggccgactcctgctttgctcttcaaactccggctgtggcccctttaaacaggttcggcgacacgtggcgggggttctgtggcagtcgcagtggcggctggagtggggatgtagtagggggcgtttatgggactgggggcttcgggtcctccagggccggacccccgggagtcctgttctcagaacctccttgagccgacttctaccggtgcaggggaccccgcttcaaggcgccagctcgggtctccggact

SEQ ID NO: 918150 - DNA, 791 bp, Homo sapiens
tgagagattttgtcaacaccaggcctgccctaaaagagttcctgaagggagcgctaaacatggaaaggaacaagtggtaacagccactgcaaaaacatgccaaaatgtaaagaccattgaggctaggaagaaactgcatcaactaacragcaaaacaaccagctaacatcataatgacaggatcaaattcacacataacaatattaactttaaatgtaaatgggctaaatgctccaattaaaagacacagactggcaaattggataaggagtcaagacccatcagtgtgctgtattcaggaaacccatctcaagtgcagagacacacataggctcaaaataaagggatggaggaagatctaccaagcaaatggaaaacaaaaaaaggcaggggttgcaatcctactctctgatagaacagattttaaaccaacaaagatcaaaagagacaaagaaggccattacataatggtaaagggatcaattcaacaagaagagctaactatcctaaatatatatgcacccaatacaggagaacccagattcataaagcaagtcctgagtgacctacaaagagacttagactcccacacaataataatgggagactttaacaccccactgtcaacattagatagatcaatgagacagaaagttaataaggatacccaggaattgaactcagctctgcaccaagcggaactaatagacatctacagaactctccaccccaaatcaacagaatatacatttttttcagcaccacaccacacctattccaaaattgaccac

SEQ ID NO: 918151 - DNA, 579 bp, Homo sapiens
ggaagccaccccgaccctgtccaatctgcaatggagaccactggagagtggactctccccagggatgctggttactgggtctagaaccaatctcccaaatggtccagcagcatgacttctgggtcccggcactcctcttcccggctccagtggcctacacaaccattaccatccaggggccttgggtaattctggaaattgaagggaggaaaaaggacctcctcttggacactagagccagtctctcaattctctccaatctgggctccctttttatctcagcatgaccatgaggggcagctcaggaaggcgtctaacccaatatttctctcaaccccttagttgtagctggggagaccttttgttcactcatgcttttctaattatgcyttaaagcccaactcctctgttgggcaaggatatcctggcccgtacggggaacaccattctgatgtcccctgggcaaactctttgtctccccctaatggaggctgatattaacccagaagtttgggcaacttgagggaaaattggacagccatactagtccgggtccatcttaaggatctcacctccttt

SEQ ID NO: 918152 - DNA, 579 bp, Homo sapiens
ggaagccaccccgaccctgtccaatctgcaatggagaccactggagagtggactctccccagggatgctggttactgggtctagaaccaatctcccaaatggtccagcagcatgacttctgggtcccggcactcctcttcccggctccagtggcctacacaaccattaccatccaggggccttgggtaattctggaaattgaagggaggaaaaaggacctcctcttggacactagagccagtctctcaattctctccaatctgggctccctttttatctcagcatgaccatgaggggcagctcaggaaggcgtctaacccaatatttctctcaaccccttagttgtagctggggagaccttttgttcactcatgcttttctaattatgctttaaagcccaactcctctgttgggcaaggatatcctggcccrtacggggaacaccattctgatgtcccctgggcaaactctttgtctccccctaatggaggctgatattaacccagaagtttgggcaacttgagggaaaattggacagccatactagtccgggtccatcttaaggatctcacctccttt

SEQ ID NO: 918153 - DNA, 650 bp, Homo sapiens
tcctggcccgtacggggaacaccattctgatgtcccctgggcaaactctttgtctccccctaatggaggctgatattaacccagaagtttgggcaacttgagggaaaattggacagccatactagtccgggtccatcttaaggatctcacctcctttcctaaccagaaacaatatcccctgaaaccagaggtcaggaaagtgctagaagccatgatatacgacttaaagatgcagggcctcctcaaaccctgcaacagcccttgtaataccctgatattaggggtatgaaaacccaacatggaatggacgctagttcaggacctctgcctcattaatgagactgtggttccaatgcacctggtggttcccaatctatataccctgctagcccaaatgcctgaggggactaaatggctcacagtcttggacctaaaggcatgccttcttytgcataccattacaccctgactcccagtatttgtttgcatttgaggatccctctaaccaaaccacccaattaacctgaacggtgttacctcaaggattccaagacagcttccacttgtttgggcaggcattattgagcgacctctctgagttcctttatccttaggtgaaggtcttgaaataggtaatgaacttctcttcc

SEQ ID NO: 918154 - DNA, 651 bp, Homo sapiens
gagagaaacacactggcagaagaacacaccagtagacaccagtagggcatctatggcgggacaacgtggaatttggttggcggtggttggaggagagtctggctgctcagcagcccccaggggaaaaccgccttcccactccatcccctttctggctccccatccatctgctgagagctacttccaccattcaataaaaccttgcactcattctccaagcccaagtgtgatttgttttttccagtacaccaaggcaagaacctcaggatacaaaaagccctctatctttgcaataaggcagagggtctaattgggctgattaacacaagccacctgaggcaaaactaaaagagcatactgtaacaaacatccactggggcttcaggagctgtaaacattcacccctagtcgctgccatggggttggagccccacaacctgcctgtctgcatgctcccyctagaggtttgagcagtggggctccaaagaagggagccacacttctatcacatgccctgagaggggaataagggtacttttcccatctcaatatcagcactcctcttttaaataattgatagaactggtagataaaaaactcattgacactatagaagaactgaacaacaccattaactaactgtatctaatt

SEQ ID NO: 918155 - DNA, 627 bp, Homo sapiens
catgtgcacattcactttggccatcttttcctttaaatctttgaacatgtttgtgctgtttcttagtccattttgtgctgctgtaacagaatgccacagactgggtcatttatttttatttattatttattattttttgagatggagtcttgctctgttgcccaggctggagtgcagtggtactatcttggctcaccacaacctccgcctcccgggttcaagcaattctcctgcctcagcctcccgagtagctgggattacaggcgcccgtcaccacacccagctaatttttgtattttyagtagagacagggtttcactgtgtgttggttggctaggctggtctcaaactcctgacctcgtgatctacctgcctcagcctcccaaagtgctagggttacaggcatgagccactgcacctggccagatcatttataatgaacagaaattgatgggctcaccgttctggaggctggtgagccccagattgagggtggcgtctggcaaagaccttcttgccatgtcatggcaagaaggcatggtggaaggcaggacggcacagaccggagggggctggattcgccctttagtcaggaacccactcccctgctgatggcattcactcatc

SEQ ID NO: 918156 - DNA, 546 bp, Homo sapiens
ctcctgcctcaacctcccgagtagctgggactacaggtgcccaccaccatgcctggctaatttttatatttttagtggagatggggttttgccatggtggccaggctggtctcgaatttctggcctcaagtgatctgcccacctcggcctcccaaaatgctgggattacaggcgtgagccaccgygtctggcccaaaataaatttttaaaaaattttcatcaattatttatttatccttaatttttcaacctttaaaaaattttcaactattttagaatcagggggtacacgtgcaggttgttacatggggatattgtgtgatgccgaggtttgggcttctattgaacctaccacccaaacagtgagcatggtacccaacaggtggtttttcaacctttgccccttgtagtcttctccttcttgtagtccccagtttctatttttgttatctttgtgtccatgtgtagtcagtgtttagctcccacttttaagtgagagcatgtggtatttggttttcgttcctgtgttaatttgctgaggagaat

SEQ ID NO: 918157 - DNA, 593 bp, Homo sapiens
acaactactgacttgtgattagcatataactcacccagaggatattgtggtagcatatgtgaaaacaacattcatctttctgtacatttccatcagagctcttagatgcctaggtgcactatcaatgagcagtaatattttgagargaatctttttttttctgagcagtaggtctcaacagtgggcttaaaatattcagcaaaccatgctataaacagatgtgttatcatgcaggctttgcttttccatttataaagcacaggcagagtagatgtagcataattcttaagggccctaggatttttggaatagtaaatgagcattgatttcaacttaaagtcagcagctacattaacccctaacaagacagtcagcctgtcctttgaagccaggcattgacttctcctccctagctaggcaagtcccagataaagtcttcttccaatataaggctatttcatctacattgaaaatctgttgtttaatataaccacctcgatcaattatgttagctatatcttctggataatttgcctcagcttctccatcagcatttgctgcttcaccttgcactttttttttttttttttttt

SEQ ID NO: 918158 - DNA, 701 bp, Homo sapiens
tgaacaacagagtaaggccaagaagggcaaaaagggaccagagctgaggtgtttgggccagttctggatcactcatattgttgagggaggggtgggggcataagataacaaggagcctacaggccacttgaggaaattctctggttttgctgcagcttcgcttcaaacttccacagcagaagagttggaattctaatgccgcaatatcgttgtaataccagggattctctagaggcaagttaaggctttctgggcaaagaaaacaattccagatgatattgtgatagaatgctacagtgaaatgcttcttaatgactctcctgtcctgcctaaaggacaaagacctatgagtgacttcaacttgacgtgatgtttcagtgatctttacttcagctctaagtcagaatcaatgccacaggaaaagaaaagcttcttacatstcagacatctgcttgctgagcaaacacaaacaagaacacatgtattgtttcccaggagctggcaaactagatctcaagtcacacagttacaaagagagctctcattcagatgccgggcatataagctcagctacccagaaagttcagctttaatgaagactgtagttttagaatgaaagcctgagcaggaaggatttctgccctgggaattctcaatgctctgcctgagtcacactggaggatggagataggctcctcatt

SEQ ID NO: 918159 - DNA, 465 bp, Homo sapiens
ctcctctgactttggatccaagccacccagagagccagtggtctctggcaatcccagctttctcttaccctggttcatttctccctttgctgacctcctaactgaagggatgttcttgcttttgttagtacctccttcattgcagacaggctgcagaggtagggaagggaggagggtgtggccataaacaagatataaaaagatgctgcagcccttgattttttttttattgaaaacaccacaggcactgcttgttgaaaggttctagggattcacagggacccagggctcagggagggatcaggacaaggatgctgggaccagtattccactgtttattttggctaagattgagttttagtatctttggyttaccactcagtatatgtaggggatgtcttttacctttggctgtagaattaaggaattgaaacttaaatttatattgctttaataaaagaatca

SEQ ID NO: 918160 - DNA, 631 bp, Homo sapiens
atagtattgtaatttatacatccctcaggtggccatttttccccatcagagagagaatattggagccaggctgcagtgtggaaaaaaatgagccacctctttttcagggtttgagggtcaaattggtcccaatggcttaggatgcatttcaagcgtaagcctgttgatgcctgagtgcttcccaactgaaagaaaaaaacgcccatggttttggtttgttcccgccccccccactgcccaagaacccacagcggcccctggaccctgctaattggaatagtcacactcacygacgcagcagtagaaacacctcttgcccaagaacccgcaacggtccctggaccctgctgatcagaatagttgtgctcaccaatgcagcagcagaaacccctcttgcccaagaacctgcaacggtccctgcaccctgctcatgggaatagttacgctcactagtgcagcagcagaaacactagttttcctcctagaccacaaggaggactgaggaaggttggatttagtggcccttactgacacattctcaaaaacctgcacccttgcctgtcctcttaaaccataaggaggactgagaaaaatcagatttattggcgcttactgacgcattctcgaaaac

SEQ ID NO: 918161 - DNA, 632 bp, Homo sapiens
ggtaggtgcctgtaatcccagctactcgggaggctgaggaaggagaatcgcttggatctgggaggtggagattgcagtgagccgagatcgcaccactgcactccagcctggcaacagagtgagactctgtctcaaaaaaacaaaaacaaacaaaaaaacccacctgtgtgttagttccttttgcattgccataaaggagtacctggggctgggcagtgtataaagaagtttatttgggtcaccattttgcagaccatataagaagcacagtgccagcatcktccatttgtggtcgaaggtaaagggcgagcaggtgtgtcacatggtgagagagggagcaagagggaagggaggaggttcaggctctttaaacaacagctatcacatgaactagtggagtgagaactcactcactactatgaggaggtcaccaagccattcatggaggattcacccccatgacccaaacacctcccaccaggccccacttccaacatgaggggtcagatttcaacatgtgatttggaggggacaaaaatccaaactatattccattcctggtcccccaaattcatgtccttctcacattggaaaatacagtcatccctccccaatagtcttcaaaagttcta

SEQ ID NO: 918162 - DNA, 616 bp, Homo sapiens
gttccacactcaaagggacccagagctttgttcaatgttctacagttgcagtcttgaaattcttaataatttttcaaaaaggaggtcccacattttcattttgtacttagccccataaattacatagctggtcctgtttgttggatatgcaatttgcaaatatacgttcacagtgctagcttgtctttccatacccttagtagtgtttttcccagaacaaagttttcaactttgataaggtccagtttatcaattttttctttgttggattgcacttttggtgtcatgtccaagaactctttgatcatgaagattttcactcctgttttcttgtaaaattgttattgctttgtttcacattaagatacatcatccatttggagttaatttttgtatcgtttatgagatttaggttttacatkgaaactttgattggcaagagatttaagttatagattaatttaggaagaactgacatttttacaatgtagcatctttatgtctagaaacatgataatactttttttatatattcaagtctttgtgtcctataaagttttatggttttattcctatatttcttgcacttttttcctggtttattcctaggtatttt

SEQ ID NO: 918163 - DNA, 586 bp, Homo sapiens
ggtagctccccatctccaattctgacctgccaagtcagaatcttgtgcgtggggcccaggactgtacatattgaaacaggcagtgacctgggaactatttctgaacacccctaggtttcccctgtgttcgccctttcctttcacatttggacccctttgtgtgctgaccactgggctgtttcacatggaygtaacataaaaaagacaggccaggtgcattggcttatgcctgtaatcccagcactttgggaagccgaggtaggcgaatcacttgaggccaggaattcaagatctgcctggcgaacatgagtaaaccccgtctctaccaaaaatatgaaattagctaggtgtggtgatgcacacctttgatctcagctactcaggaggctgaggctggagaatcccttgagcccaggaggcagagactgcagtgagccgagatcacaccactacactccagcctgggtgacagtgagactcttaaaaaaaaaaaaaaagacagagatgatccttcctttatggagctctcagtaaaacaagaaagctcacgatgtcctggcatttgtcagaaatacatttggtatat

SEQ ID NO: 918164 - DNA, 586 bp, Homo sapiens
ggtagctccccatctccaattctgacctgccaagtcagaatcttgtgcgtggggcccaggactgtacatattgaaacaggcagtgacctgggaactatttctgaacacccctaggtttcccctgtgttcgccctttcctttcacatttggacccctttgtgtgctgaccactgggctgtttcacatggatrtaacataaaaaagacaggccaggtgcattggcttatgcctgtaatcccagcactttgggaagccgaggtaggcgaatcacttgaggccaggaattcaagatctgcctggcgaacatgagtaaaccccgtctctaccaaaaatatgaaattagctaggtgtggtgatgcacacctttgatctcagctactcaggaggctgaggctggagaatcccttgagcccaggaggcagagactgcagtgagccgagatcacaccactacactccagcctgggtgacagtgagactcttaaaaaaaaaaaaaaagacagagatgatccttcctttatggagctctcagtaaaacaagaaagctcacgatgtcctggcatttgtcagaaatacatttggtatat

SEQ ID NO: 918165 - DNA, 586 bp, Homo sapiens
ggtagctccccatctccaattctgacctgccaagtcagaatcttgtgcgtggggcccaggactgtacatattgaaacaggcagtgacctgggaactatttctgaacacccctaggtttcccctgtgttcgccctttcctttcacatttggacccctttgtgtgctgaccactgggctgtttcacatggatgtaacataaaaaagacaggccaggtgcattggctyatgcctgtaatcccagcactttgggaagccgaggtaggcgaatcacttgaggccaggaattcaagatctgcctggcgaacatgagtaaaccccgtctctaccaaaaatatgaaattagctaggtgtggtgatgcacacctttgatctcagctactcaggaggctgaggctggagaatcccttgagcccaggaggcagagactgcagtgagccgagatcacaccactacactccagcctgggtgacagtgagactcttaaaaaaaaaaaaaaagacagagatgatccttcctttatggagctctcagtaaaacaagaaagctcacgatgtcctggcatttgtcagaaatacatttggtatat

SEQ ID NO: 918166 - DNA, 586 bp, Homo sapiens
ggtagctccccatctccaattctgacctgccaagtcagaatcttgtgcgtggggcccaggactgtacatattgaaacaggcagtgacctgggaactatttctgaacacccctaggtttcccctgtgttcgccctttcctttcacatttggacccctttgtgtgctgaccactgggctgtttcacatggatgtaacataaaaaagacaggccaggtgcattggcttatgcctgtaatcccagcactttgggaagccgaggtaggcgaatcacttgaggccaggarttcaagatctgcctggcgaacatgagtaaaccccgtctctaccaaaaatatgaaattagctaggtgtggtgatgcacacctttgatctcagctactcaggaggctgaggctggagaatcccttgagcccaggaggcagagactgcagtgagccgagatcacaccactacactccagcctgggtgacagtgagactcttaaaaaaaaaaaaaaagacagagatgatccttcctttatggagctctcagtaaaacaagaaagctcacgatgtcctggcatttgtcagaaatacatttggtatat

SEQ ID NO: 918167 - DNA, 597 bp, Homo sapiens
gtaggcgaatcacttgaggccaggaattcaagatctgcctggcgaacatgagtaaaccccgtctctaccaaaaatatgaaattagctaggtgtggtgatgcacacctttgatctcagctactcaggaggctgaggctggagaatcccttgagcccaggaggcagagactgcagtgagccgagatcacaccactacactccagcctgggtgacagtgagactcttaaaaaaaaaaaaaaagacagagatgatccttcctttatggagctctcagtaaaacaagaaagctcacgatgtcctggcatttgtcagaaatacatttggtatatgtagctggggtcacatgcttgacwtgcctattgaaagcttctgggtaggaagagaacaatcatcacagcatcacagcctggcataactgtctcccaggacaggtctccctggggagactgagaccacaactctgaaatcagagcttaaatccaggttctacatttcgctcagtaatgtacatgatgtaggacagtttttatattagttatctattgctgtgcaacaatattactgcaaactttgtggcttgagacagcacacagttatc

SEQ ID NO: 918168 - DNA, 589 bp, Homo sapiens
aaaggaataaggtgcaaagaatattcagagtggtggtaatcagcaagataaagatgggagcatgggaacaaggtcatgtctcagttcttggtgatgagggaggctcatgggtatgccttccttcccttttattttttaatttacatattttttgcaaagcaaagttctttattcccgcaaattgtgaacaatacacatagtagtttccacatatgaatgtttcctaaaatgatggctgttttgttttgttttcttgagacagagtctcttgctctgtcgcccaggcaggagtgcagtggcacaatctcggctcactgcaacctccgccccccgcgttcaagccattctcctgcctcagcctcccaagtggctgggattacaggtgcmcaccaccacgccaggctaatttttttgtatttttagtagagacgggcatgagtcactgcgcccagccaaaatgatggttgtttaacgtaacgccatgtaatgcaggcatgtggtgttttgcggttatattcacatgtgattttatcagggaccaaagcaaaaacaaagagaattctgaaaagagtttgtatcaaggaagata

SEQ ID NO: 918169 - DNA, 727 bp, Homo sapiens
aaaagtttggtggttcctccaaaagctgaacatagaattaccatatcacccagcaattccactccttagtatataccccaaagaactgaagacagttattcaacccaaaatgtgtccactaatattcataagagcactattcacaccagccatctaaacaaaaaaaaaaaattcgaagtcctctcccgcccccctcaaaaccatctgaatggacttcctttttggccagggcactctaaatttaactggaaagactagttcaggctatggtgggaagtggggggtctgacatgtgtcatgccctcctcccttttggagttgaggaaaagctgaccagcatttaacataacacagacctgaagcttaataagraacatttaccatctattctctctgaagcctgatacctgaagagttcatctggatgatacaacttcagcctttacagccccttatcgtattccagacattcttttctatggataataactccttcaaccaactgccaatcagaaaagcttaaatctacctataatctggaagcacccgccccacacctccacttcaaattgtcctgcatttctggactgaaccaatgtatagcttaaacatatttgattgatgtctcatgtccccctaaaatgtataaaaccaagttgcgggggcaggcgtggtgtctcacgcctgtaatcccagcactttgggaggccgaggcaggcggatcacg

SEQ ID NO: 918170 - DNA, 704 bp, Homo sapiens
tttctatggataataactccttcaaccaactgccaatcagaaaagcttaaatctacctataatctggaagcacccgccccacacctccacttcaaattgtcctgcatttctggactgaaccaatgtatagcttaaacatatttgattgatgtctcatgtccccctaaaatgtataaaaccaagttgcgggggcaggcgtggtgtctcacgcctgtaatcccagcactttgggaggccgaggcaggcggatcacgaggtcaggacatcaagaccatcctggttaacatggygaaaccctgtctttactgaaaacacacaaaataattagccgggcgtggtggcgggcgcctgtagtcccagctacttgggaggctgaggcaggagaatcgcttgaacccgggaggtggagtctacagtgagccaggatcgcaccactgcactccagcctggttgacagagcaagactctgtctccaacagaagacaacaacaacaacaatcacaacaagctgtaccacgactaccttgtgatatagaagttaaaaaggaattatttaggcagagagtgtgggtaaggaagtcctgggtaagtctttccttttaatgaaaatcagcccctatatcattttttttttttctaacaaagagcagcctgtaaaatcgagctgcagacataggcaagcaagctggaagcctgcacaggtg

SEQ ID NO: 918171 - DNA, 689 bp, Homo sapiens
cccgagaggccacgaaacactcaccaagccccacagctctcccgcggacctgaaatacacaggggaatcatgacctgctggaggcgacagaatttcccggaaactcgtgctgagggcacaagcggcaggattttgttttgttttttgagacagggtcttactctgttgccccggctggagtacagtggtgccatcacagctcactgcaacctctgcctcccaggcccaagcgatcctctcaacttagcctcctgaatagctgggactayaggcacacaccaccacacctgggtaagtttctttatttttagtagaaacgaggtctcactatgttgcccaggatggtctccaactcctgggctcacatgatcctctcacctctgcctcccaaagtgctgggcttacaggtgtgagccactagtggcagggttcaaaacatcccctggacttttgactttaaggagtttcacccaaagggggccacctcctcagtggacagaagagaactgcgcgtggcgaggcctgaccgattcacagcagaaggtgcgcagagccgggccccaagagcccgcaggggccgcatcttccccggtgccgatgcctggcccggacctagacttgctgctacccagcactgtggggcttgagtgtggggcaggctgagatgccagtcacaggggactgcatgg

SEQ ID NO: 918172 - DNA, 751 bp, Homo sapiens
ataaaacattacccaggcatggtggcttgcacctgtagtcccagctactggggaggctgaggcaggaggctggcttgaacctgggaggtggaggttgcagtgagccactgcactgtagcctgggtgacagagggagactccatctccaaataagtaaaatttaaaaccacattgattttgggaggccgaggtaggcagatcatgaggttaggagttcaatatcagcctggacaacatggtgaaatcccgtctctactaaaaatacaaaaattatccagtcatgctggtgcacacctgtaatcccagctacttgggaggctgaggcgggagaatcgtttgaacccgggagggagaggctgcagtgatctgaggtcgcatcattgcactccagcctgggcaacaagggtgaaactccrtctcagaacaaacaaacaaacaaacaactaggaaacagcagcctctctggaaggcggttcccgatccccgctctttgcctaacaggagcctgtcccttcccagcgccgtggtgccctctaggggcgaggtgcagcagcacagcgctgacgggcacagggctaagggtccaccctgtggggcccgggctgcccctctctgccatgctgctgaggtgcaaaataccaaattcgtgagccaaagctggtcttccgttaggctccggactcacgacgtttcacgctggaagggaccccggagactcactcacccaatgcccacatttttcacatacaga

SEQ ID NO: 918173 - DNA, 624 bp, Homo sapiens
cccccacccgcctgccgtcacagaccccgcctcccgtgcctgagccccatttctctgggggccgggctgcctcgcgtggcccccgcctgactaaagccatgcagcttctcggccggctccatccgctggctgcctcagtttccccctctgcagcatgggcatacagggttcctctcgtcggctcattggctgctgaatgggggctgtgtgggcagaggctctcccggggctttcccagggtgctcgggggtccctctgcccggtccctccactgtgcctttgtccaggaaattcgaggtggcagggagaacggatccgctctcggcctgaacggagccgcggcaaatgctgttgacccckgaccccggccccctaatcccggggttgaggctctcaccggagaggggccctgggagatgagctggggcacgacccccgccccgggcaccgaggggggcttccaggtcagggtcggagaggcttcgggaggacgcggctgccccattggccacgtgcccggtcatcacctctcggaggccaacacgggaaactgaggcgtggaggagccctcctaagccccacagctctgggatgggagccaggcctagccacctgcagggagag

SEQ ID NO: 918174 - DNA, 580 bp, Homo sapiens
cagtgaactcattttctacaaaggtgccaagtacacacattggggagaggacagtctcttcaataaatggtgctgggaaaattaaatattcatatgaaaaagaatgaaactagactcctatcgctcaccatacaccaaaatcaaatcaaagtggattacatacttaaatctaagacctcaaactatgaaactactraaagaaaacattggggaaactctccaggacattgaactgggcaaggatttcctgagtaataccccatgagcacatgcaaccaaagcaaacattgataaatgggatcacatcaagttaaaaagcttctgcacagcaaaagaaacaatcaacaaagtaaatagacaatgcacagaatgggagaaaatatttgcaaactcctatccatctgagaagggattaacaaccagaatacataagaagctcaaataactcggtgggaaaaaaaatcaaataatcgatttttaaatgggaaaaaatctgaatgtacgtgtctcaaaagaagaaagacaaatggcaaacaggtatataaaaagatgctcaacatcattgattatcagagaaaca

SEQ ID NO: 918175 - DNA, 580 bp, Homo sapiens
cagtgaactcattttctacaaaggtgccaagtacacacattggggagaggacagtctcttcaataaatggtgctgggaaaattaaatattcatatgaaaaagaatgaaactagactcctatcgctcaccatacaccaaaatcaaatcaaagtggattacatacttaaatctaagacctcaaactatgaaactactaaaagaaaacattggggaaactctccaggacattgaactgggcaaggatttcctgagtaataccccaygagcacatgcaaccaaagcaaacattgataaatgggatcacatcaagttaaaaagcttctgcacagcaaaagaaacaatcaacaaagtaaatagacaatgcacagaatgggagaaaatatttgcaaactcctatccatctgagaagggattaacaaccagaatacataagaagctcaaataactcggtgggaaaaaaaatcaaataatcgatttttaaatgggaaaaaatctgaatgtacgtgtctcaaaagaagaaagacaaatggcaaacaggtatataaaaagatgctcaacatcattgattatcagagaaaca

SEQ ID NO: 918176 - DNA, 558 bp, Homo sapiens
gctggcttgattttaaaaatcattccaaattacaaattttaagaagctgatgaatgccaccaaattcacagccacgaggccccacctggctggagctggcttgattttaaaaatcattccaaattacaaattttaagaagctgatgaatgccaccaaattcacagccacgaggccccacctggctggagctggcttctcctgaccgcgcctctctgggcgcgggctcccgctgctccttgggtgcctcaggcgcgccccccatcggtgcggctgacccccgagcttgcagtccgcgccgcggctgtgtctgcctgcttccccctgcgtggccggcyctctcatttccatcagtgtctggcgtcgggtttcctgcaggaagagctggtacccctggatcgggcagcttgagacgagtttaacagagaggctatttacagaggtgtggacggagtcctgcagggacactgcagtggccagggctggaaaccgcgggagctagcccctaagcctcggggagggggacggggacggggacgggaaagccactgtaccctgga

SEQ ID NO: 918177 - DNA, 558 bp, Homo sapiens
gctggcttgattttaaaaatcattccaaattacaaattttaagaagctgatgaatgccaccaaattcacagccacgaggccccacctggctggagctggcttgattttaaaaatcattccaaattacaaattttaagaagctgatgaatgccaccaaattcacagccacgaggccccacctggctggagctggcttctcctgaccgcgcctctctgggcgcgggctcccgctgctccttgggtgcctcaggcgcgccccccatcggtgcggctgacccccgagcttgcagtccgcgccgcggctgtgtctgcctgcttccccctgcgtggccggcccyctcatttccatcagtgtctggcgtcgggtttcctgcaggaagagctggtacccctggatcgggcagcttgagacgagtttaacagagaggctatttacagaggtgtggacggagtcctgcagggacactgcagtggccagggctggaaaccgcgggagctagcccctaagcctcggggagggggacggggacggggacgggaaagccactgtaccctgga

SEQ ID NO: 918178 - DNA, 632 bp, Homo sapiens
accatataaatgctttatctaatcataaaacaaaattaaattttaaaaagtaacctgtagtaattgaaagcaaatgaaacagctaaacctagccatatatcaagttcattaaataatcgaacatacgggaattctttcaaggggctttagaattgtaaacactaaataaataaaatgttaagcagtcctcagtaatcacattgctagaaatagtattggcattgttattctgaatagagagagcaaattgtattatattaatgtcattaagaaccaagatcttcagcaaaagggaaaagagatatgcaaatttcaaaaatcagagaagttaagattagatggaatgctaaakttgaattagaaatatcaatttgaactcatgatgtatttctcttaaagaaattaaaaggatatcctagctctctcccctgaaagggcccaccgcagcaagtgccccagccccagacttcggactttcaatgtcagtcctctttaaaatgagcccatgatcctagaagaaatgtctgattccaggacaggggcaggaaatacgcacaatgaacctggaacatcttgtcgtatgaggaagcaagaagttaccaaagacaaatgatattgtgcccaagggaccc

SEQ ID NO: 918179 - DNA, 722 bp, Homo sapiens
gagaataaatgatattagttatataactatgcaaagtcagggtatagccagataagacaaaggacaaggtattgcaaataagctaaatcccttacatttcatgacagagtcaagagatgcaggattttaaacagataacgaagaaataaggttattagcacacaatttagaggcacgaaggagaactcacaacaaggctgggcatggtggctcttgcctgtaatctcagcactttggttaggctgtgtcgggcagatcacttgaggtcaggagtttgagaccagcttaacatggagaaacctcatctctactaaaaatacaaaaattagctgggcatggtggtgcatgcctgtaattccagctactcaggaggctaaggcaggaaaatcgcttgaacttgggaggtggaggttgcagtgagtcaagatcatgccactgcactccagcctgggtaacatagtaagaccctgcctcaaaaaaaaaaaaaaaaaaaaaaggacttcagcagagatggctccctctgatgcgtgtgtctggggatggaagcccagggsaatatttctcttctaaggcctcattttgctaaggcctcatccttctccactccttgatttgcacagcaaatgaatgttttactcttacaacaataatgtaatgttaaaacaaaacgcagctatgactggcaggacatgcatcagaggttctgtacaggtctgcagatt

SEQ ID NO: 918180 - DNA, 614 bp, Homo sapiens
ccaggctggtcttgaactcctgacctcaggtgatccacccacctcagcctcccaaagtgctgggattacaggtgtgagccaccatgcccaacctctattctactctttaaattgattggcctccctaccccagttggcacgctgggccagcacctggcccctgtattggcatgcctatcccttcagccactttgaacctgtccattctgcacacctctttctgaactcttcctgacctcctctggccatgccactggtcaacagttttataaattttttttttttttggatccaatattcaaggtarcttttctggttcttactgcattccttaactaatcaatatgtcccctgatggatgtttgcttccatctgttttaggtaataccttgcccaattctggtctagtgcttagcattgtctcctatgtggtctgatgttcccaccaaatggatctggatctcacagatgcgaagatctcttgtccatgtatggtggctcacacttgtaatcccagcactgtggtaggccaagctggaggatggctagagcccaagagtttgagaccagactaggcaggatagtgagaccccatttctacaaaaattttttta

SEQ ID NO: 918181 - DNA, 614 bp, Homo sapiens
ccaggctggtcttgaactcctgacctcaggtgatccacccacctcagcctcccaaagtgctgggattacaggtgtgagccaccatgcccaacctctattctactctttaaattgattggcctccctaccccagttggcacgctgggccagcacctggcccctgtattggcatgcctatcccttcagccactttgaacctgtccattctgcacacctctttctgaactcttcctgacctcctctggccatgccactggtcaacagttttataaattttttttttttttggatccaatattcaaggtaacttttctggttcttactgcattccttaactaatcaatatgtcccytgatggatgtttgcttccatctgttttaggtaataccttgcccaattctggtctagtgcttagcattgtctcctatgtggtctgatgttcccaccaaatggatctggatctcacagatgcgaagatctcttgtccatgtatggtggctcacacttgtaatcccagcactgtggtaggccaagctggaggatggctagagcccaagagtttgagaccagactaggcaggatagtgagaccccatttctacaaaaattttttta

SEQ ID NO: 918182 - DNA, 544 bp, Homo sapiens; identical to SEQ ID NO: 917407

SEQ ID NO: 918183 - DNA, 639 bp, Homo sapiens; identical to SEQ ID NO: 917408

SEQ ID NO: 918184 - DNA, 631 bp, Homo sapiens; identical to SEQ ID NO: 917409

SEQ ID NO: 918185 - DNA, 781 bp, Homo sapiens; identical to SEQ ID NO: 917405

SEQ ID NO: 918186 - DNA, 714 bp, Homo sapiens
ccactgcattccagcctggatgacagagagacgccatctctacaaagaaaaaaaagaaataatgcagagaagtctcatgtacgggcccactaagttttatagtgtttttgctttattgcactttgcagatattgttttttacctattgaatgtttgcggcaaccctgtgtcaagcaagtcttgcggtgccgtgtttctaacagcatatgctcactttctgtctctgcattacgtttcgctgattctcacaatattttagatgttttcattatcatgttatagtgatcagtgatccttaatgttgctattgtaattgtttacaagttcattgatataagagggtgaacttaatgttgtctatgtgtcttyttgttttgtttcgttttgttttgttttgagacagagtctttctctgtcacccaggttggagtgcggtggcatgatctcagctcactgcaaccttcaccttccgggctcaagcgatcctcccacctcagcctcccgaataactacagcaggcatgtgccaccacactcagctaatttgtaaattttttgtagagacgaggtctcattatattgcccaagctagtctccaactcctggactcaagcaatcctcccacctcggcctcccaaagtgctggattataggcatgagccactgcaccctgccagttatgtgtgttctgactgcattgtccaccatccattcc

SEQ ID NO: 918187 - DNA, 552 bp, Homo sapiens
aagcagcagcaaaagaaaataaagagaaacaagaagatgagaagaagacaatacagactagaagaaagaaaaaagaacaggtgtgggaagtagaaggcctattatgataccttttatcccctccccaattcatgaaatttgaaaaagtcagagactatcacaacaaaaaagaaacaagatacacaaatagtcaccccctaagttttgttaagaataagacaatcctgcccctcacgcctggctcagtcaccagcaggaggagggcaccctccacagattgcaggagaaggggaaggactcctcctttccctaggtgcacctccactgctgccaccaaggcctggtacagtacccgcaggttcctccccatccccaggtcgggctgggccctgcagygctcctactcccccttcccagcccccagacttaatgctgataccaccactagcaccgatgccaatacaaccgctgtcgccctcaatgcagcagcccaccctacaaggctcctaccaccttgcccccgcgggcaccctcctaccactccagtcgagc

SEQ ID NO: 918188 - DNA, 426 bp, Homo sapiens
catgtaaagaatagctgataccattcctgctgatactattcccaaaaaatcgaggaggaaggactccttcctaactcattacataggtcagcataattctaatacaaaacctggcagagacacaaagaaaaaaatttcaagccaatatccctgatgagcatagatacaaaagtcctcaacagaatactagcaaactgaatccagsagtacatcaaaaaagctagtctgctatgatcaagtaggctttattcctgagatgcaagtctggttcagcatacacaaatcattaaatctgatttatgacataaacagaacaacaaacaaaaatcacataatcatctcaatagattcagaaaaaggcttttgataaaattcaacatcctttcatgttaaaaaccctcaacaaactaggcactgaagaaatat

SEQ ID NO: 918189 - DNA, 605 bp, Homo sapiens
tttacccccattgacagccaaagagtctgaatctcaaagaggcttcagtccttaagtggcagaagtggaatgagaccccaggtcaggtgctttcccacttccacagaagatagaagtcacgttgctagaaagtaacaggggaagtaacggtcccattggaccatttagggtcctaggaatgaaatatttattatgttcagttctgggaatcgcgttttaagagaagcaagaacttacttcctacagggaaatcaggttcgtgaaagagaccgggggtgccttttctggcttttktaacatcagagggtcctccccagtcagtgttagcagccctgggaagcagagttctctagggcttccagactcgaccccagtgttgtcaccgggcaccatggtatgctcagtgccatgggcaagcgtggctgtcatctgcccagggccgtcgcctgtgtagctaacgtcctctgtagacaagcacccctctgttgcagcctcataagcaaggtgattgtagatgtcatgcctgactagttcacccttctcaggaagtgaacttcctttttactcagtttcacaaatatgggggttcatgcagtctcccctcc

SEQ ID NO: 918190 - DNA, 460 bp, Homo sapiens
cccgggtgctctgttccagggagatgggggttttatctgtaagtccctgactggggctgctgcctttttttcagagatgccctgcccagagagaaggaattagagaggcagtctggctgcaacggacttgctgagccacagtgggctccacccagttcaaactttmcggtgactttttttacactgtgagggtaaaactgcctactcaagcttcagcaatggcggacgcccttcccaccaccaagcttgagcgtcccaggtcaacctcagactgatgtgttagcagcaagaatttcaagccagtggaccttagcttgctgggttccacgggggtgggacctgctgagccagactacttggctccttgtctttagccccatttccgggggagttaatggttctgtctcactggtgttccaggtgccactggagtatgaaaaacaaaacaaacaaacaaaaa

SEQ ID NO: 918191 - DNA, 638 bp, Homo sapiens
tcttttgcttatttaacgcctgtatttcttctttggagtagggcctatttaaatctttcacgcactttttttttttttttttttgacagggtcttgctctgtcacccagacttgagtgcagtggcatcatcttagctgactgcaacatctgcttcctgggctcaagtgatcctccctcctcagcctcccaagtagttgggactacaggcacatgccaccatacctaattttttaaaaaaattttgtaaagatgaggtctcactatattgcccagactggtctcaaactcctgggctcaagcagtcctcctgcttcggcctcctaaagggctaggattacaggcstgagccactgtgcccggccccttttgtctatttttaaggttcttttcttaatgagtttaagacttctttctatattctgtacatgagttcttcatcatgtctgtattttacaaatgttatctcctactctgtggcttgtattttcattttaagtgtcttctgaagagcagaagtttttaattttgatgaagtacagtttatctacttttcttgcatggtttgtggcttttgtgttttatcgaagagtcctccgccgagcccagtttcactggggagcagcccatgttgtcatgc

SEQ ID NO: 918192 - DNA, 578 bp, Homo sapiens
agctggcggggcagtttgggggcgtggccaggtcccgttgggcgggtcatgggcgtggccaggaatgcctgggtggaggagtggtcagggctggccgggtcgggggtgtggccgcggcctgctgggttggttgggggcgtgrccagcggcttgcaggaggggcaaatgcataaaaatcctcccagtgcctctgaggttcctttccacttctcccctctgcgaaccccggttttgtataagcctggattgtagaacctgtccccgggctctccggccctccctgaagcttcacattccctctgtgggctgtgcgggcggtggtcacctgcagggtctcggtcccacaaaagggtttgaacctgtcccagggctgggtgcagccgggccactcacacttggacggcacgtagtcggcgtaggtctctgtgtgccccagctcctccgcctcctcctcctcagcctcgtcctcctcctctggctggctctgcacactctgctcctgcgtgcgtggcgggagctcagcggagactgcaggcctgagcggccgcgggcactgggctcccccaggggcaggggcc

SEQ ID NO: 918193 - DNA, 578 bp, Homo sapiens
agctggcggggcagtttgggggcgtggccaggtcccgttgggcgggtcatgggcgtggccaggaatgcctgggtggaggagtggtcagggctggccgggtcgggggtgtggccgcggcctgctgggttggttgggggcgtggccagcggcttgcaggaggggcaaatgcataaaaatcctcccagtgcctctgaggttcctttccacttctcccctctgcgaaccccggttttgtataagcctggattgtagaacctgtccccgggctctccggccctccctgaagcttcacattccctctgtgggctgtgcgggcggtggtcacctgcagggtctcggtcccacaaaagggtttgaacctgtcccagggctgggtgcagccgggycactcacacttggacggcacgtagtcggcgtaggtctctgtgtgccccagctcctccgcctcctcctcctcagcctcgtcctcctcctctggctggctctgcacactctgctcctgcgtgcgtggcgggagctcagcggagactgcaggcctgagcggccgcgggcactgggctcccccaggggcaggggcc

SEQ ID NO: 918194 - DNA, 572 bp, Homo sapiens
gatcaacagccaaggtactgccctcgtgcccagacccgctgtgcttcctgcgtgtgtcacacagtgagggccttggagcctacatatgtaaagagtgccaacaaatcaataagaaaaaaaaagccgggtgcagtggctgacatctgtaatcccagcactttgggagrccgaggtgggtggatcacttgaggtcaggagttcgagatcagcctgggcaacatggtgaaactccatctctactaaaaatacaacaaattagccgggcgtggcagcgcacccctgtagtcccagctacttgggaggctgaggcaggagaatcacatgaactgggagatggaggttgcagtgacccgagataacgccactgcactccagcctgggcaacaatagcaaaactccatctcaaaaaataaaaaataataaagtaaactggctgggcaccgtggctcatgcctataatcccagcactttgggaggctgaaatgggaggattgcttgagcccaggaatttgagatcagcctgagcaacacagtgagatgccatctctacaaaagttagctgggcgtggtga

SEQ ID NO: 918195 - DNA, 572 bp, Homo sapiens
gatcaacagccaaggtactgccctcgtgcccagacccgctgtgcttcctgcgtgtgtcacacagtgagggccttggagcctacatatgtaaagagtgccaacaaatcaataagaaaaaaaaagccgggtgcagtggctgacatctgtaatcccagcactttgggagaccgaggtgggtggatcacttgaggtcaggagttygagatcagcctgggcaacatggtgaaactccatctctactaaaaatacaacaaattagccgggcgtggcagcgcacccctgtagtcccagctacttgggaggctgaggcaggagaatcacatgaactgggagatggaggttgcagtgacccgagataacgccactgcactccagcctgggcaacaatagcaaaactccatctcaaaaaataaaaaataataaagtaaactggctgggcaccgtggctcatgcctataatcccagcactttgggaggctgaaatgggaggattgcttgagcccaggaatttgagatcagcctgagcaacacagtgagatgccatctctacaaaagttagctgggcgtggtga

SEQ ID NO: 918196 - DNA, 622 bp, Homo sapiens
ttgttgaaaagactatcttgactccactgtattgtctttgcttcgtcaaagatcaattgattctatttatgtgggtctatttctgggctattttttctgttgatctacttgtctattcttttaccaaaccatactgtcttaattactgtagctttacactaagtcttgaatccagagagatggcctccatattactttaaaatcagtttgttgatatccagagaataacttgttgagatttttatccaaatttcatttaatctatataygagttgggaagaactgacatcttgacaatgttgactcttttcattcataaatatggaatatctctccatttatttagctctttgatatctttcatgagtcttgtaatttttcttgtatagatcttatacatattttgttggatttttcctaagtattttcaattttcagggtactaatgtaaatggcactgtgtttttaatttcaaattttacttgttcattgctggtatatagaaatgcaattgacttttgcatattaaccttgaatcctgaaaccttactataattgcttattccaagagtattcttgccaaatcttttagatttttctacggagaggattatactctgca

SEQ ID NO: 918197 - DNA, 801 bp, Homo sapiens
accaggtcaaagctaaagatcaagcttttctttccaaacgctttagctaaaagtaggagctaattttcacatctccgaaggtggctccaggactccaagtcacaccttggcaagggtgtggcagctggcagaggactgcaggtccttgtcaggcagaacctgccgggttctggggagtggagactcagatctygaggtggaagcagagacaagagctgggcacacttacctggatgtggggttgggagcggtgaatcagagcccagttagatcctggaggctggcagcaggctctgcagaggtgcaggggcacctcattcagaaggggccatttattggccctctgtggctaaaaccagctccaagcaggactttttatggctggagtcgcctccaaaggggcgtcggcctccactcaggtgtgactctgagcgttgcctagctgaaaaggcgtgatgatagggagcacacgtgaggccattcgggaagaatattttgccaagtgcagaggccgtaaaaacgtggaacatggctctgttttttatgctctattgaaaatgatcatcagaagcagaaactgggcttgtgttcagaacctgaaaatctgcagggcagaaaaacaggacaaaggcatcttttagtgactgcaaaactaaacctcaacagaaagatgcctgaagagacaggtggattatgacctcagaattggagacaggagaggttttcagaattaaagatcatctatggctacacaaacatttgagaggtattttcattaaaacatccctttcttcacaccaa

SEQ ID NO: 918198 - DNA, 688 bp, Homo sapiens
taaaaacgaaaaacaacaaaagagttgaatggtggctgggcgcagtggctcacacctgtaatcccagcacttggggaggccgaggcaggctgatcaactggggtagggagttcgaggccaggctgaccaacgtggagaaaccccgtctctactaaaaatacaaaaattagccaggcgtggtggcgcatacctgtaatcccagctacttgggaggctgaggcaggagaatcgcttgaacccgggaggtggaggttgyagtgagccgagatcatgccattgcacttcagcctgggcaacaagcgtgaaactccatctcaaaaaaaaaaaaagggtagccgggcgccgtggctcacgcctgtaatcccaacactttgggaggccaaagcgggcagatgacctgaggtcggcagtttgagataggcctggccaatatggtgacaccccgtctctaccaaaagtacaaaaattagccgggcgtggtggctcgtgcctgtagtctcagctactcgggagactgaggcagaagaatcgcttgaacccaggaggtagaggttgcagtgagccaagatggtgccactgcactctagcctgggtgacagagcaagactctgtctcaaaaaaaaaagagttcaatgacacaggtaaggatatctcccagaaagtagagtgaaagaacaaagaaaataaa

SEQ ID NO: 918199 - DNA, 463 bp, Homo sapiens
ttttttctcttgagacagtctcactctgttgcccacgctgcagtgcagtggcgcaatcgtgtttctctgcatcctgggctccagcgatcctcctgcctcagcttcccgagtagctgggaccacaagcgcctacctcctacttattttaaaagagttcaatccaggctctactgttcccaagggacttttctccatactaggaactctaaaatctgacaatggtttggatctgtgagatagaaaaggcatcttataggtacagggtcctgtcttctgccagggtctactgtgctgcagtctcagagggatwtcatcaggggatcccagtaaggttgtaaaatgaataatgatcttggtggcaccacaccatctctgtgtagtgaggaaaacttatgtaaaactggaacgggtgaaggggtgaaactaggaaggtgtcatagctgttagaggatggggagcagga

SEQ ID NO: 918200 - DNA, 573 bp, Homo sapiens
caaatggcacatgaggagattatatcccacacctggctcggagggtcccactcattgctagcacagcagtctgagatccaactgcagggtggcagtgaggctatgggaggggtgcccaccattgctgaggcttgagtaggtaaacaaagtgaccagaaacctcaaactgggtggagcccaccacagctcaaggacgcctgcctgcctctgtagactccacctctgggggcagggcatagccgaayaaaaggcagcagaaaccgctgcagacttaaatgtccctgtctgacagcattcaagagagtagtggttctcccagtacggagtttgagatctgagaacagacagactgcctcctcaagtgggtccctgacccccgagtagcctaactgggaggcaccccccagtaggggcagactgacactcacacggctgggtacccctctgagacgaaacttccagaggaacaatcaggcagcaacatttgctgttcagcaatattcgctgttctgcagcttctgctgctgatacccaggcaaacagggtctggggtggacctacagcaaactccaa

SEQ ID NO: 918201 - DNA, 706 bp, Homo sapiens
acacagatacacatacacatatacacactgatctacaaccctctattagtaatcctgaaatccaaaatgctctgaatactggaggggctttcaactttttgtttctaatttttaatttttttaattttatttttctgatttttaattttttttttttttcaaaacagaccagccctacctagagatctttttgtaccttatttggcaactaaacttgacctgccctgtacttatttggtggcaaaatgactaaactgacttgaggctaggtatagtctgtattttcctgagtgtgaagaattgtggacttgtatataaatggttcgattaaataatgatggccctgaaataataaattttaactcaaaaacacgttttaaaatctatacagtagcaactaacagagaacaaattatttaaaaaccagaagtttytaagctaaaaaggatcttaagagcagtcaatctagtaacaccatttgtggagctaactaatttacaatagactgattacctgctacctacagtccaaggcaatgcatttttgtgaccactagtccccattctgaaggctctccctgtgggagttgttttttttttttttttttttttttttttgagaccaggtctaccaggctggagtgcatggcacaatcacaggcactgcacctcaaactcctgggctcaagcaacactcctgccacagc

SEQ ID NO: 918202 - DNA, 744 bp, Homo sapiens
atgcagcggggctttactataaaagtgaatcccttgatctgtgcttgaatctagtatttacatgccctttattaaatcacactagcaactggaagtttgtttttctcatcgtaacttgggtttttggttatagtacttaatgatgcaaatagaaaatttttattttggtggtaggattttcaacttttataaattattttaactatatagatctaaagatgccatttacctttctctttcacatattagtgtcttttcaattgtctgccagggatctagacatcttctagagagctagatctgaacttgttaagtcaaaaagccttagaatgtccctgaatctaaaaataaaataaaataaaataaaagccttagaatatattcctctcaaatggcaaaggtactttctcgtgtttttaaaaaagcctttataaatatcattttaaagagctgagtaatggcccatcaagaagatgtcataataaacatataatttgttcccctaccatggaaatctaatttgcttattgtgtttttgcgactacaaataatgctgtgatcagcagttttcttcrtaagtttttgcccacatttctcatcaatatctcaaaggaatttctcaaagtagaattactgtgtcaacgggcataaatattaaggctcttgacacctactggcaacccaacttccagaacaactctgccatcctctcatatgtgaaattgggcagagggggaagtgggt

SEQ ID NO: 918203 - DNA, 643 bp, Homo sapiens
aacaaagcaaatcctcagataaaaaggagttaaaaaaaataacaaaaagagagtacttgaaaaaatcaggtagaaaggaaaggctatctaaagatgatgaaaaatcaactagcctcagagcttcctacaactttaaatgctcttaagacaatggagcaatgtgtgtaaagttttcaaggaaaactattttaagtaaagtattatatacctattaaaggtcttttcctcacagaaaagtaatataaygattatacgtacatatatatgtatgtatatattcagatatccagaaagtattatatattcatattgtcagccttaaataattagattcagaaaatatgactaatatatcgagtttattcaagtggaaagcttgagaataagcgcttgggaaatacagactccaaaacaatgggtcagcattccaaagtggggaagttacagtttcacttatataggcagttaacaggggttgcaacgttttccaaacaaagtcagtacctacgctgtagcaatttgattacagcttgctacatttcaagaatgattgctttaacattctgtgaggaggagtgacgatctgaggaggtcttatctcttatgctacaaagcctttcctaatgattttcaggaaaaagca

SEQ ID NO: 918204 - DNA, 618 bp, Homo sapiens
gcttctcacaggggagacagaattttcagcttgaatttagccaagttaattgcccaattgaaaaaaacattgtctgggtgtggtggctcacgcctgtaatcccagcactttgggaggcagaggcgggcagatcacraggtcaggagatcgagaccagcctggctaacacggtgaaaccctgtctctactaaaaatacaaaaaattagccaggcgtggtggtggcctctgtagtcccagctactcagggggctgaggcaggagaatggcgtgaacccaggtggcagaggttgcagtgagccgagattgtgccactgcactgcactccagcctgggggacagagcaagactccatctcaaaaaaaaaaaaaaaaaaggaaaaaacacaaaaacacgaggaacctattagaagccagagttcctacaacacatcattaacaatgtccagcacacaatccaaaattactgacaatatgaataaacaagaaaatgccacctattctcaaaagaaaagggaatcagcagaaattgactttaagaggactcagatgtcatggctatcagacaataagtttaaagccacaattttacctatgctcaaagacagaaagaaaaatatg

SEQ ID NO: 918205 - DNA, 618 bp, Homo sapiens
gcttctcacaggggagacagaattttcagcttgaatttagccaagttaattgcccaattgaaaaaaacattgtctgggtgtggtggctcacgcctgtaatcccagcactttgggaggcagaggcgggcagatcacgaggtcaggagatcgagaccagcctggctaacacggtgaaaccctgtctctactaaaaatacaaaaaattagccaggcgtggtggtggcctctgtagtcccagctactcaggrggctgaggcaggagaatggcgtgaacccaggtggcagaggttgcagtgagccgagattgtgccactgcactgcactccagcctgggggacagagcaagactccatctcaaaaaaaaaaaaaaaaaaggaaaaaacacaaaaacacgaggaacctattagaagccagagttcctacaacacatcattaacaatgtccagcacacaatccaaaattactgacaatatgaataaacaagaaaatgccacctattctcaaaagaaaagggaatcagcagaaattgactttaagaggactcagatgtcatggctatcagacaataagtttaaagccacaattttacctatgctcaaagacagaaagaaaaatatg

SEQ ID NO: 918206 - DNA, 613 bp, Homo sapiens
agttcttccgtctcacaactcacaagaaactttctgggtttgtgacatacagaggttgaattgagtatatatttgaaaaggaaaaaacaaaaaacaaacccagaccccacctgaattgggctttttaacttagaagcaacacttgattaaacatctttagaaagctattgcttttctaatttccttccatatccctcaggcctcagtgttcagagaagccaaaaagaatgtatcacttctctktctgtccaaaggtttttgagagtctcacttctaaatgaaacaatgcaacatttcactttgatttctccactgaaatttccttgattatatggttagaggtatgtagttaggaatgtctgttaactttctgagaaccctagtgccccatcatattaactgtcagtattttgggggcattaggttaatagacttaattgcctaggtacaagcaggactttgggacaaatctctttgtgctgtttggtaacacttaactctatttgttgcaatctttctccttaggtcctcacacaattccttacagagcacttattaaaaaaaaatcttaagagttgatctgttttctgattattttgtgtaagcttctaaa

SEQ ID NO: 918207 - DNA, 636 bp, Homo sapiens
ctggagccatgctctgtcttcaggtttctcaggaaccagcttcctagcatccagacatttctcttggggcagaagaagaaactgctcttttccaggatttggctgtggattctcatgggggctgggactggagaggtgactagataatcgcagccctgggagcagaaggatctccctgcactttgcccttcacccttagcagagacctgctagaaggccagacatggccccaagtgggtgacgccaaagtctgaagcccagaagtcagggcggcagcagccccctctctcaaaatctaccacacattctcatcccagccatctctttggctccacaaaacaactttatggggatgtatggatggtaatccctattaccatccacaccttacagataaggaaacagagggcacgaagatctgcccaaggcgtcaagaccaggackgaatccccaatcttcagattagaaatccagggcaagacacagccccatcaccctccagctttgcgatgggccaaggagggggacagcaggaggtccctggggcccctagcctgcccctggcctctctccataccccacttgcacctgccacacccagtgtgttgggggggtttatggcttcccaggtgctca

SEQ ID NO: 918208 - DNA, 636 bp, Homo sapiens
ctggagccatgctctgtcttcaggtttctcaggaaccagcttcctagcatccagacatttctcttggggcagaagaagaaactgctcttttccaggatttggctgtggattctcatgggggctgggactggagaggtgactagataatcgcagccctgggagcagaaggatctccctgcactttgcccttcacccttagcagagacctgctagaaggccagacatggccccaagtgggtgacgccaaagtctgaagcccagaagtcagggcggcagcagccccctctctcaaaatctaccacacattctcatcccagccatctctttggctccacaaaacaactttatggggatgtatggatggtaatccctattaccatccacaccttacagataaggaaacagagggcacgaagatctgcccaaggcgtcaagaccaggactgaatccccaatcttcagattagaaatccakggcaagacacagccccatcaccctccagctttgcgatgggccaaggagggggacagcaggaggtccctggggcccctagcctgcccctggcctctctccataccccacttgcacctgccacacccagtgtgttgggggggtttatggcttcccaggtgctca

SEQ ID NO: 918209 - DNA, 636 bp, Homo sapiens
ctggagccatgctctgtcttcaggtttctcaggaaccagcttcctagcatccagacatttctcttggggcagaagaagaaactgctcttttccaggatttggctgtggattctcatgggggctgggactggagaggtgactagataatcgcagccctgggagcagaaggatctccctgcactttgcccttcacccttagcagagacctgctagaaggccagacatggccccaagtgggtgacgccaaagtctgaagcccagaagtcagggcggcagcagccccctctctcaaaatctaccacacattctcatcccagccatctctttggctccacaaaacaactttatggggatgtatggatggtaatccctattaccatccacaccttacagataaggaaacagagggcacgaagatctgcccaaggcgtcaagaccaggactgaatccccaatcttcagattagaaatccagggcaagacacagccccatcaccckccagctttgcgatgggccaaggagggggacagcaggaggtccctggggcccctagcctgcccctggcctctctccataccccacttgcacctgccacacccagtgtgttgggggggtttatggcttcccaggtgctca

SEQ ID NO: 918210 - DNA, 646 bp, Homo sapiens
cccagcccctgccagccagtcccattattgctgagagtcccccttcctagggaggccgcccactgcagcaggctggtcccaggtgaaggagctgtgggctgtcagagattgtccccaggagggccttccaggctgggctgggttgaggggagggaggcagggcactaactcttcattatcagtgataggcaaacacccttccctgagggtggttggtggaaaggccaccttggcaatgccccaccctttcctgcctccccagatcacgatgagtgccaggacctggcctgtgagaatggcgagtgcgtcaacacggagggctccttccactgcttctgcagccccccgctcaccctggacctcagccagcagcgctgcatgaacagcaccagcagcacgggtgagtgggcctgagcgtgggggagcaggagaagggtacctgggctggggggctcatgtgcctccgtgccctgtgccaccagaggacctccctgaccacgacatccacatggacatctgctggaaaaaagtcaccaatgatgtrtgcagcgaacccctgcgtgggcaccgcaccacctacacggaatgctgctgccaggacggcgaggcctggagccagcagtgtgctctgtgtcccccgaggagc

SEQ ID NO: 918211 - DNA, 588 bp, Homo sapiens
tacaggcatccgccgccatgcccggctcatttttttgtatttttagtagagacagggtttcaccgtgttagccaggatgatctcgatcgcctgaccctgtgatccgcctgcctcagcctcccaaagtgctgagattacaggcgtgagccaccgcacccggccccaaatccatattgttctttttcttcatcatcctgctgaagttataaacctcstaaagacaatttttaaaaaattatttttacaaaggatttctagtaacttgaaaccatttgttttttctttttcaagatacaaggtcttggtatgttgcccaggctagacttaaactcctgggctcaagcaatcctcccatctcagccttccaagtggccaggactataggtacacatgactgtgcctggcctatgttctattttttagctcttcatagcactgaacagatttattcattgaggaaatatttactgagcaccgactatgtgccaaatacagtaaagtgggaaaccaatggacaaagtccttggccttctgcagttaacattctaattggagagatggacaataaaaaacaaacacataatataa

SEQ ID NO: 918212 - DNA, 729 bp, Homo sapiens
aatgtatggaaacagacacacaactgtccctcccaaaataagcacaaaaagagacacagaagcagtccaagccactaataaattctcctgccttgaatccttaaaaactcttagtctgtaagaaagtgtgcctctgacctaacttggccagaagctcgtgtcaggtttgttttctctaaaataaacctgtcttgactggtgagccacctttcatgtttcttttctctttaattcttacaaccctgacattactaacccacatgtggtctcccaagggtctctgtatttatctaattttatacagatgatttacacacaaatttctacaggtttttcaaatcactattttacaaataatgacatttatttatttatttttgagatggagtttcgctcagtcacccaggctggagtgcagtggtgcgatcttggctcactgcaacctctgcctcctgggttcaagagattctcctgcctgagccccccgaggagctggaactacaggcacgcaccaccatgcccagctaatttttgtatttttagtagagacggggtttcacygtgttggtcagtctgttctcaaactcctggccttgtgatctgcctgccttggcctccccaagtgctgggattacaggcatgagccactgcgcctggccaatgatatctttttgtaagtgattttcagtcttactctacagagccttgtggaaatcctctaaaccatgc

SEQ ID NO: 918213 - DNA, 573 bp, Homo sapiens
tgcctaggttttcttctagggtttttatggttttaggtcttatgttgaagtctttaatccatcttgagttaatttttgtataaggtgtaaggaagggatccagtttcagctttctgcatatggctagccagttttcccaacaccatttattaaatagggaatcctttccccattgtttttgtcagatttgtcaaagatcagatggttgtagatgtgtggtgttatttctgaggcctctgttctgttccattggtctatatatctgttttggtaccagtaccatgctgttttagttactgtagccttgtagtatagtttgaagtcaggtggcgtgatgcctccagctttgttctttttgcttaggattgtcttggctatgygggttcttttttggttccatatgaaatttaaaggagtatttttccaattctgtgaagaaagtcaatggtagcttgatggggataacattgaatctataaattactttgggcagtatggccattttcacgatattgattctttctatccatgagcatggaatgtttttccatttgtttgtgtcctctcttattt

SEQ ID NO: 918214 - DNA, 605 bp, Homo sapiens
attttaactcattctatcttggttaacttatgaactttgaatatcatcatacccaactcacaggacctttatgggaattaaatgaaaaaatttatgttagagctattcgttaactgtattatacaaaatcaggttcacattagaagaatttagcaccagcagcagaattcactatgactgagtcttgaattggcaggatttctacacatggaaaaggtagagaagggcattgcagacatgaaaaactacaaataaggaggtttaaatgagaagtctgaagccaaaaatacttgtaaggaaacagaaaaaaaaaatagagaggtggtctatggaaaracataaatatccagttaaaagtggtaactagcatcacttacctttcaacatgtcgatgtcatcacgttctatctcagccatccatttgggtggagaactagtaataggctgtcaaaaaataatatatccattcagacacataaaaagtgtgaggagaccctattattcttataagaagtgtagcctgggccggatgcggtggctgccaaggtgggcggattacttgaggtcaggagtcaggagttcgagacccgcctggccaacatggg

SEQ ID NO: 918215 - DNA, 578 bp, Homo sapiens
gaggctgtgtcctctccactcaaagcctgaagcatattggggtctcttcgtctctgtacatgcccatttcagtgtccagtctggtgggagagggaacagagtgggaaagaaaactagggtaagcagaaacgatgaaaccttataagagtgagattatcatgtacaagagtgagattatcatgtacaagagatcccaagaatactgacttgatgaaaaagtcacatcagagcactcagtttggcagagcttttctgccgaatgtttactcacattcactctctgagattctatactgggggtacacacgtcctctgccctaaggcaattttgagtccaagagacattttgaggcctaaaaatcataggaaactgcccctgagctcacacatatttccaatggtgtccccartttcagggaatccatggattacctaagccagcctctccagttcggctaagaaactctagtctatatatcaagttttgtatcatatgtattgctctgaactcagaaatttcccttccatttatggattctatgaataaaatatcacatgtacaaaaagactaagtcgaa

SEQ ID NO: 918216 - DNA, 731 bp, Homo sapiens
gaacacagcccgaggaagggacccaataacctttcaaaacgcaaactgctgcctgcggtgagggcccagggtcttccacggagaggacaggcatcttcctttcccaccaggaaggagtgagcccggagcctctgctatgtgcaaggcggtgtgcaagcaccggctgcagctttttgctctcttctttctctttggggctgggctgggtgtgcgttctggtgctgatgctttggcctgtgaggctgagctagagaartgtagatgttagatgtgccagtaccatcctgcgcctcccaagcatgcccccactcactcacgtcggcatctcgacccgttcaattacagcaacgaagaagccaccgctaagcgtggtcttgggggaagcccggaggcagtgctcggcacccgggaacgtgctcaggcctcggtggggccgggcaggcagggcgggagctagcctgcaagagaaacagccccaatgctgggtaagagagcagttcaccccatccccccctccacgaccctggcgcacgccctgtacctgaaggcgcccgggttctgctgcagcgcatcttgtaccatgtcttcattctcctcctggcagagggagcacatggagtagacgagccgctgcagggaagggaaagtgagcgcgtggcacagggctcgctgctggaaccctgccagggcatgcagacgcaccgggctaggtgtccctgccccgggctcct

SEQ ID NO: 918217 - DNA, 578 bp, Homo sapiens
gaggctgtgtcctctccactcaaagcctgaagcatattggggtctcttcgtctctgtacatgcccatttcagtgtccagtctggtgggagagggaacagagtgggaaagaaaactagggtaagcagaaacgatgaaaccttataagagtgagattatcatgtacaagagtgagattatcaygtacaagagatcccaagaatactgacttgatgaaaaagtcacatcagagcactcagtttggcagagcttttctgccgaatgtttactcacattcactctctgagattctatactgggggtacacacgtcctctgccctaaggcaattttgagtccaagagacattttgaggcctaaaaatcataggaaactgcccctgagctcacacatatttccaatggtgtccccaatttcagggaatccatggattacctaagccagcctctccagttcggctaagaaactctagtctatatatcaagttttgtatcatatgtattgctctgaactcagaaatttcccttccatttatggattctatgaataaaatatcacatgtacaaaaagactaagtcgaa

SEQ ID NO: 918218 - DNA, 847 bp, Homo sapiens
aaaggacaaactgcggttcatttatgcaatggaacaccacagagcaatgagaacgagccattgctccacaaaacaatatggatcaatcccacactgtggagtatatgaagagattcctaaaaaacaaaagatttaatctacaaaagttcaaaaccaggccaaacttatctatggggaccagaagtcaagtgatggcctgtgtggtggctcacacctgtaatctcagcactttaggaggccaaggcaggaggatcccacaaggccaggagttcaagaccagccgaggcaacataagaagacctcatctctataaaaaatttaaaaaattagccaagtgtgatgatactcacctgtagtcctagctacttgggaggctgaggcaggaggatcacttgagcmtgggagttcaaggctgcagtgagctgagatcgcgccacttcactccagcctgggcgacagagtgagaacttgtctctaaaacaaaatagtaagaagattatgggtggctcagtaactgggatggggaatgagggggtcttcagtggtgctagtaaagattctatttcttggtctgggttatgttacatgtctcacattttgaagactcatcaaactatatccttatgacttgtgttatacctgaataaaaataaaatctccacagcctctagcctatgccttctcataggtgaagttcacttaaatggttggcaaccagttaacttatagaactctacttccctttaggtatctgggtatgtttgggggcaggctcaatggctttgaattatactcaaccacgtctagtttgcccttctctacattgaaccacacaattcgatttcag

SEQ ID NO: 918219 - DNA, 668 bp, Homo sapiens
tggaaagagacaggcacgagacagttcacccaccaccacaaacacgactgcctcacacatttatacctgtccacccgaggcccgactctgggactttagaatattagaaaacagtcctgacccacggccagtgggcaccctccaggaggggctttcctgagtgtggatcctgaactgtgaaggctcagcagcttggcagggcagagcacacaagagatggaaggcatgaggtcatgagagaggcccccaaagccaaggcaagattagaactttcccctgggaggggtggggatcatcagaacacagttctgyttctccacaagcccaggaatgaccctaacctgagccaccgtacccagccaaaaaagtcttttgtagggggaggggagacagagggcaagggcggcacacgcaaagctgagtcacccacagtggaggctgaaattatccctatttccatttgcagactttgtgcagaactttacaaaatgcagggcaatatctgtatctaaatattagtttacaagaaataaaagggttatagatgatgttaaaagatatcaaccagccagtgctggcatatgaaaaaaatattcaaccaaatcaactgcaaggaaaagaaaaggagcggaaatctaaaaggaacttaagaaaagaaagaaacttaa

SEQ ID NO: 918220 - DNA, 739 bp, Homo sapiens
cttgccgcggtagcccggctcgcaggcacacgtgccgtccacagggtggcagcggccgcggaagcactggcagtagcgatcgcagcgcgcgccgaacgtacgctcgcggcactgacagcggccgctctgctgctcgcagggagacgagttgcaggcgcactggttgttgcagctgcggccccaccagcctgcgtggcacaggcaggcgccggtctgtgggtcgcagcgcgacgtggcgctgcagtagcacgcgctggcgcactgcgcgccccaccagccggrctcacagcggcacgcgccgctccgggggtggcacgtgccgtgctggcactggcacgcatgctcgcagcgcgcgccccagcgccgcgcgtgacaagtacactggcctgtcacgtcctcgcactgcccgtgtgggtggcagctacacagctccttgcagtcggggccccagaactggcgcgggcactctgcaggggaggagcggagggggtggaaggccccggtgcttgagtaggtgcccccagccagccggaacctgcccgcgtcccgcactccagccgccacctctggggacccgccccgaaggcggatccgaccccgccccaccttggaccccgccccatctctccaggattccgccccaccgaccaataccggcccgaccccacgctcactggtgtcgcagttggcaccgaagtagccgtggcggcagcggcactcgccaggcctcacgcacacc

SEQ ID NO: 918221 - DNA, 739 bp, Homo sapiens
cttgccgcggtagcccggctcgcaggcacacgtgccgtccacagggtggcagcggccgcggaagcactggcagtagcgatcgcagcgcgcgccgaacgtacgctcgcggcactgacagcggccgctctgctgctcgcagggagacgagttgcaggcgcactggttgttgcagctgcggccccaccagcctgcgtggcacaggcaggcgccggtctgtgggtcgcagcgcgacgtggcgctgcagtagcacgcgctggcgcactgcgcgccccaccagccggactcacagcggcacgcgccgctccgsgggtggcacgtgccgtgctggcactggcacgcatgctcgcagcgcgcgccccagcgccgcgcgtgacaagtacactggcctgtcacgtcctcgcactgcccgtgtgggtggcagctacacagctccttgcagtcggggccccagaactggcgcgggcactctgcaggggaggagcggagggggtggaaggccccggtgcttgagtaggtgcccccagccagccggaacctgcccgcgtcccgcactccagccgccacctctggggacccgccccgaaggcggatccgaccccgccccaccttggaccccgccccatctctccaggattccgccccaccgaccaataccggcccgaccccacgctcactggtgtcgcagttggcaccgaagtagccgtggcggcagcggcactcgccaggcctcacgcacacc

SEQ ID NO: 918222 - DNA, 597 bp, Homo sapiens
aggggaagctcacccccatgattcaatcacctcccaccaggaccctcccccaacatctggggattacaattagagatgagatttgttgggacacagagacaaaccatatcagtgggggtttttttgttgttgtttttgttttttgagacagagtctcactctgtcgcccaggctggagtgcrgtggtgtgattttggcttactgcagccttaacctccctggactcaggtgatcctcctgcctcagcctcctgactagctgggactacaggcacatgacaccatgcctggctaatttttgtatgtttgtagagacagggttttgccatgttgcccaggctggtcttgaactcctggcctcaagtgatccaccctccttgggctcccaaaatgctgggattatgggtgtcagccaccatgtccactttatacaaaaatggtgttttaactggacactacaaaacaaaagacaaaaagaactgaagattgaacataagcactgttttctagttggtaaatttgtttctcctgaggatatggtttaacaattctgaaactgctgaatatgtttactggaattgaacaagtaaataagttg

SEQ ID NO: 918223 - DNA, 597 bp, Homo sapiens
aggggaagctcacccccatgattcaatcacctcccaccaggaccctcccccaacatctggggattacaattagagatgagatttgttgggacacagagacaaaccatatcagtgggggtttttttgttgttgtttttgttttttgagacagagtctcactctgtcgcccaggctggagtgcggtggtgtgattttggcttactrcagccttaacctccctggactcaggtgatcctcctgcctcagcctcctgactagctgggactacaggcacatgacaccatgcctggctaatttttgtatgtttgtagagacagggttttgccatgttgcccaggctggtcttgaactcctggcctcaagtgatccaccctccttgggctcccaaaatgctgggattatgggtgtcagccaccatgtccactttatacaaaaatggtgttttaactggacactacaaaacaaaagacaaaaagaactgaagattgaacataagcactgttttctagttggtaaatttgtttctcctgaggatatggtttaacaattctgaaactgctgaatatgtttactggaattgaacaagtaaataagttg

SEQ ID NO: 918224 - DNA, 552 bp, Homo sapiens
tctttctccattcttctatccttctacttagcaccttgtgtcacaggtatttgtttgcctgtttagactctgcaaacttccctggtgaccaagtgacatgtggaaccctccaagacagggaccatatttcctgtctccctgcacagtgcctggcataaagcagggtctccataaatgtttctttaacgagtgcctaaatggcctggtggaggtkgctggcacactggaagaggagcctggaagtatgatgttatatttttctagtctgctaataatcaaaccttttcacactcagtttcttcatctgagaaatattccatccagtgtgcttcccttgcagagatgctgtgataattaatgaactcattggaaaggaacgatattctctatccctttgaagtttggttttacaagaagatctttatatacaaggctgtaaaaattctgttctccttcctgccctttttttcctcaagcccaaaggtccaggagagattatctgcctgtgaaacttccatttcataaatgccagtctcccctgtagtataacct

SEQ ID NO: 918225 - DNA, 716 bp, Homo sapiens
tacccatttttgtgttggtgggtttttttgtttgtttgtttgttttttggagatgatggctcactctgtcgcccaggctggagtgcagtggcaccaactcggctcactgcaacctccgcctcccaggttcaagcgattctcttgcctcagccycccggagtagctgggattacaagcatgcgccaccacgcccggctaatttttgtatttttagtggagacagggttttgccatgttggccaggctggtctcgaactcctgacctcaggtgatccacctgcctgggcctcccaaagtgctgggatgacaggcgtgagccaccacgcccggcccatttttgtgttgttgaacttaaagcatgagcttgggcaaatcccttcttcttctgagccatagggtaaaggtgagaggagagtcttgtaagctccgtgatgagttccagaagtccagggtgaccagtcatgcttagatcatttccgtgtcatttatggactcgatgagagacaaaagggcctctggggactgtgagttgcatcagcctcttgctgaactgacagaacattcaggtttcagggagaggtgaggtcattgccagggatcttgttcaagggataagggctgacacctgctcctgaagagggaccacacggtgcctgcctggaaatggaaaatccgggctcgcactctggctctgctcctggtttttgggtcttggc

SEQ ID NO: 918226 - DNA, 558 bp, Homo sapiens
aacatgggccgagtcctcggcacacaggctctggggagatggctgaggagggtgggagctccaggaccctcagagtgaagtgaatcctgcttgcccagctcccctttgggctccacagaacacgccggcctctccttcacacaggcaggccgagggcaccctccacaccaccatggtccacaggctggtcccacacccagtggagtccaagctgctctcttgcctggctgacctcaagaccccctagagggtaggatgagctgctgctgcttgtcgcaggatgactgcagcactgcctggcaggatgcctgctgccacrcctgcctctgcacctgtctccacggcctgctcgcttggcagccagagggagatttttctgaaccctgagtcaaaccatgctgttcacctgctgacccacctgccaacaaccttctatttgggcagcaacttgcctaattccaggaggtgactcaaacacacctggccccagcctcctttgcagccagggcaaccagacgcccgagtcccggccaaggaggctcatagagaattcagctt

SEQ ID NO: 918227 - DNA, 580 bp, Homo sapiens
tgtatcctgctgagccacagaggcagatctgcccaagtccttgggagcctatcttttacataggcatgccctggatgtgcaacatggagtcaaaggaaattattttgaaattttaagatttaaagatgtgccctggtggttttcagayttgcatggggcctgtggaccctttgttgtggccaatttctcccatttagaatgggaacatttacctaatgcctgtacccccattgcatcttggaagtaactaacttgtatttgattttacaggctcataggcagaaaggccttgccttgtctctgatgagactttgaacttgagcttttgagttaacgctggaatgagttaagactatggaggaactattaggagggtatgattggttttgaaatgtgaaaaggacatcagaggagagcaggagggagaaaaaaaaaggacatgagatttgggtggggccagggtggaattatatggtttggctctgtttccccacgcaaatctcatcgtgaattgtaatccgcatgtgtccagaaagggacctaacaggaggtgataggatcatggaaacagtttccccca

SEQ ID NO: 918228 - DNA, 602 bp, Homo sapiens
ttaaatattataatcaaagttttcctgtatgttaaaaaaaggaaaaagaaaagtatatacttctaaaatctgattaatctggcaacttgcatttcattttattttttgttaataagaggcagaaaatactaaaacattataaaataacacaaaataaaatttgtataactagtaactgatatcaatatttcattatacctgacaaaatagttctaaatatcctacygaataatgtgtaccaaatctgaaataaactgtattaaagttttacctctgagttttaaacaatatgtattgagaatatgtgacctacaaaaatatttcagttacagttagaagaatcaatatcactcacctatactacttaggctatttgaaagttatactctttccaactaaataacatgtcttagggatagtgttgaaaacaaactgcttgcattaggcaagtgctgtttttgcacttacgaaagtgcaaaaacactttgcttaattcacaacaacttctttcttaacagtgatgtatcctttgatactggtgggggaataagaagcaggctcttaaataattgtctttactgcatagatgccacactaccata

SEQ ID NO: 918229 - DNA, 623 bp, Homo sapiens
ttctattcaatattgtattggaggttctagccagtgcataagaaaaaaaaaaaggcatccacattgcaaagaagtaaaactgtgtttattcacgggtgccatggttgtctatgtagaaaatattacagaatctacaaaagattgcaggctccaagaacaatataaaacattaattatatttctatatactagtaacaatctttcagaaattgaaattaggccaggcatggtggctcatgcctgtaatctcagcactttgggaggccaaggcaggcagatcacaaggtcaggagatcragcccatcctggctaacacggtgaaaccctgtctctactaaaaatacaaaaaattagccaagtgtggtggcgggcgcctgtagtcccagctactcaggaggctgagggaggagaatggcttgaaccggggaagcagaggttgcagtgagctgagatggtgccactgcactccagcctgggtgacaggcaagacttcgtttcaaaaaaaaaaaaagaaaaaagaaagaaaattacagaaaattgtagacataaaagtttctcttttacttgttatgaggaagcagacatcctgggcaacatagtgagaccccgtctctacaaaaaat

SEQ ID NO: 918230 - DNA, 592 bp, Homo sapiens
cctcaccattgctttatttcttctatgaagatttcactggaattatcagattaatttgcttatttgtttactgtctgtttgtcacccatgactggaatgtatactctaggaaggcagggatataatccaatgggtttactgctgcacccctagtacccagaagagtgcttggcacctgataagtgtctggggaacttgctacatgaattacatgtgtcagatgggatatctgttcgtctttcttctctcttttttctttctctctttctctctctctttctttctctttctttcttttttctttttttgagataaggtctcgctctgtcacccaggctagagtgcagtggtgcaatcatggctcactgcaaccttgaacatgtgggctcaagcgatcctcccacctcaggctaccaaatagctaagactacagaggtgcktagctatgcccagctaattaaaaaaaaaaaaatttttttttttttttagagatgggggtctcaatatcttgcccaggttggtcttgaactcctaggctcaagcaatccccctgccttggcctcccaaagtgctgggattataggcatgagcc

SEQ ID NO: 918231 - DNA, 732 bp, Homo sapiens
aaccactgatctatagaaaaggataatagtagtgacattcagagaggcaggatggtatagtgcaaagcttgccaaactttaattttacataaatgacctggggaatcttggaaaaatgtaggttctgattcagtagttctgggatggaagtgagaattttgtattaataacaaactctcaggtgatgatacctgtgccaccggcccaaggaccacactttgartagcagagcagtagtagaaagtgcatcggctttgaaagaagacagacctgggcttgaattctagctaaaatacttctactttggacaagttacatagctctctggaccttattttctcattggtaaaatgagactaataatgctgaccctgcagagttcttataaggattcatggaatgcatagtccctggcagaaaggaagatataggagggactataattggcctaaagtaggaggctctggttaccatgggcactgccctgttgtgatttatcaagccattacacctcactgaacctcagatttccagtggaaaaacctgtttgtaaaccatgttcacatattctgttgaaagtaatcatagtttgatttatgatgatagggctcaggtaagtgattagttttattctcctgcctgctttttatgttgtccattaatgagcaaggtgctgatgcaaggagatggcagatgcattttgaaaaaaaaggagagagagagtacttgtag

SEQ ID NO: 918232 - DNA, 752 bp, Homo sapiens
acctccatgaccacattgagaaccactgatctatagaaaaggataatagtagtgacattcagagaggcaggatggtatagtgcaaagcttgccaaactttaattttacataaatgacctggggaatcttggaaaaatgtaggttctgattcagtagttctgggatggaagtgagaattttgtattaataacaaactctcaggtgatgatacctgtgccaccggcccaaggaccacactttgartagcagagcagtagtagaaagtgcatcggctttgaaagaagacagacctgggcttgaattctagctaaaatacttctactttggacaagttacatagctctctggaccttattttctcattggtaaaatgagactaataatgctgaccctgcagagttcttataaggattcatggaatgcatagtccctggcagaaaggaagatataggagggactataattggcctaaagtaggaggctctggttaccatgggcactgccctgttgtgatttatcaagccattacacctcactgaacctcagatttccagtggaaaaacctgtttgtaaaccatgttcacatattctgttgaaagtaatcatagtttgatttatgatgatagggctcaggtaagtgattagttttattctcctgcctgctttttatgttgtccattaatgagcaaggtgctgatgcaaggagatggcagatgcattttgaaaaaaaaggagagagagagtacttgtag

SEQ ID NO: 918233 - DNA, 719 bp, Homo sapiens
atgggaacatcctggtggtttaacttgaaagccactaggtggcaacatttactaagttgccagccattctcttcccttaagacattgaacttgcttttccacatagcagatggaatagctgagaaaagagattgccattgcttcaggttcttttgaaagtgaggctataggataaacacactacagtatattgatatctattcgtcacctgggtttagataccaggagtttgaatttgctctgggtgactgggtgagtagcttcccctttggcctcagttaggcatccttgacaggacagacctgtgattggactgtctggtctctcatggttctttttctccrtgatttatgactttgattatgatttctttatattaaaaaaaaacttgtagtaaaaccagtcttatttaaaggaatactagccttttatcaaagggcaaagtaatgatttaaaaaaaaaatcaacaacaaaatttcaagggaatgaatgtccctagaagctagccatctccccgagttaacttaagaggctagactctcctaaatgaggatgcttatttaccagctttcctaaattagcagctttggagatgttaaaatccgtaaggaactgtccaagggatgtattgtgtatgctttgcagtgattaagccattaagctctaattggtattttcccactcatgggtttgtaaaggaagctttaaaattatttagg

SEQ ID NO: 918234 - DNA, 742 bp, Homo sapiens
aggaagttgaggcttagagagaggatgccttactcaaggcctcagaaggggtacttcagcacccccccacttcccttcaggatcctctaaggccagtgctctcatttgacaaatgaaagacagatttggagagacctgagatcttttggacatcaggtttatgtgtcaagcatagttttatttattttattttattttgttattttttgagatggagttttgctcttgttgcccaggctgtagtgcaatggcatgatcttggctcactgcaacctccgcctcccgggttcaagcgattctcctgcctcagcctcccgaatagctgggattacaggcatgtaccaccacgcctggctgattttgtatttttagtagagacgggtttctccatttggtcaggctgctctcaaactctcaacttcaggtgatctgcccgcctaggcctcccaaaagtgctgggattacaggygtgagccaccacgcccagccaagcatagttttaaaaactttgctggtcttatttaattaaatccctgtaagagtcctgcaagataaatactattattattcctgttttacagatgagaaagctgagacacaaaaatttccaaggccacatagctactatgtgaaagatgtaggataaaaccttaggcagcctgcctccagagccaggctcctaccctcactctacagctgccttgcagggagtactgttaaagcttagtacagttacgactta

SEQ ID NO: 918235 - DNA, 600 bp, Homo sapiens
tcaccctttgatatggtgaggctttgtatccccacccaaatctcatctcgaattgtaatccccataatccccaggtgtccagggagagaccagktgggggtaactgacatgggggtggtttcccccatgctgttctcatgatagtgaagagttctcacaggatctgatggttttataaggggctcttcgtgctttgctcagcacttctctctcctgctgccttgtgaagaaggtgcctgcctcccctttcccttctgccatgattgtaagtttcctgaggccttcccagccatgcagaactgtgagtcacttaaacctctttcctttgtaaattacccagtcttgggtatttccttatagcaatgtgagaacggactaatacacccttcatgcaataagttacttgttatgtttactgtctttctcccacaatgagaatataaacccatgagggcaggtttgtgttttgtttactgctggagccccagcacctaaaatagtgcacagtacagagtaggcattgaagtacttgttaaatgtatcaattctcattttccctttgggacaactgaggttcagagagggagtgtgatttgccca

SEQ ID NO: 918236 - DNA, 781 bp, Homo sapiens
ctggcccctccgaatctcatgtcctcacatttcaaaaccaatcatgccttcccaacagtcgcccaaagtcttaactcatttcagcattaacccaaaagtccatagtccaaaatctcatctgagacaaggcaagccccttccgcctatgagcctgtaaaatcaaaagcaagctagttacttcgtagatacagtgggggtaaatatagccattccaaatgggagaaattggccaaaacaaaggcgttacagggcccatgcaagaccaaaatccagtagggcagtgaaattttaaagctccaaaattatctcctttgactccaggtctcacatccaggtcaagctgatgcaaaaggtggcttcccatggtcttgggcagctccacccctgtggctttgcagggtacagtctccctccctcctggctgctttcatgggctggcattgagtgtctgcagctttttcaggtgcatggtgcaagccgttcgtggatctaccattctagggtctgaagggacggtggccctcttctcacagctctactaggcagtgcctcagtagggactgtgtgggggctctgaccccacatttcccttccacactgccctagcagrggttctccatgagcgcgccagcagcaaacttttgcctgggcatccaggtgtttccgtacatcttctgaaatccaggcggaggttcccaaacctcaattcttgacttctgtgcacccacaggcttaacaccacttggaagctgccaaagcttggggcttccaccctctgagc

SEQ ID NO: 918237 - DNA, 745 bp, Homo sapiens
ggaggaaggggggtgggttgaggtgaaatgtgagtgacctgagtttctgtgggtgcagggctgtctgtgtcaagggctcggcatcaggcctgactcacgtggtggactcagggccctgtttctctagaaacaaagtgagataaatggggtgtttgtgttcagagcccctcatctgaagtgctgccccaggtcatcagtggagcccgtgtctctgtcacgtgacttaggttcaccaggtagaagagggctattttatttggactgacagaacttcaaacagcaacgcttctgagagccaactttttttttttaagacagggtcttgttctgtcacccaggctcaagtgcagtggcactgtcatggctctcactgcagcctctgcctcctggactcaagtaatcctccaccttagcctcccgagtagctgagactacaggcatgagccaccacacccagctaattttcaaaattttttgtagagatgttgtgagakccaataattttgagaacaagattttacagtgagtaagaaagcaactgctgctcaaagagagtgtcctggccgggtgcggtggctcacgcctgtagtcccagcttctcgggagcccaaggcggggggatcattctaggccaggagttcaaggctacagtgagctaggttcatgccactgcactccagcctggggcatcctgatacttcacagcttctgtacgtccttgggagaaatatgttctcctataact

SEQ ID NO: 918238 - DNA, 745 bp, Homo sapiens
ggaggaaggggggtgggttgaggtgaaatgtgagtgacctgagtttctgtgggtgcagggctgtctgtgtcaagggctcggcatcaggcctgactcacgtggtggactcagggccctgtttctctagaaacaaagtgagataaatggggtgtttgtgttcagagcccctcatctgaagtgctgccccaggtcatcagtggagcccgtgtctctgtcacgtgacttaggttcaccaggtagaagagggctattttatttggactgacagaacttcaaacagcaacgcttctgagagccaactttttttttttaagacagggtcttgttctgtcacccaggctcaagtgcagtggcactgtcatggctctcactgcagcctctgcctcctggactcaagtaatcctccaccttagcctcccgagtagctgagactacaggcatgagccaccacacccagctaattttcaaaattttttgtagagatgttgtgagagccaataattttgagaacaagattttacagtgagtaagaaagcaactgctgctcaaagagaktgtcctggccgggtgcggtggctcacgcctgtagtcccagcttctcgggagcccaaggcggggggatcattctaggccaggagttcaaggctacagtgagctaggttcatgccactgcactccagcctggggcatcctgatacttcacagcttctgtacgtccttgggagaaatatgttctcctataact

SEQ ID NO: 918239 - DNA, 505 bp, Homo sapiens
gggaggctgaggtgggaggattgcttgagcccaggagttgaggctgcagtgagctatgactatgccactgcaatccagccttggcaaagagcaagaccttattgctaaaaaaaaatttttttaattaaaaacattccagcctggccaatatggtgaaatcccgtctctaccaaaaatacaaaaattagccaggtgtggtagcaggtgcctgtagtcccagctactcaggaggctgaggcgatygtaccactgcactccagcctgggtgacaaagtgagactcggtctcaaaaaaaaaaaaaaaaaaaaaaagatatatatagatatatatatatatatatatataatttgtcagtttacaataaaacaatttaaaaagcaatcaaattcccgttgccaagacaatgtgagtatcactatatgacctactactctgctcagagccacggaggcttcaaggcccttcttcctgggattcaggtggacactgtcctttctgtggagta

SEQ ID NO: 918240 - DNA, 505 bp, Homo sapiens
gggaggctgaggtgggaggattgcttgagcccaggagttgaggctgcagtgagctatgactatgccactgcaatccagccttggcaaagagcaagaccttattgctaaaaaaaaatttttttaattaaaaacattccagcctggccaatatggtgaaatcccgtctctaccaaaaatacaaaaattagccaggtgtggtagcaggtgcctgtagtcccagctactcaggaggctgaggcgattgtaccactgcactccagcctgggtgacaaagtgagactcggtctcaaaaaaaaaaaaaaaaaaaaaaakatatatatagatatatatatatatatatatataatttgtcagtttacaataaaacaatttaaaaagcaatcaaattcccgttgccaagacaatgtgagtatcactatatgacctactactctgctcagagccacggaggcttcaaggcccttcttcctgggattcaggtggacactgtcctttctgtggagta

SEQ ID NO: 918241 - DNA, 591 bp, Homo sapiens
tcacaagaacttactatcatgagaacaacaccaaggggagcaatctgcccctgtgatccaatcacctccaacattggggattacaacattgggacctcactccaacattggggattacaatttaacatgagctttgggtggggacacagatccaaaccacataattcctcccctgacctttccaaattttatatcctcacattgcaaaatacaatcatgccttcccaacagtcccccaaagtcttaactaattccagcattaactcaaaagtccaaagtatcatctgagacaaggctagtcccttccacctatgagcctgtaaaataaaaaaaacaagttagttgcttccaagatacaatgcaagtatgggcattgggtaaatactcctgttccaaaaggaaggaatccaccaaaagaaaggggcwacaggccccacttgaagtctgaaacccaggaaggaagttattaaaccttaaagctccaaaataatcttgtttgactccatgtcccaatttcaagacacaccagtgtgagaggtgggctcccaagtccttggacagctctgctcctttgactttgcagggatcagc

SEQ ID NO: 918242 - DNA, 603 bp, Homo sapiens
aaggagtcagttaaagaaagagggcccgggtgcggtggctcacgcctgtaatcccagcactttgggaagccgaggtgggcggatcacgaggtcaagagatcgagaccatcctggctaacacggtgaaaccccgtgtctactaaaaaatacaaaaaaattagccaggcagggtggcgggcgcctgtagtcccagctactccggaggctgaggcaggagaatggcgtgaacccgggaggcggagcttgcattgagccgagatcgtgccactgcactscagcctggcgacaaagcaagacgctgtctaaaaaaaaaaaaaaagaaagaaagaaagagtggtatatgcatgcaatggcatactcagcaactaataaggaattaatttatttaacaaatgcttaaatcctactcactatttactagctactaagcatcctcatcacaaccctatgaaaaggacgttagtcgtcttatccacagatgagaaagcagaagcagaaaaaggttagatgcttccccaggtttacacgaccagaacttggcggaagcagccttggaacccaggcatcccagccgagagtcgtgctcacacacgctacactgtg

SEQ ID NO: 918243 - DNA, 604 bp, Homo sapiens
ctctcaaggggaaagcatttccctcatggggaaaattatggatgccccgatggaacctattgtctactctctgcataacactagctttggtgacctggtctctggggataaaattaaaattagtgccaggcacatacaaccctttcttcttccctgccatctttatagaaaccctcaatagagttctaatgcccacatttgacaatgatgtcttttgggaggtcaggaagcagagagagtaaaaaaaattctctcccaatgtggttttacaaatgggcattagccacaggctgttccagctcaagggtgaagagtagcacaaactcttttctttctctgcaataaaaagaatgaaattacttctttctayagcagtgctaagatatgaataactgaactggaaaaaaatattagctgtctgtctactgttgctgcataatacaaaatatatatcattccagcatctgcccagtgaaaaattacaagaacactagcaaacatgtgctacaaagtatctttgatttgcttgtcctcattattgatgcaatcaaaatggggttatcaatctggttctttgaaatcaactattttagtatccatttat

SEQ ID NO: 918244 - DNA, 638 bp, Homo sapiens
actttatcccccagctttttaactttttattttcttctctttatgtcttattgaaatgtctatgtcttgaaaaggtgttatagctattatttttcactggttcaccatttagtctttctacttaagaatagtaaacacatcacaattacagttttataatattctgtgcttttctgtgtgcttgctattaccagtgagttttctatcttcagatgatgtattttctttcttttctgtttggattttgtttgtttgttttgagacagggtctcactctgtcaccttggctggaatgcagtggcacaatcttggctcactgaaacctctgcatcccagctcaagtgattttccctcctcagcttcccaagtagctgagactacaagtgcatgccaccacacccagctaatttttaaataaaaatttggagagacaaggtctcactrcattgcccaagctggtctcaagcttccaagcttaagctaccctcccgcactggtctcccaaaatgctggaattacagacgtcagccactatacctggccctcaaaggatttcttcttgtttgttggcatctttcttttcagtttgaagaactccctttagcatttgctgtaggaaagatctggtgttgataaaa

SEQ ID NO: 918245 - DNA, 680 bp, Homo sapiens
ctctgcccctggtgtccagcagacatgactgcaggccactgagatgtggcctcctctctccaccaccgttcctatcttctgtggcagccactttttttttctttttggacagagtttagctcttgttgcccaggctggagtgcaatagctcaatctcagctcactgcaacctccacctcctgggttcaagcgattctcctgcctcagcctcccaagtagctrggattacaggcgtgcaccaccacgcccagctaatattttgtattaagcagagatggggtttcaccatgttggccaggctggtctggaactcctgacctcagatgatccacctgcctcagcctcccaaagtgctgggattacaggtgtgagccaccgcgcccagcgtttttttttttttttttaagacagggtctcactctgttgcccaagctggagtgcagtggtgtgatcttggctcactgcaacctccgcctgccacgctcacgcctgccacgccttcagcctcccaagtagttgggactacaggtgcacgtgccaccacgtccagctacattttatattttttgtagagatggggtcttgccatgttgcccaggctggtactgaactccggggctgaggcaatcctcccaccttggtctcccaaggtgctgggagtacaggcatgagacactgcg

SEQ ID NO: 918246 - DNA, 680 bp, Homo sapiens
ctctgcccctggtgtccagcagacatgactgcaggccactgagatgtggcctcctctctccaccaccgttcctatcttctgtggcagccactttttttttctttttggacagagtttagctcttgttgcccaggctggagtgcaatagctcaatctcagctcactgcaacctccacctcctgggttcaagcgattctcctgcctcagcctcccaagtagctgggattacaggcgtgcaccaccacgcccagctaatattttgtattaagcagagatggggtttcaccatgttggccaggctggtctggaactcctgacctcagatgatccacctgcctcagcctcccaaagtgctgggattacaggtgtgagccacygcgcccagcgtttttttttttttttttaagacagggtctcactctgttgcccaagctggagtgcagtggtgtgatcttggctcactgcaacctccgcctgccacgctcacgcctgccacgccttcagcctcccaagtagttgggactacaggtgcacgtgccaccacgtccagctacattttatattttttgtagagatggggtcttgccatgttgcccaggctggtactgaactccggggctgaggcaatcctcccaccttggtctcccaaggtgctgggagtacaggcatgagacactgcg

SEQ ID NO: 918247 - DNA, 584 bp, Homo sapiens
gcagggtctgtcttagtgtctcaactcttactccaaacctactcaaaatgccctctcctttctgacatctaggggccaggaattttgcacagaagcagaaaaaagaaactttatttctggatctctgtctcctctagcctccccttaccaaacttgtgaaattacttaaaaggtttactgaaggcaggtctctggaccacgcacaaagaatcaaacaatttattacacacttcatgatctgagtggtgcataaaggagtgctgcataaaacttacattctcaagccctacttggaggtctcaggaacactgaaacagtgaaacttggaataaaacaattttccactatatctttagttttatcttccattcaatattataaatgtacgaggaagakaactaactagatttgaatgtaactagatggagccgggcacaatgactcacacctgtaatcccagcactttgggagactgaggcaggcagatcacttgaggtcaggagttcgagaccagcctggccaacatggtgagaccccgtatctactaaaaatacaaaaaattaactgggcgtggtggcgggcgc

SEQ ID NO: 918248 - DNA, 607 bp, Homo sapiens
gctgtgcattaaacaatataagggaagaaaattaaaataaggacaggagatggtaagtgacagaggatgctctcatagataggatgctggggaggctctctgaggagggggaatatgaacagacacctgaatgaagtgaggaggggagccctgtgggtgtatatctgggagttccaggcagagggagtgtaaaggacaaaggatctgagaagcatcttacttagcaaatttaaggaacagaaaggaagccaggggctgagcatggtggctcatacctgtaatcccagtgctttgggaggctgagacaggcggatcacaagagtttgagaccagcctaggcaacgtggcaacaagccaggtgcattggcgtgctcctgtactttcagctactcgggaagctgaggtgggaggatcacttgagcccagggattttgagactgcagtgagccaagattgcrccactgcactccaccctgggtgacagagtgagaccatgtctcaaacaaacaaacaaacaaataaataaataaataaataaataaactggaaaaggaagccagtatggccagagcatagcaaggtaggagaaaagttgttggaaatgcag

SEQ ID NO: 918249 - DNA, 582 bp, Homo sapiens
ataggacttaagaagaaattatttaggcagatagtgaggatatggaagtccttggtaaggttttccttttttaaggaaaagtagccccaaaatcattttcttttctaacaaacagcaacttgtaaaattgagcggcagacatagacaagcaagctggaagcttgcatgagtgaaggctacctgggactaggaatgttcaaaatggtggctccatgttcccttctctttgccagccatgtgtacagtaaggagtagacaacatrgcgccagccaagtgaaaagcccatttgcataagattagggtggggtggccagtgttccccacgtgctatgtaaacatcacacctggtccaaccaatctgtgggccctatgtaaatcagacactgcttcctcaagcctgtctataaaatctggtgcactcaaccatgggccagaattcccattcaagcagccctctctctcacaagagagagagctgttctcttttctctttcttttgcctattaaatctccactcctaaactcactccttgtgtgtgcccgtgtccatcatcttcttggcgtgagatgatgaaccctgg

SEQ ID NO: 918250 - DNA, 756 bp, Homo sapiens
agttgggcagcctctgttcctgtttggctctgtccttgaagaaagtgataagaagtgcacagattttggaattaaacagaccatggtttgaagtctggatcttccagttgtaaccaggtggcattgggtaaattatttaacctctcagtgcctgagtttactaatgatataggacttaagaagaaattatttaggcagatagtgaggatatggaagtccttggtaaggttttccttttttaaggaaaagtagccccaaaatcattttcttttctaacaaacagcaacttgtaaaattgagcggcagacatagacaagcaagctggaagcttgcatgagtgaaggctacctgggactaggaatgttcaaaatggtggctccatgttcccttctctttgccagccatgtgtacagtaaggagtagacaacatggcgccagccaagtgaaaagcccatttgcataagattagggtggggtggccagtgttccccacgtgctatgtaaacatcacacctggtccaaccaatctgtgggccctatgtaaatcagacactgcttcctcaagcctgtctataaaatctggtgcactcaaccatgggccagaaytcccattcaagcagccctctctctcacaagagagagagctgttctcttttctctttcttttgcctattaaatctccactcctaaactcactccttgtgtgtgcccgtgtccatcatcttcttggcgtgagatgatgaaccctgggtattt

SEQ ID NO: 918251 - DNA, 581 bp, Homo sapiens
atgggctctaattccagcttggctatcagctctatggccttgggcaggtccctgagccactgtatcctcgccagtacaataggggtactggtagtaacagtatctgcctcacaggattgctgtaagataaaataagttaatacatataagagtttgygggctttttccccttcatccaaccaattctctgattctctaacactgactggatgtcttgcaattcaatttaaatctgatatactaagtatctggagttactgtcagacaccacaggttaaggactcagtcccataagaccacccacacctctgatgccagtcacaagtatcagcttctcaggttaccctcacttctgtctgacttggctgcaagatcagccacccaatgggttcattttgcccactggccagatagagctgatttatcaagatagaggaattgcaatagagagagtgtaatgtacctatggctggcaaaacgggagactggagctttattattactcaagtcagcatccctgaaaattcagaggctagagtttttcaaggatagtttgatgggcaagggaatgggtgctgctg

SEQ ID NO: 918252 - DNA, 614 bp, Homo sapiens
gctctaattccagcttggctatcagctctatggccttgggcaggtccctgagccactgtatcctcgccagtacaataggggtactggtagtaacagtatctgcctcacaggattgctgtaagataaaataagttaatacatataagagtttgtgggctttttccccttcatccraccaattctctgattctctaacactgactggatgtcttgcaattcaatttaaatctgatatactaagtatctggagttactgtcagacaccacaggttaaggactcagtcccataagaccacccacacctctgatgccagtcacaagtatcagcttctcaggttaccctcacttctgtctgacttggctgcaagatcagccacccaatgggttcattttgcccactggccagatagagctgatttatcaagatagaggaattgcaatagagagagtgtaatgtacctatggctggcaaaacgggagactggagctttattattactcaagtcagcatccctgaaaattcagaggctagagtttttcaaggatagtttgatgggcaagggaatgggtgctgctgattcgttgtggatgcaatcaaagggatgtggaaaatg

SEQ ID NO: 918253 - DNA, 582 bp, Homo sapiens
gtattatttgtagaaacgaagtctcactatgttgcccaggctggtcttgaactcctgggctcgagcgatcctcctgccttggcctcctgaagtgctgggtgcatgaggcaccatgcctggcagctcccaggtgcattgaattcaacaacatacttttaactcacccatgagaaaaagaggaagcctcaagggaaattagaaaatattttggaactaaatgaaaatgaaagcaacatataaaaatttgtgaaattcagctaaaggagtagttagaggaaaattatagcattaaatacttgcattagaacagaagaaaggtttcaatagtgttagattccttcttaagaaactagaaaaggaagagtaaaataagtccaaagcragaagaaaaatggagcacagaaatcaatgatattggaaacagaaaataaagaaaatcaatgaaatcaaaagctgattttttgcaatgtcaagaaaattggtcaaactctagcaagactgataaagaaaagagaagcaggggagagagaagacaaattaccaatatcggcaatgaaagaggggatatcattacaaacatta

SEQ ID NO: 918254 - DNA, 722 bp, Homo sapiens
actgggctgagtacacaccttctccatcagccacacccaagtcatctccaccttctggcatacatggaacaagggtctcggagtctgtggctcttgagacaaaactggcttcgaggagtcctcactggctgaacctgctttcttgggcccaaggagcctcctgagaatttctggcaagttaatggcctcagagtgggtacggctatttattttgctgagaagagatgtcttcatcttcactttctctatttcctcttctggcaattctttcactcacccacccctctctttttcttttgactcctcctcttacttttctaccycctttttcttctcttcctccctcacacacttcctcttctgcattctcttttcctttttcctccttctcatttccaaacagttgtcttttatacactcacatttgtaggcatacgtataagatgtaagatttttgaaacagatattacatatgtgtatatgtattatatacatatttaaatatacaaatatatattacagatgtgtatatgtgtgcatacacacatatatgcatatatatgtacatatacatataatcagtgtaattatacatccagacatgtttttctgctaagaatatcgaaaatccagaagccagtctgaccagagccccattaggagtctcaaggggaggcagaagaatggtggagaaagcaaggacttttagtgttagaggccac

SEQ ID NO: 918255 - DNA, 776 bp, Homo sapiens
tcctgaactgggctgagtacacaccttctccatcagccacacccaagtcatctccaccttctggcatacatggaacaagggtctcggagtctgtggctcttgagacaaaactggcttcgaggagtcctcactggctgaacctgctttcttgggcccaaggagcctcctgagaatttctggcaagttaatggcctcagagtgggtacggctatttattttgctgagaagagatgtcttcatcttcactttctctatttcctcttctggcaattctttcactcacccacccctctctttttcttttgactcctcctcttacttttctaccccctttttcttctcttcctccctcacacacttcctcttctgcattctcttttcctttttcctccttctcatttccaaacagttgtcttttatacrctcacatttgtaggcatacgtataagatgtaagatttttgaaacagatattacatatgtgtatatgtattatatacatatttaaatatacaaatatatattacagatgtgtatatgtgtgcatacacacatatatgcatatatatgtacatatacatataatcagtgtaattatacatccagacatgtttttctgctaagaatatcgaaaatccagaagccagtctgaccagagccccattaggagtctcaaggggaggcagaagaatggtggagaaagcaaggacttttagtgttagaggccacttgggctagaagtttccgatactaagttgctacatgatgctgggaaaa

SEQ ID NO: 918256 - DNA, 758 bp, Homo sapiens
aactcaggttatatggtaacttggtggcccatggttaagcactcagtttctactaaggctcagtagtaggtcaagaactatctcttaaaaggtgagtagttatctgtggataatggctgagctttgctccaaaatcctagaagcctgcacttcagttcaccaatgagggcttgctaaaggctccaaacagcattcctatctgccactgatacttttaagcaccattggatctgctggatcatataccctcaagtgtcagagcagtttgcccagcaatctggacctgttgcagagccttctcttgctctgagttccactcaaaactagaaatttttcaggtcacwtgtaaatgggccagagtaacacatccaaatgaggaatatgttgcctccaacattcaaagaggcccactaggcatgctctttcttgtctgtaggaggggccagatacaacaccttatccttcactttagaaggggtatcttgacatgccccacacaactggaccccaagaaatttcactggggtggaaggccctgaagttttttgaatttatttcccaaactctgctgcaaaaatttcttaccaataaactagagtagttgctaatttcttgctcactagagccaatcaacataatgtcatcaatataatgggtcagtgtgatatcttgtggaagggaaaggtgatcaagatccctgagaactaagttatgtcatagggctgcagagttgatacacctgagatagaacagtgaag

SEQ ID NO: 918257 - DNA, 640 bp, Homo sapiens
tctctgtgggaggctgtcctttgtactataggatgctcagaggccaccctagcctcttcccgatggatgtcagtgacacctccagccccacagttgtaacacctcggaacgtctccagacattgctaaacatactgggatcaggggcagaattgtcctgggttggcagtgatggctgtagagtagaggttgccagtggggcaaggtggcccacgcctgtaatcctagcactttgggaggctgaggcaggaggatcacttgagtccaggagttcaagaccagcctgggcgacaaagcgagacccccttctttacagaataaaaaattaaaaaattcgttgggcatggtgctgcacgcctgtcgtcccagctactcgggaggctgaggcaggaggatcacttgagctgggaggtcaaggctgcagtgagctgtgatccygccagtgcattccagcctgggcaacagagcaagaccctgtctcaaaaaaatatatacataaataaaatagagtagaggttggctgactttcctgtagaaagcccgatggtaaatcctgcaagctttgcgggccgcagacgggttctgtggcctgttctcttttctcttctcttcagtcctttaaaaatgtaaacaccattctt

SEQ ID NO: 918258 - DNA, 705 bp, Homo sapiens
tgacagaaggttcacctcttgccttccactcacttctcacaatgtcctttcagcacctgaccctatacccaccggttattcctaggttatattagtaatgcaacaaacagtaatattaaaagctaatgattaatgtttataataattgataattgtccatgatcatctccataatttgtattatgactgttcttattgtaacgattttattatactgaaatagtttgtgccttcggtctcttgcctcggcacctgggtaattctccgcccacaggactacaggctcgtgtcaccacactgggcaatacaaaaaatacaaaaaaaaaattttgtattttttgtagagacgrggtcttgccatattgcccaggctggaattcttacctttgttactgtatttaacgtatctttttcctccggccatcttcatggttttctctctgatttccacagtttgaatacactgcatgtgtcaggcaggggctcatatttatcaagttttgtgtgtgctctgagctcaggtctttcattattttgggaaaattattggtaattttctcttcaaacattttttatgatttgttctttcttcttcttttgggagtcctattacatgcatatgatatcatttgatattttcccacagttcttggatgctttttttaaaaaaaaactttttttcttctttattttccaacgtgggta

SEQ ID NO: 918259 - DNA, 705 bp, Homo sapiens
tgacagaaggttcacctcttgccttccactcacttctcacaatgtcctttcagcacctgaccctatacccaccggttattcctaggttatattagtaatgcaacaaacagtaatattaaaagctaatgattaatgtttataataattgataattgtccatgatcatctccataatttgtattatgactgttcttattgtaacgattttattatactgaaatagtttgtgccttcggtctcttgcctcggcacctgggtaattctccgcccacaggactacaggctcgtgtcaccacactgggcaatacaaaaaatacaaaaaaaaaattttgtattttttgtagagacgaggtcttgccatattgcccaggctggaattcttacctttgttactgtatttaacgtatctttttyctccggccatcttcatggttttctctctgatttccacagtttgaatacactgcatgtgtcaggcaggggctcatatttatcaagttttgtgtgtgctctgagctcaggtctttcattattttgggaaaattattggtaattttctcttcaaacattttttatgatttgttctttcttcttcttttgggagtcctattacatgcatatgatatcatttgatattttcccacagttcttggatgctttttttaaaaaaaaactttttttcttctttattttccaacgtgggta

SEQ ID NO: 918260 - DNA, 653 bp, Homo sapiens
ccacgcctggctactttttgtatttttagtagagacggggtttcaccatgttggccaggctggtctcaaactccagaccttgggtgatccacccgcctcggcctcccaaagtgctgggattacaggcgtgaggcaccacagtcagccacaaatacacttaattgatctcagataaaaactactgagggaaggtcagtaatcgttttagcccctaatctrttagaactttatcctgagtagccttgaggatgggttagctgattctttccaccagttcccaccatccacagtgttagaaaaaacaaggcattgtctcagtttaggacaaaggcatggctggcaaccaattccagtctctcgtattctgaattttttctttaactcttctactttgttgacgtaagctttagctttcatgggatcttccctggcagcccctttcagctaattccagggatctcacttggctttgcccttgaagtccaccatcctgggccgttctgtctttatgttgcctacagtcgctcgtttgtagtggccgtagaggaaccgcatctcatcatctgctggcttggtcttaaagtgcttaataccctgcacatcttttttttttttttttcttcccagctcaagtgattctcctgcctcagcct

SEQ ID NO: 918261 - DNA, 653 bp, Homo sapiens
aacgcccggctaatttttttgtatttttagtagagacggggtttcaccgtgttagccaggatggtctccatctcctgacctcgtgatccgcccgcctcggcctcccaaagtgctgggattacaggcgtgagccaccgcgccctgccaggtctataaacatttttaagtgtacagttcagtggcattaagtatattcacattgttgtgtagtgattaccaccatctgtctccagaactgttatcatcttacaaacctgaaactctttatcagttaaataactccccattagccccgtcctggcccctggcaaccagcagtttcttttctgtctttatgaatttgactactctaagtgcctcgtataggaggaatcatatagtgtctgtctttttgggtctggcttctttcactcagcataatgtcctccatgttcatccatgttatagcgtgtcagaattccattcctttttaagactaaacaatattatacataggaaagcmggttagttttacatttatctttagtattcagcaatttaccacattgctttgacatagtaagtacaatcaggatttgtttcattaaattgggttaatctacttgaagggctggggtggagaatggggtctaggaagaattctgtggtactca

SEQ ID NO: 918262 - DNA, 745 bp, Homo sapiens
ggatcacttaaggtcgggagtttgagaccagcctggccaacatggcaaaaccccgtctctactaaaaatacaaaaattagggcatggtagcgggcgcctgtaatcccagctacttgggaggctgaggcaggagaattgcttgagcccgggaggcacaggttgcagtgtgccaagattgtgccactgcactcctgcctggacaacagagtgagactctgtctcaaaacaaacaaacaaacaaacaaacaaaagtctctctgaagccctctttacccacacctttattcctaataccccacagtctgggcaggrgcccagggtgctacctctctccctgctcaactcctccccacggctccacccacgagctcagttctgctgattgcatcactggtgctgctgttggaacacagcattcagggatgagccaacaaccagtttggtgggtgagtttcaccagcaccctgcaagtggcctgctgtggagcagaaacctctgctggaaagcgccgagccatttcttccatgccttcctcttgctttactgccgtgtcccctttttactggcctcttctttcctggagggtcccatgaagtctttcagttgttgttcataatctaagcccctcaagcatggaaaaggaacctgatatgtattgatcacatgctatgtgcctgacatgctgtgccagatgcttcatatctagatttcatttaatttcatagcaatttattaggtaaaaaag

SEQ ID NO: 918263 - DNA, 745 bp, Homo sapiens
ggatcacttaaggtcgggagtttgagaccagcctggccaacatggcaaaaccccgtctctactaaaaatacaaaaattagggcatggtagcgggcgcctgtaatcccagctacttgggaggctgaggcaggagaattgcttgagcccgggaggcacaggttgcagtgtgccaagattgtgccactgcactcctgcctggacaacagagtgagactctgtctcaaaacaaacaaacaaacaaacaaacaaaagtctctctgaagccctctttacccacacctttattcctaataccccacagtctgggcaggggcccagggtgctacctctctccctgctcaactcctccccacggctccacccacgagctcagttctgctgattgcatcactggtgctgctgttggaacacagcattcagggatgagccaacaaccagtttggtgggtgagtttcaccagcaccctgcaagtggcctgctgtggagcagaaaccyctgctggaaagcgccgagccatttcttccatgccttcctcttgctttactgccgtgtcccctttttactggcctcttctttcctggagggtcccatgaagtctttcagttgttgttcataatctaagcccctcaagcatggaaaaggaacctgatatgtattgatcacatgctatgtgcctgacatgctgtgccagatgcttcatatctagatttcatttaatttcatagcaatttattaggtaaaaaag

SEQ ID NO: 918264 - DNA, 564 bp, Homo sapiens
ctctttttattttttttacttatttactgagacagggtcttactccgtcacccaggctggagtacagtgcacgatatcggctcactgcaacctccacctccagggtacaagcgattctcctgcctcagcctcccaagtagctgggactacaggcacatgccaccatgcccagctaatttttgtatttttagtagagatgagggtttcaccaggttggccaggctggtctcaractcctggcctcatgtgttcctcccaccttggcctcccaaagtgctgggattacaggtgtgagacactgtgcctagccggtaacacttttcttaataccaggatctttagactttatgtgttgggtgatgtgtgacagggaggagatgtgtggctgcatatgtgtttgctcatttttcaagagaatctacactccaagttgatcaacattaaattttgtgcattcagtgtgacacctcccagaacgaccctcaaccagtgggaaatgggaacaggcggacctccaggaagcggtacttagggatgttctgggccagcctccggagtccacca

SEQ ID NO: 918265 - DNA, 564 bp, Homo sapiens
ctctttttattttttttacttatttactgagacagggtcttactccgtcacccaggctggagtacagtgcacgatatcggctcactgcaacctccacctccagggtacaagcgattctcctgcctcagcctcccaagtagctgggactacaggcacatgccaccatgcccagctaatttttgtatttttagtagagatgagggtttcaccaggttggccaggctggtctcagactcctggcctcatgtgttcctcccaccttggcctcccaaagtgctgggattacaggtgtgagacactgtgcctagccggtaacacttttcttaatrccaggatctttagactttatgtgttgggtgatgtgtgacagggaggagatgtgtggctgcatatgtgtttgctcatttttcaagagaatctacactccaagttgatcaacattaaattttgtgcattcagtgtgacacctcccagaacgaccctcaaccagtgggaaatgggaacaggcggacctccaggaagcggtacttagggatgttctgggccagcctccggagtccacca

SEQ ID NO: 918266 - DNA, 735 bp, Homo sapiens
acgctctgtcctgctctgcgttgcccgtgaggagcacgtactgtgatatgaaattgtaaagtcagggaaatacttgcagaggacagaccatcaaagcggaaccctgagtgatgaagaggagggagtcccttcttcacagtggccttggccaaatagccaacccctctaagcctcagtctcacctgctgttcaatgaagatcataaaggtaccaaccctgtgggccgggcgtggtggctcacgcctgtaatcccagcactttgggaggccgaggcgggcggatcacgaggtcaggagagcgagaccatcctggctaacrcactgaaaccccgtctcttctaaaaatacaaaaaattagccgggcgtggtggcaggcgcctgtagtcccagccactcgggtggctgaggcaggagaatggcatgaacctgggaggtggagcttggagtgagcggagatctcgccactgtactccagcctgggcaacagagcgagactccatctcaaaacaaacaaacaaaaaagatgataccaaccttgtggcagtgatttttaaggactggctgagatcagggatgcaaagtgctcattcaagacagccttctggccgggcacggtggctcaggcctgtaatctcagcactttgggaggctgaggtgggcagttcacctgaggtcaggagttcaagaccagcctggccaacatggtaaaaccccgtctctaccaaaaacacaaaaa

SEQ ID NO: 918267 - DNA, 740 bp, Homo sapiens
aaaggggccaacatagagctgtgccttcagagggtgcaagcctcaagccctggcaacttccacgtggttttgagcttgctagtgcaagaagtcaagaataggggtttgggaacctccatctagatttcagaggatgtatggaaatgcctggttgcctaggcagtaatttgctgcaggggtgaagctcttatgtagaaattctgctagaatgcagaagagaaatgtggggtcagagccccgacacagagtccatactgggtcactgcctagtgtagctgtgagaagagggcctctgtcttccagaccccaaaatgctagatccactgatagcttacactgtgtgcttgaaaaagccacagacactcacttgcccatgaaagcagccaacagaggagctatatcctgcaaagctacagaggcagagctgcccaggctgtgggaacctacctcttgcatcagcatgaccttaatgtgagacatggagtcawaggagatcattttggaggtttaagatttgattgcccctctggattttggatttgcagggggcctgtagcccctttgttttggccaatttctcccatttggaatgcctgtatttacccaatgcctgtacttccattgtatctaggaagtaactaacttgcttttgattttacacgctcataggcagaaggtacttgccttgtcttggatgaggctctggactatggacttttgagttaatgctgaaatgagtt

SEQ ID NO: 918268 - DNA, 555 bp, Homo sapiens
cacgtcaccgtcctgccagcctgtgttcgagggccccaatttctccacatccctgcccacagtgtcaccgtctgtcattctgattctgccatcctggtgggagtgaggtggtggctcattgtggttctgatttgcatttccctggtgctgagtgctgctgggcaccttttcacgtgcttgttggccatttgtctactttggagagctgtctgcccaagtccttggcctgttttttgctggttttttagacatggtttcgctcctgtagcccaggctggaaggctggagtgcagtggtgcaatcttggctcactgcaacctctgcctycccagctcaagcgattctcctgcctcaccctcccaagtagctgggagtacaggtgcagaccgccacacctggctaatttttgtattttttatagagacggagtctcactatgttgcttatgctgatgtcaaactcctggcctcaagtgatcttcctgccttggcctcccaaagtgctgggattacaggcatgagccaccgcgcccaccagccttggcccatttttact

SEQ ID NO: 918269 - DNA, 766 bp, Homo sapiens
ccccagagtcccagcctcaggcataaggtcccccaggccccgctggacgccagaagtgggcctgcgtggcgggtgtgtgtggaacagcagcaggaagctgtgactgccctgaggccacggccagccttggctctgccctgcttagtggaccttgtctgcgctgtggcccgcaggggactgggtttgctctctgagccgagggcgccggtttatgacacggaggattctgttcaggctggaagtgagcccgccctggagaacctgagggagacgcccccgacatggagccaggcataagccagccttgcttccggccccaccagaagcaaacatgagaccagagtatttcgaatttgagattttctttttttgaatatttgcatatacatcctgagatatcttggagatgggccctaagtctggattagtctgttcttgcactgctataaagaaataactgaggctgggcgtggtggctgacgcctgaatcccagcactttgggagactgagrtgggcagatcacttgaggtcaggagttcaagaccagcttggccaacatggcaaaacctgtctctactaaaaatacaaaacttagctgggcatggtggtgtgtgcctgtaatcccggctactcgggaggctgaggcaggagaatcgcttgaacccgggaggtggaggttgcagtgagccaagatcgcgccactgccccgcagcctgggcaaaaatgagactacgtcacaagaaaaaaaaaaaaaaagaaggaaac

SEQ ID NO: 918270 - DNA, 620 bp, Homo sapiens
tccccagccaccccagcagacaatcaccactaatttccagctcattacttcttcattgtttttttaaaatttctttgaacataggtgggagtaaactgatccaataaatttggagtccctttgaagggatagttattgaggtcaatgtgtgagatttgttctgaccctaggaggtcctctcacttgtctttctccctgactctttctagcaaactaactggcctgtagtttagcatatatctccagtgattctrccaatctcctttcaattgccttttaccacaacttgcattgtttttgagcggtgtccttaggcttgaagtccataccatgttacaaatgatgtgtttctttgaaaaaagattcagagctcttttttatgtcttgctgcttcccctaggcaaaaatctgtcatccatggctctgaagctgagagttgaaacaatggtacacttctctctgcaggagagaagtttggtttgcctctcctggcttggatttgtgaactacaaatgagccagggtgagggtaatctaaaccgcagtattcccagcacatcacacttgcggtagagcttccaacccatgagtggggagtgggaagaggcagggacaacatcc

SEQ ID NO: 918271 - DNA, 592 bp, Homo sapiens
gggcggatttcttatgaatgacttagcaccaccgccttggtattgtcctcgagatagtgagtgagtgcttgtgagatctggttgtttaaaattgtgtcacctcctccctcactcttttgctcctgctctggtcttgtgacatgcctgctcactctttatcttctgccataattgtaagtttcctgaggtctccccagaagccacacagatgccagcatcatgtttcctgtacagcctgaggaactgtgagtcaattaaacatyttttatttataaattacccagtctcaggtatttctttatagccataggagaacagactaatacacttcataagaaagcaagccagcactctccaaacaggttttgagcaagagcttccgacgttgtcaatgtacactttcctcttcctaggtatagggtaatgggtatcgtctggggatacccagaccttgatgtagccttgcttaaggacaatagacaggggtctcagctcattgattagagaggctgtatacttgaactcctcatttccgttagcccccctggacttctctgttggcctgccctgcacagcctgggacaccccaaat

SEQ ID NO: 918272 - DNA, 592 bp, Homo sapiens
gggcggatttcttatgaatgacttagcaccaccgccttggtattgtcctcgagatagtgagtgagtgcttgtgagatctggttgtttaaaattgtgtcacctcctccctcactcttttgctcctgctctggtcttgtgacatgcctgctcactctttatcttctgccataattgtaagtttcctgaggtctccccagaagccacacagatgccagcatcatgtttcctgtacagcctgaggaactgtgagtcaattaaacatcttttatttataaattacccagtctcaggtatttytttatagccataggagaacagactaatacacttcataagaaagcaagccagcactctccaaacaggttttgagcaagagcttccgacgttgtcaatgtacactttcctcttcctaggtatagggtaatgggtatcgtctggggatacccagaccttgatgtagccttgcttaaggacaatagacaggggtctcagctcattgattagagaggctgtatacttgaactcctcatttccgttagcccccctggacttctctgttggcctgccctgcacagcctgggacaccccaaat

SEQ ID NO: 918273 - DNA, 610 bp, Homo sapiens
taaggatgacaagtcatctcacttgcctgaaaccgtgagggtttcccagatgtgagactttcagtgctaaaactgggacagttctgggggctcaaactgggacaagtaggccattgtctattcaaggccagtgctccttccaccagacaactctagtcaaggggttacatgggctgctgtgagatggtctggtcatccaaccagtgtttaaaacatgggaatttcaaacacctagtttaaggtaccctttcatgctcctccttttagccagttttatcatggtggcccacagctccacatcatggttatgacctagattggttttccttttttttttttttaagacaggtgtcactctrttgaccaggctggagtgtagtggcacgatctcggctcattgcaacctctgcctcctggcttcaagcaattctcctgcctcaacctcctgagtagctgggattacaggtgcccaccaccacacctggctaatttttgtatttttagtagagacagggtttcaccatgttggccaggatggttttgaactcctgaccttgggtgatcctcccacctcagcctcccaagtgctaggattacaggcatgagccac

SEQ ID NO: 918274 - DNA, 610 bp, Homo sapiens
taaggatgacaagtcatctcacttgcctgaaaccgtgagggtttcccagatgtgagactttcagtgctaaaactgggacagttctgggggctcaaactgggacaagtaggccattgtctattcaaggccagtgctccttccaccagacaactctagtcaaggggttacatgggctgctgtgagatggtctggtcatccaaccagtgtttaaaacatgggaatttcaaacacctagtttaaggtaccctttcatgctcctccttttagccagttttatcatggtggcccacagctccacatcatggttatgacctagattggttttccttttttttttttttaagacaggtgtcactctgttgaccaggctggagtgtagtggcacgatctcggctcattgcaacctctgcctcctggsttcaagcaattctcctgcctcaacctcctgagtagctgggattacaggtgcccaccaccacacctggctaatttttgtatttttagtagagacagggtttcaccatgttggccaggatggttttgaactcctgaccttgggtgatcctcccacctcagcctcccaagtgctaggattacaggcatgagccac

SEQ ID NO: 918275 - DNA, 624 bp, Homo sapiens
tacagatgagaaaaccatggttcagggctctagccatttgggtcctatagttagacatatcttggttcaaaacctgtcacttcaatgaacagactctgttgatgattggtagtccattctaggcaacactgggtgtctgaggaaygggggaaaaggtgcatccatagagtttctgtgctgatggagctcacaagagtcgagcaaggctttgagctggtttctggtaagaagaacaaggacaggtgagaaggtcctagtaggttgccgttgccccactgtggcatgctctcttttcccccacctgagtcatactggagtttgagctgccagtgaagacacagtgggtcttgttatctatcatttggccatagtacaatctctctcctgatctgggttgtttcaatgaacgcatgccttgctatcttgcaggaagcttcatttgctgggaagcagacactgatgataaggcatgattgcaaaccctactcagagattgtaatcctataaagtacagtatctccttgtgcctttgcatgccaggaaacacaacccactgaatttggaggctgtttttgtcttgcctggcaatatgtctgtagcacaaagttagggaaatggctcaaa

SEQ ID NO: 918276 - DNA, 624 bp, Homo sapiens
tacagatgagaaaaccatggttcagggctctagccatttgggtcctatagttagacatatcttggttcaaaacctgtcacttcaatgaacagactctgttgatgattggtagtccattctaggcaacactgggtgtctgaggaacgggggaaaaggtgcatccatagagtttctgtgctgatggagctcacaagagtcgagcaaggctttgagctggtttctggtaagaagaacaaggacaggtgagaaggtcctagtaggttgccgttgccccactgtggcatgctctcttttcccccacctgagtcatactggagtttgagctgccagtgaagacacagtgggtcttgttatctatcatttggccatagtacaatctctctcctgatctgggttgtttcaatgaacgcatgccttgctatcttgcaggaagcttcatttgctgggaagcagacactgatgataaggcatgattgcaaaccctaytcagagattgtaatcctataaagtacagtatctccttgtgcctttgcatgccaggaaacacaacccactgaatttggaggctgtttttgtcttgcctggcaatatgtctgtagcacaaagttagggaaatggctcaaa

SEQ ID NO: 918277 - DNA, 556 bp, Homo sapiens
gtcactgattttatctaagccactcagtaggactccctctaaccaaactgtcccatccccttgcatttttctttaaaggtgccattcattcctccaagagcatgcagcatctcatatccgtaaggtttctcatgcctaggctgcagggctccctgacacttccagaggcaatttgttcttactctgctctcaaaaccgagacccagttctgccttctttagcgtggggtgcctgcctgcacctgttctatggctcctaattctcctggtgctctgtgtttacttctcttataatgttgacagtacagtgatgtaacttctggcttgcttgactgccattttacagatgaagaagctgaggctraggagggtaaaaactctacctcaggctgggcgcggtggctcacacctgtaatcccagcactttgggaggctgaggcaggcagatcacaaggtcaggagatcaagacaatcctggctaacatggtgaagccccgtctctactaaaaatacaaaaaaaaaaaaaattagcccggcgtagtggtgggcacctgtag

SEQ ID NO: 918278 - DNA, 620 bp, Homo sapiens
tcctccccagaaaatggggttttcttttctactacatggtcaggctgcaaattttccaaacctttatgttctgcttcacttctaaacctaagttccaatttcagaccatatcttcgtgaatgcacatgactgaacgctttcagaatcagccaagtcaccactaggatgctttgctgcttagaaattttcttctgccaaataccctaaatcatctcaaagttcatcagttctctagggcaggggtaaaatgctgccagtctttttgctaaagcatagcaaaaataacctttgctccagttcccaataagttcctcatctctgggaccatttcagcctggacttcattgtccacgtcactatcagcattttggtcaaaagtattcaaaacaagtctctaggacgttccaaacyttcctatatcttccagttttcttctgagccctccaaactgttctaaccactgcctgttacccagttccaaagtcacttccgcattttcagattatctttatagcagtacccaaccctgccagtaccaattctctgtattagtcagtttttacactactataaagaatatctgagactgggtaatttataagggaggtttaatttactca

SEQ ID NO: 918279 - DNA, 563 bp, Homo sapiens
actaaaaactcaagtgtcttaatacatatttaaatggtcaaagtatattacatacataggagattagagagcagcaagatgaaactgggtaaaatctgggcagagatctggtatctaagaaagtggggaatactgtttttataacaaaaataaactacccttgtggaactgaaagcaaacttctgtgtgcattttttagttaatctctacagtttttataacatttacaagaaagtgggcagctatcattttatgtaaatcaatgtttaacatgctgacactctgcagttaagtttaaatagcctggtcaaacgtakatagagttgtgtgtgtggtttggggaattagactcttcatagtcatacccataaatctattttctatttaacaagatgtctacacacagtgtgtgctagatagcaccaacaattagtctctcctatcaaaagaaccacataggtcagttgcagtggctcacacctgtaataccagcactttgggaggccacgttgggaggatcacttaaggccaggagttagacaccagcctgggaacatagcaag

SEQ ID NO: 918280 - DNA, 580 bp, Homo sapiens
ggaataagcttcataagagaaggagaaataagatccttatcagactagcaaatgccaagggcatttgttaccaccagacctgccatgtaagaggttattaggggggtgctaaatatgtaaaggaaagattgttactctccgtcacaaaaatacactcaaatctatagaccattaacactataaagcaaccacacaatgaagtgtatataataaacagctaacaayacgatgacagaatcaaactcatacacatcaatattaaccttgaaattaaatgagctaaatgcccccatttaaaaggcacagagtggcaagttggataaagaggcaatacccaactatatgttgtcttcaagagatctatctcacatatagtaacacccataggctcaaagtaaagagatagagaataatctactaagcaaatggaaaacaggaaaaaagcagaggctgctattctaattccagacagaacagactttaaacatgcaatgatcaaaaaagacaaagaagggcatggatcattgagacagaaaactagcaaagacacttgaacaatgggagtaacagacatctatga

SEQ ID NO: 918281 - DNA, 715 bp, Homo sapiens
ttacacttctgatggtgtgttcaaccatggctatatttatcttaggttcttttatttttcttgattaatttttctctatattcttcatttagcataatcgccattgacatgcctttgagttttattattctttctttgcaagttgaaatatctttttgaattgttttggagaattattcatttcagttattgtactttttaactgtaaaatttccttttagttctgttttacaacatttgtctctttattaatattatcaaattcatgaatcattgtaatcagaactttctttaataatagttttcttttttaattttgtgarcatgattataatagcccctttaaattctttttctgatacatatgacatctggtcgccttgacaggctgtttctgttgcttgcttttttctagtgagtaagtcatgctttccggtgtttttgcatgcctcaaaatttctgttggaaactggctatctttgataatatggcaactctggttacttctgctttcactcaatgtatgttatcattattggcttgtttatgtgtttagtgactggcctaattattttggtgaagtccatttttccctcaaattgttaagcttttaatgttactcctcagggaaactcagctttgggaacactcgcagtcaccttgcatgacagtggcttttgtaaggctttcttccactttctctgacacatccagc

SEQ ID NO: 918282 - DNA, 597 bp, Homo sapiens
agggctgaggggtgggggatgggtagctactgtgagctaagctgagattgaccaaatatactgtactttactgtccaagccttctgaaatttttaagtcttcaatagactccagagtttcaaaatagttatatcagtgtgatggttaatattaggtgtcagcttaattggattgaaggatgcctcggtgggctggtaaagtagtgtttctggtgtgtctgtgagggtgttgccaggggagattaacatttgagtcagtggattgggagagacagacccaccctcaaggtgggtgggcaccatccagtcggctgccagcatggctagaacaaaagcaggtrgaaaaaggtgtgataagatggcttgctgaaccttctggctttcacctttctcccatgctggatgcttcttgcccttgaacgtcagactccagttctttggcatctggactcttggacttacaccactggtttgacaggggcttttgggccttcggccacagactgaaggctgcactgttgtccttccctacttttgagacttttggtgtcagactgagccactgatggcttctttcttcatcatcttgcagatggcc

SEQ ID NO: 918283 - DNA, 672 bp, Homo sapiens
cctgctatagactggcaggcttataaacaatagaaattacttctcacagctctggaggctggaagtccaaggccaggatggcagcatggttgagttctggtgagggtgcccttctgggttacagacggctgacttctcactataacctcacaggacagtgggagtgaggggcttccattggtatacatatataggcactgatgccactcgcaagggctctgcttctatgacctaatcaccccccaaaggctctacctcctaacaccatcaccttgggatttcaatatatagattttggggggacacaaactcaaactagcttaaytctgtgtagctttcttctctcctgtgtctgacccacaaattcaagcctccctggtctccccaaactttgggttctctctctcttcaactcagcaaggtactgcttgaggttccctccctgtcccccatgtagtgtgctgttgagaccacaaggcttggctcatcttgtttccttccactcagggaccatagtcctgtgcagccctttgtgcaaacccttttactgcatccattttctccagttctctgcatgttcaaggtgagaggggaaatctggctcctgttactccatcttggcctttgacacgtgcagtgaatacattgtgcctggctgcgagtgcaggccta

SEQ ID NO: 918284 - DNA, 672 bp, Homo sapiens
cctgctatagactggcaggcttataaacaatagaaattacttctcacagctctggaggctggaagtccaaggccaggatggcagcatggttgagttctggtgagggtgcccttctgggttacagacggctgacttctcactataacctcacaggacagtgggagtgaggggcttccattggtatacatatataggcactgatgccactcgcaagggctctgcttctatgacctaatcaccccccaaaggctctacctcctaacaccatcaccttgggatttcaatatatagattttggggggacacaaactcaaactagcttaattctgtgtagctttcttctctcctgtrtctgacccacaaattcaagcctccctggtctccccaaactttgggttctctctctcttcaactcagcaaggtactgcttgaggttccctccctgtcccccatgtagtgtgctgttgagaccacaaggcttggctcatcttgtttccttccactcagggaccatagtcctgtgcagccctttgtgcaaacccttttactgcatccattttctccagttctctgcatgttcaaggtgagaggggaaatctggctcctgttactccatcttggcctttgacacgtgcagtgaatacattgtgcctggctgcgagtgcaggccta

SEQ ID NO: 918285 - DNA, 644 bp, Homo sapiens
caaaccaaagcacctcccgtgatggttaattatatacgtcaccttgcctaggccatggtgccacagggtttagacaaatgccagtctttgtgtgtgtgtgtgtgtgtgtgtgtgtgtgtgtgtgtgtgtcagagagagagagagagagagagagagagacggagtcttactctgttgccaggttagagtgtagtggcgcgatctccgctcactgcaacctccacctcctgggtttaagcgattctcctgcctcagcctttcgagtagctgggattacaggcacacaccaccatgcccagctaatttttgtgttttagtagagacgaggtttcaccatgttggccaggatggtcttgatctcttgtggtctcgcgatccacctgccgtagcctccaaagtgctgggattacaggtgtgagccaccacrcccggccaggaaggcattttttagatgtgatttgctgtaaaatgtgtagcctttgagtagaggaaatgaccttccacaatgtgggtgggcttcatccaattagttgtaggcctgaagagaaaagagtgaagttccccaagtaggagggagtctcggacctccttcccatgcaagctgcggcaccaggtcttccctgggtctccggcctgctggcaga

SEQ ID NO: 918286 - DNA, 728 bp, Homo sapiens
taagagcagtggggtaatttcaagggacttctcttgaactacaggggggcccttggctctatgtttagtgaagtcttgcaggagacttgatgataaaaaccacacctgtggacaattccttctctaggtcccatgctaggacagagcttactcctccagcccctactggcggtccactctccaagctgccattcctttacccaggacactcacagatacaactccaacccacaccttgggtgagacatgtcttgggctaaagcgcgagctattattcagaaccccaggactgagaacccttcacagtacaaatgtgaggttgtttttttcttccttycttttttttttttttttttttttttttgagacagggtttcactctgtcacctaggctgagtgcagtgccatgctcatagctcactgcagcctcagccttctgggctgaagtgatcctcccaccttagcttcctaaacagctaggactacaggcatgcaccattatgcccagcaaatttttaaattattattattatttgtagagacagagtcttgctatgttgtccagcctggtctcaaactcctggcctcaagtgatcctcctgcctcagcctctcaaagtgctgggattacaggtgtgaggcaccacacctggcctgatttttttcttttagttagcatcaagtgttcattctggtccccaaagttcagcaaatgtataaatactgagc

SEQ ID NO: 918287 - DNA, 728 bp, Homo sapiens
taagagcagtggggtaatttcaagggacttctcttgaactacaggggggcccttggctctatgtttagtgaagtcttgcaggagacttgatgataaaaaccacacctgtggacaattccttctctaggtcccatgctaggacagagcttactcctccagcccctactggcggtccactctccaagctgccattcctttacccaggacactcacagatacaactccaacccacaccttgggtgagacatgtcttgggctaaagcgcgagctattattcagaaccccaggactgagaacccttcacagtacaaatgtgaggttgtttttttcttccttcyttttttttttttttttttttttttttgagacagggtttcactctgtcacctaggctgagtgcagtgccatgctcatagctcactgcagcctcagccttctgggctgaagtgatcctcccaccttagcttcctaaacagctaggactacaggcatgcaccattatgcccagcaaatttttaaattattattattatttgtagagacagagtcttgctatgttgtccagcctggtctcaaactcctggcctcaagtgatcctcctgcctcagcctctcaaagtgctgggattacaggtgtgaggcaccacacctggcctgatttttttcttttagttagcatcaagtgttcattctggtccccaaagttcagcaaatgtataaatactgagc

SEQ ID NO: 918288 - DNA, 728 bp, Homo sapiens
taagagcagtggggtaatttcaagggacttctcttgaactacaggggggcccttggctctatgtttagtgaagtcttgcaggagacttgatgataaaaaccacacctgtggacaattccttctctaggtcccatgctaggacagagcttactcctccagcccctactggcggtccactctccaagctgccattcctttacccaggacactcacagatacaactccaacccacaccttgggtgagacatgtcttgggctaaagcgcgagctattattcagaaccccaggactgagaacccttcacagtacaaatgtgaggttgtttttttcttccttccttttttttttttttttttttttttttgagacagggtttcactctgtcacctaggctgagtgcagtgccatgctcatagctcactgcagcctcagccttctgggctgaagtgatcctcccaccttagcttcctaaacagctaggactacaggcatgcaccattatgccmagcaaatttttaaattattattattatttgtagagacagagtcttgctatgttgtccagcctggtctcaaactcctggcctcaagtgatcctcctgcctcagcctctcaaagtgctgggattacaggtgtgaggcaccacacctggcctgatttttttcttttagttagcatcaagtgttcattctggtccccaaagttcagcaaatgtataaatactgagc

SEQ ID NO: 918289 - DNA, 572 bp, Homo sapiens
cagatgtggtatctttattggagtagatcagtataactttggcaacttggtaggtggctatttttctggtgaacgcacttgtcttaaattccaccagggaataaaatcaaaagcagtcatcttctcatgataagaaaacagaacacattcaactatcttattacaaagctatgttaactctcttgctttctttcataatgtactccacaaatatttcaacattgaacattctatagaacataatgctagatcactgcatagatgacatgattctaattggacccagtgagtagtgagtagtaagtaacaaggaccctagatggtctagcatgtcaaagagtaaaatattaaccctatgaatattcaggtgactrtcatatcagtaatgattctagggttcttgggcatgcaaagaaatgccctctgagataaaatataagtcattatcacttgcatttcttaccattaagaaagaggcacagtctctttggattttagaggtaacatataccacatctggaactcaaaatgctatcaggtttgagaagactctggagtaagaggtccaggct

SEQ ID NO: 918290 - DNA, 601 bp, Homo sapiens
tctcctgggagatgggatggatggtggggccgtgggtgagatggggtcatgcagagaggacagaccaaggccccagtggaccctgggggaccctgtggctgtcttcagagcagcccccgaggtatcagtgctcacagcaacttgcggatacagcctagaaggccccatgcctcaaaaattcttagagtctgaggagctcaagaggctcacatcagcttcgggaagctctgtagggcggccaccaagctggactgagggatgggcggaagcagctaaggcctaaattggtggaggttggccggacacagtggctcatgcctgtaatcccagcactttgggaggccgaggcgaggattgcttgaactcaggagttcgagatcagcctgggcaacatagtgagaccacccccmacccccgccaacttatacaaaaatttcaaaaattcaggccggcacggtgctcatgccggtaatcccagcactttgggaggttgaggttggtggatcacctgaggtcaggagttcaagaccagcctgaccaacatggtaaaaccttgtctctactaaagatacaaaattagctgggcctgatagctcatgcc

SEQ ID NO: 918291 - DNA, 746 bp, Homo sapiens
cccctgatccagctgtcatacctttttagtctcccttaatctggaacagttcctctgcctctttttgtctatcatggggttgacgccgaagaacagttcaggtcagtccttgaaggtccctccatctgtgtttgtctgatgtttcctccagggaccggaatgctacagaagcaatgctgtgttctcagtgtatcacatcaagaaacacttggcacccatttgtcctattcctggtgttgttaactttgttcagctcattaagggaggacctgctgggtttctctactgttaagttaccactttttctctttgcaattaataaaccatatgagtggaagtgctatgagacaatgaaaacatactttaccttcctaaattttcactcagtgatgattcttccttgaataaactattatgatcatgtttgcaaatggagttttctattattccctctgtatttattcattggcattctacygtaagaaagtcttcttccttcttccctgcctccgtccctccctccctctctccctccctccctctcttcttctttcttttcttccttcccttttctttctttctatagctataggttcccattttattcaatagactataatctaccattatcattatttatttggatgctcacatcatcctagatttggccagtggaagccccttgaagttgattgatgtgtcctttgacatgtccctgtcattttttaaatgcttccttgctttct

SEQ ID NO: 918292 - DNA, 746 bp, Homo sapiens
cccctgatccagctgtcatacctttttagtctcccttaatctggaacagttcctctgcctctttttgtctatcatggggttgacgccgaagaacagttcaggtcagtccttgaaggtccctccatctgtgtttgtctgatgtttcctccagggaccggaatgctacagaagcaatgctgtgttctcagtgtatcacatcaagaaacacttggcacccatttgtcctattcctggtgttgttaactttgttcagctcattaagggaggacctgctgggtttctctactgttaagttaccactttttctctttgcaattaataaaccatatgagtggaagtgctatgagacaatgaaaacatactttaccttcctaaattttcactcagtgatgattcttccttgaataaactattatgatcatgtttgcaaatggagttttctattattccctctgtatttattcattggcattctactgtaagaaagtcttcttccttcttccctgcctccgtccctccctccctctctccctccctccctctcttcttctttcttttcttccttcccttttctttctttctatagytataggttcccattttattcaatagactataatctaccattatcattatttatttggatgctcacatcatcctagatttggccagtggaagccccttgaagttgattgatgtgtcctttgacatgtccctgtcattttttaaatgcttccttgctttct

SEQ ID NO: 918293 - DNA, 637 bp, Homo sapiens
ggtcctcaacccagaggttccctaggccccacttgccccagctcatgagagcctggttctgagctctgccaggaccggggctcagcactgcccatgaaaacaggcgtggcagggaagaaaatcataaccaaatatttgtagtcattccagaacctcccttctggaaagggaggttcccaggkttgtgggctctttgcctcctggacattattgtgtagtgaagggagaaaggttgagatgcagagttggagaaactaagagaggccgaactggtccatttgaggaaagatgactgatcccagaaggggaggaggggacaccctggggaagcagggggcttcccagatggtccaagaaggggagggcgggatatagaaagtcagagcatggttttgagttttggagacaacaagagaaaagagggagggatttggacaactatggagaggactgggctgtggagagaaatgtttagagatttggaagatggtgtgtcatgcgatgtattgtgaaaaccccttcttcatatccctaaaagaccaccgctgatggtgattcatggtacaattgatgattgtatcatgatataattcagtgcttttgcagagggattggtgcctttttaaaataataatga

SEQ ID NO: 918294 - DNA, 676 bp, Homo sapiens
agcctggggacaggtgaccccagcaccctccggggcagtcctatgactgtttcttgcttcctgccctctgacttttagaggtgggtagccctggggtcctcccaggtctggacatcatcatcccagctagaggcatggagccccccaatcacagaggaagagacagtggtataagaggctccttatgtcgggtgtggtggctcacgcctgcaatcccagcactttgggaggctgaggcaggacaatcacttgaggtcaggagtttgagaccaacatggccaacatggtgaaagctcatctctactaaaattaaaaaaaataataataattagccgggcctggtggtgcatgcctgtaatcccagctactcaggaggctgagacacragaatcacttgagcccgggagatgaaggttgcagtgagctgagattgcaccactgcactgcagcctgggacacagagtgacactctctcaaaacaaaacaaaacagagaaacaaaaaagactccttagattcaaactggattccggcctcggttccactggtcataattcaactactttgcatctctaagtctctgtttctttaacttcaaaaggaagttagccttttccttgcagaggtgctgaggattaaatgagataatacgtggaaacattaggcatgtagcacac

SEQ ID NO: 918295 - DNA, 691 bp, Homo sapiens
tctcaagaggctaaaggcaccccacgggcttctccccgaggaagggactgaggacagaggagggccacggttgcaatgaggacagctccggctcaaaagcgtccctggacccttgactctcagcttgtcttgtcttccttaataaatttcagtttgcrggggaggggagagggatagcattaggagatatacctaatgctaaatgacgagttaatgggtgcagcacaccaacatggcacatgtatacatatgtaacaaacctgcacattgtgcacatgtaccctaaaacttaaagtataataataataaaattaaaacaacaccccctgcagaggttacatttcccccttttcttctgtcatcttctccctttccttccagtgtcacatggggagcagcaaagcctcaaaatcatggccttataattttcgtcatcactggaatggattctcagtttcttctccattcttctccttcctgcaagaacattcttctaatatgtattgattagccatttgaaagattgctcttcctgttttttgtttgtttgtttgtttgttgagacagggtctcacttcgtcacccaggctggagtgcagtgccgtgatctcagctcactgcagcctcgacctcccaggttcgagcgatcctcccacctcagacccacaagttggtcttcctagtggacagc

SEQ ID NO: 918296 - DNA, 540 bp, Homo sapiens
tacctaatatacatgaagctggagtactggaagaagaggggaaagagaagggacatttctttttaagaaataatggtgggctggcatggtagctcatgcctgtgatcccagtactttgagaggctaaggcgggtggatcacttgagcccaggagttttgaggccagcctgggtaacatgacaaaaccctgcttctacaaaaaatacaaaaaaattagccaagagtggtgacgcatgcctgtagttccagctacttgggaggctaaggtggaaggattgcttgagcctgtagtcagaggttacagtgagctgagatctcaccactgcactccagcctaggctacagagtgagactctatcttaaaaraaagaaagaaagaaaaggaataattgtcaaaaattttctgaatttgatgaaagctataaacccacagatccaagaagttccgtgaaccccaagcaaaagatagaaacaaaaaacctacattaagtcacaagtataataaaaatacataaaactagtgttaaagagaaaatctaa

SEQ ID NO: 918297 - DNA, 773 bp, Homo sapiens
gacagaggcgcacttgttccttgcagttttgttttgatgtgctgattaaagtagcgcagagggcatgatcagcagggctccagtaagacgctcccacgggaggagcaagaacacagaacagagggggcaagacagctccaccaggagtcaggagtgaatcccctctgggaacgaggcactaggaagaagaacttccagcccaggaggtaggtagcgttcagaagaagcctggggcgggcgcggtggcgcacgcctgtaatcccagcactttgggaggccgaggcgggcgaatcacgaggtcaggagatcaagaccatcctggctaacacggtgaaaccccwtctctactaaaaatacaaaaaattagccgggcgttgtggtgggcacctatagtcccagctacttgggaggctgaggcaggagaatggcatgaacccgggggacggagcttgcaatgagccgagattatgccactgcactccagcctgggcgacagagcaagactctgtcccaaaaaaaaaaaaaaaaaaagcctgggactcttagcgcctcagagccttactcagaatcataaaatcattagaagcaatgtctgtcctcactgctgcatccgatattcttccggaccactggatcacaaatcaaaccatgtgactcccgcatgagcaggcagagtggagataacacggatcgctgtgtacactgtgtgctccggttgttgcatccgagggttgatcggatggtggttcccatccagatccaagtcctggccc

SEQ ID NO: 918298 - DNA, 694 bp, Homo sapiens
catgatcagcagggctccagtaagacgctcccacgggaggagcaagaacacagaacagagggggcaagacagctccaccaggagtcaggagtgaatcccctctgggaacgaggcactaggaagaagaacttccagcccaggaggtaggtagcgttcagaagaagcctggggcgggcgcggtggcgcacgcctgtaatcccagcactttgggaggccgaggcgggcgaatcacgaggtcaggagatcaagaccatcctggctaacacggtgaaaccccatctctactaaaaatacaaaaaattagccgggcgttgtggtgggcacctatagtcccagctacttgggaggctgaggcaggagaatggcatgaacccgggggacggagcttgcaatgagccgagattrtgccactgcactccagcctgggcgacagagcaagactctgtcccaaaaaaaaaaaaaaaaaaagcctgggactcttagcgcctcagagccttactcagaatcataaaatcattagaagcaatgtctgtcctcactgctgcatccgatattcttccggaccactggatcacaaatcaaaccatgtgactcccgcatgagcaggcagagtggagataacacggatcgctgtgtacactgtgtgctccggttgttgcatccgagggttgatcggatggtggttcccatccag

SEQ ID NO: 918299 - DNA, 682 bp, Homo sapiens
ttcagtgcaattcctattaaaatcccaatgacagccaggcatagtagcatgtatctgtaatcctagctagtcagaggctgaggctaaagaactgcttgaacccaggggttcaaggccgcagtaagctaggatcacaccattgcattccagcctagatgacagaacaagacctgtcaaaaaaaraaaagaaaagaaaaaaaaaatcccaatgacattgtttgcagaaacagagaaatctatcataagatttatatcgatctttaaggagcccaaagagccaaaacaatctggaaaaagaacaacatttaaggactcacacttcctgatttcaaaacttactacaaagctacagtaatcaaaacagtgtggtattagcataaggacagacacaaagaccaatggaatagaatacagagcccagaaacaaaccctcatgaatacggtcaaatgaccttcaataaaggtgccaagaccattcattagggaaatgatggtattttcaacaaatgatggaactggatacacacacgtaaatgaatgaactcacacccttaccttattacatacacaaaaattaactcaaaatagatgaaagatctaaacataagacctcaaactataaaactcttagaagaaaatataggggaaagtcttcatgacactggatttggcaatgatatct

SEQ ID NO: 918300 - DNA, 645 bp, Homo sapiens
ctacgcaggcacagggctagtccttcactgtccctgctgagcctgtgtgtggtcacccaccagctggccttcaggcttccttctgcctgcaccaagcatgttgggggtaccgaggggccttgcttggctcctttccaactccacgccctcaataggcrgcttggaggccgagctccggtcatccaagccaggtgtctggggaagggtcctggtctgccgcaggaagctgggtggagccggtcttgcctgctgtggcggtcccagctgccctctggtggccatgctcagctccccgttgctctgccagaggcggcagcccctcaatcagcaggggcagtgggaagggcctgtgcataactggttatggagtggggggaactctgtggccccaggcacccaccagctctgggtcatcttcccgacctgaaacaggccaagatatgaaggccctgagccaggaaaacctactaagggatccctgatcccaagtcccctcagagtgacccaagacttcatcttgggtttttctgtttgtttttttgtgggtatttttttttctttttttgagacggagtctcaccctgtcacccaggctggagtgcgatggcacaatcttggctcactgcaacctctgcctcccaggtt

SEQ ID NO: 918301 - DNA, 666 bp, Homo sapiens
ttaaaatcccaatgacagccaggcatagtagcatgtatctgtaatcctagctagtcagaggctgaggctaaagaactgcttgaacccaggggttcaaggccgcagtaagctaggatcacaccattgcattccagcctagatgacagaacaagacctgtcaaaaaaaraaaagaaaagaaaaaaaaaatcccaatgacattgtttgcagaaacagagaaatctatcataagatttatatcgatctttaaggagcccaaagagccaaaacaatctggaaaaagaacaacatttaaggactcacacttcctgatttcaaaacttactacaaagctacagtaatcaaaacagtgtggtattagcataaggacagacacaaagaccaatggaatagaatacagagcccagaaacaaaccctcatgaatacggtcaaatgaccttcaataaaggtgccaagaccattcattagggaaatgatggtattttcaacaaatgatggaactggatacacacacgtaaatgaatgaactcacacccttaccttattacatacacaaaaattaactcaaaatagatgaaagatctaaacataagacctcaaactataaaactcttagaagaaaatataggggaaagtcttcatgacactggatttggcaatgatatct

SEQ ID NO: 918302 - DNA, 649 bp, Homo sapiens
ctacgcaggcacagggctagtccttcactgtccctgctgagcctgtgtgtggtcacccaccagctggccttcaggcttccttctgcctgcaccaagcatgttgggggtaccgaggggccttgcttggctcctttccaactccacgccctcaataggcrgcttggaggccgagctccggtcatccaagccaggtgtctggggaagggtcctggtctgccgcaggaagctgggtggagccggtcttgcctgctgtggcggtcccagctgccctctggtggccatgctcagctccccgttgctctgccagaggcggcagcccctcaatcagcaggggcagtgggaagggcctgtgcataactggttatggagtggggggaactctgtggccccaggcacccaccagctctgggtcatcttcccgacctgaaacaggccaagatatgaaggccctgagccaggaaaacctactaagggatccctgatcccaagtcccctcagagtgacccaagacttcatcttgggtttttctgtttgtttttttgtgggtatttttttttctttttttgagacggagtctcaccctgtcacccaggctggagtgcgatggcacaatcttggctcactgcaacctctgcctcccaggttcagg

SEQ ID NO: 918303 - DNA, 712 bp, Homo sapiens
cccttgctgaaactgcaaatttccagtgcccttgggggcagatatcttggagctagggctgacacaggactgaaataggtcccagatacacacacacacaaacacacacacacacacacacacacacacacacacacacactctrctccctgcccccggtcttcctgcagcagcccactgaaaggcaaaggcagggctggaggctctacctcagaggaatcatagggatcaagcttgccccatgggctgcggggcctggcagatgggctgagaggggctggggcacagaagtactgctggttgtcagaggactggggccgcgaggggggtctgaactccaggtcatcatcatagaggtccggggcctggggccttggctccgggacttggggcctggatgcccaggtcttagcctctggtgggtggcagctcgcatttcctgagaaatccttcacgaacttgctcagttctccatcatccgtggtgtcctccaggaaacgcttgatctgggggaagcggggtgggtagaatagatgggtggtgccgggaagggagccggaagggaagaatgaggaaggagacagaagacaggagaaggcaagagggaaagggaaagcacttgtggttagaagaaaaagaaactgcagccaagacagaggaagtgctcaccatccctccctcacctgctcacaagcctccccaatccaatatg

SEQ ID NO: 918304 - DNA, 577 bp, Homo sapiens
cgggtggagcctgaagtgagccaagattgcaccactgcactccagcctgggcgacagcgagactccgtctcaaaaaaaaaaaaaaaaaagaaaagaaacagaaataaaagaaaaagaaatctacccgcagcacagggaactacaaatggtcaatggcacaggacacattgttcaatctctttagtaagcagagagatacaccctaaagcaatgacaagggtccactacccacctattagttttcaaatgttgtaacataaagtgctggtcagggcgtggagagayggccacttctctcctcacttgcggtgggagtatatacatgggtacaggctttttgaaggacaatctgtcagtatctgatgaaagtttaaacagcttggctctgtttaaagggagagaggaggacaaggattgttcccctcaccttccaatctcctgcctgtgccccactttggtggacaccagttgcaatggagccgggaaacccagtggaccaggctcggcctccctggcagccttccctgccaggaagaagggagcaagggcagggaacagatgtgacaataaacccaca

SEQ ID NO: 918305 - DNA, 657 bp, Homo sapiens
catccacccacagcctgtcctcaggcatgggagagacatccacagtgcataagcagggagctaagcggccgatgccgaggtccaaagatacaggtttcactttcactgaccagctttcataaccgtcaataaatgcagctctgcccggaaacttattcaggtttagggaccagtggcttgccgagtccacatattgcctttggttgtccggtgtccccccaagcccggcacctgggtcagttcccaatcaaacagraaagactttacatttctgcctgactgcagcaggtaatctttgagctggaacgctccggcgggacctagttgcccagcaatgtccttttcccgaatgacttgcactaagtctatatacaactgccatctactgacagtttctggtatttcaccggcatcagaccacactgtaattaaagaagccagcttttccatctcagagggggagcaggaaatggatcagctcctttgtcccggagagacagaattcaggcagggagtctcccccaaatgctgctggcactgcttgcctaactcccacaactcagtggggggtacaagcactataagaagtgtgcttcactatggtagggggtctctaggcccacccttggggcccagtggctgttcatgctctatttt

SEQ ID NO: 918306 - DNA, 541 bp, Homo sapiens
cagagggggagcaggaaatggatcagctcctttgtcccggagagacagaattcaggcagggagtctcccccaaatgctgctggcactgcttgcctaactcccacaactcagtggggggtacaagcactataagaagtgtgcttcactatggtagggggtctctaggcccacccttggggcccagtggctgttcatgctctattttctggcagaccactgggtgagcctgtaayggaggttcgtcctcctccctgcactgcgtccagcagggactgggcatgcccttccagcagcacagtcacaaatgcccatctgactctgttggcaaaggcacactccttctcggtcctgtgcatttccaggtgcttcagcaccttctccacactcgtggagggcctgtccactgccgcccatgtttccaccagagcccatccttgcagcacggctgccactgggtgccacagctcatgctgtggctgcatagccgctccgggagcctgggggctgaagacccactcacctcatcttgctcactatgcca

SEQ ID NO: 918307 - DNA, 624 bp, Homo sapiens
atcactccaggacatcctttgggaaccttactatgggattcaggtttggggtggtgtagaggattaagctgcagaaccactgaacatggagaaatttctgcagcagttccccagagatgtctctgggctcctgggcaggagagaagggactacttgcaagtttactggttaataatgatttcccacctttcagggatcttctgcagaaatagcgctggaagctagagtgaggcctgagtactgccttggcctaggatggctagagaattaagtgaaagcacagccctggatgcccagtctacagaagaccagatggagcttctggtcataaaggtggaggaagaagaagccgkttttcccagtagcccagatctgggttctgagggctcccgcgagcgcttccgaggcttccgctacccggaggctgcaggcccccgcgaggcgctgagtcggctccgagagctctgccgacagtggctgcagcctgagatgcacagcaaggagcagatcctggagctgctggtgctggagcagttcctgaccatcctgccggggaatctgcagagctgggtgcgggagcagcatccagagagcggggaggaggtggtggtgctattggagtat

SEQ ID NO: 918308 - DNA, 624 bp, Homo sapiens
atcactccaggacatcctttgggaaccttactatgggattcaggtttggggtggtgtagaggattaagctgcagaaccactgaacatggagaaatttctgcagcagttccccagagatgtctctgggctcctgggcaggagagaagggactacttgcaagtttactggttaataatgatttcccacctttcagggatcttctgcagaaatagcgctggaagctagagtgaggcctgagtactgccttggcctaggatggctagagaattaagtgaaagcacagccctggatgcccagtctacagaagaccagatggagcttctggtcataaaggtggaggaagaagaagccggtttkcccagtagcccagatctgggttctgagggctcccgcgagcgcttccgaggcttccgctacccggaggctgcaggcccccgcgaggcgctgagtcggctccgagagctctgccgacagtggctgcagcctgagatgcacagcaaggagcagatcctggagctgctggtgctggagcagttcctgaccatcctgccggggaatctgcagagctgggtgcgggagcagcatccagagagcggggaggaggtggtggtgctattggagtat

SEQ ID NO: 918309 - DNA, 606 bp, Homo sapiens
atccataagcttcacctactggcctggaggttgaactgcacaatacaataagaaatctggggccaggcacagtggctcacgcctgtaatcccagcactttgggaggccaaggcgggcagatcacaaggtcaggagatcgagaccatcctggctaatacggtgatacccggtttctactaaaaatgcaaaaaattagctgggtgtggtggtggacgcctgtagtcacagctactcgggaggctgaggcaggagaatggcatgaccccaggaggtggagcttgcagtgagccgagattgtgccactgcactccagcctggatgacagagccagactctgtctcaaaaaaaaaaaaaaaaaaaaaaaaaaaaargaaaagaaaagaaagaaagaaatctaggcagggcatggtggtttatgcctgtagtcccagcactttgggatgctaaggccggcaaatcacttgagcttaggaattcgtaaccaacctgggcaacatagtgagacccccatctctgcaaaaaatttttaaaattagccaggcatggtgatgcacacctgtagtcccagttgccagggaggctgaggtgggagaattattggtgccc

SEQ ID NO: 918310 - DNA, 571 bp, Homo sapiens
caggcatcatgggaggaacctggtgggaggtgattgaattatgggggcagatcttttctgtgctgctctcgtcatagtgaatgagtctcacaagatctgatggttttaaaaaggagagtttttctgcacaagctctctctttgcctgccaccatccatgtaagacctaacttactcctcctagccttctgcaatggttgtaagccctccccagccatgtggaactgtaagtccattcaacctctttttcttcccagtctctgttatgtctttatcagcagtgtgaaaacagactaatacagtaaatttctactaatagagtcgggcgctgctaaaaagatacccaaaaatgtggaagtgactgagtaataggcagaggatggaacagtttgaagggctcagaaaaagacaagaaactgtkggaaagcttggagcttcctagagacttgttgaatggcttttaccaaaatgctgatagtgatatggacaaagaaatccaggctgaggtggtctcagatggagatgaagaacctgttgggaactggagcaaaggtggctcttgctgtgcttta

SEQ ID NO: 918311 - DNA, 624 bp, Homo sapiens
ctttttaacacaatgttgggataatattaataaatttctctttactttttaattacaagttgaggctgagcccaggtattgtcacgactggaccgggtgtgcatgcatttagggtacaccaacacaccagcctcgtgacaccttggccccttccgactttggtcgctgagaagcactggagggaggttggcaggggcagggggtgctgagggtggctcagtgcaggcctgcaggcaccccttggcatgaatagcctgagcgtcaagggtggcaggctgatggcagcagaaggcaggcagctaatgggtagaaaggggtgggtgcctggtgaggcacaaccttcatgcctgggacagcctgaagcctgggggtcaggctgccagttctgtgaactggagtgagaacttatggtgyttttttctgggcccacccatggctgcctatggaccaatcagaatgcacttcctcccctctgaagaccataaaatccctggactcagccagaagggcagatgtcgggacaacctacctgcagagaggagctccccactgtgggtctcctctctgctaagagctgcactaatcgggatgacctgcttgtggaaaggagctacccacttcagg

SEQ ID NO: 918312 - DNA, 738 bp, Homo sapiens
cggtcacatagaatcctttttatattcctgtttgtgcaatagtacatcattgtccattttatttgcagatggaaacttagactgttttcctctttattaaaaaaaggctagcctgtcattctgttgtttctacatgtttgtataaatataagtatgtacatatatgtatacatgtctaagtatgcatgtatggctctaaaataggttttgaattatgagtaaatatatgttaattttccaaatccagaaaacacagataagctttccccactaaagaagttgactgctgggaatggcttggtgcatgtcttccaggtggytctttttttttctttttggagatggaatcttgctctgtcacccaggctggagtgcagtggtgtaatctcggcgcactgcaacctccgcctcctgggttcaagcgattctcctgcctcagcctcctgagtagctgggattacaggcatgcagcactacacccggctaatttttgtatttttagtagagacggggtttcaccatgttggtcaggctggtctcaaactcctgacctcatgatctgcccgcctcggcctcccaaagtgctgggattataggcgtgagctactggccccaggtggttctttatgataacactagctagcatttttttgagcatgtgtatatgctaggcactgttctaggtgctttatatgtattagctcctttaatactgtgaaattggttctattattactc

SEQ ID NO: 918313 - DNA, 668 bp, Homo sapiens
gattgacacattcaaatgttcttttagtgtggcctttcctattcacactattcacaattatacccctagctccacatgtctttctgctgatttgttttttgcatgccctaaacacatataaacacagtcatatgtattaatagatayatatgagtttgagtcctctagggagcaaaggctaagacagaattagaagtgcaagaggtggccgggcgcagtggctcacgcctgtaatcccagcactttgggaggccgaggcgggtggatcacgaggtcgggagattgagaccattctggctagtacggcaaaaccccatctctactaaaaatacaaaaaaaaaagtagccgggtgtggtggcgggcgcctgtagtcccagctactcgggaagctgaggcaggagaatggcgtgaacccgggaggcagagcttgcagtgagccgagatcgcgccactgcactccagcctgggcaacaaagcgagactccgtctcaaaaaaaaaagaagtgcaagaggtctatttgggaaaatgtccatggaagaaaaaagggagaggaagcaaggaagcctgaaggagggaagaccttcagaccacaatgctggtctgacatctgtaacaggaagtgggggagggaaggaggagtgagtagaagaagcctcagactacagt

SEQ ID NO: 918314 - DNA, 581 bp, Homo sapiens
aagataaaaaaaaaaaagaaaccctgtctctactaaaaattaaaaaaaaaaaaaaaaattagccagtgtggtgattgtcaggcctctgagctgaagctcagctattgtaacccctgtgacctgcacatatacacccagatggcctgaaggagccaagaagtctggggcagccgaaaaaccacaaaagaagtaaaacagccagttcctgccttaactgattaaccaacattacaacattccaccattgtgacttgtccctgccccaccttaaccgatcaatcaactytgtgacattcttcttctggataataagtcttatgatctccccaccatgtaccttgtgacctcctcctctgctaacaatagatgaccatcttttaccgtaattttccattacctacccaactcctataaagcaaccccttccccatctcccttcgctgactcctttctcagactcagtccacctgcacccaggtgaattaaaagctttattgctcaaaaaaaaaaaaaaaaaatatatatatatatatatatatatatatgaactattagctggccatggtggcacacacctgtag

SEQ ID NO: 918315 - DNA, 627 bp, Homo sapiens
ggagaaacagtgtaaaccggcagtgtaaacaagagcagggcatgtatgagtagttgagaatggtgaataggagtatgactagatgaaagatagtagggatgacaagtttttttggggcacagtctaagttggtctggtgtcgaatgagactggggcctaataaaaaggagcgtctatacaggagcttaaatgggctgtaccttgtagcattcygaggacaggcctgaattctgagaagcgaaagtggtaaaagtattgtccagtcctttttaagttggtggctgagcttggtgaggtgtgtttttaaaagacctttagtctgttctacttttcctgaagactgaggaccgtaagggatataaaggtttcactgaatactaagagcctgaaaaactgcttggctgatttgactaataaaggctggtctgttatcagactgtatagaggtgggaaggctaaactgaggaattatgtctgacagaagggaagaaatgactgtggtggccttctcagagcctgtaggaaaggcctttacttattcagtgagagtgtctatttagactaagaggtattttagtttcctgactcgggacatgttgagtaaagctaatttgccagtcctgggtg

SEQ ID NO: 918316 - DNA, 753 bp, Homo sapiens
aacctccatgaccacattgagaaccactgatctatagaaaaggataatagtagtgacattcagagaggcaggatggtatagtgcaaagcttgccaaactttaattttacataaatgacctggggaatcttggaaaaatgtaggttctgattcagtagttctgggatggaagtgagaattttgtattaataacaaactctcaggtgatgatacctgtgccaccggcccaaggaccacactttgartagcagagcagtagtagaaagtgcatcggctttgaaagaagacagacctgggcttgaattctagctaaaatacttctactttggacaagttacatagctctctggaccttattttctcattggtaaaatgagactaataatgctgaccctgcagagttcttataaggattcatggaatgcatagtccctggcagaaaggaagatataggagggactataattggcctaaagtaggaggctctggttaccatgggcactgccctgttgtgatttatcaagccattacacctcactgaacctcagatttccagtggaaaaacctgtttgtaaaccatgttcacatattctgttgaaagtaatcatagtttgatttatgatgatagggctcaggtaagtgattagttttattctcctgcctgctttttatgttgtccattaatgagcaaggtgctgatgcaaggagatggcagatgcattttgaaaaaaaaggagagagagagtacttgtag

SEQ ID NO: 918317 - DNA, 858 bp, Homo sapiens
gggaggctgcggggcagtcgggccggggctccggggggctcgggggcgccgaaggggggtcgggggcgggctcgaggcgtaaacacccagcaacgtgaccggaactggcgaacgagccggaggggtgcggggggcgggagagagaaagggggaggggagggacctgagacgggcggggaggggccgtgggcggggcggggggaggggaggccggcggcgcgcggtcggggggagggggaaccccgggagccccgagagccccgggaaccgggcctgaggcccccagcgggccgctgggctcgcggagctggctttggctggtagctggaagggcaaactggggaacccgccggtgccttggcgcgcaggggcgcggcgaaggatcagcaccgcggacagcgcccakgccgccaggccgcgatccgctccgcccctcccgccctggcgtaggaaggagaggcagcgcccgcagccgcgcaggcaaggcttggggcgaagcgcgatctgaccagtgggctgggaatccgtcccgtgtctaggcagcagcaaacctgccccagacctctcactagctgtgtggccttgggtgagtcacatcacctctctgggccgcagttgataagatgccctatttctaaaattcttttattattattattatgctttaagttctatgagggtcccaagagccaagggaagattcttgataaactccaaagttcaggccgggcgcagtggctcacgcctgtgaggccagcagtttgggaggccgaggcgggcggatcacctgaagtcaggagttcgagaccagcctggccaacatggtgtatgtatcccaatctctactaaaactacaaa

SEQ ID NO: 918318 - DNA, 569 bp, Homo sapiens
ctatacactgaaattttagcagatgaacccccttatgtcagacagtgcatgatatttacagataaacaaaatagaaagaccttttacttgagaaattagtcacccactgtccaggggacatgttcgcacaggggagtttattgactttcctaagaaatacaccacattctcttgatttctgacattatgtcatttagcctgacaactgcagatttgtaaccagtatttgtagggaaagatacaagaagtcctgacgtttccagtttaaacctgtttttagatttcaaagagaaatgataacgtttgcatcctctgattaaatcaggttattgtctccaaggrtgaccatgtaaataattcaaattaattcatcagtgtacaataggtttaataagcataataaacacttttaagaaaatacttaagaccctcggtctgccctcgatcttgctccctattatctcagatttccctgagaacagaatgagtggtaccacgttgttctcttctattcaaaatatgcaaagctgctatttaccagcttgcaatttgcatgtctcaaatcctgc

SEQ ID NO: 918319 - DNA, 623 bp, Homo sapiens
gcaaatgaccaggttccacctcacaccgactgtatcagagaccctggggctggaacccagcagtctttttccaggagccccccaggtgatggtgtgtgcaccaaagcttgagaaccgtggctgtggttcattatcctcctggtctctgcaacactgcagtggagggaactgagaagccgagtaggttggcaagatcacaaggttattcactggagacatcattcaaatgcggatctcaggcaagtagtgctcttcttactcggaaaaagaaaaccaatagaggcaggtgccagtgrctcatgcctgtaatcccagcactttgggaggctggggcaggtggatcatctgagctcaggagttcaagaccagcctgagcaacatgacgaaaccctgtctctaccaaaaatataaaaaattagccaggcgtgggggcacacacctgtagtcccagctactcgggaggctgaggtgagaggatcacttgagcctgagaggcgagggttgcagtgaaccgaggtcatgctactgcactcaaagctgggtgacagagtgagaccctgtctcagaaaaaaaaaaagaaaagaaaaaaagaaaaaaaatagaacacagactttgtcattttt

SEQ ID NO: 918320 - DNA, 639 bp, Homo sapiens
atggctgaggaacatagagagaaaataaaagtccaacaagtgagattggaagcaagcaagggcctgagcacatgggtctgctgaaagcagtaaagtctttgaatgttttttctaaaggaaacgaaaaaccattagacagtttacacaaaggagtgatatgatatgatttacatttgctaaagatcattatttggtttgcttgggctgccataataaaatgtcacaaacagagtggcttaagcaacagaagtttgctttctcacagttagggaggctggaagcctgagatcacggtgtcactagggttggcttcttctaaggcctctccttggcttgcagatggttcccttctccctgtgtcttcatgtcgtctttcctctgtccacgcagcacatgtctgcatccaaattttctcttcttataaggacagcaactatgttgtatgagggctcatattaaagacytatttgaacttattgtctgttcaatagttgtatctccaaatacagttgcattgtgaggtactaggaattacaacttcagcatatgaatttttagggtcacaattcagcccataacaatttctctggccactctggggaggataactgtctgagggagacagtggcgaggagcaaa

SEQ ID NO: 918321 - DNA, 578 bp, Homo sapiens
tagataaagttgaaagtggagcaaaaccctaaaattagatttaatggtgatgtcataatttgattaattcatttgttcagtaaacatgaattatgtgccagtacaactcagttcattgtagataccctttggctcactgaatgcaatgcattaagtgtagtgtcctttaaattcatgcttcagtgttttggtaaacacatttctatagaaatattaaaaagaaaaataatcatattgatttttaactaaaataactgcatctcaagggccctagmaaaactttttttctgatcactaagcaaaatcaagttactaccacctattggttgctatatactggttttgaacttgtctctggattattagaattctaaaattgaacatttataatgataaaaagtcatggtggagaagatttaacctgttgggtgacaagtgtccatgaacctcttatatttctgcacactcttctgagcaaaggaataaactttttttttccagactctcattactagtactttcatatttaaaaaaaaaaaaaaaaaaaaaaaaactgccttgggagagaaagagatttt

SEQ ID NO: 918322 - DNA, 498 bp, Homo sapiens
aggcctaataatagggtcgaacattacatacgaccttgacatctggtaaattggggaagcccttgaatagcctgcttacaagttttccttcccattctgctcctggggataaagccctctagccaaaaaattctttatcggctaagtgcggtggttcatgcctgtaatcctagcactttgggaggctgaggcaggtggatcacctgaggtcgggagttcgagaccagcctggccaacatggcaaaaacccatctctactaaaaatacaaaaattagccgggtgtgrtggcgggttcctgtgatcacagctactcgggaggttgaggcaggagaatcgcttcaacccaggaggcggaggttgcagtgagtcgagatcacaccactgcactccagcctgggcgacagagtaagactccatctcagaaaaaatgtaaaaagaaaaaacaaaaaactctttatcaagaggacgaggcacagttcccgcttatccctgagaag

SEQ ID NO: 918323 - DNA, 773 bp, Homo sapiens
tgcttgatgagaattatctagcagagaggagaaaaatatgaatgcaggggagaagaggaaattgctagagtgatctcctcaggaatgtgtgggattcagagcacaggcagcagtttcagccttagggttggcatcagagggcagcacaaacagtttacctctagcaacggatggratggcagaagatacaaggagagatgctgcagtcaaagtggacataagagttcgtggacttgttattctcgtttccgtttcttaaaaaaccaagaaagaagcaagagcgtctcagagtgaggttaacaggaggttttggacatttgaaagaagaaagatttttcttttcaaattgtttctcacgttgggaaatagtgatctaaaagagcaagaaaatatagttggaatagaaaaaaaatagaatgtctgctgggaaacataaaaggcttacttagcagttcgagaggtcgtgtatttaaagaggagcccattggtttttccctggtctcttttaatttaatgggtgcaggtatgaagtatgtagagctgggttttaccaggattgtggttgcaccaactgagtatgacatagtgaggtagaggccagtacatcaggagctgatgcaagggtatgatgatcatgaaggagcatggcactcaaattgggtaagagaagagaccgtgtgcatggtccagggccaatgggaaggagccaaggtcaagagattggagctcccagcaggatcaaaggactgttgtagtcagggtatgagagagag

SEQ ID NO: 918324 - DNA, 729 bp, Homo sapiens
ggatgaaaggaggattttgcttgatgagaattatctagcagagaggagaaaaatatgaatgcaggggagaagaggaaattgctagagtgatctcctcaggaatgtgtgggattcagagcacaggcagcagtttcagccttagggttggcatcagagggcagcacaaacagtttacctctagcaacggatgggatggcagaagatacaaggagagatgctgcagtcaaagtggacataagagttcgtggacwtgttattctcgtttccgtttcttaaaaaaccaagaaagaagcaagagcgtctcagagtgaggttaacaggaggttttggacatttgaaagaagaaagatttttcttttcaaattgtttctcacgttgggaaatagtgatctaaaagagcaagaaaatatagttggaatagaaaaaaaatagaatgtctgctgggaaacataaaaggcttacttagcagttcgagaggtcgtgtatttaaagaggagcccattggtttttccctggtctcttttaatttaatgggtgcaggtatgaagtatgtagagctgggttttaccaggattgtggttgcaccaactgagtatgacatagtgaggtagaggccagtacatcaggagctgatgcaagggtatgatgatcatgaaggagcatggcactcaaattgggtaagagaagagaccgtgtgcatggtccagggccaatgggaaggagccaagg

SEQ ID NO: 918325 - DNA, 726 bp, Homo sapiens
cattggtttttccctggtctcttttaatttaatgggtgcaggtatgaagtatgtagagctgggttttaccaggattgtggttgcaccaactgagtatgacatagtgaggtagaggccagtacatcaggagctgatgcaagggtatgatgatcatgaaggagcatggcactcaaattgggtaagagaagagaccgtgtgcatggtccagggccaatgggaaggagccaaggtcaagagattggagctcccagcaggatcaaaggactgttgtagtcagggtatgagagagagtgagctggaaagatgggagtagtggtcagagaaggaggtgcataaaattggacaatgaggttggtggttgttgggaatgcaaggtctggaaatggccatgggagrggctgcttatgatcgggaggaggacaagatcactggaggacaaagatacagagaacccagaggccaagttattggaagggtcattcacatgtctttggaaataaccacatattagaagtaatgttggggagagccacagtgagttgggaggcaaaatcatacacacgcaagggtagcaccatctgtacaggatgcagcagtgagagtggatgatgtcctttgatgacaggagattcaaactggaggctttttgatgtggatctagagcagcaaggaggaacaaggaggccacctgccccagctccaggcttaggagaaggctgtagggga

SEQ ID NO: 918326 - DNA, 832 bp, Homo sapiens
gtgcactagctataaaccaactaagtcacaatggtttgactaaatttggattggtctactatagataggactagattggagaaaaatatgatggtccagttgtaaaccttcttcctaagaaaacactaccatggtacaggacatgagcaaaggaccatctagtagaagaatgctaacatacattgaatctggtgagtcaacagtggtggcggcagtggcctgtggaagaagccaccccagtctttttttatttttattttttgagacggagtctggctctgtcgcccaggctggagtgcagtggcgcaatcttggctcactgcaacctccacctcccaggttcaagcgattctcctgcctcagcctcctgagtagctgagattacaggtgtgtgccaccatgcccagctaatttttgtatttttagtagagatgmggtttcaccatgttagtcaggatggtcttgaactcctgatctcgtgatccgccccccttggcctcccaaagtgctgggattacaggtgtgagccaccacacccggccatagccaccccattcttgaaacctcttcagttcaacaaacacacatcagaagggttccaagcagtgcaggcatgctcatggcaagcataaagtctggctgtgccgggctgctcccagccatggcatctgaggagtagaggtcctctacagtgattgcctggggctgtagtgctaggagggatgctggacagagctatgttgtggtcctgaggtgaagaaaatggcagactgaaggaaaaagaataaacagaacctgccccctggtagagcttcttgaataattacaaagg

SEQ ID NO: 918327 - DNA, 832 bp, Homo sapiens
gtgcactagctataaaccaactaagtcacaatggtttgactaaatttggattggtctactatagataggactagattggagaaaaatatgatggtccagttgtaaaccttcttcctaagaaaacactaccatggtacaggacatgagcaaaggaccatctagtagaagaatgctaacatacattgaatctggtgagtcaacagtggtggcggcagtggcctgtggaagaagccaccccagtctttttttatttttattttttgagacggagtctggctctgtcgcccaggctggagtgcagtggcgcaatcttggctcactgcaacctccacctcccaggttcaagcgattctcctgcctcagcctcctgagtagctgagattacaggtgtgtgccaccatgcccagctaatttttgtatttttagtagagatgcggtttcaccatgttagtcaggatggtcttgaactcctgatctcgtgatccgcccmccttggcctcccaaagtgctgggattacaggtgtgagccaccacacccggccatagccaccccattcttgaaacctcttcagttcaacaaacacacatcagaagggttccaagcagtgcaggcatgctcatggcaagcataaagtctggctgtgccgggctgctcccagccatggcatctgaggagtagaggtcctctacagtgattgcctggggctgtagtgctaggagggatgctggacagagctatgttgtggtcctgaggtgaagaaaatggcagactgaaggaaaaagaataaacagaacctgccccctggtagagcttcttgaataattacaaagg

SEQ ID NO: 918328 - DNA, 543 bp, Homo sapiens
aaattattgtaatattacagctattatggattcggtttctaaataacatttgttgtttttccatatcataaaagtaatgaatctccattgtggaacatttggaaaaaacaaaacaagacacacatgtaagaaaaaatgacctattctcctgccacatggagataatcacagttattttgatatrtttcattatagattttttcatgatatgtgtacgtatgtatgggtatacactcttaagtgtgtgcttacacgtgctccaaatgtgtgtgtgtgcacatgtgcacaatccaatctacatcgtggggaatctacaaagttgtggtcacagtgtagagccagccccacaggcctccccagagacaaggccctggactgcccccaagtcctcccgaaagggacatctgtggtggtggtagggccaggatgccatgagcaaccacctggaggccccgagtactcagcgtgaaccaggtagtggaagggaaggggaagggcagagtgagaaccaggaggaatgcttgcttttctttccaagcacaa

SEQ ID NO: 918329 - DNA, 543 bp, Homo sapiens
aaattattgtaatattacagctattatggattcggtttctaaataacatttgttgtttttccatatcataaaagtaatgaatctccattgtggaacatttggaaaaaacaaaacaagacacacatgtaagaaaaaatgacctattctcctgccacatggagataatcacagttattttgatatgtttcattayagattttttcatgatatgtgtacgtatgtatgggtatacactcttaagtgtgtgcttacacgtgctccaaatgtgtgtgtgtgcacatgtgcacaatccaatctacatcgtggggaatctacaaagttgtggtcacagtgtagagccagccccacaggcctccccagagacaaggccctggactgcccccaagtcctcccgaaagggacatctgtggtggtggtagggccaggatgccatgagcaaccacctggaggccccgagtactcagcgtgaaccaggtagtggaagggaaggggaagggcagagtgagaaccaggaggaatgcttgcttttctttccaagcacaa

SEQ ID NO: 918330 - DNA, 543 bp, Homo sapiens
aaattattgtaatattacagctattatggattcggtttctaaataacatttgttgtttttccatatcataaaagtaatgaatctccattgtggaacatttggaaaaaacaaaacaagacacacatgtaagaaaaaatgacctattctcctgccacatggagataatcacagttattttgatatgtttcattatakattttttcatgatatgtgtacgtatgtatgggtatacactcttaagtgtgtgcttacacgtgctccaaatgtgtgtgtgtgcacatgtgcacaatccaatctacatcgtggggaatctacaaagttgtggtcacagtgtagagccagccccacaggcctccccagagacaaggccctggactgcccccaagtcctcccgaaagggacatctgtggtggtggtagggccaggatgccatgagcaaccacctggaggccccgagtactcagcgtgaaccaggtagtggaagggaaggggaagggcagagtgagaaccaggaggaatgcttgcttttctttccaagcacaa

SEQ ID NO: 918331 - DNA, 549 bp, Homo sapiens
cttaagaaattacctcggctgggcgcggtggctcacgcctataatcccagcactttgggaggctgaggcgggcggattacaaggtcaggagattgagaccatcctggctaacacggtgaaaccctgtctctactaaaaatacaaaacaaaattagccgggcgtggtggccggtgcctgtagtcccagctactcgggaggctgaggcaggagaatggcgtgaacccgggaggcggagcttgcagtgagccgagatcgcaccactgcacgccagcctgagcgacagagtgagactccgtctcaaaaaaagaaattaccttgttaaacccaacactgcccctcttttgtccattcacttctagttgccttcattcwtgcctgatgtgctggacttgggttttatcaagttgcttggcacgtccttaaagaatttaaatctccacagtgcctcctggacaatgactgcagggtgacccccgtctctcctctacacgatgactcttcaaacagttgacgattgcagtttttctttccttccttctttcagtggc

SEQ ID NO: 918332 - DNA, 647 bp, Homo sapiens
gtgctgtggagaattgctcctggtccaaactgcctagtcttgctggcactggcagcaggaaaaatggccaaatggagccacagtgatggtggccacccctccctgccccaccagaacttggtcttcttaagcagtctccagcttgctgtgctggtcaggggggattccaagccagtgagttttagcttgtggagttccttgggagtggggcctgctgaatggggacacttggctccctggtttcagcctccttcccaggggtgtggacagatctcctgtgtcactggagttcccagagccagaatatgcagactcctgtgtctcagtgcctgactgagtggctgcccactcaagcaactgccatgagtctgcacagctctgtgcttgggacccaagttcctggtggtgttgggctcatgaagagacctcctgatccaaaggttrcaaagctctgtggggaaagcaaggttttcagggtggagtagcacaatccctcactacctgtcttggctgtgggagggagtttctgttgccccttgcagctcctgggtaagccctcactccactccgcttttcctcattctccatgggttgcaccaactgcctggtcagtccccatgagagaacctgggtacctcaattgaaga

SEQ ID NO: 918333 - DNA, 687 bp, Homo sapiens
gcttgggacccaagttcctggtggtgttgggctcatgaagagacctcctgatccaaaggttacaaagctctgtggggaaagcaaggttttcagggtggagtagcacaatccctcactacctgtcttggctgtgggagggagtttctgttgccccttgcagctcctgggtaagccctcactccactccgcttttcctcattctccatgggttgcaccaactgcctggtcagtccccatgagagaacctgggtacctcaattgaagatgcagaactcacttgctgttttcgttcttcccagtgggagccacagaccagagctgttyctattcaaccattttggctgcttcccccacgtagtagctttttttgtggattccatcaggttttctgtgtagatgatgatgtcatttatgagtaaacactgtacttcttcatttataatcttgatgcctttgtttctttttcaggccttattgcattggctaggaccaccactaacaatgttaaatagaagtggtgagagcatacatctctggcttgttcttgatcatagtagaaaggtattcagccttccaccgttaagtatgatgttactatacatcatttgcagatgtcctgtatcaggttgaagaaattttcttctattcatactttgctaggagcgtttttaatatcaggtattaatg

SEQ ID NO: 918334 - DNA, 615 bp, Homo sapiens
ttgatccctagactgggatcacatgagaggggccttcaaaaagttcatggaaagtgggtatggtgaaaaaactatgtacgaattcaaaattttttggcatcaaaagaaacttgcactaacttgttatgatgtgcgtgaacacgatctagtttgaggcagtaagaagagtaagacatcagtttgaaaggagcctccaccagagcaacatgaattctattaaaattgaaacaaaaaaacaaaaaaacagacaaaaagaaccccattaaatgtatggtaatgtttgggtggaaaaatgattaaatcattgatttttttaatgaagagtttatgggaacaatgccccaaagcaatcaccagtttacaaatggataaattgttctaagaagggatgagatgatgttgaagaagaagcccacggtagcagacaatccacatcagttttcaaaggaaaaattaatacygtttgcgtcctaattgaagaggactgatgaataacagcagagacgatagccaaagccaacaccatagatatctcaaaggttcagcttatacaattatgactcaaaaattaaagttgagcaaatttccatttgatgggtgccaaaattgttgtgc

SEQ ID NO: 918335 - DNA, 746 bp, Homo sapiens
gtctttagaagctgagagcttccatcctacaagaaggaacaaaactctatcaacaacttgggctgggcgcggtggctcacacatgtaatcccagcactttggaaggccgaggcaggcagattacttgaggtcaggagttcgagaccagcctgaccaacatggcgaaacctcatctctactaaaaatacaaaaattagctgggcgtggtggcacacgcctgtagtcccagctacttgggagtctgagacagaagagttgctggaacccgggaggcagaggttgcagtgagcctcaatcctgccactgcactccagcctgggcgacagagcaagactctgtctctaaataaataaataaataaataaattttttatcaacaacttgatattgagcttgaaagaggaccccacgctctgggtgagaacacagccaacacctggacagcaccttgatggcaatctcgtgagactctgagcagasaaccctgctaagctatgcctagactcctggcccacagtcattgtaagatcctcaatgggtatttgttttaagtctttaagtttgtggtaatttgctctgcagtgataaataatgactacagtatctaatcccaaatatacataaaatagtaccaacactatacaacttaaccagaatgtaaaaccaagtgttttcaaatacagtgatggcttctatctggagccataggtagtagctatgggtcatgtcaaacaggcttacaaaga

SEQ ID NO: 918336 - DNA, 724 bp, Homo sapiens
ttggatggatggatgaggggatgaattgggggagatggatataattttggatagataggaggtgactggatggttgggatatgggatggaaagagggagggaaggatgaatggagggagggagagatgggtggctagatggatggataatccagtggtatataktcagcccctgtagtttaacctacctatgtttggaatgtgaattcagcacttactagctgtgtgaccttgggtaacatacataacctctaaaagttttcattttcttaacaacgaaatagggctaccgatggcacatcccttgtaagagcattctgagaaatatatgatccaatgcatgtaagagccagtgtctgggacatagtaatcactcaataaatgatagtctttaatatctcgagcagacaagactgtgaggcaaagttatgaacaaggttttgtttatttttctgttgttaagggaaatcacttgccattttaagcactagttcatatcctgaatgcaggtggtaacacgttaaaatgttgactgggcttggtccctgcaggtgttgagataactaagcacttacggaaattcagatacactttcattccctcaggaccactgacaacaataaccaaggttttaagcaaatacataattggtattgaactgaatcactcatttactaattgtttctccatgcccaaatattaactggcatttgctaaattagctg

SEQ ID NO: 918337 - DNA, 777 bp, Homo sapiens
tgggccctaggaggtgagaccttggcaggctcatcacatggcaccagcatctgctgagtcaagtcacagacatgactccccaggcttagacaaagggtcagagctgatccagtctatgcccctgccttcatgcaggaaccctctctccagcatcttctggaagcccactggtatgatttccacctgctgccattactggtagacccagaggattccatgcctcagtgttcccaggggccctctcactcccctcctcctcccatcccyggagagtgggaaatgtacctgtaggaatagatgggttttgggaagagaggctggtgcccatcggtgctggcctggggtgccattcgctggtactgatagtgtgaggagcccaggtagggtatggggtagctgccaccacctggcgagtactgaggaggtcaaaaggggcagagtgattgcatggtacccagcctttcccaggagggccctcctccccatttatatacatccagagaaggggctcaggccagattcttccctcctgggtcatgggccccatcacccccaaagcagagctgtctgaggggctgtgaggagatccacaccctgtaattcaggatctcagaggccttaaaaccctcttcctccagctccttcctctcagcccttttgatgctctggttgctatggtgacgggaccctgcagggagagtatgaagtgaagccctcggcccctgcacccttccaggaaggtgctcccagtgcctgtgcatctcccagagcagctgg

SEQ ID NO: 918338 - DNA, 731 bp, Homo sapiens
ttggtgcccaacgtgggctccaggaaccctctccagaggaagctggggacactgcccccactgacagtgaagactgctgtggtcactctgggcctgcgtggaggaggggtgctaagtgcagagtctgataattgggttttctgatcacagcgatgtgtgtgtgtgtgtgtgtgtgtgtgtgtgygcgtgtgtgtgcgtgtgtgtgtgtgtgtccttcctcatgtacattctatgccttccgagactgatgggctggtgcagtctgggacatggctatggaatttacaagtgtaagtgggacctccaactgtctccaggcaatctggttccagggatgcaccccattctcattctgtgtgtgtgcgtgcgcgtgtgtctgtgtgtgtctctgtgtgtgtctctctgtatgtatatatgtatgcgtgtgtgcatgtatgtatctctgtgcatgtgtctgggtgtgtgtctctgtgtgtgtgtgtctctgtgtgtatgtgtgtctctgtgctgtagtttgtcagaggcagtggggggagccctgaaggccccggagggtgtatgagggcaggatttggagctgactgacagtgcatcctcctgtgagcatggggtggagggcgagggtcagaccttgcagtgggctttctgttgcattctggaaggggatgggaggatctggagggttgcctacccctggaagcttctagagtagctgtgagagcacaggttcc

SEQ ID NO: 918339 - DNA, 638 bp, Homo sapiens
ccttgctttctggctttgaggtcattgacggctcacaggtgtcctcaggccctaggggacaggggacagcgtcatcagggaatgtcagtgacttggcgcagactgtcaaaacctttgataaccttaaggttagtttttttgttttttttttcctacttctaaaactttctattaattctgcagtagagcacgtgaaataataagcagcctccaggtctgaggcaaacaacttggaatgaccttcgatttggttttcacgattttaatatttagtctaaagttagtagcattctgcatttttaacatccttgctttttgacatatgacgcacctccattgcctttccattgcacaaggatgcttmtcatttgaattattagttattttctcttcctgggacctgtggtgccttttgggatttctagaagctggtgataaatgacagtaaaggtggctttccttggcaccttgggtggagagctagttgataatctgatttcagagaccactttctcaaatacttctacgtctcttgaaatccactattttatgattacttgaaatgatgttggtgtgggtgaatcctaggacacagctcactgagaggacaggctgccgagaacattgtagtatttcat

SEQ ID NO: 918340 - DNA, 685 bp, Homo sapiens
tatttatattttgatattgagttgtgagagttgtttatatgttgtggatcctagtccttgatgaaatgtgtaatttcaaatattttctcccattctacaggttgtgtttgccattgctattattagctaactttccagatgttgttattttcagcataaagttttaaatttttgttaatcgcaatgaacctattttttctttagtagtttgtgcttttattgtcatattaacaaggctttacctaagccaaggttgtaaagctgtattcctatgtcttctaaggcttttcgagttttagctcttccgtttaggtctatgatccatttcgagttcatttttatctatggtggaaggagatccaacttcattctcttgtgtgcagttatccagttctgacatcatttgttgaaaagattattctcttscccttgaatgccctttatgccctcgtcaaaaatcacttattcgtaaataaaaggatttatttatggactctcagttctagtccattaatctgtatatataagttcttaggctagtaccatactatcttcatcactgtagctttgtagaaatattttaaattgggaagtgtgagtctccaactttgttcttagttttcaagattgttttgattattctgaatcccttgtatttctcagtgaatttcagagtcagcttgtc

SEQ ID NO: 918341 - DNA, 685 bp, Homo sapiens
tatttatattttgatattgagttgtgagagttgtttatatgttgtggatcctagtccttgatgaaatgtgtaatttcaaatattttctcccattctacaggttgtgtttgccattgctattattagctaactttccagatgttgttattttcagcataaagttttaaatttttgttaatcgcaatgaacctattttttctttagtagtttgtgcttttattgtcatattaacaaggctttacctaagccaaggttgtaaagctgtattcctatgtcttctaaggcttttcgagttttagctcttccgtttaggtctatgatccatttcgagttcatttttatctatggtggaaggagatccaacttcattctcttgtgtgcagttatccagttctgacatcatttgttgaaaagattattctcttgcccttgaatgcyctttatgccctcgtcaaaaatcacttattcgtaaataaaaggatttatttatggactctcagttctagtccattaatctgtatatataagttcttaggctagtaccatactatcttcatcactgtagctttgtagaaatattttaaattgggaagtgtgagtctccaactttgttcttagttttcaagattgttttgattattctgaatcccttgtatttctcagtgaatttcagagtcagcttgtc

SEQ ID NO: 918342 - DNA, 685 bp, Homo sapiens
tatttatattttgatattgagttgtgagagttgtttatatgttgtggatcctagtccttgatgaaatgtgtaatttcaaatattttctcccattctacaggttgtgtttgccattgctattattagctaactttccagatgttgttattttcagcataaagttttaaatttttgttaatcgcaatgaacctattttttctttagtagtttgtgcttttattgtcatattaacaaggctttacctaagccaaggttgtaaagctgtattcctatgtcttctaaggcttttcgagttttagctcttccgtttaggtctatgatccatttcgagttcatttttatctatggtggaaggagatccaacttcattctcttgtgtgcagttatccagttctgacatcatttgttgaaaagattattctcttgcccttgaatgccctttatgccctygtcaaaaatcacttattcgtaaataaaaggatttatttatggactctcagttctagtccattaatctgtatatataagttcttaggctagtaccatactatcttcatcactgtagctttgtagaaatattttaaattgggaagtgtgagtctccaactttgttcttagttttcaagattgttttgattattctgaatcccttgtatttctcagtgaatttcagagtcagcttgtc

SEQ ID NO: 918343 - DNA, 563 bp, Homo sapiens
gtttgctggaggtccattccagaccctgtttgcctgggtatcagcagcagaggctgcagaacagcgaatatttctgaacagcaaatgttgctgcccgatcattcctttggaagcttcgtctcagaggggcacccgactgcatgagatgtcagtctgcccctactgtgggggtgcctcccagttaggctactcgggggtcaggaacgtacttgaggaggcagwctgtccattctcagatgtcaaactccatgctgggagaactagtactctcttcaaagctgtcagacagggacatttaagtctgcagaggtttctgctaccttttgtttggctatgccgtgcccccagaggtggagtctacagaggcaggcaggcctccttgagctgtggtgggctccacacagttggagcttcccatctgctttgtttacctactcaagcctcagcaatggcaggcgcccctcccccagcctcgctgccgtcttgcagttcgatctcagacggctgtgctagcaatgagtgaggctttgtgggcgtgggaccctctgagccaggcatgggat

SEQ ID NO: 918344 - DNA, 563 bp, Homo sapiens
gtttgctggaggtccattccagaccctgtttgcctgggtatcagcagcagaggctgcagaacagcgaatatttctgaacagcaaatgttgctgcccgatcattcctttggaagcttcgtctcagaggggcacccgactgcatgagatgtcagtctgcccctactgtgggggtgcctcccagttaggctactcgggggtcaggaacgtacttgaggaggcagactgtccattctcagatgtcaaactccatgctgggagaactagtastctcttcaaagctgtcagacagggacatttaagtctgcagaggtttctgctaccttttgtttggctatgccgtgcccccagaggtggagtctacagaggcaggcaggcctccttgagctgtggtgggctccacacagttggagcttcccatctgctttgtttacctactcaagcctcagcaatggcaggcgcccctcccccagcctcgctgccgtcttgcagttcgatctcagacggctgtgctagcaatgagtgaggctttgtgggcgtgggaccctctgagccaggcatgggat

SEQ ID NO: 918345 - DNA, 563 bp, Homo sapiens
gtttgctggaggtccattccagaccctgtttgcctgggtatcagcagcagaggctgcagaacagcgaatatttctgaacagcaaatgttgctgcccgatcattcctttggaagcttcgtctcagaggggcacccgactgcatgagatgtcagtctgcccctactgtgggggtgcctcccagttaggctactcgggggtcaggaacgtacttgaggaggcagactgtccattctcagatgtcaaactccatgctgggagaactagtactctcttcaaagctgtcagacagggacrtttaagtctgcagaggtttctgctaccttttgtttggctatgccgtgcccccagaggtggagtctacagaggcaggcaggcctccttgagctgtggtgggctccacacagttggagcttcccatctgctttgtttacctactcaagcctcagcaatggcaggcgcccctcccccagcctcgctgccgtcttgcagttcgatctcagacggctgtgctagcaatgagtgaggctttgtgggcgtgggaccctctgagccaggcatgggat

SEQ ID NO: 918346 - DNA, 426 bp, Homo sapiens
gctgtcatatagaggcactcacttttcacttgctggacttggagggtttggtttgaggtctgtaaattctttctcgctcgctttctttctttctctctttctttctttctttctttctttctttcttttcttttctttctttcttttcttttctttctttctttctttctccttctgtctttctctctttcttttgtttcttttcttttytttttttttttttgagacagaatctcactctgtcacccaggttggagtacagtagcacgatcttggctcactgtaaccttcacctcccagttcaagctcttctgttgcttcagacccccaggtagctgggattacaggcatccacaacaacgccaggctaatttttgtatttttagtagagacgaggtttcgccaccttggccaggctggtcttga

SEQ ID NO: 918347 - DNA, 547 bp, Homo sapiens
gtttgaaaccagcctggacaacacagcaaaaccgcgtctctccgaaaaattttaaaaaattagccagccatggtggtgtatgcctgtagttccaactacttggagcctgaggtgggaggattgcttgagcccaagaggtcaaggctgcagtgagctgtgattgcaccagtactctccagcctgggcaaaagatagagaccctgtctcaaaaaaagtgtgtgtatagatatgaatatacactgtatatatacatccacatgcacatgcatgtackcacgcacacacacacacacgcacacccacccacacacacatagaaagagagtgaaaacacatttttgggttgtaaggaacagaagaagggatgaaccagcccaggaagctctcctctttgggagagaccatttactactgatcatttctagactttgggctaagcacattggtgcttgaaaagagagaagcatccctgggttttcagccaggcggccacagatgtgaacaatagagaactcagctcacgtgcccagtgggaagaagacaattg

SEQ ID NO: 918348 - DNA, 547 bp, Homo sapiens
gtttgaaaccagcctggacaacacagcaaaaccgcgtctctccgaaaaattttaaaaaattagccagccatggtggtgtatgcctgtagttccaactacttggagcctgaggtgggaggattgcttgagcccaagaggtcaaggctgcagtgagctgtgattgcaccagtactctccagcctgggcaaaagatagagaccctgtctcaaaaaaagtgtgtgtatagatatgaatatacactgtatatatacatccacatgcacatgcatgtactcacgcacacacacacacacgcacacccacccacacacacatagaaagagagwgaaaacacatttttgggttgtaaggaacagaagaagggatgaaccagcccaggaagctctcctctttgggagagaccatttactactgatcatttctagactttgggctaagcacattggtgcttgaaaagagagaagcatccctgggttttcagccaggcggccacagatgtgaacaatagagaactcagctcacgtgcccagtgggaagaagacaattg

SEQ ID NO: 918349 - DNA, 547 bp, Homo sapiens
gtttgaaaccagcctggacaacacagcaaaaccgcgtctctccgaaaaattttaaaaaattagccagccatggtggtgtatgcctgtagttccaactacttggagcctgaggtgggaggattgcttgagcccaagaggtcaaggctgcagtgagctgtgattgcaccagtactctccagcctgggcaaaagatagagaccctgtctcaaaaaaagtgtgtgtatagatatgaatatacactgtatatatacatccacatgcacatgcatgtactcacgcacacacacacacacgcacacccacccacacacacatagaaagagagtgaaaacacatttttgggtygtaaggaacagaagaagggatgaaccagcccaggaagctctcctctttgggagagaccatttactactgatcatttctagactttgggctaagcacattggtgcttgaaaagagagaagcatccctgggttttcagccaggcggccacagatgtgaacaatagagaactcagctcacgtgcccagtgggaagaagacaattg

SEQ ID NO: 918350 - DNA, 695 bp, Homo sapiens
agattgggcatggagtaggaggggggtgcttttcctgggacaagatgaagttaactttgggcagactcctgcattgataagctcacagctaaaaaattggctcccaatcccctgccgtctccaatcattgcaatgcaaattcgatagaaaagagctgcaggggtccctggcagctgaaaatcagtctgcattgaaatgggaatagatgccaccacctaggtattggaaagccaagttcccaggctgaggaaaagggaaaattcccttctctgtcaaaactgtcaaattacccaaccgaggggagatgccaacctcttagctcgtctctcttcaatcatctgtaggggcaggcggccagttgtttttgacccagcacccctatccactgctcacagatgcccagccagctccggccacctsccctcctttcagggaaggagaaggtggaaaggtcaagttctgcttgaacagccctgaaacttccctgttttctggccctcccagccaacactggtggagaggaggcttcccctgctgctggagctcaccccatgaataaataatgagcaggtggatgattccatcctgttagcttcagcttctgcagcttcctgacaaacagaactctgattgtgatggcagagtttttgtttcgtttttgaatttcacgtcattaatattttttctttctaaac

SEQ ID NO: 918351 - DNA, 611 bp, Homo sapiens
ccggccgcccagccctacgagcaagcggcaaatggaaacgtgtggccttaccttcctccatcccgaacgcatgctttgttactgttgggttgctcacggacgctgggctgttggcattgttttttttttcctttttttttcccttttgaaaagaaaagcattgaggaatctttttggaaaagatatggacaacgattgagaagtacactgatctctgcaagcaggtggagaggtgtcaggaggcgcaggggcacaccgtgaggagggggagtttgcagtcaaggaggacagtgacatgcatgtgtaggggctggggaccaatctgtcttgggggtcccagagatggatctgctgtgacagagggggccaagaccccgttcagagtgggggagggggagaggagtcacaggttcaacatgaagarcagttttaggaagtgggagggctggggacctacggcccatgcagtgccagatgggaccccatgcaggtgggttgctggaggaggacagggaaacagactgcagttttcagggatgcccttggaccttctgactcagtggcccaactcctggctgctgccctcctcccccactcccaagacctccagg

SEQ ID NO: 918352 - DNA, 609 bp, Homo sapiens
aatacaggcatgtgccaccatggctggctgatgtttcttttttgtaaattttggtagagatgaggttttgctttgttgcccaggctggtctcaaactcccggcctcaagcagtcctcctgcctcagccttccaaagcactgkggttgcatgcatgagtcatcatgtcccgcctccccttgttctctaacctcctttatcaggtataactggattcagttgcttctaggagaaactccaaataacagtaaattaaggtgaagtttatctttctctaatgtaaaaaagatccagaaacaggtaggctttgattagtgtggtagctcgatgaaggtattgggagcccatctctctccttccaaatccgttatgcatccatggctcctgttctcgtggtacaaaatagcccctggagatccagccatcgcttacatgttccaggtggtatgatgaataaaggagcaaagaaggctgtatctcctgtctttaagattttccagagatctcacatcatacttacactcatatatagttggtcaaaacatagtcacattcactctttatacctacatccttggcaagatccacttctcatcaagcctgagctatta

SEQ ID NO: 918353 - DNA, 583 bp, Homo sapiens
agaaaaacttaaatatggagattggatgattaaataaattgtctaataagtagaacaagagatggaaaagaagaaaaaaattataatttagagtctcagaaaatcaacacaggaggtgcaatatttaatgagattctggttaaagtgagactgtagaaaactcaatggataaattattactaaaacataacaagaaaatttctcagaacttacagtaagagtctatatgttaacagggtatgcctgcatggccagattaataaataaaatgcctgtattaaggtcttttcagattaccaggaaaaagtttttcaatgcttccaggaaaggaggtaagagagaaggacacaaagagagrtggaatcaaaatcaagtcagtcttctgaagaaactcgacatgcaatgagtaaaagagacagcttcagctttcaaaatttgagggaaaattattttcaaactagaattttatacccagtcaaactatcaagcaaatgaaaacaaacaaaaaagatgtcttcacaatgtaaggagacaattttttaaaaatctcttctgcattcgtttatatgaaggtcttgagaga

SEQ ID NO: 918354 - DNA, 812 bp, Homo sapiens
ctaaaaaacggcaggaaacgaattttctcctggagcctccgggaaaagccagccctaccgatgccctgacgttagcccagaagggcctgcaggggcttctgacctccagcactgccagagaataaattggtgccatttcgtttattattattattattatattttcttgagatggagtctcgctctttcgcctaggccagactgcagtggtgcgatctcggctcactgcamgctccgcctcctgggttcatgccattctccttcctcagcctcccaagtagctgggactacaggtgcccgccaccacgcccggctgatattttgtatttttagtagagatggggtttcaccacgttagccaggatggtctcaatctcctgacctcgtgatctgcctgcctcagcctttcaaagtgctgggattacaggtgtgagccaccgcgcccagcctcatttattatgtatatatttattttgagacagggagacagggtcttgctctgccgcccacgctggagtgcagcagtgcaatcaaagctcactgcagcctcgacctcctaggctcaagccatcctcccacctcagcctcccaagtagctgggaccacaggcacctgccaccaccaggcccggctcattatttcattttttgtggagacggggttttgccatgttgcccaggctggtcttgaactcctggcctcgagcaatcctccagcctcggcttcccggagtgctgggattacaggtgtgagccaccatgtctggcccaagttggtatcattttaaaccactacgtttctgggaattcgtt

SEQ ID NO: 918355 - DNA, 812 bp, Homo sapiens
ctaaaaaacggcaggaaacgaattttctcctggagcctccgggaaaagccagccctaccgatgccctgacgttagcccagaagggcctgcaggggcttctgacctccagcactgccagagaataaattggtgccatttcgtttattattattattattatattttcttgagatggagtctcgctctttcgcctaggccagactgcagtggtgcgatctcggctcactgcaagctccgcctcctgggttcatgccattctccttcctcagcctcccaagtagctgggactacaggtgcccgccaccacgcccggctgatattttgtatttttagtagagatggggtttcaccacgttagccaggatggtctcaatctcctgacctcgtgatctgccygcctcagcctttcaaagtgctgggattacaggtgtgagccaccgcgcccagcctcatttattatgtatatatttattttgagacagggagacagggtcttgctctgccgcccacgctggagtgcagcagtgcaatcaaagctcactgcagcctcgacctcctaggctcaagccatcctcccacctcagcctcccaagtagctgggaccacaggcacctgccaccaccaggcccggctcattatttcattttttgtggagacggggttttgccatgttgcccaggctggtcttgaactcctggcctcgagcaatcctccagcctcggcttcccggagtgctgggattacaggtgtgagccaccatgtctggcccaagttggtatcattttaaaccactacgtttctgggaattcgtt

SEQ ID NO: 918356 - DNA, 759 bp, Homo sapiens
ggaaaagccagccctaccgatgccctgacgttagcccagaagggcctgcaggggcttctgacctccagcactgccagagaataaattggtgccatttcgtttattattattattattatattttcttgagatggagtctcgctctttcgcctaggccagactgcagtggtgcgatctcggctcactgcaagctccgcctcctgggttcatgccattctccttcctcagcctcccaagtagctgggactacaggtgcccgccaccacgcccggctgatattttgtatttttagtagagatggggtttcaccacgttagccaggatggtctcaatctcctgacctcgtgatctgcctgcctcagcctttcaaagtgctgggattacaggtgtgagccaccgcgcccagyctcatttattatgtatatatttattttgagacagggagacagggtcttgctctgccgcccacgctggagtgcagcagtgcaatcaaagctcactgcagcctcgacctcctaggctcaagccatcctcccacctcagcctcccaagtagctgggaccacaggcacctgccaccaccaggcccggctcattatttcattttttgtggagacggggttttgccatgttgcccaggctggtcttgaactcctggcctcgagcaatcctccagcctcggcttcccggagtgctgggattacaggtgtgagccaccatgtctggcccaagttggtatcattttaaaccactacgtttc

SEQ ID NO: 918357 - DNA, 759 bp, Homo sapiens
ggaaaagccagccctaccgatgccctgacgttagcccagaagggcctgcaggggcttctgacctccagcactgccagagaataaattggtgccatttcgtttattattattattattatattttcttgagatggagtctcgctctttcgcctaggccagactgcagtggtgcgatctcggctcactgcaagctccgcctcctgggttcatgccattctccttcctcagcctcccaagtagctgggactacaggtgcccgccaccacgcccggctgatattttgtatttttagtagagatggggtttcaccacgttagccaggatggtctcaatctcctgacctcgtgatctgcctgcctcagcctttcaaagtgctgggattacaggtgtgagccaccgcgcccagcctcatttattatgtatatatttattttgagacagggagacagggtcttgctctgccgcccacgctggagtgcagyagtgcaatcaaagctcactgcagcctcgacctcctaggctcaagccatcctcccacctcagcctcccaagtagctgggaccacaggcacctgccaccaccaggcccggctcattatttcattttttgtggagacggggttttgccatgttgcccaggctggtcttgaactcctggcctcgagcaatcctccagcctcggcttcccggagtgctgggattacaggtgtgagccaccatgtctggcccaagttggtatcattttaaaccactacgtttc

SEQ ID NO: 918358 - DNA, 678 bp, Homo sapiens
gggaactgtcattcatctggttgctcaggcaaaacaatcaacataattatcaacataattctggttaagtctatttttgtcattcccacatgtaatacaccaacaagccatgtgggctctatccccaaagcctagcttaaatctaatcacctcttactaattctttggctatcatcctaaattcacgctgccatcatctctgtctggactcttaccatattttaatatttctcccaaccattctattctgtacacagcaatgaacatggtcttttaagaatgtcaatcaaattgcttaagtctcttgctaaagcttttcatttatactcgcaataaaaaggaaattccttagtgtggccttcaagattttataccacatatttcccttgactctttctctcyttaactatgaatacagctacactgaccttctgactggttatccaccatatcaagtttgtttctgtcttacaagctttattcatgtttctctttctgcctagcaagctcttccctcctcagtctcagtccttaccctgctgtgattgttcatattgagtgtcaacttgattggattgaaggatgcaaagtattgttcctggatgtgcttgtgaaggtgtagccaaaggagattaacatttgagtcagtggactgggagaggcagacccaccctcaat

SEQ ID NO: 918359 - DNA, 748 bp, Homo sapiens
acttgtttactggtcacaaccttgctgaccaaaacaggacctgttctggacaggataaagtgaggaaactaacaagaaccagcaggtggctacaaaactgatccctggctgccctcattgctcattggtgtaagacacacactagtgctataacagtttacaaatgtcacggcagccatctggcagtcaccaccccctttccatggcaacaacccagaagttactgcccctttcccataaagttctaaacaacttgctcctcaatttgaattgacccaccccttaatttgcatgtaattgaaagtgggcttaggtgaatataaatgcagttgccacagtccgtaggtgctaactctgggtgcactgcctgtgagttagccctgctccatatggagtagctcgggttcaataaaagattgctgtttaaaatcaacttgaattcttttctgggaaaagccaagaacccttatggattaagccccaactttgwggcttgcctgtcctgcatcagtttctctaattgaggtgcaaaataatcataaggatttctgagaagagatgggaatttcttggaattggggtgctacccagttttagacccagcatgggtatacctggaatggtcatggcactggtgggtgtgtggtttagtataataaagagcgtataattgagtctggggtaaaacttgggtcagaccaatttcacccacatcctgtttgtcagggtgttatggtccctttcccaa

SEQ ID NO: 918360 - DNA, 690 bp, Homo sapiens
ggcctatgaagaaatacatcacatagggtattatagagattcagttgtaggggattaacaaagagactgcttagttgagtgagtaaactctttagctccttttttgatctatttaattttaggtggtttcatttataaagaccctgggtaaggagcatactccaaaytcttggtgttatcctcccaacagtcataatagtgtctccctggtgcactgtattctctcaaaagttttaaatgtttgcatgcagccatctctgtcatgtcaaatggtctctcttcaactggaatgacaagaactgaaagaaatgtgtggccatgaaggcaccataacctatgaatgacatgctgagaccagaaacccaaaatgatggtaattgagagtggtgctaaggccctaagttttggtcacactctcacctaaggggagacttttaaaacaaaattatgggaggccattgttcaggactgagcacatgcattaggccccaacagatcagaccaaaccaaaatggagctgctggtgctaaatgtcacatcaaactaagactttaagaaaacatacatcctagaacagaccaggttttttttttctcctgtaaacaggacgtctcagcataaagaggtcccctctacactgacccttacaaaaaacgaaataaaataaatgaactgaagtccttgtcccca

SEQ ID NO: 918361 - DNA, 600 bp, Homo sapiens
gttttttttttctcctgtaaacaggacgtctcagcataaagaggtcccctctacactgacccttacaaaaaacgaaataaaataaatgaactgaagtccttgtccccaccttacaaacccactgttctgctatttcccagtgggtttcaagaccaaataagtatatttacaatagtsataatgacatcagtgactaaagttttggtcagtctctcaaaattaagaagatgaccaaaagtggggaattgtttaatcaggtttagcctaaaggtgcctccttacatattttaagttcagcctaaaggtttctctgtacatagtgagctataataattggaggtgtaataagactgtagcctacacttgtgccaatcatcgagttttggccaatgaaatgtagccaactgttcaaaccatgtgcaaataaggcaaacaccaagctgtaaccaatccggctgtttctgtacctcgcttccatttcctgtacattactttccattttctgtccataaatcttccaccatgtggctgcgatggactctctgagtatactttggctcagaaggctgccccattggtgaatagttcaatgcttaatta

SEQ ID NO: 918362 - DNA, 737 bp, Homo sapiens
gaagttctctgaagttcccctatctgcctaaagcccagacctggcaaagaataaaacaattacctctcgtcccttccctgagttttcaactgacctcatatgcaggaagaaagactgaagtctgtcaacacacctggatggacttttgttacaaaccattgtctgggctggaggcccaaagactctgttccaggccactgtatgttcttcaagttcatttaattcccctaaaaatcacttactacccccttaaaatcatccgtatttccccattactctttccctaggaagtaatgtatataatgtgaacccaaaatacctgagacaggttccagtcaatttagaaagtttgttttgccaaggttaaggacaagcccatgacacagcctygggaggtcctgatgacacatgcctaaggtggttggggtacagctttgcttttatacattttagggagatgagacatcaatcaatatgtgtaaaatgtacattggtttgctccagtaaggcaggacaactcaaagtggggacttccaggttagaagtagataaaagacaaaaggctgccttctttttttgtttgtttgttttgttttgttttgagacagagtctcactctgtcaccaggctggagtgcagtggtgcgatctcagctcactccaatctccgtctcccaggttcaagcgattcccctgcctcagcatcccaagtagctgggactacaggtgcccgtcacc

SEQ ID NO: 918363 - DNA, 647 bp, Homo sapiens
tcggtgaattgcctctccaggtaggaaacagggcaagtgagataaattagcttccttatgctgggctggatttcccaaggttctcttgggctgacgcagctcctgaacatgaagccttcagaggggtctgacggtggctcacaagatgggtacgcgacgcacatgcattgttcatttcagtcccagccatagctgtggggatagctgatctgtgtgtcagtgctgaggccatctgattttgagcatcagctttcagacttaaaaaaaagagtcctgatcctttgatcaatgcccaaagccaacctggaggacaggtactgtctgagcctagggatcatctgcctgatatctgagccagagcctccaaaacacccatatagaatagactaaggaactaccatycaggagtggtccaccagtccagtcactggactaatataaaccatccaaacccgcttctttggtgaactttattttttgagacagggtctcccccaggctagagtgcagtggcgtggtcatggatcactgcaatctcaaactcctgggctcaagtcatcctcccacctcagcccttccagtagctaggactataaaagtacaccatcacatctggtttggtggactttaaaaaatcctggagaagg

SEQ ID NO: 918364 - DNA, 585 bp, Homo sapiens
aagctgctctctaccccatccttgctgctccagctctatctgtggcttaaagggcaccaggtagaggttgggctgccacttgggagagcgtaagctaccacagtccttgctggtttgcatgcggtggtaagcccgtggggtatacagaatgtaggagaagggttggcagcttccacttaaactttaggatgtataggaaagcttgggtgcccaggcaaacctgccacaggtgtggatctcctacgcagagactstactagggtagtgccagggaaatgtggggttggagtcaccacacagagtcccttcctgggtactgtctagcggagcttgtagcaatggggcttccctccacaccccagaatggtggcgcctataagcagcatgcaaccttagcctggaagaaccacagaggcagggatacccaagaccttgggcacccaacccctgtactggtgtgtgtgtaggaggagacacatggagtcttaaggattgggagctttaaggcttaagttctgccctgctgggttttagacttgtatgggtcctgttaccacccctttttttgtaaattttccttttaga

SEQ ID NO: 918365 - DNA, 585 bp, Homo sapiens
aagctgctctctaccccatccttgctgctccagctctatctgtggcttaaagggcaccaggtagaggttgggctgccacttgggagagcgtaagctaccacagtccttgctggtttgcatgcggtggtaagcccgtggggtatacagaatgtaggagaagggttggcagcttccacttaaactttaggatgtataggaaagcttgggtgcccaggcaaacctgccacaggtgtggatctcctacgcagagactctactagggtagtgccagggaaatgtggggttggagtcaccacacagagtcccttcctgggtactgtctagcggagcttgtagcaatggggcttccctccacaccccagaatggtggcgcctataagcagcatgcaaccttagcctggaagaaccacagaggcagggatacccaagaccttgggcayccaacccctgtactggtgtgtgtgtaggaggagacacatggagtcttaaggattgggagctttaaggcttaagttctgccctgctgggttttagacttgtatgggtcctgttaccacccctttttttgtaaattttccttttaga

SEQ ID NO: 918366 - DNA, 619 bp, Homo sapiens
accctgtctctactaaaaatataaaaattagccaggtgtggtggcaggtgcctgtaatcccagctactcaggaggctgaggctggagaatcacttgaactcaggaggcagaggttgtagtgaaccaagattgcaccattgctctccagcctgggtgacaaaagttgaaacttcagagcatgaattgtctgaagatagtgagcaccacactcttggctttgtgatgttagaggatatattgtaaaggaggcaatggaattggcagggagagttggacaaaattactttgtctcgacacatcacttgcttcttcctcctttcattgattagtacytttattcagtttcctctttaaatatgcaaaaactaaacttcagaaggatcaggattaaaaaaatgcctctagaacaaggaggaaaaaaatgtgtgtgcatatattccacatccactagtggacttggagtaaaatttgtagcctttaaaaaagtgattcagctctgtaattggagagatgattttaatcattcaataatactctattttctaccttggatcccaattttttccatcttatgtctgtgtatatttcataaacggcataaaatccttttttgggggaa

SEQ ID NO: 918367 - DNA, 702 bp, Homo sapiens
ccccccattgcccttcggtgctgtttcttctgttctttggcagtttggtctccacaaagcagtcttatctgatcattaaagtcagattacaaccctccctccaatgcctctgcatcactgttaaaatcccaaatatgttctgcagcctccaagtcctaacttcctctgacccctgtctacctcctagatgttatctatwaaactcacctgtactcatatccgtgggccacactggatgtcttactcctggacacctcaagtatgtctcaaccacagggtctctgcacctgctgtatgtttcatgggtcacacgttcactttatatttagatccctgctcaaatgttaccccctcagacaggccttctctgatggctgagtctaaaatagcattgcaccttactttccatcccctcccctgctttttgattcattacagtaagtacataacttactatgcatatatattatctgcttattcatatacgtgctttgggatctgttctcccataccatgaaggtcttttgatgagaccttctcctgactcatttaatgctatgtccccagggcttagaacagttcctgacacccacaaaggactagagatattaatcgactaaaatgaatttctagtcactgattaagtaacttgcttttcaacctccattctcataccagacccttcttctgcaactactacaa

SEQ ID NO: 918368 - DNA, 702 bp, Homo sapiens
ccccccattgcccttcggtgctgtttcttctgttctttggcagtttggtctccacaaagcagtcttatctgatcattaaagtcagattacaaccctccctccaatgcctctgcatcactgttaaaatcccaaatatgttctgcagcctccaagtcctaacttcctctgacccctgtctacctcctagatgttatctattaaactcacctgtactcatatccgtgggccacactggatgtcttactcctggacacctcaagtatgtctcaaccacagggtctctgcacctgctgtatgtttcatgggtcacacgttcactttatatttagatccctgctcaaatgttaccccctcagacaggccttctctgatggctgagtctaaaatagcattgcaccttactttccatcccctcccctgctttttgattcattacagtaagtwcataacttactatgcatatatattatctgcttattcatatacgtgctttgggatctgttctcccataccatgaaggtcttttgatgagaccttctcctgactcatttaatgctatgtccccagggcttagaacagttcctgacacccacaaaggactagagatattaatcgactaaaatgaatttctagtcactgattaagtaacttgcttttcaacctccattctcataccagacccttcttctgcaactactacaa

SEQ ID NO: 918369 - DNA, 752 bp, Homo sapiens
gacatctacggggtgtctggggagggcaccgctgtgcaaaggccctggggcaggaccgcacctggcgaggcggaggagcgaggaggaggccagggtggctgccgcagggtgaggaggggagagcaggaggagggagggcggggctgacccagcaggtcgtgaagggccctgaggacacggagaggacacagggttttaccctgagcagggtgggagccacggaggcctctgctggagcagaggagggcacggcctgaattgggtttgaaggaatcgactgagggtaggaaggtgggggtagggaagcccgggggaggcgagcacaccagcccaggtgggcaccacggggcctgggctgggggctgctgtgggatggtcaggagtgggtgggttctgggcctgtcttgaaggcagaactcacaagattttctgagacrctgtggggtgaaggggagtgagaggaggggagggtcctggaagggcgggtgcaacctcaacccagcggaggaccctgctgacctgcttagttgtttatggagggtcattgccgtgctctaccacgtaacacacgtacacacacacacacaggtgcacgtttacaccacgtgggtgcgcacgatgaggcacacacaggcaggcgcgcacacacacgcgtgctcacataggaacacgaagaggcaggagccgggcgtgcccgagccccgtggcgccctgggcatcccaaacaccgcctgcccagaacaggtgcgcag

SEQ ID NO: 918370 - DNA, 700 bp, Homo sapiens
agtgggtgggttctgggcctgtcttgaaggcagaactcacaagattttctgagacgctgtggggtgaaggggagtgagaggaggggagggtcctggaagggcgggtgcaacctcaacccagcggmggaccctgctgacctgcttagttgtttatggagggtcattgccgtgctctaccacgtaacacacgtacacacacacacacaggtgcacgtttacaccacgtgggtgcgcacgatgaggcacacacaggcaggcgcgcacacacacgcgtgctcacataggaacacgaagaggcaggagccgggcgtgcccgagccccgtggcgccctgggcatcccaaacaccgcctgcccagaacaggtgcgcagtgagtgcctgctgagccagtgagtggaatgaagctctacaatagtccagatgacagacatgactgctgtggctgctgccgatccaagtcccaccgttcttttctctagagacaaggtctcactccaccatccaggctggcgcgatcacagctcactgacggtggagaagggtgatcagagaatggtgggaatgaggcggccctgacctcctggggttagcgatcctcccacctcagccccctaaagcaccgggagggcaggtgtgagccacggtgccagccccaagttcccgacattctttcctaaaacacatcctccggctgcagatg

SEQ ID NO: 918371 - DNA, 837 bp, Homo sapiens
aggagttcgagaccagcctggccaacatggtgaaactctattaagggaggagaccatccctcatattgtcttatgcccaatttctgcctccaaagaaagaagtaaaaactaaaaggcagaaatgaaatccacaggcagacagcccggcgctgtgccctgggcctggtagttaaagagcgacccctgacctactgggttacgttatctatagattccagacattgtatggaaaagcactgtgaaaacccttgtcctgytctgttccgatctgattgccggtgcatgcagcccccagtcacgtaccccctgcttgttcaatcgatcacgaccctctcacgcggaccccctgagagttgtgagccctgaagagggacaggaattgctcactcggggagctcggctcttgggacaggagtcttgccgatggccccggccgaataaaccgcttccttctctaactgggtgtctgaggagttttgtctgcggctcttcctgctacactatctctactaaaaatacaaaaaaaaaaggccgggcttggtggctgaagcctgtaatcccagctcctcgggaggctgaggcgggcagatcacgaggtcaggagatcgagaccatcctggctaacacggtgaaaccccgtctctactaaaaatacaaacaattagccgggcgtggtggcaggcgcctgtagtcccagctactcgggaggctgaggcaggagaatggcgtgaacccgggaggcggagcttgcggtgagccgagatggcgccactgcactccagcctgggcgacagagcgagactccgtctcaaaaaaataacaagtaaatcagtgtgg

SEQ ID NO: 918372 - DNA, 837 bp, Homo sapiens
aggagttcgagaccagcctggccaacatggtgaaactctattaagggaggagaccatccctcatattgtcttatgcccaatttctgcctccaaagaaagaagtaaaaactaaaaggcagaaatgaaatccacaggcagacagcccggcgctgtgccctgggcctggtagttaaagagcgacccctgacctactgggttacgttatctatagattccagacattgtatggaaaagcactgtgaaaacccttgtcctgttctgttccgatctgattgccggtgcatgcagcccccagtcacgtaccccctgcttgttcaatcgatcacgaccctctcacgcggaccccctgagagttgtgagccctgaagagggacaggaattgctcactcggggagctcggctcttgggacaggagtcttgcsgatggccccggccgaataaaccgcttccttctctaactgggtgtctgaggagttttgtctgcggctcttcctgctacactatctctactaaaaatacaaaaaaaaaaggccgggcttggtggctgaagcctgtaatcccagctcctcgggaggctgaggcgggcagatcacgaggtcaggagatcgagaccatcctggctaacacggtgaaaccccgtctctactaaaaatacaaacaattagccgggcgtggtggcaggcgcctgtagtcccagctactcgggaggctgaggcaggagaatggcgtgaacccgggaggcggagcttgcggtgagccgagatggcgccactgcactccagcctgggcgacagagcgagactccgtctcaaaaaaataacaagtaaatcagtgtgg

SEQ ID NO: 918373 - DNA, 655 bp, Homo sapiens
ccttaacaagtccagtattgatgccctggacctgacactgtgttaatacattatccaaatgcactctctcatttgattatcaaaccactctgtgaggaaggtactttattttgtactttttttagatggagatttgctcttatcgcccaggctggagtgcaatggcacaatttcggctcacttgcaacctccgcctcccaggttcaagygattctcccacctcagcctcccaagtagctgggattacaggtgcccgccaccatgcccgactaatttctgtatttttagtagagacaaggtttcaccatgttagccaggctggtctggaacacctgacctcaggtgatctgctcactttggcctcccaaagtgctgggattacaggcatcagccaccgcacctggccgatgaaggtactttattattttcatattagagaaggagaaactaggcctttgtaaggccaaagcttacaaagcaagttagaagctaagccagagcttgcactaaggcctgactgaccctggggtctagtccttaaccacagtgctgagccatcttcttaaacttgcacagttaatgtgtaactgaaaccacacctacccacgtgctggctgacaaattccaggtccttcaggcagcatgaatacttcat

SEQ ID NO: 918374 - DNA, 606 bp, Homo sapiens
attatccaaatgcactctctcatttgattatcaaaccactctgtgaggaaggtactttattttgtactttttttagatggagatttgctcttatcgcccaggctggagtgcaatggcacaatttcggctcacttgcaacctccgcctcccaggttcaagcgattctcccacctcagcctcccaagtagctgggattacaggtgcccgccaccatgcccgactaatttctgtatttttagtagagacaaggtttcaccatgttagccaggctggtctggaacacctgacctcaggtgatctgctcactttggcctcccaaagtgctgggattacaggcatcagccaccgcacctggccgatgaaggtactttattaytttcatattagagaaggagaaactaggcctttgtaaggccaaagcttacaaagcaagttagaagctaagccagagcttgcactaaggcctgactgaccctggggtctagtccttaaccacagtgctgagccatcttcttaaacttgcacagttaatgtgtaactgaaaccacacctacccacgtgctggctgacaaattccaggtccttcaggcagcatgaatacttcat

SEQ ID NO: 918375 - DNA, 629 bp, Homo sapiens
tccttcttctacccattcattcattcaacaaacatttatcgagtgcctctgtttgcctgagctcagtttatacactaacatttgatgttagcgtataaattagtgttctgtgtcaaagaagtgcagaacgtactcttggcagaaaggatttaatacaggaaattaagtgcttttaaraatgtgggaaaggccaggcacagtggctcatgcttgtaatcctggcattttgggaggccgaggcgggaggatcacttgaggccaggagttcaagaagcatagcagacgccatctcaactaaaaatcaaaaaaattagccaggcatcatgttatgtacctgtggtcccagctactcgaaagaccgaggtgggagaatcacttgagcccaggaggttgaggctacagggagctgtgttcccgccactgcactccattctgggtgacagagcaaaaccctgtctcaataaatcaataaataaaatattaatagtaatttaaaaaatcaggccaggcacagtggcttacgcttgtaatcccagcactttgggaggcagaggtgggcggatcacttgaggtcaggaatttgagacctgcctggccaatatggtgaaaccccgtctctactaaaaata

SEQ ID NO: 918376 - DNA, 658 bp, Homo sapiens
gggagggaaaccagttcagactggctggagcagagagagggaagggattggttcacatcacaggtcaaggccagctagaatggggccagctccaggatgaggacactgccccccaccagggctgtagggcaggttgatggccaacaccagggcacactctgggatgcacctgattagtgggtgcaggtgttcccactgggtgtgggcagaggaatggggtagttaacagtcacaaatctgtccaggcacagkggctcatgcctgtaataccagcactttgggaggctgaggcaggtggatcaagaagtcaggagatcgagaccatcctggctaacatggtgacaccccgtctctactaaaaataccaaaaaaaaaaaaaaattagctgggtgcagtggtgggcacctgtagtcccagctactctggaggcagaggcaggacaatggcgtgaacctggaaggcggagtttgcagtgagccgagatcacgccactgcactccagcctgggcaacagagcgagactccatctcaaaaaaaaaaagtcacgattctgtgaatactcagttctgagttcgaatcttacctctgtgctcacactgctagcagaatgaccgggtaaatccctgtgcctctgtttcctcctcggtaaaatgggctt

SEQ ID NO: 918377 - DNA, 741 bp, Homo sapiens
gtgagcctggccaagtcaggcaatcctttgggagagagggcttagggcttcctgggatcagagattctccctgctggcctcagaagcagcagccaccgtgatctccacaggtgcaagactacaacttctgccaccaaccacgtgagcatagaggagggaccgcccccagccttccataagacgctagccctgggcaaccccttgaatgcaggctcaagacagaccctgaagcccaacagccctctccccctagctcagccatgctggactcctgacccccagaaactgtgagaggagaaatgtgtgatggctgagtgtggtggctcatgcctgtaatcgcagcactttgggaggccaaggcaggaggatcgcttgagcccaagagttccagaccagcctgggcaatatagtgagacccygtctctacaaaaactttttgttttttttttttgagacggaatctcgctctgtcgcccaggctggagtgcagtggcgctatcttggctcactgcaagctccacctcccgggttcacaccattctcctgcctcagcctcccgagtagctgggactacaggcgcccaccaccgcgcccggctaattttttgtatttttagtagagacgaggtttcacgtgttagcgaggatggtctcgatctcctgacctcgtgatctgcccacctcggcctcccaaagtgctgggattacaggtgtgagccatgcccagcctacaaaaacttta

SEQ ID NO: 918378 - DNA, 690 bp, Homo sapiens
aaacatactagttacttcctccatgcacgccccattctgggaaatgcagggtcccctgagaagacccagccttggccccaaaatagtccctggttggggagatacagatatcctcagcctatggggtcagggcctgaccagagggggacttggggctgcccaggggtacaggcagagaggacttcctggaggagagggcatcagagctagggttttgagggatgcataggagctaggcaggagaaaggatgttaccttctgatggccagcaggcagcctgggccttgaggggtggtgctgggttcctggccacagcactgacggtgaactcatggctytgatccccaccactctctaccagtcaagctcatcctcccgggaacgtctccaccagcttcccttccagccgacgccggacgagctgcacttcctgtccaagcacttccgcagctcagagaatgtgcttgatgaggaaggcggccggtcaccccgcctccgaccccgctctcgcagtctcaggtgggccgcgacctctggccccagccccggcccctccctgggctggtgtggaggcccaagttgtggctcctccttcaccccagccctgaccctgcctgagcctagcctctgattcttgtccctcaaccctggctcagatcccccaacatcctcccctggggttggtctcag

SEQ ID NO: 918379 - DNA, 599 bp, Homo sapiens
tcagccgggcgcggtggctcacgcctgtaatcccagcactttagaaggctgaggtgggcagattacttgaggtcaggagttcaagaccaccctggccaatatggtgaaaccccggctctactaaaaatacaaaaattagctgggcatggtggtgcgcgcctgtaatcccagctactcgggaggctgaggctggacaattgcttggacccaggaagcagaggttgcagtgagccaagattgtgccactgcactccagcttgggcaacagagccagactctgtaaaaaaaaaaaaaaaaaaaaaaaaaaaagaaagaaagaaaaagaaaagaaagtwtaaaatctctttgggttaacaaaaaaagatccacaaaacaaacaccagctcttatcaaacttacacaactctgccagagaacaggaaacacaaatactcattaactcacttttgtggcaataaaaccttcatgtcaaaaggagaccaggacacaatgaggaagtaaaactgcaggccctacttgggtgcagagagggaaaatccacaaataaaacattaccagaaggagctaagatttactgcattgagttcattccccaggta

SEQ ID NO: 918380 - DNA, 648 bp, Homo sapiens
tgccccatagactgcatacaggtcccattgtgtccggacttggtgggttcttggtctcactgacttcaagaatgaaatcgcagaccttcacggtgagtgctgtagcgagttctacagttcttaaaggcggcgtggccggagtttgttcctgacgttcggatgtgttcggagtttcttccttctgataggttcgtggtgcggctggctcaggagtgaagctgcagaccttcgcsgtgagtgttacagctcctaaggcggcgcgtactggagttgtttgttcctcccggtgggtttttaatctcactggcttcaagagtaaagctacaaaccttcatggtgagtgctacagctcataaagtcagtgtggacccaaagagcaagcagcagccagttttactgcaaacagcaaagcttgcatagtgtgtaaggcaaccacggctggcttcggcagcccgctgttattcttttatctggccccacccgcatcctgctgattggtccattttacagagagctgattggtccgttttgacagggtgctgattggtgcgtttacaatccctgagctagacacaaaagttctccacgtccccactagattagctagatacagagtgtccattggtgtatttacaaaccctgagctag

SEQ ID NO: 918381 - DNA, 648 bp, Homo sapiens
tgccccatagactgcatacaggtcccattgtgtccggacttggtgggttcttggtctcactgacttcaagaatgaaatcgcagaccttcacggtgagtgctgtagcgagttctacagttcttaaaggcggcgtggccggagtttgttcctgacgttcggatgtgttcggagtttcttccttctgataggttcgtggtgcggctggctcaggagtgaagctgcagaccttcgccgtgagtgttacagctcctaaggcggcgcgtactggagttgtttgttcctcccggtgggtttttaatctcactggcttcaagagtaaagctacaaaccttcatggtgagtgctacagctcataaagtcagtgtggacccaaagagcaagcarcagccagttttactgcaaacagcaaagcttgcatagtgtgtaaggcaaccacggctggcttcggcagcccgctgttattcttttatctggccccacccgcatcctgctgattggtccattttacagagagctgattggtccgttttgacagggtgctgattggtgcgtttacaatccctgagctagacacaaaagttctccacgtccccactagattagctagatacagagtgtccattggtgtatttacaaaccctgagctag

SEQ ID NO: 918382 - DNA, 648 bp, Homo sapiens
tgccccatagactgcatacaggtcccattgtgtccggacttggtgggttcttggtctcactgacttcaagaatgaaatcgcagaccttcacggtgagtgctgtagcgagttctacagttcttaaaggcggcgtggccggagtttgttcctgacgttcggatgtgttcggagtttcttccttctgataggttcgtggtgcggctggctcaggagtgaagctgcagaccttcgccgtgagtgttacagctcctaaggcggcgcgtactggagttgtttgttcctcccggtgggtttttaatctcactggcttcaagagtaaagctacaaaccttcatggtgagtgctacagctcataaagtcagtgtggacccaaagagcaagcagcagccagttttactgcaaacagcaaagcttgcatagtgtgtaaggcaaccacggctggcttcggcagcccgctkttattcttttatctggccccacccgcatcctgctgattggtccattttacagagagctgattggtccgttttgacagggtgctgattggtgcgtttacaatccctgagctagacacaaaagttctccacgtccccactagattagctagatacagagtgtccattggtgtatttacaaaccctgagctag

SEQ ID NO: 918383 - DNA, 703 bp, Homo sapiens
cgccaaccagccaaaaacattggtacacaagcaaaagaaaacctaggccaggcacggtggctcacacctgtaatcccagcacttggggaggccgaggcgggtggatcacctgagaggtcaggagttcaagaccagcctggccaacatggtgaaaacccatctctactaaaaatacaaaaaattagccgggtgtggtggcccgcgcctgtagtcccagctactcgagaggctgaggcaggagaattgcttgaacccaggaggcgggggttgcagtgagccagaatcccaccattgcactccagcttgggccacagagcaagactatctcaaacaacaacaacagcaacgaaaataaaaaacagaaaggaaaagaaaacctaggctgggcatggtgactcccgtctgtaatcccagcactttgggaggctgaggcgggcagatcacctgaggtcgggagtgtgagaccagcctggcccccatggtgaaaccctgtctctactaaaaatacaaaaattagccagatgtggtggtgcacgcctgtaatcccagctacctggcaggagaatcrcttgaacccaggaggcggaggttgcagtgagccaagatcatgccaccacgccactgcattctggcctgggtgacagagtgagactctgtctcaaaaaaaaaaaaaaaaaaagaagaaaatctaagtgaaaactgc

SEQ ID NO: 918384 - DNA, 588 bp, Homo sapiens
tgctgcccagtctgttctccagctcctggactcaagtgatcctcccaccttggcctcccaaattgctgggattattgacatgaaccaccatgcccagcccagagcctctttttcatatgattattggccatctaggcttttttttcctataaggttcataacctgtgccaaattttctgttgggttggttgtctctcttcttgatttgcagaagacctttacatattctggataccaatttgctgattatattgcagatatttcctccatattgtgcatatctgttatttatttatttatttatttatttatttatytatttatttatttttgagacagggtcttgctctgtcactcaggctggagtgcagtggcccagtctcagctcactgcaacctctgcctcccaggttccagtgattctcccacctcagccttccaagtaactgggactacaggcatacgccaccacacctggctaatttttgtattttttgtagagacagagttttgccatgttgcccaggctggtctcaaactcctcagctcaagtaatctgcctgcctcagtctcccaaaatgctgggatt

SEQ ID NO: 918385 - DNA, 556 bp, Homo sapiens
aggctcctcaaaaaattaaaagtagaactacagaggatctagcaatcccactactgggtatatatccaaatgaaatgaaaccagcatgtcaaagagatatctgcactcccatgttcattgcagcattattcacaatagacaagatatagaatcaaactaagtgcccaacagtggatgaatggataaagaaaatctgatacatatatacagtggaatactattcagccttaaaaagaaggaaatcctgtcatttttgacaacacgaacaaacctggaggacaatatgttaagtgaaataagacaggcatagaaaggcaaatactrgccaggtatggtggctcacacttgtaatcccagcactttgggaggttgaggcaggaggattgattgaacccaggagtttgaaaccagcctggacaacatagtgagaccctgtgtctattattttaaaaattttaggctgggcaaggtggctcatgcctgtaatcccagcactttgggaggctgaggcgggtggatcacttgaggtcaggagttcgagaccagcctggacaac

SEQ ID NO: 918386 - DNA, 689 bp, Homo sapiens
gtaacgactaaacctcatgtggtatcctggggggcgagctggaacagaaaagggacattagaggaaaactggcaaagccaaaggaacagtggcgtttagctaatagtgatgtacccgtgctggttccttagctacaaccaatgtacacagcagcgtaagatgtgaaccttcggtgaagctgggtaccatgtgtaaaggaacactrctatctttgcaactttcctgtaagtctaaacattttttttttttttgagacagagtctcactctgtcaccaaggctggaatacagtggtgcaatcttagttcactgtaactttccctcccaggttcaagtgattctcctgactcagcctcccaagtagccgggattacaggcgtgcgccactgtgctcagctaattttttatatttttagtagagacagggtttcactatgttggccagactggtcttgaacccctggcctcaaatgatctgcccaccttggcctcccaaagtgctggggttacaggcgtgacccactgcacctggcctgtaaatctaaaattctaaaataaaaagttcttttttattgtatttatttagagacagggtcttactccgtcacccaggcctggagtgtgttggcatgatcacggctcactgtagcctccacctcctgggctcaagtcatcctcccttctcagtct

SEQ ID NO: 918387 - DNA, 729 bp, Homo sapiens
gccctcagtcccagtgaccctctgagctgcaggcccggcaatgcctgttgccagcacaggcctctgcccggcagctcaggccagcctggggccggagttctcaggaaacctccccctcaggccctggattctccttagtgttgcacgtgacgttcccctcaagggtaggccttctgggtcacatggtcctaaaggcccactcagaatccagcaccttctcagagcctgcatcccccaaaaccaggccactcagggcctgggggccagccttgcccatgatttccctcaggatctgctcccccagtctctccaggacccggcctgtcccagagggcatagagcttgtgtccccctaaaacaggcgccctggtggcctcagggctggacccggctgctgagccactggccacgcaggkcccggatctcctggccatagcactcgtgcagccgggcgaagggggccatgtccaggggcccgtggggtgccgaggcccggcggcgaggcggtggtggagggggctcgggtccaggcctgaaggtggcctcagtgctccagacagcgcagccattctccttgggcgggagggcactgggccggcggggcaggggcagggctgggaccggggctggggcagaaggcagggatgggactggggccagggcagagggcagggacgggggcaagggcagggactggggctggggctggggcagggccatgccaccccc

SEQ ID NO: 918388 - DNA, 729 bp, Homo sapiens
gccctcagtcccagtgaccctctgagctgcaggcccggcaatgcctgttgccagcacaggcctctgcccggcagctcaggccagcctggggccggagttctcaggaaacctccccctcaggccctggattctccttagtgttgcacgtgacgttcccctcaagggtaggccttctgggtcacatggtcctaaaggcccactcagaatccagcaccttctcagagcctgcatcccccaaaaccaggccactcagggcctgggggccagccttgcccatgatttccctcaggatctgctcccccagtctctccaggacccggcctgtcccagagggcatagagcttgtgtccccctaaaacaggcgccctggtggcctcagggctggacccggctgctgagccactggccacgcagggcccggatctcckggccatagcactcgtgcagccgggcgaagggggccatgtccaggggcccgtggggtgccgaggcccggcggcgaggcggtggtggagggggctcgggtccaggcctgaaggtggcctcagtgctccagacagcgcagccattctccttgggcgggagggcactgggccggcggggcaggggcagggctgggaccggggctggggcagaaggcagggatgggactggggccagggcagagggcagggacgggggcaagggcagggactggggctggggctggggcagggccatgccaccccc

SEQ ID NO: 918389 - DNA, 704 bp, Homo sapiens
actcttttttgctgcacatccaggctgtttaagaaaaggcttaaggcagcttaagcacaaagaatgtcatcttcaaacattgtaatggcatcttctttttgggacactgaagtattcccatgattccaagaatcaaatgaacaacatctggttatggggtctctggtctctgccaaggcaaactcataaagcatttcaaagcccttcatctggaaaggccttttctccaccccacacccagccaatgcccactcatactttaaggcccagctcatccgtcatctctgctagggaaccttcctcagtgccttatgcaggcaaccattcctgccttgtgttgtgtgagtgccttaagtcaaatccttaactcatctttgtgtgtccccttgcatttcagacagtaggtgcccaataartgtttgtgggatgaatcaaccggttattctcctgaacaccctttcccagtacacctccactcgccagaacaactgtcttcctcacaggtgccagccatcaccccgaccacaccctctcaaaaggcctttgccagtcatcaaacaaagcctcttgtctcctgagagccgctccacaatcaccttcccaagaagaattccccataccgagtctaccattccttccctgatcaaagttgctttcacaggcatctgttcagctatccactcttcacggcttggttttcatgc

SEQ ID NO: 918390 - DNA, 704 bp, Homo sapiens
actcttttttgctgcacatccaggctgtttaagaaaaggcttaaggcagcttaagcacaaagaatgtcatcttcaaacattgtaatggcatcttctttttgggacactgaagtattcccatgattccaagaatcaaatgaacaacatctggttatggggtctctggtctctgccaaggcaaactcataaagcatttcaaagcccttcatctggaaaggccttttctccaccccacacccagccaatgcccactcatactttaaggcccagctcatccgtcatctctgctagggaaccttcctcagtgccttatgcaggcaaccattcctgccttgtgttgtgtgagtgccttaagtcaaatccttaactcatctttgtgtgtccccttgcatttcagacagtaggtgcccaataagtgtttgtgggatgaatcaacyggttattctcctgaacaccctttcccagtacacctccactcgccagaacaactgtcttcctcacaggtgccagccatcaccccgaccacaccctctcaaaaggcctttgccagtcatcaaacaaagcctcttgtctcctgagagccgctccacaatcaccttcccaagaagaattccccataccgagtctaccattccttccctgatcaaagttgctttcacaggcatctgttcagctatccactcttcacggcttggttttcatgc

SEQ ID NO: 918391 - DNA, 406 bp, Homo sapiens
tgtattactactagcccctgctattattatttttgagatttaacctggaaccctctgcccctacacaacaggcctgtcactttcaaatatgtaatcaatacatagacttccatattctgagtaattatcttccatccactgacccctccgagtctgtcgcttccacattacaccctctgcaatatatgaagacagttgccacatacccttcaatcttctattatccaattaaatatcccaagtcccttcatgyactccttatgggaacagtgtccagggttccccattcattcttttttagaatgccaagacacatttccctgggctccatctgtcctgaacaatatagaatgggtctattatcccttttattttggaaacaatttcaacagatgcacctaagagc

SEQ ID NO: 918392 - DNA, 620 bp, Homo sapiens
cttaacaagcctgagcctaacctgacccaggagttttgtcagacctggggggagagagatatccaactccagccacctctagtcatcctgtcccacctatggggtaaaataaaattaaatttaaaaaggcaaaaaacacagtttgaggtgagaaggcaaacattagcaccagactgaggtatggcaaggatgttgaaattttcagactaggaatttaaaataactatgattaatatggtaatttcactaatgatcaaagtagacagcatgcaaaaatagatgactaatatataaacagagagatcaaaattctaagaaagaataaaaagatatgctatagatsaaaaacactgttacagaaatgaataatgcctttgagggggttattagtagactggacttggatgagaaaaaaacctgagcttcaggatatatcaatagaaacttctataactaaaagacaaagagaaaaagatttaaaaaaagaacagaatattcaaaaactgtgggacaattataaaaggcgtaatgtatgtgtaatgaacataccagaatgagaataaagagagaatggaatagaagaaatgcctgaagcaataataacttggaatatccccaaa

SEQ ID NO: 918393 - DNA, 581 bp, Homo sapiens
aagctggaagtcatcattctcagcaaattaacacaggaatagaaaatcaaacaccgcatgttctcactcataagtgggagttgaacaatgagaacacatggacacaaggaggggaacatcacacacctgggcctcttggggcaggggcagagggttggggaaggggagggagagcattaggacaaatacctaatgcatgcagggcttaaaacctagatgacaggttgataggtgcagcaaaccaccatggcacatgtatacctatgtaacaaacctgcaygttctgcacatgtatcccagaacttaaagtaaaatttttttaaaaagactaatcttattgtaggaatattactatgattattagtatgaattcacctccataaaaatacttgaaaaggaaatttgtgttttttacttacattttatatttttgcacatattgttagggtcagcctttttttgttttttttctttttttgtgagacgaagtttctctcgtgtcacccaggctggagtgcagtggcgctgtctcagctcactgcaacctctgcctcccaggttcaagcgatcctcctgcctca

SEQ ID NO: 918394 - DNA, 581 bp, Homo sapiens
aagctggaagtcatcattctcagcaaattaacacaggaatagaaaatcaaacaccgcatgttctcactcataagtgggagttgaacaatgagaacacatggacacaaggaggggaacatcacacacctgggcctcttggggcaggggcagagggttggggaaggggagggagagcattaggacaaatacctaatgcatgcagggcttaaaacctagatgacaggttgataggtgcagcaaaccaccatggcacatgtatacctatgtaacaaacctgcatgttctgcacatgtatcccagaacttaaagtaaaatttttttaaaaagactaatcttattrtaggaatattactatgattattagtatgaattcacctccataaaaatacttgaaaaggaaatttgtgttttttacttacattttatatttttgcacatattgttagggtcagcctttttttgttttttttctttttttgtgagacgaagtttctctcgtgtcacccaggctggagtgcagtggcgctgtctcagctcactgcaacctctgcctcccaggttcaagcgatcctcctgcctca

SEQ ID NO: 918395 - DNA, 668 bp, Homo sapiens
ctcactctttgttaagtcccacaattaccattgttcctggcccggacctcaatctggcctcccacattattcctgataccacacctgacccccatgactgtatctctctgatccacctgatgttcttcccatttccccacatttccttcttycctgtttctcaccctgatcacgcttgatttattgatggcagttccagcaggcctaatcaccacacagcagcaaaagcaggctatgctatagtacaagccactagcccgcctcttagaacctcatttcctttccattgtggaaatctatcctcaaggaaataacttctcagtgttccatctgctattctgctactcctcaaggattcttcaggccccctcccttccctacacatcaagctcaaggatttgcccccgcccaggactggcaagttagctttactcaacatgcaccgagtcacaaaaactaaaatacctcttagtctaggtagacactttcactggataggtagaggcctttcctacagggtctgagaaggccacacagtcatttcttcccttctgtcagacataattcctcagtttagccttcccacctctatacagtctgataacagaccagcccttattagtcaaatcagccaagcagtttctcaggctcttagtattcagtgaaac

SEQ ID NO: 918396 - DNA, 668 bp, Homo sapiens
ctcactctttgttaagtcccacaattaccattgttcctggcccggacctcaatctggcctcccacattattcctgataccacacctgacccccatgactgtatctctctgatccacctgatgttcttcccatttccccacatttccttctttcctgtttctcaccctgatcacgcttgatttattgatggcagttccagcaggcctaatcaccacacagcagcaaaagcaggctatgctatagtacaagccactagcccgcctcttagaacctcatttcctttccattgtrgaaatctatcctcaaggaaataacttctcagtgttccatctgctattctgctactcctcaaggattcttcaggccccctcccttccctacacatcaagctcaaggatttgcccccgcccaggactggcaagttagctttactcaacatgcaccgagtcacaaaaactaaaatacctcttagtctaggtagacactttcactggataggtagaggcctttcctacagggtctgagaaggccacacagtcatttcttcccttctgtcagacataattcctcagtttagccttcccacctctatacagtctgataacagaccagcccttattagtcaaatcagccaagcagtttctcaggctcttagtattcagtgaaac

SEQ ID NO: 918397 - DNA, 627 bp, Homo sapiens
ctttgttaagtcccacaattaccattgttcctggcccggacctcaatctggcctcccacattattcctgataccacacctgacccccatgactgtatctctctgatccacctgatgttcttcccatttccccacatttccttctttcctgtttctcaccctgatcacgcttgatttattgatggcagttccagcaggcctaatcaccacacagcagcaaaagcaggctatgctatagtacaagccactagcccgcctcttagaacctcatttcctttccattgtggaaatctatcctcaaggaaataayttctcagtgttccatctgctattctgctactcctcaaggattcttcaggccccctcccttccctacacatcaagctcaaggatttgcccccgcccaggactggcaagttagctttactcaacatgcaccgagtcacaaaaactaaaatacctcttagtctaggtagacactttcactggataggtagaggcctttcctacagggtctgagaaggccacacagtcatttcttcccttctgtcagacataattcctcagtttagccttcccacctctatacagtctgataacagaccagcccttattagtcaaatcagcc

SEQ ID NO: 918398 - DNA, 627 bp, Homo sapiens
ctttgttaagtcccacaattaccattgttcctggcccggacctcaatctggcctcccacattattcctgataccacacctgacccccatgactgtatctctctgatccacctgatgttcttcccatttccccacatttccttctttcctgtttctcaccctgatcacgcttgatttattgatggcagttccagcaggcctaatcaccacacagcagcaaaagcaggctatgctatagtacaagccactagcccgcctcttagaacctcatttcctttccattgtggaaatctatcctcaaggaaataacttctcagtgttccatctgctattctrctactcctcaaggattcttcaggccccctcccttccctacacatcaagctcaaggatttgcccccgcccaggactggcaagttagctttactcaacatgcaccgagtcacaaaaactaaaatacctcttagtctaggtagacactttcactggataggtagaggcctttcctacagggtctgagaaggccacacagtcatttcttcccttctgtcagacataattcctcagtttagccttcccacctctatacagtctgataacagaccagcccttattagtcaaatcagcc

SEQ ID NO: 918399 - DNA, 763 bp, Homo sapiens
atatctcctggtgctatccccaaactgccactcttaactcttgaagtaaataaataatctttgctggcaaggctatgctgaatctccttaggtactctaattagatgtcctaggtcctcccaattcttagacctttaatacctgtttttctccttctcttattccgtttagtttttcaattcatacaaaaccgtatccaggccatcaccaataattctaaatgacaaatgtttcttctaatagtcccacartatcaccccttaccacaaaatcttccttcagcttaatctctcccactctaggttcccacgccgcccctaatcccgctcgaagcagccctgagaaacatcacccattatctctccacaccacccccaaaaattttcaccgtcccaacactttaccactatttcattttatttttcttattaatataagaagacaggaatgtcaggcctctgagccgaagctaagccatcatatcccctgtgacctgcacgtacacatccagatggccggttcctgcctcaactgatgacattccaccacaaaagaagtgaaaatggcctgctcccgccttaactgatgacattgtcttgtgaaattccttctcctggctcattctggctcaaaagctcccctgctgagcaccttgtgacccccactctgcccaccagagaacaaaccccctttgactgtaattttcctttatccacccaaatcctataaaatggccccacccttatctcccttcgctgactct

SEQ ID NO: 918400 - DNA, 654 bp, Homo sapiens
attacctcccttttgccatgtaacaacatatttacagattctgggtattaatatgtggatatctttaggaggccattattacgtctaccatattttctaatacataaactcattttccacacatcagccagagtaatctttttaaaaacataaatatgttcatgacacttccttcaatgtgttaccactcctstaaggataaagttcaaaatcctaaacatgtgcctcaaatccatgcatggcctggttcctacctcctgggcttgtcttctggtgcactgtgtcccagccacataggcttctctctttttctcaagcaccaagctcctttctttctcaggatctttgctcacactatctctgctgtctgaacagctctccccaccttccagccaacctttacctggctaacgcttgctcaatccttcagatctctataaaagttactttcacagggtggcctttcctgattgcccagtctagtattagctccccctacactgtcatagtactctttttctttcatatctttttatcacaatttaaattaaatgtatttgcataattatttgtttaatatctgcctgcctgcaccagactgcaaacccataaaggctggagcctagtctgttctgttcaccactgtaaaccctg

SEQ ID NO: 918401 - DNA, 584 bp, Homo sapiens
ctgttggagtttgctggaggtccactccagaccctgtttgcctgtgtatcagcagcggaggctgtagaacagcgaatgttgccgaacagcaaatattgctgcctgatccttcctctggaagctttgtctcagagggatacccggccatgtgggtgtcaaggctgcccctacgaggcggtgcctcccagttaggctacttgggggtcagggacccacataaggaggcagtctgcccgttctcagatctcaaactccatgctgggagaaccactrctctcttcaaggctgtcagacagggacatttaagtctgcagaggtttctactaccttttgtttggccatgccctgcccccagaggtggagtctacagaggaaggcaggcctccttgagctgcggtgggctccacccagttcgagcttctgggctgctttgtttacctactcaagcctcagcaattgtgggcacccatcccccaggctcgctgccaccttgtagttccatctcagactgctgtgctagcaatgagcgaggctccgtgggcgtgggaccctccaagccaggtgcaggatataatctcctggtg

SEQ ID NO: 918402 - DNA, 629 bp, Homo sapiens
agcggcagcaagacggtgcagtgaaggagagtgggcgtctggcggggtccgcagtttcagcagagccgctgcagccatggccccaatcaaggtgaccgctggcccggccgggcctgacatcccccactacccccatggcaatccccgtcccgctagtctgagagtatcgccttatttcctgcctgccagacccctcccckccgcccgcccggctcatcccttcagaaggccctcgtggctgcccacctttctcgccaatcgtgggggcctcacctcccgggacagtcccgaggcattgtgttttttgttttttgtttttttttgagacggagtctttctgtgtcgcccaggctggagtgcagtgacgcaatctctgctcactgcagcctccgcctcccgggttcaagcgattctactgcctcagcctcctgagtagctgggactacagatgcgagccaccacgcccagctattgtatttttagtagagacgggatttcaccccgttgttcagattggtctcgaactcctgacctcaggtgaaccccccccgcccccccccgcctcggcttcccgaagtgctaggattacaggtgtgagacaccactcccggcctgatttcccctatctt

SEQ ID NO: 918403 - DNA, 682 bp, Homo sapiens
gaactcgcccgtgacctgacctgccccacaggagcttcggctgagctggcccggctgctggaggaccggctgctgacaaggcagttgctggcccagcagggtggtgtggctgtgccagcaaccctggctttcacctacaagccgccggggctgctgcggggaggggatgccagcctagggctacggctggtggagctgagtggcaaagagggccaggagacgctggtgaaagaggaagtggaggcttttctgcgctccgaggccctgggtgatwtcctgcaggtaacagactctcgcccaccctgaggtctgtacagatgccagcaggatgggacccaggcacggttaccaagtctggctggaaaggtgtccctacctcttagccctgccgctgccctgccccatctctggggcaatcccctgcccttttgcctcagtttactcaccggctcctgtggcggaagtgccccaccctgcagtacctggggtggtgtccaggaggcccctttcccctccttgctgcaggtagctgtgaagctcagtggctggcgctggcgggggcggcaggcatggcgtctgcacccgcgggcagagctgggtgcagtggtggacacagtgctggcgctgctggagaagctggaggaggaggagagtgtcctggtggaggctgtgtacccacctg

SEQ ID NO: 918404 - DNA, 603 bp, Homo sapiens
ttgaatctactatatgtagttgatataatttcttctgaaattcttaccattagattcattcaattattgttgaaccatcgtattaggagaaacactatcattcttgaaaagtgtggtcatgacatgtgcaatacccatttgataaggaaatcttgagcagagaaactaacataaaaattgctccagaagtcacaaaatgtgctattcctctgacaaacagaaactaccacatgggaatacctccacaacccagtgccatggcagtacttttttgaaaggcaactcacacttgagaaaagttcacatcctcaaattacaaaacrtatagaacacacatggaaactcactagcaagagtgccagtaggcacaagaaatgataaaattcacatctaaggaactacaaataacaaagcaatttaaaagggacttttacattaaattaataaaaagaaagacattttgaaagaaaacattcaaaataagagaataactttcacagaataaaaacattataaaggaatataaaaggagaacaggctgttgcaaaaagagtcaaaaaaaggaattcttaaaaaaaagaaaaaaatagaatcattgaaatt

SEQ ID NO: 918405 - DNA, 595 bp, Homo sapiens
ggtttgaaatattttcattttctctagcaagtgcatgttcccctctgaaatattatttaaactaccaatttgcataacattttactcacacttaaagatcaacctcaattcagcaaagtcatacattctgaatggattgtgttatcacytacaatctcatctttttactctgattatgagagtcacaaggaaagaaaatgaacatcatcagtggaccagcaaagcctagaattcaaatctgccactctagctcaagattctatcatttttactttaattttagttccattttgaaagccatgaaaactaccaatttgattaggttgttttagatatttgagggttgtggggagagggcagaaacactcctaagagctcagtcattttaaacagtaagtatttcaaagcaattttcagagtgacccaaactggtacacaagtaagcgaccttggctggatagtcgcttacagtggctcacacctgtaatccgagcactttaggaggccgagggggatggatccctgaacccaggagttcgagaccagcctgggcaacatggcaaaaccctgtctctacaaaaaacaccaaaaaaaa

SEQ ID NO: 918406 - DNA, 545 bp, Homo sapiens
agcagagcctcggtctcagaggcccaattaagggacctaatgcaaactgttgttttccacaacgcgtggttcccagaaaaagtcacgttagacctagagctctgggaacagtgggaaaaagtcttaaacaacatcgtgcgcaagggcaacgggtcccagtaacatctttaatgttatgggccttagttagggctgctttggccccactctacacagaagagcctaaaaagggaggggaggaagaaccatcatctaccttatcacctcctcctcctccctcagcccctccattaccaggtaaaggtgccacagaggagagaaaggttttccctgagtcctcctcctccaataaattagaaaaaaggcaagggatacactacagttatgggaccctgtcttaggcaagtggcattagaaggggaactcttgtcctgcctggtgatgcaaggtcaacaaggcaatyagttacatgaacccgttactttcaagacttataaagagataagaaaaagcattagagaaaacggagctgctagcccatttat

SEQ ID NO: 918407 - DNA, 586 bp, Homo sapiens
ctgagtcaaactttcagatctacacagtgcagggccttcttttcaaattggaacaacctccttatgagttagtgagtgaatgattactacagaggagaagcagaggctatatcagactatatatattcataatttttgacctccaaataatggtagttagaatcmcatcaatgacaccttcctccatctggttgaaaatgatcattcaggtctatttttgtgtatgccaattgcactttaagtgatgaagaccctttccagtgcggttcacaatctgcacgtcacctgctcctggcatcgtcaccagcccttcatgctgcagcccctccttcccacatctctgttcatacagtacccatctatctttatataatcaaacttcctgtgtattttacttctctcttcccacccttgcccacgtcggtacccatgtcctactcatctcccaggcatcttctcaggaaccttttcttcatcatctacagtaagcaatgtgcctccataatgcacccccataatgcccatgttttgtagagcccagtgcatctgaattgatttgcttaacctagtgcatctgcattgattt

SEQ ID NO: 918408 - DNA, 520 bp, Homo sapiens
acgcagctccttgggagggaagggggtctgggtccaattggattgcttgccctcatatagaacacagaactcataaaaatggatatgtgaggaagagaggtgctaaactcatcatggccagtggtccttacatttcttactgcaactagctcttcagcaaatgctaaaagccatctttcaagatcccgagtctggccaggtgcagtggctcatacctgtaaccccagcactttgggaggctgagaccggtggttcaaaaccaacctgaccaacatggtgaaaccccgtctctgctgaaaataccaaataataataacaaaaataaaattttttaaaaatcccgggtctgcctgtatmccccgacaccatcaccaccggggatcacatagactactttttccttctctgcttctcttaggtgcctagaacatcggcactctttggggtttcaaacgttcacttctaacttggcttttgtttcttttttgagatggaatttcgctcttgttacccaggctgg

SEQ ID NO: 918409 - DNA, 605 bp, Homo sapiens
gcatggtggcgcatgcctgtaatcccagctactcaggaggctgaggcaggagaatcacttgaacccgggaggcggaggttgcagtgagctgagatcatgccattgcactccaacctaggccacaagaatgaaactccayctcaaaacaaaacaaaaccccaaggctatcagtaacatcaacttttagtgcctcagttttatcgtctgtaaaatgagactaataattactacctacctcattggagtgccatgcagaccaaaatactgtttagcagtaggcacggtgttcagcacatgctgggtcctgaatgcttgcatgcctctggatctcccaaaaacacagtgggaggaaagaataaaaaaaaaaaaacacaaaatacaggaaccaggcttccaaatattcacagtcatgtacttcgacttaacaaaatgattaaattagatagtttttaaaccaaaaggttaatttgaaaatttattttcaaggaaagttccctgtggcttacttataatataatgggggagtatgagaaaaagttaatagctttgtaattataccaattttccattgtaaaaatattattctcatttattagtctgtcaag

SEQ ID NO: 918410 - DNA, 639 bp, Homo sapiens
actataatagagtaagggactgtcatcagaattaaacaacataatgcaggtgaaaccattatcacggtgctgggcacacagtgggtcctgggaatggtgggtgtcggaaggacgttgcactcatcagcctatcccaatgccccattttatggtcaataaaacaaagccttgtcactgcattctgcctttaaaagaagaaaragaaagaaagaaagaaagaaagaaagaaagaaagaaagaaagaaagaaagaaagaaagaaagaaagagaaagaaagaaagaaagaaagaaagcaaagcccagaggcttgctcagtattgctcagtaattagtgacagagatggtattgacactaaggactcctgagtcctgatcctgttctggaacattctaaaatagcctggtccctaggtgggactgttggctggccagagaacacagaccctataacccccatcccttacctataaaggactgctgttaggagatttctcccagataggctccgtgtcttgaaatgttttggtctttaacctgcctgtagtacatagttcattcatttgtccacttcaagtccatctgaagtgtccgcacctgctgaagagtttatctgaccagtgggaaagaatcagcctgagt

SEQ ID NO: 918411 - DNA, 773 bp, Homo sapiens
aaataaaatcctttgcagacaagcaaatgctgagggattttgtcaccaccaggcctgccttacaagagctcctgaaagaagcactaaatatggaaaggaaaaaccggtaccagccactgcaaaaacataccaaaatataaagaccaacaacactgtgaaaaaactgcatcaattaatgtgcaaaaataaccagctagcagcatgatgacaggattaaattcacatgtaacaatattaaccttaaatgtaaaagggctaaatgtcacaattaaaagacacagactggcaaattggataaagagtcaagactcatcagtgtgctgtattcaggagacccatctcacgtgcaaagacacacatgggctcaaaataaaaggatggaggaatacttaccaagcaaatggaaagaaaaaaaaaaaaaaaacaggggttgcaatcytagtctctgataaaacagactttgaaccaagaaagatcaaaaaagacaaagaagggcattacataatggtaaagggatcaatgcaacaagaagagctaactatcctaaatatatatgcatccaacacaggagcacccagattcataaagcaagttcctagagacctacaaagagacttagacttgcacacaataatagttggagacttttaacaccccactgtcaatattagacagatcaacaagacagaaaattaacaagaatattcaggacttgaactcagctctggaccaagcagaactaacagacacctacagaactctccaccccaaat

SEQ ID NO: 918412 - DNA, 553 bp, Homo sapiens
cctcacttcctatttctgcacgtcacttccctttttttgtctataaatcttccaccatgtggccgcgctggagtttctctgaatctgctgtgattctgagggctgccgaattcgtgcatcgttcattgctcaattaagctcctttaaatctaactcagatgaagtttttcttttaacactttccaaaggccaaactcctttttgtcgcctgcttcttgctcatgtctccagcttactgccagtccctcttgcacactgactctggcagtactgagtggctttctgttccctgagtgcccgggtctcccacttctgctaatgtggtttcccctgagtagaatggctgttagcctggcttcctcccacttctctttggggactcagccaaaatgtcacttcccccttctccrggcccagtttggttggccagaccccctgctgcatcatagaacctatcacattgggttatacctcaattgtccacgttgcctgctagtctacaagctctgtgagggcatggatcacgtcttttcgggaggttaagtactgcata

SEQ ID NO: 918413 - DNA, 720 bp, Homo sapiens
aggcctcagtgacacttggtttacctccctgtggcctcggtagcacttggtccatttccatgagttcttatcatgctatgccttgtgtacccagcatggcaccctacatttcttgactaactcatgttactcaataaacattgattgaacacctacatgtgccaggtatattctaggactaatgatagaacaatgaacaaagctccattctagtgagggaaagcaataaacaaaataagtaagtaaaatagtctcagcgcgtccrgtatcaacaaccaaacagaggaagggaggaagggagaaagggagtgaagggggtgaaagtaggctcctgttttacatcagatggccaacgatggcctctccaagaaagaagtcagggaccaaggaggggtgtgtctggtacattcaagaaatggcaaggaattgcaggtgggagggtaccatagtacaggcactttgataaacagtttggtggctcctcaaaaagttagcattaactgctttggatgctggtggggaaaaatgttagagttattatttgatccagcaattccactcctagacatacccaagagaaatgaaaacatatgttcacacaaagacttgtacatcagtgttcatagcagcattattcataatagtcaaatgtggaaacaacccaaatgcccatcaaccgatggtgaataaataaaacatggtatcaccaggtaatggaat

SEQ ID NO: 918414 - DNA, 593 bp, Homo sapiens
taattttcactcctctatgttcttgtattgcatggttataccaccatctacttttgaatttcctgtgaacggacatttagcctacctattattttttacgattattaacgttgctagtgtgaacattcttgtgcatatcttttttgtgcacatgaacgagaacttctctagaacatatccgcaaastggaactggtgagtcgtggcatgaatgcataatcgcttcttctatttattatcaatttattttccaaaatcattgagtcaaatgacattcccaccagcagggtctgtttcattatcttcccaacacttagcattaaaagactttttaatttttgttaatctgatggatgtgaaatatctcatttctctgcctatttagtgaggtttaatatctatttatttaccacccatgcatatttcagcttctgtgaaatataattttctatctttcatccctttttgagggattatttgtctttttcataaagatttgtagaaattctttgtgtatcctgggcacttatcctttgtgggttctctagatttcaaatatctttttctagcctgtgtcttgtctttcattttttc

SEQ ID NO: 918415 - DNA, 565 bp, Homo sapiens
aaaccttatctgaatctccagcctgctagccacactgtatattttggatttgctagcctccgcaattgcatgagccaattccttaaaataaaaataagtttctctgtctctccccgccatacctcctccctctctctttctcactccctgtcctctttcccttctccattcccttcttccctcccgctgtcttccccttttcccttctctccccctctccactcttatccctcaccttctctctctccccacctccttcttttcctccttcctactttcttccccattctatttctcgggaaaaccctgactaatatgggtgacccaattcttttgcatcctcaccggcattttatatatatatatatatatatatatatatrtgtgtatatatgtatatgtatatacgtgtgtatgtgtatatatgtgtgtacatatgtatatgtgtgtatatatatgtgtatatgtgtgtgtgtgtgtgtatatatatatttaaattctctttatttttattttttagtagagatgggttttgccacgttgcccaagctggtcttgaactcct

SEQ ID NO: 918416 - DNA, 608 bp, Homo sapiens
tgataggagtatctttgtttgcttgggaccttgggccaggcagagtaacagtgtgatttatggtgtgggttttgagccatggcagcaatgtgctagaaggtggacactttgaatcacgtggtctcagcttgccttcctgamaggctggagacagaggtgagccacatgggaagtcaactgcttaggcgatggagctccagtaaaagctctggaagtcaaggcctgagtaagattccctgtagggcaatactcgtgtattgtcacacattggtggaatgagagtaatgctgtcctgactccatggggaaagaataactggggtcttcacatattttatttttaagactgagtcttgctttgtcactcgggctagagtacagtgctgtggtcttggctcactgcaaactactcctcccaggttcaagcaattctcctacctcagcctccagagtagcagggactactggtgcctgccaccacacccagctaatttttgtatgtttttagtagagatggggtttcgctgtgttggccaggctggtctggaactcctgacctcaggtgatctgctcacctctgcctcccaaagtgttgggattacaggcaag

SEQ ID NO: 918417 - DNA, 645 bp, Homo sapiens
tttttttaaattttattatgaatatgtttgtaggtgtatatgtataaacatatctgtatacataaaatatccttaatatatctttgttttcttccttgttatccccttatcctataacataagatgtattagctttatattatagtatttaagctacaggatgtcaaggaggagaatgaacattatccaagsactttggatcttcttctaaagaaaggcttagtgcactttcagttgtatgcagaatagttgtatcgttaggtgggagtatgattttgtagttatctttacttggatattaagtatggtttaaaaagatgtgtatggatggcaagttgacaagggttggactgggagtgttaattgaatgtgtcactttggctggccttggtgttcacctgtttggtcaaacactccatgttgctatgaaggtattttgtagatgcgactatcatttacaatcagttgactgtaagtaaagaagatcatcctagaaaatgtggatgggcttcctccagtcagttgaaggcctttagggcaaaaagggcgatttcccggagaagaaattctacctcaagtccgtagcacggaaattcaacctgagtttccagcctgcctggctgccctacagatttcaaacttgcc

SEQ ID NO: 918418 - DNA, 645 bp, Homo sapiens
tttttttaaattttattatgaatatgtttgtaggtgtatatgtataaacatatctgtatacataaaatatccttaatatatctttgttttcttccttgttatccccttatcctataacataagatgtattagctttatattatagtatttaagctacaggatgtcaaggaggagaatgaacattatccaaggactttggatcttcttctaaagaaaggcttagtgcactttcagttgtatgcagaatagttgtatcgttaggtgggagtatgattttgtagttatctttacttggatattaagtatggtttaaaaagatgtgtatggatgscaagttgacaagggttggactgggagtgttaattgaatgtgtcactttggctggccttggtgttcacctgtttggtcaaacactccatgttgctatgaaggtattttgtagatgcgactatcatttacaatcagttgactgtaagtaaagaagatcatcctagaaaatgtggatgggcttcctccagtcagttgaaggcctttagggcaaaaagggcgatttcccggagaagaaattctacctcaagtccgtagcacggaaattcaacctgagtttccagcctgcctggctgccctacagatttcaaacttgcc

SEQ ID NO: 918419 - DNA, 645 bp, Homo sapiens
tttttttaaattttattatgaatatgtttgtaggtgtatatgtataaacatatctgtatacataaaatatccttaatatatctttgttttcttccttgttatccccttatcctataacataagatgtattagctttatattatagtatttaagctacaggatgtcaaggaggagaatgaacattatccaaggactttggatcttcttctaaagaaaggcttagtgcactttcagttgtatgcagaatagttgtatcgttaggtgggagtatgattttgtagttatctttacttggatattaagtatggtttaaaaagatgtgtatggatggcaagttgacaagggktggactgggagtgttaattgaatgtgtcactttggctggccttggtgttcacctgtttggtcaaacactccatgttgctatgaaggtattttgtagatgcgactatcatttacaatcagttgactgtaagtaaagaagatcatcctagaaaatgtggatgggcttcctccagtcagttgaaggcctttagggcaaaaagggcgatttcccggagaagaaattctacctcaagtccgtagcacggaaattcaacctgagtttccagcctgcctggctgccctacagatttcaaacttgcc

SEQ ID NO: 918420 - DNA, 645 bp, Homo sapiens
tttttttaaattttattatgaatatgtttgtaggtgtatatgtataaacatatctgtatacataaaatatccttaatatatctttgttttcttccttgttatccccttatcctataacataagatgtattagctttatattatagtatttaagctacaggatgtcaaggaggagaatgaacattatccaaggactttggatcttcttctaaagaaaggcttagtgcactttcagttgtatgcagaatagttgtatcgttaggtgggagtatgattttgtagttatctttacttggatattaagtatggtttaaaaagatgtgtatggatggcaagttgacaagggttggactgggagtgttaattgaatgtgtcactttggctggccttggtgttcacctgtttggtcaaacactccatgttgctatgaaggtattttgtagatgygactatcatttacaatcagttgactgtaagtaaagaagatcatcctagaaaatgtggatgggcttcctccagtcagttgaaggcctttagggcaaaaagggcgatttcccggagaagaaattctacctcaagtccgtagcacggaaattcaacctgagtttccagcctgcctggctgccctacagatttcaaacttgcc

SEQ ID NO: 918421 - DNA, 589 bp, Homo sapiens
actcctctttacttatgcaaatttctggagctggcttgaatttctcctcagaaaatgggtttttattttatatcacattgtcaggctgcaaactttctgaacttttatgctctgttacctttataaaactgaatgccttaaacagcacccacgtcacctttttgaatgctttgctgcttagaaatttcttccagtaggtatcctaaaycatctctctcaagttcaaagttttacaaatctctagggcaggggcaaagtgccaccagtctctttgctaaaacatgactagagtcacttttcctccagttctcaacaaattcctcctcatctctacctgggaccaactcagcctggaccttattgtccatatcactctcaggcttttgttcaaagccattcaacaagtctctaggaagctccaaactttcccacatttttctgtcttcttctgagctcttcaaactgtttcaacctctgcctgttacccagttccaaagttgcttccacattttcaggtatcttttcagcaacaccctacctactctgctgataccaatttattgtattagttcattttcatgctgctgat

SEQ ID NO: 918422 - DNA, 624 bp, Homo sapiens
cgagtaagcttggattacaggcacgtgccaccactcctggctaattttgtatttttagtagagacagggtttttccatgttggtcaggctggtcttgaactccagacctcaggtgatccgcccaccttggcctcccaaagtgatgggattacaggtgtgagccaccgcacccagcttttcttttcttttcttttgtttttgagacagagtcttgctctgtcgcccaggctggagtgcagtggagcaatctcggctcactgcagcctcygccccgtgggttaaagtgattcttctgcttcaccctcccgagtagttgggtctacaggcgtgcgccaccacgctcggctgattttacaggtgtgagccaccatgcccggccttgcatctgtatttctaaataaaatacttgaatgtgtttgtggcagttaagataaaatttgtctttaacagatcccaaataacagtggcttacataagggaaatttccttctctctcctataaatgtctggagggtaggtagtccagggaaggtgtggcagctctgctccatgaagctctcagggacccaggatgcttccgtcttgtggctcatgagcatgccttccattgtgaatgttccctta

SEQ ID NO: 918423 - DNA, 624 bp, Homo sapiens
cgagtaagcttggattacaggcacgtgccaccactcctggctaattttgtatttttagtagagacagggtttttccatgttggtcaggctggtcttgaactccagacctcaggtgatccgcccaccttggcctcccaaagtgatgggattacaggtgtgagccaccgcacccagcttttcttttcttttcttttgtttttgagacagagtcttgctctgtcgcccaggctggagtgcagtggagcaatctcggctcactgcagcctctrccccgtgggttaaagtgattcttctgcttcaccctcccgagtagttgggtctacaggcgtgcgccaccacgctcggctgattttacaggtgtgagccaccatgcccggccttgcatctgtatttctaaataaaatacttgaatgtgtttgtggcagttaagataaaatttgtctttaacagatcccaaataacagtggcttacataagggaaatttccttctctctcctataaatgtctggagggtaggtagtccagggaaggtgtggcagctctgctccatgaagctctcagggacccaggatgcttccgtcttgtggctcatgagcatgccttccattgtgaatgttccctta

SEQ ID NO: 918424 - DNA, 671 bp, Homo sapiens
agctgacttgctatttttaggtagaacttccaagccagtgaatggatttttaagcagccctggggaggagtgccctgaataacgacatttaggtcaaccatactgcatatacaacaggggtcccctaagatgataacaccacattgtcagccaggcacagtggctcacgcctrtaatcccagcactttgggaggcagaggcgggtggatcacttgaggtcaggagttcaagaccagtttgaccaacatggtaaaaccccgtttctactaaaaatacaaaattagctgggcatggtggtgcacgcctgtaatcccaactacttgggaggctgaggcaggagaatcacttgaacctgggaggcagagattgcagtgagccgagatcatgccattgcactccagcctgagtaacaaagatgcgactccgtctcaaaaaaaaaaaaaagtattctcactgtacctttgctatgtttagatatgctaatacttaccagtgtgttccaattgcctacaatattcagtacagtaacaggctgtatagctttgtagcctaggagcaacagactgtaccacagggcctaggtaggtagtaggatatcccatcaaggtttgtgtacactatgacgttcacacaacaaaatccactaatgacacatttctcagaatgcatcc

SEQ ID NO: 918425 - DNA, 363 bp, Homo sapiens
tgccagtgcgctggcactgagggcaggaggaatcaggtttcccaggctggtggggcagggctggccaccgggggaagcggaagtagaagggaagcgaccctctggccaccccaacagcactatcctggagagggccaaagaggcggtacagccgcccagagaccttcccaagttgccaagtttgtcccacacatcggtgatccacgcaagaaagaggatrcagggagggatcaaagaagacccaggggcctgggcacctccaagtacacctgatatctgaatgcacagagggcatggaggggttggtcagggatgaacaataaacagggttctacctctgccaggctcccgtcactgcttccc

SEQ ID NO: 918426 - DNA, 731 bp, Homo sapiens
agcatgctgggcgaatggttcatgcctgcaatccaagcactttgggaggctgaggcgggaggattgcttgagaccaggagtttgagaatagcctgggcaacatagtgagactctgtctctaccaaaagtaaaaaaaattagaccagacacagtggctcgtatcggtaatcccagcactttgggaggccaaggtgggtggatcacaaggtcaagagatcgagaccatcctggccaacatggtgaaaccccgtctctactgaaaatacaaaaattagccgggtgtgatggtgagcgcctgtagtcccagctactcaggaggctaaggcaggagaatcacttgaacccggraggcagaggttgcagtgagccgagattgtgccactgcactccagcctggtgacagagcgagattccgtctcaaaaaaaaaaaaaaaaatacaggcatggtggctcatgtctgtagtcccagctactcaggaggctgatgtgggaggatcatttgagcctgggaggtcaaagctgcagtgggctgtaaacacagcactgcacctagccttggcgacagagtgagaccctgtcttagaaatgactgcaattatctaggagatacaaaaaaaactaatgaacactttaaggaataacatgtaatttcttatttacattcaattatcaagatatagatgcagaaaaattttaaaggaactaacgcccagtgtcaattacattctaaa

SEQ ID NO: 918427 - DNA, 731 bp, Homo sapiens
agcatgctgggcgaatggttcatgcctgcaatccaagcactttgggaggctgaggcgggaggattgcttgagaccaggagtttgagaatagcctgggcaacatagtgagactctgtctctaccaaaagtaaaaaaaattagaccagacacagtggctcgtatcggtaatcccagcactttgggaggccaaggtgggtggatcacaaggtcaagagatcgagaccatcctggccaacatggtgaaaccccgtctctactgaaaatacaaaaattagccgggtgtgatggtgagcgcctgtagtcccagctactcaggaggctaaggcaggagaatcacttgaacccgggaggcaraggttgcagtgagccgagattgtgccactgcactccagcctggtgacagagcgagattccgtctcaaaaaaaaaaaaaaaaatacaggcatggtggctcatgtctgtagtcccagctactcaggaggctgatgtgggaggatcatttgagcctgggaggtcaaagctgcagtgggctgtaaacacagcactgcacctagccttggcgacagagtgagaccctgtcttagaaatgactgcaattatctaggagatacaaaaaaaactaatgaacactttaaggaataacatgtaatttcttatttacattcaattatcaagatatagatgcagaaaaattttaaaggaactaacgcccagtgtcaattacattctaaa

SEQ ID NO: 918428 - DNA, 584 bp, Homo sapiens
gccagaacttccaatactatgttgaataggagtggtgagagagggcgtccttgtcttgtgctggttttcaaagagaatgtttctgcttttgcccattcagtatgatattggctacgggtttgtcataaatagctgttattattttgagatatgttgcataaatacctagttcattgactgtttttagcatgaaggggtgttgaactttattgaaggcattttctgcatctcttgagataatcatgtggtttttgtgactggttctgtttatatgatggattacatttattgatttgcatatgttgaacctgccttgcatcccggggatgaagccaagttgatyatggtggataaactttttgatgtgctgctggattccgtttgccagtattttattgaggatttttgcatcaatgttcatcaggaatattggcctgaaattttctttttttattgtgtctctgccaggttttggtatcaggatgatgctggcctcataaaatgagttagggaggagtccctctttttctattgtttggaatagtttcagaatgaatggtaccagctcccctttgtacttctgg

SEQ ID NO: 918429 - DNA, 500 bp, Homo sapiens
tttggtcctgagctttttttggttggtaggctattaattatggcctcaattcagaacttgttattggtcaattcagggattcaacttcttcctggtttagtcttgggaggttgtaggtgtccaggaatttatctatttcttctagattttctagtttatttgcgtagaggtgtttattatattctccgatggtagtttgtatttctgtgggatcagtggtgatatcccctttatcattttttgttgtatctatttgattcttctctcttttcttctttattagtctgactagaagtctatctattttgttaatcttttaaaaaaaacagctcctggattcattgattttttttgmagggtttttcatgtctctatccccttcagttctgctctgatcttagttattttgtgtctcctgatagcttttgaatttgtttgctcttgcttctccagttcttttaattgtgatgttagggtatcaattttagacctttcccgtt

SEQ ID NO: 918430 - DNA, 645 bp, Homo sapiens
tcccagctactccgaaggctgaggcaggagaatcgtgcgaacctgggaggcaaatgttgcagtgagccgagattgcgccattgcacgccagtctgggcggcagagcaagactccatctcaaaaaaaaaaaaaaaaaaaaaaaaagaatcacgggggggtgtacacaccattcgatattgggagtaatatcatcccctttccccctaaatattaggaacaatatcacaggaagcgtgtacatcccctgcgatattgggagtaatatcacactttcttcycctaggtattactaacaatatcacagggggagtgtacatcccctgcgatattgaaagtaatatcatcctctttcttcatggatattaggaacaatatcataaaggtggtgtacaccccctgtgatattgggagtaatatcgtcctctccccccatcgatattaggaacaataacacagggttggtgtacaccccttgtgatatttggagaaatatcataatctccccaacctggatattaggaacaatatcacagaggggaggacaccccctggaatattcacagtaacatcatcgtttcctttcctggatattgggaataatattatcctctccaccctggatattaggaacaatatcacaagagg

SEQ ID NO: 918431 - DNA, 645 bp, Homo sapiens
tcccagctactccgaaggctgaggcaggagaatcgtgcgaacctgggaggcaaatgttgcagtgagccgagattgcgccattgcacgccagtctgggcggcagagcaagactccatctcaaaaaaaaaaaaaaaaaaaaaaaaagaatcacgggggggtgtacacaccattcgatattgggagtaatatcatcccctttccccctaaatattaggaacaatatcacaggaagcgtgtacatcccctgcgatattgggagtaatatcacactttcttctcctaggtattactaayaatatcacagggggagtgtacatcccctgcgatattgaaagtaatatcatcctctttcttcatggatattaggaacaatatcataaaggtggtgtacaccccctgtgatattgggagtaatatcgtcctctccccccatcgatattaggaacaataacacagggttggtgtacaccccttgtgatatttggagaaatatcataatctccccaacctggatattaggaacaatatcacagaggggaggacaccccctggaatattcacagtaacatcatcgtttcctttcctggatattgggaataatattatcctctccaccctggatattaggaacaatatcacaagagg

SEQ ID NO: 918432 - DNA, 823 bp, Homo sapiens
agacacagaccgagacccaggaggtttacacaatctagccttgagaaaccaggaaaggtgggagttccgttggtacattcccccagtaagggggctgaattcaggtgttatacgagttgttaagaaattattttgggcagacagggaggaaaaggggtccttgggaagttttgtttcttyttaaagcagctccagaaatgagtcttgtctagcaggaaagccccggcttttagagttctccggtaaccttgatctgcagatgccggccattagaaactgggtccacccaaacatagcgattcccgccctcttctggcccttgtccccacctgtgcctggcgatatggccacccccatatatccccatgagtgtaggaaatcagggtgtccggcacgtgcatattcaaaggctaggtgggagggccagtttttccgtgggccacataaatgacatgcctggtcgaaccaatcgcctgaaccctatgcaaatcagacaccgccccctccagtttcttcatataactcattggtatccacagcactccgggtttcctcttttggctttggagcccccctccctctgtctcagtatggggagctcttccttcgttcttgcctattaaactgcacgccataaaaccactgtacatgtgtttgtgtcattttctccaattctgtgtgagacatgagccctggtgttcctccactcatcacagccatatcacagggagccagacagcctcatcctgtggtccccatcatcacagcacttctcaagtcccacgggcttggaataccagccaagcagtggcaagatagcaag

SEQ ID NO: 918433 - DNA, 642 bp, Homo sapiens
ctgtcactctgtatgaacagtccataacccttcggccaccctccacctatgcgctggaacccaaatgcwctcacctactccagaacatcatttgtcccctgtctcttctgctgcatcatcaacttctacttttgactatattattcccacatacaaacatgctgcaattctcccatttcaggggaaaaaagtttctctttaccccacttcaccaccagctaccatcccatcttctggtcccctttatgataaaactatgaaaagcataatttatatcagtgctgtccagtagccatataatgtgagccacatctgtcattttaatttttctagtagccacatgaaaaaaatttaaaaagaaacaaatgaaattaattttaataataaatttttggagttattttcagatataggccatttttatgccccagttctgtacagccccaatttctcctccttccatcctcttttgaacccacgtctcagggttttgccttcaccactcaactgacactgctcttatcaaagtctccaataatttgctctatctagaggtcaattctcagcctatcacttgcttgacctgtcacactgtattagtcaatgttctctaaagggacagaactaattggacagatgaat

SEQ ID NO: 918434 - DNA, 642 bp, Homo sapiens
ctgtcactctgtatgaacagtccataacccttcggccaccctccacctatgcgctggaacccaaatgctctcacctactccagracatcatttgtcccctgtctcttctgctgcatcatcaacttctacttttgactatattattcccacatacaaacatgctgcaattctcccatttcaggggaaaaaagtttctctttaccccacttcaccaccagctaccatcccatcttctggtcccctttatgataaaactatgaaaagcataatttatatcagtgctgtccagtagccatataatgtgagccacatctgtcattttaatttttctagtagccacatgaaaaaaatttaaaaagaaacaaatgaaattaattttaataataaatttttggagttattttcagatataggccatttttatgccccagttctgtacagccccaatttctcctccttccatcctcttttgaacccacgtctcagggttttgccttcaccactcaactgacactgctcttatcaaagtctccaataatttgctctatctagaggtcaattctcagcctatcacttgcttgacctgtcacactgtattagtcaatgttctctaaagggacagaactaattggacagatgaat

SEQ ID NO: 918435 - DNA, 614 bp, Homo sapiens
ttgaagggctctcctggaatccaggcagggagacagcctcatccacttggcgacccttctagtttgaaacaatcgccttctgttgagtccaagtctgcctccctataatttgagcccatgagtcctagtttttcccacagtgacaactataccacttataaaatggcatttcccaccattttcttaaaaaatacctgggtgcttgttaaaaaaacagaacaaacaaaatattctctagtcctacatcatacccagcaaatcaaatacagggaaagccctgggattcctttttctttttcttcttcttctttttttttttttttttttttgagatggagtctcactctgtcacccaagctggagtgcagtggcacaatctcggctcactgcaacctctgcctccagggttcaagcaatccgcctgcctcagcctctcaagtagccaagtagctggrattacaggcacccaccaccatgcctaattttttttgtattttagtagagacagggtttcaccatgttggccaacctggtctcaaactccccacctcagttgatccactcaccttggcctcccaaagtgctgggattacaggcatgagccatggtgccca

SEQ ID NO: 918436 - DNA, 596 bp, Homo sapiens
gacctcaaggaatttagttccaaagggatctcatgttttcccaaattgcatccttcctcttgagtttccactctgagaatagcaccattaccccatcacccaagctggaaatttgggcatcttcctaaacatcccacactctctcattcctcaccrcccacgaagtcacctccttcttgatacctctcaaatctgcccctctctctttacccaatgctgctgtcctcaccatttctcatttgaacacttgctgggggaaaaacgtaatttctcctcaaccctcataagttcgtagtaggggcagacccctgaaacaaaaaataagcaagtttattaatgtgtgtaatgcacagcaatgccagagaaacttcaatgaaaggtgactcaaagcagtgacttagaacactggcttatgtagtaccttaaacaaaaaacaataaatctgtagagaaatgacaggacaaagagaagcagtcttaggctttcaaaggtaggaaactatgggaaggtaaacagatgaaaattaactaacagagcaaggctcgtttgtagatttctttcctggagctgtctccagtaaaggagaatttatattc

SEQ ID NO: 918437 - DNA, 640 bp, Homo sapiens
ctgtcctacctcaggggtatatcaactctctggctttgtgtcataatcttattcagagagaccttgatcactttttgcttccacaagatatcactctggtccattacattgacgttatgctgattggatccagagaacaagaggtagcaaacacactggacttactggtgagacatttgcaagccagaggataagaaatccaactaaaattcagggaccttctaccccaataaaatttctaggggtccagtggtgtggggcctgttgagatattccttctaaggtgaaggataagttgctgcatttggcccctcctacaaccaagaaagaggcacaacacttagtgggyctatttggattttggaggcaacacattcctcatttgggtgtgttactccggcccatttattgagtgacccgaaaggctgccagttttgagtggggtccagaacaggagaaggttctgcaacaggtccaggctgctatgcaagctgctctgccacttgggacatatgatccagcagatccaatggtgcttgagttgtcagtggcagatagggatgctgtttggagcctttggcaggcgcccataggtgaatcacagtggagtactctaggactttgcagcaaggccctgtca

SEQ ID NO: 918438 - DNA, 634 bp, Homo sapiens
atgtgagtccgtatgtgttaggtgagtctcccgcaggcagcagagagttagttggtgagttcttatccattctgcagttctgtatctttcaagtggaacatttaggccatttacagtcaatgttagtattgagatgtgaggtaccattgcattcattgtgctatttgttgcttgcatacctcggttttttttttgtttttgctttttaacttgcatttttgttttataggttctgtgtgatttacgctttaaagagtttctgtttgtatgtgtttccaggatttgtttgaagatttagagctccttttagcagttcttatagtggtggcttggtagtggcgaattctctcagcatttgtttgtctgaaaaagactgyatctttccttcatatatgttgcttagttttgctggatacaaaattcttggctgataattgttttgtttgaggaggctgaagatagggccccaatcccttctagctttgcagggtttctgctgggaaatctgctgttaatctgataggtttcctttataggttacctgagtgtttttgtctcacagctcttaaaattattttctttgtcttaactttagataacctgatgacaatatgcctagatgatgatcgttttg

SEQ ID NO: 918439 - DNA, 606 bp, Homo sapiens
ttatttgcatgtctaggtctctagcaaggccagggaagttttcctcgattactcccccaaatatgttttcaaaacttttagatttctcttcttcctctggaacactgattattcttaggtttgttcccttaacataatcccagacttcttggaggctttgttcwtattttcttattgtttttctttgtctttgttggattgggttaattccaagaccttgtcttcgagctctgaatttctttttctacttattcaattccattgctgagactttccagagcattttggatttctataggtgtgtccaatatttcctgaagttttggttgattttctttatgctatctatttccttgaatatttctcccttcacttcttgcatcgttttttgtatttccttgcattgggctttgcctttctctggtgcgtccctgattgcttgataagtaacctcctgaattgtttttcaggtaaatcagggatttcttcttcttggtttggatccactgctggtgagcaagagtgatttttggggggtgttaaagagccttgttttgtcatattaccagagttggttttctggttccttcttatttgggtaggctc

SEQ ID NO: 918440 - DNA, 606 bp, Homo sapiens
ttatttgcatgtctaggtctctagcaaggccagggaagttttcctcgattactcccccaaatatgttttcaaaacttttagatttctcttcttcctctggaacactgattattcttaggtttgttcccttaacataatcccagacttcttggaggctttgttcttattttcttattgtttttctttgtctttgttggattgggttaattccaagaccttgtcttygagctctgaatttctttttctacttattcaattccattgctgagactttccagagcattttggatttctataggtgtgtccaatatttcctgaagttttggttgattttctttatgctatctatttccttgaatatttctcccttcacttcttgcatcgttttttgtatttccttgcattgggctttgcctttctctggtgcgtccctgattgcttgataagtaacctcctgaattgtttttcaggtaaatcagggatttcttcttcttggtttggatccactgctggtgagcaagagtgatttttggggggtgttaaagagccttgttttgtcatattaccagagttggttttctggttccttcttatttgggtaggctc

SEQ ID NO: 918441 - DNA, 606 bp, Homo sapiens
ttatttgcatgtctaggtctctagcaaggccagggaagttttcctcgattactcccccaaatatgttttcaaaacttttagatttctcttcttcctctggaacactgattattcttaggtttgttcccttaacataatcccagacttcttggaggctttgttcttattttcttattgtttttctttgtctttgttggattgggttaattccaagaccttgtcttcgagctctgaayttctttttctacttattcaattccattgctgagactttccagagcattttggatttctataggtgtgtccaatatttcctgaagttttggttgattttctttatgctatctatttccttgaatatttctcccttcacttcttgcatcgttttttgtatttccttgcattgggctttgcctttctctggtgcgtccctgattgcttgataagtaacctcctgaattgtttttcaggtaaatcagggatttcttcttcttggtttggatccactgctggtgagcaagagtgatttttggggggtgttaaagagccttgttttgtcatattaccagagttggttttctggttccttcttatttgggtaggctc

SEQ ID NO: 918442 - DNA, 606 bp, Homo sapiens
ttatttgcatgtctaggtctctagcaaggccagggaagttttcctcgattactcccccaaatatgttttcaaaacttttagatttctcttcttcctctggaacactgattattcttaggtttgttcccttaacataatcccagacttcttggaggctttgttcttattttcttattgtttttctttgtctttgttggattgggttaattccaagaccttgtcttcgagctctgaatttctttttctacttattcaattccattgctgagactttccagagcattttggatttctataggtgtgtccaatatttcctgaagttttggttgwttttctttatgctatctatttccttgaatatttctcccttcacttcttgcatcgttttttgtatttccttgcattgggctttgcctttctctggtgcgtccctgattgcttgataagtaacctcctgaattgtttttcaggtaaatcagggatttcttcttcttggtttggatccactgctggtgagcaagagtgatttttggggggtgttaaagagccttgttttgtcatattaccagagttggttttctggttccttcttatttgggtaggctc

SEQ ID NO: 918443 - DNA, 562 bp, Homo sapiens
ttgattgtcgtaaatcctatgaagtcacgcacatctggacacaggtttctccaggaggaatgtactgtttcaccatgatggctttcacagctttttatacgatgatggcctcttcaatgatgtaatccttccagactcttcaagatgttctaatcagggttctctttttttttttttttttttttgagatggagtcttgctctgtcacccaggctggagtgcagtggcgcgatctcactacaacctycacctcctgggttcaagcaattctcctgcctcagcctccaaagtagctggaattacaggcatgcgccaccatgcccagccagggttctctttcatagcactgacaatttcatagagtactgtgtgtaatgagcctgggggcaagtagacgactttgacgcccttggtgttaactcgtggggctctgagtgcctgcagcattgaagaactttaaaaaggtgtaccttactggcaaggtacatcctgacttcaaggacaaggcatcaatggaattaatccagaaaaagcgttcttgtccagacgttgtacaaccaaa

SEQ ID NO: 918444 - DNA, 599 bp, Homo sapiens
ataggtttgtagccttggaaccataggttataccatacagccttaggtgtatagtaggatccgccatctaggttttggaattacactctgtgatttttgtacaatgacaaaatcacctagaatcacatttctcacaacattcccatcgttaagaaacacctggccgggcgcggtggctcaagcctgtaatcccaacactttgggaggccgaggcgggtggatcacgaggtcaggagatcaagaccatcctggctaacacggtgaaaccccgtctctactaaaaatacaaaaaaattagccaggtgtggtggcgggtgcctgtagtcccagctactcgggaggctgaggcaggagaatggcgtgaacccgggaggaggaacttgcagtgagccgaaatcgaaccactgyactccagcctgggcaacagagtgagactccatctcaaagaaaaaaaaaaaaaaaaaaaaaagaaacacctgactgtattaaactgttttaataatattgtctgatccatgaagatctgcatattttaatatgctaccaaatgagatatccagtgatacttgccccagccaaaataaagtatgtgtataaga

SEQ ID NO: 918445 - DNA, 607 bp, Homo sapiens
aaacccctgataaacccatcagatctcacaagacttattcactattatgagaatagcatgggaaacaccagtccccatgatttaattacctcctcctgggtccctcctacaacatatggaaattctgagagatacaattcaagttgagatttgggtggggacagagccgaaccatatcattccatccctggccctttcaaatctcatgtcctcacatatcaaaaccaatcatgccttcccaacagtcccccaaagtcttaattcatttcagtattaacccaaaagtccacagtccaaagtctcatctgagacaagacaagtccctaccgcctgtaagcctataaaatcaaaagtaagctagttaacttcctagatacaatggaggtatcagtattgggtaaatatagctgttccaaatgggagaaattggctgaaagaaagtggttacarggcccatgcaagtctgaaatccagcagggcagtcaaattttagggctccaaaatgatctcctttgactccctgtctcacatccaggtcacgctgatgcaagaggtgggttcccatggtcttgggcagctccactcctgtcgctttgcagggtacagc

SEQ ID NO: 918446 - DNA, 737 bp, Homo sapiens
tggcactgagtgtctgcagcttttccaggtgaacggtgcaagctgttggtggatctaccattctagggtctggaggacagtggccctcttctcacagctccactgggaggtgccctagtagggactctgtgtgggggctccgatcccacatttccgtctgcactgccctagcagaggttctacatgagtgccctgctcctgcagcaaacttctgtctgggcatccaggcatttccatacatgttctgaaatctaggtggaggttcccaaacccaagttcttgactattgtgcacctgccggctcaacaccaagtggaagctgccaaggcttggggcttacaccttctgaggctacggcccgagttctacattggcccctttcagccatggctggagtaactgggacacagggcaccaagtccctaggctgcacacagtacagggacccttttcttctaggtctctgggcctgtgatgggaggaagtggcccaggaaaccattttcttctaggcctctggacctgtgatgagaggggctaccatgaagacctctgatgtgscctggagacattttccccattgtcctggggattaacatttggttcctcattacttatgcacatttctgcagccagcttgcagaaaataggtgtttcttttctatcacattgtcgggctgcaaattttctgaacttttatgctctgcttcccttataaaactgaatgtctttaacagc

SEQ ID NO: 918447 - DNA, 737 bp, Homo sapiens
atacgggaggctgaggcaggagaatagcttgaaccacctgggaggcagaggttgcagtgagccaagatcctgccattgcactccagcctgggaaacaatgagactccatctgaaaaaaaaaaaaaagaaaggaaggaaggaaggaaggcaggaagggaaagaaaagaaaatcagttttcaaactcagagcttcctggagatgtgaataggtatggatttgtgcactgcactgcaaaaatctatcgataagattaagtccctttgccataaaacaaagtgtcagtgacattgcatggaacgctctcaggtggaacactaataacatgatatagacgtagtcagtcttttctaacttctaattagtatactacrttaagagtatcaatgaaaccccaacaaaaatacacggcaacaaaacacatataatttcccaaaatatttctgagccttttataacaaattaacttggcacaaagatgaataaaagattgtctataataatgaacagaactgcattccactatatcatgaaaagtcaaaccacatgatttctctttttcaatttcttgaggcctttctttatctcctcgggtcttccaaaatgactagttgctccgtagaaatgaactcaaggatttgttcaccagacacctttgttaggaaagctctttgagattccaaaatactcttccgccatttccttctccatcttccttcaaaaagccttcctctaatta

SEQ ID NO: 918448 - DNA, 569 bp, Homo sapiens
ggggggaaaatgctgcaaggagaaggtagtctccaatttgaccaattttgtgaccatttgaactgggtgaaaagccttctgcccagaactcagggaagggcatgaatccagtgttcagacttcacaggcaggggaagaaataaaaccctgttctttctcagaggggaggtgggtagcctggagcaagttctcaagccctgttcacccactgcctggaaacagactcaggctgttacgtggggcacggtaagactgagtccagcccttcagatcatgtgggagctgggtgaggactgtgactgccgactttcccccactgccctgataacctgcatgactcagcaagggaagtcataatgctcctaggtacacaactccattgacttgggaaccwcgtccagttcctctacagcagcctcagcaagacctacccaatgacagtctgagctcagacatgcctggtactgaccccacctgatgggccttccctatccaccctggtagctgaagacaaagggtatatactcttgggagttctagggccccacccactgccggttcctctcaat

SEQ ID NO: 918449 - DNA, 569 bp, Homo sapiens
ggggggaaaatgctgcaaggagaaggtagtctccaatttgaccaattttgtgaccatttgaactgggtgaaaagccttctgcccagaactcagggaagggcatgaatccagtgttcagacttcacaggcaggggaagaaataaaaccctgttctttctcagaggggaggtgggtagcctggagcaagttctcaagccctgttcacccactgcctggaaacagactcaggctgttacgtggggcacggtaagactgagtccagcccttcagatcatgtgggagctgggtgaggactgtgactgccgactttcccccactgccctgataacctgcatgactcagcaagggaagtcataatgctcctaggtacacaactccattgacttgggaacctcgtccagttcctctacagcagcctcagcaagacctrcccaatgacagtctgagctcagacatgcctggtactgaccccacctgatgggccttccctatccaccctggtagctgaagacaaagggtatatactcttgggagttctagggccccacccactgccggttcctctcaat

SEQ ID NO: 918450 - DNA, 600 bp, Homo sapiens
ctctacaagccagaagagagtgggggccaatattcaacgttcttcaagaaaataattttcaacccagaatttcatatccagccaaactaagcttcataagtgaaagagaaataaaatactttacagacaagcaaatgctgagagattttgtcaccaccaggcctgccctaaaagagctcctgaaggaagcactaaacatggaaaggaacaaccagtaccagccactgcaaaaacatgccaaattgtaaagaccattgaggctaggaagaaactgcatcaacaaacgagcaaaataaccagcgaacatcataatgacaggataaaattcacacataacaatattaaccttaaatgtaaatgggctaaatgctccaattaaaagacacagactggcaaattggataaagagtcaagaccatcagtgtgctrtattcaggaaacccatctcacgtgcagagacacacataggctcaaaataaaggggtggaggaagatctaccaagcaaatggaaagcaaaaaaaaagcaggggttgcaatcctagtctgtgataaaacagactttaaaccaacaaagatcaaaagagacaaagaaggccatt

SEQ ID NO: 918451 - DNA, 537 bp, Homo sapiens
ttgaacttgggccttgtgacttctaccctgtcacttcctcacttggccatccataaacttgtatagaaaaaagattcatgaacaccacagcccactaaaacagcctattgccccactaaaaactcattttattatagacaaactttttaaagagcaaaggaatgagagtcaatccttgattttttacataatgcagtcctgcctttcatgcagggcctcaaaggggcctaagagagtgctcagaaacagaccccacacatgtggagactggacacaggacagaggtggccccatatgccacagggaagggggtctttgcaagaaatggagtaggaaaaattgcacgtgtgttttttaaaaygtgaaatgggatttctacctcacaccagacacaaaaattgacccacatccattcataaaagatatcaaaaagaggccaggtgcagtggctcatgcttgtaatcttagcactttgggaggccaaggcgagcggatcacctgagatcaggagattgagaccaacctggccaacatggt

SEQ ID NO: 918452 - DNA, 597 bp, Homo sapiens
tattttacccctgtggattatttaaacatttgttttggtgaccagtttagcaaggacatttcttaaaaactgaaattgtaacgtatgtcctcataatcattcttacttggaaaatgcctaactgacgggtctcttagctactgcctaggtttcattctttaacctatctgaacagcaggtatagtgactaagaggaactgcttagtttgtgaagaactggctttgtaaactcagctttataaagtgaccacaaatttcacaagtcaacatgtgtgtcctgtttgagctcacttgtcaagggttgttataaaacttggggtttggttctgcatcttcaagggactgtgggcaaaacaccagctcttggaataccaatttctttaactgtaatattggggctttggctaaatcaytaaggtcccacctagctctaaaacttgaattttaaaaaatcctgcaattaggaaaaatctaacaaacataacttttcttgttcttcttttttacctatataaaaatgacattttaggagagtcataggaagcagcccagaactttttagctaatcaggaatactagaaagacaaatttatgtta

SEQ ID NO: 918453 - DNA, 734 bp, Homo sapiens
ctcaggaggctgagacaggagcatcacttgaggccagcagttcaagaccaacctaggcaacatagcaagatctcatcactacaaaaaatatgtatttttaaaatagctaggcatggtggcacacacctttggtcctagctactctggaggctgtgtcaggaggatgacatgagcccaggaattcaaggttacagttatgttcacaccgctgctgtactctagcctgggtgatagagtgagactctgtctcaaaaagaaaaaaaaaaaaagaaaacccaaacaacacaatcttaaaataagcaaaggatttgaacagatatttctctagagaagataaacaaatgaccaatgaacatgtgaaaagatgctcaacatcacaagccatttggaaaaatgcaagttaaaacagcaatgacrtatgaactcataccaactaggatgactacagttaaaacaaaaataaaatccagaaaataacaagctttggcaaggatgtgaagaaaatggggccctcataccttgctggtggtgatgtaaaatggtacagccactgtggaaaacaatttggccattcctaaaaaagcaaagtgtaaagtttgcatgtgacccagcaattccaagcctaagtatatacccaagagaactgaaaatatgtgctcacacaaaaacctgtacatgaatgttcatagcggtattattcataagagcaaaaaagaaaaaccaacccgaatgtc

SEQ ID NO: 918454 - DNA, 565 bp, Homo sapiens
gctgagacaggagaatcacttggacccgggaggtggaggttgcagtgagccgagatcatgccactgcactccagtctgggcgacagagtgactctgtctcaaaaaaaaaaagaatgctgcattgattatcttaatattaaaatatttgtgcctccttcragtcatttctttagtacagattattaaaactgaaattaggccaggcgtggtagctcatgcctgtaatcccagcactttgggaggccgaggcgggtggatcacttgaggtcaggagttcaagaccagcctggccaaatgatgaaaccctgtctctactaaaaatacaaaaattggctgggtgtgatggcatgcacctgtagtcccagctactcaggaggctgaggcaggagaaccacttgaacctgggaggcagaggttgcagtgagccgagatagtgccactgcactccagcctgggcaacagagtgagactgtgtctcaaataaataaataaataaacccaaacaaacaaataaacaacccccgccccgaaattacaggatcagaaagtagaacattttaaataa

SEQ ID NO: 918455 - DNA, 792 bp, Homo sapiens
tccccatacgaatcttctgaaggaattcttataaaattaatctgaaaattacagacataaaaagctaatgaaattaaagcaatttcctaatactcaggattattactcattgttaaaatgataggatgataatgataaaatgaacctccatgaaaaatatttaaatgcatattatgaagaggtggggtaagactcattgtcacatcttacaagatgcaacaagatgcagctttcgccaatttcctctacctttttttttttaatatactttaagttctggggtacatgtgtagaacgtgtagtyttgttacataggtatacgcgtgccatggtggtttgctgcacccctcaacccatcacctatattaggtatttctcctaatgctatccctctcctagccccctatcctccgacacgccccggtgtgtgatgttccccaccctgtgtccatgtgttctcattgttcaactcccacttatgagtgagaacgtgcagtatttggttttctgttcttgtgttagtttgctgagaatgatggtttccagcttcatccatgtccatgcaaaggacatgaactcatccattttttatggctgcacagtattccatggtgtatatgtgggcaaaggatatgaacagacactttcctctaacttgtaagagcaactcaagcagaatttatcaacgggagcctatggatgtagttttatatacctggttgccctacttttccactagactttaagtaaaatggaagaagaaagtatattgtgttcctaacacccagcaca

SEQ ID NO: 918456 - DNA, 792 bp, Homo sapiens
tccccatacgaatcttctgaaggaattcttataaaattaatctgaaaattacagacataaaaagctaatgaaattaaagcaatttcctaatactcaggattattactcattgttaaaatgataggatgataatgataaaatgaacctccatgaaaaatatttaaatgcatattatgaagaggtggggtaagactcattgtcacatcttacaagatgcaacaagatgcagctttcgccaatttcctctacctttttttttttaatatactttaagttctggggtacatgtgtagaacgtgtagttttgttacataggtatacgcgtgccatggtggtttgctgcacccctcaacccatcacctatattasgtatttctcctaatgctatccctctcctagccccctatcctccgacacgccccggtgtgtgatgttccccaccctgtgtccatgtgttctcattgttcaactcccacttatgagtgagaacgtgcagtatttggttttctgttcttgtgttagtttgctgagaatgatggtttccagcttcatccatgtccatgcaaaggacatgaactcatccattttttatggctgcacagtattccatggtgtatatgtgggcaaaggatatgaacagacactttcctctaacttgtaagagcaactcaagcagaatttatcaacgggagcctatggatgtagttttatatacctggttgccctacttttccactagactttaagtaaaatggaagaagaaagtatattgtgttcctaacacccagcaca

SEQ ID NO: 918457 - DNA, 566 bp, Homo sapiens
aactgttacatagtctttcccaagatccatttatcagagaatcacatggatcacacaagtctaagaagtcaaaggaaaatcacaagtggaggactggagctgcatgggtgagcgtgactaatactaatcgcttagttcctccggttccatggctgaggatcaagtctgcatccacaggcagcacctttaayggatgccagcgctcaggaaccaaggaagaaaaacagttgggggaacaaccccactgtcttctcatccaccctgggccattccaaaggaaaggaaggagaccaaaggaacacctttttcttgcttctctttttcaatgggtaacagaccatctttggcctgcactcctctggagtgcatactgaagcactgcgactcctttaaccccaagactttgaagaaaaacgtggtggctcattttcttttgcacaagggtatggccttactagacctttggaggtgttacacaatggaccccactcttttagcagtcatatcaggcaggcccaaagggaatgaatccccaaaactagagaagcaacttccaggggaatcat

SEQ ID NO: 918458 - DNA, 658 bp, Homo sapiens
cactgctgcttagaggctggtgtaggaacaaaagggaattttccttcaccctcaaaaggttcacttaaaaatcagcttgtagaggcagattaattggagaaaaagcaaacaaatttatttcatgtgtttacacaggagccttcagaatgaagactcaatcccccagtggggtgcagaagcttataaaccatcttgaggttacagaaagaatggggcttggatcttggcaaaacaggttataggaggggaaaaagaggagtttttttgaggggaaataaatgattactagagagatttcaatgggcttgaagaacatacaatggcctctggcaaagtctgctgggcttgcagagcagacaatggtttgtgacaaaaatctgtccaggtttgttgacctcagccattcttcctgccatataagtttagttaatgaaaatcagggcakggacaatactggaggtaattgtcttcttctttggtagggctgaactttaagcagataaaggaatttcagagaataactttgtcctgtgctttgggagagatggtggtggggtgtggaaggtggacagaatgtcaaagacaacttaagcctcctttttcagttcagcatgtacaaagtgagatttttcgggatatcgatttctgagccctgaat

SEQ ID NO: 918459 - DNA, 774 bp, Homo sapiens
ccggggcagggacacctagcccggtgcgtctgcatgccctggcagggttccagcagcgagccctgtgccacgcgctcactttcccttccctgcagcggctcgtctactccatgtgctccctctgccaggaggagaatgaagacatggtaccagatgcgctgcagcagaacccgggcgccttcaggtacagggcgggcgccagggtcgtggaggggggggatggggtgaactgctctcttacccagcattggggctgtttctcttgcaggctagctcccgccctgcctgcccggccccaccgaggcctgagcacgttcccgggtgccgagcactgcctccgggcttcccccaagaccacgcttagcggtggcttcttcgttgctgtaattgaacgggtcgagatgccgacgtgagtgagtgggggcatgcttgggaggcgcaggatggtactggcacatctaacatctacayttctctagctcagcctcacaggccaaagcatcagcaccagaacgcacacccagcccagccccaaagagaaagaagagacagcaaagagccgcagccggtgcttgcacaccgccttgcacatagcagaggctccaggctgactccttcctggtgggaaaggaagatgcctgtcctctccgtggaggaccctgggccctcaccgcaggcagcagtttgcattttgaaaggttattgggtcccttcctcgggctgtgttcttgctggtgagcaaaagtgttgcctgcagaaataaaatgcagaacg

SEQ ID NO: 918460 - DNA, 593 bp, Homo sapiens
gtgggtctctcaaaatctacggaataggtaacagaacaggtaagaacaaatatgggtaggtgtcaggtaacagtttcactcatcaagtgccagcttggagatgaagttcgagataaagactgttcaagtccatccaagccctgggatgtgggtgtcctgctggccggaccaagctacctgcatgggggctgaatgaggcaggaagaagatmataagagaggagcactgttctaccctctaaaatttccagccatcaccaaccactgtgtcttctttctaggctggtcccttttgaggtcctgaaattgcctctctgtctctggctacaatatccccagcctccttcatttactcactccctgctctcgctcccagctgaagaatttcccacatggaagcccgactgcttgccctggagctctgggcccaggaacccagccttccatataaggcccacatcacctgtgtcccaaagggaacctattatatcttgccacagtatctctcttgccccttcccctatttgttccctgtgacttagtagttgcaagaaaataaaatccctgccaggcacggtggctcacatctgtaat

SEQ ID NO: 918461 - DNA, 593 bp, Homo sapiens
gtgggtctctcaaaatctacggaataggtaacagaacaggtaagaacaaatatgggtaggtgtcaggtaacagtttcactcatcaagtgccagcttggagatgaagttcgagataaagactgttcaagtccatccaagccctgggatgtgggtgtcctgctggccggaccaagctacctgcatgggggctgaatgaggcaggaagaagatcataagagaggagcactgttctaccctctaaaatttccagccatcaccaaccactgtgtcttctttctaggctggtcccttttgaggtcctgaaattgcctctctgtctctggctacaatatccccagcctccttcatttactcactccctgctctcgctcccagctgaagaatttcccacatggaagccygactgcttgccctggagctctgggcccaggaacccagccttccatataaggcccacatcacctgtgtcccaaagggaacctattatatcttgccacagtatctctcttgccccttcccctatttgttccctgtgacttagtagttgcaagaaaataaaatccctgccaggcacggtggctcacatctgtaat

SEQ ID NO: 918462 - DNA, 609 bp, Homo sapiens
cagtacttggtgctcaatactcagtactctgtgctcagtatcagcactcagcactcagtactcactaccatacctctgttcatcactatggcaggtgcctccgttcccttcttagagaaacttcagcagcatctccagcatttccacccaatgggcttgaggaaaaaccacttgggcaggggctagcaggtgtcgggagtgggcatgccatcatctgccacttgggcagattcacccaagcctgagggccctgtaaggacctggtgctgggctgagggcctgtcacccaggtctcctggtctctgttccagtgtccctcgcccccgctagagcagacatttcctgaggacaggagcagagtccccagtatctccttatccctggagcayggggacagccacgtcaccctcgtcacccgcaacctctctgagccacagctacaggggggatgaatacagagcagcaggtggagcccctggccccgaccacaggagcatggctcagccccccacagccccccaccagggcacggtgagcctcacctccttcttcacctccttccctttggccttggctttgctccttctggcagcagtcagggagatgccg

SEQ ID NO: 918463 - DNA, 606 bp, Homo sapiens
tcaagtgattctcctgcctcagcctcccaagtagctgggattgcaggtgtgtgccaccatgccccagctaattttggtatttttagtagagatggggtttcgccatgttgggcaggctggtcttgagctcctgacctcaggtgctgggattacaggcatgagccgccgctcccagccacaaacacgcctctttattattattattattattttttgagacggagtctcactctgtcgccaggttggagtgcagtggcgcgatctctgctcactgcaagctctgcctcctgggttcatgccattctcctgcctcagcctcctgagtagctgggactacaggcgcccrccaccacacccagctaattttttgtatatttagtagagacggggtttcaccgtgttagccaggatggtctcgatctcctgaccttgtgatccacccgccatggcctcccagagtgttgggattacaggtgtgagccaccatgcccagcctccgagacccttcttagcagaagtgatctgggagcaggaagccccagaaggggtgtgtccccaaagcaaccctgaagcaagcgtgcaggcaacctgagaagggctgtgggt

SEQ ID NO: 918464 - DNA, 616 bp, Homo sapiens
tcaagtgattctcctgcctcagcctcccaagtagctgggattgcaggtgtgtgccaccatgccccagctaattttggtatttttagtagagatggggtttcgccatgttgggcaggctggtcttgagctcctgacctcaggtgctgggattacaggcatgagccgccgctcccagccacaaacacgcctctttattattattattattattttttgagacggagtctcactctgtcgccaggttggagtgcagtggcgcgatctctgctcactgcaagctctgcctcctgggttcatgccattctcctgcctcagcctcctgagtagctgggactacaggcgcccgccaccacacccagctaattttttgtatrtttagtagagacggggtttcaccgtgttagccaggatggtctcgatctcctgaccttgtgatccacccgccatggcctcccagagtgttgggattacaggtgtgagccaccatgcccagcctccgagacccttcttagcagaagtgatctgggagcaggaagccccagaaggggtgtgtccccaaagcaaccctgaagcaagcgtgcaggcaacctgagaagggctgtgggtctgggcaagg

SEQ ID NO: 918465 - DNA, 606 bp, Homo sapiens
tcaagtgattctcctgcctcagcctcccaagtagctgggattgcaggtgtgtgccaccatgccccagctaattttggtatttttagtagagatggggtttcgccatgttgggcaggctggtcttgagctcctgacctcaggtgctgggattacaggcatgagccgccgctcccagccacaaacacgcctctttattattattattattattttttgagacggagtctcactctgtcgccaggttggagtgcagtggcgcgatctctgctcactgcaagctctgcctcctgggttcatgccattctcctgcctcagcctcctgagtagctgggactacaggcgcccgccaccacacccagctaattttttgtatatttagtagagayggggtttcaccgtgttagccaggatggtctcgatctcctgaccttgtgatccacccgccatggcctcccagagtgttgggattacaggtgtgagccaccatgcccagcctccgagacccttcttagcagaagtgatctgggagcaggaagccccagaaggggtgtgtccccaaagcaaccctgaagcaagcgtgcaggcaacctgagaagggctgtgggt

SEQ ID NO: 918466 - DNA, 433 bp, Homo sapiens
acaaacacgcctctttattattattattattattttttgagacggagtctcactctgtcgccaggttggagtgcagtggcgcgatctctgctcactgcaagctctgcctcctgggttcatgccattctcctgcctcagcctcctgagtagctgggactacaggcgcccgccaccacacccagctaattttttgtatatttagtagagacggggtttcaccgtgttagccaggatggtctcgatctcctgaccttgtgatccacccgccatggcctcccaragtgttgggattacaggtgtgagccaccatgcccagcctccgagacccttcttagcagaagtgatctgggagcaggaagccccagaaggggtgtgtccccaaagcaaccctgaagcaagcgtgcaggcaacctgagaagggctgtgggtctgg

SEQ ID NO: 918467 - DNA, 686 bp, Homo sapiens
tcaggagttcgagaccagcttggccaacatggtgaaaccctgtctctattaaaaatacaaaaattaggccaggtgcagtggctcacgcctgtaatcccaacactttgggaggccaagatgggtggatcacctgaggtcaggagttagagaccagcctggccaacatggtgaaaccccatctctattaaaaatacaaaaattagcygggcatggtggcaggcacctgtagtccaagctacttgggaggctgaggcagaagaatcgcttgaacccaggaggcggaggttgcagtgagccgagatcgtgccactgcactccagcctgggcgacagagtgagactccagggcagaggagaaaagagagggagagaggaagggtggggatcaggatgaggacagggagagagacaagcagagagaggagagggcaatgtcacagcagccactagaaccaagacctccactgtcctggttctgtcctccttccggtcagcagcaacctgccattggtcattccctggccacttgtgcccggtacaaacaacatgtctgccctcccgaggctgggcctgcttcctagagtctgggagtggaagacatcacttgaccagctaggaccccctccgcccaccaccgtggttccctgcttggggcagagctgaaacaactcccatccagccacatat

SEQ ID NO: 918468 - DNA, 717 bp, Homo sapiens
acagtcccagaaagactttaccgcacctctccggcctggggtgtcctgggggatgaagctccaggaggccacctatggcttggggccccagtcccagaagcctggcctggggcgcacctctctggtcttcaggaagaggggcctggaatgagagtgggggcgtccagtggggcagcttaaccgggcagggctgatgggaccgcgggctggggagggaccggggcctggggaggaaccagaatctgcctggcctcactgtgtgacttgggtgagctcctctacctctctgagcctgggcttcccatctgtctgggatgtctcccctcctgtagtcactgtgaggttctgagcagaggacactcttagcccagagcctggcgcatagctggtgcggtgagcgccagcccctccctgttcctgcagagccctgccgttcagcgcacacaggctgccttgccctctccagagaggatcatggggcttaatttgttgattgaatttgcttgtttggcccagatggttgggtctcrttttctttttttctttcttttttttggagacggagtcttgctccatcacctgggctgaagtgcagtggcatgatctcggctcactgcaacctccgcctcctgtgtacaagcgattctcctgcctcagcctcccaagtacctgggattacaggcacgcaccaccatgcctggctaatttttgtatttt

SEQ ID NO: 918469 - DNA, 564 bp, Homo sapiens
gcaccaccacgcccagctaatttttgtatttttagtagagacggggtttcactgtgttgcccaggctggtctcaaactcctgagctcaaagtgatccgccctccttggcctcccaaagtgctgggattgcaggtgtgagccactgcggccagcaggaaagtagaaattctttaacaaatttccccatgccctttccatcgttctrtttagatttctttctttctgataacagcatttctgcttatttatagtttaccagaaaatcattttacccagttttttccttttttttttttattttgcacacagtggaaggcatcttttgtatttccctttgctgtttctgtatcccctaacgctgtcatgctgccagttttccatcttattctaaatcttcttaactgcatagcctggtggtgacttcagatttctctgcagggttacatattatttcactgattgctctgggtttttcaaatataacaatcatgtcatctgttccccatggcgagcaacgtaaatcggggactcgtcttggccaaggggaccatttgcagtgtttgg

SEQ ID NO: 918470 - DNA, 628 bp, Homo sapiens
gtgccatcaccttcattgattgtcttagctagatcttctggataacttgctgcagcttccaacaaagcatttgctgcttcaccttgcacttttgtgttatggagatgaattctttccttaaacatcatgaaccaacctccgctagcttccaacttttcttctgtagcttccccacctccctaagccttcatagaattgaagagagtcagggccttggcttgagaggattaagccccaattaagagaattaggctttggcttaagaaaatgttgtcgctggtttgatctgctatccagaccatcgaaactttctccctatcagaaataaggcttttttwaaatcactcatgtgttcactggagcagcacttttcatttccttcgtgaacttgtcctttccattcacaacttggctaactggtgcaaaaaagtctagcttttaacctatctcagcttttaacgtgccttcctcgctgagcttaatcatttctagcttttgacttaaagtgagagacatgtgactgttcctttcacttgattacttaaacaggccattgtaggattattaattcacctaatttcagtattgctgtgtctcaagaaatagggaaacccaaagacaggaagag

SEQ ID NO: 918471 - DNA, 615 bp, Homo sapiens
aagtcaagtaatgtcattccttcagttctgttgtttttgctcagatagcataggctattctgggtcttttgttattccatataagttttaggattttttttttctatttctgtgaagaatgtctttggttcattggtattttgatagggattgcatcgaatctgtaggttgctttgggtggtgtggacattttaacagtattgattcttccagttggtgaatgtggaacatctttctttttgtgcgtgcatgtcttcaattttttttttccttccttttgagagagtcttgctttgtcrcccaggttggagtgcactgctgtgatcttggctcactgcaacctccacctcctgggttcgcatgattctcctgcctcagcctcctgaggagctgggattacagttgcccaccaccacacccggctaatttttgtaattttagtagagatgggggtctctccatgttggtcaggctggtctcgaactcctgacctcaggtgagctgcctgcctcagcctcccaaagtgcttggattacaggtctgagccactgtgcccagcccgtcttcttcaatttcttttatcagtattttatagttttcattgcagagatcatt

SEQ ID NO: 918472 - DNA, 615 bp, Homo sapiens
aagtcaagtaatgtcattccttcagttctgttgtttttgctcagatagcataggctattctgggtcttttgttattccatataagttttaggattttttttttctatttctgtgaagaatgtctttggttcattggtattttgatagggattgcatcgaatctgtaggttgctttgggtggtgtggacattttaacagtattgattcttccagttggtgaatgtggaacatctttctttttgtgcgtgcatgtcttcaattttttttttccttccttttgagagagtcttgctttgtcacccaggttggagtgcactgctgtgatcttggctcactgcaacctccacctcctgggttcgcatgattctcctgcctcagcctcctgaggagctgggattacagttgcccaccaccacacccggctaatttttgtaattttagtagagatgggggtctckccatgttggtcaggctggtctcgaactcctgacctcaggtgagctgcctgcctcagcctcccaaagtgcttggattacaggtctgagccactgtgcccagcccgtcttcttcaatttcttttatcagtattttatagttttcattgcagagatcatt

SEQ ID NO: 918473 - DNA, 568 bp, Homo sapiens
gggactcacagcaccaagttcctaggctgcacacagtgggggcctgggcctggcccaggaaaccattttttccccctagacctctgggcctgtgaggggaggggctgctgcaaaggtctctgacataccctggagacattttccccattgtcttggtgactaacrttgggctccttacttatgcaaatttctgcagcaggcttgaatttctctccagaaaatgggtttttcttttctattgcatcatcaggctgaaaattttccaaactttcatgctctgcttcctcttgaatacttttctgcttagaaatttcttccaccacataccctaaatcgtctctctcaagttcaaagttccacagatctctagggcaggggcaaaatgctgccagtctatttgccaaagcataacaagagtcacctttgctccagttcccaacaagttcctcatctccgtctgagaccacctcagcctgtactttattgtccatatcactatcagcattttagtcaaagccattcaacaagtctctaggaagttccaaactttctcatattttcctgtctt

SEQ ID NO: 918474 - DNA, 709 bp, Homo sapiens
aaagaataaagtttgaggtctcaaacttctgaatttcaaaatttactaccaagaaacttcaatcaagtgagtgaagcctaaggataaatatatgaatcaatggaatagaattatgaagattctatggagagttcagaagtaaacccatgtgtctatggttaactgattttggttgagtatcaagaccattaggtgaagaaaaggatagtcttttctagaaatggtcttggaagaactggatagccacatgcagaagaaggaatttgaactcctacctcacaccatatgtaaaaatttactcaaaacatatcaaagacctaaaagtaagagcaaaaactataaaactcttagaataaaacattgggataaatctccatgaccttgtatctggcaatggattcataaacatgacaccaaaaccatgaagaacaacaactacaaatagrtaaattgaacttcattgattaaaacatttgtgcttcaaaggacactatgaagaaagtgaagacaacccacagaatgggagaaaatttttgcaaatcttaaatctagcaagagagttgtgtttagaatataaagaatacttaaatctcaataatcaaaacaaataacccaattaaaaaatgggccaaggagttgaatcaacattttttccaaagaaaataaacaaattaccaataaatacataaaaaatgctaaatatcattaa

SEQ ID NO: 918475 - DNA, 599 bp, Homo sapiens
tcttttttctccagtactaggtaaggatttcattcctgtaggacagatcaactttaactggttccatttataaaggtacagtttaaatccattgtccttttaacctactctgttttacttgtttcatggataaaaaattaaaattaaagctcttgcatttttacatttgtctgtctttatttctrtgtatacatgtttacatgtctatctttatatatttgtctttatatggtaccaaattgatagacataaatcagtactcataaattaagtaaataagcccaaatgctttgcaagttcatgtaactttagtaatctttcatatataaagctagtttttaaattatttagattaaaatgtttataaaaatttagacacttttgcctgagcctactggtcagactaatttattctgtctctgctagatttttaacatcataaaactattgtttatgagatatttttgatagttgcctaatttgtctataagcttatgtctttggttttaagtctttaggttctggggtatagacaggagaccacagttagacctggaaatatatgtgtgtctacagtgcctgggtcattagctgcagtg

SEQ ID NO: 918476 - DNA, 593 bp, Homo sapiens
gaagttcattatatattttggatattgacctctatcagacatatggtttggaaatatttctactattctgtaggttatctcttcatactgctgtttcttttgctgtgcaacagcttttcagtttgatgcatcccatttgtccatgtttctttttgttgcctgtccttttggtgtcatgtctaaggaataattkccaagaccagtgtcaagaagcattctccctatgttttcttctaggagttttacagtattcggtctaatgttaaataagtctttagtccagtttgaattgacttttgtgtgtggtataagatagggatccaatttcatttctgggcctacagatatctagttttcccaactccatctcttgaagagactatcctttctctgttgtgttcttggcactcttgtcaaacatcagttgatcatatatgtgtaggtttacttctggactctctattctgttcctgtgacttgtatatcttcctttataccagaaacatagtgttttaattattgtagaattgtaatatatatttaaatgaggaaatatgaagcctccagttttgttcttctttctcaaggttact

SEQ ID NO: 918477 - DNA, 609 bp, Homo sapiens
cttgtgcattgcatgtgatgctcgtgtctctttatgctcttttctatttgaagagtattcacaccactatcctttttatttttgtttttcaccacattgacttctctgaagagtccaggatagtcgcctttagaatgtcccatatactgtttattattrttatttttaatgactaaattcaagtaaaacttctggcaaggatttatcacaattgatgttatatagttcttgttgcaacgcatcagaaggcaggtaatgccagcttgctccagtattggtgatgctgtttgattacatggttcagatggtgactgccagatctctccactgtaaaagcatattatccccaatgaaattattaaataatctgagagatgctgctttgaaactacaatatcatatcccccaacaaccttttaataattgccagcatccataatggtccttgcctgaatctgttactacactgggagttgcaaaccactgatttttctaattttattattccttttacatttttatgtgacttttttctgtatagaagaactcttcccctgccatctgtcttttatttacaatattaccatggactcatggaatttttaaatt

SEQ ID NO: 918478 - DNA, 609 bp, Homo sapiens
cttgtgcattgcatgtgatgctcgtgtctctttatgctcttttctatttgaagagtattcacaccactatcctttttatttttgtttttcaccacattgacttctctgaagagtccaggatagtcgcctttagaatgtcccatatactgtttattattgttatttttaatgactaaattcaagtaaaacttctggcaaggatttatcacaattgatgttatatagttcttgttgcaacrcatcagaaggcaggtaatgccagcttgctccagtattggtgatgctgtttgattacatggttcagatggtgactgccagatctctccactgtaaaagcatattatccccaatgaaattattaaataatctgagagatgctgctttgaaactacaatatcatatcccccaacaaccttttaataattgccagcatccataatggtccttgcctgaatctgttactacactgggagttgcaaaccactgatttttctaattttattattccttttacatttttatgtgacttttttctgtatagaagaactcttcccctgccatctgtcttttatttacaatattaccatggactcatggaatttttaaatt

SEQ ID NO: 918479 - DNA, 617 bp, Homo sapiens
aaaacggaattagaatccagaacatttgaaggggtatattaacaagatgggggaacaggaggtcctcacgctgaattcgtctacagaaacaaatatttgacaggtatctacagaccaaagtgcctatgtaaagctttggaattcaggtagagggaaggaaattctagtggagccaaagacccaggaggactgctttaagaagacaggcttatacattgatgacaagcccacagaccttgataccagcttcagaatagaaacaatgttgytcctgtatggagcaggctccagccccactcctccccagtcctgccaagagcccctttcaccaaaaatccagggatgcgccatgcccattcatgcctgcagtaacagggcctgcaaaccttaggcccaactgaagttcctgaagcagtactgtgacctgacttccagctccattctacttcagtccaaggcagtcctacctgtctagagacatgcccaagggagctgggagaagtcatatgcaggagttcagtcagggtggtgggaaaagttgtaagaaaaagttttagggaaagatgcaagccttcttggaaggccagaaggttttgcaaagcttcagggaaggatga

SEQ ID NO: 918480 - DNA, 602 bp, Homo sapiens
agatggctgcttgaagtaggtagtattaaagcccaatgttgagagatggatggaaaagtgaaaggtagaaggaaaggaaaaaagggcagttaattaagagtgacattttgcaagaatagagcagtgaaaacacaagatatatttggggaacagtgaggagtacgagttagcctgagtatacaggagttagagcctaagcctactttctgcacacctstaaggcaggtgtcctggggccaaaaggtgttcagacttcgttactgttgtagtcttttctgaaaacaaatctttagcaacaatgggtataagaattaacacaatattgaaatgcttttttcaatcctttttcccgtaatttaactcttagctaccaaagcttgtattttcatctgcaagtatagtaagaactatacagaacatctatctctatccattagcatcttttgagttcttgttctgtgtaaattatggtaggaagaaaaaaggacttacataaatatgcaaaaacattcactgttgtgcaagtccctatcgtgttccaattctggaggtggggggaggaggcagagacaggggaaatattaataagataaagctcactc

SEQ ID NO: 918481 - DNA, 652 bp, Homo sapiens
attatgaaatctttgccaggtcctgtgtccagaatggtaattcctgggttatcttctggtgtttttatagtttcaggttttatatttaagtctttgatccatcttgaatttatttttgtatatggtgtgaggaaggtatccagtttcagtcttctgcatatagctagcgaattatcccagtgccatttattgaatagggagtactttccccattgcttatttttctcgactttgtcaaagaacagatggttacaggtgtgcagtattatttctgggctctctcttctgttccattggtctatatgtctgyttttgtaccagtaccatgttttggttactatgtccttgtaatatagtatgaagtcaggtcatgtgatgcctctagctgtgttcttcttgcctaggactaccttggctgttcaagctcctttttggttctatatgaattttaaaatagatttttctgattctgtgaggaacatcattggaagtttgatgggaacagcattgaatctggaaattgctttggacagtatggctttttattttatttttatttttttggagacagagtcttgctgctctgtcgccaggctgaagtgcagtggcatggtctcggctcactgcaacctccacttcccaggttccaatg

SEQ ID NO: 918482 - DNA, 852 bp, Homo sapiens
tttctttcattccaaccttggagaatctgatgattatgtatcttgggaatggtcctcttgtgtagtattttgcaggggttctctgcatttcctgaatttgaatgttggcctctttagtgtgggtggggaagttttcatggacggtatcctgaaatctggtttctaagttgcttgctttctcctcakcatttttagggatgccagtgcatcgtggatttagtctctttacatagtatttctcagaggctttgttcattcttttttattctttttaaaaaaaattttggctaggcacggtggctcatgcctataatcctagcactttgggaggccaaggcaggatcacctgaggtcagaagttcaagaccaacctggccaacgtggtgaaaccccatctctactaaaaatacaaaacattagccggtcatcgtggtgggcacctataatcccagctactcaggaggctgaggcaggagaatctcttgaacccaggaggcggaggttgcagtgagccgagattgtgccattgcactccatcctggcaacaagagcaaaactccatctcagaaaagaaaaaaaaaatttcgtcttagttcagagaaccagtcttcaagctctgagattctttcctcagcttggtctattctgctattaatatttgggattgcattatgaaagtctcatagtgtgtttttcaactctctgatcagtttggttccttcttacaatggccatttcatcaatcagctcctgtattattttatggtaatcattagattccttggattgggtttttgctttcttctgaatcttgatgaccttcatttctatattatgaattctttctgtcat

SEQ ID NO: 918483 - DNA, 700 bp, Homo sapiens
attttttctttcattccaaccttggagaatctgatgattatgtatcttgggaatggtcctcttgtgtagtattttgcaggggttctctgcatttcctgaatttgaatgttggcctctttagtgtgggtggggaagttttcatggacggtatcctgaaatctggtttctaagttgcttgctttctcctcatcatttttagggatgccagtgcatcgtggatttagtctctttacatagtatttctcagaggctttgttcattcttttttattctttttaaaaaaaattttggctaggcacggtggctcatgcctataatcctagcactttgggwggccaaggcaggatcacctgaggtcagaagttcaagaccaacctggccaacgtggtgaaaccccatctctactaaaaatacaaaacattagccggtcatcgtggtgggcacctataatcccagctactcaggaggctgaggcaggagaatctcttgaacccaggaggcggaggttgcagtgagccgagattgtgccattgcactccatcctggcaacaagagcaaaactccatctcagaaaagaaaaaaaaaatttcgtcttagttcagagaaccagtcttcaagctctgagattctttcctcagcttggtctattctgctattaatatttgggattgcattatgaaagtctcatagtgtgtttttc

SEQ ID NO: 918484 - DNA, 768 bp, Homo sapiens
ccatgttgctgcaaaggacatgattttgttattttgtgtggctgcatagtattccatggtgcatatataccacattttctttatccaatccaccattgttggacacctaggttgattccatgtctctgctattgtaaaaagtgctacagcaaaaatatgtgagtgcgtgtgtcttttggtaaaatgatttgttttcttttgggtgtataccctgtaacaggattgcttactcacctagtagttctattccaagttctttgagaaactgtcaaactgctttccatgtaagtgttcccctttctctgcagcttcaccaacatctgttgttttctgactttttattaatggccattctgactggtgtaggatggtatccttttgtggtttgagttgtgtttctctgatgattagtgatatggaatatctttatatgyttgttggccacttgtatgtcttcttttgtggggtgtctgatcatgtcttttgcccatttttaaataaagttatttgttttttgcttcttcaattaagtttcttatggattttgggtattagatttttgtcagataaatagtttgcaaatattttctcctattctgtagatctttttactctgttgatagttccttttgctgtgcagaagctctttagtttaactgggtcccacttgtcaatttttgtttttgttgcaattgcttttgagaacttgaagttggtttgctagtattttgttgaggatttttgcatctatgttcatcagggatattg

SEQ ID NO: 918485 - DNA, 768 bp, Homo sapiens
ccatgttgctgcaaaggacatgattttgttattttgtgtggctgcatagtattccatggtgcatatataccacattttctttatccaatccaccattgttggacacctaggttgattccatgtctctgctattgtaaaaagtgctacagcaaaaatatgtgagtgcgtgtgtcttttggtaaaatgatttgttttcttttgggtgtataccctgtaacaggattgcttactcacctagtagttctattccaagttctttgagaaactgtcaaactgctttccatgtaagtgttcccctttctctgcagcttcaccaacatctgttgttttctgactttttattaatggccattctgactggtgtaggatggtatccttttgtggtttgagttgtgtttctctgatgattagtgatatggaatatctttatatgcttgttggccacttgtatgtcttcttttgtggggtgtctgatcatgtcttttgcccatttttaaataaagttatttgttttttgcttsttcaattaagtttcttatggattttgggtattagatttttgtcagataaatagtttgcaaatattttctcctattctgtagatctttttactctgttgatagttccttttgctgtgcagaagctctttagtttaactgggtcccacttgtcaatttttgtttttgttgcaattgcttttgagaacttgaagttggtttgctagtattttgttgaggatttttgcatctatgttcatcagggatattg

SEQ ID NO: 918486 - DNA, 778 bp, Homo sapiens
caggcgcccgccaccacgccccgctaatttttgtatttttagtagagacagggtttcaccgtgttagccaggatggtctcaatctcctgaccttgtgatccgcccgcctcggcctccgaaagtgctgggattacaggcttgagccaccgcgcccggcctkagcgtgattcttgatggaaactttagttcttcagcttggtaactacgaaatgtgaggaaatgggctgccttgtaaaagcactatttcttcttactgtctgaacatttgatgtaatccctgccaatcaaccagtggactcaacaaggacaatgtttcctcccagctagcttcacaagaggaaaaaacaaaaacaaaaaaacatttggactggttatcactagaactgtggtacttgaatcagtagaaaaattaaagtctccaaaaaaattggcgttacaaaatttgaaacctatctattgtctcaggtggtcatgggacattgttcacttagccctggaaacttctatccttctatttctgtaaaatatgagtaagcactggatctaaattaaaatttgtcattgcactcttccaggacattgcatgcacatttgctattcaaaatcggatctgccctcctttttgtctcaggaatatctactaagtatctatgtagacaaagaagatatgtgtgtttaaacaacacaatctttatatagattcatataaatgttctgtttcagaaatatttaattggattaagattctaacttgcttcattccaagtccctgcattac

SEQ ID NO: 918487 - DNA, 719 bp, Homo sapiens
gtcccgcaacagttgccacctgctctaccgccatctggcccctgtagcattacagccccgcctccactcctcaaggcctggaaaattgcctctctgccacacccagttcatagccacattctcaatgtgacaccgactctcacctcaccatatatattcccttcaccttcctcctgttctctgccccagggataaactgcattaamcagaacatcaggctcacggaggacgtgacactccctacaatgagacgtctcatctctcctgtaactcgtccctgtcctccctgcactcactgtgtagatcccaagcctaacgtgaggaagaccccaataaggccgggaccttaacctttctcataagatccagcaggaaaagatgtaaagagtgcattggaattaatgaaggcacccaaagcatgagaactgcttgaacacccagcaagcatgcgtgtctccatttaacacataagaagacaaaggagtgtctgactcactaaaggtcacagaatggggcgacggagggttgctgcagcaggcacagggctcacggtgagctgctagactctacccctgcctcctcagccctctctcacacactccacatgcacgcacacatgtgctcgtgtacatggtgacagacaaggtgcacgcctcctcctgggcttctccaggcctcgagatacaaggggctggatttctgaccccaagaacattctt

SEQ ID NO: 918488 - DNA, 719 bp, Homo sapiens
gtcccgcaacagttgccacctgctctaccgccatctggcccctgtagcattacagccccgcctccactcctcaaggcctggaaaattgcctctctgccacacccagttcatagccacattctcaatgtgacaccgactctcacctcaccatatatattcccttcaccttcctcctgttctctgccccagggataaactgcattaaacagaacatcaggctcacggaggacgtgacactccctacaatgagacgtctcatctctcctgtaactcgtccctgtcctccctgcactcactgtgtagatcccaagcctaacgtgaggaagaccccaataaggccgggaccttaacctttctcataagatccagcaggaaaagatgtaaagagtgcattggaattaatgaaggcacccaaagcatgagaactgcttgaacacccagcaagcatgcrtgtctccatttaacacataagaagacaaaggagtgtctgactcactaaaggtcacagaatggggcgacggagggttgctgcagcaggcacagggctcacggtgagctgctagactctacccctgcctcctcagccctctctcacacactccacatgcacgcacacatgtgctcgtgtacatggtgacagacaaggtgcacgcctcctcctgggcttctccaggcctcgagatacaaggggctggatttctgaccccaagaacattctt

SEQ ID NO: 918489 - DNA, 618 bp, Homo sapiens
gctatgctgagcggctgcctccaatctacctgtgcttacagggcaagctcaacccaaggggcccccagctaggaacagccacacagagagccccggcggctcactgtaatttacatggaaatcctcaaagccagagatggctcttcaaaccccttaggacggctattatcgaaaaaatcagaaaataacaagtattggcaatcatgtggaaaaattggaaacttcatgtgttgctggtggggaatgtaaaatggtgcaaccgctatggaaaacaggatgaaagttcctcaaaaaaattaaatgtggccasgcgcggtggctcacatctgtaatcccagcactttgggaggtcgaggcgggcggatcacaaggtcaggagatcgagactatcctggctaacatggtgaaaccccgtctctactaaaaatacaaaaaaattagctgggcgtggtggcaggcgcctgtagtcccagctacacgggaggctgaggcaggagaatggtgtgaacctgggaggcggagcttgcagtgagccgagatcgcgccactgcactccagcctgggtgacagagcaagactccatctcaaaaaaataaataaataaaaatttaaaaatta

SEQ ID NO: 918490 - DNA, 618 bp, Homo sapiens
gctatgctgagcggctgcctccaatctacctgtgcttacagggcaagctcaacccaaggggcccccagctaggaacagccacacagagagccccggcggctcactgtaatttacatggaaatcctcaaagccagagatggctcttcaaaccccttaggacggctattatcgaaaaaatcagaaaataacaagtattggcaatcatgtggaaaaattggaaacttcatgtgttgctggtggggaatgtaaaatggtgcaaccgctatggaaaacaggatgaaagttcctcaaaaaaattaaatgtggccaggcgcggtggctcacatctgtaatcccagcactttgggaggtcgaggcgggcggatcacaaggtcaggagatcgagactatcctggctaacayggtgaaaccccgtctctactaaaaatacaaaaaaattagctgggcgtggtggcaggcgcctgtagtcccagctacacgggaggctgaggcaggagaatggtgtgaacctgggaggcggagcttgcagtgagccgagatcgcgccactgcactccagcctgggtgacagagcaagactccatctcaaaaaaataaataaataaaaatttaaaaatta

SEQ ID NO: 918491 - DNA, 515 bp, Homo sapiens
attctgtggataccacttagcctctttccctagccacccatgttatcgcccaatgggcccataagcaaagtggccatggtggcagggatggatgtgacatacgggctcagcaacatggacttccactcaccaaggctgacctggctgcagctactgctgagtgtccaatttgccaacagcagagaccaacagtgagccctcgatatggcaccatttctcagggtgatcagccagctacctggtggcagcttgattatactgaacctcttccaccatggaaagggcaraggtttgtcctcactagaatagacacttactccagatatgggtttgcctatcctgcaggcaatgcttctgccaaaaccatcaaccgtggattcatagaatgccttatccacagccctggtatcccacacagcatttcctctgaccaaggcactcacttttacggctaaagaagtgtggcagtgggctcatgttcatggaattcaatggtcttaccatgttccccatta

SEQ ID NO: 918492 - DNA, 598 bp, Homo sapiens
agtgacagaagtaatattggtctcagtcaggtcctgaaggcaccagtaggtgccttcctacttataggaatccataagcgggattcctatagtacctctctccactccctcagtcttcacctatggcttcatggggagttctttatgatcagttgattgaggaagaaaaagctscgacaaagttcacgaatggatctgcacagggtgctgcaccaactagatgaagagtgctacacattatacggaacataatggggagggaaattctccctctgggcaatactttaaaaaagaccactggttgttcattttgcctggaaagaaagatgtttacaggtagagatctatgctgatttatgggaggtagctaatgatttggctggatggtcagggatttagaaggaacaagactaagagattggtggctataaggtctggaaaagggatttgtagatagtccttttggaatgggcacagcgtgaggatatctgtatgctgtgtgaatgcttgccttaagatgcccacagcaggcaaggcttttaataatctgatggacaagatgagctatagatgtcagcagcctctttccctagccaca

SEQ ID NO: 918493 - DNA, 675 bp, Homo sapiens
ctgaggcagaagaatcgcttgaacccgggagatggaggttgcagcaagccaagattgcaccactgcactccagcctgggcgacagtgcaagactctgtctcaaaaaagtaaataataaataataaataataaataaattatggggttgtggagaccaaggttttaccatgcagatgaagtctccaagtagtaggcttcagagctcttatcagaccttgaaaggtgcatgactcttagttaattctctcctatatcacggaaaagacctggaaagggaaagggactctctacagaatgtagattttcycgagggacagccttgcagggccatttcaaaatatgtcaaagaaatatatttcagggtaaaatactttgatttattccagatcctgctatctgtcatgtgatgtatcttattgctacaaaaagtctgtttggtcagtcttaagatctctgctttaatgttagtgctggtcagttgtccctgaattccaaagggagtagggtataatagagcatgtctgaccccctcttcccatcgtgtcctgaactagattttcaggtttactttggaatgcccttgactgtgaggggggctcatcagttggttggggagcttagaatcttatttttggtttacacatatgattgatactgaaattttcttaagacgat

SEQ ID NO: 918494 - DNA, 738 bp, Homo sapiens
gtctgcatgctggcggagcttgctctgagcccagacacagccttaggtgaggaggtgtgggagggcattcagaagttgagctggtgtgccctgaaacagcctagcacaagaaagtcagggtgggaccctgaaaacatctgttgtttacctcttgtttaactcaacatcagcgtgattcctgttacagagtggatctaatacattttgaattacggtttaaaataaatatattaatagtttcatgaataaaatgtgatgaaatcatgaaaggaattcccacattactaaatattcctaatcttcttcctctatggtacaaagttaataatcagacacaggcatccctttctagtttcttttattttcacctctctcatttcccaaaatctgacgagctttacattattgttcacttcttggaatgagaagaccactaatgtctaaccaacagagagcccagattttgggaatgaccaatttggagtcagggttacaaatataaaaacacctttgggttccatgttgcagttgcttatctttttcagtaarttggtgtttaacctttccttgatattgctgatatttatcaaatgagtaaaaatagttattttacaaataaacattcgtatttttacaaataaagtaaatacaaaattacaaaatacaaaaatacagaatattgcatgcttaggattggaaatatatattgctaagtagctactacctattacaaaatag

SEQ ID NO: 918495 - DNA, 746 bp, Homo sapiens
tgacctgtgaggtagaagttaatagccctagtgaataaaaaaaggtactgctgggtgtggtggctcatgcctgtaatcccagcactttgggaggccaaggtgggcagatcacgaggtcgggagtttgagaccagcctgaccaacatggtgaaacccctctctactaaaaatacaaaacttagccagggrtggtggcgcatgcctgtaatctcagctactcgggaggctgaggaaggataattgcttgaactgggaggcggaggtttcagtgagccaagattgcaccactgcactccagcctgggtgacagagcgagactccatctcacaaaattaaataaataaattttaaaaaggtaacaaaaattaagtaatgtgctcatggtcaaatgcaaaaacaaacaaacaaacaaaaaaacaccaaattccttttccatagaggagcactataagaaataaaggcatgacccactaggatagcttaattttttttaattaaagaaatgcaaataagcattggtgaaggtgggcagaaatttgaactgttgtatatcaccaatgaggcagccactttggagtcagtttggcagttccccaacaaattaggcatagagagttgtcatatgacccagcaattccactcctaagaacattacaactaaaaacatacagtcacatggaaatttatgcacacactcacagcattattattcatgtaaccaaaaggtagaaacaacccaaatgtgc

SEQ ID NO: 918496 - DNA, 576 bp, Homo sapiens
aatactttcaccatcacagaattttttttttttttgagatggagtctcgctctgtggcccaggctggagtgcagtggcgcaatctcggctcactgcaagctccgcctcccgggttcacgctattctcctgcctcagcctcccgagtagctgggattacaarcgcccaccaccacgtccggctaatttcttgtatttttagtagagaacggggtttcaccatgttagtcaggatggtctcgatctcctgaccttgtgatcagcccaccttggcctcccaaagtgctgcgattacaggcgtgagccactgtgcctggcccacaggaatttttattagacattgctgcttagagattctacccttgggtcaatccaggctcacagtgagctctacacaagggcagcactgtttgggtccctcatagaattgtttttatggatttagcttgcaaagaggaacataagaaaaatccctataaatgcatgatggtaagtatcatctgtactctgtggaggacgtcatccaccatgttacacagtgtcttccgctctgaggatccctggaagaaatcttcgtc

SEQ ID NO: 918497 - DNA, 576 bp, Homo sapiens
aatactttcaccatcacagaattttttttttttttgagatggagtctcgctctgtggcccaggctggagtgcagtggcgcaatctcggctcactgcaagctccgcctcccgggttcacgctattctcctgcctcagcctcccgagtagctgggattacaaacgcccaccaccacgtccggctaatttcttgtatttttagtagagaacggggtttcaccatgttagtcaggatggtctcgatctcctgaccttgtgatcmgcccaccttggcctcccaaagtgctgcgattacaggcgtgagccactgtgcctggcccacaggaatttttattagacattgctgcttagagattctacccttgggtcaatccaggctcacagtgagctctacacaagggcagcactgtttgggtccctcatagaattgtttttatggatttagcttgcaaagaggaacataagaaaaatccctataaatgcatgatggtaagtatcatctgtactctgtggaggacgtcatccaccatgttacacagtgtcttccgctctgaggatccctggaagaaatcttcgtc

SEQ ID NO: 918498 - DNA, 616 bp, Homo sapiens
ctgagtgagacaccgtctcaaaaacaacaacaacaacaaaaaccctgagtccacaagagaatgcttcgcagcccctacctgaaggtccccaggcacacagacaacctgtgttatttccaaaatggagatcgttctcatctcactgggctgccatgaggaaataagacacatgatgctattctgtacatgggtgctgtccactgtagtcttatcgagccaaaacccggttttctsccagtgaaatgctaggctgctctggtgcttcaggggtaaagctcagggatgcatcatttgttcatgatcttattagtaaacccagtacttgccctctccagctcagcacatcctcgagggcacaagaaattgagaacatgatgacagggttccccagagcccattaatccaatactctgtgccctgcttctttgagtctccaagaagaaacagccaagtccagagaaaattaggggcaaccgtcctatccttggaaaaccccagaacactctaacctctctgtggtccaacctaaatctatcctgacccattagaaaaaggtcttcatgtctgtccagtgtctaccatactcctggcatgcataggtatttctctcttttta

SEQ ID NO: 918499 - DNA, 660 bp, Homo sapiens
gtacgagggttaggccgtgaggccatgggagcagtggggagccagaccgcaggttcttgtgggccatcatggtgactttggcatttcctcagaatgaagtggagccactggggagccacaagcagggaggtgaggtgacctgacttgtacttcaacagggccatcctagctgttgtattgaaatcgactatggagggaaaggggaagcaagagaccagttaagaggctgttccaataactcaagcaagagatgatggtctcttagaccaaggcgtggcagtggagatggggagaagtagttggattctatactttttccttaaggtagagcttacaggatttgctaacagactgggtgtgaggtgggagggagagttcagtcaaggatgactctcccgggttttggtctgagcrtttggaagactggagttaatggtaactgagatagggagaaggctgtgaataggtgttttgggaggaagatcagatgttctgttttggacatacaaagtttgaggtgtttattagccacgtaaagtcagatttggacgttgaatatatagatctggagttcaggagagaggtctgagctagagataacacatttgggaatataatagtattcagagccgtgagactgaatgaaattaccaaatcagt

SEQ ID NO: 918500 - DNA, 734 bp, Homo sapiens
gaggtgggagggagagttcagtcaaggatgactctcccgggttttggtctgagcatttggaagactggagttaatggtaactgagatagggagaaggctgtgaataggtgttttgggaggaagatcagatgttctgttttggacatacaaagtttgaggtgtttattagccacgtaaagtcagatttggacgttgaatatatagatctggagttcaggagagaggtctgagctagagataacacatttgggaatataatagtattcagagccgtgagactgaatgaaatyaccaaatcagtaagtgtagctaaaagagcaggaatccaaggactggtaccctagggcactccagcattaagagtgaggatgccgggtgcatggctcacgcctataatcctagcactttgggaggctgaggcaggaggatcacttgagcccaggagtttgagatcagcctggacaacatagtgaaactgtgtctctacaaaaaatagaaaaattagctgggcatggtggaggctgaggtgggagcatcacctgagctatgaggaggtcaaggatgcagtgagccgtgattgcaccactgcactccagcctgggcaacagaggcagaccctgtctcaaaaaaaagagtctgaggaggaactagccaaagaaactgagaaaggagtcttgttcttgtgtcctggaagcgagataaagcatatatttcaaggagaaagtgagtgatta

SEQ ID NO: 918501 - DNA, 625 bp, Homo sapiens
gggtatccaacttcaagtctagattatgtgcttacataattataatgaccagaagatctacattgtgttcagcagcagcaacatgtaggcactctcctaagtgctttgcatgagttaaattatataatacagcaaccctctttccctgtctctgtctctccctctctctctacacacacacacacacacatacacacacatgcatatatataggcttgtaaatatatgtctgtatatgtgtgtatatgcatatcacacatatatgttcaacaaatatatatatatatatatatatatatatatatatatatatatgcacacatcccatttttctgataaagcaacgaaagcaagagaggcaggccagtgtcacgcaagtggttaatgacagytgacctttgtcatttggacctttgtcattagaactttgtcaacagacctttgtcaacagacctttgtcatttggaccagaccaccatcctctagttcccactctctccaccatgtctcactgcctttcatcttttgattacttacctatgccagttagtttcctaaccagctttttaggtgatccccatgagcaccctgtgaggttggtgctaccattacccatcatacagat

SEQ ID NO: 918502 - DNA, 646 bp, Homo sapiens
agaatgcaatctcatttacaatagttataaaaatacttaagaatatatttatcgaatgaggtgaaagatacctgcaaggaaaactacaaaacactgacaaaagaaattgtagataacacaaacaaatgggaaacatctcattctcacggatcagaagaattaatgctgttaaaatgaccatactgcccaaagcagtctacagactcagtgcaattcctactgaaatactaatgtcatttttaatggaattagggaaaaaaatcctaaaattgataaggaagtraaaaagagcccaagtagctaaagcaatccgaaaggggggtggggaagctggaggcattacattatccattctcaaattatattaaaaggctatagtaaccaaaacaacatggtttggggttaaaaatagacacatagatcagtggaacagaatagagaacccagaagtgtagccacatacttacagcaaactgatttttgacaaagttgataagaacatacacgggaaaggaaatcctattcaataaataaatgatgctgggtacattggattgcctttgcaaaagaatgaaaccagatccctatctctcgctatgtacaaaaatcaactcaagatgcattaaaggcttaaatgtaagacatg

SEQ ID NO: 918503 - DNA, 646 bp, Homo sapiens
agaatgcaatctcatttacaatagttataaaaatacttaagaatatatttatcgaatgaggtgaaagatacctgcaaggaaaactacaaaacactgacaaaagaaattgtagataacacaaacaaatgggaaacatctcattctcacggatcagaagaattaatgctgttaaaatgaccatactgcccaaagcagtctacagactcagtgcaattcctactgaaatactaatgtcatttttaatggaattagggaaaaaaatcctaaaattgataaggaagtgaaaaagagcccaagtagctaaagcaatccgaaagggrggtggggaagctggaggcattacattatccattctcaaattatattaaaaggctatagtaaccaaaacaacatggtttggggttaaaaatagacacatagatcagtggaacagaatagagaacccagaagtgtagccacatacttacagcaaactgatttttgacaaagttgataagaacatacacgggaaaggaaatcctattcaataaataaatgatgctgggtacattggattgcctttgcaaaagaatgaaaccagatccctatctctcgctatgtacaaaaatcaactcaagatgcattaaaggcttaaatgtaagacatg

SEQ ID NO: 918504 - DNA, 646 bp, Homo sapiens
agaatgcaatctcatttacaatagttataaaaatacttaagaatatatttatcgaatgaggtgaaagatacctgcaaggaaaactacaaaacactgacaaaagaaattgtagataacacaaacaaatgggaaacatctcattctcacggatcagaagaattaatgctgttaaaatgaccatactgcccaaagcagtctacagactcagtgcaattcctactgaaatactaatgtcatttttaatggaattagggaaaaaaatcctaaaattgataaggaagtgaaaaagagcccaagtagctaaagcaatccgaaaggggggtggggaagctggaggcattacattatccattctcaaattatattaaaaggctatagtaaccaaaacaacayggtttggggttaaaaatagacacatagatcagtggaacagaatagagaacccagaagtgtagccacatacttacagcaaactgatttttgacaaagttgataagaacatacacgggaaaggaaatcctattcaataaataaatgatgctgggtacattggattgcctttgcaaaagaatgaaaccagatccctatctctcgctatgtacaaaaatcaactcaagatgcattaaaggcttaaatgtaagacatg

SEQ ID NO: 918505 - DNA, 587 bp, Homo sapiens
gaaattatgctaagtgaagtaaatcagtcatagaaagacagatagcacatgatctcactcacatgatcgcactcaaaaaagttgatatcatagaagtagagcagagaatgaagataatcagaggctaggggtggctagggagtcaggggcttgaggagatactggtcaaaagacatataattgtagctagacaggaagaatcagttcaagaggtctactgtatagcatagtgactatagttaatgatgatatattgtacatactgtattcttgaaaaattctaagaatgratattaagcgttctcaccacaaaaaaatgataggtatgagaggtaatgcatttattagctagatttaatccttccacaatgtatatatacttcaaaatattatgttgtatgtggtaaatacaatattatatgtcaatctgaaaaataactaattgtttttaatttcactgagcttgagttctttctatattaagcacatcatgcaagacacagtagtgggggtagatagattcttaaaagtattatacaggtgttacacagtgttagggagcctgggtgaagtacagacagcctctc

SEQ ID NO: 918506 - DNA, 587 bp, Homo sapiens
gaaattatgctaagtgaagtaaatcagtcatagaaagacagatagcacatgatctcactcacatgatcgcactcaaaaaagttgatatcatagaagtagagcagagaatgaagataatcagaggctaggggtggctagggagtcaggggcttgaggagatactggtcaaaagacatataattgtagctagacaggaagaatcagttcaagaggtctactgtatagcatagtgactatagttaatgatgatatattgtacatactgtattcttgaaaaattctaagaatggatattaagcgttctcaccacaaaaaaatgataggtatgagaggtaatgcatttattagctagatttaatccttccacaatgtatatatacttcaaaatattatgtkgtatgtggtaaatacaatattatatgtcaatctgaaaaataactaattgtttttaatttcactgagcttgagttctttctatattaagcacatcatgcaagacacagtagtgggggtagatagattcttaaaagtattatacaggtgttacacagtgttagggagcctgggtgaagtacagacagcctctc

SEQ ID NO: 918507 - DNA, 589 bp, Homo sapiens
gctgcagctgttatggccaaatgccagaagaaatagagtccacatagagagcagaggagagataggcgttaaaggggtttatcacaattccttctctcagtctgaaatgtgatttttgatggttaagttttctaaagctttatccagttaaaattatcagtcatttcttttcgaataataatatttttgtcttggtcaggaggtatttatctacctaaaaataaaaaaaatcacataaatcatctagtgaggatttaagattttttttgaccttcaagatattgatacacctggaattgatttttttcctacatgatgagtgatcagaatccaagttcatcttttccatgtaaatacttttccatgtaaatactggaaacagstttgattatgattcctttgattatggaacattttcagctttattgctggatatgttctcattttcatccagaatattatttatttgtgtcttctttacatttcttgatcaatcttttcaatggcttatcatttattggtattttttttgaaaaagaaattttggctttgttcatcttctctgtgatgtcgtttttaactagttcat

SEQ ID NO: 918508 - DNA, 717 bp, Homo sapiens
attaatttcctaccccttccatagcaaattactgcaaacagagcggcttaaaataacagaaacttattctcttagttctggaagttggaagtcgtaaatcaaggtgtaggcaaggtggattccttctgagaactctaaggaaggatgtattagttgattctgatgctgctaataaagacatacctgaaactggaaaatttacaaagaaaaagaggttcagtggcctcacagttccacattgctggggagacctcacaatcatggtggaaggcaaaggaggtgcaaagacacgttttacatggcggcaggcaagagagtgtatgcagggcagcttcccttaataaaaccatcagctctcataagactaactgactatggtgagaacagcatggggaagacccacctctatgattcagttacctccmaccgggtccctcccatgacacatgggaattatgggagctacaatttaagacgagatttggctgggggcacagcataactgtagcaaaggatttgttctttgtttctctcctggctcctggtggctccccagcaatcctgggtgatccttagcttgtggctgcattactccaatctctgcctgcattgtcacacatacattttccttctatgtttgtctgtcttcacctaatcttcttgtaagggcaccagccattggatttagggcccactttaatccggtataatctcatc

SEQ ID NO: 918509 - DNA, 592 bp, Homo sapiens
aagaaaaactacaaaaaagaatagaaattctacaactgaaaactacaagataaatttttaaagaaattataggctgggcgcggtggctcacgcctgtaatcccagcactttgggaggtagaggcaggcagatcacgaggtcaggagatcgagaccatcctggccaacatggtgaaactccgtctctactaaaaatacaaaaattaactgggcatggtggtgggagcctgtaatcccagctacttgggaggctgagggaggagaatcgcttgaacccgggaggtggaggttgcagtgagccgagatcacgtcactgcactccagcctggcaacagagtgagactccatctcatttaaaaaaaaaaaamaaaaacaaaaggaattgtatagccttatcagtagatggacaatgccaaagtaatattagtaaactcgcagacaagaataaaaggagtcatacaaactaaaacaaaacaaaaaactgtaacaaaaaaaaagaaagaaaagagcttcaatgatctgtgagacaatgtcaaatagtccaaatagtctaatgtataattgaaatgctagaaggagaagagagagaaaaa

SEQ ID NO: 918510 - DNA, 596 bp, Homo sapiens
tgaattctttttctcagcaaggaatacccctgagaaagagaatgcacccctgagggtaggtctctgaaatggcctccttgggtgtggccatcttctatggtcaagactgtagggatgaaataagccccagtctcccatagcgctcccaggcttattaggacgaggaaattcccgcctaataaattttggtcagaccggttgctctcaaaccctgtctcctgataagatgttatcaatgacaacgtgtgcctgaaacttcatcagcaattttaatttcaccccagtcctgtggtcctgtgatctcgccctgcctccatttgccttgtgatattctattaccttgtgaagcatgtgatctctgtgacccacaccctattcatacactccctctccttttgaaaatccctaataaaaacttgctggttttacagyttggggggcatcacagaacctacgaacatgtgatgtctcccccggatgcccagctttaaaatttctctcttttgtactctgtccctttatttctcaacccagccaatgcttagggaaaatagaaaagaacctacatgactatcgggagcaggttccctgatatc

SEQ ID NO: 918511 - DNA, 593 bp, Homo sapiens
acatggtggcacatgactgtagtcccagctactcgggaggctgagtcaggagaattgcttgagcccgggagacagaggctgcattgaggggacatcatgccaccgcactccagcctaggtggcagagcaagatgctgtctcaaaaaagaaaaaaaaagaatgtcacatgtcaaggacatcaaaacatgacattggatcaataataaaatacaatcaaaactctcagtaagatattaaataatgattatgatctgttagaatggcccatgttctgtaaggtgtagctaatatattgatcatctatgttctataactttcataagagatgggcatcatcaatgaaggattcatctctacatttttccaacacctktcatctacccttctagtccacggcatggtttatgctgactttctcttctctgaacacctttaagttctctgaactattcactaaaacagtagactcctatacactaaatggttaggagagggaatttttctccactaccttcctgttcccagaacccctaatgtggcctcacaagccttgaccagatgtgtatgtgtatgtgtgtgcatgtgtgtgtatg

SEQ ID NO: 918512 - DNA, 628 bp, Homo sapiens
agcaaggctcatttaccattttgaatctcctagggcccttaagaataactctaaatctactctgcctatgctctagaaatgaaacaggacatctgtttatagcatggtttgctgaatattttaagcccactattaacacctactattcagaaaaaaggattcctttaaaaatattactgctcattgacaacacatctggtcaccggaaagctctgatggagaagcacaaggacataagtgttctgttcgtgcctgttaatgcaatataggttcctgcagccaatggatcaaggaataattttgatttccagtcttattatttaggaaatatatctcataaggttatagctgccrtaaacacggattcttctgatggttctgggcaaagtacactgaaatattctaaaaaatattcgcttttgagatgccattaagaacattcaagattcatggaaggaggtcaaaatagcaacattaacaggagtttggaataagttgattccaactctcaagaatgattttgaagggttcaagacttcagtggaggaagaacctggaaatgtggaggaaatagctaaagaactagaattacaagtggagcctgaagaggcaactacattgctgcaat

SEQ ID NO: 918513 - DNA, 650 bp, Homo sapiens
gattccccgtgtagctcccctggctgtgctgtgccctcgacttgtgattatgagcaacaaactttccttttaatggcaggtatctcctgatctgtttaactcctgtgtgtgaaactttgtgattcatgcaatgagaacaaggctttacgtgaacagaccagagcccaggtgcagggcggtcattccagagcccaggtgcagcaggtgcagggcggtcattctgcccacacaggtatgtgttgggggagggcaagttgaaacagagcctgagagatgaattcattaaygaacaaatttgagccccaagccacatttcctcctttacagccaccttggtaggaccctacccaagccccaaatgccaagccagaatgcagagcaagacagcagccctcaaatcccccctctgggaggtgccaggactcccctccttggatgctcagagacaggatgggagcaggtgacggaggcgtgggttcagggccaggcagcctggagacctcccctccctgcgcccagtgccctgctctgtaaaatgcagacactcctaagacctcacgcacagccagggccgctggggatggccgtgcgtattctaccccgcacttaggctcctgtctgaggagatgagaggatgtgaaatgcagcct

SEQ ID NO: 918514 - DNA, 580 bp, Homo sapiens
caacaatgatgtgtggcagtatgcacagtgtgtggccaaccaaggaagcctatctgacccttgttatccagactcctcattagggcaccatcatgtagacatggctgactgctaatgtctcacctcaatctctagctcctctgaaggtcaccctaatatcatgtgacccaaagccccacataaatcacatagtttgattatctggtgtggtccaacgcccataggtaaatagagacacttttatcttgcaggatatttcaaggtgtcagagatgaccatctcccaggagccaaaggcaaagactagaactctctttggaaaaggttaaattatttactacacaatggytaagatttattttagcaaaagatataaaacaaaatcagcaaaggtaagctcataaggcaaagtctggaggaaatcaggaatgtgcttccgagattcctctcccaggggagtcacacaggaggtacttaattcctctagcagcaacttgtgtggtatgtgtgagataatagcagctagacaacattagacttagtgccaaggaatttacttagggaagccataaaggtaccct

SEQ ID NO: 918515 - DNA, 581 bp, Homo sapiens
gctgggagaaccactactctcttcaaagctgtcagacagggacaattaaatctgcaaaggtttctgttgccttttgtttggctatgtcctgcccccggaggtggagtctacagaggcaggcaggcctccttgagctgtggtgggctccaccaagttcgagcttcctagccactttgtttacctattcaarcctcggcaatggtgggtgcccctccccaagcctctctgccaccttgcagtttgatcttatactgctgtgctagcaataagcaaggctccatgggtgtagaaccctccaagccatgcaagggatataatctcctggtgtgccatttgctaagaccattggaaaagtgcagtattatggtgggagtgacctgattttccaggtgccatctgtcaccactttctttgactaggaaagtgaattccctgaccccttgtgcttcccaggtgaggtgatgcctcaccctcttttggctcatgctcggtgtcctgcacccactgtcctgaacccactttccaacactccccagtgagatgaacctggtacctcagttggaaatgcagaaatcatccat

SEQ ID NO: 918516 - DNA, 581 bp, Homo sapiens
gctgggagaaccactactctcttcaaagctgtcagacagggacaattaaatctgcaaaggtttctgttgccttttgtttggctatgtcctgcccccggaggtggagtctacagaggcaggcaggcctccttgagctgtggtgggctccaccaagttcgagcttcctagccactttgtttacctattcaagcctcggcaatggtgggtgcccctccccaagcctctctgccaccttgcagtttgatcttatactgctgtgctagcaataagcaaggctccatgggtgtagaaccctccaagccatgcaagggatataatctcctggtgtgccatttgctaagaccattggaaaagtgmagtattatggtgggagtgacctgattttccaggtgccatctgtcaccactttctttgactaggaaagtgaattccctgaccccttgtgcttcccaggtgaggtgatgcctcaccctcttttggctcatgctcggtgtcctgcacccactgtcctgaacccactttccaacactccccagtgagatgaacctggtacctcagttggaaatgcagaaatcatccat

SEQ ID NO: 918517 - DNA, 644 bp, Homo sapiens
aatgtccccgcctagtttcgacaataagagtatttttaacaggttgaattaaaacaaaggtttaacgctgtgagatgaatttacacatcacaaagcattttcacagatagcttcttcctagtttctattttgtgatattcagtttctcactacaggcctcagtgggttaaggaatgtcactttgttgtttccagagaaagagtgtttttaaccccttgaatcaaagcgaaggtttaactctgtgagatgaatctacaaatcagaaagggttttcacacgtagcttgtttctagtttttatccggggatatttggtttttcacaataggcctcaasgaactcagaaatgtccctttgtagattctacaagaagaggacttctaatttggtaaatccaaactcaggttccatttggtgagatgcatttacacatcacaaaacattttcacagatatcttgtttctagtttttatcatggcatattcggttttatattgtaggcctcaatagactcagaaatattttttcacagattctacagaaaaagtgtttactaactgttgaattaaaacaaaggttcaacactgtgagatggatctgcacatggcaaaacatttttacagttagcttgtttctaatttttaa

SEQ ID NO: 918518 - DNA, 788 bp, Homo sapiens
aggcgggcggatcacctgaggtcaggagttcaagaccagcctggccaacagggtgaaaccccatctctactgaaaatacaaacaaaattagctgagcatggtggcgggcgcctgtagtcccagctactcaggaggctgaggcaggagaatcgcttgaacccgggaggcggaggttgcggtgagccgagatcgcgccacggcactccagcctcagcaacaagagggaaactctgtctcaaaaaaaaaaaaagaccatagaaatgcttcctcacacaggcctgagggccggaagcccgtcccctctggaggcagcaggggaaggcccgtcctgcctctcccagtgctggtggtggccggggctccctgacatccttggcccgtggccgcatcgctcgtctctgsccctctcatcctgtcccgcgtccttctctctgtgccctcactcagcttctcataaagacggcagtcaccgggtcagggtgacctgaatccaacgtgaccttgtttaatgacacctgcagagagcctgttccacagaaggcctcattttggggttccaggttggcatgaatttcggtgaaataacaatgacctggacccatgacaaagtcactgagctgctgaattaaccaaccccagagccgccgaccccgggttcttctcgcaggagacaatcaaggtccctttggcgcccagcagctccgagtcaggtctgtggtgacagccctaaaggcatcgcgagtgccatgacccagggaagggctctcgggcagctctttgacctgctg

SEQ ID NO: 918519 - DNA, 661 bp, Homo sapiens
gtttctccatgttggccagccaggctggtatcgaactcctgacctcaggtgatccacctacctcggcctcccaaagtgaccactgcgcccggcgcctttggttcttacatgagcctcctggagctgctgtgacaatgcaccacaaaccagggggcagggggaggcttgaaatttattctctcacaagtctggaggccagaagcccaacatgaagatgtggtggggccgtggtgcttctgaaggctctggcgggaggatcttctctgtctcttccagcttctgggggtggcctgccatagttggtgtcccttggcttggggccacatcactccaagctctgcctgcatcatcatgtggccttcttccctgtgtctctttctccttttttgtttttatttttattttttgagatggggtctcggtctgtcacctggctggagtgcagtggcacgatctcggctcactgcartctctaccccacaggatcaagcaattctgcctcagcctctcgagtagctgggattacaggtgcacgccaccacacccagctaatttttgtatttttagtagagacgggggttttgccatgttggccaggctggtctcgaactcctgacctcgtggtctgcccgccttggcctttcaaaatgctgggattaca

SEQ ID NO: 918520 - DNA, 666 bp, Homo sapiens
ctgacgggtgtgagatggtatctcatcgtgctttttatttgcatttctctgatgattagtggtgttgagcattttttcatatgcttggaccacaaaggtcttagaaagccaggtggcttattaagtttctgtagtattctcttccttcccccgttactatttttttactggagagaggcaccaattcctgcacagcataactctggccagtaagtcaaacttagacctgggtgtcttccagggacaaggcagtgccctgagtgccagggtaagtacaaaacaagtccaaccccctaggggacaggtagtcagtccccttggaagcacattgtttgcaatggtcgggacaccccaagcaggacttaacattggtcaggcagtcgggttagcagggctcccagtgtgacctcccactgtgggcctcctgtcctagggytctcagtgtagaccgaataattcagtttagtcctcagtttcagaggctctgcctgaggcatcattttcaagcagttttgcatgtctgtgataccagttcattgacctctccagtatggacgacacctggagatgtcctttgtgggaagttcaggaactggggccacttgctgctgtctcagggttgtcggatgtgatcagaggcttagcagccaacctgaattcagagca

SEQ ID NO: 918521 - DNA, 611 bp, Homo sapiens
agacaaggtcttgctatgttgaccaggctggcctcaaactcctggcctcaagccatcttcctaccttggcctcccaaagtgttgggattacaggtataaaccattgtgcccagcctaagtagaaatattaaatgtcaattggggcttgatttccaytgccgattataaaaaaaaaattgtccaatactgttgtaattgagtgactgagtataagccactataaatagttacaggaattatcaaaaaagatatagtcctatgatctactctgtagaaagttctttctcagaagcttacagacagaccatggaaagaagaattatattcttgaaattctatgattttagaactaatcacagtaatatctaagtgctggaaaacagaaagtatttatctgggatccttattctagaagaagaggttgggttaagttaaagaagccagggctctgacagcgtccccatcccaattcctgactcaatcacaacagctccgcttccgtgttacatgttacatgctgggtgttctttcataaattatgtttgaaaaagaatcccctaggagcaggaaaggctcccgacttgtactcaagtagaagagaaggcaggtgt

SEQ ID NO: 918522 - DNA, 446 bp, Homo sapiens
tcttttaagtagagaatttaggccatttacactcagcattagtattgagatatgaggtagtattctattcttcatgctagttgttgcatgaataactttttttttcattgttttattgttttacaggccctgtagaacatgctttagggaggttctattttggtgtattttaaggttttgtttcaagatttagaactccttttaacatttcctgcagtactagcttggyagtggtgaattctctcaggaattgtttgtctaaaagagactttacccctccttcatttatgaatctcagtttggctggacacaaaattcttggctgataattttgtttcaggagtttaaagataagaccccaattcctgctggattgtagggtttctgctgagaaatctgccattaatctgataggttgtcctttaaggttaatggaggagaccacc

SEQ ID NO: 918523 - DNA, 629 bp, Homo sapiens
caagttgaggagacccatagtggatagatccttcctgaagctggtagtcctgatgtctgtgttagtctggctgggtccagggtttttatgggctcagaagggaggtggtgtgtgctgactggtccatgggcagccatgggcggccatgggcaggcctggaaaaagcaccataagttttctctctgggccgtggattccacccagaactagcagccctgcccccaggctttaggccrtctctggcttgaaggtggtgctcaccaggtacccacccctttctacccaggaacctgtctgcctcctgctgccatcaacattttgtccatggtgcctggctgctcatgctgaggggtgcctgcgggcccacactaagctgtcctcagcatccttcctgttcttgttggtgcccaaagtctggagggggccaaggcagcagaaggctggtgtttcagcactgccctgagtgtgcaaactcctagctgagtcatgacagcgcccaggtttgaccacaactttgctccaaaatcagaggggttactgggagctggggagcagtgggagcaggcatttccaagcctgtggggacaggggtgtcttcctgggcccctgagagcacagggatacctggg

SEQ ID NO: 918524 - DNA, 843 bp, Homo sapiens
cttttaaagatcaaatggaaactgcacacagcctactgaccacagagttcagggaaggcggaatggatgaaccagacactcaaacagctactaaaaatgttttgccaggaaactcacttacgatgggatcaggtcttgcccatggtcctcctccaggtcaggtgtacacttacagaacaaattgggtattcaccctatgaaatattatttggaaggccacccccaatcattaatcaaattagagggtagttaaaggagttaggagagctaacccttagaagacagatgcaggctttaggagtggcaatgcaggaggtgcaaggctgggtaagtgaaaggatacctttaagtctaacagacccagtgcatccacataaaccggggattctgtctgggttaaaatgtggaatccaggctgggcctggtggctcacacctgtaatcccagcactctgggaggccggcgggggggagatcacgagatcaggagaatgagaccatcctggctaacacggtgaaacccygtctctactaaaaatacgaaaacaaaaaattagccaggcatggtggtgggtacctgtagtcccagctacttgggaggctgaggcaggagaatggcatgaacccgggaggcacagcttgcagtgagccgagattgcgccactgcactccagcctgggcaacagagcgagactccatctcaaaaaaaaaaaaaaaaaaggtggaatccaacaaccctggggcccttataggatgggctccatattgtgatcatgtctactcccactgctgttaaagttgcaggtgtcacaccttggattcaccatagctggctaaaaccagc

SEQ ID NO: 918525 - DNA, 563 bp, Homo sapiens
tatttgaatggctatttctcatggataacccaaaaatcagcagcttggaaaaatttgagccccaaagtcacaacccactgtggaagaaatagcttgaatatgactctcttcaatcactagtctaagcattgtcgatgattaagagctttatctccccttcaagcaagagaaaaagaacrtgacaagttggaagaatgtagcaagatgtcagttgccattctgaatgctctggtttgggttatgactggtcattaattttgttgttgcctgaagatacatctgctaaagtgttattttcagaaaatcactgttctcatctccaattctttattccccagggcaatttaagtatttttaaagaatatatttgtaccaagaagagagaaaaaagcaaccatagaatagggtcgttgtttcagtttgggggaccagagcttccctaagtggatggaggtgtttaaaggactctgcacatttccaattatcacgctgctgataaagacatacctgagattgggcaatttacaaaagaaagaggtttaattgtattcacagttccacgt

SEQ ID NO: 918526 - DNA, 618 bp, Homo sapiens
gttttttttacagttccatttctatttcgcattctaatttatatcattaactaattatatcaaactcaaaaattgatatgaaggtcactgagcaaaagtatattgattaaatatgcagcatggctatcttactgagatttcaaaatacaattttttatgttaaaattcacttagaaaaatttatattttaaatattgcattkcttatgcttatcttgcactgcaattgactattcattatttcaaatttcagagagttccttgatagtcccctaaagctgtcatatagatagttcctttgaagagaaagagtacaaagtgtgaaaaccttgaattttaatttttaaattagttttggcaaatgaaaactattttagcacttcagagtcacatactccattaactctacctttacctaagactagaattatgaagactcagtagaaagacaattagaaatatattattttagtaaaaaataggaaatggccgaaagataatgctactacattctactaattacaaaaagcaaataatggattcgaaaaagtttaagcagaatatttttactatgatttcagtatgtcttttaatcaaggatctatagctaactgtttta

SEQ ID NO: 918527 - DNA, 470 bp, Homo sapiens
gcactttatgcaaactgtcaggccaagtataagactgaagtctattttgcaaacaactcagtcctatcatgaattgtttttaacaaaaatgaggactggggagataaaaattatgtttcaaaacttaccacacatttgtcattaaattctagtctcattagttgttttgaatttttttttgcctacattttacattaaccctcttattcctgtgaaccaaccagcaatttctggctacaactcagaagaaacaaaaggcatgggtaatgtaataatctggatcaatattttaattctgagcagttatcctgcwaatcctgacatctgataggagtaaatagggtgcccataacccagaggttcctctgggaaaataagaccaaaggagcaaaccaaagccaagccccatgcaaccaatcttagcaggcataattatagccaccagttatctgggcatgctgacagccttg

SEQ ID NO: 918528 - DNA, 605 bp, Homo sapiens
aatatttttagttttgtaaggaaccaccaaactatattccaaagtgatcatgccaatttccattcccagtatcaataaatgagtgtgacagttactccacattctcaacagcatttggtggtgtcactgttctaagttttgggcattctggtagtgtgtagtagtatctcwttgttgttttaaagtgaatttcactgatgacatctggcctacaatgtcttttcacaagcttatttgctctgtgtatatcttcttggggaggtgtctgttcagttcttggcccctttttttgttatcagattgttttctttttgttgaattttaagagttcttcacatatttcagtcctgtatctcatatgtcttttgcaaatattttgtccagtctgtggcttgtcttttcaaacttttcacattttttctttcatgaattatgccttttgcatggtatctatgtcattgccatactcaatgtcacctaaattttctcttcaattatcttctaaaagttttatggtttggttttacctttatgcctataatgcactttgaggtaatttgcatggtaaggtctgtgtctagattcattttcttgtttccagatat

SEQ ID NO: 918529 - DNA, 695 bp, Homo sapiens
gaagccatggcagaagaacataaattgtgaagatttcgtggacatttattagttccccaaattaatacttttataatttcttatgcctgtctttactgcaatctctgaacatcaattgtgaagatttcatggacacttatcacttccccaatcaatacccttgtgatttcctatgcctgtctttactttaatctcttaatcccatcatcttcataagctgaggaggatgtatgtcccctcaggaccctgtgatgattgcgttaactgcacaaattgtttgtagagcatgtgtgtttgaacaatatgaaatctgggtaccttgaaaaaagaacaggataacagcaatgttcagggaacaagagagataaccttaaactctgactgctggtgaaccaggtggaacagagccatatttctcttctttcaaaacaaatgggagaaatatcactgaattctttttctcgacaaggaacatccctgagaaagagaatgcktccctgagggtaggcctctaaaatggccacttcaggggtggccgtcttttatggtcgaagcttagggatgaaataagccccagtctcccgtagcgctcccaggcttattaggaccaggaaattcccacctaataaattttggtcagactggttgtctgctctcaaaccctgtctcctgataagatgttatcaatgacaatg

SEQ ID NO: 918530 - DNA, 822 bp, Homo sapiens
ataaattgtgaagatttcgtggacatttattagttccccaaattaatacttttataatttcttatgcctgtctttactgcaatctctgaacatcaattgtgaagatttcatggacacttatcacttccccaatcaatacccttgtgatttcctatgcctgtctttactttaatctcttaatcccatcatcttcataagctgaggaggatgtatgtcccctcaggaccctgtgatgattgcgttaactgcacaaattgtttgtagagcatgtgtgtttgaacaatatgaaatctgggtaccttgaaaaaagaacaggataacagcaatgttcagggaacaagagagataaccttaaactctgactgctggtgaaccaggtggaacagagccatatttctcttctttcaaaacaaatgggagaaatatcactgaattctttttctcgacaaggaacatccctgagaaagagaatgcgtccctgagggtaggcctctaaaatggccacttcaggggyggccgtcttttatggtcgaagcttagggatgaaataagccccagtctcccgtagcgctcccaggcttattaggaccaggaaattcccacctaataaattttggtcagactggttgtctgctctcaaaccctgtctcctgataagatgttatcaatgacaatgcatgcccaaaacttcattagcaattttaatttcgccccggtcctgtggtcctgtgatctcaccctgcctccatttgccttgtgatattctattaccttgtgaagcacgtgatctctgtgacccacaccctattcttacactccctc

SEQ ID NO: 918531 - DNA, 582 bp, Homo sapiens
ccacctggctaccacctttgttcactcaaggccctagggctctacaatcagcaagtgaagccagtgcagtttgtgtccttcccttcaggatgttgagttcccccaggcgggtccagagatgctgcttgggagccagggattggagtcaagaatcttaaaaatttgccttatgttctattcttctgtggctaagctggcattcaaaccacaatatatatttctccccattcttccctctcctttccataggcgaggagcctccctgtgagcactgccaccaccactggcctakcatggggttctgccaggtcaccactgatgttcacttaatgcccaagggctcctcattcatcttgtggtgaatgctgccagtcctgaaactcagccttcagggccatgggctctgctctggccccagggcagatccagaaaggctgttcaagagcctagttctggaatcgggaaccccacacttttgcttacggctctaccccactgttgtggagctggtaccttaggtgaaagacaaagtcccatttacttttctctctgcttttctcaaacagaaaggtctttcactgt

SEQ ID NO: 918532 - DNA, 670 bp, Homo sapiens
cttcagattgaggaatataagataggcagtagtttttgacagcaaatcgcctcttaatcttaaatgttctgcttaatagtggaataaaatcatacaatccaacacataatgtttagtatgactagacagccccaatacttggtgtacagtagatgctcattgagggtttaccaaatgatcacgttcttctcatacctgatgcagaccataaaaggttcgagtcttccctgccttcagaggtggtccagatctaaaacaagaggaaatagtcrttttaaaacaagtattttgctcggttcacttgggaaggcacacttacatactcggcattatcacactattctgctaactgcttccatggtctttttcacttatgtttttatccaaatacagaatgctctcaagccagatttctttcttttttttttttttaaatagagacagggtctcactctgttgcctaggctggtctcaaactcctatgctcaagcaatcctcccacctcagcctcccgaggtgctaggattacaggtgtaatacagattacactgctgatctaccgtgcccagcccagatttcttaggtgtagcctttctaattctagctcaaaaactatttaacaaactttcagattagatctaacacaaacatatttaaaaacaatggaaag

SEQ ID NO: 918533 - DNA, 597 bp, Homo sapiens
aaagcttatgattctaatgtcagagatcctgtctataggaacaatgggaatgcaaatggtcagtatgtagtgctaggtgacttttagcaacaaggaagtgggccaaagtacagcctgattaatgcttaattataactatatttctgcctagaacttggcatgaaatttttgtcaacacagtggggatggtttcaatagaaagttttcaagtagtgctcaatatttttatatatttttattttctgtaaagcgttttgttttttttaattccttattttttacttttttttttttaacggagtcttgctctgtcacccaggctggagtgcactggtgtgatctcagcttattgcaacctccayccctgggttccagcgattctcctgcctcagcctcccaagtagttgggattacaggcgcccgccaacacgcctggctaatttttgtattttcagtagagatggagtttcaccatgttggccaggtgggtcttgaagtactgacctcaagtgatccacccgccctggcctcccaaattgctgggattacgggcgtgaaccaccgcgcccggctggttttaaatttctcattgtaaaa

SEQ ID NO: 918534 - DNA, 627 bp, Homo sapiens
aatgagtgtcaatcagtaaagcaaaacagagttagagtgaaaagaaggcacgtaaggctatgtccaaactcggtcttccgtagataacaggggttactacagtcactactggaaatctaagaatatcttctttgtcatcacaaaaccagatgtctacaagaaycctgcttcggatacctatgtgtgtgtttttggggaagccaagatcaaggatttatcttaacaagcatgggtagcacctgctaagacacagagtgagctgtctcaaacattcaagaaaacacacagactccaactatacaagacgagactggagaggaaaaggttgatgatacaggtgtggaagttaaggacgtagaattggtcatgtcacaagcaaatgtattgagagcaaaggaagtccgagccttgaagaacaagagtaatcatattgtaactgctattacagaattaacaatgtgaccacctgaaaatgactgtttttgtgtgtttcaaaagaataactgcaacttggtttgaaatttgtacctgtttctatcataaataaaattatggcttcttcttggaaaaatattagaataaaataaacattcaaattatgcaaagtcccacagtcactgcactccc

SEQ ID NO: 918535 - DNA, 627 bp, Homo sapiens
aatgagtgtcaatcagtaaagcaaaacagagttagagtgaaaagaaggcacgtaaggctatgtccaaactcggtcttccgtagataacaggggttactacagtcactactggaaatctaagaatatcttctttgtcatcacaaaaccagatgtctacaagaatcctgcttcggatacctatgtgtgtgtttttggggaagccaagatcaaggatttatcttaacaagcatgggtagcacctgctaagacacagagtgagctgtctcaaacattcaagaaaacacacagactccaactatacaagacgagactggagaggaaaaggttgatgatacaggtgtggaagttaaggacgyagaattggtcatgtcacaagcaaatgtattgagagcaaaggaagtccgagccttgaagaacaagagtaatcatattgtaactgctattacagaattaacaatgtgaccacctgaaaatgactgtttttgtgtgtttcaaaagaataactgcaacttggtttgaaatttgtacctgtttctatcataaataaaattatggcttcttcttggaaaaatattagaataaaataaacattcaaattatgcaaagtcccacagtcactgcactccc

SEQ ID NO: 918536 - DNA, 741 bp, Homo sapiens
ctttaacaatagactagaccaagcagaagaaagaatttcagagcttgaagacaggtctttcaaattaacccagtcagacaaaaagaaagaaaagagaattaaaatatgaacaaagccttcaggaagtatggggttatgtaaaacatctgaacccatgaatcataggtattcctaagggagaatgaagkgtaaaaagtgtggaaaatctacttgaggaaataattgaggaaaacttccctaaccctggctagagatttaaaatccagatagaagatacttagagaactcctggaaaatacattgcaagatggacttcaccaagacaaatagtcatcagacaatctaaactcaatgtaaaggaaaaaaaatcttaaaatgagcaagagaagagaaaaagtgtcctaaaaacctatataggaaattccatcagcctaacagtggatttttcaggccgggcacggtgggtcacgcctgtaatcccagtactttgggaggctaaggtgggtggatcacgaggtcaggagatcgatactgtcctgggtaacacagtgaaaccccgtctctactaaaaatacaaaaaattagccgggcgtggttgcaggcgcctgtagtcccagctactccggaagctgaggcaggaaggagaatggcgagaacccgggaggtggagcttgcagtgagccgagatcgcgccactgcacgccagcctggacaacggagcgagactccgtctcaaaaaaa

SEQ ID NO: 918537 - DNA, 741 bp, Homo sapiens
ctttaacaatagactagaccaagcagaagaaagaatttcagagcttgaagacaggtctttcaaattaacccagtcagacaaaaagaaagaaaagagaattaaaatatgaacaaagccttcaggaagtatggggttatgtaaaacatctgaacccatgaatcataggtattcctaagggagaatgaagtgtaaaaagtgtggaaaatctacttgaggaaataattgaggaaaacttccctaaccctggctagagatttaaaatccagatagaagatacttagagaactcctggaaaatacattgyaagatggacttcaccaagacaaatagtcatcagacaatctaaactcaatgtaaaggaaaaaaaatcttaaaatgagcaagagaagagaaaaagtgtcctaaaaacctatataggaaattccatcagcctaacagtggatttttcaggccgggcacggtgggtcacgcctgtaatcccagtactttgggaggctaaggtgggtggatcacgaggtcaggagatcgatactgtcctgggtaacacagtgaaaccccgtctctactaaaaatacaaaaaattagccgggcgtggttgcaggcgcctgtagtcccagctactccggaagctgaggcaggaaggagaatggcgagaacccgggaggtggagcttgcagtgagccgagatcgcgccactgcacgccagcctggacaacggagcgagactccgtctcaaaaaaa

SEQ ID NO: 918538 - DNA, 741 bp, Homo sapiens
ctttaacaatagactagaccaagcagaagaaagaatttcagagcttgaagacaggtctttcaaattaacccagtcagacaaaaagaaagaaaagagaattaaaatatgaacaaagccttcaggaagtatggggttatgtaaaacatctgaacccatgaatcataggtattcctaagggagaatgaagtgtaaaaagtgtggaaaatctacttgaggaaataattgaggaaaacttccctaaccctggctagagatttaaaatccagatagaagatacttagagaactcctggaaaatacattgcaagatggacttcaccaagacaaatagtcaycagacaatctaaactcaatgtaaaggaaaaaaaatcttaaaatgagcaagagaagagaaaaagtgtcctaaaaacctatataggaaattccatcagcctaacagtggatttttcaggccgggcacggtgggtcacgcctgtaatcccagtactttgggaggctaaggtgggtggatcacgaggtcaggagatcgatactgtcctgggtaacacagtgaaaccccgtctctactaaaaatacaaaaaattagccgggcgtggttgcaggcgcctgtagtcccagctactccggaagctgaggcaggaaggagaatggcgagaacccgggaggtggagcttgcagtgagccgagatcgcgccactgcacgccagcctggacaacggagcgagactccgtctcaaaaaaa

SEQ ID NO: 918539 - DNA, 741 bp, Homo sapiens
ctttaacaatagactagaccaagcagaagaaagaatttcagagcttgaagacaggtctttcaaattaacccagtcagacaaaaagaaagaaaagagaattaaaatatgaacaaagccttcaggaagtatggggttatgtaaaacatctgaacccatgaatcataggtattcctaagggagaatgaagtgtaaaaagtgtggaaaatctacttgaggaaataattgaggaaaacttccctaaccctggctagagatttaaaatccagatagaagatacttagagaactcctggaaaatacattgcaagatggacttcaccaagacaaatagtcatcagacaatctaaactcaatgtaaaggaaaaaaaatcttaaaatgagcaagagaagagaaaaagtgtcctaaaaacctatataggaaattccatcagyctaacagtggatttttcaggccgggcacggtgggtcacgcctgtaatcccagtactttgggaggctaaggtgggtggatcacgaggtcaggagatcgatactgtcctgggtaacacagtgaaaccccgtctctactaaaaatacaaaaaattagccgggcgtggttgcaggcgcctgtagtcccagctactccggaagctgaggcaggaaggagaatggcgagaacccgggaggtggagcttgcagtgagccgagatcgcgccactgcacgccagcctggacaacggagcgagactccgtctcaaaaaaa

SEQ ID NO: 918540 - DNA, 594 bp, Homo sapiens
cacccgcattgagtatgagtcctccttttccagtccactgactcaaatattaatctcctctcgtaacacccttacagacacacccagaaacaatactttaccagctatccaagcatccttcaatcaagttgacacrtaatattaaccatcacaagggttttttgcaatagtgttcagttttagtctttgtgccctataggccttgacaaattcatgatgccatgtttccatgattacagtttcatgtagaatgttttccaccaccctaaaagatcccatgtgatttacctatttacctctgcccctaccctgtattcctggaatccactgatgtttttaaatacctctattgttttaccttttccagaaccttatatcattggaatcatatagtatacagttttttagactgtcttctttcagatagaaatatgaatttaagattcattcatgtatttgcatagcttgataatacgttcattattgctgaatagtatttcattatatacatgtaccactctctctttatccatttacctcttaagggacatattagttacttcaagttttagacaattatgaataggtctgcca

SEQ ID NO: 918541 - DNA, 627 bp, Homo sapiens
agccagctgaaacagaaggcgtaaatattatccagagtgtcataatataatatggaaatatgcacatttcaattgagctttatttatcatatccagaaccaggaaaagttcaaactgaatgaaaagagacaatcaatagatactaacacaatataacagatgttagaattatctaataaaaattttaaagcagacataacatagctcaagcactaatgaacatgcttgaagcaaatgaaagaataaaaaatctgagcaaagaaatagaagacataaaaaagraagaactaactggaaatcttagaattgaaaaatacaataatgcaaataaaaagctcagtagatgagctccacagcagaatggagggaacattgaaaagagtcaagaaactaaaagatagatcattacaaattataggttgagcattccaaatctgaaaatgcaaaaccagaaatgcttcaaaatttgaaagaaaaaaaaataggaatgtgaaatacttctggtcctaagcctttcaaattaaagatactcaacctgtatccactttgagtaataaagaagatagaccataaaagcataaagacagaaaagagcctcaggcacccatggaatagtaacaaagattg

SEQ ID NO: 918542 - DNA, 663 bp, Homo sapiens
aaaccagtgctccgacaggtcccaggtccttcctcacgggccaaagttaatccaccgcatctccctcccctgcttcgctcattccacctggatcccagtttccttatctgtacaatgaagacagtaagaatgacaaagaaaagcagaattagaaagaaattactccagctattgttttaataaaagaaaaacttcagccaaattaaatttaaagaggtttaattgagcaatgagtgaytggtgaatccagcagccttctgagccagagtaggcttggggactccagcggagccatgaggtggaagaagatttatggacagaggctgggcgcagtggctcatgcctgtaatcccagcattttgggaggccaaggccggcggatcacaaggtcaggagtttgagaccagcctggctaacatggtgaaaccccatctctactaaaaatacaaaaattagccaggcgtggtagcacgtgcctataatcctagctactcagaaggctgaggcaggagaatcgcttgaacccaggaggcagaggttgcagtgagccgagattgtgccactgcactccagcctggaacagagcaggactccaccttgggaaaaaaaaaaaaagatacatggacagaaaaaggaaagtgacgtacagaaaacagaagtgag

SEQ ID NO: 918543 - DNA, 663 bp, Homo sapiens
aaaccagtgctccgacaggtcccaggtccttcctcacgggccaaagttaatccaccgcatctccctcccctgcttcgctcattccacctggatcccagtttccttatctgtacaatgaagacagtaagaatgacaaagaaaagcagaattagaaagaaattactccagctattgttttaataaaagaaaaacttcagccaaattaaatttaaagaggtttaattgagcaatgagtgactggtgaatccagcagccttctgagccagagtaggcttggggactccagcggagccatgwggtggaagaagatttatggacagaggctgggcgcagtggctcatgcctgtaatcccagcattttgggaggccaaggccggcggatcacaaggtcaggagtttgagaccagcctggctaacatggtgaaaccccatctctactaaaaatacaaaaattagccaggcgtggtagcacgtgcctataatcctagctactcagaaggctgaggcaggagaatcgcttgaacccaggaggcagaggttgcagtgagccgagattgtgccactgcactccagcctggaacagagcaggactccaccttgggaaaaaaaaaaaaagatacatggacagaaaaaggaaagtgacgtacagaaaacagaagtgag

SEQ ID NO: 918544 - DNA, 663 bp, Homo sapiens
aaaccagtgctccgacaggtcccaggtccttcctcacgggccaaagttaatccaccgcatctccctcccctgcttcgctcattccacctggatcccagtttccttatctgtacaatgaagacagtaagaatgacaaagaaaagcagaattagaaagaaattactccagctattgttttaataaaagaaaaacttcagccaaattaaatttaaagaggtttaattgagcaatgagtgactggtgaatccagcagccttctgagccagagtaggcttggggactccagcggagccatgaggtggaagaagatttatggacagaggctgggcgcagtggctcatgcctgtaatcccagcattttgggaggccaaggccggcggatcacaaggkcaggagtttgagaccagcctggctaacatggtgaaaccccatctctactaaaaatacaaaaattagccaggcgtggtagcacgtgcctataatcctagctactcagaaggctgaggcaggagaatcgcttgaacccaggaggcagaggttgcagtgagccgagattgtgccactgcactccagcctggaacagagcaggactccaccttgggaaaaaaaaaaaaagatacatggacagaaaaaggaaagtgacgtacagaaaacagaagtgag

SEQ ID NO: 918545 - DNA, 573 bp, Homo sapiens
ttatttataaattctggatgaaaatcttttatcagctatatttggcaaatgttttctcccaatcttcacttatcttttcattttttaaaatgatgtccattgaagagaaaatatttaatttgggaaaatttatcaayttttatggtttgggctgtttgtatcttatctaagaaatctttgcctaatcaaaggtcacaaagagtttttcttatatttgctagtagcagttttatagtctttgttcttacatttaggtcttatgctccattttgaattattgctttataaatagtgtgaggtaatatttgaagctaatttctttttgcgtttggatttcaaaaggttccaataccatttgttgaaagaaagcctattatttcctttagtgaattacctcagcagatgtgtcaaaaatcaattgattccacatttgtgatatttctggactgtatcttctgtttccttaatctgtatctcttcttttgtcaatattacattgtcttattactatagtaacaagtaaaccttgaaatcaaatagtattaagtcttgacattttgttcttttcccagt

SEQ ID NO: 918546 - DNA, 621 bp, Homo sapiens
tgacgtaaaattaaccattacgactggtgactattctttttgtcttagtaaaagctctgatttagatcaaatgtaacaaaactttcaggtagataataagggaaatagttctgcttttttcaaaattaatttctaaagaactggcatttggtgcttcagcttagatgtgacttggggtgtattttaaggaaacaaccacactctaagcacaattaatatgagacactcagggttgtttgccaggaatagaatatatactgcaagtgatttaagaaaatattataataaattaaatggtggcctttttctcccctctcggtagttttcgtatagtattaaagacttcctgagattmcttagataaatatgatataaaaataaaatttaagaagaaaatctacaattaggtttttccccttataattttcaggcttttaggctgtatctcttgaaatgatatataaaaatgataatgactcagatatggttaacacagataatcagcttagataattaccgcagaagagtggctctctttatttcaactggctattttaatagatcagctaagcctaataataatcaagcaatttctccttaatttgtgctgggcacataaaa

SEQ ID NO: 918547 - DNA, 623 bp, Homo sapiens
ttgattaaaggcatttaaggattactttgtctaattaccagctgaccactaaactaaccaatagagacttcaatagccacatagaacaaagatacagaatttacagaaatagtgcaagagaaacaccaagcacagaaaaaaaaaaaaaaaaacagaaagaataacataatttagacaggagaggaacctgatttccaaagttaccacattctgttatttgaaatttccagttttcaacaaaaagtatgagacatgcaaagaaataggaaagtatcacccacatacagggaaaaggcattcaatagaaattgtctctgagggagctgcgattggtgaccactagacaaagactttaaatcagctactgtaagtacgtttcaagaactaaaggaaaccattctaaagaactaaagcaaagtatgagaacagtgtcttagcaaatagaraataccaataaagagatagaaaatattttgaaatacacacacacacacaggtacacacagacaactaaatagagattttggagttgaaaagccagtgaaatttaaaaattaataaagaagctaaacagcaagtttgatttggcagaaggaagaatcggtgaacttgaaattgacaga

SEQ ID NO: 918548 - DNA, 520 bp, Homo sapiens
ttgaaattgtctctgaatgtccctggatgttgggtctaggagacagtttttaaagcagttattagaaatatgttctactaaaataaaataagcctgagatttaatcataaaattatagatcatttcacctcaccaacaccttttgtattagggttctctagagggacaggactaataggatagatgcatatatgaaagggagtttattaaggagtattgactcacaagatcagaagatgaagtcccacaatagaccgtctggaagctagggagcaaggragccagtctgaatcccaaaacctcaaaaatagagaacgcgacagggcagtcttcagtttgtggccaaaggcccaagaacccctggcaaaccactggtggaggtccaagagtccaaaagctgaggaatttagagtccgctgttccagggcaggaagcatccagcacgggagaaagatggaggccagaagacttagctagtctagtccttacaccttcctctccctgcttttatcctagccac

SEQ ID NO: 918549 - DNA, 520 bp, Homo sapiens
ttgaaattgtctctgaatgtccctggatgttgggtctaggagacagtttttaaagcagttattagaaatatgttctactaaaataaaataagcctgagatttaatcataaaattatagatcatttcacctcaccaacaccttttgtattagggttctctagagggacaggactaataggatagatgcatatatgaaagggagtttattaaggagtattgactcacaagatcagaagatgaagtcccacaatagaccgtctggaagctagggagcaaggaagccagtctgaatcccaaaacctcaaaaatagagaacgcgacagggcagtcttcagtttgtggccaaaggcccaagaamccctggcaaaccactggtggaggtccaagagtccaaaagctgaggaatttagagtccgctgttccagggcaggaagcatccagcacgggagaaagatggaggccagaagacttagctagtctagtccttacaccttcctctccctgcttttatcctagccac

SEQ ID NO: 918550 - DNA, 662 bp, Homo sapiens
ataactacccagattgagggtgggtctgcctctactagtccactgactcaaatgttaatctcctttggcaacaccctcacagccacacccaggaacaatacttttcgtccttcagtctaataaaattgacactcggtattaaccatcacaccttattatatcaacagagctctagtatagcagattacatctgaaagacctgaaaaacacaagttctatttaagaaagggttctggccagatgcggtgkctcacgcctctaatcccagcactttgggaggccgaggcgggcggatcacgaggtcaggagatcgagaccatcctgactaacacggtgaaaccccgtctctactaaaaatataaaaaattagccgggcatggtggcaggtgcatgtagttccagctactcgggaggctgaggcaggagaatggcgtgaacccgggaggcggagcttgcagtgagccgagagcatgccactgcactccagcctgggcgacagagtgagactctgactcaaaaaaaagaaaagaagggattcttatgggaacccaatgacaacaggacagagggaggaaagcaaggatgctgcaggtaactaaactctctggcacctacagctatggtaaacattaaacatagcccagcttgtagccagattaaca

SEQ ID NO: 918551 - DNA, 662 bp, Homo sapiens
ataactacccagattgagggtgggtctgcctctactagtccactgactcaaatgttaatctcctttggcaacaccctcacagccacacccaggaacaatacttttcgtccttcagtctaataaaattgacactcggtattaaccatcacaccttattatatcaacagagctctagtatagcagattacatctgaaagacctgaaaaacacaagttctatttaagaaagggttctggccagatgcggtgtctcacgcctstaatcccagcactttgggaggccgaggcgggcggatcacgaggtcaggagatcgagaccatcctgactaacacggtgaaaccccgtctctactaaaaatataaaaaattagccgggcatggtggcaggtgcatgtagttccagctactcgggaggctgaggcaggagaatggcgtgaacccgggaggcggagcttgcagtgagccgagagcatgccactgcactccagcctgggcgacagagtgagactctgactcaaaaaaaagaaaagaagggattcttatgggaacccaatgacaacaggacagagggaggaaagcaaggatgctgcaggtaactaaactctctggcacctacagctatggtaaacattaaacatagcccagcttgtagccagattaaca

SEQ ID NO: 918552 - DNA, 662 bp, Homo sapiens
ataactacccagattgagggtgggtctgcctctactagtccactgactcaaatgttaatctcctttggcaacaccctcacagccacacccaggaacaatacttttcgtccttcagtctaataaaattgacactcggtattaaccatcacaccttattatatcaacagagctctagtatagcagattacatctgaaagacctgaaaaacacaagttctatttaagaaagggttctggccagatgcggtgtctcacgcctctaatcccagcactttgggaggccgaggcgggcggatcacgaggtcaggagatcgagaccatcctgactaacacggtgaaaccccgtctctactaaaaatataaaaaattagccgggcatggtggcaggtgcrtgtagttccagctactcgggaggctgaggcaggagaatggcgtgaacccgggaggcggagcttgcagtgagccgagagcatgccactgcactccagcctgggcgacagagtgagactctgactcaaaaaaaagaaaagaagggattcttatgggaacccaatgacaacaggacagagggaggaaagcaaggatgctgcaggtaactaaactctctggcacctacagctatggtaaacattaaacatagcccagcttgtagccagattaaca

SEQ ID NO: 918553 - DNA, 670 bp, Homo sapiens
cccaagccctctcaaatatctcccaatccatttccactgtccctgccttggcccaggccaccttcaggtaatgatggcctctttcccaccacacctgcccctgcgactgtattctccatgcagcagccagagggccaatttaaaacaaactggccggccgggcgcggtggctcacgcctgtaatcccagcactttgggaggccgaggcgggcggatcacgaggtcaggagatcgagaccaaccccgctaaaacggtgaaaccccgtctctactaaaaatacaaaaaattagccgggcgtagtggcgggcgcctgtagtcccagctacttgggaggctgaggcaggagaatggcgtgaacccgggaggcggagcttgcagtgagccgagatcccgccactgcactccagcctgggcgacagagcgagactccrtctcaaaaaaaaaaaaaaaaaaaaaaaaactggccaggcacagtggcacatgcctgtagtcccagctactcgggaggctgaggcaggaggatcgcctgagcccaggagttcaagattacagtgagctagggtcacaccactgcactccagccagggcgacacagcgagaccctttctcaaagacaaaaaaccataaactgagtcatggggctgccctggactctgcctcacccaggtt

SEQ ID NO: 918554 - DNA, 609 bp, Homo sapiens
cccaaaagcagtggcaggggagttccctaaagggactgccccaaaccatcccaggatggggctgttgggattccaaagaaagaaacagcaataccagggtgaccaattcaaagtgtttattagcagaacttatgtacataggggagctgcagtgtatcctcacattggacaccaagayaagagatgctaaagttagtgggtgaaagtttgaggagaaagaggatttgcatagtgttaaagtattaccctcccaagatgtttattaactacaaatgggaaggtagtaatgtacagaaggaaaacacaggagaaaacactttaaccaagtgatgaaggttaatgtcaccagtaataaaacattgatatcatgcacccttggacatgatgatgcaatgtgaaagacacagcatcattactgtgccactgccaagaatacatgcctcatttcagttataaaaacacatcatacaaacccagcggggggaaatttgacagaataaattattggtactcttccaaattgaaaggacatgaagataggtatgacaggcagatgttaggtggccccatgattcccacctcctggagtccacagccttgtttagtccc

SEQ ID NO: 918555 - DNA, 560 bp, Homo sapiens
ccaaaagcagtggcaggggagttccctaaagggactgccccaaaccatcccaggatggggctgttgggattccaaagaaagaaacagcaataccagggtgaccaattcaaagtgtttattagcagaacttatgtacataggggagctgcagtgtatcctcacattggacaccaagataagagatgctaaagttagtgggtgaaagtttgaggagaaagaggatttgcatagtgttaaagtattaccctcccaagatgtttattaactacaaatgggaaggtagtaatgtacagaaggaaaacacaggagaaaacactttaaccaagtgatgaaggttaatgtcaccagtaataaaacattgatatcaygcacccttggacatgatgatgcaatgtgaaagacacagcatcattactgtgccactgccaagaatacatgcctcatttcagttataaaaacacatcatacaaacccagcggggggaaatttgacagaataaattattggtactcttccaaattgaaaggacatgaagataggtatgacaggcagatgttagg

SEQ ID NO: 918556 - DNA, 560 bp, Homo sapiens
ccaaaagcagtggcaggggagttccctaaagggactgccccaaaccatcccaggatggggctgttgggattccaaagaaagaaacagcaataccagggtgaccaattcaaagtgtttattagcagaacttatgtacataggggagctgcagtgtatcctcacattggacaccaagataagagatgctaaagttagtgggtgaaagtttgaggagaaagaggatttgcatagtgttaaagtattaccctcccaagatgtttattaactacaaatgggaaggtagtaatgtacagaaggaaaacacaggagaaaacactttaaccaagtgatgaaggttaatgtcaccagtaataaaacattgatatcatgcacccttggacatgatgatgcaatgtgaargacacagcatcattactgtgccactgccaagaatacatgcctcatttcagttataaaaacacatcatacaaacccagcggggggaaatttgacagaataaattattggtactcttccaaattgaaaggacatgaagataggtatgacaggcagatgttagg

SEQ ID NO: 918557 - DNA, 732 bp, Homo sapiens
ttaaccaaagggctcatgcaggagagaagccctacaaatgtgaaaaatgtgataatgccttccgtcggttttcaagtcttcaagcccatcagagagtccacagtagagcaaaatcatacacaaatgatgcaagttacaggagttttagtcagaggtcacatcttccccatcatcagagagttcccactggagagaatccatacaaatatgaagagtgtgggargaatgttgggaaaagctcacattgtcaagctcctctgatagttcatacgggagagaaaccctataaatgtgaggagtgtggggtgggcttcagtcagagatcatatcttcaagttcatctgaaagttcacactggaaagaaaccatataagtgtgaagagtgtgggaagagcttcagttggcgttcacgactgcaggctcatgagcgaatccacactggcgagaaaccatacaaatgcaatgcatgtggcaagagctttagttacagctcacaccttaatattcattgtagaatccacacaggagagaaaccctataagtgtgaggagtgtgggaaaggtttcagtgtgggttcacaccttcaggcccatcagataagccacactggagagaagccatacaaatgtgaggagtgtgggaaaggcttctgccgggcctcaaatctgctggaccatcaaagaggccatactggagagaaaccgtatcagtgtgatgcatgtggtaagggct

SEQ ID NO: 918558 - DNA, 732 bp, Homo sapiens
ttaaccaaagggctcatgcaggagagaagccctacaaatgtgaaaaatgtgataatgccttccgtcggttttcaagtcttcaagcccatcagagagtccacagtagagcaaaatcatacacaaatgatgcaagttacaggagttttagtcagaggtcacatcttccccatcatcagagagttcccactggagagaatccatacaaatatgaagagtgtgggaggaatgttgggaaaagctcacattgtcaagctcctctgatagttcatacgggagagaaaccctataaatgtgaggagtgtggggtgggcttcagtcagagatcatatcttcaagttcatctgaaagttcacrctggaaagaaaccatataagtgtgaagagtgtgggaagagcttcagttggcgttcacgactgcaggctcatgagcgaatccacactggcgagaaaccatacaaatgcaatgcatgtggcaagagctttagttacagctcacaccttaatattcattgtagaatccacacaggagagaaaccctataagtgtgaggagtgtgggaaaggtttcagtgtgggttcacaccttcaggcccatcagataagccacactggagagaagccatacaaatgtgaggagtgtgggaaaggcttctgccgggcctcaaatctgctggaccatcaaagaggccatactggagagaaaccgtatcagtgtgatgcatgtggtaagggct

SEQ ID NO: 918559 - DNA, 732 bp, Homo sapiens
ttaaccaaagggctcatgcaggagagaagccctacaaatgtgaaaaatgtgataatgccttccgtcggttttcaagtcttcaagcccatcagagagtccacagtagagcaaaatcatacacaaatgatgcaagttacaggagttttagtcagaggtcacatcttccccatcatcagagagttcccactggagagaatccatacaaatatgaagagtgtgggaggaatgttgggaaaagctcacattgtcaagctcctctgatagttcatacgggagagaaaccctataaatgtgaggagtgtggggtgggcttcagtcagagatcatatcttcaagttcatctgaaagttcacactggaaagaaacsatataagtgtgaagagtgtgggaagagcttcagttggcgttcacgactgcaggctcatgagcgaatccacactggcgagaaaccatacaaatgcaatgcatgtggcaagagctttagttacagctcacaccttaatattcattgtagaatccacacaggagagaaaccctataagtgtgaggagtgtgggaaaggtttcagtgtgggttcacaccttcaggcccatcagataagccacactggagagaagccatacaaatgtgaggagtgtgggaaaggcttctgccgggcctcaaatctgctggaccatcaaagaggccatactggagagaaaccgtatcagtgtgatgcatgtggtaagggct

SEQ ID NO: 918560 - DNA, 732 bp, Homo sapiens
ttaaccaaagggctcatgcaggagagaagccctacaaatgtgaaaaatgtgataatgccttccgtcggttttcaagtcttcaagcccatcagagagtccacagtagagcaaaatcatacacaaatgatgcaagttacaggagttttagtcagaggtcacatcttccccatcatcagagagttcccactggagagaatccatacaaatatgaagagtgtgggaggaatgttgggaaaagctcacattgtcaagctcctctgatagttcatacgggagagaaaccctataaatgtgaggagtgtggggtgggcttcagtcagagatcatatcttcaagttcatctgaaagttcacactggaaagaaaccatataagtgtgaagagtgtgggaagagcttcagttggcgttcacgactgcaggctcatgagcgaatccacactggcgagaaaccatacaaatgcaatgcatgtggcaagagctttagttacagctcacaccttaayattcattgtagaatccacacaggagagaaaccctataagtgtgaggagtgtgggaaaggtttcagtgtgggttcacaccttcaggcccatcagataagccacactggagagaagccatacaaatgtgaggagtgtgggaaaggcttctgccgggcctcaaatctgctggaccatcaaagaggccatactggagagaaaccgtatcagtgtgatgcatgtggtaagggct

SEQ ID NO: 918561 - DNA, 569 bp, Homo sapiens
cacagtttctatgcatcagaaatctaggtgtgagctagctgggtccttcctctgcttcagggcctctcataggcttcagttaaggtgtcactcaggctacactcatctgaagggaaggatacactttcaagttcatgtagttattggtaagattcagctccgtgtaggctgttggacctcagtttctcactggctgttggacagagtctgccctcaattcctcgccatgcaggtctcacgaacatggcagtttgcatcctcagagcacacaaaccaaaaggyaaatagagagagcctgccagcaagacagaagtcacaatcatttgcaacctagtcagaaaggtagcaaccctcaacattgccatattctattggttggcagcaagttactcaagcaaaggggatttcacaaggccatgaataccaagaggtgaggatcagaggaggccatctcagaaggtactgaccatagctgctgagcaggaacccaggagcccaagctcccagtgatgatgctggagccaccaccaatgctgttggagcccacggtactgcccgctgctgccact

SEQ ID NO: 918562 - DNA, 565 bp, Homo sapiens
ttatatttatcccatacatatatgacatgtgatttattgaaaagaattagctcttgtgattatgaaagggctgagaagtccaaaatctgcttcatggtccagcaggctggataccctagagacctgatagggcagatagtctggtaggctggctactggagaattccctcttgcttggggaagtcagtctttttgttctgttcaggccttcaactaataggttgaggtccacttacattatggagggcagtctgttttacccaaagattataaatttaaacgttaacctcatctaaaaatactcttcaggctgacacataaaattaaccatcatccctgaaatggctacacagagcctgyactttccttaggagtggaagaaaaacattaggaaaaacgatgcctcttataaactatatgcaaacaggtctcatcggagtagcattcgtacatgtttaattgcagctaattggaggaccctagaaagatttgaactagcttatgcctgagttaggcacgtttgtgaagaaagaaacacttttcaaagaaatgaacaactttcttg

SEQ ID NO: 918563 - DNA, 557 bp, Homo sapiens
attaggagcccagagggtttgatgtgggagtgtctattgtggagcctagcaagagaggcccatcccgctaggctcaacttgctcccataggagattgtagccctaggggaactgctgcacctgaactctgcaggggagtcttgcccattagatgaggctggtcggatctgagcacctcttggtctgctggcttcttctggggccccagcctggccatgtctgcttgcaggcatgccttgggtgcccttgggggcccacatgaagttcctgtgctggtggaccatgactgacaggtggagaactccagcagtgtggccgctgcagatggacatatatcagtccacctgcttcctccccaactgcagcttcccatgggcccatggccacttcccacattgttttgccagaatgtgtgtgcctgggtggattttgcctgccctgccttkccagaacacttttgcatgtgcaccctgtcctgccactgctgctgacaggagagcactccatcctcccccactcgacctgccatactgccattgcagttggagccttggcag

SEQ ID NO: 918564 - DNA, 610 bp, Homo sapiens
tctcgcactttggaaggccagagcaagaggaggcttgagcctaagagtcaatgaccagcctggaaacataatgagactccatctctatttacgtaaaaagaaaaacaattagattggactttttaaaagcctctcaagactaggaagccaaaayaaaaatttgacttgtcctcaggctgtgtctgaaatatctgtacaaattgagtaaatatccctcttcccaaggttgtcctcaaaataacctgaagttcctgggcctgtcagaaagtgacattctttacttagcacaaggtcaggagccctgtaagggagccacatagacaagacactgggccagtcttttttccaagtttactgacttttaagtcaacctccacttctcaaagaagcctcatcatatctgaaaatatgacattacaatcaaagtcttggtaaaaatccagtgtctccaattgtgtcctgttacaaaagaaaagacattgttatttaacttatgcaaataattatattgcctttaaaagttcttgaaaagttttcaagactttttgattccttagggatcagttaaagagaaaggcaaatgtttcagttttgctcatgaaagtatatt

SEQ ID NO: 918565 - DNA, 655 bp, Homo sapiens
ctggcccttggcaactactgttctactttctgtctctatgaattgactactctaggtattttgtataagaggaatcatacgatatttatcgttttgagattcacttatttcacttagcataatgtctttaagtttcatccaagctgtagtacgtgtcaaaatgttctccctttttaaggctaaataatatttcattgtatttgtgacattttgcttttccattcatcaattgatggatacttgagttacttccacctttgggctcttgtgaataatattgctgtaaacacaggtgtaaagatatctctttttaagaccctgatttcagttctttgtggatgtatacctggaattggaattgctggatcatatggaaattcaatttktaatttttcgaggaaccaccatgctgtttttctcagtagttgcatcattttacactccaccaatagtgcacaaggggcccaatttcaccacatcctcatcaacatttatcattttcaggttttttgttcatagttgccgtcctaatggtgtgaggtggtatgataagtacgctatatgcctcacaacaactatgcagtagacagtattatattcctcattttacagatcaggacattaaggcttggagatgtcaaataaatcattcaag

SEQ ID NO: 918566 - DNA, 629 bp, Homo sapiens
gcccatggctgaatgattacttctcatccatggaattcattttcatatctggaatgctgcataatctggtgaataaagcactaaactggaaatccaggatatacagtttgtgaggacttgctgactgcacttatgtgatcatcttaacagcttaatgcttgaattaactcaatcagtatcatggttggtaatttgtartaaaaattctgacaacttatacatggtttaaatttataaagtgcttttatgcagtttaactcttttaatcttcaggttcagatgggaaaaaaaaattggggctgcgcgctgtggctcatgcctgtaataacagcactttgggaggccgaggcgggcagatcatgaggtcaggagatcaagaccatcctggctaacacggtgaaaccccgtctctactaaaaaatacataaaaattagccgggcgtggtggcgggcgcctgtaatcccagctactgaggaggaggctgaggcaggagaatggagtgaacccaggaggcggagcttgcagtgagccgagatcgcgccactgcactccagcctgggcgacagagcaagactccgtctcaagaaaaagaaaaaaaaaaaaaaaaacaacaaaaaaaacctggctg

SEQ ID NO: 918567 - DNA, 565 bp, Homo sapiens
tgatttttctaactcctccatttattagttggcatttattatttgtttgttttcttgagacagagtctcactcagtcacccaggctggagtgcagtggcacgatcttggctcactgcagcctctgcgtctcaagttcaagcaattctggtgcctcagcctccaaagtagctgggattatgggcatgcaccatgcccagctaatttttgtatttttaatagacttggggtttcactatgatgttgaccaggctggtctygaactcctaaccccaggcgatccacccaccttggcctcccaaagtgctgggataacaggcgtgagccaccacactcgcctggcatttattatttctttcttctatgtttattagttaggatatattctttcttcctattcttttctacatttattagccagaattctattataacaaggaagtgttctctcattgattatgagtattatgttattcaatgggtaattgatccattactgtcattcatttttaatacttgtattatcctatatttgaccacagatagccccttcaagctggcttccac

SEQ ID NO: 918568 - DNA, 631 bp, Homo sapiens
aagacaaggcaagtcccttctgcctataaacctgtaaaatcaaaaacaagttagttacttcctagatacaataggggtacaggaattgggtaaatacagcaattccaaatgggagaaactgacgaaaacaaaggagctacaggcccccaagaagggacaggccctgcaagtccaaactccagcagggcagtcaaatcttaaagctccaaaatgatctccttgaatccacgtctcacatccagatcaccctgatgcaagaggagggttcccatggtcctgggcagctctatccctatggctttgcagggtacagcctcccttctggctgtcttcaagccctggcattgagtgtctgtggcttttccaggcacacggtgcaaactgttggtggatctaccattctgggatctgaaggatggtggccatcttctcacagctctactaggcagtgcygcagcagggactctgtgtgggggctctgactccacatttcccttctgtactgccctatcaaaggttctccatgagggccccacccctgcagcaaacttctgcctgggcattcacgtgtttccatacatcttctgaaatctaggtggaggttcccaaacctcaattcttgacttttgtg

SEQ ID NO: 918569 - DNA, 477 bp, Homo sapiens
gctgggactacaggcgcacgccaccacgcccgaataatttttgtattcttagtggagacagggtttcaccatggtggccaggatggtctcgatctcctgacctcatgatccaccaacctcagtctcccaaagtgccgggattacaggcgtgagccaccgcaccraccacagctcttctctttaacaagcacttaatcctaccccgcagtagccctcctgggagcaaacggggtgtcccacctgatgtgggttcgaagatgcttgtctgtgcatctcaacccaagctacaaccgtcccgtcctccctgatcgcaaacacatcccttcccagaaacaaacctgtcactttcttctctgttaaaaggcaatctgcaacttgaggcaacaacggaagtcttgcgaagataacggcggagcgtgccagtgggtttcctaatatggagggactgccctgtagagaggtaggaggcgtggaaat

SEQ ID NO: 918570 - DNA, 616 bp, Homo sapiens
cttggcggtaacctttgtgccttttatctttctcctttgtaggaaaagagggttagataagttattactctgtttcaactctaaaagtagaattttagatttgaactggacctgagaaatacaggagagggggtgaggggacagcatctgggttcttgttccccatctctactcaaattcctgaattagtgggattagcaggtttgttcaggggaaaggaaaggagtaaggtataacttctgtcagctttggtgctgacaggctctatagtttttgcacactgaaacatcattcaagaagatcaccgttcccaactgcagagcaatcaaatgagattataatatggaaagggggaagcatgaaggcttggccaaggaaaaggagtttggaggggaaaaaaagaaaaaagcaaaytgaaaatccaaatgaccagggataaggctactacaggtaagagaacccatcaaaagctagggtaggtaactgcatctctgcctccaggactgtgtggttaatgacagtcatttcaatgctttctactggttgcactaatcccttgatttctcatatgtacaaaagtataaaacagtaaagtgcagtgtttcagttacacttt

SEQ ID NO: 918571 - DNA, 495 bp, Homo sapiens
taaaaaagaacaggatcatgtctttcatgggaacatggatggagctggaggctattatccttagtaaactaacacaggaacagaaaaccaaatattgcatgttctcacttataagtggaagctaaatgatgagaactcatgaacacaaagaagggaaaacagacactgaagtctacttaagggtgaaggttgggaggagggagaggagaaaaaaaaactgttgggtaagaggcttaatatctcggtaataaaataatctgtataaacccccatgacatgagtttacctatataaaaaaccttcacatgtaccccggaacctaaaayaaaagataaaaaaaactacctctttatttcatgagttatttaaaagtgtgttgtatagtttacaactgtgggggaaattgtttgttaccttttgttattgatttctagtttgattccattatggttgattcacatattccatattatctacatattttgaagttcttgt

SEQ ID NO: 918572 - DNA, 548 bp, Homo sapiens
agacaaaggatgatataaaaaactcatgaatcaatgagaaaaaaagataaacaactcagtgtaaagtgaatcaaggacccaattaggaaaatcacaaaagaaaaaaatttatttaaatactatatacataaatttaatatgcaaaataaagcatattcgtatataccccattgttataaccccatcacagacgagttatgtcaaatcaacaagctatatcctttttgcttattsgatggcttatcaaagatcatatattcatgttacctttgtgaggaagcagacgtactttgcgtttgaaagtgaaaactggtagaatctttttggaagataatttggaaatatgtaccaaaaagcttaaacttgtgcatcttcattgatccagaaattagttttgttaaaatttatcaaagagaagtaattgtgatcatacttaagggtttagatataaagagaataactgccttctcatttgtaatgtgaaactttggttataactgtagttcagataatagaaaattattccattcatccaaggaaatactttt

SEQ ID NO: 918573 - DNA, 785 bp, Homo sapiens
gagccctagggccttgaatgaacataggcggtacccagggagtggttacagcaagccttgggtgagatccagcactttgctggcttcagatctgtccaaacacagtactagtggtggtggccacagggattcttgtgtcactctacacccagcttcagatgggtcagaacagagaaagacactccgtttgtttgggagaaagtaagggaagagaacaagagtctctgcctggtgacccagagaattctggatcttctccaagactaccaaggcagtaaatctatgagtctgcaaggaccacagcattagtgggctttagatagacccctcacaacacccaagtcctttagaatatatggaatgccttcctttccaagaaggatgagtacaaacaagttcagactgtgaagactataataaatacctaactcctcaatgcccagacacagacaaaaaatcgataagtatcaagacaatccaggaaagcaagacctcacctaaagaactaaataaggcatcagggaccaatcctggagaaacagagataagtgacctctcagagaattcaaaatagctattttgagaaaactcaaattcaagataacacagaaaaggaattcagaaytctatcagacaaatttaacaaagagattgaaataattacaaataattaagcagaaattaagcacaccccaccttcagtattggacagatcttccagacaaaaagtcaacaaagaaacatcagacttaatctgcactatagatcaaatggacttaatagat

SEQ ID NO: 918574 - DNA, 570 bp, Homo sapiens
gtggcatcatggtcctcgtagattctctgggcccgtccgttgttctccatggacatgacctccagaaagttaaagtccacattgtggccgaaacccaggttgtagagcgggaacctgccccggatggcgttgcggacgttcttgaggatttgggaacggtccgtcacccctgcaagccacacacctgggtagtgacgggatgctggcccacaggcatgtggggcacgagggggctctggggaacactccctggggctcaagccttccatctcagagcatctccaggctcctgggcatcctgaggcatcgcgtcctcctggctctcctgggagactgcagcagctatcaacagctcctcacagaccccgcccatctaggtgggtccatcaccagcaggtctgattctgctcraaatcctgccatggctcctttgccatggactgcgagaccctgctgaccttcccacgcttgttttaccccattctgcacatgcccacagttcccgggcaggccctgccagtgcacacaccctttttatgacttaagctgcctcttctgcctgggatccct

SEQ ID NO: 918575 - DNA, 535 bp, Homo sapiens
attatgggagatacaattcaagatgagatttgggtggagacacagctaaaccatactttcggaggacgaggtgggcagattgcctgaactcagaagtttgagacgggcctgggcaacatggcaagactcctgtgtgtgctgcggcatgaccttcactccacgtgatccacttccaggtctcattggacacattttgagttaattcttgcrtatggcatgatgaagtaaagctccaacttcattatgtatgtggctctcctgttgtcccgtcaccatgtgttgcaaagactattttctcaccttgttaaaaatcagttgactagagacacatgggcttatttctggactctcatttctattccgctgatctatatatctatccttatgccactaccacactttgcttactgttactttggagtaaggtttgaaatcaggaaggatgagtcctccactattattctttctcaagattgttttggttattctgggtcccttgcaattacatatgaattttagaatttgtttgtcaatt

SEQ ID NO: 918576 - DNA, 558 bp, Homo sapiens
accccttccccagccaggctgccacctcacagttcgatctcagactgctgtactagcagtgagcaaggctgcatgggcatgggacctgctgagccaggcatgggatataatcttccagtgtgctgtttgccaagatcgttggaaaagtgcagtatttggatgggagtgccctgattttccaggtacagtctgtcatggcttcccttggctaggaaagttaaatcctccaaccctttgtgcttcccaggtgaggcaatgccctgtcctgtttcggctcaccctccctgggctgcattcactgtccaaccagtcccagtgagatgaaccaggcacctcaattggaaatgcagaaatcacccgtcttctgcgtcgatcatgctgggagctacaggccrgatctgttcctattcagccatcttggaacagagccattattgtttgttttaagaaaattttcaatttccttttcaatttcttcattgacccactggtcattcagaagcacattgtttaatttccacgtatttgtacagttcccaatattccggcagctgggcc

SEQ ID NO: 918577 - DNA, 614 bp, Homo sapiens
cttctccactgacatcccacactcttcctggagtctcatggctgcacattctcctccccaaaaatttagacactcaaatccaacttcaaacttgccatctccatttgtgtaaccaataagcaccttctacttaacgtggtcagaatagaactctttattttattttacatatttttctcggagtcttctacatcttggcaaaggcatcaccccctaataaattattcaagccaaaattctaggcagtgtaatataatggtcaagaacatagaccttgatgccagactgtatggattcaaatcctgcttctgctcctcactacctgtataaagatactacaagcctcagagagtgataatggtacctgccttatagggttaccataaagactaaatgcattaattcatataaagmatttagaatagcacttggcaaatattaaattttcactatgcttaagctctcatcatcatcatcattatgctgattcttctctttctctcacaaccaatccaccatgtcaatattactttaaaaactaactgaaatccactgacttctgtcagtcatatcaccacaaccaatccatttcaagccactatctagattaatgt

SEQ ID NO: 918578 - DNA, 643 bp, Homo sapiens
aagatactacaagcctcagagagtgataatggtacctgccttatagggttaccataaagactaaatgcattaattcatataaagcatttagaatagcacttggcaaatattaaattttcactatgcttaagctctcatcatcatcatcattatgctgattcttctctttctctcacaaccaatccaccatgtcaatawtactttaaaaactaactgaaatccactgacttctgtcagtcatatcaccacaaccaatccatttcaagccactatctagattaatgtgaaaacttccagactagtcctcccgcttccattccttttttatcctccaaaatggctttcaagcagcagccacagtcatctatttaaaacataaatcagatcatatcactcacttattcaaaatcatccaatgtctttcaactacattaggctaaaaaaaaatcaaactctttaccctgggactctacctcaaagtctcacagagtctacacctagccattgcagcctcacatggtagcactctaccgtagctcactatgctctagctacactggcctttttgattctaaaaaaaaaggccaagattcctccctttgggggcctttgcattagtgacttttcctgcctggaatgcagt

SEQ ID NO: 918579 - DNA, 643 bp, Homo sapiens
aagatactacaagcctcagagagtgataatggtacctgccttatagggttaccataaagactaaatgcattaattcatataaagcatttagaatagcacttggcaaatattaaattttcactatgcttaagctctcatcatcatcatcattatgctgattcttctctttctctcacaaccaatccaccatgtcaatattactttaaaaactaactgaaatccactgacttctgtcagtcatatcaccacaaccaatccatttcaagccactatctagattaatgtgaaaacttccagactagtcctcccgcttccattccttttttatcctccaaaatggctttcaagcagcagccacagtcatctatttaaaacayaaatcagatcatatcactcacttattcaaaatcatccaatgtctttcaactacattaggctaaaaaaaaatcaaactctttaccctgggactctacctcaaagtctcacagagtctacacctagccattgcagcctcacatggtagcactctaccgtagctcactatgctctagctacactggcctttttgattctaaaaaaaaaggccaagattcctccctttgggggcctttgcattagtgacttttcctgcctggaatgcagt

SEQ ID NO: 918580 - DNA, 643 bp, Homo sapiens
aagatactacaagcctcagagagtgataatggtacctgccttatagggttaccataaagactaaatgcattaattcatataaagcatttagaatagcacttggcaaatattaaattttcactatgcttaagctctcatcatcatcatcattatgctgattcttctctttctctcacaaccaatccaccatgtcaatattactttaaaaactaactgaaatccactgacttctgtcagtcatatcaccacaaccaatccatttcaagccactatctagattaatgtgaaaacttccagactagtcctcccgcttccattccttttttatcctccaaaatggctttcaagcagcagccacagtcatctatttaaaacataaatcagatcatatcactcacttattcaaaatcatccaatgtctttcmactacattaggctaaaaaaaaatcaaactctttaccctgggactctacctcaaagtctcacagagtctacacctagccattgcagcctcacatggtagcactctaccgtagctcactatgctctagctacactggcctttttgattctaaaaaaaaaggccaagattcctccctttgggggcctttgcattagtgacttttcctgcctggaatgcagt

SEQ ID NO: 918581 - DNA, 701 bp, Homo sapiens
aactttattccctcctttttcctccaccctagccagctgctccccacttacagattattgctctccacgtttcaatgcctcaagttcatcatatccttctggcacctcattatggtgaccaaccatcccagtttgtccaggaatgagaggtttctaaggatgtgggacttccagtactaaaactggaacaggcacggtccaaatccaaatcttgtcgacatcacaacatccactttcttgccactgtccaaatggactgctacacccatatggatgatccagtcaacactagtttcacagtcgtcagcatcctctgacccactcacmctccacttctgcagcccactcccacgatcacagcacaattcacaagcaacgcatcacccctaccctcacacattttccccaaccacatctccatgtccttcctgctcacttactccattatccccactacacaggctctttgtgtccatcaaagttcctttttatcccaggcctttaaactctttctagtttcaattttcttcccctaaaatactttgccctccaattataccaacctatctgcacttcctatagcgcaccatgtctttctttcacttctatgactttacacatatttcccacatctgaaatgtctttctataccctgtgtttctactggcaaatttctatgcaactaacaggttacctctgca

SEQ ID NO: 918582 - DNA, 603 bp, Homo sapiens
gattctttcctcagcttggtttattctactgttaatacttgtgattgcattgtgaaattcttgtgttgtgttattcagctctgccagacctgttaggttcttttttataccagctattttgtcctttggttcttgtatcactttattgtgactcttgttttccttggattgggttttgccatcctcctgaatttcagtgatctttgtttctatctgtattctgaattctacttctgtcatttcagctagttcagcatggttcataactcttgttgcagaactagtgtggtcgtttggaggacatatgaccctctggccatttgagttactggagttcttgcattgcttctttctcatctctgtgtgtgrgtgtttctttaaccacagtgtagattaagtacagtcaatagacttcttttctggatgttttccctgggctgaggctttgtgtggggtctttatttgaaactgacttcttgtctctggtttcagaggccggatatgttagtaaggtattatttatgttgacgctttggggtgtgatccagcaggtggcacttaggcttattggtcagttgtatggctcccctatgtttcctcaca

SEQ ID NO: 918583 - DNA, 724 bp, Homo sapiens
gaaataagttgttgttttgttttttgtttgtttttgagacagtctcactctgtcgcgcaggctggagtgcagtggcacgatctcggctcactgcaacctctgcctcccggattcaagcgcttctcctgcctcagcctcccaagtagctgggattacaggtacctgccaccacactcaggtatttttttttttttttgtagttttagtatagacgggattttgccatgttggccatgctgttctcaaactcctgacctcaggtgatccacctgccttggcctcccaaagtgctgggattacaggcgtgagccaccgtgcccagcatgaaataaattttataacctgaataggacccggtaatataggagttaagaagaaattattttaggcagatagtgaaggtaagaaagtccttggtaaggtttttcttttaatgaaaagcrccctccaaatcatatacttttccaacaaacagcagccattaaaatcaagccacagacatagaaaggcaggctagaagcttccacaggtgaatgccagcatttgtgccaataggaaaaggctacctgggactaggcattttcaaaatggcagctccatcttcccttttcctttccaaccacatgcacagtagaaagcagataacatggcatccaccaagtggaaagtccatttgcataataagattagggtggggtggtcagcttcttccagcactatgtaa

SEQ ID NO: 918584 - DNA, 744 bp, Homo sapiens
cctccttaaattattctatgaagtaagtattaacctagtacctaaacctggaaaagacattaaaaaagataacttcagatgaatatcactgattaacatagatgcaaaaatcctgaacaaaatactagctaactgaatccaacagcacatcaaaaagataataatacatcacgatcatgtgaatttcatcttggggatacagggatggtttaacatatgcaagtcaataactgtgatacagtacataaacagaattaaatcaaaaaccatatgatcatctcaatagacacagaaaaaacaatggataaaatccagcttccctttatgataaaagccctcaacaaaataggcctagaaggaacatacttcaaagtaataaaagtcatgtatgacaaacccacagctaatatcacactgartggggaaaagttgaaagcattccccttgagaactggaacaagacaagtgtgtctacttttactacttacactcaacataatacttgaagtcctagccagatcagacaagagaaagaaataaagaacatccaaattgaaaacgaagaattcaaactgctgctgtttgttcatgatgtaattgtatacctgggaaaccctaaagactcatctaaaaagcttctagatctaataaactaattcagaaaagtctcagcatgcaaaatcaatgtacataaatcagtagcacttcaatacacttacaacgaccacgtagagaataaattca

SEQ ID NO: 918585 - DNA, 725 bp, Homo sapiens
atcgtgaagatgaagtgtcaaaaaagtccaaatatgttgtattagttcattctcaaattgctataaaaaatagctgaaactgggttatttaaaagaataggtttaattagctcatgattgtgcaggctatacaggaagcacggtagcatttttttctggggaggcctcaagaagattccaatcatggcagaaggcaaaggggaagcaaggtgtctcacaaggcagcaacaggggcaagaaagagagcaacggggaaagtgctgcacaattttttttttttttttttttttgagacagagtctcactctgttgcccaggctggagtgcagtggcatgatcttggctcactgcaagctccgcctcccaggttcatgccattatcctgcctcaacctcctgagtagctggaactacaggcactggccaccaygcctggctaatatttttgtatttttggtagagatggggtttcacaaacagcgtacgtcacaagaactcactcaccatcatgagaacagctccaaagggataatgctaaaccattcgtgagaaatctacccccatgatccaaccacctcccatcaggtcccacttccaacattggggactacagtttgacattagctttggtgtgaacacagatccaaattatattattccacccttggctcccccaaatctcatgtccttctcacatttcaaaataaaataatgctttcccactta

SEQ ID NO: 918586 - DNA, 725 bp, Homo sapiens
atcgtgaagatgaagtgtcaaaaaagtccaaatatgttgtattagttcattctcaaattgctataaaaaatagctgaaactgggttatttaaaagaataggtttaattagctcatgattgtgcaggctatacaggaagcacggtagcatttttttctggggaggcctcaagaagattccaatcatggcagaaggcaaaggggaagcaaggtgtctcacaaggcagcaacaggggcaagaaagagagcaacggggaaagtgctgcacaattttttttttttttttttttttgagacagagtctcactctgttgcccaggctggagtgcagtggcatgatcttggctcactgcaagctccgcctcccaggttcatgccattatcctgcctcaacctcctgagtagctggaactacaggcactggccaccacgcctggctaatatttttgtatttttggtagagatggggtttcacaaacagcgtaygtcacaagaactcactcaccatcatgagaacagctccaaagggataatgctaaaccattcgtgagaaatctacccccatgatccaaccacctcccatcaggtcccacttccaacattggggactacagtttgacattagctttggtgtgaacacagatccaaattatattattccacccttggctcccccaaatctcatgtccttctcacatttcaaaataaaataatgctttcccactta

SEQ ID NO: 918587 - DNA, 856 bp, Homo sapiens
ttttttttttttttttttttgagacagagtctcactctgttgcccaggctggagtgcagtggcatgatcttggctcactgcaagctccgcctcccaggttcatgccattatcctgcctcaacctcctgagtagctggaactacaggcactggccaccacgcctggctaatatttttgtatttttggtagagatggggtttcacaaacagcgtacgtcacaagaactcactcaccatcatgagaacagctccaaagggataatgctaaaccattcgtgagaaatctacccccatgatccaaccacctcccatcaggtcccacttccaacattggggactacagtttgacattagctttggtgtgaacacagatccaaattatattattccacccttggctcccccaaatctcatgtccttctcacatttcaaaataaaataatgctttcccacttattcccaaagtcttaactcactgtagcattaactcaaaagtctgaagttcaaagtctcattacagacaaggcaagtccyttccacctacaagcctgtaaattaaaaaaaaaatcaggttagttacttccaatatacaattgggatactggcaatgggtaagtactattattctgaaaggcgaaaataaactggccaaaagaaagcagccacaggcccagtgtaaatccaaaacccagcaggacagtcattaaatcctaaagctccaaaataatctcctttaacaccatgccccacatcatccagggcatactgatatggcaggtgggttccctagggcttgggcagctccacccctgtgactttggtgggttgggccaccatggctgctctcacaggctggc

SEQ ID NO: 918588 - DNA, 534 bp, Homo sapiens
caacattggggactacagtttgacattagctttggtgtgaacacagatccaaattatattattccacccttggctcccccaaatctcatgtccttctcacatttcaaaataaaataatgctttcccacttattcccaaagtcttaactcactgtagcattaactcaaaagtctgaagttcaaagtctcattacagacaaggcaagtcccttccacctacaagcctgtaaattaaaaaaaaaatcaggttagttacttccaatatacaattgggatactggcaatgggtaagtactattattctgaaaggcgaaaataaactggccaaaagaaagcagccacaggcccagtgtaaatccaaaacccagcaggacagtcattaartcctaaagctccaaaataatctcctttaacaccatgccccacatcatccagggcatactgatatggcaggtgggttccctagggcttgggcagctccacccctgtgactttggtgggttgggccaccatggctgctctcacaggctggcat

SEQ ID NO: 918589 - DNA, 716 bp, Homo sapiens
attctaccagtccttcaaagatgtattggtgccaatcctactgaaaaaattctgaaagagaaagacaatgtattagtccatttgaatactggtataaagaactgcctgagactgggtaatttataaaggaaagaggtttaattgagttacagctaagcatggctgggaaaaactcagaaaacacaattatggcagaaggcagaggggatgcaaggcaccttcttcacaaggaagcaggaaggaaacatgctgaggaaagggggaagagccccttataaaaccatcagatctcatgagaactttctcactatcacgagaacagcctgggggaaccacygccattactcaattacctccacctggtctctcccttgacacgtggggattatagggattaaaatttaagatgagatttgggtggggacacaaagcctaaccatatcagagggaatcctccttaaattattctatgaagtaagtattaacctagtacctaaacctggaaaagacattaaaaaagataacttcagatgaatatcactgattaacatagatgcaaaaatcctgaacaaaatactagctaactgaatccaacagcacatcaaaaagataataatacatcacgatcatgtgaatttcatcttggggatacagggatggtttaacatatgcaagtcaataactgtgatacagtacataaacagaattaaatcaaa

SEQ ID NO: 918590 - DNA, 716 bp, Homo sapiens
attctaccagtccttcaaagatgtattggtgccaatcctactgaaaaaattctgaaagagaaagacaatgtattagtccatttgaatactggtataaagaactgcctgagactgggtaatttataaaggaaagaggtttaattgagttacagctaagcatggctgggaaaaactcagaaaacacaattatggcagaaggcagaggggatgcaaggcaccttcttcacaaggaagcaggaaggaaacatgctgaggaaagggggaagagccccttataaaaccatcagatctcatgagaactttctcactatcacgagaacagcctgggggaaccactrccattactcaattacctccacctggtctctcccttgacacgtggggattatagggattaaaatttaagatgagatttgggtggggacacaaagcctaaccatatcagagggaatcctccttaaattattctatgaagtaagtattaacctagtacctaaacctggaaaagacattaaaaaagataacttcagatgaatatcactgattaacatagatgcaaaaatcctgaacaaaatactagctaactgaatccaacagcacatcaaaaagataataatacatcacgatcatgtgaatttcatcttggggatacagggatggtttaacatatgcaagtcaataactgtgatacagtacataaacagaattaaatcaaa

SEQ ID NO: 918591 - DNA, 716 bp, Homo sapiens
attctaccagtccttcaaagatgtattggtgccaatcctactgaaaaaattctgaaagagaaagacaatgtattagtccatttgaatactggtataaagaactgcctgagactgggtaatttataaaggaaagaggtttaattgagttacagctaagcatggctgggaaaaactcagaaaacacaattatggcagaaggcagaggggatgcaaggcaccttcttcacaaggaagcaggaaggaaacatgctgaggaaagggggaagagccccttataaaaccatcagatctcatgagaactttctcactatcacgagaacagcctgggggaaccactgccattactcaattacctccacctggtctctcccttgacacgtggggattatagggattaaaatttaagatgagatttgggtggggacacaaagcctarccatatcagagggaatcctccttaaattattctatgaagtaagtattaacctagtacctaaacctggaaaagacattaaaaaagataacttcagatgaatatcactgattaacatagatgcaaaaatcctgaacaaaatactagctaactgaatccaacagcacatcaaaaagataataatacatcacgatcatgtgaatttcatcttggggatacagggatggtttaacatatgcaagtcaataactgtgatacagtacataaacagaattaaatcaaa

SEQ ID NO: 918592 - DNA, 594 bp, Homo sapiens
ctccatcgctgaagtattcagcaaacactctcccctgaaaaccttcccgtgaactgtggaggcaaaggggtgtcgggggctgggcgggggtcctggctcaccatgctgaagtccaggaggtcactgagctccttgtctgtgcccacaggcgccatcctctgcggctggttcattctcctggggccagggcgggcacctcaggcctggaaaccctgcttggtggatgtggggacagatggacagggagaaacagggaggggagaagagttgtgagtggycaaagcacagagtgctaaaagccacctaaaaaaccctcaaccgccctggggtctgagttccagcagagccctgggggcacggggagccctgggagcaggcgcagggaagctggaattccagagtctaggtccctgcagagtcctccccagagaccacagggagtctgaaaaatggggggagggtgtgcaaatataaactccctaactcccccagggaacaccagggcatcaagttgccaagtttaaactgcacgcagggcagccagaacctctcctttctccaactctctcatttccaaccaaccccgggcttcct

SEQ ID NO: 918593 - DNA, 572 bp, Homo sapiens
ggctccgtctcaaaaaaaaaagtaaaataactaaacaaataaatgaaaataacacaatctcccagggctccctggggccccaaagggaaatttacactccactcccagcctgggaagatgccaccatctcgctggcccgcttggctccagccatcctgccctctggatggtccagaacttgctaagctcatccccaccccgggcctctacgtttgctttgtcctctacctgggaggcttttcccacccctatctggagcccctgagtcatcacagttcratgctgcacctatgccaggccggcggggaggcggggccacaggggccccccaccaaagccacaagcccctcctgctatacacccaaactgggctgtccacagtccgaccctccgtgcccagagagttccacgtgccgcaggtctggggagagggctgtgggtcccagggtctgtgctgcaaatccctcatccctctccacctcactgtgacctcaggcaagttcgtgctactctccgggcctcggtttctccatctggacagtggaaggggggagtctggcacacagtaggtg

SEQ ID NO: 918594 - DNA, 613 bp, Homo sapiens
atgattgcaccactgcactccaaccagagcaatagagcaagactccatctctaaaaaaacaagaacagggccaggcatggtggcctgcggctgtaatcctagcattctgggaggccgaggtgggtggatcggatcacctgaggtcaggagctggagaccagcctgcccaacatgggaaaaccccgtccctacttaaaatacaaaaattagctgggcgtggtggygggcacctgcaatcccagctacttgagaggctgaaacaggagagtcgcttgaaaccgggagacaaaaggttgcagtaagccgagatggcgccactgcactccagcctgggtgacagagcgagactccgtctcaaaaaaaaaaaaaaaaaaaaaaagccagggatggtggctcacgcctgtaatcccagcactttgggaagctgaggcagacagatcacctgaggtcaggagttcgagaccagcctggccaacatggtgagactcccccccaccaactaaaaatacaaaaattagccgggcatggtggcaagtgcctataatcccagctactcgggaggctgaggcaggagaattgcttgaacctgggaggcagaggttgcagtgagatg

SEQ ID NO: 918595 - DNA, 770 bp, Homo sapiens
caaaaagctttattccatttagtccagggcttgggagagggcttcagcgtggttaaaaaaatacattcttttaaataaatggaaatagtttttttttttaagtcatgacacttataagaaattttttttttttttttttgagacgtaagtcttaatgccacccaggctggagtgcagtggtgcgatctcagcttactgcaacctctgctccctgggttcaagcaattctcctgcctcagcctcccraggagctgggattacaggcatgtgccaccacgcctggctaatttttgtattttttagtagaggcagggttttgccatgttggccaggctggtttcaaactcctgacctcaggtgatccacccaccttagcctcccaaagtgctgggattacaggcgtgagccaccacacccggctaattttttatgtttttagtagagacggggtttcaccgtgttagccaggatggtctcgatctcctgacctcgtgatctgccctgctcggcctcccaaagtgctgggattacaggcatgagccaccgcgcccggccaagaaatttttatgatgcacacttttcttgttaccttgccccttagaaataactcataatggtttggtgtacgtttttctaaacatgtgttttgcttatataaacattttattatgtataaatatatgcaaataagtagatatgtatatatgtgcatttagtaaataggatcataccatccattttcccacagagttatctttgccacaaatcat

SEQ ID NO: 918596 - DNA, 558 bp, Homo sapiens
ttcatattgtgggaggtgacacacagggatgatctgaaattaatgaagtgggttgcagctaaaatcaatttagtaagagtaagtactgttttgggaaaatctgcctgctgtatatgtgggtgtggatgtttactgtgttgtactctgaaatgtgttttttgtggatcttcctcatcaagttgggtggaaaattacttctctgtaatttcttcagcactctccattttcttattttaggttaataatgatctgagaggcgcatttggttataagggtccaaagcagtgatctgtttccattttgcgacttcsaggcctcagaaatataaaactagctggttgatcccggctagttttatatttttgagccctcaaagttacaaaatgtcagtggagcctttgtgtgttttgtgtcagtggagccaaagagatggatactcccaacaatacaaatattttatatgaagaatgatttagattgtcagaatcgttctaagactacttgtagatgttattctaatgtaagttgtaactaacgtattatccaaaacagctcttt

SEQ ID NO: 918597 - DNA, 597 bp, Homo sapiens
catatttttatcccaacaaccacaaagaatgtgaacaacaaagcaagttttacttttcaatgaaaattattatcactcacccttcattccattacttcttttgggaaatgaaaataagcaacagcattcctccaaaatgacgtgtttgtccctttaactttggactgcttcatttttctttgggaagcagatcaccatagggtgcatgttatagacagatgacatttctttttctaatttagatgaaagaactctgaaatactggtatttggtcgagcatactgggctgttccagacyaagacttttgatcttgaatgcagacctgccagtactctatatttcagattgatggatggtattactggcatcatattttcattattttttgttctcctgttccctgtgccaaaccaccactaaatcatagacactaaatgttgaataaagtaaaatatctatgaattagaaatgaatccttttattattttattcacttatctcatcccatgctacattttccatcattcatctgattttcctaatttcttcgtatattcttctctttgacctttccttagattctttacattttaaag

SEQ ID NO: 918598 - DNA, 639 bp, Homo sapiens
ttaagtatccaattcaacggtcttacaatattcaaatagttgtgcaccacatctctagaactttttcatcttgcaatactgaaactgtatacccgttgaacaactccccattttcccctcccctagctacaattccactttctgtttctatgtgtttgactactttagataccttatataagtaaaatcatgtagtatttgtctctttgtggctgacttatttcacatagcataatgtcctcaaagatatgaatactaatgtccagcaagttcatccatgctgcatcatgttaaggataaggcatggaaraaaccctacccattggctgggtctaacaacacctggctagcacagtaagttatatctgacggaaaagaagatgactagaaaaatggaagaagcatctagagcaaagcagtctaatagaactttctgcaataatgaaaattatctgtagcaggtgctatccaatatggtagccactagacgcagatagctatcacttagcacgtggttaatgcaactgtgaaattaactcagtatcagttaagttttattaatttgtatttaaaattaaatagccacccatgtctggtgtctagcatattggacagcacacttcaagaagaagctctgta

SEQ ID NO: 918599 - DNA, 573 bp, Homo sapiens
tctctttataagccttatcttctctgtgctaaaacaattgattgattgaatcataataatgacaagcataaaagcagtgaagccttctcccttagcattggggaggtggaggggccaagccaagtggtcacttgcttgcatttttcacattattagtgatctkacatggatttgcgttggtttttcagggttgcctttcctagatactactcagttttcttttttttccttatgcaaccgtaccccataaggagcttcttaccatgaagctccattacagtagggcagacctggaaacacatgcttttgttcaacactcccccacttttatttttgctttcagagagtctatgaacattttccaggcgaatccacccaccctggtagagaccctcaagggaccaggaacacaggatccaaggatagggcaggaaaattccacctcaatccctctcccaaagttccctatttctcctcccctatattctaaccgtaggcctgctgaggccccaggggtgggatactgcacttaaagcctttaaacccatcaagattaaggtgttttttttttgc

SEQ ID NO: 918600 - DNA, 573 bp, Homo sapiens
tctctttataagccttatcttctctgtgctaaaacaattgattgattgaatcataataatgacaagcataaaagcagtgaagccttctcccttagcattggggaggtggaggggccaagccaagtggtcacttgcttgcatttttcacattattagtgatcttacatggakttgcgttggtttttcagggttgcctttcctagatactactcagttttcttttttttccttatgcaaccgtaccccataaggagcttcttaccatgaagctccattacagtagggcagacctggaaacacatgcttttgttcaacactcccccacttttatttttgctttcagagagtctatgaacattttccaggcgaatccacccaccctggtagagaccctcaagggaccaggaacacaggatccaaggatagggcaggaaaattccacctcaatccctctcccaaagttccctatttctcctcccctatattctaaccgtaggcctgctgaggccccaggggtgggatactgcacttaaagcctttaaacccatcaagattaaggtgttttttttttgc

SEQ ID NO: 918601 - DNA, 638 bp, Homo sapiens
cctatttgttttctggttagaatgggcttttctgtggctattacaaaagtaaaaaaaacaaaacaaaacaaaaacccaacagatgctggcgaagttgtggagaaaaaggaatgcgtttaccctgttggtgggagtgtaaattagttcaaccattgtggaagacagtgtggcatttcctcaaagacctagaggcagaaacggcattcgacccagcaatcccattactgggtatatacccaaaggaacataaatctttctattattgatacacacatatgttcactgcagcagtattcacaataacaaagacatggaatcaacctaatagcccatcaatgatagactggataaagaaaatgtggtacatatacaccatggaatactatrcagccataaaaaggaatgagaatcatgtcctttgcagggatgtggatggagctggaagccattatcctcagcaaactaatgcaggaacagaaaaccaaataccatatgttctcacttataagtgggagctgaacaatgagaacacatggacacacaaggggggaacaacacacactggggcttgttggaaagtggggagtgggaggagggaaagcatcaggaagaatagctaatggatgctgggcttagta

SEQ ID NO: 918602 - DNA, 638 bp, Homo sapiens
cctatttgttttctggttagaatgggcttttctgtggctattacaaaagtaaaaaaaacaaaacaaaacaaaaacccaacagatgctggcgaagttgtggagaaaaaggaatgcgtttaccctgttggtgggagtgtaaattagttcaaccattgtggaagacagtgtggcatttcctcaaagacctagaggcagaaacggcattcgacccagcaatcccattactgggtatatacccaaaggaacataaatctttctattattgatacacacatatgttcactgcagcagtattcacaataacaaagacatggaatcaacctaatagcccatcaatgatagactggataaagaaaatgtggtacatatacaccatggaatactatgcagccataaaaaggaatgagaatcatgtcctttgcagggatgtggatggagctggaagccattatcctcagcaaactaatgcaggaacagaaaaccaaataccatrtgttctcacttataagtgggagctgaacaatgagaacacatggacacacaaggggggaacaacacacactggggcttgttggaaagtggggagtgggaggagggaaagcatcaggaagaatagctaatggatgctgggcttagta

SEQ ID NO: 918603 - DNA, 773 bp, Homo sapiens
ttgtgactgtggcttcctctttctctgatgagtcccaaagcacctcacttcacgaagggtcctgggaccaccgttgtgcacctcagccatctgtgtgccaggaagggcttgttctggcgaacaggatacacacaatgggaggcttggagggtttgctccttgtgatttttttcacttttggcaaagatatccccttgcgatgattttgcccagacccatcctaaagccagtgtgtgttctgggcaaactcacctgtctggagggaagaggctgcctgacaggcaggtgttctgggtgaactcacccgtctggagggagaggctgcctgagaggcaggcagaggtgtggggaggaaactactttgaatttagatttcctggggcttatcccagagtgggcctcactgtggagtcacgaacacacctgcctgaggtggctctcgctgaccattcctggtaatgtgtgccccgttctcccagcctccatggcctcctctgtccagttcagagccacctgaagctcacgggatgcagggccagccagaaggtggtatgtgccagccttgacaaggccacctcttttactgctaggcagccagtacaggaggatggtcagtgmggcaagatggacccttccaaggttggacccttccatggcacaaaacctggaactccttggtacagagaggccagacacacgtcaacctcacgtccagttcctgttgagccaaagctcatgagaacttttttgttttgatggctgttgctgctgga

SEQ ID NO: 918604 - DNA, 676 bp, Homo sapiens
gaagcaaaggtacagcttgagccattgcttcacagtgtgcatgccccaagccttgtcagcttacaggtggtattgggcctgcaggtgcacagaagtcaagaaatgaggttggggaacttctacctagatttcagaggatgtatggaaacacctggatgtctaggcagaagtctgctgcatgggtggagccttcrtgaagaacctctgctagggcagtgcagaagggaaatgtgggtttggagcccccacacagagtctccactggggcactgcctaggggagctatgagaagaggaccaccatccttcagaccctagaatggttgatccacacagattgcactatgtgcctgtaaaagccactcaacaccagcctgtgaaagcggctgggagggggcctgtaccctgaaaagtcacaggggtggagctgccaaaggccatgtgagcccacttcttgcatcagtgtgacctgaatgtgagacatggattcaaagcagattattttagaactttaaggtttaatgactgccctattggatttcaagtttgcatggggccggtagcccttgtttaggccaatttctcctatttggaatgggtgtgtttactcaatgcctatatcaccattgtatctaggaagtaactaacttgcttttgattttacaggctcataggtg

SEQ ID NO: 918605 - DNA, 676 bp, Homo sapiens
gaagcaaaggtacagcttgagccattgcttcacagtgtgcatgccccaagccttgtcagcttacaggtggtattgggcctgcaggtgcacagaagtcaagaaatgaggttggggaacttctacctagatttcagaggatgtatggaaacacctggatgtctaggcagaagtctgctgcatgggtggagccttcatgaagaacctctgctagggcagtgcagaagggaaatgtgggkttggagcccccacacagagtctccactggggcactgcctaggggagctatgagaagaggaccaccatccttcagaccctagaatggttgatccacacagattgcactatgtgcctgtaaaagccactcaacaccagcctgtgaaagcggctgggagggggcctgtaccctgaaaagtcacaggggtggagctgccaaaggccatgtgagcccacttcttgcatcagtgtgacctgaatgtgagacatggattcaaagcagattattttagaactttaaggtttaatgactgccctattggatttcaagtttgcatggggccggtagcccttgtttaggccaatttctcctatttggaatgggtgtgtttactcaatgcctatatcaccattgtatctaggaagtaactaacttgcttttgattttacaggctcataggtg

SEQ ID NO: 918606 - DNA, 673 bp, Homo sapiens
cattgctgctgggaatataaactagttcaaatattgtgaagggctgtttggtgatttttcaaggaacttaaaatagatctactatttgacccagcaatcccattattcagtatatacccaaagaaatataaactgttctaccataaagagacacatatgcatatgtttatcacagcactattcacaatagcaaagacatggaatcaacataaatgcccatcaatggtagactgaataaagaaaatgtgatacctatataccatggaataccatgcagycataaaaaaatgagatcatatcttttgcagtaccatggatagagtgggaggccattatcctaaacaaactaacacaggaacagaaaaccaaatactgcattttctcatgtataagtggaggctaaacattgagtatgtggacacaaagaagggaacaacacacattgaggcctacttgagggtagaggttgggaaaaggatgaagatcaaaaaactacttattgggtgctatgcttattacctgggtgatgaagtaatttgtaaaccaaactcctgtgacatgcaatttacctatatagaagcctccacatgtacccctgagcctaaaataagtttttttaaaaaggaatagaatgtgtgtttgtgtgcatgcatgcatgggtacatatttgtta

SEQ ID NO: 918607 - DNA, 673 bp, Homo sapiens
cattgctgctgggaatataaactagttcaaatattgtgaagggctgtttggtgatttttcaaggaacttaaaatagatctactatttgacccagcaatcccattattcagtatatacccaaagaaatataaactgttctaccataaagagacacatatgcatatgtttatcacagcactattcacaatagcaaagacatggaatcaacataaatgcccatcaatggtagactgaataaagaaaatgtgatacctatataccatggaataccatgcagccataaaaaaatgagatcatatcttttgcagtaccatggatagagtgggaggccattatcctaaacaaactaacacaggaacagaaaaccaaatactgcattttctcatgtataagyggaggctaaacattgagtatgtggacacaaagaagggaacaacacacattgaggcctacttgagggtagaggttgggaaaaggatgaagatcaaaaaactacttattgggtgctatgcttattacctgggtgatgaagtaatttgtaaaccaaactcctgtgacatgcaatttacctatatagaagcctccacatgtacccctgagcctaaaataagtttttttaaaaaggaatagaatgtgtgtttgtgtgcatgcatgcatgggtacatatttgtta

SEQ ID NO: 918608 - DNA, 673 bp, Homo sapiens
cattgctgctgggaatataaactagttcaaatattgtgaagggctgtttggtgatttttcaaggaacttaaaatagatctactatttgacccagcaatcccattattcagtatatacccaaagaaatataaactgttctaccataaagagacacatatgcatatgtttatcacagcactattcacaatagcaaagacatggaatcaacataaatgcccatcaatggtagactgaataaagaaaatgtgatacctatataccatggaataccatgcagccataaaaaaatgagatcatatcttttgcagtaccatggatagagtgggaggccattatcctaaacaaactaacacaggaacagaaaaccaaatactgcattttctcatgtataagtggaggctaaacattgagtatgtggacacaaagaagggaacaacacacattgrggcctacttgagggtagaggttgggaaaaggatgaagatcaaaaaactacttattgggtgctatgcttattacctgggtgatgaagtaatttgtaaaccaaactcctgtgacatgcaatttacctatatagaagcctccacatgtacccctgagcctaaaataagtttttttaaaaaggaatagaatgtgtgtttgtgtgcatgcatgcatgggtacatatttgtta

SEQ ID NO: 918609 - DNA, 675 bp, Homo sapiens
atggccttgggcagctctgccctgtggctttgcagggtatagtcccccctggctgctttcacagtctggcgtcgagtgtctgcagcttttccaggtggatggtgcaagctgtcagtggatctaccattctggggtctggaggacagtggccctcttcccacagctctactaggtggtacaccagtagggacactgtgttggggctccaaccccacatttcccttgtgcaccaccctagcaggggttctccatgaggactctgcccctgcacaaacttctgcctgggcatccaggcatttccatgtatcctctcaaatctaggtggcagttcccaaaccccagttcttgacttctgtgcactcgcaggctcaacaccatgtggaagctgccaaggcttggggcttgcactctctgaagccacagcctgagctgtatcttggccctttttaatcatggctggagaggctgggatgcagagcaccaagtccctagactgcacacagcagagggaccctgggtctttcccacaaaacyatttttccttcctacgtctccaaacctgtgagatgactggtgctgcaaaggtctctgacatgccctagagacattttccccattgttttggtggttaacatttggctcctcattacttgtgtaaatttctgcagctggctt

SEQ ID NO: 918610 - DNA, 605 bp, Homo sapiens
ttcgcctctcacaggagagtcaggctgtcctttgaggctttgaagccaggcatggacttctcctctctatgtgggaaagtcctagatagcaccttcttctaatagaaggctgttctgtctacgttgaaaatctgttgttgagtgtagacaccttcagcaaygagtttagctagatcttctggagaacttgctgcagcttctccatcagcacttgctgcttcaccctgcaccattatgttgcagagacagcttctttccttaaacctcaagccaacctctgctaccttcaaacttttcttctgtagcttcctcacttctttcagccttcatagaattgaagagaactaggcccttgttctggattaggcttttggcttaagggaatgttgtggctggactggtcttctaaccataccactaaaactgactccctatgaacaatgaggctgttttgctttcttagcattcgtgtgttcactggagtagcatgtttaatttccttcaataacttttcctttgcattcataacttggcaaattatttggcacaagaggcctagctttcagccttatttggcttgtgacttgtcttcctcactaaagctt

SEQ ID NO: 918611 - DNA, 605 bp, Homo sapiens
ttcgcctctcacaggagagtcaggctgtcctttgaggctttgaagccaggcatggacttctcctctctatgtgggaaagtcctagatagcaccttcttctaatagaaggctgttctgtctacgttgaaaatctgttgttgagtgtagacaccttcagcaatgagtttagctagatcttctggagaacttgctgcagcttctccatcagcacttgctgcttcaccctgcaccattatgttgcagagacagcttctttccttaaacctcaagccaacctctgctaccttcaaacttttcttctgtagcttcctcacttctttcagccttcatagaattgaagagaactaggcccttgttctggattaggcttttggcttaagggaatgttgtggctggaytggtcttctaaccataccactaaaactgactccctatgaacaatgaggctgttttgctttcttagcattcgtgtgttcactggagtagcatgtttaatttccttcaataacttttcctttgcattcataacttggcaaattatttggcacaagaggcctagctttcagccttatttggcttgtgacttgtcttcctcactaaagctt

SEQ ID NO: 918612 - DNA, 590 bp, Homo sapiens
agctgggattacagacacccaccaccacacctggctaatttttgtatttttagtagagacgaggtttcatcatgttggccaggctggtctcaaactcctgactggaagtgatccacccgccttggcctcccaaagtgttgggattacaagcgtgagccagtgcgcccagccttgacattctatttttaaataaaactcaggcttccaaaaagaagcggatgtttgtctaattctaattagtaatcagccamaaccaaggcgacagacatttccgagcaagcaaggctctctgagtggcccggaacatcttgttgacaaacacatgctgcaagacaggaaattaccctcctcagtgcctattttatctctgtttaattgctgtttgataataaattacaacatagagtccattaattaagctagcgatgtccgtggagcaccaattccttctgctgagagccgcctggttacaggagctctgattctgccactgtttgcacccatggcattttgggaagcagtttagaaggattccagttgggtgacaggactccttgcacagaaggagtgggtttgggaagtgggggagc

SEQ ID NO: 918613 - DNA, 590 bp, Homo sapiens
agctgggattacagacacccaccaccacacctggctaatttttgtatttttagtagagacgaggtttcatcatgttggccaggctggtctcaaactcctgactggaagtgatccacccgccttggcctcccaaagtgttgggattacaagcgtgagccagtgcgcccagccttgacattctatttttaaataaaactcaggcttccaaaaagaagcggatgtttgtctaattctaattagtaatcagccaaaaccaaggcgacagacatttccgagcaagcaaggctctctgagtggcccggaacatcttgttgacaaacacatgctgcaagacaggaaaytaccctcctcagtgcctattttatctctgtttaattgctgtttgataataaattacaacatagagtccattaattaagctagcgatgtccgtggagcaccaattccttctgctgagagccgcctggttacaggagctctgattctgccactgtttgcacccatggcattttgggaagcagtttagaaggattccagttgggtgacaggactccttgcacagaaggagtgggtttgggaagtgggggagc

SEQ ID NO: 918614 - DNA, 632 bp, Homo sapiens
caaatatccaaaaccatagattatacaacataaagaatggagcctcatatacgctatggactttgggtgataacgatgtgtccatgtaagttcatcaagtataagaaatatgtcactctgttagggatgttgataatgggaaagtctgtgcatgtgtgagggcaggggataaatggaaaatctttgtacctttcactcaattttgctgtgaacttaaaactgctctaaagtaataagtctttaaaaaaaaaggtgagggggagtgacacaagcatgatggcagaataggagttttcagcactcattcacccacaggaacactgattttgasaaccccccacagatgagagtccatttgtgagagcctgggagtccagcagagaggtcccagcacctcactggagcaaaaaatctgaaaatagatgcactgaaaagggtaagaagaacaatttcactttactcatgtcaccacacccccaaagcagcacagctcagtgccaagagaactccttggcctgcagtttctgccacaggggaaagtgaaagcatagtgagtgcctgttttccccaaccatgtgggatgctgtccaagaggtccacttcttttttgtcttatccagaacacgaagcag

SEQ ID NO: 918615 - DNA, 632 bp, Homo sapiens
caaatatccaaaaccatagattatacaacataaagaatggagcctcatatacgctatggactttgggtgataacgatgtgtccatgtaagttcatcaagtataagaaatatgtcactctgttagggatgttgataatgggaaagtctgtgcatgtgtgagggcaggggataaatggaaaatctttgtacctttcactcaattttgctgtgaacttaaaactgctctaaagtaataagtctttaaaaaaaaaggtgagggggagtgacacaagcatgatggcagaataggagttttcagcactcattcacccacaggaacactgattttgagaaccccccacagatgagagtccatttgtgagagcctgggagtccagcagagaggtcccagcacctcactggagcaaaawatctgaaaatagatgcactgaaaagggtaagaagaacaatttcactttactcatgtcaccacacccccaaagcagcacagctcagtgccaagagaactccttggcctgcagtttctgccacaggggaaagtgaaagcatagtgagtgcctgttttccccaaccatgtgggatgctgtccaagaggtccacttcttttttgtcttatccagaacacgaagcag

SEQ ID NO: 918616 - DNA, 674 bp, Homo sapiens
cgtggagaacctttatgtctagctcagggattgtaaacacaccaatcagcaccctgtgtttagctcaaggtttgtgagtgcaccaatcaacactctgtatctagctgctctggtggggccttggagaacctttatgtctagctcagggattgtaaatacaccaatcggcactctgtatctagctcagggattgtaaacgcgccaatcagcgccctgtcaaaacaggccactcggctctaccaatcagcaggatgtgggtggggccagataagagaataaaagctggctgcccgagccagtattggcaaccacctcgggtcgtcttccatagtggggagtgtttgttcttttgctctttgcaataaattttgctactgttcactctttgggtccacgctgcttttatgagctgttacactcaccgcgaagatctgcagtttcattcctgagtccagcgagaccacgagcacgtygggaagaacgaacaactccagacgcgccgctttaagagttgtaacactcaccgtgaaggtctgcagcttcactcctgagccagcgagaccacgaacccaccaaggaagaaactctgaacacatctgaacatcagaaggaacaaactccagacgcgccaccttaagagctgtaacactcaccgcgagggtctgcggcttcat

SEQ ID NO: 918617 - DNA, 674 bp, Homo sapiens
cgtggagaacctttatgtctagctcagggattgtaaacacaccaatcagcaccctgtgtttagctcaaggtttgtgagtgcaccaatcaacactctgtatctagctgctctggtggggccttggagaacctttatgtctagctcagggattgtaaatacaccaatcggcactctgtatctagctcagggattgtaaacgcgccaatcagcgccctgtcaaaacaggccactcggctctaccaatcagcaggatgtgggtggggccagataagagaataaaagctggctgcccgagccagtattggcaaccacctcgggtcgtcttccatagtggggagtgtttgttcttttgctctttgcaataaattttgctactgttcactctttgggtccacgctgcttttatgagctgttacactcaccgcgaagatctgcagtttcattcctgagtccagcgagaccacgagcacgttgggaagaacgaacaactccagacgcgccgctttaaragttgtaacactcaccgtgaaggtctgcagcttcactcctgagccagcgagaccacgaacccaccaaggaagaaactctgaacacatctgaacatcagaaggaacaaactccagacgcgccaccttaagagctgtaacactcaccgcgagggtctgcggcttcat

SEQ ID NO: 918618 - DNA, 588 bp, Homo sapiens
tccacaagcccagcccggggcagggagacctgggttcggggtcgctctttgctggggacccctggggaagcaggattcccctctgtggtctgcagcctcttgcagctactctgggtgctggctctgtccatacagcactcacctggatgaagttccagcgcttgtacaggctgctcttgaccttgtcgcagtccaggagctggggcagccgactcttggagttgtccaccaggcagcgggtgtcagggaggagtgtggtggtccccagggcacccaagtgcaggaagccttccttggtgtagcgggcaagctgtcgagagaccagagcagcaggggaatggaagtgggaggcaggagtgagacatgggaggaagcagggctcaggtctctcggctttactcctgctgtttgtcaatactgcagtyctggccaccatcccagcctgtcactcaggccatatgctcacctcacaggacagccctgttccagaaagccacccaggcttctgagcctggatacagagtccccagggcaactctctgatcttttttccttttttctttgagatggagtctcactctgttgtcc

SEQ ID NO: 918619 - DNA, 565 bp, Homo sapiens
aaaggggtctttatggagtgcctactctatagcacatactgtgtcttactggaaataatcccctatgattctaataggaagctcacaaggtaagaatgattttccccattttacagatgaggaaattgtggctcaggcaagtgtaagcatcctgctagaaaataaaggacctaggaacaactcaaacataggtcagtttgacagtccactctctggccatggcaatgacaaggagacgtcatttcaatagaactgctggacaggccaagtgtggtggctcacacctgtaatcccagctctttgggaggccaaggsgagaagatcacttgaggtcaggaacttgagatcagcctggacaacataacaagatcccatctctaagaaaaatttaaaaattagccaggtgtggtggtgcatgcctgtagtcccagctactcaggaggctgaggcaggaggatcgtttgagcccaggagttggaggctgcagtgagctataatggcaccaccacactccagcctgggcaacagagcaggattccatgcctttaaaaccaaagaaaaccaa

SEQ ID NO: 918620 - DNA, 593 bp, Homo sapiens
aaagacggccatcaacatgctgggctattttttattttttgtagagatgtgttggttatgttgcctatgctggtctcaaactcctggtctcaagccatcctccctccttgacttcccaaagtgctgatattatagatgtgagccaccatgcccagccgtggctcttcattaaaaaaaaaaaaagaaagaaagaaaagaaaagaagccatgcagatatgcctctcagatctctttccaagaatgaatttgggctgggcgcagtggctctcacctataatcccagcactttgggaggccgaagcaggcagatcacgaggccaagagatggagaccatctcatgaaamcccatctctactaaaaatacaaaaattagctgggtgtggtgatgcatgcctgtaatcccagctactcaggaggctgaggcaggagaatcacttgaacccgggaggcggaggttgtagtgagccgagatcacaccactgcactccagcctggtgacagagtgagactccatctccaaaaaaaaaaaaaaagagagagaaagaatgaacgaatttgccattcaactacaaagagtgcagttagacatcgg

SEQ ID NO: 918621 - DNA, 593 bp, Homo sapiens
aaagacggccatcaacatgctgggctattttttattttttgtagagatgtgttggttatgttgcctatgctggtctcaaactcctggtctcaagccatcctccctccttgacttcccaaagtgctgatattatagatgtgagccaccatgcccagccgtggctcttcattaaaaaaaaaaaaagaaagaaagaaaagaaaagaagccatgcagatatgcctctcagatctctttccaagaatgaatttgggctgggcgcagtggctctcacctataatcccagcactttgggaggccgaagcaggcagatcacgaggccaagagatggagaccatctcatgaaaccccatctctactaaaaatacaaaaattagctgggtgtggtgatgcatgcctgtaatcccagctactcaggaggctgaggcagragaatcacttgaacccgggaggcggaggttgtagtgagccgagatcacaccactgcactccagcctggtgacagagtgagactccatctccaaaaaaaaaaaaaaagagagagaaagaatgaacgaatttgccattcaactacaaagagtgcagttagacatcgg

SEQ ID NO: 918622 - DNA, 655 bp, Homo sapiens
agttgagctgaggccagtcttcccagacagtgcccagtcagtgactgagcttggaaagggcaccagggcctggccagtcccactcaacatgggacacctctctgggatgtctctctgcactagaggtccccattcagcttgcttagatattctcatagtattaccactatctcagactcttgctaccccgtctcccttccttctccttctcctttcacaggtaccaggcctgtacaatgatctcagggcattccctgccctgacaaagactctttgcttagtcaaacctcagttaggcctttgaatcttctactaggcctgtctgtgcactttcttatacaatccagttttaacaagaaccctgctaagtcagtttagcaagaacccctctgacatagtttggatatttgtcccctccaaatctcatgttgaaatgtgawccccaacgttggagatggggcctgatgggagatgttttggtcatggcggttggatccctgatgaacctcttggtgctgtcccagtagtaatgagtaagttctcactctgccagtccctgtgaattctgattgttaaaaataatcgggcacctcctcccttctctcttcctttctctctcaccatgtagtgctagggttggttctccttcaccttc

SEQ ID NO: 918623 - DNA, 608 bp, Homo sapiens
gggtggctgtaccctgcaaagccataggggtggagctgcccaagaccatgggaacccacctcttgcatttgcatgacctggatgtgagacctggagtcaaaggagataattttggagcattaagatttactgcccctctggatttcagacttgcataggccctgtaacccctttgttttggccaatttctcccatttggaatggctatatttatccaatacctgtatccccattgtatctaggaagtaactagcttgcttttgattttagaggctcataggtggaagggacttacttgccttgtctcatataagactttggactgtggacctttgggttaatgctgaaatgagttaagactttgggggactgttggaaggcasgattgattttgaaatgtgaggacatgagatttggaggggccatgagtgaaatgatatggtttggctctgtgtccccacccaaatctcatcttgaattgtattcccataattcccacatgttgtgggaggcacccagtgggagataatttgaatcatgggggcagttgcccccataccgttctcatgatagtgaataagcctcacaagatctgatggttttatcag

SEQ ID NO: 918624 - DNA, 773 bp, Homo sapiens
tttgtactgacttcaaagatctttgatgttttctttattgatatttgtccactgtgaagtgtcctaaattcctgagaacttccaagaatcaaagagaaatgtcagaggtgttaccttctggttttgtctttttcctttaattcaccgaatcagtgtgcctccacttattgtaccagatgcagtgtacaaggtttattaagataaactggggccaagtctctgtattcaaataacatacccatcacaaaaagatgggtagttagagttaacaatcaatgcagagataggatcacacagccacacaaacacaaaagcagaggcattaactctgagctgtgttctgcagagtgagttggaatctctgggcaaacaatgtagttaaagaaacgttcaagcaaaaggaagactgtgcaacrgcacatgttatatcagaggctgccatacctggaggaaacagatatacctcagagaacaagaggcaatggaattacaagaaaagaaacaacagggtatttgtttgtttgtttgtttgagacagaatatctctgtgttgcccaggctggcgtgcagtggcatgatctctgctcaatgtatccgcctcctgggttcaagcaattctccaacctcagcctcccaagtagctgagactacaggcatgcaccaccacacctggctaatttttgtatttttagtagagacagggtttcaccattttggccaggctggtcttgaactcatgatctcaagtgatctgcccaccttgacctcccaaa

SEQ ID NO: 918625 - DNA, 644 bp, Homo sapiens
ggtgggccaggggtcaggccaaagggcctgttggcatcggccatggctttgttcgtgcacaaaggacctcttacctgcaccggcctggagcgtggcgccttgctggggcccagcgagtgtgtgggaacaggtaacctgcaggtcacaggctccccgcagggctggtgccaccctgtcaccgcttggccttggtggcagcgggcctcctgggatggtggcggacttggctttgcatggggccacagggctgctctttcctctgggtccttgcacccggggcctggcagagccgctccacgcatgggtgagcacagcctctccaggagctgccccttgactaaggtcagaccgagaggaatggagtctgactgggagacagggacctggtgggaaggagaaagggggatagsgttgaggacaggaaagccaagggggaggcgcagggccccgagttgtggggagcgctcagagagccaggcccggtggtggggatgctaaggagcgcctgggtcgtagcctttgttcaggctggaggctcagaggatgggctggggtgggggtcctcaggccacctgtgtgagtgagggcagaaaccctcagggctgggtttctgcccatgctcctgggccagccttacctgattc

SEQ ID NO: 918626 - DNA, 760 bp, Homo sapiens
ttatattccctatgtagcaggcaataatctttatgcatattatttcctttaacttcccaaccgctctatgaggcaagtattattttaatgtattagtctggactctaggttgctagctaaaaatgggaaaacataattaggagaaccttgaactatctcacatatctacaagaaaagcctggttaaggtcctcatcaccatcagaactctttccatctgtcacctttattctgttgcacaagtcaatattattcttccaggtcagcttcccccttgtggtggaaacttcccagcctcatatctcacagcctcaaactactgcctcccaccccctgagagagaataatcttcctcctttcactcccattttagatattactcggaaggactctgataatttagctttagtgaagagctcagtgttaaatcaatcagttgtggctgaagagacacmagggagaggatcagggttgtagaatagagacatggccagaggggctccacttatggacagtgaaaacaatttctacagaaactggaatggcagggtcctctccttcaacatatttctgagtcctcaaggctctatctcaggccctctgcaatttccactccacatactttctggatctgtctcaccaagtcccattaatatactagtgaggccccaattctctgtctcagcaagaccttgtattcttagcttcagactcacataaccaagtaacccttcccagacatctgcagctctatatctcat

SEQ ID NO: 918627 - DNA, 683 bp, Homo sapiens
catcagggcaccaggacacctcaccagagctctcagagggcagcttcagagagccctgagaccaagtcagagggaccaaaatgctcagggaacagtctccacttaccatggtcccggggcacgagctcctctaggccagttgcacagcatgcctggggagagggtcaaggcgggggcaacccaaggggtgtgtgtgcgcatgtgtgtcccyggggatgggtgtgtgcatgttatcatgcatgggtgcatgtgtacgagtgtgtcaatgtggggggttgtcctgagtatgtgtgtgcatgccatatgtatgcaaaggtgtgtgcatgtgtgcatatgggaggtatgtgcacacatgtagaggtgcttgggggggtgtgtgtgcgcacacgtggagacaggaatatgcatgcatgtttgtggtcagaaagaaagaagaggtagacatttagaaacgcttattttggccaggaaacaattgtctgaaaccaatttggccaaaagcaaattggccaatgtgatctttttttttcaaaaattaatattcccagtctcaagtttttcaagtttctttgccttcattcctccaaaagtggagctcaagacaaaacttacacacagtttatttgggatgtgaccttgggggtgcaggagtggagaatcaagaagaaagaccaatactagga

SEQ ID NO: 918628 - DNA, 683 bp, Homo sapiens
catcagggcaccaggacacctcaccagagctctcagagggcagcttcagagagccctgagaccaagtcagagggaccaaaatgctcagggaacagtctccacttaccatggtcccggggcacgagctcctctaggccagttgcacagcatgcctggggagagggtcaaggcgggggcaacccaaggggtgtgtgtgcgcatgtgtgtccccggggatgggtgtgtgcatgttatcatgcatgggtgcatgtgtacgagtgtgtcaatgtggggggttgtcctgagtatgtgtgtgcatgccatatgtatgcaaaggtgtgtgcatgtgtgcatatgggaggtatgtgcacacatgtagaggtgcttgggggggtgtgtgtgygcacacgtggagacaggaatatgcatgcatgtttgtggtcagaaagaaagaagaggtagacatttagaaacgcttattttggccaggaaacaattgtctgaaaccaatttggccaaaagcaaattggccaatgtgatctttttttttcaaaaattaatattcccagtctcaagtttttcaagtttctttgccttcattcctccaaaagtggagctcaagacaaaacttacacacagtttatttgggatgtgaccttgggggtgcaggagtggagaatcaagaagaaagaccaatactagga

SEQ ID NO: 918629 - DNA, 607 bp, Homo sapiens
agtttaaggaagagaaatatgaaaaccaaatttatgtagttataataataactaacatttattcattacttgttacagatcagttaatgattcaaatacttgacgtaaattatctcatttaattacaccataagcctttgaggtaggagctattattatccttattttatagatgaggaaaatgaggcgcagagagaccatgtaacttgcctgaggtcrcagagtagagccaaggtttaaactctgagcctgacctcattgccttggcatgtcctcatcatgctccatggcctttttgatatgggaaaaatgtgctctgcaggtcatgggcttagtccagtgccctggacactttttgagtcatcaacccctttgagatggggtggaccctcctcagaaaaaaatgcacacacttaggttagtgtttatcttctacatagtctaatgctagttcaaaaattccagtagcataaatcaagttttttttcccccaaaatatattgcaccgtttattccaacatgtgtttaaaagcacaaaaatagcctgggcaacatggtgagactttgtctctacaaaaacttagccagccatggtggcttgcacctg

SEQ ID NO: 918630 - DNA, 607 bp, Homo sapiens
agtttaaggaagagaaatatgaaaaccaaatttatgtagttataataataactaacatttattcattacttgttacagatcagttaatgattcaaatacttgacgtaaattatctcatttaattacaccataagcctttgaggtaggagctattattatccttattttatagatgaggaaaatgaggcgcagagagaccatgtaacttgcctgaggtcgcagagtagagccaaggtttaaactctgagcctgacctcattgccttggcatgtcctcatcatgctccatggcctttttgatatgggaaaaatgtgctctgcaggtcaygggcttagtccagtgccctggacactttttgagtcatcaacccctttgagatggggtggaccctcctcagaaaaaaatgcacacacttaggttagtgtttatcttctacatagtctaatgctagttcaaaaattccagtagcataaatcaagttttttttcccccaaaatatattgcaccgtttattccaacatgtgtttaaaagcacaaaaatagcctgggcaacatggtgagactttgtctctacaaaaacttagccagccatggtggcttgcacctg

SEQ ID NO: 918631 - DNA, 597 bp, Homo sapiens
gcccatgaccacacctggctaatttttgtagttttagtagagcagggtttcaccatgttggccaggctggtctcgaactcctgacttcagataatcttcccaccttggcctcccaaagtgctgggattacaggcatgagccaccatgcctcccccggcctgttttttttaaaaaaaatttcttcarattggtttttacctttctctgttacctccttgagtagctggataatcaactgtctgcattctttatctggcaatttagagattcttcttggtttggatccattgctggagagctagtgtgatcttttgagtgtgtgatagaaccttgttttgtaatattaccagacttacttttctgtttctttttcatttgggcagactgtttcagtggaaagatctggaactcaagggctgctgttcaggttcttttgtcccacagggtaattccttgatgtggtgctctcccccttcccctaggaatggggcttcctgagagctagactgcagtgattgttattgcccttctgagccctgggctggtgctaggcaatgtctgcaaagagtcctgtgatatgatccatcttcaagtctc

SEQ ID NO: 918632 - DNA, 727 bp, Homo sapiens
cttgcatcacccctcccctaactccaggcaacatagctataattctgggagtgactccttctgcttgagggaagaagagggaagagtaatgagacctctgtattataacttgaatgtcagctcagccacagtaaaataaagcaccaagcagggtcctgaggccctcattttagatcatagctgccagatatttctagactcaccctgggcccagaagaaacctgaaggcaaggactcagtcctggcagaatttatcacttgccaactaaaaagttcttgggccttgaataaacattagcagtagcaaggcagtagttgctacaggcctgacatggtggtggtcacaggcagaggcatctgcttgaggaaaggagaggaaaaagtaaagggacttygttttgtaccttgggtaccagctcagccacagtaaaatgaagcaacaaacaaattcctaaagctccgaattccagaccgtagctcctggatggcaattctacacccatcctggatgagaagggaacctactcccctgaagggaaagacctaatcctggcaggattcactgcctgctgaccgagagcccattgggccttgaataaacattggcagtatacagatagtagtcaccatggaccttgggtgaaacccagtaccatgctagcttcaggtgtgacccagcatagtcccagtggcggtggccacagaagtacttacatcacccctcttc

SEQ ID NO: 918633 - DNA, 727 bp, Homo sapiens
cttgcatcacccctcccctaactccaggcaacatagctataattctgggagtgactccttctgcttgagggaagaagagggaagagtaatgagacctctgtattataacttgaatgtcagctcagccacagtaaaataaagcaccaagcagggtcctgaggccctcattttagatcatagctgccagatatttctagactcaccctgggcccagaagaaacctgaaggcaaggactcagtcctggcagaatttatcacttgccaactaaaaagttcttgggccttgaataaacattagcagtagcaaggcagtagttgctacaggcctgacatggtggtggtcacaggcagaggcatctgcttgaggaaaggagaggaaaaagtaaagggactttgttttgtaccttgggtaccagctcagccacagtaaaatgaagcamcaaacaaattcctaaagctccgaattccagaccgtagctcctggatggcaattctacacccatcctggatgagaagggaacctactcccctgaagggaaagacctaatcctggcaggattcactgcctgctgaccgagagcccattgggccttgaataaacattggcagtatacagatagtagtcaccatggaccttgggtgaaacccagtaccatgctagcttcaggtgtgacccagcatagtcccagtggcggtggccacagaagtacttacatcacccctcttc

SEQ ID NO: 918634 - DNA, 632 bp, Homo sapiens
ttcaagataacacagagaagggattcagaatcctatcagataaatttaacaaagggagaaataattttgaaaaagaaatttgggagctgaaaaagtcaactgacaaactgaagaatggattagagtctctcaacagcagaagtgatcaagcagaagaaagaatcagtgagcttgaagacaggctgtttgaaaatatacagtcagaggagataaaacaaaaaataataaaaaagaatgaagattgcctacaagatctagaaaacagcctccaaagaacaaaatctaagagttattggccttaaggagcagatagataaattaggatagaaagtctactcaaagacataataacagagaactttcacttcctgttagaagatgtcaatactcaagtacaagaaagttatagcacaccaagcagattcaattcaagtaagagtacctcaagacatttagtaatcatactccctaaggtcaagaataargaaaggatcctaaaagcagcaagagaaaggaaacaacataaaaaagagctccaatacatctggcagcagacttctcagtagaaaccttacaggccaggacagggtgacatgatatatgtaaagtgttgaagaaaaaaacccttttat

SEQ ID NO: 918635 - DNA, 597 bp, Homo sapiens
cttcctgagagctgagctgtactgattgttatgtctcttctggacctagccacccagcaagttcaccaggctctgggctggtactgaagtttgtctgcacagaatcctgtgatgtgaatcgtctgtgggtctctcagccgtggataccagcaccttctctggtggaagtggcaagggagtgaaatggactctgtgagggtccttaactttggttgcttaatgcaccatttttgttctggttggcctcctgctgggaggtagtgctttcaagacagcatcagccatgatagtatggggaggaacaggtggtgggtgccgtcctagaactcccaagagtatatgccctttgtcttcagctaccaggrtgtgtagggaaggaccattaggtgggcgcagggctaggcgtggctgcctctactgtgtcatgcaggttgtcaggaaagtgggggaaagctggcagtcacaggcctcacctagctcccactcaacccaaagggctagtctcactcccaccatgtgcctgccccccacccccaatagcaacaagtctgtttccaagcaatgggcaagcagggctgagaacttgccccaggatac

SEQ ID NO: 918636 - DNA, 749 bp, Homo sapiens
caagtccggaggggcccacgtgtctcgggagcgggtcttgggccgccgcggggctctccaggggcccgggggttgccagtgcccgccgtccggctccgcacccaggggagggcgggcagaggccccaggttgagcctcggagtatccactccccgttggtgtccccgcccgccagcgccgcgcaacagcccgggctgcttaggacctcgcggcgcgggggcggggcggcgggcggccgggacggtgacaggtgcgcccctcggccaatggcggagcccgcggccctccccgggcccccgctgcgcgcgccaatcggaagccgcgctgagcttcaagtgcgcggaggggcgcgggtccccaccacggcggcagcggcctccgcgcggtcgcctgagggctgcagcgcaaagaaccgggctcccgggcccggacgcggggaagcactcgcgtgggagtttgtgcgagcgcggcccggggcggggcccgcacggaggaggcgccgggaccatggtcaccctcggctgagtttccggcggcgactttgattattggcaaataaccacmataacaataccgagcccccgggcttgcaccgcacgcactgactccgcgagcccgcacacggccgcgtcgcccgccaccgggccctgagcgccagccccaaacgagccgatggaaaaatccaaaaatttccgcatcgacgccctgctggcggtggaccccccacgagccgcctctgcgcagagcgc

SEQ ID NO: 918637 - DNA, 788 bp, Homo sapiens
gtgtgtcctgattgccctactaactggctatcctccatctctctccctttcctggggcctcctcgttccctgagacacaacaatattgaaattacgccatgtaataacactgcaatgtcccctaagttcaagtgaaaggaagagtaacacatctcttactttcaatcaaaacctagaaatgattaagcttagtgaggaaggcatgttgaaaactgagacaggctgaaagctaggcctcttgtgtcggttagccaagttgtgaatgcaaaggaaaagttgttgaaggaaattaaaagtgctaccccagtaaagatgcaaataataagacagaaacagcctgactgctgatgtggagagaggtttagtgctctaaatagtagattaaaccagccacaatattctctaaatagaagattaaaccagccacaatattccctaaaccacagcctaatccagggccaggccctaactccaagggccttctgggagggctgagaggtgaggaagctgcagaagagctggaagctggcagaggttggttcataaggttgaaggaaagaagccgtctccataacataraagtgcaaggtgaagcagcaagtgccaatggagaagctgctgcaagttctccaaaagatccagctaaggtatttgatgacggtgacttcatacacaggttttcagtgtcgacaaaacagccttctattggaagaagatgccatctaagaccttcatagctggagaggagaagtcagcacctggcttcaaagcctcaaaggacaggctga

SEQ ID NO: 918638 - DNA, 561 bp, Homo sapiens
cacatgaggtctggtcacttctgacgcccatgtccacacccactgccacgatcccaacatttgccaccacctactccccagctcctgcaaaactcctcctgacttcgaccacctcatgcctctttctgccttggagtcaaagtgaccatcagaaggaaaactccaacctgtcattcacctgctggaacccttcagatgcctctaggataaaaccctcaattccctgcagtaattaacaagggrccagagacctgaactctgcctttttctcttgtgatgccccctccaggctctcaaactaacccttttcgggttcttccccaaacggcttcccaggaacacgcggttccacacatctcatcatctgaacggcacacaatgtgggagctgtgatcagtccctgttttacagagggggaaactgaggctcagaagacccaggttatgctgctgtcaagtggcagagcccaaagtccaacccaggctgaccctagagccccatgtcctgtggcctcctcggtaagcattttttaacggatgaatgttaaataaatcagttttt

SEQ ID NO: 918639 - DNA, 561 bp, Homo sapiens
cacatgaggtctggtcacttctgacgcccatgtccacacccactgccacgatcccaacatttgccaccacctactccccagctcctgcaaaactcctcctgacttcgaccacctcatgcctctttctgccttggagtcaaagtgaccatcagaaggaaaactccaacctgtcattcacctgctggaacccttcagatgcctctaggataaaaccctcaattccctgcagtaattaacaagggaccagagacctgaactctgcctttttctcttgtgaygccccctccaggctctcaaactaacccttttcgggttcttccccaaacggcttcccaggaacacgcggttccacacatctcatcatctgaacggcacacaatgtgggagctgtgatcagtccctgttttacagagggggaaactgaggctcagaagacccaggttatgctgctgtcaagtggcagagcccaaagtccaacccaggctgaccctagagccccatgtcctgtggcctcctcggtaagcattttttaacggatgaatgttaaataaatcagttttt

SEQ ID NO: 918640 - DNA, 785 bp, Homo sapiens
gaaacataaggaacttaaaggactcacagccattttttaaatgaagaacaaagttggagaatgtccactacctgattttaaggcctattatagagctacagtaatcaaaacagtgtggtcatgatgaaagtatagatataaatcaatgaacaaaatagagaatccagaaatagatccccatatatggtcaattgattttaaataaaggtaccaagggaatccagtgaggcagcaaaatcttttcaacaagcaatgtggaacaattggatttcagtatggaaaatatgaacctcaacccttgccacatatcataatttaaaaattaaatcaaaatggatcctaggcctagtaaaaggaaaatgtaaaacttctagaaggaaacatttaagacaatcctcacaaccttggaagaagaggaggcaaagatttcttagctaggacagaaaaagcatgagtcataatataataaataggatcttatcaaaattaaaaacttgctctttgaaagacatgactaggaatatgaaaaggcaagccacagaaggagagaaaatattcactattcacagtacatgtgtctgacaaaggacttacatcctaaatgcatttttttaaaacccattgtattatctagttgtgtaasagattaccacaaacttagtggctgaaatcatgcattgattatctcatagcttctgtaggtcagaagttcaggtacagcttagttgagtcctctgcctcaggctcttttgtgaagcttgcaatcaagatgttggccaggacca

SEQ ID NO: 918641 - DNA, 577 bp, Homo sapiens
agccgaggtggaggatttgctcccaagatggagctgcttcaggcttcacgggcgggttggctgaaacatggacccaaaggtggcccatgctgaacggagttgaaacaccagaaacgcctgcgtctgctgcagagggaggcatcatggctcagggagactggagaggatttgccakttgagaccaactcacctgccactcacacacctttcaccaagactgtggtgagggagcccagcgcccttgaagagctccctgtaggttggaaatcacagggggacctactgccactgaccagggatcctaaatgaagtgggagtatctgggtcccagcatggcaggggccaagtggaaacaatcaccaaaggcaaggcaggtgcggcccatcggcgaaagcagaggccaagcagccatcaggaccgtcagactcaactccttggggtgggccgcgtgacctagggcgtgggccagttcgccaccatgttcttagaagtgaaatggatgggaagcctactacattctaactcgatctgtataagtagaagtgtaggccaagtgaacaaaagtctagctcgaatg

SEQ ID NO: 918642 - DNA, 641 bp, Homo sapiens
tgtgtcctctcatggcagagattgagagagtgagagagcttgctcatgtctctgccttatatgggccctaatcccatcatgagggctccatcctcctgacctgattacctcctggattaggccattcttgtattgctataaagaaatacctgagatttggtaatttataaagaacaggtttaattggctcatcgttctgcaggctgtacaggaagcacagtgctggcatctgcttggcttctggggagccctcaggaaacttacaatcatggcagaaggcaaagggggaggaggcatgtcacatgayaaaaacaggagcaagagagagagagtcagcagggaggcaccatacacttttaaatgaccagatcttgcaagaactcacttgctatcacgaagacagcaccaagccatgagggatgtgcccacatgatctaaacacctcccactaggccccacccccagagttggggattacaattcaacatgagatttgggcaggggtaaatatcaaatgatatcacctcccaaatgctccatctccaaacaccatcacattgagggttaggccttcaacatgtggattttttctgtgaggaggaacgacacaattcagtctgtaacaaacactaaacttggtc

SEQ ID NO: 918643 - DNA, 611 bp, Homo sapiens
acccatgtagaggtctggcatttgctaattaatcacaggtccagtaatcaagggatggaagtggaagtggcaccactcaccatcacccctagcaaaccactagcaaaatttttgcttcctgttcccatgactttatgctctgctggcctagaggtcttagttccagagggaggaatgctgccaccaggagacacaacagtgattccattaaactggaagttaagatccctacctggacactttgggctcctcttacctttaagaaaacaggctaataagggagttacagcgtkggctggggtgattgatgcaaactatcaagataaaatcagtttactactataccatggagataaggaagagtatgtgtggatacaggagatcccttgaggtgtctcttagtattaccatgccctgtagttaaggtcaatgggaaactacaacagcccaatccaggcaggactacaaatagtccagacccttcaggaatgaaggaatgaaggtttgggtcactccaccaagaaaaaaaccatgacctgctgaggtgcttgctgaaggcaaagggaatacagaataggtagtagaaggtagttatcaataccagctacaac

SEQ ID NO: 918644 - DNA, 556 bp, Homo sapiens
aggacttccagtactatgtggtgtaacagtgttgaaaatggacatctttgtcattttctagatcttggatgaaaggctttcaatttttcctcattcagtatgatactagttgtgggtctgttgtatatggcttttattatgttatgttccgtctatacccagttttttgaaggtttttatcattaagtgatgtttaattttgtcaagtgctttttcagcatcaattgaaatgatcatatgactttggtccttcattctgttgatatgatgtatcatgttgattgatttgcatatgttgaaccatccttgtaccctggaataaatcccacttggtcgtgatgaatgatctttttaatatggtatwgaactcagtttgctagtattttgtcgaggatttttgaattaatgttcatcagagacattggcctgtagttttattttttgatgtgtctttgtgtggtttttgtataagggtaatactggcctcttagaattagtttgaaagtattctctcctcctctatttttcagaacagtttaagtaggattgatattta

SEQ ID NO: 918645 - DNA, 627 bp, Homo sapiens
taatgtctcctttttcatgtctgattttgtttatttgggtcttctttcttttttcttagtttggttaaaggtttgtcaattttgtttatcttttcaaaaaaccaacttttcatttcattgatcttttgtattattttctttattacaaattcayttatttctgctctgatctttactatttctttccttctactaattttgggtttgatttgctcttgcttttctagttcttcaacatgaattgttagatcgtttcttagaagttttttttttacttttttgatgcgtgcttacagctataaagttccctcttagtactgcttttgctgtatctgataggtttggatatgttgtgtttccgtcatcatttgtttcaagaaattttccagtctccttcttaacttcttcattgactcactagtcattcaggagcatattgtttaatttccatgtgtttttatagtttccaaaattcctcctgtgattgatttctagttttattccattgtggtcagagaagatacttgatattatttcaatattttgaacttttttaagacttgttttgtggcctaacatatggtctagcctcaagaatgatccaagtgctgaggagaataatgtgta

SEQ ID NO: 918646 - DNA, 722 bp, Homo sapiens
aatccagaggtttcgtgtgcacaggatcaccggttatccatgtggcttcttattccacaagggcagaaggaggtcatggcaatagatagtgtgactcagggagaacaacgtgggctcaggagctgatgaaaactgagtctgcatctcatcgctggcacattactagccttaaacaagtcatgccaattctccaaacagcagcttcctcatttataaaatgatgatcaacatgcgcctgctttctctctctctctgtctctctctctctgtctctctctctcwcacacacacacacacacacacacacacacacacagacaccttgcatggtagtggtgagaattagagatatgtctaaaatgctcagcatactatctggcccacagtagggactcaatgcttggaagctattattattagctattactaaataaagtctgtggaaagagtctttctgtataatcgaaattcccattatgctcatcttatgcccaatctggcagcaaaaacggcttgccaacagcatccgtctttccattcacaagtcacatgaaatatatgacctttttcctaaagggttcccaaaggtccgctagctttcctggcaatgagacagcaattcaagccagtccaggtacagaacaaagtggtgccaagagccacattccttgcatagaacactccccagccaggccatccacatggcggctgtgtgtgccagc

SEQ ID NO: 918647 - DNA, 570 bp, Homo sapiens
cctgtctacttagggatgctgctccagcaagtctttccccctgtattagtctgttttcatgctgctgataaagacatacccaagactggacaatctacagaaaaaaagagttttaattgggcttacagttatacatggctggggaggcctcacaatcatgggggaaggtaaagaggagtaagtcacatcttacatgaatggcagcaggcattcatgtaaagagagctttgcatcctgcaaagagagcttgtgsaggaaaactccccctcataataaccatcatatctcatgagacttactcactatcacaagaatagcacaggaaagactgcccccatgattcaattacctcccactgggtccctcccacaacacgtgggaattgaagatgagattttgggtggggacatagccaaatcatatcattctacccctggtccctcccaaatctcatgtcctcacatttcaaaaccaatcatgtcttcccaacagtcctccaaagtcttaactgatttcagcactaactcaaaagtccatagtccaaagtctcatccaagacaagtcaggtcc

SEQ ID NO: 918648 - DNA, 570 bp, Homo sapiens
cctgtctacttagggatgctgctccagcaagtctttccccctgtattagtctgttttcatgctgctgataaagacatacccaagactggacaatctacagaaaaaaagagttttaattgggcttacagttatacatggctggggaggcctcacaatcatgggggaaggtaaagaggagtaagtcacatcttacatgaatggcagcaggcattcatgtaaagagagctttgcatcctgcaaagagagcttgtgcaggaaaacyccccctcataataaccatcatatctcatgagacttactcactatcacaagaatagcacaggaaagactgcccccatgattcaattacctcccactgggtccctcccacaacacgtgggaattgaagatgagattttgggtggggacatagccaaatcatatcattctacccctggtccctcccaaatctcatgtcctcacatttcaaaaccaatcatgtcttcccaacagtcctccaaagtcttaactgatttcagcactaactcaaaagtccatagtccaaagtctcatccaagacaagtcaggtcc

SEQ ID NO: 918649 - DNA, 570 bp, Homo sapiens
cctgtctacttagggatgctgctccagcaagtctttccccctgtattagtctgttttcatgctgctgataaagacatacccaagactggacaatctacagaaaaaaagagttttaattgggcttacagttatacatggctggggaggcctcacaatcatgggggaaggtaaagaggagtaagtcacatcttacatgaatggcagcaggcattcatgtaaagagagctttgcatcctgcaaagagagcttgtgcaggaaaactccccctcataataaccatcatatctcatgagacttactcactatcacaagaatagcacaggaaagacygcccccatgattcaattacctcccactgggtccctcccacaacacgtgggaattgaagatgagattttgggtggggacatagccaaatcatatcattctacccctggtccctcccaaatctcatgtcctcacatttcaaaaccaatcatgtcttcccaacagtcctccaaagtcttaactgatttcagcactaactcaaaagtccatagtccaaagtctcatccaagacaagtcaggtcc

SEQ ID NO: 918650 - DNA, 570 bp, Homo sapiens
cctgtctacttagggatgctgctccagcaagtctttccccctgtattagtctgttttcatgctgctgataaagacatacccaagactggacaatctacagaaaaaaagagttttaattgggcttacagttatacatggctggggaggcctcacaatcatgggggaaggtaaagaggagtaagtcacatcttacatgaatggcagcaggcattcatgtaaagagagctttgcatcctgcaaagagagcttgtgcaggaaaactccccctcataataaccatcatatctcatgagacttactcactatcacaagaatagcacaggaaagactgcccccatgattcaattacctcccactgggtccctcccacaacacgtgggaaytgaagatgagattttgggtggggacatagccaaatcatatcattctacccctggtccctcccaaatctcatgtcctcacatttcaaaaccaatcatgtcttcccaacagtcctccaaagtcttaactgatttcagcactaactcaaaagtccatagtccaaagtctcatccaagacaagtcaggtcc

SEQ ID NO: 918651 - DNA, 580 bp, Homo sapiens
tcaaatgatacatcatttgtttaaacatcaaatgatatattatgaacaatactcctgtggctggtggaataatggcccccaagataggagattctaatgtctggaacttataaatgtcaccttatttggtaaaagggrccttacagatatgattaagttaaggatcttgagatggggcattagtctggattatctgggtggaccctaaatgcaatcacgattgtccctataagagagaggcaaagggaaatttgaccagaagaggagtagacaatgtgaccacagaggatggattgatgcatccagaaatcaaggaatgctgccagccaccaaaaagtgaaaaaggcaagggacagatttccccctagagcctctggagggagtacagccttgctgacagcttgatttcggcccagtgacaccgatttcagacttctggcctctagaactgtgagacaataaatttctgttgtttatagccaccaagtttttagtaatttgctaaagcaattataggaaactgatgcaatacccaagcactggagagaatacagaaaaatggaaaacgttaaggataatg

SEQ ID NO: 918652 - DNA, 707 bp, Homo sapiens
tcaacatataaaaatcaacctctcttatacactaagtcagtaaaatgaggcaaaaaccacatgactatttcaatagatgtggaaagggcatttgacaaaatccaacagcatttcattataaaaacactaaaaaaattaggaataggatggaaattcctcaacctgatgaagagaatttacaaaaagaaacacagctaaatcataygtaatggtaagagattaaaagcttttcctctaagatcaggaataagacaggcatgtccactcttgccacttgtatttgacattgtatgggaagttctggtcagggcaattaggcaagaaaagaaagaaaaggcatgcaaagtaggcaaaagttgatattgcagttttgagtgtgaaaattgtagggcaggcaagcaggcaaaatacagacagaatttctgcataactgtcttgaggcaaaattccttcttctcagggaaacctccatttttgctctgaaggccttcaccgattggatgaggatgactcacattatgcagggttatctctttttcttaaagccaatcaagtgtagatgttaaccacatctacaaaataccttcacaaatgactgggttccatagcctagccaagtgacacataatatttaaccatcataacaagggtaccaagacaattcaatgtggaaagactagtcttctcaacaaatgggctgggacaac

SEQ ID NO: 918653 - DNA, 707 bp, Homo sapiens
tcaacatataaaaatcaacctctcttatacactaagtcagtaaaatgaggcaaaaaccacatgactatttcaatagatgtggaaagggcatttgacaaaatccaacagcatttcattataaaaacactaaaaaaattaggaataggatggaaattcctcaacctgatgaagagaatttacaaaaagaaacacagctaaatcatatgtaatggtaagagattaaaagcttttcctctaagatcaggaataagacaggcatgtccactcttgccacttgtatttgacattgtatgggaagttctggtcagggcaattaggcaagaaaagaaagaaaaggcatgcaaagtaggcaaaagttgatattgcagttttgagtgtgaaaattgtagggcaggcaagcaggcaaaatacagacagaatttctgcataactgtcttgaggcaaaattccttcttctcagggaaacctycatttttgctctgaaggccttcaccgattggatgaggatgactcacattatgcagggttatctctttttcttaaagccaatcaagtgtagatgttaaccacatctacaaaataccttcacaaatgactgggttccatagcctagccaagtgacacataatatttaaccatcataacaagggtaccaagacaattcaatgtggaaagactagtcttctcaacaaatgggctgggacaac

SEQ ID NO: 918654 - DNA, 588 bp, Homo sapiens
tcgtcatttcacttcattactgaaggctcttttcattggagatagaattctgggttgacatttagcagtttaaaatgttgttccacttccttctggacttcattgtttctgaggagaaatctgcagtcttttgaatagttgttacctaaagagtaatgtctccattttctcaaactactttaaagaattttcctttgccctcaagttttagtcttcattatgatgtgtctggctgsgtaaagatttctttagttttatcttgcttggggtgtttgctcagattcttgaatttgtgggtttatgtcttttgccagatttggaatgattttgctgttatttcttcaaatattgttttctttattgcactgtttttcactgtggaggttggcaagtccaaatctgcagaggaggctggcaggcccaggaaagaactggcatcttggttcacgttcgaaggctgagagctggcagaactcccccttctttgagggagggcaatcttttccttaaggccttcaacgaattaaatgaagcacacccacattatggagtgtcatctattttactcaaaatatgttcacttaaatg

SEQ ID NO: 918655 - DNA, 572 bp, Homo sapiens
gtgtggtagactgaggacttgcagtctgctgtttcaagataaatgaatccagcataagtaacattgcaaatgaaaagaaaataaaatctatgaagttggcagggcgcggtggctcaagcctgtaatcgcggtactttgggaggccgagacgggcagatcacgaggtcagaagatcgacaccatcctggctaacacaatgaaacccggtctctactaaaaatacaaaaaaaaaaaaaaaaaaaattagctgggcgtggtggcacgcrcctgtagtcccagctactggggaggttgaagcaggagaatggcgtaaacccgggaggcggagcttgcagtgagccgagattgcgccactgcactccagcctgggcgacaaagtaagcctccctctcaatcaatcaatcaatcaatcaataaaaataaaaaaatgtgaagtcatcgctacaactattccaggcaaaaaacctttgcactttttgagaaatacctttttactttgtattgaaaatgaaggttttatgtgcatgcaagattgctgtaaggaaggcatacctatgactctaatacaattt

SEQ ID NO: 918656 - DNA, 605 bp, Homo sapiens
tggtagactgaggacttgcagtctgctgtttcaagataaatgaatccagcataagtaacattgcaaatgaaaagaaaataaaatctatgaagttggcagggcgcggtggctcaagcctgtaatcgcggtactttgggaggccgagacgggcagatcacgaggtcagaagatcgacaccatcctggctaacacaatgaaacccggtctctactaaaaatacaaaaaaaaaaaaaaaaaaaattagctgggcgtggtggcacgcacctgtagtcccagctactggggaggttgaagcaggagaatggcgtaaacccgggaggcggagcttgcagtgagccgagattgcgccactgcactccagcctgggcgacaaagtaagcctccytctcaatcaatcaatcaatcaatcaataaaaataaaaaaatgtgaagtcatcgctacaactattccaggcaaaaaacctttgcactttttgagaaatacctttttactttgtattgaaaatgaaggttttatgtgcatgcaagattgctgtaaggaaggcatacctatgactctaatacaatttgagtaaagcactcattatatgaaaactttaagcaac

SEQ ID NO: 918657 - DNA, 573 bp, Homo sapiens
cctgtctacttagggatgctgctccagcaagtctttccccctgtattagtctgttttcatgctgctgataaagacatacccaagactggacaatctacagaaaaaaagagttttaattgggcttacagttatacatggctggggaggcctcacaatcatgggggaaggtaaagaggagtaagtcacatcttacatgaatggcagcaggcattcatgtaaagagagctttgcatcctgcaaagagagcttgtgsaggaaaactccccctcataataaccatcatatctcatgagacttactcactatcacaagaatagcacaggaaagactgcccccatgattcaattacctcccactgggtccctcccacaacacgtgggaattgaagatgagattttgggtggggacatagccaaatcatatcattctacccctggtccctcccaaatctcatgtcctcacatttcaaaaccaatcatgtcttcccaacagtcctccaaagtcttaactgatttcagcactaactcaaaagtccatagtccaaagtctcatccaagacaagtcaggtccctt

SEQ ID NO: 918658 - DNA, 573 bp, Homo sapiens
cctgtctacttagggatgctgctccagcaagtctttccccctgtattagtctgttttcatgctgctgataaagacatacccaagactggacaatctacagaaaaaaagagttttaattgggcttacagttatacatggctggggaggcctcacaatcatgggggaaggtaaagaggagtaagtcacatcttacatgaatggcagcaggcattcatgtaaagagagctttgcatcctgcaaagagagcttgtgcaggaaaacyccccctcataataaccatcatatctcatgagacttactcactatcacaagaatagcacaggaaagactgcccccatgattcaattacctcccactgggtccctcccacaacacgtgggaattgaagatgagattttgggtggggacatagccaaatcatatcattctacccctggtccctcccaaatctcatgtcctcacatttcaaaaccaatcatgtcttcccaacagtcctccaaagtcttaactgatttcagcactaactcaaaagtccatagtccaaagtctcatccaagacaagtcaggtccctt

SEQ ID NO: 918659 - DNA, 573 bp, Homo sapiens
cctgtctacttagggatgctgctccagcaagtctttccccctgtattagtctgttttcatgctgctgataaagacatacccaagactggacaatctacagaaaaaaagagttttaattgggcttacagttatacatggctggggaggcctcacaatcatgggggaaggtaaagaggagtaagtcacatcttacatgaatggcagcaggcattcatgtaaagagagctttgcatcctgcaaagagagcttgtgcaggaaaactccccctcataataaccatcatatctcatgagacttactcactatcacaagaatagcacaggaaagacygcccccatgattcaattacctcccactgggtccctcccacaacacgtgggaattgaagatgagattttgggtggggacatagccaaatcatatcattctacccctggtccctcccaaatctcatgtcctcacatttcaaaaccaatcatgtcttcccaacagtcctccaaagtcttaactgatttcagcactaactcaaaagtccatagtccaaagtctcatccaagacaagtcaggtccctt

SEQ ID NO: 918660 - DNA, 573 bp, Homo sapiens
cctgtctacttagggatgctgctccagcaagtctttccccctgtattagtctgttttcatgctgctgataaagacatacccaagactggacaatctacagaaaaaaagagttttaattgggcttacagttatacatggctggggaggcctcacaatcatgggggaaggtaaagaggagtaagtcacatcttacatgaatggcagcaggcattcatgtaaagagagctttgcatcctgcaaagagagcttgtgcaggaaaactccccctcataataaccatcatatctcatgagacttactcactatcacaagaatagcacaggaaagactgcccccatgattcaattacctcccactgggtccctcccacaacacgtgggaaytgaagatgagattttgggtggggacatagccaaatcatatcattctacccctggtccctcccaaatctcatgtcctcacatttcaaaaccaatcatgtcttcccaacagtcctccaaagtcttaactgatttcagcactaactcaaaagtccatagtccaaagtctcatccaagacaagtcaggtccctt

SEQ ID NO: 918661 - DNA, 600 bp, Homo sapiens
taagtggatggactgcattgtgacccccaaatctgtaatgtcaaaaatgttgaacccttaattcccaatgtgactatatttagagatagaatctttaggagataattagcattaaatgagattataagaatgggaccctaatctgataggattataagtcttataagacttatataagaagagtaagagagagatatttctctctttttttcttcgtaaacacagaggaaaggcatatgaagacaaagcaagaaggtggccaactgcaagccaggaagagcgacttcgccagaaaccaaactgaccagcaaattgatctgggacttcccagcctccagaactgagagaaacaatttctgttgtttaagccacccacactayggtcttttgtgatggcagcctgagcagactaagacggattttggtactgagaagtgggtgctactgttaacaaatatctaaacacatgaaagcagctttggaactaggtgatggccataggctggacaagttttgaggtccattctagaaaaagccattgctatgatgggactgttggtagaaatatggactttaaaggtaattctgatgaaggctcag

SEQ ID NO: 918662 - DNA, 600 bp, Homo sapiens
taagtggatggactgcattgtgacccccaaatctgtaatgtcaaaaatgttgaacccttaattcccaatgtgactatatttagagatagaatctttaggagataattagcattaaatgagattataagaatgggaccctaatctgataggattataagtcttataagacttatataagaagagtaagagagagatatttctctctttttttcttcgtaaacacagaggaaaggcatatgaagacaaagcaagaaggtggccaactgcaagccaggaagagcgacttcgccagaaaccaaactgaccagcaaattgatctgggacttcccagcctccagaactgagagaaacaatttctgttgtttaagccacccacactacggtcttttgtgatggcagcctgagcagactaagacrgattttggtactgagaagtgggtgctactgttaacaaatatctaaacacatgaaagcagctttggaactaggtgatggccataggctggacaagttttgaggtccattctagaaaaagccattgctatgatgggactgttggtagaaatatggactttaaaggtaattctgatgaaggctcag

SEQ ID NO: 918663 - DNA, 594 bp, Homo sapiens
cagctgcttgtgttagaacatttatacaggtactaatgaacaggtactaacagcttcaatggaaaagagtcgtgtgaatacttatttagaaaatatttaaagtagtcgttattgagaatctccaatttaccacatattttatggtaatctcttttctaaaatgaatcaacaagactaagccattatgttaaaaagccatgcctccataccaccatctttagatacagatttaacagagcaattccttttgtctcttctgataattacaatattaaagaaaatactagtcacctacataaaggaaactacactgacttggtgtcactcagtaagtttacataaatgaagagtttggaaactttaggttctcaaagacagagttacctaaatattaatacattgtttactgaggaggcctctttttgctttgacractcaatgactcagatgtgaaaaccccaggaattgttttaccttaactgaaatgtccaaggattctttaaaaaaaaaaatcatctctttttttatctttaattttttagaaatttttattgttttatttttccataatttattggggtacaggtggtattt

SEQ ID NO: 918664 - DNA, 630 bp, Homo sapiens
tacccagtaataggattgcttggtcaaatggtatttctggtttctagatctttgaggaatcgacatgctatcttccacaacggttgaactaatttacattcccaccaacagtgtaaaagcattcctatttctccacagcctcaccagcatctattgtttactgattttttgaaaatcgccattctgactggcatgagatggtatctcattgtggtttttatttgcatttctttgatgatcagtgatgttgagctttttttcatatgtttgtcagctgtgtaaatgtcttcttttgagaaatgactgttcatatcctttgcccactttttgatggacttgtctgtttttttcttgtaaatatgtttaacttccttgtaaattctggatattagacttttgtcagatgggtagattggaaaaattttctcccattctgtaggctgcctgttcactctgatgatagtttmttttgctatgcagaagccctttagtttaattaaatcccatttgtcaattgtggcttctgttgcaattgctttttgcattttagtcatgaagtctttgcccatgcatgtgtcctgaatgctactgcctaggttttcttctagggttcttatggttttgggtttt

SEQ ID NO: 918665 - DNA, 722 bp, Homo sapiens
aggaggctgaggtggaaggattgcttgagcccaagaggttgaggctgtagtgagctatgatcacgccactgaattccagcctgggagacagagcaagaccttgtctcaaatacaataaacaaaaaagacctcatactacatgaattaaatcagtctgtagatcaggcaccagtggtaaaggtcttttttgcctcttttttagtgcattctagaattttaaaaataaccgatactaggccaggtgtggtggttcatacctgtaatcccagcattttgggacacygaggcaggcggatcacctgaggccagtagttcaagatcagcctggctaacatggtgaaaccctgtctctactaaaaatgcaaaaattagccgggcatgatagcacgcgccttttatcccagctacttgggaggctgaggcaggagaatcgcttgaaccagaagatagattgtagtgaaccaagatcctgccactgcactccagcctgggcaacagagcaagactccatctcaaaaacaaacaaaaactgatactttgtccgaaaggtgattaaaaataacagtgtgaaacatcagaggtctccattccaagaacttcaggtcaggggtagagtggagaggccataaatgtaattcagtgggaccttctagtacagcaaagcatgaaagcagttttcctccactctatttatgtgtgatgaccacatgcgttggcctctg

SEQ ID NO: 918666 - DNA, 653 bp, Homo sapiens
attccagcctgggagacagagcaagaccttgtctcaaatacaataaacaaaaaagacctcatactacatgaattaaatcagtctgtagatcaggcaccagtggtaaaggtcttttttgcctcttttttagtgcattctagaattttaaaaataaccgatactaggccaggtgtggtggttcatacctgtaatcccagcattttgggacaccgaggcaggcggatcacctgaggccagtagttcaagaycagcctggctaacatggtgaaaccctgtctctactaaaaatgcaaaaattagccgggcatgatagcacgcgccttttatcccagctacttgggaggctgaggcaggagaatcgcttgaaccagaagatagattgtagtgaaccaagatcctgccactgcactccagcctgggcaacagagcaagactccatctcaaaaacaaacaaaaactgatactttgtccgaaaggtgattaaaaataacagtgtgaaacatcagaggtctccattccaagaacttcaggtcaggggtagagtggagaggccataaatgtaattcagtgggaccttctagtacagcaaagcatgaaagcagttttcctccactctatttatgtgtgatgaccacatgcgttggcctctgctc

SEQ ID NO: 918667 - DNA, 553 bp, Homo sapiens
gacgtaagacaggtttctaggacggtgcagaggccagggcgcccggactacgcggaagcccggatgtgggccgggcgggaccacggctgtgtatgtagccccgccccgggggcggccgccttcccctcgggcatggcaagagccaatcacaggccagygtgtccccgctccgccaatggtcggactgttgctagggcctgggtccctgccccgaaatcggcccgcttagcggccccggggcttcatttgttgcagatcccgccctccagccactggggagcttttatctcccaacttcacccgcttctctctcctccgtcttccgcctccacctttgttacgtgcttgggaggatggagccttgggctcgtggtgggcccttggtcccacgcctgcccttcagtttctccatctgaataatgacgtgatctctcgtgtcccggcccgtactggttggctatcctttcttacctacacatctctgcttctgaaaacagccctgggaggtctgcgttgttcccagattgcagaagaggaaactcctggcccccga

SEQ ID NO: 918668 - DNA, 567 bp, Homo sapiens
ctcgacttctcaccgggccttagctgcctctcagcagagcagggctcgggacctgcagcccgccatgcctgagcctccccaccccgctgtgggctcctgcgcggcccgagcctccctgacaagcaccgccccctgctccacggcgcccagtcccatcgaccacccaagggctgaggagtgcgggcgcacagcacgggactggcaagcagctccacctgcggcccccatacaggattcactgggtgaagccaactgggctcctgagtctggtggagaacctttatgtcaagctaagggattgtaaatacaccaatcggcactctgtatctagctcaaggtttgtaaacacaccaatcagcgccctgtgtctagctcaggrtttctgaatgcaccaatcgacactctgtatctagctactctggtggggccttggagaacctttgtgtccacactctctatctagctaatctagtggggatgtagagaacttttgtgtctagctcagggattgtaaacacaccaatcagccctgtcaaaacggaccaatcagctctctgtaaaatggac

SEQ ID NO: 918669 - DNA, 668 bp, Homo sapiens
caatgcctgtacccccattgtatctaggaagtaactaacttgctttttattttacaggctcatatgcagaagggacttgccttgtctcagatgagactttggaccgcagacttttgagttaatgctgaaatgaattaagactttgagagactgttgggaaggcatgactggttttgaatgtgaggacatgagatttgggaggggccaggggaggaattatattgtttggctctgtcccyacccaaatttcatcttaaattggaactcccacaattcccatgtgtcatgggaggaacccagtgagaggtaattgaatcataggagtgggtctttcctgtgctgttcttgtgatagtgaataagtctcacaagatctgatggctttaaaaacaggagtctccctgaacacgctctctctgtttgcctgctgtcatccacataagatgtgacttgcttttcctgggcttctgccatgattgtgagccctccccagtcatgtggaattgtaagtccattaaacctttttttgtaaattgcccagtcttgggtatgtctttatctcagtgtgaaaacagactaatatgatagccatttataaaaatcatttcagcatttcttatctcacaataactgtttggtattttgctttcacttgagtggtttataaca

SEQ ID NO: 918670 - DNA, 668 bp, Homo sapiens
caatgcctgtacccccattgtatctaggaagtaactaacttgctttttattttacaggctcatatgcagaagggacttgccttgtctcagatgagactttggaccgcagacttttgagttaatgctgaaatgaattaagactttgagagactgttgggaaggcatgactggttttgaatgtgaggacatgagatttgggaggggccaggggaggaattatattgtttggctctgtccccacccaaatttcatcttaaattggaactcccacaattcccatgtgtcatgggaggaacccagtgagaggtaattgaatcataggagtgggtctttcytgtgctgttcttgtgatagtgaataagtctcacaagatctgatggctttaaaaacaggagtctccctgaacacgctctctctgtttgcctgctgtcatccacataagatgtgacttgcttttcctgggcttctgccatgattgtgagccctccccagtcatgtggaattgtaagtccattaaacctttttttgtaaattgcccagtcttgggtatgtctttatctcagtgtgaaaacagactaatatgatagccatttataaaaatcatttcagcatttcttatctcacaataactgtttggtattttgctttcacttgagtggtttataaca

SEQ ID NO: 918671 - DNA, 565 bp, Homo sapiens
tctgttgtaatataccaggcctcatttctgacttattaacttgtgtcttctctttttctttggcagtcttgcttgagatttgttagtgttattgatctttccaaacaatcagctttttgtttcattgattttctgtattgtttttctgttttcaatttcattgatttctgttcactatttctttctttctgtttgcttttggtttattttgttctttcattgttctagtttcttgaagtgggagctcgggttattgatttgaggctttttctttgtataacactaagcatccagtgttataaatttccttctcagcactgcttcagctatgtcccacagmctatttgttcaacatatgaacaaaattcatacgttaaagtcctaattctcagtacctcagactacgactatatttggacatatggtctttaaagagaaaataaagttacaaggaacttattaatgtgggccccaaaccaatactgaggcacttataagaagaaaatatcagaagacacataaatacagagggaggaccatgagaagcacagggagatggtggcta

SEQ ID NO: 918672 - DNA, 565 bp, Homo sapiens
tctgttgtaatataccaggcctcatttctgacttattaacttgtgtcttctctttttctttggcagtcttgcttgagatttgttagtgttattgatctttccaaacaatcagctttttgtttcattgattttctgtattgtttttctgttttcaatttcattgatttctgttcactatttctttctttctgtttgcttttggtttattttgttctttcattgttctagtttcttgaagtgggagctcgggttattgatttgaggctttttctttgtataacactaagcatccagtgttataaatttccttctcagcactgcttcagctatgtcccacagaytatttgttcaacatatgaacaaaattcatacgttaaagtcctaattctcagtacctcagactacgactatatttggacatatggtctttaaagagaaaataaagttacaaggaacttattaatgtgggccccaaaccaatactgaggcacttataagaagaaaatatcagaagacacataaatacagagggaggaccatgagaagcacagggagatggtggcta

SEQ ID NO: 918673 - DNA, 565 bp, Homo sapiens
tctgttgtaatataccaggcctcatttctgacttattaacttgtgtcttctctttttctttggcagtcttgcttgagatttgttagtgttattgatctttccaaacaatcagctttttgtttcattgattttctgtattgtttttctgttttcaatttcattgatttctgttcactatttctttctttctgtttgcttttggtttattttgttctttcattgttctagtttcttgaagtgggagctcgggttattgatttgaggctttttctttgtataacactaagcatccagtgttataaatttccttctcagcactgcttcagctatgtcccacagactatttgttcaacatatgaacaaaattcatacgttaaagtcctaattctcagtacctcagactacgactatatttggasatatggtctttaaagagaaaataaagttacaaggaacttattaatgtgggccccaaaccaatactgaggcacttataagaagaaaatatcagaagacacataaatacagagggaggaccatgagaagcacagggagatggtggcta

SEQ ID NO: 918674 - DNA, 676 bp, Homo sapiens
gccgagtggtggaggttccagcatagcaaccaggccttttgttccttctccagcccaatggtggttagggcagtactacggccgctgcaatggcagaggggctatgggttgtctgtgtgattacctcctcagagaaatgcagagccatctctgactaaagtgtttgggtaagggcagggtagttgtgctagagtcctaggtcaggaagctttgaccagtgaagagaagtgggaacggggacccatgtggaaaacagtctggccagttttctgtggggcagctttgctgtgctgagggatctgtgccaattcctaatcaccgtgctccacccagggcctgagggcaacaatggtgagggttgtaggacagcaagaatggccacctgcatctctgggaactctgtcccagggaagtacagagctgctactggcctgaragcccagccgagggttggctggagtcctaggttgggaggctctgtccagtgaggaaaagcagaaatgaggacctgcattgaaaacagtctggtcacttttctttggggtggcttcactgtgctagggatccactccaatccctaattaccatgctcactccagagcctcagggcaacagtggtgaggggtgtgagagagcaaaaatagcagcctgcctttccctctgggagctctgtctc

SEQ ID NO: 918675 - DNA, 719 bp, Homo sapiens
ttcctgtgcatagatcattgtgcagtggggtccactccgctccatgcccaggcaaatcttcaggcattcaaaggactggcttgccctacaattcctgtgcagagatcctggatccagggtggggtgagggtccctctcttcttcatgcccttgcagatctccagacattcagagtacctgctcacctggataagcagccccacccttccagtgcayagatcattgtgcagtttggtccaatctgcttcatgcccaggcagatctttgggtattcaaaggaccagcttgccccacaattcctgtgcagagatcctggcgccagggttgggagaggggccttctcttcttcacgcccttgcagatctccaggcattcagagcacctgctcacaagattcacagcctgagctgcgctacctttcctgcatagaaactgcggtgcaccagggccttttctactccatgcccaggcagatctctagtgattcagagcacccacctgcctgaatgagtagcctgtgccacctattttttctgtgcagagattttgatgcactgtggccctctgcactccaccctcaggcagatctccaggcatctagagtgcctaccctcctggaatagcagtttaggccacccaactacctgtgcaaagaactgaaaactaagtaggttgcccagctctatgcctagacataattctgagtgattggtagcaca

SEQ ID NO: 918676 - DNA, 719 bp, Homo sapiens
ttcctgtgcatagatcattgtgcagtggggtccactccgctccatgcccaggcaaatcttcaggcattcaaaggactggcttgccctacaattcctgtgcagagatcctggatccagggtggggtgagggtccctctcttcttcatgcccttgcagatctccagacattcagagtacctgctcacctggataagcagccccacccttccagtgcacagatcattgtgcagtttggtccaatctkcttcatgcccaggcagatctttgggtattcaaaggaccagcttgccccacaattcctgtgcagagatcctggcgccagggttgggagaggggccttctcttcttcacgcccttgcagatctccaggcattcagagcacctgctcacaagattcacagcctgagctgcgctacctttcctgcatagaaactgcggtgcaccagggccttttctactccatgcccaggcagatctctagtgattcagagcacccacctgcctgaatgagtagcctgtgccacctattttttctgtgcagagattttgatgcactgtggccctctgcactccaccctcaggcagatctccaggcatctagagtgcctaccctcctggaatagcagtttaggccacccaactacctgtgcaaagaactgaaaactaagtaggttgcccagctctatgcctagacataattctgagtgattggtagcaca

SEQ ID NO: 918677 - DNA, 614 bp, Homo sapiens
agatacatgggtatagtagaaagaataatgatccctcaaaaatgatcatgtcctaatctcaggaacctgtgaatatgttcctttgcaaaatggactttgtagaaattattaagttaaggatattgagatggaggaaatcatcttgaatgatctggatggatccaaggtaatcacaaggatcctcaaaaggaaaagagggtggcaggagagtcgatgcagatgggatgcagaaagtcagatrttgcatattctcactcacatgtgggagctacaaatgttgatctcacggacacagagagtagaattatggttaccagaggctgggaagggtggaggaggtgggcaggaataaagagcagttggtgaatagatccaaaatccagtcacacagatggaataagatttagtgctcagtggtacaataaggtatgactatggctaaaaagaatttattgtatatttcaaaataactagaagagtggaattggaatgtttgttacacaaagaaatgatacatgcttgaggtaatggatacccaattaccctaatttgatcactgcacattgtatgcttgtatcaatatttcacatgaaccccataaatacgtagtatta

SEQ ID NO: 918678 - DNA, 614 bp, Homo sapiens
agatacatgggtatagtagaaagaataatgatccctcaaaaatgatcatgtcctaatctcaggaacctgtgaatatgttcctttgcaaaatggactttgtagaaattattaagttaaggatattgagatggaggaaatcatcttgaatgatctggatggatccaaggtaatcacaaggatcctcaaaaggaaaagagggtggcaggagagtcgatgcagatgggatgcagaaagtcagatgttgcatattctcactcacatgtgggagctacaaatgttgatctcacggacacagagagtagaatkatggttaccagaggctgggaagggtggaggaggtgggcaggaataaagagcagttggtgaatagatccaaaatccagtcacacagatggaataagatttagtgctcagtggtacaataaggtatgactatggctaaaaagaatttattgtatatttcaaaataactagaagagtggaattggaatgtttgttacacaaagaaatgatacatgcttgaggtaatggatacccaattaccctaatttgatcactgcacattgtatgcttgtatcaatatttcacatgaaccccataaatacgtagtatta

SEQ ID NO: 918679 - DNA, 614 bp, Homo sapiens
agatacatgggtatagtagaaagaataatgatccctcaaaaatgatcatgtcctaatctcaggaacctgtgaatatgttcctttgcaaaatggactttgtagaaattattaagttaaggatattgagatggaggaaatcatcttgaatgatctggatggatccaaggtaatcacaaggatcctcaaaaggaaaagagggtggcaggagagtcgatgcagatgggatgcagaaagtcagatgttgcatattctcactcacatgtgggagctacaaatgttgatctcacggacacagagagtagaattatggttaccagaggctgggaagggtggaggaggtgggcaggaataaagagcagttggtgaatagatccaaaatccagtcacacagatggaataagatytagtgctcagtggtacaataaggtatgactatggctaaaaagaatttattgtatatttcaaaataactagaagagtggaattggaatgtttgttacacaaagaaatgatacatgcttgaggtaatggatacccaattaccctaatttgatcactgcacattgtatgcttgtatcaatatttcacatgaaccccataaatacgtagtatta

SEQ ID NO: 918680 - DNA, 584 bp, Homo sapiens
aagacgtgagaagcctaggttctgtgcagcttatcaacaaccgctgcgtggacatgcagagaagcaggcacggtagccaccaggaccatggtgtagccgcaggtggtctggagagagtgaggcaggggtggcagtgactgaagaccattcagtgtctttcatagaaagaatggcagaggagaccccagttcctccctgagtcccctctccttgggaaaaagtgttcctactctctgggtgagcgtctggtccgaatcgttggcttggagatgattttacgggctctttctggagaacaraagtaaaacgttacagtgttccgatgagacacagtaggcagtacttgggagggtcttatagaccccaccctgtggaagtgggtctcaacattacacaaccccctctcgggcccgtggacagttgctgtcctctctgttttctctctttgtgcctgtgcccccctcagagaagaagaaaggagctgaggaggagaagccaaagaggaggaggcaggagaagcaggcagcctgccccttctacaaccacgagcagatgggccttctccgggatgaggccctggcaga

SEQ ID NO: 918681 - DNA, 728 bp, Homo sapiens
tctgccccacaagcgcccccgctcatcccaaggtccaccatgagtttgggtttttttttttttttttggaggaagggttatctttatatttttatttttaaaaatagagatagggtctcacagtgttgcccaggctggtcttgaactcccaggctcaagcgatcctcccacttcaggctcccaaagtgctgggattacaggtgtgagccaaggcacccagcccagcgtggatttgtgccaggaagagccagcaggagctgaccagccccatggaagcctccaggccggctgcctgctctcatctcccaagagcccgcctttgcttctgccagccactcacgctctccacaggctgcagccaggtacacaccccccttcaagcaacaaaaccactgcctgagcacctggcctgctctaagcccagggctgagacaagggggagccagccacacacaacaccaggagcgctgrcatcgccggagcaaggagcccgtgatggccgtccacccgggacagcaatcgcgctctgcggcacgaggctttcaacagaggcgagtgcttcctgggggtcaagagcatggaacacacacttcaggccccctctccaggctgcaggccaacaggcgtccatgagacagacactccctgatgtgtcccactcagttctcctgccgctgagtgactctcccagggaggcccagagccacatgctcttggtagcccctact

SEQ ID NO: 918682 - DNA, 745 bp, Homo sapiens
tcctcggtgggggcccttcccatctcttggcatctcctcggggctcagcagtggaggccatggtgggagggcctgagactgattttatgttctgccaaacaaggaaggaaagcgtactccaatcgcctgatggcaccggagctgctctccacacctgcacaccaagaatcccagctcggcatggamaggagccggcagtggccagcttcaaggctaagaaggaagctcttggctcagagcttacaaagtttacaacaagttacagggaaactcaagaaaagcgttcataagaggatgctcccaagtccactgatgatgccctgggcttggcagtgccgggcatgagagaggaggcctcgaggaccccacctcagtctccccagatagcagctcctggcagccctgaccctgctctaggctccgctgtggggtgtgggctgctctcctggggttaggctcacacaaaccccttcaaaataagcaaggaaacagaagttcagggcaccaaaatacttagggaccaaccccagcaagggcccttctcccatctccctattctcttcctgaagcaacaataaacaacattcaagtagtattcatttctgtgttttctccaaatgtttgaggaaatctacattctactaccaccttttgggggccaagaaagatgttcgcttgcaaaggacagaactgacccaagcaccctcttctcaaacgtatatggcactccagatgccgttttctg

SEQ ID NO: 918683 - DNA, 745 bp, Homo sapiens
tcctcggtgggggcccttcccatctcttggcatctcctcggggctcagcagtggaggccatggtgggagggcctgagactgattttatgttctgccaaacaaggaaggaaagcgtactccaatcgcctgatggcaccggagctgctctccacacctgcacaccaagaatcccagctcggcatggaaaggagccggcagtggccagcttcaaggctaagaaggaagctcttggctcagagcttacaaagtttacaacaagttacagggaaactcaagaaaagcgttcataagaggatgctcccaagtccactgatgatgccctgggcttggcagtgccgggcatgagagaggaggcctcgaggaccccacctcagtctccccagatagcagctcctggcagccctgaccctgctctaggctccgctgtggggtgtgggctgctctcctggggttaggctcacacaaacccmttcaaaataagcaaggaaacagaagttcagggcaccaaaatacttagggaccaaccccagcaagggcccttctcccatctccctattctcttcctgaagcaacaataaacaacattcaagtagtattcatttctgtgttttctccaaatgtttgaggaaatctacattctactaccaccttttgggggccaagaaagatgttcgcttgcaaaggacagaactgacccaagcaccctcttctcaaacgtatatggcactccagatgccgttttctg

SEQ ID NO: 918684 - DNA, 745 bp, Homo sapiens
tcctcggtgggggcccttcccatctcttggcatctcctcggggctcagcagtggaggccatggtgggagggcctgagactgattttatgttctgccaaacaaggaaggaaagcgtactccaatcgcctgatggcaccggagctgctctccacacctgcacaccaagaatcccagctcggcatggaaaggagccggcagtggccagcttcaaggctaagaaggaagctcttggctcagagcttacaaagtttacaacaagttacagggaaactcaagaaaagcgttcataagaggatgctcccaagtccactgatgatgccctgggcttggcagtgccgggcatgagagaggaggcctcgaggaccccacctcagtctccccagatagcagctcctggcagccctgaccctgctctaggctccgctgtggggtgtgggctgctctcctggggttaggctcacacaaaccccttcaaaataagcaaggaaacagaagttcagggcmccaaaatacttagggaccaaccccagcaagggcccttctcccatctccctattctcttcctgaagcaacaataaacaacattcaagtagtattcatttctgtgttttctccaaatgtttgaggaaatctacattctactaccaccttttgggggccaagaaagatgttcgcttgcaaaggacagaactgacccaagcaccctcttctcaaacgtatatggcactccagatgccgttttctg

SEQ ID NO: 918685 - DNA, 787 bp, Homo sapiens
gttcaattccttggatttttagatcccacaaataagtgatagcatgtaatgtttatatttatgtacctggcatatttcatgtaacataatatcgtccagttacatccatgttgtgtaaatgacaggatctcattctatttaatggctgaatagtgcctctattgtgtaaatgtaccccattttcttgattcattcatctgttgatggacacttaggttgctttcaaatcttggctattgtgtacagtactgcaacaaatgtkggagtgtagatatctcttcaatgtactaatttcctttcttttgggtatatatccagcaggaggattgctggatcctatggtagcttaacattatttgcataagcaaacaaaagaataagaaaaaaactaatgaaattctaaactttgactctgtcctcctgctttttaagattttgttgtttttttatcttattgtgctgtctatgtcttgaaaagttgctgtacttattattttgattggtttatcatttagtctttgctcttaccataagaatagtttacacaccacagttacagtgttataatattctgtgattttctgtgtagttactgttaccagtgaattgtgtatcatgaggttattacgtatttctcattaacgttcttttctctcagattgaagtatgccctttagcactttagcccaaggtggtgaagaggtttgcaggaactcaatttctgactgctgggtttggcaattttcctctggctagccgtggtttaaatgttccctctgtgtgtggg

SEQ ID NO: 918686 - DNA, 595 bp, Homo sapiens
gaagtcgccctcgatgggcaggaagcgggacccaggcacgcccgcgcggtcgcgtccagatctgccgtcctccgacaggcgcaggcctgctgcgccttcgccacacaccgccactctgggcctggactccgtagttacgccgggatatctctgggcatmcaaccacctccccttccccacagtcttttcatctccacccgaccccttgctaggagcagcttctagttgcagctcaagacccgcgagttcaccctccgcgccaagcacccaactcccggctctgcctacagtcacccacagacctaatgatcgactaagcgccgtaatggcccgagatgacaccaggagactcccttgctgtgcgcctccggaagacgcggaacgtagcccctttctcacactcctgggacacaaaaatacccgacaactcaaagtcgccaaaccacatcttttcatgctttgaagacttctgcccaaggctgtggcaggagtatgtccaactgtgatttgggattctttttaaacatcgaatcaaagggaagaggggagggattcgcaactaaatggtagttgttttcaagcaagtctttacgta

SEQ ID NO: 918687 - DNA, 659 bp, Homo sapiens
attcttttaaaaactgccaaggtcgggcatggtagctcacacctgtattcccagcactttgggaggccaaggcaggctgatggcttgaggccaggagtttgagaccagcctgggcaacatggtgaaactccatctctacaaaatacaaaaattagccgggagtggtggcatgtgcctgtagtctcagctactcagaaggctgagggtgaggaattrcttgagtccagcaggtcaaggctgcagtgagccacattcatgccattctgtgcctgggcggcagagtgagaccctgtctcaaaacaaaacaaaactaaactaaaaactgcaaggctgttttccaaacgggctattccattttacattcctattaatatccatgatataggctgggcacggtggctcacgcctgtaatcccagcactttgggaggctgaggtgggcggatcacctgaggtcaggagttcgagactagcctggccatcatggcgaaaccccgtctctactaaaaaaatttaaaactaggccgggcgcagtggctaacacctgtaatctcagcactttggaaggccaaggcgagcagatcacaaggtcaaaagatcaagaccatttggccaacatggtgaaaccccatctctactaaaaatacaaaaattagctgt

SEQ ID NO: 918688 - DNA, 659 bp, Homo sapiens
attcttttaaaaactgccaaggtcgggcatggtagctcacacctgtattcccagcactttgggaggccaaggcaggctgatggcttgaggccaggagtttgagaccagcctgggcaacatggtgaaactccatctctacaaaatacaaaaattagccgggagtggtggcatgtgcctgtagtctcagctactcagaaggctgagggtgaggaattacttgagtccagcaggtcaaggctgcagtgagccacattcatgccattctgtgcctgggcggcagagtgagaccctgtctcaaaacaaaacaaaactaaactaaaaactgcaaggctgttttccaaacgggctatwccattttacattcctattaatatccatgatataggctgggcacggtggctcacgcctgtaatcccagcactttgggaggctgaggtgggcggatcacctgaggtcaggagttcgagactagcctggccatcatggcgaaaccccgtctctactaaaaaaatttaaaactaggccgggcgcagtggctaacacctgtaatctcagcactttggaaggccaaggcgagcagatcacaaggtcaaaagatcaagaccatttggccaacatggtgaaaccccatctctactaaaaatacaaaaattagctgt

SEQ ID NO: 918689 - DNA, 696 bp, Homo sapiens
tgcccgcacccactgacctgcgcccactgtctggcactccctagtgagatcaacccggtacctcagatggaaatgcagaaatcacccatcttctgtgttgctcacgctgggagctgtataccggggctgttcctgttcggccatcttctttttttccagtttttttttttttttttttttttttttgagacggagtctcgctctgtcgcccaggctggagtgcagtggcgggatctcggctcactgcaagctccgcctcccgggttcacgccattctcctgcctcagcctcccaagtagctgggactacaggcgcccgccactatgcccggctaattttttgtatttttagtagagayggggtttcaccgttttagccgggatggtctcgatctcctgacctcgtgatccgcctgcctcggcctcccaaagtgctgggattacaggtgtgagccaccgcgcccggcctttttccagttttatgtagtgaattacatttattttcaaatgttaaaccagccttgcattcctgggataaacccacttggtcatgttatactattcttttttggatattattatattccatttactaatattttgttttatgtttacatctgtattcataagagattttggctacaattttttttttgtaatcttgtcggattttgatatcaaggttacattggccttt

SEQ ID NO: 918690 - DNA, 625 bp, Homo sapiens
gatatatttttttccatccatttgcttttaatctgtgtgtgtttgtatatttaaagtggatctcttgtagacagcatatagttaggtcttggtttttaatccactctgacaatcttttaattggtacatttagaccattcacgttcagagtgattactgatagcattggattaatgtctaccatatttgccactattttctgttgtcattgttctttgttcctatttttttttttgtcttccactgtttttctgccttttgcagttttaattcaaaatatcatatgactgtcctttcttagcatgtcagttttacttctttttttttttactttttttgtttttggtcttttctaaagagacaaggtgtcgcttagttgcttaggctggaatgcagtggcatgtcatagctcactgtaacctcaaacttctgggctcacgtgatcctcctgcctcagyctcctgagtagctaggactacaagtgtgtgccaccaaccctcaagtaatgttttttattttttgtagagagaaggtcttaccatgttgcccaggctgtcaaactcctggcctcaagcaatcctcctgccttggcttcccaaagtattgggattataggcatgagcca

SEQ ID NO: 918691 - DNA, 516 bp, Homo sapiens
ccagtgatggtgtcattgtcaaggggccattgaaatgtccttaagcagtcattggccaaatcatgtcctctatggatccagagccacagaatattccagcagaaatatgtcttagccagcagctctttattgaggactgattgtgggctaggctctgtgctagggtctttacagatgttactaaatcttctcaataaccctatgagacaggcattattatccccatcttaccgatgagaaaactgaggcttagagaggttaagcagcttatccaagaccacagttaataagtgacaaagccagcatcggaacccatgctagtsctctctaaagccttcttagaaatcatgtgatagatgagaagatcaaggtctggagaagaaaagtaagttgtctgagatgacacaaccagctctaattggtggcaaagctgcgcctataactcacctgcgcttttcacaccctgcagtacgtgaccactgccgaaatgaagaggcagcggtgtgccccctccca

SEQ ID NO: 918692 - DNA, 562 bp, Homo sapiens
agtaacaaaagcacatcttggcatgaacaaattcccatatattcaaattagggacagtgctttaccacagggtgttttaattaatatttataaatcacagagtgcctttgaaagggccagtaagctgtttatattgttatcatgtcacacaaataacaaaccctttggagattgctgcctactttgcattttggtctgagaagtaagtgagcatgttgcgtgtgtttctctccctcgtaggtgtggtgtcagcacagcggcaggtcaccgttaaggaaggacccttgtaccgcayggagggctcccacatcactatctggtgcaatgtgagtggctcccagggacctcctgagcagaatttccagtggtccatttacctgccttcgtcgccagagcgagaggtgcagatcgtcagcaccatggacccttccttcccctatgccatctacacccagcgcgtccgcggagggaagatcttcatagaaagagtccaggggaacccaaccctattgaacatcacagatcttcaggcccgggatgccggagaatatgaatgccacac

SEQ ID NO: 918693 - DNA, 588 bp, Homo sapiens
tgtcctgaggcagccctgtggagaaaaccccactggaaaaaactgaagcctgcaatggctacatgagtaaacttggaagcagatcttctccaccccaccctacctcatgggaaatcttaagtcaaggcatacagctaagccatgcccagattcctgacccacagaagtcataagacaataaatatttgttgttttaagctgctatgtttagggatgacttgttaagcaaaatgagaaaaataatacaacaggtgattacaatgttcagcagagttcaggaaccactgagccagaccagtacatggtcttagagaagtctagtctcttcttgagcccacagggaaatctgtagcataaactgygccatagagttgtacagccagaagcaattctcacatcagtccgtcattgacagatgctgtctggaggaaaagtagaggggtgcacaacctccctagtattcccaggtaggtgcttgtcagcaggacaagggttttagaaacctgcagatattagcagccaacaagaagcactgggagatgtgttcattgacctggtaaatggattctggcagaagcaccaaaagca

SEQ ID NO: 918694 - DNA, 413 bp, Homo sapiens
ccacagcttggtgggtgggttccgtcctcctcctcggacagggcaggaccagcagccaatcactccttcctgccagagaaggaagtggcgctcaaactgtttttctgacatcagtaatatctgcctacactcctccagcaggcatctctgaaacatcagttttgggtgattggtctaagccaagcacctttgatagcaagggtaagcccgctatcctttgctggagatgggcatggagagggcatgtgaagagtgccagaccaggcgttgacaarctatggctcatgagaagaatggagtgtacatttttaaagggtcatctctctctctctctctctctctcacacacacacacacacacacacacacacacacacacacagaatatgctgcagagatcatatgtgacctga

SEQ ID NO: 918695 - DNA, 742 bp, Homo sapiens
tcatacctttttagtctcccttaatctggaacagttcctctgcctctttttgtctatcatggggttgacaccgaagaacagttcaggtcagtccttgaaggtccctccatctgtgtttgtctgatgtttcctccagggaccggaatgctacagaagcaatgctgtgttctcagtgtatcacatcaagagacacttggcacccatttgtcctattcctggtgttgttaactttgttcagctcattaagggaggacctgctgggtttctctactgttaagttaccactttttctctttgcaattaataaaccatatgagtggaagtgctatgagacaatgaaaacatactttaccttcttaaattttcactcagtgatgattcttccttgaataaactattatgatcatgtttgcaaatggagttttctattattccctctgtatttattcattggcattctacygtaagaaagtcttcttccttcttccctccctccgtccctccctccctctcttcttctttcttttcttccttcccttttctttctttctatagttataggttctcattttattcaatagactataatctaccattatcattattaatttggatgctcacatcatcccagatttggccagtggaagccccttgaagttgattgatgtgtcctttgacatgtccctgtcattttttaaatgcttccttgctttctggcaccacacagcactctgggctcacc

SEQ ID NO: 918696 - DNA, 702 bp, Homo sapiens
taggaaatatacacaagaatttagaagtaaagggacattgtgtctgcaacttactcttacagggtgtgtgtgtgtgtgtgtgtgtgtgtgtgtgagagagagagagagacagagagagagagagacagagagaaagagaatgataaagcaaatacaggaatcaggatgaagcgtatctgtttgtttgttttgctttgtgatagggtcttgctctgttgcccaggcaggagtgcaatggtgtgatcccgctcactgcaacctctgcctcccaggttcaagcgattctcatgcttgtattgttcttgcacctgttctgcaagtacaacattgtgggaatggaaaatgcaggaaatgggcagtaaggctatgaacgaagcccgcacaggagtgtgggtagcagagttctctagtccaggctcccacctgaggtgctgggacstagaagaaaagcctctctgcagacagaactggagttaacgctgtccacgataaatggcccaggccctgttaagtttgccccattgagcaaaacaagtacccacccgcctttgcagccttgcctagctcacataaggtgccagcccttgctgtacagcagaacctttggggagctggacaaaagcctatcaaggagcatacccccaggaagcccagtccaggtggggagcccagccacacaatggcccttgcccccacacctcc

SEQ ID NO: 918697 - DNA, 641 bp, Homo sapiens
ctccttggtttctaatgagaaatcatctgttaaacttattgcaaatccttggtatgtatgctatgtgtcatttctctcttgctgcttccaagattctctctctgtctttgtcttttgacaatttgactataatgtgtttcagtgtgaatttcttagagtttatcccacttggatttcattgagcttcttggatgtgtacgtttgtctttcaccaaatctgggaaattatttcaccatttctcaaatatctttttcttcccctttccatctctcttcttctggagctcccgtatacttagttggyatgactgatggtatcctactggtccctcaggttctgttcatttttcttctttctttttttctgctctgcagactggataacttcaatcgccttttcttcaagttcaatgattatttcttctgcctgctcaaattggccatttaacccctccagtgactttttcatttcagtattgtacttttcagatccagaatttctatttggttcctctttaataaattctttttattgtcattccccatctgttcatacattgctctcccaatttcctgtagttctttgtccatggttttctttagttaattaagcatatttaagacagttgacttaatgtctt

SEQ ID NO: 918698 - DNA, 550 bp, Homo sapiens
ttaaggaagggatccagtttcagctttctacctatggctagccagttttcccagcaccatttattaaatagggaatcctttccccatttcttgtttttgtcaggtttgtcaaagatcagagggtggtagatatgcagcattayttctgagggctctgttctgttccattggtctatatctctgttttggtaccagtaccatgctgttttgtttactgtagccttgtagtatagtttgaagtcaggtagcatctcactgatatttctttaaaaataaatgagtactgcactcatttatttttaagttacaacattcacaagaaatataacaatgaaactgtcattagtgttgtgactatacttaataaaaagctaggcaaaaaaagttttgaaaagacttctgacactaaaaaagttgcaagtacaaaatttcagaataaagaacagtactttttttaaaatttcaaataagtaatcaaaggcacataaattaaaatgtaatatctttgtctaatactgaattagtaaataccaaatttgacatttaaaag

SEQ ID NO: 918699 - DNA, 524 bp, Homo sapiens
gttttgctcttgttgcccaggcgggagtgcagtggcaccatctcagttcactgaaacctccccctcccgggttcaagctattctcccacctcagcctcttgattagctgggattataggcacctgccatgacacccagctaaattttgtatttttagtagagaaggggtttcaccatgttggccaggctggtctcgaactcctgatctcaggtgatccagccgcctcagcctcccaaagtgctgggattacaagkgtgatccaccgcgctcggccttagagttggtattttataaagaatagaagtttacatagctcacaattttagattatggaagtccaagagcacgccattgacatctgatgagaatcagatttccacatcacaaaatggccaaaggcatgaggatgacagaaggtgaacataagagagcttacttttataatagacccaatttcctgccagctaacccactctggaaacaatgacattaattcattcatgagagtagattccctcaaaac

SEQ ID NO: 918700 - DNA, 524 bp, Homo sapiens
gttttgctcttgttgcccaggcgggagtgcagtggcaccatctcagttcactgaaacctccccctcccgggttcaagctattctcccacctcagcctcttgattagctgggattataggcacctgccatgacacccagctaaattttgtatttttagtagagaaggggtttcaccatgttggccaggctggtctcgaactcctgatctcaggtgatccagccgcctcagcctcccaaagtgctgggattacaagggtgatccaccgygctcggccttagagttggtattttataaagaatagaagtttacatagctcacaattttagattatggaagtccaagagcacgccattgacatctgatgagaatcagatttccacatcacaaaatggccaaaggcatgaggatgacagaaggtgaacataagagagcttacttttataatagacccaatttcctgccagctaacccactctggaaacaatgacattaattcattcatgagagtagattccctcaaaac

SEQ ID NO: 918701 - DNA, 513 bp, Homo sapiens
gacagtttctagaccacggctcctgattggataaggtttcaggccccacccttcatgccctgagtgagggaatatttgatcagacactgggctgagcgaagcaaaaataacagcctaggctgcagccttcacaggcagggcttcttccttgatctgagccaggccaacttcagaggatatttgcatttaaccttgtgtataatgtsatatgcatttataaatgatatataatatttattcataaattgaaataatgacaattattttaaaatttaggattttatgcccttccttgctgcggatcctttgcagtgatatggtgtgactttctggctccacccaaatctaatctcaaattgtaattcccgtccatgtgcggtggctcacacctataatcccagcactttgggaggccgaggcgggcaggtcactagttcaggagttcgagacaggcctggcaaatacggtgaaaccccgtcaatactaaaaatacaaaaattagccaggcgtggc

SEQ ID NO: 918702 - DNA, 545 bp, Homo sapiens
aagcagggtctcaaatccatgactgttctcccagcctaactgttctaggccctgtggaaaattctaactttccaattcctttcccacattcccaaatgccaaccgttcttctccaaatcacaacattatcaactattagtcttttatttagttttaaaacagacacagcattttaattgtttatttttgtttcacggcgtggtggatggctcttctaaaaatatgtgtctgtttgtgaacatttcacatgacagggaagcaaagggtaatcacctgacactctgctgtgacaagtcttcgygcgtctaattttccctaggcacacacaccttaccagaatatctctgggtgaaggtttctttttggaacctttgcagggtgatgtgtcctcagccactgtcctgttttttcctggttctgaatactacaaccgtctggggatgacccaagatacccacaagagccatgtctcttggagtgtctagtaaatatcagtccttctgtcagcttccagaggagagtctgagatattgggtggagcctct

SEQ ID NO: 918703 - DNA, 708 bp, Homo sapiens
tgagacaaggcaagtcccttccacctataagcctgtaaaatcaaaaacaagttagttactttctagttacaatggaggtacaggcattgggtaaatacacccattccaagtgggagagaaattggccaaaacaaaggggctataggccctatgcaactctgaaatccaatagggcagtcattaaaccttaaaattccaaagttatctcctttgactccatgtctcacatctaggtcacaytgatgcaagagttgggctcccacaaccttcaggagctccgcccctgtgactttgcagggtatagcccttctgttggctgctttcataggctggcattgagtgactgtggctgttgcaggtgcccaaagcaagctgtcagtggatccaccattctctggtctagaggacagtggtcctcttctcacaactccactaggcagtgccccagtggggactctgtgtgggggctctgaccctacattttccttccacactgatctggcagtggttcttcatgactgctccacccctgcagcaaacttctgcctagacatccaggcatttccacacatcctctgaaatctaggcagaggttctcaaacctcagttcttgccttctgtgcaccaacattacctggaagccaccaaggattgggatttgcactgtctgaagctatggcctaaggtgtactttggccctttttagcc

SEQ ID NO: 918704 - DNA, 618 bp, Homo sapiens
ggttaaccagattaggaaggtacttgggaaattggggacagagtctttaatggataaatgagagtgggtatttagaaaggcagtagaacatgctgcctagtgtcaaatactgacattaccccttattaactatttggcactagcaagttatttcattttgtttccaaactgtaacaataatgatacagattgaatatccctaatccaaaaatctgaaatctcaaatactccgaagtttgaaactttgaatgctgacatsatactcaaaggaaatgctcattgaaccaatttttggattttggattttcagattagggatgctgaactgatgagcaatgcaaatattctaaaatttgaaaaagccccaaatccaaaacgcttctggtcccaagcattttggataagtgatacacaacctgtagtatcagtctcatgggattataaaggttaattaagtcaatgcttgtaaaatactggcacacagaataatttacaacttactggctgtcattgtcattattttccatgcatagtggtatcagtgctagatgatttgggggttcaaaatttgaaaaatgccccccaggggacatttgtcaatgtctggaagcatttttg

SEQ ID NO: 918705 - DNA, 618 bp, Homo sapiens
ggttaaccagattaggaaggtacttgggaaattggggacagagtctttaatggataaatgagagtgggtatttagaaaggcagtagaacatgctgcctagtgtcaaatactgacattaccccttattaactatttggcactagcaagttatttcattttgtttccaaactgtaacaataatgatacagattgaatatccctaatccaaaaatctgaaatctcaaatactccgaagtttgaaactttgaatgctgacatcatrctcaaaggaaatgctcattgaaccaatttttggattttggattttcagattagggatgctgaactgatgagcaatgcaaatattctaaaatttgaaaaagccccaaatccaaaacgcttctggtcccaagcattttggataagtgatacacaacctgtagtatcagtctcatgggattataaaggttaattaagtcaatgcttgtaaaatactggcacacagaataatttacaacttactggctgtcattgtcattattttccatgcatagtggtatcagtgctagatgatttgggggttcaaaatttgaaaaatgccccccaggggacatttgtcaatgtctggaagcatttttg

SEQ ID NO: 918706 - DNA, 611 bp, Homo sapiens
gtttaccaaattatttcagagaacatgtataggaaatcagaaatgaataaaatataggaagataattctatgtgtttcacatcacatttaaagaatcttttttgtgtgaaaaataaggaaaggcaactcattctgaccaatttagtatttcccattgttgtgacttataatcacagaaaaataatcagtgttagaaaggtaaagtccatattactaaagagtcacttaaaaatatattctttaaagacaacagctctcctaggaatacaaacaaagtattagtggcccacyacctggggccaggatgaagtattttcccttaggggtagagaatttcatatccatccaattgcattatgggtggttttgccctgctttggaagcatctggtggagactgcttcccaaacaggatattgaacaagagttctgttctggtatgacaataaccacaggcagatcctgcaaatattcatttagtgatagggcctgcttaactcaatacagccttgttgtcacttgtcaggtaaatcaaaggcacatagtgtgtattaaatgcctgatattatctaagtgtatcagccatgctcgagtaatcccaagggtttaatt

SEQ ID NO: 918707 - DNA, 611 bp, Homo sapiens
gtttaccaaattatttcagagaacatgtataggaaatcagaaatgaataaaatataggaagataattctatgtgtttcacatcacatttaaagaatcttttttgtgtgaaaaataaggaaaggcaactcattctgaccaatttagtatttcccattgttgtgacttataatcacagaaaaataatcagtgttagaaaggtaaagtccatattactaaagagtcacttaaaaatatattctttaaagacaacagctctcctaggaatacaaacaaagtattagtggcccaccacctggggccaggatgaagtattttcccttaggggtagagaatttcatatccatccaattgcattatgggtggttttgcccygctttggaagcatctggtggagactgcttcccaaacaggatattgaacaagagttctgttctggtatgacaataaccacaggcagatcctgcaaatattcatttagtgatagggcctgcttaactcaatacagccttgttgtcacttgtcaggtaaatcaaaggcacatagtgtgtattaaatgcctgatattatctaagtgtatcagccatgctcgagtaatcccaagggtttaatt

SEQ ID NO: 918708 - DNA, 561 bp, Homo sapiens
acatttgggttgtttccacattttagctactattaatcatgttctgtgaacatgagtgtacaagtttttgtgtagacatgttttcagtgctcttgggtgtatacctagcactggcattgctgggccatatggcaactcmatggttaactttttgaggaactgccaagctgttttccaaagtgactgcatcatttgcattctcaccaacgataaatgaggattcagatttccccacatccttgtcaacactttttattgtctatctttttgatgatagatgatttaatggatgtgaagtggtttcttgtggttttggtttgcattaccctaataactaatatggttgagaatcttttcatgtgattactaaccaacctttctttgtctctccttcacccctactattcccagcctctggtaaccatgaatccactctctacctccatgagatccacatttagctcccacatatgaatgacagcatgtggtatttgtctttctgtgctcagcttatttcactcaacataatgacctccagatccatccaagttgctgtaaatg

SEQ ID NO: 918709 - DNA, 775 bp, Homo sapiens
ttgtatcctgcaccctcgctatagttgctactagttcctgtaatattcctttattcttagtttaatgttaatggtgtatcagtcatgatagcccctttttcatttctgatattggtaatttgtgtcttcaatcttttcttcttagatagcctggctagaagtttrtcatttctattgaaatttttaaagaaccaggtttttgtcaattttcatcagttttatgtttcagttttattggtttctgccctaatttttattgcttttttttcttctgattactttggatttaatatgctcttctttcttctagttttcttttgtggcagcttagattattgattttagatcttccttctttggtaatttatggattcaatgttataaatttccttttgaaaattacgtttgctgcatccacaaattttaatgagttgtattttcatttttatttagttaaacatattatttaattccccttgacatgactattttgactcatgctttatccagaaatgtactgtttaatctccaggtattttggcatttctcagccatctttcttttttacatttctcatttagctccattatggcattattagagcacactttgtatcatttctacttgtttaaatctgttaaggtatatcttatggcccagaacgtggtcagtcttagtgaatattctgtatgactttgagaagaatgtatattctgcttttgttgaagttttatatgaatgccaatttggtctatttgattgatggtgctattca

SEQ ID NO: 918710 - DNA, 620 bp, Homo sapiens
gacaatagaactgggatggtgccactgtgtggtggacctgaccaatgcattcctctcaatcaacattgctccagagagccaggaacagtctgccttcatgggagggtgacaatggactttcatagtgtcactgcaggactatatgcatagcctcatcatatgtcatgatcttgttgatgacgttatgcgaacctctggttctcttgcagatttagaagtggcaatgcccaccttgcctggggttgcatggtgaggcttacacagccaagcaggctcttcagtaggcacaagacctatgggtagttgactaggggtgcccatttaaactgaatgygcatgtgaccacaaatagtgttggctagggcctatagcagtgcatggagaccttggaagtgccaacaggcttttagtcctagctgtggaagggagctgagctccagtgttcattaatacagaagcagttagtaatagcagatgggtgcattcatgggtagtgaccccctggactgggaaagcagttagtaactacatatgctgcccatcaggctcataagagtgtggcagaatgggttacagtcgtcatatggacgacttacctgatagcaggatgggtgcattca

SEQ ID NO: 918711 - DNA, 599 bp, Homo sapiens
aatattttttaattggattttcaaaatcatggtaaaattttgatatgttttgatggctattccaaatactgctattataacattgaattggattttaaaacttgatgtgtactgagagttagattgtcgaaaccaatacttttcaataataactcttccagaatttcaaatwttttaacatggaagtatggaaattgagtcacataagtttacttaaaagacttttcattctattttaaaaatatatttgatccaccgcatattctcactcataggtgggaattgaacaatgagatcacatggacacaggaaggggaatatcacactctggggactgtggtggggtcgggggagggggtagggatagcattgggagatatacctaatgctagatgacacattagtgggtgcagcgcaccagcatggcacatgtatacatatgtaactaacctgcacaatatgcacatgtaccctaaaacttagagtataataaaaaaaaaaaaaaaaaaaagacagcaatgcaaaaaaaaaaaaaaaaaatatatatatatatatatatatatatatatatatatatatatatatatatttgatcataa

SEQ ID NO: 918712 - DNA, 599 bp, Homo sapiens
aatattttttaattggattttcaaaatcatggtaaaattttgatatgttttgatggctattccaaatactgctattataacattgaattggattttaaaacttgatgtgtactgagagttagattgtcgaaaccaatacttttcaataataactcttccagaatttcaaatattttaacatggaagtatggaaattgagtcacataagtttacttaaaagacttttcattctattttaaaaatatatttgatccaccgcatattctcactcataggtgggaattgaacaatgagatcacatggacacaggaaggggaatatcacactctggggactgtggtggggtcgggggagggggkagggatagcattgggagatatacctaatgctagatgacacattagtgggtgcagcgcaccagcatggcacatgtatacatatgtaactaacctgcacaatatgcacatgtaccctaaaacttagagtataataaaaaaaaaaaaaaaaaaaagacagcaatgcaaaaaaaaaaaaaaaaaatatatatatatatatatatatatatatatatatatatatatatatatatttgatcataa

SEQ ID NO: 918713 - DNA, 475 bp, Homo sapiens
gaaatggaggcaacaataactttgacaaatgccattgagaggttacttaggatgagtgcagaggatagacatttggattcaagaacatgatcattggcaacctgatgagggcaatttggtagaacttaataaaattaggtatgcctatgcggtgtggccaagcaattctacytctgtgtatataacccagagaaactcttgcagagtcacatgaagatatttattaggatttttaccgtaacaaagcttatgggaacaaggacttggaagaggtctagcaacaggaaattgggtgaagtatgctttatgcatagggtagaataatatgcagcagtcagaaataatggactcaattatagacaacactttggatagatttttaaaataatattgagtgaaaataatgaaaaagttttaaaaagtaagaaacatttatagcatgttactactattgtacacatttttaaatgataaa

SEQ ID NO: 918714 - DNA, 475 bp, Homo sapiens
gaaatggaggcaacaataactttgacaaatgccattgagaggttacttaggatgagtgcagaggatagacatttggattcaagaacatgatcattggcaacctgatgagggcaatttggtagaacttaataaaattaggtatgcctatgcggtgtggccaagcaattctacctctgtgtatataacccagagaaactcttgcagagtcacatgaagatatttattaggatttttaccgtaacaaagcttatgggaacaaggacttggaagaggtctagcaacaggaaattgggtgaagtatgctttatgcayagggtagaataatatgcagcagtcagaaataatggactcaattatagacaacactttggatagatttttaaaataatattgagtgaaaataatgaaaaagttttaaaaagtaagaaacatttatagcatgttactactattgtacacatttttaaatgataaa

SEQ ID NO: 918715 - DNA, 840 bp, Homo sapiens
gtgtctccttttgtgtgcgcgggagcctggctgcggattgccgcgctgcccctagaggtcagtctgatccagggattgtctcgaatccgcgcagctctggacccgaaaggagaggctcagggagaggataatgcggttgccaagtgccaggcttggcctgggtgagaacccggggctgcgcgagcacggtggcctcggtgcgtcccccggctgtccccgccgcgctgggcggccctgccgcaagttctctctactttctcaacacgggtttgccaaagtcagaaaaggttgggatttttcttcaacgtgatatgactggggttagcttgactttgtaatggtaaaaagaaaagatgaatgtaaatggcttagtgatattttctattaaactatgatttttgcttgtgctgcattcaactgactgcaaccaggagccagacggcctgagacctgtgaggccctttccatcaagaaaccagatttcatttcacaagaaactgaggcccagggaagaaaaacaaccaaaacactgttgaagtcacttgaaaacaagtctcaactcagggttatttccactatacataatctcattatttaaaatatgatgaakgattattggttttaaaggccttgaattgacataagaaacagttaggtatttagttggcaaactggcatagctggttgaattcagaggcaggttgtgttcagatgggggaggagggaaaccaagagttacccctatttgtgaggtcctaggcagattactttacctctctgtgcctcagtttactcatctgtaagatgggataaatcgcaaggctttatttcaggaaaaaa

SEQ ID NO: 918716 - DNA, 599 bp, Homo sapiens
ttaaagaagtttaattaagcaatgaatgattcgcaaatcaggcagccttcccagccagggtaggctcagggactccagcagagccacgtggcggaagaggacttatggactaacaaagaaagtgagctacacgatatggaagtgaggtacagaaacagccagattggttacagctcggcatttgccttataggctgcggtctttttacacctccacttgttatgttaacgatgtacaggaaaacctttagggccaaccttaaagtatgtaaggaggcagctttaggctaaacttgatttaacaataccaatactctctcgtcatatctcctcattttatatccactttcaattagacaaggagtcagctattacacgtagaaccaaacaatttaggggcacacatacctactcacatacatacacacacayacacacacacacacacacacgctactatgaagagcttttctgtacttatgtttatatttttattaatttttttgagacagagtctcactctgttgctcaggctggagtacagtggcgtaatctcggctcaccacaacctccgcctcctgggttcaaacgattctcctg

SEQ ID NO: 918717 - DNA, 598 bp, Homo sapiens
atggctggagtaggagcaagagagaatgggaaggagctgcatacttaaaaatttttatttaatgtactttacattctgggatacatgtgcagaacatgcaggtttgttacataggtatacatttgccatggtggtctgctgcacccatcaacctgtcatctaggttttaaggtatttgtcccaatgctctccctccacttgcctccccamcccccgacaggcccccatgtgtgatgttcccctccctgtgtccatgtgttctcattgttcaactcccacttatgagtgagaacatgcagtgttcggttttctgttcctgtgttagtttcctgagaatgatggtttccagcttcatccatgtccctacaaaggacatgaactcatactttttatggctgcatagtattccatggtatatatgggccacactttctttatccagtctatcactgatgggcatttgggttggttccaagtctttgctattgtgaacagtgctgtaataaacatatatatgcatgtgtctttatagcagaataatttataatcctttgggtatatacccagtaatgggattgctgggtcaaatggtatttct

SEQ ID NO: 918718 - DNA, 598 bp, Homo sapiens
atggctggagtaggagcaagagagaatgggaaggagctgcatacttaaaaatttttatttaatgtactttacattctgggatacatgtgcagaacatgcaggtttgttacataggtatacatttgccatggtggtctgctgcacccatcaacctgtcatctaggttttaaggtatttgtcccaatgctctccctccacttgcctccccaacccccgacaggcccccatgtgtgatgttcccctccctgtgtccatgtgttctcattgttcaactcccacttatgagtgagaacatgcagtgttcggttttctgttcctgtgttagtttsctgagaatgatggtttccagcttcatccatgtccctacaaaggacatgaactcatactttttatggctgcatagtattccatggtatatatgggccacactttctttatccagtctatcactgatgggcatttgggttggttccaagtctttgctattgtgaacagtgctgtaataaacatatatatgcatgtgtctttatagcagaataatttataatcctttgggtatatacccagtaatgggattgctgggtcaaatggtatttct

SEQ ID NO: 918719 - DNA, 598 bp, Homo sapiens
atggctggagtaggagcaagagagaatgggaaggagctgcatacttaaaaatttttatttaatgtactttacattctgggatacatgtgcagaacatgcaggtttgttacataggtatacatttgccatggtggtctgctgcacccatcaacctgtcatctaggttttaaggtatttgtcccaatgctctccctccacttgcctccccaacccccgacaggcccccatgtgtgatgttcccctccctgtgtccatgtgttctcattgttcaactcccacttatgagtgagaacatgcagtgttcggttttctgttcctgtgttagtttcctgagaatgatggtttccagcttcatccatgtccctacaaaggacatgaactcatactttttatggctgcatagtattccatggtatatrtgggccacactttctttatccagtctatcactgatgggcatttgggttggttccaagtctttgctattgtgaacagtgctgtaataaacatatatatgcatgtgtctttatagcagaataatttataatcctttgggtatatacccagtaatgggattgctgggtcaaatggtatttct

SEQ ID NO: 918720 - DNA, 499 bp, Homo sapiens
tagtgtcatgtctgagaactttttgcctaacctcaggtcaggaagatatttttcctgtgttttcttctacaagttttatggattcattttctacatttaggtctattatgccttctatgttaatttttctgtaagctgtgagattgacgtcaaggttaattttttgcatatagatgtccagttgttccaacaccattagtgttgttgtctttccttatcaactccaggacacacaatttgggaaacrggttttccagctctgagctggagtcaacccctgttcacattagttgaaaagactatcctttctccattgaattgctttggtacctttatcaaaaatcacttggccatgtttgtgtgactatttcaagactttctttctaccctgttctactgatggatgtgtgtctctctccaccagtaccacaatgtgttgattgctgtagctttatagcaactcctaaaacatccaattttattctttgtcttcaagatt

SEQ ID NO: 918721 - DNA, 571 bp, Homo sapiens
tactcaacttgatctccctgagaattcagaggtaatgataatttggtgggcagggggctagggtaggggtgctgctaactggttggggatgcaatcataggggtgtgaaaaatggtccttgtctgccgagttcacttctgggtggggccagagggagtttggcgggtccargtggagccgttggttgtcagaaatgcacaaacctgaaaccttatctcaaaaggccaatcttagtttctgtaataatagtgatgttatctgtaggagttattggggggttgcaaatcttgtgacctctggaataatggctggtaatcgtttagtctacatctcagcagaattcaggctcttctcatcctcctcgcctggtggtctctcattagctttacgaaggcggttgagttttggagaagggatattatcatttaaactataaactaaatgtctcccaaagtttgcttggcccaagcccagatatgattaaaggcagtttggatgttgaaggcaagatggggattggtgagacccaatctttcactgtcgtaatttccttactgttataattttttgc

SEQ ID NO: 918722 - DNA, 571 bp, Homo sapiens
tactcaacttgatctccctgagaattcagaggtaatgataatttggtgggcagggggctagggtaggggtgctgctaactggttggggatgcaatcataggggtgtgaaaaatggtccttgtctgccgagttcacttctgggtggggccagagggagtttggcgggtccaggtggagccgttggttgtcagaaatgcacaaacctgaaaccttatctcaaaaggccaatcttagtttctgtaataatagtgatgttatctgtaggagttattggggggttgcaaatcttgtgacctctggaataatggctggtaatcgtttagtctacatctcagcagaattcaggctcttctcatcctcctcgcctggyggtctctcattagctttacgaaggcggttgagttttggagaagggatattatcatttaaactataaactaaatgtctcccaaagtttgcttggcccaagcccagatatgattaaaggcagtttggatgttgaaggcaagatggggattggtgagacccaatctttcactgtcgtaatttccttactgttataattttttgc

SEQ ID NO: 918723 - DNA, 787 bp, Homo sapiens
cttgtagagagaggaaggcaaaggagaatcagcatgtccaggcatggttttagccttgccaaggctgatgagcgataaatcttcagctactttcttgtctcttctaatctggcccatgattaaactgattagcttaatacacttcctaaacatttcatggatgtaatgtccttcaatgataagtatgaatataactgaagcagattatacaactgcagatttatctagctagagtttcttaaccataatatgcaagtgcatgaatcatcaaatgccatttttaatgatccagctcctatatacatgggcactagaaatacagaataaaacataagatttgggccgggcacagtggctcacgtctgtgatcccagcactttgggaggccgaggccggcagttcacgaggtcaagagatcaagaccatcstggccaatatggtgaaaccccgtctctcctaaaagtacaaaaattagttgggtgtggtggcaggcacctgtagtcccagatactcaggaggctgaggcaggagaatcgcttgaatccaggaggcagaggttgcagtgagccgagatcgcgccactgcactccagcctggcgatagagtgagactgtctcaaaaacacaaaaacaaaaaacccataagatttggtttctttactcaaaagagctaaaaacatacaacaagaaataaagttgccacatataaaaccagtgagtgggtgtaaaaatgacatttcagtgtctaccttgtgttaagggctaacactcaagtgtccagcagagga

SEQ ID NO: 918724 - DNA, 626 bp, Homo sapiens
ctatctagtggcctctaagtcaaaccatacagcccaatataaagcctgctgacagaagtgcatagagctatagaagcaaatccaaaggattctatgcaacgtactctatggtcacactcccctagggagagggaaaagggaaagaaatatacaggggaagaaaaaaatcaatattcatatgaaaataattacaaaaagtaggagtattagcatcgccagatgagagtaaaacaacacaagaattctggcactatgaaatatcatgacaggatcaaacctcccctatcaatattaactttgaatgtagatggtctcaacaccccacttaaaaggcacagagtggcaagttggataaaaaataaaaaaaaaatttaaaaaaaaaacaaagatccaaccacctgctgtcttcaagagactcatctcacatgtaatgacaccaayagactcacattcaagggttggagaaagatctatcatgcaaatggaaaacaaaaaagagcaagggtagctattcttatattggacaaaacagactttaaaccaacaaaagtaaaaaaaggacaaagaatggcattacaaaaccacaatgagataccatctcacattaattagagtagctattatta

SEQ ID NO: 918725 - DNA, 561 bp, Homo sapiens
aattaaagagcttttgcatggcaaaaggaacagtcagcagagtaaacagacaacccacagagtaggagaaaatcttcacaatctatacatctgacaaaggactaatacccagaatctacaatgaactcaaacaaatcagtaagaaaaaaacaaaagatcccatcaaaaagtaggctaaggacatgaatagacgattctcaaaagaagatatacaaatggccaacaaacatacaaaaaaatgctcagcatcactaatgatcagggaaatgccaatcaaaacaactatgtgataccacctcactcctgcaagaaygtccataatcaaaaaatcaaaaaacagtagatgttagtgcggatgcagtgaacagggaacacttccacattgctggtaggaatgtaaactagtacaggcactaaggaaaacagtgtggaggttccttaaataactaaaagtagaactaccatttgacccagcaatcccactactgggtgaaaagaagtcattattcaaaaaagatacttgcatatgaatgtttatagcagcacaagttacaattgcaa

SEQ ID NO: 918726 - DNA, 561 bp, Homo sapiens
aattaaagagcttttgcatggcaaaaggaacagtcagcagagtaaacagacaacccacagagtaggagaaaatcttcacaatctatacatctgacaaaggactaatacccagaatctacaatgaactcaaacaaatcagtaagaaaaaaacaaaagatcccatcaaaaagtaggctaaggacatgaatagacgattctcaaaagaagatatacaaatggccaacaaacatacaaaaaaatgctcagcatcactaatgatcagggaaatgccaatcaaaacaactatgtgataccacctcactcctgcaagaacgtccataatcaaaaaatcaaaaaacagtagatgttagtgcggatgcagtgaacagggaacacttccacattgctggtaggaatgtaaactastacaggcactaaggaaaacagtgtggaggttccttaaataactaaaagtagaactaccatttgacccagcaatcccactactgggtgaaaagaagtcattattcaaaaaagatacttgcatatgaatgtttatagcagcacaagttacaattgcaa

SEQ ID NO: 918727 - DNA, 653 bp, Homo sapiens
gaggttcagaaagtttaagtgactttcaaggggtcacacaactggtaaatagagtggcctggatttaggcctaatctgtatagccccagagcctagactagttccacaagggtgcagaaatggaaacagactggagcatgtcccaagactcctcctggttctgaaatgcaatgatccccacgattgatgggaagccaatctccctgttttgtgaggctcctcaacaaattttcatcactttatgacccagagacatggccacagcaaattttggcctctgccagagtggcagggctccactgaggcaggtgaaaaccaaaacatgtcactctgggagggtctccacttatttaggaggcctctgtttattcaggtggacattgcccacttcctattgctaccttaggggacctaagtaccacatcccaagttcaaagacctagcaaggatgagcatcactctgaagctaattgctcgagttttagagagctgtatagttaacatctgttgayaaagcagtcgctagatgtgtggggcatggcactgtgtgctagctcatggtcatttcattttgaaattcaaagtagaaggaaatattcagcttagctttaacacctagttttgagtgtattcttaaacaactccttcagtcc

SEQ ID NO: 918728 - DNA, 587 bp, Homo sapiens
attaaaggatgttcttcaggcagaaggaaaattgtaccacatggaaattttaatccacacaaaggaataaagagtgacagaaatagtaaatatattggtaattaaaactcttttttctcactttttaatttatttaaagataattgactaaacataaacagtaagyatatgtagaatctttaatatacgcagagattaaatgtatgacaatagcatcaaggatggaagaggaaaatgaaagtacattgttaaagatttatacattatatatgaagctgtatgatattatttgaaagttgactgtggtgagttgtaagtatgcatattttaaggcctagaataatttccaaaaatataaaacaaagaggtatagctaataagccagcagtgaagataaaactaaatcctgaaaagtgctcagttaatccaaaagaaggcagagagaaaggaaaatgagcaaatggtgcaaataaaaatcaaataccataatactatgtttaaaaccaatcatgccaccatttacattaaatataaataatctaagcactccaattaaaaggcagagattgtcagcccagataaaaaag

SEQ ID NO: 918729 - DNA, 809 bp, Homo sapiens
ctgaagccctagtatgtgagagaggcagagagcctccctctatgactcacctttcccctaaggatctgagcaacccaggccagggagagcattttgtttctcctaagctctggagctaaaatggggagaagcttggacatactgtgagagaaagacattgggaaaagctgtagacattttcccaggccagaaccaagaggagaatgtcatttttattctgagtgcatacaaaatcagccattcttcggtaacacagcatcatggctgcacaggcattttactcttgggccagagattgcagcacctgctctgaagcagggtaggggcctccacagctaggactgtggaaagtacctcaggagtagatcctggaattgtgctctcccccatcacaggtgtggagtgggaggagagctgctaccactgcagttttttggggtgatgagatttgcagccagggccaccttggtracctgaaactggtctgagtgtgccattgctgtgtgcaccagcctgctccactgagatcatggtgaagcagggccctctccactctactcccaggcagatctccaggcatttagaccatttcctcacctggatcagcagcctgagatggcctaacattggggccctctccactccacgcgcaggcacaactccaggcattcagagcacttcctcacctgggccagcagcctaagttgcccaacctttcctgcacagagatcctggtccaggagggccgtctccactccatgaccaggcagatatctaggcatttggagtgcctattcacctggagcagt

SEQ ID NO: 918730 - DNA, 811 bp, Homo sapiens
accactgcagttttttggggtgatgagatttgcagccagggccaccttggtaacctgaaactggtctgagtgtgccattgctgtgtgcaccagcctgctccactgagatcatggtgaagcagggccctctccactctactcccaggcagatctccaggcatttagaccatttcctcacctggatcagcagcctgagatggcctaacattggggccctctccactccacgcgcaggcacaactccaggcattcagagcacttcctcacctgggccagcagcctaagttgcccaacctttcctgcacagagatcctggtccaggagggccgtctccactccatgaccaggcagatatctaggcatttggagtgcctattcacctggagcagtggcctgacccaccccacccttcctgtgtagaaattctgttatagggagaccttctgtgcttcaaacccaggcagatctgaaggcattcagagcacctgcttgcctggttcagaagcctgagctgccccacctgcctgcacmaagatcttggtgtaggtggtggtggagggctttcttctctatgcccaggcagatcttgaggcatctggagcactcactctcctggattagttgaggctgcctgcttctctatgcagagaacttgggaatgaggagatttcccaacgctacacctacacacacctctgggcacttagtcaccacccactggattcttcctcagagctggtgcttgtgcctgccattgggggacccatagatggatacgcctggtctggctctgaccatcttggcccccttt

SEQ ID NO: 918731 - DNA, 545 bp, Homo sapiens
tgaagaggctgagtcactttccaaggacatccagtgtgtgagtggcatggctgaaccctacttaatataaagcctgaaagtggctccgagtaggaaagatcaggttcctcaaaagactattctgggggtctcgcagcgtgggaaggatgctatgcctatttytgtagagccccaccggatctggggcgctcttcactgtggctttttttttttttttttttgagacagagtttcgctcttgttgcccaggctggagtgcaatggtgcaatcttggctcaccgaaacctccgcctcccaggttcaagcaattcttctgcctcagcctctggaatagctgggattacaggcatgtgccaccaagcccggctaatttttttgtatttttagtagagacgaggtttctccatgttggtcaggctggtcttgaactcccaatctcgggtgatctgcctgcctcggcctcccaaagtgctgggattacagatgtgagccaccgcgcccggcttcattccggctttgctgagctaagagggcccaacgctta

SEQ ID NO: 918732 - DNA, 545 bp, Homo sapiens
tgaagaggctgagtcactttccaaggacatccagtgtgtgagtggcatggctgaaccctacttaatataaagcctgaaagtggctccgagtaggaaagatcaggttcctcaaaagactattctgggggtctcgcagcgtgggaaggatgctatgcctatttctgtagagccccaccggatctggggcgctcttcastgtggctttttttttttttttttttgagacagagtttcgctcttgttgcccaggctggagtgcaatggtgcaatcttggctcaccgaaacctccgcctcccaggttcaagcaattcttctgcctcagcctctggaatagctgggattacaggcatgtgccaccaagcccggctaatttttttgtatttttagtagagacgaggtttctccatgttggtcaggctggtcttgaactcccaatctcgggtgatctgcctgcctcggcctcccaaagtgctgggattacagatgtgagccaccgcgcccggcttcattccggctttgctgagctaagagggcccaacgctta

SEQ ID NO: 918733 - DNA, 644 bp, Homo sapiens
tgtccaatgttttgtgtagttgcctcaaaggaatctatgtctgctggtgatcagaaaacacaaatatgggtgtgaagaacaggattaggactaaaaaccatttaccaagatgtgaaccttaaaaaaattatttcagtagtttttggggaaaaggtggggtttggttacatggataagttctatagtggtgatttctgagattttggtgcatccatcaccagagcagtatacactgaacccaacatgtagtcttttattctcctccccctcctatccttcctcccttagtccctaaaatccattgtatcattcttatgcctttgcatcctcatagcttagctcccacttatgggaacacatgacatttggtttttcatttctgagtgacttcatttataataatggcctccagctccatccaagttgctgcaaaggccattatttaattctgttttatagctgagtagtattccatgggttatacataccatattttctttatctactcwttggttgatgagcatttatgttggtttcatatttttgcaattgcaaattgtgctgctataaacacgtgtgtgcatgtgtctttttcatataatgacttcttttcctttgggtagatacccagtagtgggattgct

SEQ ID NO: 918734 - DNA, 723 bp, Homo sapiens
ccacacttcccagacggggtggccaggcagaggtgctcctcacttcccagacagggcagccgggcagaggtgctcctcactttgcagatgaggtggccaggcagaggcgctcctcacttcctagacagggtggcagccrggcagaggtgctcctcacatcccagacaatgggcggccgggcagaggtgctcctcacttcccagacggggcggccaggcagaggcactccccacttcccagacagggtggccgggcagaggcgctcctcacttcccagatggggtggctgctgggcagaggcgctcctcgcctctcagacggggcggccaggcagaggcactcctcagttcccagacagggcagccaggcagaggtactcctcacctcccagatggggtggtggccaggcagaggcgctcctcacatcccagatggggcggccaggcagaggcactcctcacttcccagacagggtggcagccgggcagaggcattcctctcatcccagacggggcagcaaccgggcagaggcactcctcacatcccagacggggctgccgggcagaggcgctcctcacttcgcagatgatgggcagccgggcagtggcgctcctcacttcccagatgatgggcggctgggcagaggtgctcctcacttcctagacggggcggccaagcagaggtgctcctcacctcccagatgaagggcggccggggagaggc

SEQ ID NO: 918735 - DNA, 701 bp, Homo sapiens
gaggcgctcctcacatcccagatggggcggccaggcagaggcactcctcacttcccagacagggtggcagccgggcagaggcattcctctcatcccagacggggcagcaaccgggcagaggcactcctcacatcccagacggggctgccgggcagaggcgctcctcacttcgcagatgatgggcagccgggcagtggcgctcctcacttcccagatgatgggcggctgggcagaggtgctcctcacttcctagacggggcggccaagcagaggtgctcctcacctcccagatgaagggcggccggggagaggctctcctcacatcccagacgatgggcggccgggcagaggcgctcctcaccccccagacggggtggccgggcagaggcgctcctcactttccagacagggtggccagccagaggcgctcctcacatcccagayggggcagttgggcagaggcgctcctcacttcccagatgataggcggccgggcagaggtgctcctcacttcccagacgggacggccgggcagagatgctcctcacctcccagacagggtggccgggcagaggcgctcctcacttcctagatggggcagccaagcagaggcactcctcacctcccagatgaagggcagccggggagaggctctcctcacatcccagacgatgggcggctgggcagaggtgctactcact

SEQ ID NO: 918736 - DNA, 701 bp, Homo sapiens
gaggcgctcctcacatcccagatggggcggccaggcagaggcactcctcacttcccagacagggtggcagccgggcagaggcattcctctcatcccagacggggcagcaaccgggcagaggcactcctcacatcccagacggggctgccgggcagaggcgctcctcacttcgcagatgatgggcagccgggcagtggcgctcctcacttcccagatgatgggcggctgggcagaggtgctcctcacttcctagacggggcggccaagcagaggtgctcctcacctcccagatgaagggcggccggggagaggctctcctcacatcccagacgatgggcggccgggcagaggcgctcctcaccccccagacggggtggccgggcagaggcgctcctcactttccagacagggtggccagccagaggcgctcctcacatcccagacggggcagttgggcagaggcgctcctcacttcccagatgataggcggccgggcagaggtgctcctcacttcccagacgggacggccgggcagagaygctcctcacctcccagacagggtggccgggcagaggcgctcctcacttcctagatggggcagccaagcagaggcactcctcacctcccagatgaagggcagccggggagaggctctcctcacatcccagacgatgggcggctgggcagaggtgctactcact

SEQ ID NO: 918737 - DNA, 530 bp, Homo sapiens
ccaaataaagatgtgggtattatccagtgttcaatctaagtttccaatgaatacatgaataccaaagcatgaattattaaaccttacacaaaaggtaggtctttacttcaattttctgtggaagaaattaggtatacaatgaaaaaccttcccgtggtatcctcagtaccctggaaactcccttactggatattatacagctattaaggtagaagtacaacaattatatcgaaattatcctacataacaaractaatactcatgttgacaatgaccactgccactatctctcgatgttctgggataagaacattcagttcttatccatgaagaggaaaaggcagaagctcccagcactctgcatttggtgcattcaatgcattctgcattcagtcttttacctctgggtgagctgatgatgctgcattgacctgaggatctgcaagagcagatttaagtgtcacgagaaggagatacctgctccttccaaggtgagtagcagttcaatagaatttgttctgctcaacagt

SEQ ID NO: 918738 - DNA, 733 bp, Homo sapiens
agatgatgtgcatctcacatactccaatgtacacagacctgtggtcacaagttaaggcagaaaaatctttggaagaatttccccttataagtgttcaccctatagaacttccagaatggcagtaggaaactcccaagtctctccctatagaaaagctattaggacactgacaagattgtcaaaagtaaactttcagtactctggatatcagccaagcacttkcaacaatcttagggcagtaagtttgtggcattttaacttgtcttactccaatcttactctccccagctctttactacctttgaaatcccaagtttcacaaccatattagccgtgatgacaagccgcctaccagccactgttgggggcaatttggacctcctcaaaaagtccttgctcccccacagagacacttgtttcacttgtctggcaccttccagaagcagccctgttctcaggttgtctttagctgacttaccttagagcacactcattggcaacagcccaatccccactttgtcaacaaaaataagtcagcagcaattgtttaacatcagatgctcaagacagtattactattactagggggaagtgagagactgaccaaatagaccatgaaaggagatgttcacagggagcttcgcaaagttctaagatttctgggaccttccaaggccacgtacatgtgcatggctacgtgcacgcccaggaaagacctgagaagcttccagta

SEQ ID NO: 918739 - DNA, 846 bp, Homo sapiens
tgtgtggaataataccttcaccataccaagtattttggggtgacaaggaacctatctagacaaaaaggaatgtgaggcagatgagaaaacatttacctaagccatatccagtacagtctcagatgatgtgcatctcacatactccaatgtacacagacctgtggtcacaagttaaggcagaaaaatctttggaagaatttccccttataagtgttcaccctatagaacttccagaatggcagtaggaaactcccaagtctctccctatagaaaagctattaggacactgacaagattgtcaaaagtaaactttcagtactctggatatcagccaagcactttcaacaatcttagggcagtaagtttgtggcattttaacttgtcttactccaatcttactctccccagctctttactacctttgaaatcccaagtttcacaaccatattagccgtgatgacaagccgcctaccagccactgttgggggcaatttggacctcctcaaaaagtccttgctcccccacagagacacttgtttcacttgtctggcaccttccagaagcagccctgttstcaggttgtctttagctgacttaccttagagcacactcattggcaacagcccaatccccactttgtcaacaaaaataagtcagcagcaattgtttaacatcagatgctcaagacagtattactattactagggggaagtgagagactgaccaaatagaccatgaaaggagatgttcacagggagcttcgcaaagttctaagatttctgggaccttccaaggccacgtacatgtgcatggctacgtgcacgcccaggaaagacctgagaagct

SEQ ID NO: 918740 - DNA, 639 bp, Homo sapiens
aaaacttgtttgaacaatgaaatcagtgcaccttgaaaaatagtgatttttgtggaacacgggaagacaaccataaagtctgactgcctgcagggttgggcaaagagccctatttttctttttgcagagggcctataaatggacgtacaagtagtaaacatatgcctaaattcttttcccagcaaggaatattaattctctgggaaaagaaagtgtccctgggtggaggtctgtgaatggctactctgggaatgtctgtcttgtacagttgagataaggactgagatatgccctggtctcctgcagaacactcaggcttactggagttgggaaaactcaaccctggtaaatttttggtcagactggttttccgctctcaaaccctgttttctgttaagatgtttatcaagacaatacgtgcaccgctgaacatagacccttatcagtggttctgcttttgccctttgccttgttccctcagaagcatgkgatctttgttagaccctttatcagtggttctgctttttcctctttgaagcatgtgatctttgtacctactgttcttacaccccctccccttttgcaacccttaataaaaaacttgctggtctgagactcaggcaggcatcacagtactac

SEQ ID NO: 918741 - DNA, 578 bp, Homo sapiens
aaagacctctgggcccatttggataaacacttgtacgaacctccagaatcactcagatacacgaacaaggcttagcatagaaatacctctgtcccatgggcaaagacttcatgactaccaccaatagcaatggcaacaaatgccccaattgacaaatgggatctaattaaactgaagagcttctacacagstaaagaaactatctgaacagacaatctacagaatgggagcaaatttttggagtctagccatctgacaaagggcttatgtccagaatctacaaggaacttaaatttacaagaaaaccccatcaagaagtaggtgaaggatatgaacagatacttctcaaaagacatttatgcagccaacaagcatgaaaagaagctcatctctggtcattagagaaatgcaaatcaaaactgcaatgagataccatctcaagccagctacaatggcgaacattaaaaagtcaggaagcaacagatgctggagaggatgtggagaaatacgaacgcttttacactgttggtaggagtgtaaattagttcaaccattgtggaagacagtgtggcgattcc

SEQ ID NO: 918742 - DNA, 578 bp, Homo sapiens
aaagacctctgggcccatttggataaacacttgtacgaacctccagaatcactcagatacacgaacaaggcttagcatagaaatacctctgtcccatgggcaaagacttcatgactaccaccaatagcaatggcaacaaatgccccaattgacaaatgggatctaattaaactgaagagcttctacacaggtaaagaaactatctgaacagacaatctacagaatgggagcaaatttttggagtctagccatctgacaaagggcttatgtccagaatctacaaggaacttaaatttacaagaaarccccatcaagaagtaggtgaaggatatgaacagatacttctcaaaagacatttatgcagccaacaagcatgaaaagaagctcatctctggtcattagagaaatgcaaatcaaaactgcaatgagataccatctcaagccagctacaatggcgaacattaaaaagtcaggaagcaacagatgctggagaggatgtggagaaatacgaacgcttttacactgttggtaggagtgtaaattagttcaaccattgtggaagacagtgtggcgattcc

SEQ ID NO: 918743 - DNA, 725 bp, Homo sapiens
ctgaacaacatctatagaaaccagtggcaaagacagaagcaagacgactggtttggtggagagatctgataacaaagttaggaaatacgtaaaataacaacatggggtagaggttatgcttgtgtttctccaggccaaaaccagcagccaacttggataccatcaaggtacctgaaaccttatgagccagatgctgaggaagagatttgggaaggaacccgaggacccccgattgcagccatgtcgagactgacaktaaggaagacaccagtcccggcaagcaacactcaccaggcacagccactcacctggggccacatcaagaagttgacaaagatgggagaagaaaatctgaaggtggcggaatgaccagctatgatgaataatctaataatagctatgacggctgtgctcaccattgctatgagtactccccccaccccccccccccccagtaactgctgaaacaattatattgggcatatattccttttctaccacttctacggccagtaatatgcttagagcccctagtggaggtatacactaatgatagcttttggatgcctttttctacagatagaggcgtgtctcacccccaagaggagggaacaattataaatatcttgttgggatttgagcatttacctatttgcttagggaaagccaatgggcgtttacctcccaatcttggctggggatagtgcctgaacatatctctgcgg

SEQ ID NO: 918744 - DNA, 563 bp, Homo sapiens
gagacacctgaaaccttatgagccagatgctgaggaagagactttgggaggaacccaaggactgcagccatgtctagactgacaataaggaagacaccagtcctggcgagcaacacttatggtggcacagccacccatctgaggycagatcaaaaagttgacacagatggcagaaaaaaatctgaaggtgggacaaccagttacaatgagtaacctaatggtagctgtgatggctgtgctcaccattgccatattcccccagtaactgctgaaacaaaaaacaattaagcttattgggcaaatattccaccacttctacagccagtaacatggttagaccccccagcagaggtatacactaatgatagtttttggatgcctggttctacagataatagaggcccatctcacacccaagaggaaggaacaattaagaaaatctcattgggatttgatcatctacccatttgcatgggaaaagccaatgggtgtttacctcccagtcttcaatcttggcaggcaacagtaccttaacgtaacatctttgtggcacaatcacatat

SEQ ID NO: 918745 - DNA, 610 bp, Homo sapiens
tccctacttttgaggttttgggacccggcctgggccactactagcttccttgctcctcaaattgcagatgagctattgtgagacttcatcttgtgatcatgtgagtcaattctccttaataaactcccttttgtaaattagccaggcatggtggcgggcgcctgtagtccctgctactcaagaggctgaggcaggagaatggcctgaacccgggaggcggagcttgcagtgagccgagattggccactgcactccagcctgggcaatagagcgagactctgtctcaaaaaataaataaataaataaataaaataaactcccttttgtatatacatctatcctattagttctgtgcctctagagaatcttgactaataaagaatgttattcggacttaaaaaagkaaggaaattctaacacatgctacagaatgaattaaacttggaaacattacgctgagtgaaataagccagtcattaaaggacagatattctgtggttccttttatgaggttcctaggacagtcacatttataaaaacagaaagtagaatggtgattatcagaaagtagatggaggttagaaagaggagttagtgtttaatgaataca

SEQ ID NO: 918746 - DNA, 610 bp, Homo sapiens
tccctacttttgaggttttgggacccggcctgggccactactagcttccttgctcctcaaattgcagatgagctattgtgagacttcatcttgtgatcatgtgagtcaattctccttaataaactcccttttgtaaattagccaggcatggtggcgggcgcctgtagtccctgctactcaagaggctgaggcaggagaatggcctgaacccgggaggcggagcttgcagtgagccgagattggccactgcactccagcctgggcaatagagcgagactctgtctcaaaaaataaataaataaataaataaaataaactcccttttgtatatacatctatcctattagttctgtgcctctagagaatcttgactaataaagaatgttattcggacttaaaaaaggaaggaaattctaacacatgctacagaatgaattaaacttggaaacattacgctgagtgaartaagccagtcattaaaggacagatattctgtggttccttttatgaggttcctaggacagtcacatttataaaaacagaaagtagaatggtgattatcagaaagtagatggaggttagaaagaggagttagtgtttaatgaataca

SEQ ID NO: 918747 - DNA, 663 bp, Homo sapiens
atgaggactgtagaccgtggtattttggctgatgttagtttcttgctttctagagctaaaactgtggctgctgccagtgctctaagacaggttggccaccctttgactgagttgctgagttgtttagagaggtaggctacaggagcaaaggaagagggattttgtttttgttgtcctgagacaccaagggctattccttggtttttggcagtatagagagtgaaaggttgggatatactaggtaaggacagagctggtgcagtgataagattggtttagagtttgtggaagttggggagtatgttatgtgaggagtttaggtgtttgttgaggggtctttggctgctttayaaagggggcaagctaggagggcaaagttgggaatccatatttttagaaagcctgttatccctaggaaagaaaggattttgcttttttaggaaggtagagataggctgactattaaggctgctgatgccagggtcatggcttgggacctgggggagagttgaagtcctaagcaggtcaccataggggtggaaagcagtgctttggagggggagaccctatggcctttattagtaaggaaattgagaagggtggcagcatgagtttgggagatttttaaggaggggctacagaggaggaggtcatctacatatt

SEQ ID NO: 918748 - DNA, 663 bp, Homo sapiens
atgaggactgtagaccgtggtattttggctgatgttagtttcttgctttctagagctaaaactgtggctgctgccagtgctctaagacaggttggccaccctttgactgagttgctgagttgtttagagaggtaggctacaggagcaaaggaagagggattttgtttttgttgtcctgagacaccaagggctattccttggtttttggcagtatagagagtgaaaggttgggatatactaggtaaggacagagctggtgcagtgataagattggtttagagtttgtggaagttggggagtatgttatgtgaggagtttaggtgtttgttgaggggtctttggctgctttacaaagggggcaagctaggagggcaaagttgggaatccatatttttagaaagcctgttatccctaggaaagaaaggattttgcttttttaggaaggtagagataggctgactattaaggctgctgatgccagggtcatggctygggacctgggggagagttgaagtcctaagcaggtcaccataggggtggaaagcagtgctttggagggggagaccctatggcctttattagtaaggaaattgagaagggtggcagcatgagtttgggagatttttaaggaggggctacagaggaggaggtcatctacatatt

SEQ ID NO: 918749 - DNA, 583 bp, Homo sapiens
cgaacatcaagtacttcacaaggtaatagaatatcacaaggcaaatggaggcagggcgagatcacaggaccacaggaccgtggtgaaattaaaattgctaatgaagttttgggcaccattgtcattgataacatcttattaggagaaagggttttgagagcaaccggtctgactaaaatttattagacaggaatttcctcttcccaataagcctgggagcactatgggagactggggtctatttcacccctgtagtctacagaccataaaagaggggcacrcacaggggggccatctatagacttatacccctgggtgcatattctctttcccagggatgttccttgctgagaaaaagaattcagcaatatttctcctatttgcttttgaaagaagagaaatatggctctgttccatctggctcaccagcagtcagagtttaaggttatctctcttattctctgaacaattgctcttatcgtgttcttttttcaaggtgcccagatttcatatttgttcaaacacacatgctctacagtttgtgcaggtaacacaattatcacattgtcctgaggcaacatac

SEQ ID NO: 918750 - DNA, 476 bp, Homo sapiens
accagctgttctgaggggcccagcagaaagctgattcatggaagaatgcagtttccacatcctgattattattattattattattattattattttgagacagtgtctcactctgttgcccaggctggagtgcaacggcgcaatctcggctcactgcaacctcctgctcctgggttcaagtgattctcctgcctcagcctcctgagtaactggatctataggcatgcgccaccatgcccagctaacttttgtatttttagtagagayggggtttcaccatgtagtccaggcaggtcttgaactcctgacctcaggtgatctgcctgcctcagcctcccaaagtgctgggactataggcgtaagccactgcactgggtcaacacattctgattatttcgttcactttactccaaccaatcaatgaccccagttttctagcccttcaccctccatgatccccttaaaaacctttgccc

SEQ ID NO: 918751 - DNA, 652 bp, Homo sapiens
ctgaatctggtggggctttggagaacctttacaatccctgagctagacataaatacaccaatcggcactctgtatctagctcaaggtttgtaaacacaccagtcagcaccctgtgtctagctcagggtttgtgagtgcaccaattgacactctgtatctagctgctctggtggggccgtgaagaacctttatgtctagctcagggattgtaaatacaccaatcggcactctgtatctagctcaaggtttgtaaacacaccaatcagcaccctgtgtctagctcagggtttgtgagtgcaccaatggacactctgtatctatctgctctggtggggccttggagaacctttgtgtggatactctgtatctaatctgatggggacgtggagaacctttgtatccagctcagggattgtaaacgcaccaatcagcgccctgtcaaaacagaccactgggctstaccaatcagccggacgtgggtggggccagataagagaatgaaaccaggctgccccagccagcagtggcaacccgcttgggtccccttccacactgtggaagctttgttcttttgctctttgcaataaatcttgctactgctcactctttgggtccatgctgcttttatgagctgtaacactcaccacgaagg

SEQ ID NO: 918752 - DNA, 560 bp, Homo sapiens
attctcatcttattctgagatagatgagaagagatgagaactagggaagaaggtggtggcctaggagggcagttttggaaacagttttctccacccatgtacaatcccttccttgcactctgttgtaaaaacctaagattttgattgcctgaatctgtgactattgcttcatggagtttaatgaggctcaccctgtactaagaagctgtggggcttctctgatggttgttaacagggagtggcttcttggatcatagcaatttatttaatccttcccctgycaacaagtgtctggcaggatgtgtctgcactttacatttctagatctgacaacgctagctggttttgttcaaaccaagagattgacttcagacagtgttctccacaagtagtcaatttaaatcttagttctgcctagtgtcatataaagatcaaggaaaagtggcagctacttgacaaagagtgcacctagttactggttctaaaggtggctaaaggatctggatgttcctttcagtaatggaaggctctttccccatgaatgagaaggattactgctc

SEQ ID NO: 918753 - DNA, 649 bp, Homo sapiens
gggggtttctccatgttggtcaggctggtctcgaactccggacctcaggtgatctgcccgcctcggcctcccaaagtgttgggattacaggcgtgagccaccgcacccggcctttgctcaactcttaatttacagatgacaacaccaagactctcttcactgacttgaatctccccagtgccaccacagcttttagttataaaaataactaaaggagagcagaactctgagaatgctgtgagaataaagtgttttggaattgttaaccagtccttagtttttgctttctatctcattttcattgagaatttaaagtggaatttataacgaatttgtcagayctggtaagcatttgatacatgctagtttagtgactaaccaaacccaaccaaccagtcttctagggctgattaagcaaaatcctgataactgtttatgattattactatacctagggctgccataacaaaatacctcagactgagtagcttaagcagcagaagtctatttcctctcagttctagagactggaagtctgagatcaaggtgttggcagcaacgatttctcctgaggcctctctccttggcttgtagatggccattttcacagggtctttgatttttgcacacgtgtctatagccaatatgt

SEQ ID NO: 918754 - DNA, 556 bp, Homo sapiens
gagggtgagtttgaatttcaagtatataatggacgacataaggctagatgtggtagctcacgcctgtaatcccagtgctttgggaggccaaggctcaaggatcacctgagcccaggagttcgagaccagcctgggcaacatatcagatccaatctctgcaaaaaatagaaaaaattaaccagatgtggtggcacctgtctgtggttccagctacttgggaggctgaggtgggaggacctcgaacccaggaggtcraggctatagtgagccatgatagcaccgctgcactcagcctgggcaacagagcaagaccctgtctcaaacaaacaaacaaacaaacaagaacatacgagagaagttgtgtgttgtctcctttcagctttgtgttagagcaccggggcatgagctgaaaaggaacagccagtgtctgtggcatcatcacctgcacagatcacctcctacatggcagcctttctccctgtgggtctatgtccttccatggaatatccctggagagctcccgaagctctgcccaagtgggacaaaggggaagggc

SEQ ID NO: 918755 - DNA, 767 bp, Homo sapiens
acgggagttatactcagatttggtggggttttttttttttttttgtattctaacaagaaataaaaagaatattgcttattttgtagattttgtttatactttaaaaaattttttttcaggatggatagctcagttattcagggcaaggatgttggtgtgctgtgtgatctcttgttcatatgatgtgtcactgaaatctgtgacttctagaccatgaaggagccctgtaaagagatcaacccaccttaaagacagattgggcctgattcctgtagatttctttgtaaaagaacagagttactgtgttaacctcaggtagactatttcaaaacttgaactaaggtaatggtccagagtgagggaaaagctctcacctaattgtgtatatggattgagaaacctgtgtgaaagtcaaaatgcaggctttgtggtcagtttgttttgtaatrttttcacagtaacatccaggagatgagggctcggcacaaagaggcttttttgaagaaacataacctcaaactaggcttcatgtcggcatttgtgaaggcctcagcctttgccttgcaggaacagcctgttgtaaatgcaggtgagttgcttgtggctggaattggagaggtcctgggaggtaggtgtatgagcacagacctgctcccacatgcagaggatcaacagaccaaggctttttatttgctacctatagaaatatcagtatcttccccagggatttcttggttcaccttcctgaagcagcatcatgattactt

SEQ ID NO: 918756 - DNA, 630 bp, Homo sapiens
gcaggagatcgcttgaacatgggaggcagaggttgcagtgagctgagattccgccactgcactccagactgggtgacagagcaagactctgtctcaaaaagaaaaaaaaaaaaaatggaatgaccaaaagcaacttagtctggtagaagcaagatggagtcagttatgtcagacttccattactactataatttctgcaaaggcaatttcaaaatctatggtgattatggttartagattatatacacgaaaattgctaagagaataaatgttgagtattctaccacaggcaaaaataagtatgtgaggtaatatttatgttaattagcttgatttagccattccacaaggtatatatatatcaaaagattatgttgtacaccaaaaacaaaaaggaaaaattattttactggaaaacacattgtgaatatttttttccttccattaaagcaaaagttggccaggcatggtggctcaggcctgtaatcacagtactttgggatgccaaggtgatagcagcaggaggcagacaaaccctaggcagacaggggcagatccccagtgaaacccaaacttcaagccaaagacagtttaaagcctagctacaagtcctgggtaagtccacagact

SEQ ID NO: 918757 - DNA, 670 bp, Homo sapiens
ggctggagtgcaatggcacaatctcggctctctgcaacctgcaacctctgccccccgggttcaagcgattctcctgtctcagcctcccgagtagctgggattagaggcacccaccccacacctggctaatttttgtatttttagtagagacggggtttcaccatgttggccaggttggtctcgaactcctgacctcaggtgatccacccgcctcagcctcccaaagtgctgggattacaggcctgagccaccgcgcccggccacttcacattttcrtattcatggcaccagcaattgtctgtgatccatacaaagagcttaatacacgtttgttgaataagtcacacttaacgttgcaagctaggataataaatagaacgtggacttgatccattaagggaaagtaagacttcctggttgagaaagctggaactgtgcttgcatattcgtctgtaaatttgagtctaagtttggtaaactattaaaggagattacaatcctttctggaaaggacaccagctataataagggaactaggagtcttctgcaaccaagcctaagctaggaacgggtcaggaggcgttccacttccaatgtgcatccatcaaggtcaatgagcaagaagagggtctggctatccctcactggttagagacatttaaggctggtc

SEQ ID NO: 918758 - DNA, 660 bp, Homo sapiens
actgaattttcataaatattgcttgaaaatcattcagcaattcagaagatgtccaataaatttagctattactgtcactatttttaaaatgtgacaatcacaaaataatagttgaatataacttactatctagaaaaacataaaaattttagatatataccagcagacaaaacaattaaaacattataattatatttacgtgcattttaattatttctatacggtcaccttcgatcttttaaagtgcattttaatgtataagtggttttttttttttwaattaagaaacatgctgcctcctgaggcttatcattttaaaaaaccaaaagcatgaaaaaaattagaggccgggtacggcagctcacccctgtaatcccagcactttgggaggctgaggcaggcggatcacaaggtcaggagtttgagaccagcctggccaatatggtgaaaccctgtctctactaaaaatacaaaaattagacgggcgtggtggcaggcgcctgtagtcccctactcgggaggctgaggcaggagaatcgcttgaacccaggaggtggaggttgcagtgaaccgagattatgccactgcactccagcctgggtgacagagtgagactctgtctcataaataaataaataaaattagaataatcagtgtcag

SEQ ID NO: 918759 - DNA, 707 bp, Homo sapiens
agctccacttttttttttttctttttggagacagggtttcactgtcacccaggctggggtgattatagctcactgcagtctcgaactcccaggttcaagccatcttcccatctcagcatcccaagtagctgggactrcaggtgtgtgccaccaccccgggataattatacaaattttttttttgtagagatgggatctccctatgttgcccatgctggcctcaaactcctggcctcaagtgatcctccctcctcagcctcccaaaacactagggttacagatgtgagccactgtgttaatgcatttaatcctcacaacactcccctaggtggaggtattcctgtgagtcccattttaggatgaggagcctaaggcaccgagagtggttgagaaactggactcacactgagatccctgctggaactaggagcccgatgggccccaccccctgcattcctccatgatttttcctctggatgcctcctgtctcggcctcctcctcaccattcctttaaccctgttccaggtcacaccgtttcatgtctcctgcgtcctcctttccctcagcttctccccttccatccacttcccaccatgctgccagggatcttaatgaaagtcaagtgtgatcctgtccctgcaccttcttaccagcacccatatgtagcctcaggatcaagtgcagactcccttccttggcatcctag

SEQ ID NO: 918760 - DNA, 682 bp, Homo sapiens
tatctggccttcctgagctcttggccttccccatcctgccacagacaatgcttttttctctctcatttccctttcctatcttttctgtttctcagggcaaccatcctgccagagaccacatatggaaaaatgtccttgggagcttgaccttgtaaacatgtggtggtacttcctcctggtctctgctatccagggacaggaattttggggttcatagctccaaaaattatcttgagtagttaaaagtcttcgaamgctcaatattggctgttctagactccttctggggagagcaatggaaactgccccaatgtcgtaactcaggagttaaggctttgccattttacaatggtggctcatgttcaatcctggcttagagagtgagtcctttctggtttgatatctgtgtaaccttgatcatttggttattctcttcccctccacaaaccattttgaatttttctttctctgagcacagaaatattggctttttggcctggctaatgctgggcaataagaaatttaaaaggactttttaaaaagaacactatgcactatggtgaaaagtcagcttaatgaaaagtggatattcacactctgacagtctgggactccttggcaaaaacaggagacatcacagaccccgttttaggaaaaaactcagttttcctcatgaaacccc

SEQ ID NO: 918761 - DNA, 655 bp, Homo sapiens
ccatgttggccagccaggctggtatcgaactcctgacctcaggtgatccacctacctcggcctcccaaagtgaccactgcgcccggcgcctttggttcttacatgagcctcctggagctgctgtgacaatgcaccacaaaccagggggcagggggaggcttgaaatttattctctcacaagtctggaggccagaagcccaacatgaagatgtggtggggccgtggtgcttctgaaggctctggcgggaggatcttctctgtctcttccagcttctgggggtggcctgccatagttggtgtcccttggcttggggccacatcactccaagctctgcctgcatcatcatgtggccttcttccctgtgtctctttctccttttttgtttttatttttattttttgagatggggtctcggtctgtcacctggctggagtgcagtggcacgatctcggctcactgcartctctaccccacaggatcaagcaattctgcctcagcctctcgagtagctgggattacaggtgcacgccaccacacccagctaatttttgtatttttagtagagacgggggttttgccatgttggccaggctggtctcgaactcctgacctcgtggtctgcccgccttggcctttcaaaatgctgggattaca

SEQ ID NO: 918762 - DNA, 646 bp, Homo sapiens
gcattattagcaatgctaataccattctgcaatgataaataattaaacaattatggtcatgaatcaataagtttagcacattttttcatcagcaaattgcactgtataaacaagaaatataaattaccaagtctaatttccccctaaaattataagcattttatatctaataattaaaaaagtgttagaattcaattttggatagttagaactttaaagaattttcagtttccaccaaacaccattaaattgtcatgttttatgtctctgaatctgattaacattttgagatctggcctcagaaatctttctttgttagctcccagagacgctccacccaggctccagcttctcaccatcctcacagacggcgaatccactgggctccggcttccaagggtctggatctgcgggttccactggagagcgaggatttataggaatttttgattgaaagcacaggtgacaaacccaaggcktgtgggctctgcacaccctccacagtcttttgtgtggcctgttggcagtttgatttttacgtttttgggggatgttgtttgctttgtctttaagtttagatgtccgggttttgttgaggaaaaagaaacccacaccagatttacagtcccctagatcccccatctca

SEQ ID NO: 918763 - DNA, 579 bp, Homo sapiens
gctgaggctggagaatggcatgaacctgggaggcggagcttgcagtgagctgagatcctgccactgcactccagcctgggtgacagagtgagactccatctcaaaaaaaaaagaagaagaatagccatatggattaatggaacatagcaaatccagaaatgggcacacacatatatggtcaattgacttttgaaaaatgtgactacataattcaatgagaagaaagagtattttaaacaaattgtgttggaagaactggatatcaaatgggaggaaatgtctccaattcctacctcacacaatawgcaaaaatgacctaaaatggattataaaatctgaaaataaagttaaaattataaaacttctataagaaaacataggaaaaaatcttggcaaccatggattaagcaaaatatttcttaggacacaaatagcacaaaccaacatggaaaaaatgataaactgtatttcaaaaagtaaaaaactttctcttcaaaagatgctattatgaaaatgaaaaaggcaatacacagtctggggtaaaataattgcaatgcatgtatttgacaaagatatgca

SEQ ID NO: 918764 - DNA, 733 bp, Homo sapiens
tctcaaaatgctaggattacaggtgtgagacacctcgcctgtgcttggctgttcccaagcatatctcagaagccaggaaacaggccctgaatggatggagctcggggtcactgggccagccacagccctcagaggaccccatctctgtgccctctaacctgggctcctggcccacacccacccaggctgcctgtcaggatctgctccytctccagccctcagagctgccctatgtggagggttgggggtcccagaaaacctgggagaaacgggtcctggaaacagggtcggggggaagggcagagtgctggggatgctgggcccacgacctccctgtccctggggcttccccatgtcagaggtgaggctcagagaggtaagggcgcaccctttgtctgccccctccccagcatggccaagtcgctcccagggtgcaggcgatggcaggccatttgtctccctcctgggtgagtctctggacatggattctcacattttttatttaagaatcagagagatataagaatgtcaaggaaaaatcctctcatggacaatgcagccccagtaaatgactgtcagccggcgtgtccagggcttcaaggccccaggaagtggccatgctggggctgccaggcctctggctccagggtcactggggctgaactgtctgcccaggcccggagacaccctgcccctgaggagcccaccggcttggccagtccatcttcttggc

SEQ ID NO: 918765 - DNA, 695 bp, Homo sapiens
gctgaattatgaattaggttccgggtccctgtgcagctgttcccggcttgtcatccccaccactttatttccccatctgtttataaaaccaggagcgccgtcctgcaataaacacttcaaacgctttttttaggggctaattaattgtgttgcatttcttcaacacagcatgcaggccggacctgccccgaattcccaatgcgggtgtggctcctgctgagcgcctggggagggagccaggcctggagcctggggggctgcatgtggctgccccaagtttgctttctccaaggcagccctccacctttatgtggcgggctgggctgtctcaggaatgcgccggccatgtcaggttccccctagattccccctcckcaccctttggctgaagtcctcctgctcggaccataggacactcttgaaattatctgtggcacatccaaggtcaaggtcacgccctgctgccagctacagtgctgaccctgagggctccacctcccaggcccactgagcatcacgctatcttccctgccttgcctgcccagagcacctctgccctccaggaccccctcagcgagtgcggtgggcgagtgcagtgggtgggtggcccatctaggcaagccaatctctcctcggatccgtgcacctctttggagaaggcctctgggagccccagccctgctgtgcaccctgag

SEQ ID NO: 918766 - DNA, 695 bp, Homo sapiens
gctgaattatgaattaggttccgggtccctgtgcagctgttcccggcttgtcatccccaccactttatttccccatctgtttataaaaccaggagcgccgtcctgcaataaacacttcaaacgctttttttaggggctaattaattgtgttgcatttcttcaacacagcatgcaggccggacctgccccgaattcccaatgcgggtgtggctcctgctgagcgcctggggagggagccaggcctggagcctggggggctgcatgtggctgccccaagtttgctttctccaaggcagccctccacctttatgtggcgggctgggctgtctcaggaatgcgccggccatgtcaggttccccctagattccccctcctcaccctttggctgaagtcctcctgctcggaccataggacactcttgaaattatctgtggcacatccaaggtcaaggtcacgccctgctgccagctacagtgctgaccctgagggctccacctcccaggcccactgagcatcacgctrtcttccctgccttgcctgcccagagcacctctgccctccaggaccccctcagcgagtgcggtgggcgagtgcagtgggtgggtggcccatctaggcaagccaatctctcctcggatccgtgcacctctttggagaaggcctctgggagccccagccctgctgtgcaccctgag

SEQ ID NO: 918767 - DNA, 696 bp, Homo sapiens
ctgacctgtgtgatattcaagactgaggttagatttttcatattacctgtattatataactacctgaaaagcagaaactggtataacatactagattgaacaattaagttcttaaaaacctggaaagattaacataaaactgyccccacccaagaataaatttacatttaagaacttaagattgctttaccacctcaaaggcaacattactaattcatggatggacattccatgccctaagagatagccaaggaagacacacttaagggtcacactcaaggataaaaagtggagtcaaaaaaagtcatcataattagtagtttaggggttctctgagaccaataaatgggatctaaaggcaaaacaggtgggtaggaggacaaaaatacattttttaaatagacaattatacgtcattgaaaaatgaaccatatactaaaggaactcaatttttgcttgtttgtttcttatatagtagattcagcacaaatatagaaagaacgagtaatttcctaagtagatctgaaagtaagtttgccaggtgtagggggaaaattcaagaatttaaatatcacatttcaatttgaaatttgataatttgttgacaaaaaacaaagaatttattttgagtataaacctgtcccatgcaatatttagaatagtgctaaattactagaatattgaaaactatattaa

SEQ ID NO: 918768 - DNA, 449 bp, Homo sapiens
aggtaaagaaacaatctacgcaataggagaaagtattttcaaactattcatccaataagaaattaatagaatatataaggaactctaacaactcaatggacaaaaaaatcaaataatcagattacaaaatggacaaaagatctggatagacatttctccaaagaagacatccaaatggccaacaggtaaatgaaaaaattatcaacatcactartcattacgaaaatgcaaatcaaaaccacatgagatatcatctcccccagttaaaatggctattatcaaaaagataataacaaatgctgataagggcatggagaaatgggaatgctctatatactctttgtaggaatgtaaattagcacagccactatggaaaacaatatggaggttcctcaaaaaactaaaactagaactaccatatgatccagcaatctcactgctgggtatat

SEQ ID NO: 918769 - DNA, 449 bp, Homo sapiens
aggtaaagaaacaatctacgcaataggagaaagtattttcaaactattcatccaataagaaattaatagaatatataaggaactctaacaactcaatggacaaaaaaatcaaataatcagattacaaaatggacaaaagatctggatagacatttctccaaagaagacatccaaatggccaacaggtaaatgaaaaaattatcaacatcactagtcattacgaaaatgcaaatcaaaaccacatgagatatcatctcccccagttaaaatggctattatcraaaagataataacaaatgctgataagggcatggagaaatgggaatgctctatatactctttgtaggaatgtaaattagcacagccactatggaaaacaatatggaggttcctcaaaaaactaaaactagaactaccatatgatccagcaatctcactgctgggtatat

SEQ ID NO: 918770 - DNA, 761 bp, Homo sapiens
gaaagacaaactttgcatgttctcacttatttatgggtgctaaggatcccattgagttgaactcaacggagatagagagtagaaggatggttaccagaggctgagaagcatagtaggggggcagtttggtagggccatggagggaagtgaggatggctaatgggtacaagaaatagttaaaaagaatgaataagaggtagaggtactatttgatggcacaacagggtatttgtgctgatagcacaacagtagtatttgtactgataacacagtttgtactggtagcacaacagtagtacttgataccacaacactgcaattgtcaataattgacaattattataatcaataataatttagttgtaccttttaaaataactgaaatcatataattcaatttttgtaatacagagtaaatgcttgaggagatggataccccatttaccatgctgtgattgttacaygttgcatgcctgtatcaaagtatctcatgtaccccatttatacacacaactactgtatacccacaaaaaataaaaataaatgtgatataataatcaggtatggttttgctggggtatatattacatcgctgtattttgcctagtctataggattagggggaatagctgtggtaaattcccacagaggcagttgcaaaactccctacacttctctctcccatttgcactttagtttgttaaaatctgctaaagctgtttctaattcaccactttgtagcattctttggctttgttttg

SEQ ID NO: 918771 - DNA, 577 bp, Homo sapiens
tttagtaaaattcaacagaattttcacagatctgcttttctagccaactttctggcagaagaaaaagaaatttctgttttaagcaaggtattcaaaatatttcagttaccactttgagtatatatgtaatttcattttatatatcagtaactatgttaatacatgcagtaagatcagattttaaaaattatatcaaatattaaggtaaaaattacttaatttttttgaaattattgagtgcaggttgagcattaaactttcaggttttaagaaatgttgctaacaacattcagtcttaccagtgaactccaaataaagataccaaagccacttagtgaaatgttactattaaatgtataacatgttttcaccagagggcttcaaaacttgagtgttttttttttctcaacaagcatgttcttaaaaatagtaarcaatgttcattcattatttgatgatattaactttgtgtgataaaacagaaatctgagattgtatgtgttatgtttgttattgttacttgcctcttggtttaaaatggcactgaattaccttctccttggttttagttaaagtt

SEQ ID NO: 918772 - DNA, 642 bp, Homo sapiens
catccccggggctgcagagggtgtcctggccttcccctatcagctctgcacccctgaggactcccatccctaggagtccctctgcccaactttggtgcatgttaagccataattaatctgcttcctcatctcttattcatcaaagccacagcagcagcaaagggggctggcacaaggamgggaccgacaaccaaaccctggcagtggccccaagaatcccactgggcctgcccatctccaaatgcctctgacccttcactagcgagggcctcctcccacagaatggcatcctggattgtgccacactaggcaggccccctgacggaccatgcgcacctcccaccacctggaggctgctggggaccgtcaatgggacgtatgcattgcacagtgatggcccttacctctgcgtcccccagccctggactggatcccttgtggcccatctccaggatgggagcctgaacggagatgaaaggacactcggccaagtgggacatgccaggctggcacctggacccctggtccgccactcttcctggtgcctagaggaaggggtgagtccccagggctcctggaccttgagatgagcctcgggccacttgtgtttgccagcagatgggctcagggtcttctctcagt

SEQ ID NO: 918773 - DNA, 642 bp, Homo sapiens
catccccggggctgcagagggtgtcctggccttcccctatcagctctgcacccctgaggactcccatccctaggagtccctctgcccaactttggtgcatgttaagccataattaatctgcttcctcatctcttattcatcaaagccacagcagcagcaaagggggctggcacaaggaagggaccgacaaccaaaccctggcagtggccccaagaatcccactgggcctgcccatctccaaatgcctctgacccttcactagcgagggcctcctcccacagaatggcatcctggattgtgccacactaggcaggccccctgacggaccatgcgcacctcccaccacctggaggmtgctggggaccgtcaatgggacgtatgcattgcacagtgatggcccttacctctgcgtcccccagccctggactggatcccttgtggcccatctccaggatgggagcctgaacggagatgaaaggacactcggccaagtgggacatgccaggctggcacctggacccctggtccgccactcttcctggtgcctagaggaaggggtgagtccccagggctcctggaccttgagatgagcctcgggccacttgtgtttgccagcagatgggctcagggtcttctctcagt

SEQ ID NO: 918774 - DNA, 699 bp, Homo sapiens
ggcaggggtctccaagcttggctccaccccctgaggggccagttactgcatacctcgcccacccaggagctgggggccctggtcctgtttcccagggagctgttggcacttgtgggctcctggctggggtccaggtgggctctgctcctctgccctgcccagcgctttgtactgagcccatcctgcagagactcaacggggccaaacgcacattccttgaccttctgtgagtctgtcagtcttcatccctccctggacctaggaaggcctggacagctttgaccattggtgttgggtggacatggcgctgcgctgcaccccaggccctcagagcccagctgttctgctttctgcttttggtcctgagctgccttgaaggaatctgaccagcagggagagcccacggagcgggagggcctgtggggctcagccctgcagccggtctgccgaggccaggcctgggggcacagctggggctgagtacactgaatgccccctcgatgccaygcacagcagaagagctgcccacaccgccctgctgggccctgcccgggctccagacccacagaccaagcacacaagagactgggctgctttgtcatgcagcagcaggtagccggacacatgtttccccattcccctgccatcctctgaaatcctgtggggagaaagcatgtgaggtccagtgggggttggggt

SEQ ID NO: 918775 - DNA, 696 bp, Homo sapiens
tgctgaattatgaattaggttccgggtccctgtgcagctgttcccggcttgtcatccccaccactttatttccccatctgtttataaaaccaggagcgccgtcctgcaataaacacttcaaacgctttttttaggggctaattaattgtgttgcatttcttcaacacagcatgcaggccggacctgccccgaattcccaatgcgggtgtggctcctgctgagcgcctggggagggagccaggcctggagcctggggggctgcatgtggctgccccaagtttgctttctccaaggcagccctccacctttatgtggcgggctgggctgtctcaggaatgcgccggccatgtcaggttccccctagattccccctcckcaccctttggctgaagtcctcctgctcggaccataggacactcttgaaattatctgtggcacatccaaggtcaaggtcacgccctgctgccagctacagtgctgaccctgagggctccacctcccaggcccactgagcatcacgctgtcttccctgccttgcctgcccagagcacctctgccctccaggaccccctcagcgagtgcggtgggcgagtgcagtgggtgggtggcccatctaggcaagccaatctctcctcggatccgtgcacctctttggagaaggcctctgggagccccagccctgctgtgcaccctgag

SEQ ID NO: 918776 - DNA, 634 bp, Homo sapiens
accaagtcctgaaactgcacaaagcagcaaggccctggacctggcccatgaaaccattttttcctcctaggcctctgggcctttgatgggaggggctgccataaagacctctgacatccttgcagacattttcccattgtcatggtgattaacatttggctcattacttatgcaaatttgtgcagttgacttgaatttctcttcagaaatgggtttttcttttctgtctcatcctcaggctgcaaatgttccaaactgttatgctctgcttcccttttaaacaattccaaaccatatctttgtgaatgcataaaactgaatgcttttaagagcacccaagtcacmtcttagaatgctttactgcttagaaatttcttccaccagatactataaatcatctctctcaagttcaaaattccacagatctctatctatagaggacatggacaaaacgtcaccagtctctttgctacagcacaagaagagtgacctttactccagtttccaacaagttcctcatctccgcctgagaccacctcagcctgcacttcattgtccatatcactatcagcattgtgatcaaagctatgccacaagtctctatgaagctccaaaccttcccacatcttcctgt

SEQ ID NO: 918777 - DNA, 634 bp, Homo sapiens
accaagtcctgaaactgcacaaagcagcaaggccctggacctggcccatgaaaccattttttcctcctaggcctctgggcctttgatgggaggggctgccataaagacctctgacatccttgcagacattttcccattgtcatggtgattaacatttggctcattacttatgcaaatttgtgcagttgacttgaatttctcttcagaaatgggtttttcttttctgtctcatcctcaggctgcaaatgttccaaactgttatgctctgcttcccttttaaacaattccaaaccatatctttgtgaatgcataaaactgaatgcttttaagagcacccaagtcacctcktagaatgctttactgcttagaaatttcttccaccagatactataaatcatctctctcaagttcaaaattccacagatctctatctatagaggacatggacaaaacgtcaccagtctctttgctacagcacaagaagagtgacctttactccagtttccaacaagttcctcatctccgcctgagaccacctcagcctgcacttcattgtccatatcactatcagcattgtgatcaaagctatgccacaagtctctatgaagctccaaaccttcccacatcttcctgt

SEQ ID NO: 918778 - DNA, 634 bp, Homo sapiens
accaagtcctgaaactgcacaaagcagcaaggccctggacctggcccatgaaaccattttttcctcctaggcctctgggcctttgatgggaggggctgccataaagacctctgacatccttgcagacattttcccattgtcatggtgattaacatttggctcattacttatgcaaatttgtgcagttgacttgaatttctcttcagaaatgggtttttcttttctgtctcatcctcaggctgcaaatgttccaaactgttatgctctgcttcccttttaaacaattccaaaccatatctttgtgaatgcataaaactgaatgcttttaagagcacccaagtcacctcttagaatgctttactgcttagaaatttcttccaccagatactataaatcatctctctcaagttcaaaattccacagatctctatctatagaggacatggacaaaacgtcaccagtctctttgctacagcacaasaagagtgacctttactccagtttccaacaagttcctcatctccgcctgagaccacctcagcctgcacttcattgtccatatcactatcagcattgtgatcaaagctatgccacaagtctctatgaagctccaaaccttcccacatcttcctgt

SEQ ID NO: 918779 - DNA, 682 bp, Homo sapiens
gtgccttttatttctttttcttacctgattggtctggctaggactttcagtactacattgaataaaaatggtaaacataagcatccttatcttgtgtcagatcttagagagaaaacatccagcttttcccattcagtatgatggttctgttatatatggcctttattatattgaggtatatttcttctatacccaatctgttgacagtttttatctaatgagatgagcgtatggtttttgtccttcgttccattaatctgatgtatcacctttattgatttgcatatgttgaaccatctttatatttctgggatgaattctacttgatcttggtgaataatcttcacgatgtgcwatgggatttagttggctagtattttgtgaggatttttgcatctatattcttcagggaaatagtcctgtaattttgttgttgttgttatgtccttgtctgatttgatatcttttcaaaaagcctgtctttgagctcattgattcttttttctgtttgattgattgattctgctggtattttttatttggttcattacatttttcaactgtggtcactgctgcttttttagcattagagggcgctctaagcctggatttgccacatatccaaagttgctttgtcgttctggcctggaaggactagagcggggcttacagagtgtatttc

SEQ ID NO: 918780 - DNA, 567 bp, Homo sapiens
tatagttctgatactgtctacatggagatagctccagatcacacaggttgagggctcagtcccacaactgtcctccactcccaatgatgccagccacaagccccaggttgttttacccatgcttctgactgatcagctctaagttggggttcccacgatcccctgtttggatcagactaatttactagagaggctcacagagctcaaggaaacactgatgtttactagtttattataaagsatattacaaaggatacaaataaagagatgcatagggcaaggaaaggggggagggtcgcagatccccccccaccctccccaacccaccatcctccaagaacatccttgtgttcagctatccggaagctccctgaacactgtccttttgggtttttatggaggcttcattactaggcatgattgattaaattattggccatgagtgaccagcttcacagcccccctccccttcgtggaggttaggaggtagggctcagatttccagccctctaatcttgccttggtctttctggtgaccagcccccatcctgaagctgcctaggggct

SEQ ID NO: 918781 - DNA, 567 bp, Homo sapiens
tatagttctgatactgtctacatggagatagctccagatcacacaggttgagggctcagtcccacaactgtcctccactcccaatgatgccagccacaagccccaggttgttttacccatgcttctgactgatcagctctaagttggggttcccacgatcccctgtttggatcagactaatttactagagaggctcacagagctcaaggaaacactgatgtttactagtttattataaaggatattrcaaaggatacaaataaagagatgcatagggcaaggaaaggggggagggtcgcagatccccccccaccctccccaacccaccatcctccaagaacatccttgtgttcagctatccggaagctccctgaacactgtccttttgggtttttatggaggcttcattactaggcatgattgattaaattattggccatgagtgaccagcttcacagcccccctccccttcgtggaggttaggaggtagggctcagatttccagccctctaatcttgccttggtctttctggtgaccagcccccatcctgaagctgcctaggggct

SEQ ID NO: 918782 - DNA, 567 bp, Homo sapiens
tatagttctgatactgtctacatggagatagctccagatcacacaggttgagggctcagtcccacaactgtcctccactcccaatgatgccagccacaagccccaggttgttttacccatgcttctgactgatcagctctaagttggggttcccacgatcccctgtttggatcagactaatttactagagaggctcacagagctcaaggaaacactgatgtttactagtttattataaaggatattacaaaggatacaaataaagagatgcatagggcaaggaaaggggggagggtcgcagatccccccccaccctccccaacccaccatcctccaagaacatccttgtgttcagctatccggaagctccctgaacactgtccttttgggtttttatggaggcttcattactaggcatgaytgattaaattattggccatgagtgaccagcttcacagcccccctccccttcgtggaggttaggaggtagggctcagatttccagccctctaatcttgccttggtctttctggtgaccagcccccatcctgaagctgcctaggggct

SEQ ID NO: 918783 - DNA, 593 bp, Homo sapiens
aatatagttctgatactgtctacatggagatagctccagatcacacaggttgagggctcagtcccacaactgtcctccactcccaatgatgccagccacaagccccaggttgttttacccatgcttctgactgatcagctctaagttggggttcccacgatcccctgtttggatcagactaatttactagagaggctcacagagctcaaggaaacactgatgtttactagtttattataaaggatattacaaaggatacaaataaagagatgcatagggcaaggaaaggggggagggtcgcagatccccccccaccctccccaacccaccatcctccaagaacatccttgtgttcagctatccggaagctccctgaacactgtccttttgggtttttatggaggcttcattactaggcatgattgattaaattattggccatgrgtgaccagcttcacagcccccctccccttcgtggaggttaggaggtagggctcagatttccagccctctaatcttgccttggtctttctggtgaccagcccccatcctgaagctgcctaggggctgccaaccattgatgataactcatt

SEQ ID NO: 918784 - DNA, 626 bp, Homo sapiens
aacttccaaacaaatgcaagctgcagccagccccagagctgcagatgggcatgtccctagggtggctttagaaaaatgtagttctctctgtgctcagctcaacctgccccctctgccctgagatgcacacacacacactcacacacacacgccactcccccccgccaccccccacacagttccttcctttgcagaagagatgagaaaacctctctttctttgtactgtagagcarttcctttggaggacaaagactgttgcaatgagctttttgtctcggcagagtttgctaatacactttaaaatatttattgtgaatgggttggaggaggttgctgtgggaagccctgtgtgttatgtatacctttgcatgcttcagcaatgcctgcccagtgctttggggactcagcagatgtccacagatgatgatagtgactttgaggaacccccatatttcttgaatttttcataatgagtgtagaaagaggtcccagcactggaaaggaaggtggggagctgttcccctcattgcttacagtggtctgcctcttgtagacacaaacctctaccttgaggagcccctttctgagggcaagtgtgcttctgagagggcagatgccagccat

SEQ ID NO: 918785 - DNA, 587 bp, Homo sapiens
aaaaaagttttttttctaagatctggaataaggcaaaaatgcccattcttacctctcacattcaacgtggtatttctagcaagagcaattagtcaagaaaaagaaataaaagctatcaaattggaaaggaagaagtaaaattgccttagtttccagatgacatgatctcatatgcagaaaaccctaaagactctaccaaaaaacttttagaaataataaattcagtatagttgcaggatactaaatcaacmtgcaaaaatcattttcatttctgtgcactaacaacctatctaaaaagaaaactaagaagaaaagtaccattcacaatagcaccaaaaagaataaaatacctaggaataagtttaactaagagggtgaaagatttgcacattgaaaactataaaacgttgataaaagaaattaaagaggatataaataaaaggaaggtgtgaaaggaaaataaaaacttgggaccccaattcactctgccaaaatgaaaaaattaagctgaaagctgagtgatgcaagaagctgccctcccttttgttcctaagcagacagctacagataaaaggctaaatatctcc

SEQ ID NO: 918786 - DNA, 612 bp, Homo sapiens
atgacatgatctcatatgcagaaaaccctaaagactctaccaaaaaacttttagaaataataaattcagtatagttgcaggatactaaatcaacctgcaaaaatcattttcatttctgtgcactaacaacctatctaaaaagaaaactaagaagaaaagtaccattcacaatagcaccaaaaagaataaaatacctaggaataagtttaaytaagagggtgaaagatttgcacattgaaaactataaaacgttgataaaagaaattaaagaggatataaataaaaggaaggtgtgaaaggaaaataaaaacttgggaccccaattcactctgccaaaatgaaaaaattaagctgaaagctgagtgatgcaagaagctgccctcccttttgttcctaagcagacagctacagataaaaggctaaatatctccacaggcagctgctctatgttcaccttatattaagtgccgatttgctgagcacaagatgaatacttaattgactattctgctacctgctcattttctcctgcaacatgtggatgaccataccataccctccctctttcccctccagcccactagcccaatatttcccctttaaatattgaag

SEQ ID NO: 918787 - DNA, 556 bp, Homo sapiens
cagcttcagcagacttaaatgtccctacctggcagctctgaagagaacagcagatctaccagcacagtgttgaagctctgataagggacagagtgcctcctcaagtgggtccctgacccccgtgtatcctgactaggagacacctcccagtaggggccgacagacacctcatacaggasagctctgagcggcatctcgtggttgcccctctggtatgaagcttccagaggaaggaacaggcagcaatctttgctggtctgctgtctccgctggtgatacccaggcaaacaaggtctggagcggacctccagaaaactacagcagacctgcagcagaggggccagactgttagaaggaaaactaacaaacagaaaggaatagcacatccactcaaagaccccatctgaaggtcaccaacatcaaagaccaaaggtagataaatccataaagatggggagaaaccagcgcaaaaagcctgaaaattccaaaaccagaatgtctcttctcctccaaaggatcataattcctcgccagcaagggaacaaaattgattgga

SEQ ID NO: 918788 - DNA, 605 bp, Homo sapiens
gtaccccactaccagcgtaattaagactgtcaattagaaatgttggcaagaatgtagaataatggaaattcttgtacattgttggtgagatagttcaatgttttaactactttgaaaaatgttcagcagtatccaccaaaattasagattcaccaactctatgatttagcaattttattcctagatatacaccaaagagaaatgagtacattcacaatgtgtaattccattatgaagtttaagatcaggcaaatctagtcacaataatgttgaccttgctgggaggggcaggtattaactggaaaaggagccagtgagagcttctaaagttacggccgtgattgaacattgatctgggaggtgattccgtgggtgtatacaaatataaataatttattatgctgtacacataagactcctttattttactttatgcaacttataactcaacaaaacacatgtattatgtgttaattacattttctaattttctgtattcttgatgctcctgaggcctcactgactggggagagacttttcctcccagagctagctaattcttaaacatagtaagctttcatatgtaaatgaaaaatccagttccc

SEQ ID NO: 918789 - DNA, 610 bp, Homo sapiens
tcttctcagaaaaagggcttttcttttctatcacattgccagcctgcaaatttcccaaacttttatgctctgcttcccttttagacttgttccaattccaaaccgtatctttgtgaatacataaagctgaatgctttcaacagcacccaagtaacctcttgaacactttgctgttcaaaaatgtcttccaccagataccctgaatcatctccctcaagttcaaagctccacagatctctaaggtgggggcaaaatgccaccagtctctttgctaaaacatagcaaaagccacctttattctggttctcaacaagttccttatctccatctgagcctggactttattgtccatatcagtatcarcattttggtcaaagccattcaacaagtctctagttccaaactttcccacatttttctgtcatctcctgagccctccaaactgttccaaacctctgcctcttacgtagttccaaagtcacttccacatttttgagtatctttacagcagcactccactacctggtaccaacttactgtattagtctgttttcatgctgctataaagaactgcaagagactagataaaggaaaggaggttaatggaatc

SEQ ID NO: 918790 - DNA, 610 bp, Homo sapiens
tcttctcagaaaaagggcttttcttttctatcacattgccagcctgcaaatttcccaaacttttatgctctgcttcccttttagacttgttccaattccaaaccgtatctttgtgaatacataaagctgaatgctttcaacagcacccaagtaacctcttgaacactttgctgttcaaaaatgtcttccaccagataccctgaatcatctccctcaagttcaaagctccacagatctctaaggtgggggcaaaatgccaccagtctctttgctaaaacatagcaaaagccacctttattctggttctcaacaagttccttatctccatctgagcctggactttattgtccatatcagtatcagcattttggtcaaagccattcaacaagtctctagttccaaactttcccacattttyctgtcatctcctgagccctccaaactgttccaaacctctgcctcttacgtagttccaaagtcacttccacatttttgagtatctttacagcagcactccactacctggtaccaacttactgtattagtctgttttcatgctgctataaagaactgcaagagactagataaaggaaaggaggttaatggaatc

SEQ ID NO: 918791 - DNA, 634 bp, Homo sapiens
gtagatccaccattcccattgttgtgcttgggtttaactgaatgactgcatttgaaagccaccgctgtgctgttgtgaacagtagcaggagctcatgtattgttcagggtccccaagaacaacttagagatatgagaagaccctatttgaaatacygaagttgagttactttaccagaggccaacacagagctgaaaatcggtctcatgtgcagtaatttttacatcgcactctgtgctttctcacatgcagatctagtgaaagcatgaaatgaagcatgaatcccaataaatttttgttgttgttgttgtttagagggagtttcgctcttgtcacccaggatggagtgcagtggtatgatctcagctcactgcaacctctgcctcccaggttcaagtgattctcctgcctcagcctcccgagtagctgggattacaggtgcccaccacacctagctgatttttgtgtttttggtagagacagggtttcaccatgttggccaggctggtcttgaacgcctgacctcgtgatccgcccacctcggcctcccaaagtgctaggattacaggcatgagccactgcgtccggcttaaaaattgtttttcaaataaatattaggtaacaccccagcaga

SEQ ID NO: 918792 - DNA, 634 bp, Homo sapiens
gtagatccaccattcccattgttgtgcttgggtttaactgaatgactgcatttgaaagccaccgctgtgctgttgtgaacagtagcaggagctcatgtattgttcagggtccccaagaacaacttagagatatgagaagaccctatttgaaatactgaagttgagttactttaccagaggccaacacagagctgaaaatcggtctcatgtgcagtaatttttacatcgcactctgtgctttctcacatgcagatctagtgaaagcatgaaatgaagcatgaatcccaataaatttttgttgttgttgttgtttagagggagtttcgctcttgtcacccaggatggagtgcagtggtatgatctcagctcactgcaacctctgcctcccaggttcaagtgattctcctgcctcagcctcccgagtagctgggattacaggtgcccaccacacctagctgatttttgtgtttttggtagagacagggtttcaccrtgttggccaggctggtcttgaacgcctgacctcgtgatccgcccacctcggcctcccaaagtgctaggattacaggcatgagccactgcgtccggcttaaaaattgtttttcaaataaatattaggtaacaccccagcaga

SEQ ID NO: 918793 - DNA, 634 bp, Homo sapiens
gtagatccaccattcccattgttgtgcttgggtttaactgaatgactgcatttgaaagccaccgctgtgctgttgtgaacagtagcaggagctcatgtattgttcagggtccccaagaacaacttagagatatgagaagaccctatttgaaatactgaagttgagttactttaccagaggccaacacagagctgaaaatcggtctcatgtgcagtaatttttacatcgcactctgtgctttctcacatgcagatctagtgaaagcatgaaatgaagcatgaatcccaataaatttttgttgttgttgttgtttagagggagtttcgctcttgtcacccaggatggagtgcagtggtatgatctcagctcactgcaacctctgcctcccaggttcaagtgattctcctgcctcagcctcccgagtagctgggattacaggtgcccaccacacctagctgatttttgtgtttttggtagagacagggtttcaccatgttrgccaggctggtcttgaacgcctgacctcgtgatccgcccacctcggcctcccaaagtgctaggattacaggcatgagccactgcgtccggcttaaaaattgtttttcaaataaatattaggtaacaccccagcaga

SEQ ID NO: 918794 - DNA, 495 bp, Homo sapiens
tgtatcaatactttattactgttatttctggatagggtttcattatatggtgtgtacacccaatctcatgttgaaatttaactgccactgtaatggtattcagaggtgttttatagctaatattttgaaacttgcaaaatgtttttcaacatggcaagatttttaacaacatatgttatggttagtctttctaatggcagctattataaccggtgggtagtggtgtgtcactgtgaccttcattttcatttttgtaatgactatgatgctgagcatcttttcatgtgcttattttccattttytgagctcttggccttcatagaatcaaacatgcctaagaaaagtgctgacattaaaatattatattaatgctctcaggtatccccagacaccatgagattaagaaggagctaaatagatgcttggaaactttgttgtccttaagactgtgaagatcaatgatatctgagggccagggcaattgcttcatgtgt

SEQ ID NO: 918795 - DNA, 684 bp, Homo sapiens
gtgtatcccattggaagacaagaatctagctgagtaagccgggagtggtggctcacgcctgtaatcccagcactttgggagcccgaggcgggtggatcatctgaggtcaggagttcgagaccagcctggccaacatggtgaaatctcgtctctactaaaaaattagccaggcgttgtgggtgatgcccataatcccacttactcgggaggctgaggcaggagaatcgcttgaacccgggaggtggaggttgcagtgagctgagatcacaccactgcactccagcctgggcaacaagagtgaaactccatctcaaataaataaataaataaacaaataaaatactaccaaaattaaaaaaaaaagactctagctgagtagtgctcaggaaagtgagaaattagaacaaagtgaaagacrctagcaaaggctaatagtggttctatccccccaaattctagagtataatagatatttaatgtcatgtaaaagaactacacaaagaactagacacgtgcaggtgcatgtgactggtacatagtaggtgatcaaataaatgtttcaattattgccttcttttaaggggtgcaaatgtactaaattctacatgaaaatactatcttagctgttgtatcttgaaaacgttatgtttcaaataacagttatatttcaaactgacataactg

SEQ ID NO: 918796 - DNA, 572 bp, Homo sapiens
tcttctgctttcacaccagcactaccacaattatcaacacagaagaagacttgtgtgaccaaatgtggtaggggtgttccccacataccaattagcagacaccaactgggtatcctctaattcaattccgacattatctacctggagatagtgttagatcttacatttcagggattcaatatgcaagatcaccccctacacccacagacaccagtcacaagtctgggcctctggaacatctgaccaataagcttcaagttgggatttccacarcttcccctttgagttcagttaatttgctggagcagctcacagaactcagggaaacccttatgtttatcagtttattataaagtatattacaaaagatacagatgaagagaactgtagggcagggtatggggaaaggggtgtggagcttccatgccctctctgggaaggctgctctccaggaatctccacaggttcagtcatctggaagcattctgacacagttctcttgggtttttatggaagcttcaggacatcagcattcttgctgctgaccccctccccttgtcaccccagtaaag

SEQ ID NO: 918797 - DNA, 572 bp, Homo sapiens
tcttctgctttcacaccagcactaccacaattatcaacacagaagaagacttgtgtgaccaaatgtggtaggggtgttccccacataccaattagcagacaccaactgggtatcctctaattcaattccgacattatctacctggagatagtgttagatcttacatttcagggattcaatatgcaagatcaccccctacacccacagacaccagtcacaagtctgggcctctggaacatctgaccaataagcttcaagttgggatttccacaacttcccctttgagttcagttaatttgctggagcagctcacagaactcagggaaacccttatgtttatcagtttattataaagtatattacaaaagatacagatgaagagaactgtagggcagggtatggggaaaggggtgtggagcttccatgccctytctgggaaggctgctctccaggaatctccacaggttcagtcatctggaagcattctgacacagttctcttgggtttttatggaagcttcaggacatcagcattcttgctgctgaccccctccccttgtcaccccagtaaag

SEQ ID NO: 918798 - DNA, 496 bp, Homo sapiens
gtgcagagaaatgactagacagagttttaatggacaagtaaaaattgtgtgtatttatggtgtaaaacgtggtgtgttgataaatgtacacattgtggaatggctaaatcaagctatttgacatatgcattacctcatatactatattttgtggtgagaacacttaagatctgctgtcctwgcaattttcaagtatacattgttattaactgtagtcaccatgttgaacaatagatctttggaagttatgcttctaactgaaactgtgtcattcagacggattttattttatttcttaagagatggggtctcactatgttgcccaggccggcatcaaaattctgggctcaagcaatcctcctgcttctgcctcccaagtaactaggattacaggtgtgcactatcacgcccagcactagacggatctttaaaaagtttttcacagtgttgggattacggataattttcattttttttttctttctgaaagtgtatt

SEQ ID NO: 918799 - DNA, 590 bp, Homo sapiens
tgaagttgaggcttagttaacattacaaatatgcaaatacagggctggagctttgttctgggccttacaatctaatctgggagttcaactataaaatcagagcataccaggaatgggccacaaagtgagagacggccattggggtctggagagggccaggagataaggaaagcatttcgtgacaactgacatcaggaggtctcagagctgttcttattcacygatgctgctgctgctgctgctactaccgacttgttttctaatagacattatcctaattctgtattaaatatcaatgggcaatctgatttctcttatcgtcagcttaactggacctatatctattctatagaaagagaaaaacctttctacacaaatatattcaccaaatcacctaactgggtaagcaatgttatgaccacctctcaaggctaatttttaacattaaccttctctttccagcttataatgccatgtacatttcctccttcttgcaaaagcagtgattttattctagttcctttcccgtgactcagggcttcacagacatggtatggcacccagatgcctcatcattgtatggcttttgc

SEQ ID NO: 918800 - DNA, 723 bp, Homo sapiens
tctgctgtctttcctctgggacactccaggtgggcgcccttgagaggggtctcatttttgagctccaactagtagtatgtggagggatttatgttatttttaaaatctgattagttttagcctctgttaactaagaacaatagcctcactctgagccacccaccacatgcaggcagtgctgaagcagacagtgagcacagctaagctgagcccagccaggacatcttggttttaattttggtttttgcaccttgggtgctctttctctacatgggatgacaatgtccaccctgcctttctcacgggagctacagcagataagtccagggagagaaagcaattttcaaatggccaagtgctctaaaggacaaaagacaaatgtacttcttactttagcagatgtggaaagagaggaaaagaatcagggggcccatgacagaggaggcmcaggggacctcgggcatgggctatctgcagtcatcccttcaaccattcacccaggcaacaggcacaaagcacagagactaagctttcggtgtgcagtagctggggacacaggcatgagaagacagcccctgctctatgtgagagggcctggagagaggggctgatagctaaagaagtatttactcagaagagctgagcaaaattagtgcaggtcacactgagcaggagagttaaacccagggagaataaagctctgtttctcttcggttttcaata

SEQ ID NO: 918801 - DNA, 508 bp, Homo sapiens
gtaagaggatttcaatgttttgaattctgaaaacaatgatgttgccttacccttatgtgtgcaagctaattttctgctggtcccttatcccaactgtgaatgcagaaccctcatacctcctgccaatgtttcttcagctcatcagctatatctaggggcatcagaagatgcttcacacatgctaaggagcaggcccagtccagtctctggccagtcatcctgtgatgcccattttctttccctattccaattctagaaaaccctaggtactcccttttccatttggcgtgtttctccattggataccattgatatccattactgscaggtactgcacccgatctggcccctacctaccaagtcaaaaaggtgccactaccattccatctagcccaagaggaccaaagctgcacagtggccagtggcacagggaggagatattcactttatccttttgtacagacccatatctaagaaggccaaaagtatggctgctttaccatgtcaa

SEQ ID NO: 918802 - DNA, 561 bp, Homo sapiens
gaaacacgatcaccccagccctcacacttttaaacagaagctggtaagacacagaagatacatggattaagcacagccaccttccaccctctaaagttaaaacctacactttatctgaatctgctttcaattatgttcagacataatttaagggtattagaacatgcagtcaaaaaaatctcttgaaaattactctttcaaagcttatatatgtcaattttacattccatgttggccattatagaactcagttccaaattttcactctttgaagaccaatctaaatgattccctggtgcagaaatcattctgacaagtatagctcttcagagccttaaaaagaataaaatgtttwatcactgcattcatatttaattcatgttcatagcacccctttcacaaggcatgctggagctcaaaggatggagcctaccactactcttccttcaggacattaaggagctgtggactccctgccacccctcgtggtgctgtcagctcttcacagctcccattagagggaagggaggaactgagctttctgagcatccgctttgggta

SEQ ID NO: 918803 - DNA, 569 bp, Homo sapiens
agggaacaagggagataaccataaggtctgaccgcctgcggggccgggcagaacagagtcatacttttcttattgcagaaagcaaacaggagaaatatcactgaattcttttcccagcaaggaataaacctgggaaaggaatgcattcccaggggtaggcctatggaaggccgctctgggagtgtctgccttatgcagttgaacataagggatgaaatacaccctggtcttctgcagtgccctaaggcttgctaggattaggaaattccagcctggtgaattctagtcagaacggttatctgctctcgaacactgtttcctgttaagatgcttatcaatgacaatgcattcccagtgggacatggaacctcatcagtaattctaatttcaccctcaccttgtgatcttkctctgcccttgtgatcttttattgccctttgtagcatgtgatctttgtgacttacttcctgttcgtacctccctccccttttgaaatccctaatgaaaacttgctggttttgtggctcaaggggcatcatggaatctgccaatatgtgatgtcaccccca

SEQ ID NO: 918804 - DNA, 556 bp, Homo sapiens
tacctcctggtcatttgcatcaagacaaatcaggtacctaaccagtcaaatacttcactctcttctctcccctatcacgctagtaacttgaagcttggaaaaggagtgatctctgtaaagcggagatgggttgtggaaaacactaacgtattttaagcggaatcttgtgctcccaaagtagcttttggytaggagtgcaaaacagataacgaggcatgcaaccttttgaagtccaaccagatgaaggaacaatcaatggcccagctgcagagctcagacctacaaaactcctctgccaattcccagtcatcttcccgggcagccacattgttctcatcaacatgctccataaattttgcagtaggatgcaagctgctggcttgaagctgacactgattgaaaaaccttgccccaggccaactgctgtaaggaaataacttgggggttcagaaggaaacaccagggcttgttgtttagcagatttgtcagcatttagagatcacaggagagatagagaataccaagataaggctaattccccaaggggaaatattat

SEQ ID NO: 918805 - DNA, 707 bp, Homo sapiens
cattcattatgattgctatgtttgtaaaaacctggctccagtgaaatccatggcacaaagaaaggtcttctttggactccactgcttttgcacatccataattttttgtatgttgtgtttcattttcatttgtctcgagatatttttaaatatttcttttgattttgtctttgactctatcattgttcaagagactgtaattcggtttccacatatttgtgaattttcccatttctgtactgttaaagcattctagtttcatttcattgttcttggkaaagatacttggtataattttgatcttcttgaatgtgttaagatttgttttgtgacttttagtcagagttttccagggagacagaattgataggctatcaacagagagctataaaagggaattcattagggaagttggctcacttgactctgtaagctcagaagtcccatgataggctgtgtgtaagctacacaaccagaaaagccagtagcaaggctcagtccaaatccatgagcctcagaaacaaggaagccaataacgtaattctcaccaccagttcaaagccaaagacctgagaaccaggaaaccgctagtgtgagtcccagagtctaaaggcaaaagatcctggagttctaatgtccaagggccagagaagagcatcctggctctaggagtgagagggcaaggatttgcccttcttctacctttt

SEQ ID NO: 918806 - DNA, 573 bp, Homo sapiens
taaacattgactagatattgaatgatattaaaatattatacttactgtttattattgataatgatattctttgttttcaaagattcttgaaatgtatctttttgttgagcgatacattcagaaatatctgcagatgaaaaatatgatgacaaggatctacttcaatgtaattcaaagggtgcaaggggattgggtgtgtattagtccgttcattctcacactgctatgaagaaatacctgacacttggtaatttatagaggaaagaattttaattgactcacagttccacatggtttgggtggcctcaggaaacttacaatcatggcagaaggcaaaggataaacaggcactttcttcttcagagggtggcaggacagagtgagtgcaagcaggggaaatgtcagaygcttataaaaccatcagatctcaggtgactcactcattatcatgagaacagcatgggggaaactgcccccatgatcggattacttccacctggttctgtccttgacatgtggggattacaattcaagatgaaattctgggtgaggacacagccaaactgtatcagg

SEQ ID NO: 918807 - DNA, 618 bp, Homo sapiens
cttggtggcacacacctgtagtcccagctactcaggaagctgaggcaggacaatcgcttgaacccgggaggcagaggttgcagtgagccgagatcacaccattgcactccagcctgggcgacagagtgaagggcgaggctccgtctaaaaaaagagagagagagagaaaaagagagagagagaccataactatagaggatccacaaaaatatagaccacattgcttccatttcctcagtatctagcaatagtaggtagcaaacaattatagaatgaatcatacaaaatgtttaatgtaagttataaaaactatgtcaaacaggtaagatataagtatgaattctttcatgacctayaacatgtaaattgtacatcagaatttcatatttatttttcaaaaatacattgtgtgagacttccactttccggtctaatatgtaaaaggttgagaaatcatgactccggtcctcagaacaagaaaaaatctgacaaacatctcttcttagagccatcagaggattgaggtcacaggaaaaattgctgccctaaaactagagactggagggcaaacactgagaatcacaacttaccaggagcagaaaagtccagagcaaaact

SEQ ID NO: 918808 - DNA, 611 bp, Homo sapiens
ttgaaaaggcaagccataggctgggagaaaataattgcacatcaaatatttaataataagtttgtatctagaatacataaagaactctcataactcaattttaaagagtaaacaataggcaaaaagatttgaacagacacttccccagggaagatagtcacatggaaaataatcacctgaaattaacaccattagtcattagagaaatgcaaattaaamccacaatcaaataccaatacacaatgattagaatagctaaaataaaaagactttacaataccacatattggcaaggaggaagaataactaaaaatttcttattgtttaaatgcaaaatggtaccatcatttggaaaacaatttggtggtttcttacaaagttaaacataaatgtaccacataacttagagaccccaatcctacatattaccaaaatgaaatgtttacacaaaaacctgtacaagattgtttatagcggccttatatgtaactacccaaaccagaagaacccaaatgtctctcaactagttaatggattaacaagttgcagaacatccaaacaatgaaacactactccacaataaaaaagaagaactacctatacatgctaca

SEQ ID NO: 918809 - DNA, 628 bp, Homo sapiens
atggatgggtgaaaatctctttctgacgtaaatttttttataaaattaacttccacgtgattggtggtgtttttgcctgagcttcgccagatcttccggctcatgccccacttgatttcgtagagcagacaggcctctttacgaagttctctggggtcatagaagacgtcaaactcccagggttcgattcttctcctgaaatacaaaaagcagcccacactgtcatgccayatttagagagatcttagaaatcttttcctgctcccctcttctttttttattttattttattttattttatttttttaagatggagtctcacactgttgcccagactggagtgcagtggtgcaatctcagctcaccacaacctccacctcccaggttcaagcgatttttctgcctcaacttcccaagtagctgggattacaggctcccgccaccatgtccagctaatttttttgtatttttagtagagacggggtttcaccatgttggccaggctggtctcaaactcctgaccttgtgattcgcccacctcagcctcccaaagtgctgggattacaggcgtgagccaccacgcccagcctctgctcccctcttctatcaggctgatctgagacataac

SEQ ID NO: 918810 - DNA, 831 bp, Homo sapiens
ccctaagattgggaacaagacaaggatggccatgttcagcaggtctatgcagccttggttctgaccaggatgattaggcgattgatatataaaaggatccagattagaaaggaaaaagtaaaactgtcttactcccaaatgtcatgatcttgtatacagaaaatcctaaggtatccagtttaaaaaaaaaacaaaactagaactagttcagcaagttcacaaaatcagcatacaaaaatcaattgtatttctgtacactagcaatgagaaatccaaaaatgaaattcagaaaattattccattcacaatagcatcccaaagaataaagtactcactgtggaaagaaactaaaaaagaactaaataaatgaaagatattccatgttcatggatcagaagactaaatattattgtcagtactcatcaaattagtctacaggatcaacctgattcctatcaaaatcccagctaccttttctgcagaaattgacaaggtgatcctaaaattcatatggawatgcaaaggacacagaataagcaaaataatcctgaaaaagaagaacaagattggaggacttatcttcctaatttcaaaacttgctacaaagtaatcaagagggtatggtactgtcttaaggacagatgtataggtcactggaatatagttgaaagctcaggctgggcactcatgcctgtaattgcagcactttgggaggctgaggttgggggatcctttgaggtcaggaattcaagaccagcttgggcaacatagacagtgagacctgtctaaaaaaataaaaattaaagacaaatttgattagccaggcatggt

SEQ ID NO: 918811 - DNA, 544 bp, Homo sapiens
cttgtgtgtcagtgtccttgatttccttggcatgaggcaatgaacctcaggtattaacccagacgaacaatgccacttcatgtagaagtaaggtttttgcaggtgtaattaaataaagacctcgagataagatcatcctggatttagggtaggcctcaagtccaatgactggtgtcctcagaaagacgaaggggatttgacagagccaaagggaagaaggccgtgtgaagacattggcagagaatggagtaatgcagtcacagggtgaggaacaacagaagccaccaggagtgggaagaggccaggaaggatcttcccctgagactttggagggagtgtggccctcctgacatgttgatttgggacttctgggctyctgaactgtaatataataaatttcttttgttttaaaactaccagattggccgggcacggtggctcatgcctgtaatcccagcactttgggaggccaaggcaggcagatcacctgaggtctggaggtcaaaaccagcctgatcaatacggtgaaaccctgtctctacta

SEQ ID NO: 918812 - DNA, 560 bp, Homo sapiens
agtgctaagattacaggcgtgattcaccgtgcccagcctggccacactcttttttttttttttttttttcttgagacagagtttggctcttgttgcccaggctggactgcagttgtgcgatcttggctcaccacaacctctgcctcccaggttcaagagattctcctgcctcagcctcccgagtagctgggattacaggcatgcgccaccacgccyggctaattttgcatttttagtagagacggggtttcttcatgtcagtcaggctggtctcgaactcctgacctcagatgatctatctgcttcggcctcccaaagtgctgggattacaggcgtgagccaccgcgcccatccccggccacactcttaactgtgccctccatcactctttatccctcacccctctcttttattccacagcatttatcacttccagatcaatttgtctatcagcttagagtctgtcttcactctagtgagggagagcaaaggtttttttctgttttgttggtcactagcgcccagcacttagtaggcactcagtgaatatctgttgggtg

SEQ ID NO: 918813 - DNA, 560 bp, Homo sapiens
agtgctaagattacaggcgtgattcaccgtgcccagcctggccacactcttttttttttttttttttttcttgagacagagtttggctcttgttgcccaggctggactgcagttgtgcgatcttggctcaccacaacctctgcctcccaggttcaagagattctcctgcctcagcctcccgagtagctgggattacaggcatgcgccaccacgcctggctaattttgcatttttagtagagacggggtttcttcatgtcagtcaggctggtctcgaactcctgacctcagrtgatctatctgcttcggcctcccaaagtgctgggattacaggcgtgagccaccgcgcccatccccggccacactcttaactgtgccctccatcactctttatccctcacccctctcttttattccacagcatttatcacttccagatcaatttgtctatcagcttagagtctgtcttcactctagtgagggagagcaaaggtttttttctgttttgttggtcactagcgcccagcacttagtaggcactcagtgaatatctgttgggtg

SEQ ID NO: 918814 - DNA, 551 bp, Homo sapiens
ctatcattgatggacatttgggttggttccaagtctttgctattgtgaatggtgccgcaataaacatatgtgtgcatgtgtctttatagcagcatgatttataatcctttgggtatatacccagtaatgggatggctgggtcaaatggtatttctagttctagatccttgaggaattgccacactgtcttccacaatggttgaactaacttacactcccaccaacagtgtaaaagtgttcctatttctccacaacctctccagcatctgttgtttcctgactttttaatgatcaccattctaactggtgcgagatggtatctcaytgagattttgatttgcatttctctgatgaccagtcatgatgagcattttttcatgtgtctgttggccgcataaatgtctttttttgcgaagtatctgttcatacccttcgcccacattttgatggggttgtttttttcttgtaaatttatttaagttctttgtagattctggatattagccctcgtcagatgggtagattgcaaaaattttctcccattctgtagg

SEQ ID NO: 918815 - DNA, 646 bp, Homo sapiens
ccaaagctggactgtactgctgccatccctgcctgattctcctgcctcagcctgccgagtgcctgtgattgcaggcacgcgccaccacacctgactggttttcgtatttttttggtggagacggggtttcgctgtgttggccgggctggtctccagctcctagccgcgagtgatctgccagcctcagcctcccgaggtgccgggattgcagacggagtctcgttcactcagtgctcaatggtgcccaggctggagtgcagtggcctgatctcggctcgctacaacctccacctcccagccacctgccttggcctcccaaagtgccgagattgcagcctctgcccggctgccaccccatctgggaagtgaggagcrtctctgcctggccacccatcgtctgggatgtgaggagcccctctgcctggctgcccagtctggaaagtgaggagtgtctctgcccggccgccatcccatctaggaagtgaggagcgcctcttcccggctgcccatcgtctgagatgtggggagcgcctctgccccgccgccccgtctgggatgtgaggagcgcctctgccccgccacaaccccgtctgggaggtgaggagcctctctgcccggccgccctgtctgagaagtgaggagaccc

SEQ ID NO: 918816 - DNA, 552 bp, Homo sapiens
ataaagggatggaagaaaatttactgagcaaatggaaagaaggaaaaaaaaatcaggggttgcaatcctagtctctgacaaacagactttaaaccaacaaagacccaataagacaaagaagggcattacataatggtaaagggaacaattcaacaagaagagctaactattctaaatatatgtgcacccaatacaggagcacccagattaataaaacaagtttctaaaggcctacaaagagacttagactcccacacaataatagtgggagactttaataccccactgtcagtattagacagattaacaagacagaaaattaaaaagaatattcrggacttgaactcagctctggatcaagtggacctagtagacatctacagaactctgttccccaaatcaactgaatatacattcttttcagtgccacatggcacttattctaaaatcgaccacataatttgaagcaaaacactcctcagcaaaagaactgaaatcataacaaacagtctctcagaccacagagcaatcaaattagaactcaggattaag

SEQ ID NO: 918817 - DNA, 552 bp, Homo sapiens
ataaagggatggaagaaaatttactgagcaaatggaaagaaggaaaaaaaaatcaggggttgcaatcctagtctctgacaaacagactttaaaccaacaaagacccaataagacaaagaagggcattacataatggtaaagggaacaattcaacaagaagagctaactattctaaatatatgtgcacccaatacaggagcacccagattaataaaacaagtttctaaaggcctacaaagagacttagactcccacacaataatagtgggagactttaataccccactgtcagtattagacagattaacaagacagaaaattaaaaagaatattcaggacttgaactcagctctggatcaagtggacctagtagacatctacagaactctgttccccaaatcaackgaatatacattcttttcagtgccacatggcacttattctaaaatcgaccacataatttgaagcaaaacactcctcagcaaaagaactgaaatcataacaaacagtctctcagaccacagagcaatcaaattagaactcaggattaag

SEQ ID NO: 918818 - DNA, 655 bp, Homo sapiens
tgttttgtaattcttgtggtagagacatttcacttccctggttagctgtattcctaggtattttattctttttgtggctattgtgaatggcattgcattcttgatttgtctctcagcttggatgttgttggtgtatagaaatgctactgattaggccaggcgtggtggctcatgcctgtaatcccagcacttagggaggccaaaatgggtggattacctgaggtcaggagtttgagaccagcctggccyacatggtgaaaccccgtctctactaaaaatacaaaaaattagctgggcatggtggcagatgcctgtaatcccagctacttgggaggctgaggcaggagaatcgcttgaacctgggaggtggaagttgcagtgagctgagatcgtgccactgccctccagcctgggcaacaagagtgaaactccatgtcaaaaaaaaaaaaaaaaaaaaccactgatttttgtacatggattttgtattctgaaacattgctgaaattgttcatcagatctaggagcttttgggagagaccatggggttttctagacatagaatgacatcatctacaaatggaaagagtatgacttcctttctttctatttggatgcctttttttttttcctcctgcctcatgattgctctggctag

SEQ ID NO: 918819 - DNA, 761 bp, Homo sapiens
atttttgtacatggattttgtattctgaaacattgctgaaattgttcatcagatctaggagcttttgggagagaccatggggttttctagacatagaatgacatcatctacaaatggaaagagtatgacttcctttctttctatttggatgcctttttttttttcctcctgcctcatgattgctctggctagcacttccagtactatgttgaatagcagcggtgagaatggmtacccttgtcttgttcttgttctcaaggggaatgcttccagcttttgcccattcagtatgatgttgtctgtgggtatgtcatagatggctcttattgttttgagatatgttccttcaatgcctggtttgttgagagtttttaacattaaaaaatgttgaattctattgaaaacctcttctgtatctattgagatgattatatggttattgtttttagttctgcttttgtgttgaatcacacttgttgatttgcatgtattgaaccaaccttgcatcccatgaagcctacttgatcatatcatggtggattagctttttgatgtgctgctggatttggtttgctagcattttgttgaagagttttgcacatctgttaattaaggatattggcctgaaattttctttttttgttgtatctctgccaggttttggcatcagaatgatgctggccgtatagaatgagtcagggaggagtctctcctcaattttttggaatagtttcagtaggaatggtaccagctctttttta

SEQ ID NO: 918820 - DNA, 594 bp, Homo sapiens
ccaccaaaattaattccagtgatagcaaagaagcaaaatggcagaatagaaggctccaccgattattccccagcaagcacaccaatttagctactatctatataggaaaaaacaccttcataagaaccaaaaatgaggagagcactcacagtaactacatattactgaaagaagcaccgaagagaaagaaaaaagtcctgaatstccaacaccatccctgccctactcccagcagcagcagcatagtgctgagagcatctctgggcactgggggaaggagaacacagcaattgtgaggtattgaactcagtgctgtcctgttagagcagaaagaaaaactgaacaaaactcaactgatgctcactcatggagggagcatttaaaccagctctagccagaggaaaatcactcatcccagcagtctgaacttgagttcctgaaaaccttgccacctagggccaaagaactcgcagtgtctaagtaaatttgaaaagctgtctaggccataaggactgcaactcttaggtgagccctagtgctgaactgggcccagatacagtgaactgtgagaagcaagcaacatactgagacacc

SEQ ID NO: 918821 - DNA, 637 bp, Homo sapiens
catacagcctgcagaaccatgagccaattaacctcttttgtttataaattacccagtctctggtatttctttctttctttttttttttttttttgagacggaatctcactctgttgccaggctggagtgccgtggtgtgatctctgctcacggcagtctctgtctcccaggttcaagcgattcctctgcctcagcctcccgagtagctgggactacaggcacgcaccaccacacctggctaattgtattttagtagagatggggtttcaccatgttggccaggatggtcttgatctcctgacctcatgatctgcaccccttggcctcccaaagtgctgggattacagrcatgagccaccgtgcccagcctggtatttctttatagcagtgtaagaatggactaatacagtgggacagacataagatagacattcccattccaagggggagaaataggcaagaagaaaggggtcccaagtaagtccaaaacccaacaaagaaaaccacattaagtcttaaaggtatagaataatctcctttgattccatgtcctgcatcttgggcacaccaagacacgggctgagcccccaaggcctcaggcagccctgcccctatctatggctttgttgggctcagc

SEQ ID NO: 918822 - DNA, 460 bp, Homo sapiens
cagctgcagacaagaaaagagctttcaatggaaaattttaaacaagtaggatcaagatcctgaagtatttcttcaaagaattgtaacatgaaatgaaacatggccttaccagtatgattctgaagacaagcacaatcaaagcaatggctaggaaaaggtagaagtaacccagtcaaaacaaaagcagactggtcacaagcaaaagtcacaacaacagttattttgggatgatcaagacgttttgcttgaggattttcagaagggccaaaggactatatyatctgtttattatgagagtgttttgagaaagttaccaaaatattaccagaaaaatgcctaggacagcttcagcagaaagtccttcttcaccataacaatgcttctgctcatttctcaaacaagggcaattttgtgagagttttgatgggaaatcattaagcacccatcttacagtactaat

SEQ ID NO: 918823 - DNA, 640 bp, Homo sapiens
acttcatgtgtaactccactagcctaccagggtgcctctcataaaggtaaaaaatgtaaatctggcctaatctacaaagttgccagggcagcactgggtcaattctacatacagtacttctatattcataaagagaaacattaagggaaggtgaaaatgcttctagaaggcgactgracaccagcacccttgcttactacctttgggctcttctttaaggccaacagtgacctgaaattattgactgacttttccaatcaactggagaaaatggtaccaaggtcaccaacatcagacaaattcacttgaggacctatctatgtgctttgaaagacaaaactgcttttgtaaaggatacagtatttcagaaaaacaatcatattaacaactaataatactgtaaaatgctgatgtgttgaatgctactttagaaaaacaggttcaaatctaggaaaaaaatttccgacagaaagctatgtatcaattatctagctagctatctagagacatggtctcattctattgctcaggatggagagcagtgggatgatcatagctcactgcagacttgagttgctggccccaagtgatctccctgcctcagcctcctaagtagctggggccacaggtggacacaggt

SEQ ID NO: 918824 - DNA, 578 bp, Homo sapiens
ggcacgtgcctatagtcccagctactcaggtggctgaggcaggagaatcgcttgaacccgggaggcagaggttgcagtgagccgagattgcgctactgcactccagcctgagtgacagagtgagactctgtttcaataaatacataaataaaataataaaagtaaaaggctgggcatggtggctcacgcctgtaatcccagcactttgggaggctgaggcgagcagatcacctgaggtcaggagttcgagrccagcctgttcaatatggtgaaaccctgtctctactacaaatacaaaaattagccgggcatggtggcaggcatctataatcccaggtactcaagaggctgaggcaggagaatcgcttgaacccgggaggcagaggttgcagtgagccaagatcgcaccgttgcactccagcctaggtgacaagagtgagactccatctcaaaaaaaaaaaaaagaaagaaatacaaaaattagccgggcatggtggcttgcgcctgtaatcccagctactcgggaggctgaggcaggagaatcgcttgaacccgggaggcagaggttgcagtgagcc

SEQ ID NO: 918825 - DNA, 620 bp, Homo sapiens
tagtgcttgaggttggcattggttggtatttcagtccctactttagaagtgaggaaaggtcaaatgagctaaccaaggtcatgtagctggtgaggaagggagccctggtctcaagcatggaatccactgcctctctgtaacactgctgtggactcagggcattcctttgggggaaggacattacaggccaggaaaacagcataagagagacatggatgtgtcattttgagcatgtagtttatacatggaagggtgatttttttttaaggaggcttccttttaggaagagtattgagaatgcaagaaggtctggctggcaaaaaaaatgaatgaaaccatgtcctttgcaggaacatggatggagctggaggccattatcctaagtgaactaactcagaagcagawagctgttctcacttataagtgggaggtgaagatttggtatacatggacagaaagatggaaaataatagacactgatgattcccaaagtggccagggagggagaggttgaaaaactacctattgggtacaatgttcaatatttaagtgatacgtttactagaagcctaatgcttaccattatgcaatatacccatgtaataaacatgcagatgtac

SEQ ID NO: 918826 - DNA, 540 bp, Homo sapiens
gccccccacttcagatgctaatcacaagccctaggttgtgatttgtgcttctgaccaattatcaatcagggattctcacaatccccccttgagtttgattaatttgccagaacagctcatataactcagggaaatgtttatgttcacctatttattgcaaaggatattacagaggatagagataaacagccagatgggagacgggcgtgaggccaggcatgtgggaaggggaggggagcttctgcactctctccrggctcaccaccctccaggaaccccaatgtgtcccgctatccagaaggcccctgaaccctgtcctttaaggttttcatggaggcttcatgacataggcatgattgattacatcattggccaccaatgatcaactcaaccttcaacccctctcccctgtctggaggtcgagggttgggctgaaagttccaaccttctaaacacgtggttgtttcccctggcaaccagccccatcctgaggctgtgcaggagccagcagccaccagtcatcatattagcctacaaaaa

SEQ ID NO: 918827 - DNA, 540 bp, Homo sapiens
gccccccacttcagatgctaatcacaagccctaggttgtgatttgtgcttctgaccaattatcaatcagggattctcacaatccccccttgagtttgattaatttgccagaacagctcatataactcagggaaatgtttatgttcacctatttattgcaaaggatattacagaggatagagataaacagccagatgggagacgggcgtgaggccaggcatgtgggaaggggaggggagcttctgcactctctccgggctcaccaccctccaggaaccccaaygtgtcccgctatccagaaggcccctgaaccctgtcctttaaggttttcatggaggcttcatgacataggcatgattgattacatcattggccaccaatgatcaactcaaccttcaacccctctcccctgtctggaggtcgagggttgggctgaaagttccaaccttctaaacacgtggttgtttcccctggcaaccagccccatcctgaggctgtgcaggagccagcagccaccagtcatcatattagcctacaaaaa

SEQ ID NO: 918828 - DNA, 631 bp, Homo sapiens
tgccactggggaaatgaccacagtatgattccagagacttactggacccactgtaagttgcacctgagctaaaactccattaattacctgacctccataagcccctactttaactggaggaccacagtgacgttttgggtcccctggaatcaaagtcagctcagagccagtgtccagtagtccctgaaatgtctgatcatttccttttccccagtgcacagttaccctggtaaaaggccagaggtctccttggggaaggatgggagaaagattcactgcataaattgttggtaatatagtgaggtccttcctcaagggggcccagcctccccttcattcaaggggttctgtgtttgtaaactggctcaagtctggaaattggtagaggggytgttgctctctgtttttgtaattcaaattagtcttttccattcaacctgcaagttttctgtttgtatagcttaagtaggaatgcagtaggcttcctctcaatttcacttctaggaacaccatgattaattagccagtaccagagctctacacaagtcagactattctgattgccgctttgcctctgctgtccattacagcagctatgcccaccttgcctttgaaggttgagtgctgccat

SEQ ID NO: 918829 - DNA, 635 bp, Homo sapiens
acaagtccatgaaagggtctttataagaaccttgcctgaggctgggcacagtggcttacgcctgtaatcccagcattttgggaggccgaggcgggcagatcgcaaggtcaggagatcgagaccatcctggctaacatggtgaaaacccgtgttmatttgaagactgccaggttagcacggataggggattattgtttctctaggagaggcatagaaaggcctaaatggaagcaaagcagtacccaggtagggttatagcttagagtcaagaggtaaaggtatgttactgagggactagaaccagagacatggtagcctactcaaggcatctgtaactggaaatgccagaaacaatataaatccaaaattccttaggtgagcagagttaaaccctgggaattaggtgcaaacgacaagtccaaacaatcagagacaggattggattgatgatgaagttgaaactttagaattaaatgaagaaaagttggaaggatttcaagttttcaaacatgaaaaaaattcagtacaattgctaaacatcagtctcctcatttattaaccagtggaaataataactacctacaagggtggccaagaagtttcactcggaataataaacataaaacacatactag

SEQ ID NO: 918830 - DNA, 483 bp, Homo sapiens
tgaatggttatagatacaggcatgcctcattttattattattttatttattgcactttgcagatatcactttttttttttttaacaaattgaaggtctgtggcaatcctgcatccagcaagttattggcattgttttccaacagcatgtgctcacttcttgtgtttgtgtctcattttggtaattatcacaatatttcagrcttttaaattattacgttatggtagtctttgatggtggtctgtgatcattgatctttgatattactattgtaattgttttggagtgcctgccatgagccacacccatgtagatttaataaatgttgtgtgcattccaactgctttgccaactgctctctcatctctctcactctccttgggcttctctatttcctcagaaaaaaattgaatattaggccaattaataaccctataatagcctctaagtcatgggtgttcaatcttttgacttccttaggcca

SEQ ID NO: 918831 - DNA, 483 bp, Homo sapiens
tgaatggttatagatacaggcatgcctcattttattattattttatttattgcactttgcagatatcactttttttttttttaacaaattgaaggtctgtggcaatcctgcatccagcaagttattggcattgttttccaacagcatgtgctcacttcttgtgtttgtgtctcattttggtaattatcacaatatttcaggcttttaaattattacgttatggtagtctttgatggtggtctgtgatcattgatctttgatattactattgtaattgttttggagtgcctgccatgagccacacccatgtrgatttaataaatgttgtgtgcattccaactgctttgccaactgctctctcatctctctcactctccttgggcttctctatttcctcagaaaaaaattgaatattaggccaattaataaccctataatagcctctaagtcatgggtgttcaatcttttgacttccttaggcca

SEQ ID NO: 918832 - DNA, 483 bp, Homo sapiens
tgaatggttatagatacaggcatgcctcattttattattattttatttattgcactttgcagatatcactttttttttttttaacaaattgaaggtctgtggcaatcctgcatccagcaagttattggcattgttttccaacagcatgtgctcacttcttgtgtttgtgtctcattttggtaattatcacaatatttcaggcttttaaattattacgttatggtagtctttgatggtggtctgtgatcattgatctttgatattactattgtaattgttttggagtgcctgccatgagccacacccatgtagatttaataaatgttgtgtgcattccaactrctttgccaactgctctctcatctctctcactctccttgggcttctctatttcctcagaaaaaaattgaatattaggccaattaataaccctataatagcctctaagtcatgggtgttcaatcttttgacttccttaggcca

SEQ ID NO: 918833 - DNA, 629 bp, Homo sapiens
tattgtcttgataaacatcttaaacaacagaaaacagagtttgagagcagagaaccagtctgacctcaaatttaccagggtgaggtttcttccccaccctaataagcctgagggtactgcaggagaccagggcatatttcagtccttatctcaactgcataaracagacactcccagagcagccatttatagaccaccccccaggaatgcaattcttttcctagggtgttagtattatattccttgctaggaaaacaatttagcaatatctctcttacttgcatgtccgtttataggctctctgcaagaagaaaaatatggctctttttgcccgactccgcaggcagtcagaccttatggttgtcttcccttgttccctaaaatcgctgttattctgttcgttttcagggtgtactgatttcatattgttcaaacacacgttttacaatcagatttgtacagtagtggtcccaaggtgacatacattctcagcttaggaagataacaggattaagagattaaagtaaagacaggcataagaaattataagagtattattagggaagtgacaaatgtccatgaaatcttcacaatttatgttcagagattgcagtaaaaacaggcgttaa

SEQ ID NO: 918834 - DNA, 629 bp, Homo sapiens
tattgtcttgataaacatcttaaacaacagaaaacagagtttgagagcagagaaccagtctgacctcaaatttaccagggtgaggtttcttccccaccctaataagcctgagggtactgcaggagaccagggcatatttcagtccttatctcaactgcataaaacagacactcccagagcagccatttatagaccaccccccaggaatgcaattcttttcctagggtgttagtattatattccttgctaggaaaacaatttagcaatatctctcytacttgcatgtccgtttataggctctctgcaagaagaaaaatatggctctttttgcccgactccgcaggcagtcagaccttatggttgtcttcccttgttccctaaaatcgctgttattctgttcgttttcagggtgtactgatttcatattgttcaaacacacgttttacaatcagatttgtacagtagtggtcccaaggtgacatacattctcagcttaggaagataacaggattaagagattaaagtaaagacaggcataagaaattataagagtattattagggaagtgacaaatgtccatgaaatcttcacaatttatgttcagagattgcagtaaaaacaggcgttaa

SEQ ID NO: 918835 - DNA, 629 bp, Homo sapiens
tattgtcttgataaacatcttaaacaacagaaaacagagtttgagagcagagaaccagtctgacctcaaatttaccagggtgaggtttcttccccaccctaataagcctgagggtactgcaggagaccagggcatatttcagtccttatctcaactgcataaaacagacactcccagagcagccatttatagaccaccccccaggaatgcaattcttttcctagggtgttagtattatattccttgctaggaaaacaatttagcaatatctctcttacttgcatgtccrtttataggctctctgcaagaagaaaaatatggctctttttgcccgactccgcaggcagtcagaccttatggttgtcttcccttgttccctaaaatcgctgttattctgttcgttttcagggtgtactgatttcatattgttcaaacacacgttttacaatcagatttgtacagtagtggtcccaaggtgacatacattctcagcttaggaagataacaggattaagagattaaagtaaagacaggcataagaaattataagagtattattagggaagtgacaaatgtccatgaaatcttcacaatttatgttcagagattgcagtaaaaacaggcgttaa

SEQ ID NO: 918836 - DNA, 419 bp, Homo sapiens
actgcagaggacaaaaatatgctgagtttctcttcttgtggcatttttattccagtatggagagacaaacaataaacaaatataagataaagaagaataaaacaggtgactcgaaattgatgggtgatgctattttctgtaggttagttggaaaaagacattcacattaagtgatgtctatgcagacagaaaaaagtaagacaagaaatctagggaaaagcattcctcacagagggaagagtaasaatggatccctggggtgagcatatgcttgatttgctgggaaacagcaaggtggccatatggcacaagcaaagttacaaggggaatggaaaggagattggagacaaatgcagtctatgcagggctctataggtcattatgagtactttgcattgctctctaaaggagtgtaggct

SEQ ID NO: 918837 - DNA, 577 bp, Homo sapiens
acatctatcagacattcaaaaagaattggtaccaatgctattgatactattccaaaagatagagaaagagggaattctccctaaatcattctgtgaagccagtatcaccctaatagcaaaaccaggaaaggacgtagcaacaacaacaacaacaaaaccaccaccaccaacaacaacgaaaaacaactatacaccaatatccctgatgaacatagatgcaaaaatcttcaataaaatactagctgactgaatccaacagcatatcaaaaagataatccaccatgatcaattgggtttcataccagggatgcagggatggtttaacatcagcaagtcaataaatgtgatacaccatataaacagcattaaaaacaaaaatcacatgatcayctcaatagacacagaaaaaagcatttgacaaaatccagcgtccctttgtgattaaaaccctcagcaaaattggcatagaagggacataacttaaggcaataaagaccatctatgacaatcccacagccaacattatactgaatggggaaaaattgaaagcatttcccctgaaaactggaacaagaca

SEQ ID NO: 918838 - DNA, 495 bp, Homo sapiens
ggcccagaggcctaggagggaaaaatggtttcatgggctgggcccagggcccccctgctgtgtgcagcctagggacttggtgctctgtgtccaagctgctccagccatggctaaaaggagccaaagtacagcttgagccgtggcttcagagggcacaarccccaagctttggcagcttccacatggttttgagtctgcaggaacacagaagtcaagaattgaggtttgggaacctccacctagatttcagagaatgtatggaaatgcctggatgtccaggaagaagtttgctgcaggcacaggcccctcatggagaacctctcctaggtcagtgcagaagggaaatgtggggttggaaccccccacacagagttcccactggggcactgcatagtggagctgtgagaagagcgtcaccgtcctccagaccccagaatggtagatccactgagagcttgcaccgtgagcctggaaatgctgtagacgttcaacgcc

SEQ ID NO: 918839 - DNA, 495 bp, Homo sapiens
ggcccagaggcctaggagggaaaaatggtttcatgggctgggcccagggcccccctgctgtgtgcagcctagggacttggtgctctgtgtccaagctgctccagccatggctaaaaggagccaaagtacagcttgagccgtggcttcagagggcacaaaccccaagctttggcagcttccacatggttttgagtctgcaggaacacrgaagtcaagaattgaggtttgggaacctccacctagatttcagagaatgtatggaaatgcctggatgtccaggaagaagtttgctgcaggcacaggcccctcatggagaacctctcctaggtcagtgcagaagggaaatgtggggttggaaccccccacacagagttcccactggggcactgcatagtggagctgtgagaagagcgtcaccgtcctccagaccccagaatggtagatccactgagagcttgcaccgtgagcctggaaatgctgtagacgttcaacgcc

SEQ ID NO: 918840 - DNA, 495 bp, Homo sapiens
ggcccagaggcctaggagggaaaaatggtttcatgggctgggcccagggcccccctgctgtgtgcagcctagggacttggtgctctgtgtccaagctgctccagccatggctaaaaggagccaaagtacagcttgagccgtggcttcagagggcacaaaccccaagctttggcagcttccacatggttttgagtctgcaggaacacagaagtcaagaattgaggtttgggaacctccacctagatttcagagaatgtatggaaatgcctggatgtccaggaagaagtttgctgcaggcacaggsccctcatggagaacctctcctaggtcagtgcagaagggaaatgtggggttggaaccccccacacagagttcccactggggcactgcatagtggagctgtgagaagagcgtcaccgtcctccagaccccagaatggtagatccactgagagcttgcaccgtgagcctggaaatgctgtagacgttcaacgcc

SEQ ID NO: 918841 - DNA, 532 bp, Homo sapiens
atgagctagaaagacccacatggtatagaaatgatgtctccaaccaacatatagcaaagaatctgaggcctgctaacagccatgtgagtgatctgagaaacagatccttcccagtaatgcctttagatgactgttgccctagccaacaccttgattaacaacagccttatgagagaccttgagccagaggcacccagctaagcttacatgcctacattcttgacccacagcaattatgaaataacacgtaatttaagccactaaatttgggggtaatataytacacagtaataaataatgaatacacttggatatgaagacttttaagctctagtctatgaaagtccgggacatatcatagctcttattcagggatttccattaagtccttctgtattctattcccaagtgtatccttataaaaaaaaaaaaaaacctagcctaagtaagtctctctactttgcaaccaaaagaaactaatgaaaatagctatgtctcctataaataaaaaagattaaattatgttcagtat

SEQ ID NO: 918842 - DNA, 653 bp, Homo sapiens
ctgaactgttggcagaaggcctgcatacagtgtgatttgtttttgtatctttaaaatagactttattttttagagcagctttaggttcatagcaaaattgagcagaaagtacagggaattcccatatgttgcctgccctgctcaggtatacctccccactatcaatgtctgtgcaccagagtggtacagttgttaagatgatgaacctacattgacacatcattatcacccaaagtccatagtttacattagagccaactcttggtgtttgtacattctatgggttttgaaaaatgtataataatatgtgtctaccattatagtattatayctaagaaaaataattaaataatagaataaaaatcctctgtgctctgcctattcattccctcctccttgctcatccctaagcaactactgatcttttcactatctctatagttttgccttttccagaatgtcatgtagttggacttatacagcatgtagccttttcagattggcttatttcacttagtggtttgtatttaaggtcctcccatgtctttttctggctcgattgtctatttctttttagtgctgagtaacatttcactgtttggttgtacaactgttcatttatctgtttgcctactaaaggatatcttggttgc

SEQ ID NO: 918843 - DNA, 590 bp, Homo sapiens
ggaacttcctagaggcttggaggctcacaagacaggtagatgtgggaaagtttggaacttcccagagaattgctgaatggctttcatgaaaatgctgatagagatatggacaatgaagtccaggctgaggtgatctcagatggagatgaggaacttgttgacaactggaataaaggtgattcttgccctgtgttagaaaagagactggcaacattttacycctggccaagagatctgtggaactttgaacttgagaaagatgatctagagtatctggtggaagaaatttctaagtggcaaagcattcaagaggaagcagagcataaaagtttggaaaatttgcagcctgacaatgcagtagaaaagaaaaacccatttaccagagagaaattcaagcctgctgcagaaatctgcataagtaacaaggagcagaatgttaatcaccaagacaatggggaaaatgtttccacctcatgtcagcaacattcatggcagcccctcccatcacaggcctggagacttaggaggaaaaatggtttcgtgggctgcgcccaggacccccctgctctgtgcagccttggggtgtggtg

SEQ ID NO: 918844 - DNA, 597 bp, Homo sapiens
ggccattctctgccctttaaatctggccctggctgtgtgacttgctttggtcaatgcgacatcagccgatgggatgcaaagagaggcttgagaagagcttgatcatctgtgcctgctgcttctagaacttcatcaccatgggagccagcctagggtgcctccaaagggtatgaggccacaaggagagagaccctgatgtcccagccggggcctcagacacacagccatccggcccttgctgagccagtccagccaacacacagaaatgtaggaaagactaaatattccattccattccattggagcccttccccttctctttccagcccaggytggagtgcaatggcatgatcttggctcactgcagcctccacctcccaggttcaagtgattctcctgcctcagcctcccaagtagctgggactacagatgcgcaccactacggctggctaatttttgtatgtttagtggagacaaggtttcaccacgttggccaggctggtctccaactcctgacctcaggtgatccgcctgccttggcttcccaaagtgctgggattgcaggcgtgagccaccacacccagcctcatttcaggg

SEQ ID NO: 918845 - DNA, 597 bp, Homo sapiens
ggccattctctgccctttaaatctggccctggctgtgtgacttgctttggtcaatgcgacatcagccgatgggatgcaaagagaggcttgagaagagcttgatcatctgtgcctgctgcttctagaacttcatcaccatgggagccagcctagggtgcctccaaagggtatgaggccacaaggagagagaccctgatgtcccagccggggcctcagacacacagccatccggcccttgctgagccagtccagccaacacacagaaatgtaggaaagactaaatattccattccattccattggagcccttccccttctctttccagcccaggttggagtgcaatggcatgatcttggctcactgcagcctccacctcccaggttcaagtgattctcctgcctcagcctcccaagtagctgggactacagatgcgcaccactacgsctggctaatttttgtatgtttagtggagacaaggtttcaccacgttggccaggctggtctccaactcctgacctcaggtgatccgcctgccttggcttcccaaagtgctgggattgcaggcgtgagccaccacacccagcctcatttcaggg

SEQ ID NO: 918846 - DNA, 575 bp, Homo sapiens
aaagacatctttttgtcttttatgctggggatagaggctttttgatggtgtttttattttaagtatctataggcttttatccatatgagtatgatataattttgttcctgctgtaaccatttgcttattcttttaattgttccactatgaaaaaatktgatgagtgcaaaaaaaaaacaaaaaaaaaaccaaaaaaacaacaacccataaagtccagaagtaaagccttgcttaatcattgtaatccactgaatatacaactgatagtgtaccaggctgaagatgttgccaaatgatctatgcatgttgaaaggtatgccagcttaaaccttgatggattattaccaatcccctaagggagtaccaaattttcagtggacacctgacagccattaagcaagtctggctgcctagaaatactcactcagtttctaaggttgatggaatgtctgtacttagggaagttgatgacattctgtgtctagcccatttttcatcactagcagagtgacacatgatttcataattggttcagtattattcactttcccttatgtggctatgaacaagaaaac

SEQ ID NO: 918847 - DNA, 575 bp, Homo sapiens
aaagacatctttttgtcttttatgctggggatagaggctttttgatggtgtttttattttaagtatctataggcttttatccatatgagtatgatataattttgttcctgctgtaaccatttgcttattcttttaattgttccactatgaaaaaatttgatgagtgcaaaaaaaaaacaaaaaaaaaaccaaaaaaacaacaacccataaagtccagaagtaaagccttgcttaatcattgtaatccactgaatatacaactgatagtgtaccaggctgaagatgttgccaaatgatctatgcatgttgaaagstatgccagcttaaaccttgatggattattaccaatcccctaagggagtaccaaattttcagtggacacctgacagccattaagcaagtctggctgcctagaaatactcactcagtttctaaggttgatggaatgtctgtacttagggaagttgatgacattctgtgtctagcccatttttcatcactagcagagtgacacatgatttcataattggttcagtattattcactttcccttatgtggctatgaacaagaaaac

SEQ ID NO: 918848 - DNA, 667 bp, Homo sapiens
tgagccatgaaactctttctcctgaccccatctgtgcagaggaatggctgacatggtgtgtgcccaaaggttaaagcactgagaatgtgccctgggctggagaggaccatggtgcttcccagaaccactgaagcaagcctgcaatgggaaggtcagcacacaaaaggcatttgggctaaattcagtagtatgctgaaggtatgaatcaaggaatactcccaaaatactatgcaaaaggggaaaggaagcagaaaagtattaggctacttagaagatggattcagagagccaagatggccgaataggaacagctcmggtctacagctcccagcctgagtgacgcagaacatgggtgatttctgaatttccatctgaggtaccgggttcatctcactagggagtgccaggcagtgtgtgcaggacagtaggtacagtgcactgtgcgcgagctgaagcagggcgaatcactgcctcactcaggaagcacaaggggccagggagttctctttcctagtcaaagaaaggggtgacagacggcacctggaaaatcgggtcactcccaccccaatactgcgcttttccgatgggcttaaaaaacggctcaccaggagattatatcctacacctggctcagagggtcctatgcccacagagtcccggtgattgc

SEQ ID NO: 918849 - DNA, 554 bp, Homo sapiens
tccccaggggcaagttgggatttgaaagctctgaactctgacctggaccccttgcctaagtccaccccctttcgctaaggccgacgggatacgtagttctaaagcggtggaaagtcgcagagctccgcctcttagaaaccacatatcccaggaggcaatgcgcaggggagcacgggtaagagggcaggtgttagaatcgctggaaaggcgggcgccctttgtttcaagaccattggctattggaggggcggtacatgggaggccactggccaatgggaagcacggaagggggcaacgagggtaaagctgcrtggtcaccttggataccaaggacgcgacttcttgtttggagagggtggagctttggagtgagacccaggaggccaaatcccaaagagaaaaataggagcctaaataaggatcaggaccaagggaaggggtaagaaactgcgctttttaagttgacaactaggtgcaaactaggagtaacctatgtggatgtcaagatccaagcttcactaacctagtgcgggcatctccagggcatggagaat

SEQ ID NO: 918850 - DNA, 547 bp, Homo sapiens
tttaatccttttaaagcgtgctgcgagatgggatattggcattgagtggggtaagggtgatcagattttaatgagatggtaaggggtggatgatccgtcgccaaggagggagtagaggcgtcctatacttgtggtttaaggtggggagatacaaggggaggatgtgaaggaggctttgaactaggggaaaaggtggcaatgagatgtggctgtagcccaggaatagtcagggaagcagatgatttagttaaaatatctcagcctaataagggaactgcgcaggtggggataactaaaaggagtgcttaaaagagtattgtctaagttggcaccagagttggggagttttaagaggtttagaagcctggccrtcaatacccacagcagttatggaggcaaaggaaacagggctttgaaaagaaggtaatgtggagtgggtagcctccgtattgattaagaaggggacggacttaaccttccactgtgaacgttacttaaagcatctgtgatggtctgggaaggttccgaggtgattaggcagcgtcgg

SEQ ID NO: 918851 - DNA, 602 bp, Homo sapiens
atcctttgggtatatacccagtagtgggattgctgggtcaaatggtatttctagttcaagatccctgaggaatcgccacactgccttccacaatggttgaactagtttacagtcccaccaacagtgtaaaagtgttcctatttctccacatcctctccagcacctgttgtttcctgactttttaatgattgccattctaactggtgtgagctggtatctcattgtggttttgatttgcatttcgctgatggccagtgatgatgagcattttttcatatgttttttggctgcataaatgtcttcttttsagaagtgtctgttcatatccttcacccactttttgatggggctgtttgttttttttcttgtagatttgtttgagttcattgtagattctggatattagccctttgtcagatgagtagattgcaaaaattttctcccattctgtaggttgcttgttcactctgatggtagtttctttggctgtgcagaagctgtttagtttaattagatcccatttgtcaattttggcttttgttgccattgcttttggtgttttagacatgaagtcgttgcccatgcctatgtcctgaatgata

SEQ ID NO: 918852 - DNA, 585 bp, Homo sapiens
ctgataagttgcttatatattatataatatctggaaccttcactaaaactatgtatagatataaactcaaaaccactgcatataaatcaaaatggaatcataaaatgtacactgaatccatataaatcaaaatggaatcataaaatgtacactgaatccacaaaaaracaggacaaagaaaccaaaacccagaaagcaaacagaaaataaacagagaaagaattaagcgctgaaataccaataattacattaactaagaaaggactaaatatactgactaaaagatagaggttagcagcatggacaaaaataacaagctattaatatgttgtacataagaaacttgcttcaaatataatgatataggcagatttaaggcaagagtatagaaaaaaggtatactatgcaagcattaataaaaagaaagcaggggtgtctatattgatttcatgtaaaatagatttcaaagtgtattagttcattctcacattgttataaagaactatctgagactgggtaatttataaagaaaagaaaagaagtttaattggctcatggttccacaggctgtataggaagcatggc

SEQ ID NO: 918853 - DNA, 585 bp, Homo sapiens
ctgataagttgcttatatattatataatatctggaaccttcactaaaactatgtatagatataaactcaaaaccactgcatataaatcaaaatggaatcataaaatgtacactgaatccatataaatcaaaatggaatcataaaatgtacactgaatccacaaaaagacaggacaaagaaaccaaaacccagaaagcaaacagaaaataaacagagaaagaattaagcsctgaaataccaataattacattaactaagaaaggactaaatatactgactaaaagatagaggttagcagcatggacaaaaataacaagctattaatatgttgtacataagaaacttgcttcaaatataatgatataggcagatttaaggcaagagtatagaaaaaaggtatactatgcaagcattaataaaaagaaagcaggggtgtctatattgatttcatgtaaaatagatttcaaagtgtattagttcattctcacattgttataaagaactatctgagactgggtaatttataaagaaaagaaaagaagtttaattggctcatggttccacaggctgtataggaagcatggc

SEQ ID NO: 918854 - DNA, 585 bp, Homo sapiens
ctgataagttgcttatatattatataatatctggaaccttcactaaaactatgtatagatataaactcaaaaccactgcatataaatcaaaatggaatcataaaatgtacactgaatccatataaatcaaaatggaatcataaaatgtacactgaatccacaaaaagacaggacaaagaaaccaaaacccagaaagcaaacagaaaataaacagagaaagaattaagcgctgaaataccaataattacattaactaagaaaggactaaatatactractaaaagatagaggttagcagcatggacaaaaataacaagctattaatatgttgtacataagaaacttgcttcaaatataatgatataggcagatttaaggcaagagtatagaaaaaaggtatactatgcaagcattaataaaaagaaagcaggggtgtctatattgatttcatgtaaaatagatttcaaagtgtattagttcattctcacattgttataaagaactatctgagactgggtaatttataaagaaaagaaaagaagtttaattggctcatggttccacaggctgtataggaagcatggc

SEQ ID NO: 918855 - DNA, 537 bp, Homo sapiens
tgactcacagttccctatggctggggaggcctcaggaaacttgtaaccatggcagaaaatggaagcaaggtatgtcttacatggtggcaggaggctgggggagtggtgccacactttaaaaccatcagatctcatgagaactcacttacgatcatgacaacaacaagggagaagcctgcccccataaatcaatcacctcccaccaagcccttcctccaacacttggggattacaatttgagatgagattaggrtgggaacacaaagcttaactatttcattccaccctggcttctcccaaatctcatgtcctcacatttcaaaaccaatcgtgccttctcaacagtccctaaaagtcttaactcattccagcattaactgaaaagtccaagtccaaagtctcatctgagacaaggcaagtcccttttgcctatgagccagtaaaataaaaaagttagttacttccacgatataatgtgggtacagacatcgggtaagcgctcccattctaaatgggagaaattggccaaaacaaagt

SEQ ID NO: 918856 - DNA, 630 bp, Homo sapiens
cggagtctcctcagatccccccagatagaaccccactaaaggccacacacctttgctgggaagaaaagcagagggcctttcctgtcgcttgcatcatctttcctgctctggttttatcttggaaaccttgggatcgaagaaattttcccagttcgttttcttcttgagacaagactgatgaagaaaagaccaaaaggagccatgaacaatgagcattttgattgcaaagggaacaagaaagacaaatcacaaggtcctctctcttccagaggcgaagacgagatgaaattaaatctaagcggcaggctacagggtaagctccccctaccccccatttaactttcaggctgttcttccatttmcaatacgagagatcaaattcacttgaatacatctgtcagtgagtttggtgccctgtaatcagaactagaaaatgacctctgtactgaaacgtaagcccatagtgtgcggcttcgagctgaaataaaggagttgggtttgtcaagtatgactgtgggaatcttttgtggctgcctaggatgcagtgctagctgcctctcattattctctcctgctgacttttgatctctgctttttgagttacattctattccattgtaaagcaattca

SEQ ID NO: 918857 - DNA, 574 bp, Homo sapiens
atttcagagataactttgttgttaatgcttttaaaacagtgtgactatatgaaaatattgttctgtaggaacctaatatccaatgcaaaaaacattcatgaagaaatgttgtcaacaaaatgtcatcaacaaatcaactgtatgtgccttctgtctsttatcttaaaaggaacaaaattggatatcagagagtgaagataatcacattaaaaaaaaacctgaaggtaaaaagcccaagatacaaactgagaaaactcttttataattgggaaaataaatggcatgtccatatccatgggagatccaaacagaattctcctaatatgatacttgctttgaaagataaataagctatgtatattattggtaaaattattagagactctcctcccaacgcctgaagacacagacaaacactcttagtttcctaagcatatgaaatgatgtatcaagacaaaataccctgctatttcttactatttgatcaatattcatactgatgtcatacttacaacatatcctcttttgatagagtacaattgctttcgataagtccagacaggttctctgaatt

SEQ ID NO: 918858 - DNA, 698 bp, Homo sapiens
tccctgcccccaccccagccccgaaactggcggcgtctctgagccgcgggttcccagggcggcctgggaggggaatggcatgtcttgatgtgtttgcagggagaagcagcccacgtcccttttgataagcctaatgtgttcacttaataaccggtttaggggagcctggtggagatgctgagattgacggagggggtgggaatccagcccctgccttatatccccacttcggaaaatagagtgggggctctgggctagcaaggaycattttgccagcttctcggacaagaggcttcaggcaggtgaggggcccgcacattacatggctctcctgtctgggagttctgcccccaagctgctctcactgggagcccccactgtgccctcaagcagctcctcacttcttccctaggcaaggagaggcctctgggcccagggctcccactcaacccctgcagtccggcctaggccgaccagtcggacaggtgcaggcggcggggccctagcacgctggagtgcgacactccattccggggccttccagccctttcagaaacccccctgccctgtgatcccacccacccgtatctccgtttgggctctttcaagctcagaggcattacccgcctttagagatttccccacccctcccctatctttcacaaccccagagactgggcagggcctgcacacccctc

SEQ ID NO: 918859 - DNA, 759 bp, Homo sapiens
agacgcatcaggaccaaggcacgactccccacttggagaaatcaacggggaaagagacggaggcaaaggagaaccatctcactgggagaggcgacgctgtttgacacatcgtccccgtacctcccaaagccactgccctcccacacctgggcaacagtggccccaaccccaggcccagccctcctgcaggaaggaagaggactgaatggagggcgtggcaggctgaaaggacgtggcctcctcaaaccccttggtaaacggcccctggggccacctggcagggaggggctggcacaccaggaagtagcctcctcctgggagttcagccagagcccaggtcccgtcccccagtggcctccagagccaccttttcagaaaaagtacatcccgcccaccctsttccccccgcctcctccctgagcctcctgctggcctctcacctagaagcagggggtagtcctcggcctccagccagggggtgcagacctggatgtgctggaagtgcttctggtggatgaggcggctataatactccctcagaggccctttgccttcacagagaagagcagacactgccatggacccatctctgtccctgccacgtggccccaggcccaagacactcccccctaggagggatccctttcccagaagctccacccctcagcagctccagtcaggccccatccgggcccttccagaagcaacccaggagccctgagacctgcaggggtgtgtgcaccctgacccctgacgcat

SEQ ID NO: 918860 - DNA, 549 bp, Homo sapiens
gagaccattctggctaacacagtgaaaccctgtctctactaaaaatacaaaaaaattagtcaggcgtggtggcgggtgcctgtagtcccagctactctggaggctgaggcaggagaatcgcttgaacccggaaggcagagcttgcagtgarctgagattgcaccgctgcactccagcctgggcgacagagcgagactccgtttcaaaaaagaaaaaaaaaaaaaaaaaaagcaaagtcaaggagactgttgagtggagtgggaggataaagtcttcgagctagaagccagacaggaccccaggttcaaatccagctctgtcctgaccggctcacaagcttcgatgggggccaccattctgaatctcagtttccccatgcatagaaaacggggatgcttacgggccctgcctcaaggcccagaagaccactgtagaaactgggggagaatgaagcccctggcacgctgcccagcccagcacatatgcacagtggacccctctccaccctccgtctttgctgtttaggggggatttgtgcccagcccaggt

SEQ ID NO: 918861 - DNA, 676 bp, Homo sapiens
atgtcccaataccaaggttgagaaatcttagactggagattagagcttaaacagaatttggtgagagatggggatgtggaggttggcattaacttggtcatcaagactcccgtgagactttgagactatcctgtgagcaatgggggactgttattattacacaaacaaacaaaaacccaggtatgatatggtcagagttgcatgtgagaaggaaaagattatcctggctctaggcagaagatggatggaagatacgcaagactgggagggaacaaaagattggcatattagtccattctcacacactgctgtaagaaatacctgagactgggtaatttataaaggaaaggaggtttaatagactcatggtttcacatggctggggaggcctcacaatcatggtggaaagcaaaggaggagcaaaggcaggtcttacatggcggcaggcaagagagcatgtgcaggggaactgctctttataaaaccatcagatcccatgagagttattcactatyatgagaacagcacaggaaaaaaaaaaaaaaaaaaaaaaaaacacccccatgattcaattacctcccactgggtccctcccatgacacatgagggtgatgagagctacaattcaagatgaaatttgggtggggacacagccaaaccatatcaactggtaagt

SEQ ID NO: 918862 - DNA, 775 bp, Homo sapiens
atgtgactatgttagtctattcttgcattgctataaagagatcctgaggctgcataatttatacagaaaagaggttgagaccaggcacagtggttcatgcctgtaattccatgcctttggaaggccaaggcaagaggatcacttgagtccaagagttcaagaacagtctgagcagcatagtgagaacctgtctctacaaatatggtggcacacacctgtgattgcagatacttgagaggctgaggtaggaggatggctttagcccaagagttgaaggctgcagtaagccatgatcaagaaaggccccatctcaaaaaaagaaagaaagaaaagaggtttaattggctcacagttctgcaagctgtataaaaagcatggtgctggcatctgcttctggtgagagcctcgggaagcaaaggaggaaatgggccacatggatcaagtgggagagagaagggaagaggtgccacatacttttaaacaaccagatctctcaagaactcagtcactattgcaaggacaacattaagccattcatgaaggatccatccccatgacccaaacacctcctaccaggccccatctccaacactggggattaccatgggaccagagagaaggttygtcaggatgagcccgcatggacaagtgcccaaaaggcttcctgtaagaggctacatcttacccatcagctcttaaacaaaagtttgttgaaaatctctccacttctctcgttatcctttgtagccacagtgatcagccatgatcatctttg

SEQ ID NO: 918863 - DNA, 589 bp, Homo sapiens
ttgctctgtgattaccatgaagcttgcaaataacatcttataaccagttattttaagctgatgacaacttaaatctgatcacaatgaaaagaaaataaaaagcaaaaactgaaaaattctatattttaaccccgtctcccccctgcttttttattttttgttgtctctacttatatctttttgtactgtctatctcttracaaattgttgtagttattatttttgataggtttttcttttagtcttcagggctaaagatatgagtgatttaaacaccgcaattacagtgttagggtattctgtatttgtctgtgtacttatgttcactggtgatttttataccttcagatttcttattgctcattagcattcttctcttttagattgaagaactccctttagcatttcttgtaagatagatctggtgatgatgaaatcccttggcttttgcttgccttgaaaagtctttatttctccttcatgtttaaaggataactttgctggatataatactctaagttggaagttttgtttgtttctttgttttcttcagcactttgaatatatcatcccattccttcatgaccta

SEQ ID NO: 918864 - DNA, 589 bp, Homo sapiens
ttgctctgtgattaccatgaagcttgcaaataacatcttataaccagttattttaagctgatgacaacttaaatctgatcacaatgaaaagaaaataaaaagcaaaaactgaaaaattctatattttaaccccgtctcccccctgcttttttattttttgttgtctctacttatatctttttgtactgtctatctcttgacaaattgttgtagttattatttttgataggtttttcttttagtcttcagggctaaagatatgagtgatttaaacaccrcaattacagtgttagggtattctgtatttgtctgtgtacttatgttcactggtgatttttataccttcagatttcttattgctcattagcattcttctcttttagattgaagaactccctttagcatttcttgtaagatagatctggtgatgatgaaatcccttggcttttgcttgccttgaaaagtctttatttctccttcatgtttaaaggataactttgctggatataatactctaagttggaagttttgtttgtttctttgttttcttcagcactttgaatatatcatcccattccttcatgaccta

SEQ ID NO: 918865 - DNA, 766 bp, Homo sapiens
agccagggagaggatgattaggcatgtaatgttcagaggctacttgaggggaaagggagaacaaaaaaaccccaccgtaatgaaaggcctcaaagaattaacaataaaactatatttgatccagcaatcccactgggaaactacccaaaggaaaagaaataattatagccaaaagacacctatactcacgtttatcacagcactattcataatagtaaagttacggaatcaaactaagtgtccatcaatgaatgattggataaaggaaatgtgatatatatacacaatggaatattattcagccataaaaagaatggaattatgaattttgcagcaaaatgaatggacctggaggccattaagtgaaacaactcagaaacaaaaagtcaaatactgcatgttctcamttataagtgggagctaaataatgcattcacatggacatagaatgtggaataatcactggagacacagaagggtggaagggtggaagaggggtgagggataagaaattacttaatgggtaaaatgtacactatttgggtgatggatacactaaaagcctaaacatcaccactatgcaatgtagccacgtaacaaaactgcatttgtccttctcaaaattatacaaatataactgtaaaaaaaaaaaaaaagaaaataagagctaaaggagtaagaaagaaaaagtggctagaaatataattatgaatccaagataggagagcccaagtatggggaggccaggacagaaactgccagacaa

SEQ ID NO: 918866 - DNA, 607 bp, Homo sapiens
taaaaatcataaccacatgtacacttcattactttaagaaatgttacttttgaaagaaaaaatagtcatatccattgactctcaaatattcttatgagttatttatactaaatgaatgaaaaaggcagagaatacaactatgtataaaatatgagcccaattttttaagasacacttatgtatagataggcatagagagacagatgggttaagagatattaagagaggaatgatgagagaatagaaaaaaactttaggggctgggtgtggtggctcacgcctgtattcccagctctttgggaggccaaggagggtggatcacttgaggtcaggacttcgagaccagcctgaacgatatagtaaaaccctgtctctactaaaaatacaaaattatctgggtgtggtggcatgcatctgtagtcccagctgctggggaggctgagacagcagaattgcttgaacccaggacgtggaggctgcagtgagctgagattgtgccactgcactccagcctgggcaacagagtgagactctgtctcaaacaaaaaaaaaaaaaaaaaaaaagaaaaagaaaaaaatctttaaggagatatgcataaatatttca

SEQ ID NO: 918867 - DNA, 607 bp, Homo sapiens
taaaaatcataaccacatgtacacttcattactttaagaaatgttacttttgaaagaaaaaatagtcatatccattgactctcaaatattcttatgagttatttatactaaatgaatgaaaaaggcagagaatacaactatgtataaaatatgagcccaattttttaagacacacttatgtatagataggcatagagagacagatgggttaagagataktaagagaggaatgatgagagaatagaaaaaaactttaggggctgggtgtggtggctcacgcctgtattcccagctctttgggaggccaaggagggtggatcacttgaggtcaggacttcgagaccagcctgaacgatatagtaaaaccctgtctctactaaaaatacaaaattatctgggtgtggtggcatgcatctgtagtcccagctgctggggaggctgagacagcagaattgcttgaacccaggacgtggaggctgcagtgagctgagattgtgccactgcactccagcctgggcaacagagtgagactctgtctcaaacaaaaaaaaaaaaaaaaaaaaagaaaaagaaaaaaatctttaaggagatatgcataaatatttca

SEQ ID NO: 918868 - DNA, 489 bp, Homo sapiens
tggtttaaaaaaataggcaaaagacataaacaattcaacagatataaatatatctttaaacattacaagatgttcaaactctgtcattattagataaaggcaatttataataccacctttaaaaaatgctacctttgaatgttaccrtttcataactattaaatttgtgaaaatttaaaaagcatgaataagagcttttggtgagactgtggggaaacagatactttcatgcattgggatggcaaattggtaaagcccatatgaaggagaagatggcaagatggaacaaaactacacatgcacttacctttgacccagaaatctcacttctaggaatctatgctgaagatacatttctaagagaagaaaaacacacttgcacaagtttattcatctcagcattattttaaattgtaaaatattgaaaacaacctagatgcccatacatagcagattagtggaatacactaagaaaaattcacacaaggg

SEQ ID NO: 918869 - DNA, 582 bp, Homo sapiens
cattctccgtccagttttattcccttgctggtgaggagttgtgatcctttggaggggaagaagagttctggtttttggaattttcagcctttttgtgctgattttttcctcatcttcgtggatttatctacctttggtctttgatgttggtgaccttcagatggggtttctttgtggacatccttttcattgatgttgatgctgttcctttctgttgggtagttttccttctaatagtcaggcctctctgctgcaggtctgctggagtttgctggtggtctactccagaccctgtttgcctgggtatcaccagtggagactgtagaacagcaaagattgctgcctgttccttcctcytaaagcttcgtcccagaggggcacccgccagatgccagccagagctctcctttatgaagtgtctgttggctcctactgggaggtgtcttccagtcaggaggcacacgggtcagggacccccttgaggaagcagtctgtcccttggcagagcttgagcactgttctgggagatccgctgctctcttcagagctggcaggcaggaacatttaagtctgctgaagctg

SEQ ID NO: 918870 - DNA, 582 bp, Homo sapiens
cattctccgtccagttttattcccttgctggtgaggagttgtgatcctttggaggggaagaagagttctggtttttggaattttcagcctttttgtgctgattttttcctcatcttcgtggatttatctacctttggtctttgatgttggtgaccttcagatggggtttctttgtggacatccttttcattgatgttgatgctgttcctttctgttgggtagttttccttctaatagtcaggcctctctgctgcaggtctgctggagtttgctggtggtctactccagaccctgtttgcctgggtatcaccagtggagactgtagaacagcaaagattgctgcctgttccttcctcctaaagcttygtcccagaggggcacccgccagatgccagccagagctctcctttatgaagtgtctgttggctcctactgggaggtgtcttccagtcaggaggcacacgggtcagggacccccttgaggaagcagtctgtcccttggcagagcttgagcactgttctgggagatccgctgctctcttcagagctggcaggcaggaacatttaagtctgctgaagctg

SEQ ID NO: 918871 - DNA, 612 bp, Homo sapiens
atagcaggctatgcaaagtgagttcttcgtagcctcaccataatcataattgcaaggaacctaattactttccactctccctcagtcattaagtttcacaggcccaaaaactgtgaatcaggaaccttcacaagttccccggaaggtgaaaaaaatatctgcaaaagaagtgaatccagcccaagtttcataaccttaggcaaatccaggaagagtgacggcacaattacaaagagtaactgcatagaatatctgttcagttaccactcttacctggcttgtaaaacaacagcagaaggtgttaacaaatgcttgtttaccaataagtccatamtgcagcaaaattcctggccctactgaaaatgtagtaaaagcctttctacaacaacttgggtccttaaccatggaacaaaaaaaacccatgtggtcaggactgaccatgataatactaattagaaatgttttcagtcttgtataccaaacaggtctgtcctggagacaagcatctttgctagtttcataaaaatgtttgtttccagatgctattttggacatttcttctcttccatatttttattcagaaaggcagttttttgtttcccctgagtactt

SEQ ID NO: 918872 - DNA, 562 bp, Homo sapiens
gatacattaatatgcaaatgtgcttttcataagaacatatcacaggttgcacacgctcaaattacacttgggaaaatgatccaacataactgacacacactattacaactccgttcaaacacctatcccagggtcccacagccagggtaagggcaggggaactgtgcaaaaccatgctcagtagagcccaacagagcctggaaaaagcaccaggaatctgcaagacccagctctctgaccctgaagccacttcacactcagcttcaagataagcctcatatgacattgataaattattaaatctgttgatkgcatggcagatcaggagccatagagtaaaaggcactctacatggatataaaaacacctttaggcaagagacagatgaactcaaggtgagatatcaacattaacacaccacatgtttttacactttaccatatacaatttcaaaacatttacaatgagacatgccttaaagttttggtaattaaggaaccctcacacacagagcagtcatgagagagattaatcattcagcaattatttactgagttcaaca

SEQ ID NO: 918873 - DNA, 562 bp, Homo sapiens
gatacattaatatgcaaatgtgcttttcataagaacatatcacaggttgcacacgctcaaattacacttgggaaaatgatccaacataactgacacacactattacaactccgttcaaacacctatcccagggtcccacagccagggtaagggcaggggaactgtgcaaaaccatgctcagtagagcccaacagagcctggaaaaagcaccaggaatctgcaagacccagctctctgaccctgaagccacttcacactcagcttcaagataagcctcatatgacattgataaattattaaatctgttgattgcatggcagatcaggagccatagagtaaaaggcactctacatggatataaaaacacctttagkcaagagacagatgaactcaaggtgagatatcaacattaacacaccacatgtttttacactttaccatatacaatttcaaaacatttacaatgagacatgccttaaagttttggtaattaaggaaccctcacacacagagcagtcatgagagagattaatcattcagcaattatttactgagttcaaca

SEQ ID NO: 918874 - DNA, 511 bp, Homo sapiens
aaagaatttacaacccagaatttcatatcgagccaaactaagcttcataagtgaaggagaaataaagtactttacagacaagcaaatgctgagagattttgtcacaaccagccctgccctaaaagagctcctgaaggaagcastaaacatggaaaggaacaaccagtaccagccactgcaaaaacatgccaaattgtaaagaccatcaaggctaggaagaaactgcatcaactaatgagcaaaatcaccagcgaacatcataatgaaaggatcaaattcacacataacaatattaagtttaaatgtaaatgggctaaatgctccaattgaaagacacaggctggcaaattggataaagagtcaagacccatcagtgtgctgtattcaggaaacccatctcacgtgcagagacacacataggctcaaaataaagggagggaggaagatctaccaagcaaatggaaaacaaaaaaaggcaggggttgcaatccaagtctctgataaaacagac

SEQ ID NO: 918875 - DNA, 639 bp, Homo sapiens
agccctaaactgtcacaggtaataataccctgagtgtctacctcaaaggtaagtagctacatttttgtgcctgagaaaatacctagagggtcacaggatggaacagctatgtgtatatttgtgagtctatttgagcaatttggttttaattaaactatgtttgagtaagttaatggttggggaaagtaattgtttcggttcaccagtcaggattattaatgataaccatagtagcaatgtttatgagcacttgactgtttctgttctggagtttttttgtgaattaactcaaacaaccgtttgaaattggtggtgttattaccaccagcatttgacagcgaggaattgggcacaragaggttaagtcatctgccagtggtctcataactaggaaatggtggagccagggttggaagcaatgcaacagcttgtgttgtctcaaatgaaatgctttctgtggttcctaggcttacagggaatgactaagacattgtttggcctcaaaaaagcaactaataatttgtgtatttatttctgttaactgtatacttatttttgttaacttatttcatgtctctcctgctaccctataagcttcctgaaagccaagtttatcttctttttgctcacctatatatt

SEQ ID NO: 918876 - DNA, 639 bp, Homo sapiens
agccctaaactgtcacaggtaataataccctgagtgtctacctcaaaggtaagtagctacatttttgtgcctgagaaaatacctagagggtcacaggatggaacagctatgtgtatatttgtgagtctatttgagcaatttggttttaattaaactatgtttgagtaagttaatggttggggaaagtaattgtttcggttcaccagtcaggattattaatgataaccatagtagcaatgtttatgagcacttgactgtttctgttctggagtttttttgtgaattaactcaaacaaccgtttgaaattggtggtgttattaccaccagcatttgacagcgaggaattgggcacagaraggttaagtcatctgccagtggtctcataactaggaaatggtggagccagggttggaagcaatgcaacagcttgtgttgtctcaaatgaaatgctttctgtggttcctaggcttacagggaatgactaagacattgtttggcctcaaaaaagcaactaataatttgtgtatttatttctgttaactgtatacttatttttgttaacttatttcatgtctctcctgctaccctataagcttcctgaaagccaagtttatcttctttttgctcacctatatatt

SEQ ID NO: 918877 - DNA, 656 bp, Homo sapiens
agcgcggtggctcacgcctgtaatcccagcactttgggaggccaaggcgggtggatcacgaggtcaggagtttgagaccagcctggccaacatactgaaaccccatctctactaaaaatacaaaaattggctgggcatggtggtgtgcgyctgtggtcccagctacttgggaggctgaggcaggagaatcacttgaacccaggaggtggaggttgtggtgagccaagatcgtgccactgcactccagcctgggcaacagagagagactctgtctcaaaaataaaaaaacagtctgactttctaccacctcttccctgtccttcctaattttttgcttataattttttattatattaatactttgtcaaaaaatacttcgtcaggttttatgatatttacattctattttatccatgatttccctgttgatttgtcttaatttcagtatttaagtatattcattgttcactgctctatttctgacctgttcattttgatttgcttatatagatttcatcatgtatcagttagcatttacttgtgttacaaactacccccaacgattatttgtttattcgatcacaacctgtgggttggtgaatttggctgggttcaactgggaggttttgtggatctttcctggctcacttatgcaa

SEQ ID NO: 918878 - DNA, 680 bp, Homo sapiens
tattttgaaatcagtgtgatgcctccagcttttttctttttattcaacattcttttgtttatctgaagatattttgcatttccatgtgaattttaggctggtttttttttgtatttctatgaagaacatcttttgtaatttaacatggattgcactgactctgtaagtcatatattgggtgacacagatattttaacaatattctttctagtgcatggacataggatagctttctatttacttgcatttgctttaatatctttcatcaatgtgttttatagttttcattgtgggatcttttgcctttttggttaagtttatccctaggtatctttttttggtgagtactgttaatgaaatagctttcctgatttttcttaggtgtttcactattggctcattggtgcgctactcatttttgtatattgatattgtgtcttgcaattatactaaatttattatttctagtaaratttttagtggaatctttagggttctctattatatgatcatgttacctgaagacagagaaaatttgactcctttttttccagtttggatgccttttattcatttgtctaattgcattctcttgcctaattgctgtagtgaggacttccagtactataatgaacaaaagtggtaaaagtagccacgtttgttccagattttagaggaag

SEQ ID NO: 918879 - DNA, 685 bp, Homo sapiens
atatttttaaaattgcattgattttcctcaaaacagctattttttacctccctctctgaatagtttaacatctttatctctcctaggttagtcactggtgacttgtttattgtttggtgaggtcatacttccctgaatgttcttaatgcwtttgggcctatgttcatgcctgggaattgaataagtcagtatttattccagtctttgtagtctggtcttgtttgtacctgtcctcctctagatggtcttccagaaattccaagggtactgactattgagttccctaaggctggggtcactgaagctgtttcagcaccagggtgccctaagctcaggttcactgtgactcttgcaggactgaggtcccagagggccctgatggacttggagaagataagggaggggttccctgggttcccaggcaaagtgcttcattcacttccctcttcttcccattggaaggagtctgggtactaagctttgtggatctgggagaagggtggcttgggcactcccatggccactgcagctggcaccacatacccgaagcccacagcctctaggaccagagcagcactggggcttgtctgagtcctgtggccactactgcctgactgctgctgacttatgtaggtcttgaggccgagctactctgctggtggtgaagctggccagggtttaggtc

SEQ ID NO: 918880 - DNA, 800 bp, Homo sapiens
gctgaccacttcgtgtgatgaggttggaggtctctgccacctccctgtgtgtctcggcatgtcctcaggcctcgtgggggggctcccttgtcctggtctcatgcagaggaaggacgtggtgtgttcagagtcagcttagtggtggcacatagtgactgcccacccagtggaagctgctacctttgcctctttggaccatcgatcctctgttcaggacctcacttcctggaaactttttttattttttgagatggagtcttgctctgttgccaggctggagtacagtggcacgatmttggctcactgcaacctctgcctcctgggttcaagtgattctcctgcctcaggttcccgagtagctggaactacaggcgcgtgccatcacacctggctaatttttgtatttttagtagagacatggtttcatcatgttggccaggatggtctccatctcttgacctcgtgatctgccggccttggcctcccaaagtgctgagattacaggcatgagccaatgcgcccggctggaaacttctgtaccgcaggtcaagcccagcaggaaagtgagaactgctcttttctttatttctttctgtcttttttttttttttttgagacagagtctgactctgtcatccaggctggattgcagttttgcgatctcggctcactgcaacttctgcctcctgggttcaggcgattcttgtgcctcagcctcccaagtagctgggactacagttgcacaccaccacacctggctaatttttgtatttttagtagagatagggtttcaccatgtt

SEQ ID NO: 918881 - DNA, 800 bp, Homo sapiens
gctgaccacttcgtgtgatgaggttggaggtctctgccacctccctgtgtgtctcggcatgtcctcaggcctcgtgggggggctcccttgtcctggtctcatgcagaggaaggacgtggtgtgttcagagtcagcttagtggtggcacatagtgactgcccacccagtggaagctgctacctttgcctctttggaccatcgatcctctgttcaggacctcacttcctggaaactttttttattttttgagatggagtcttgctctgttgccaggctggagtacagtggcacgatcttggctcactgcaacctctgcctcctgggttcaagtgattctcctgcctcaggttcccgagtagctggaactacaggcgcgtgccatcacacctggctaatttttgtatttttagtagagacatggtttcatcatgttggccaggatggtctccatctcttgacctcgtgatctgccggccttggcctcccaaagtgctgagattacaggcatgagccaatgmgcccggctggaaacttctgtaccgcaggtcaagcccagcaggaaagtgagaactgctcttttctttatttctttctgtcttttttttttttttttgagacagagtctgactctgtcatccaggctggattgcagttttgcgatctcggctcactgcaacttctgcctcctgggttcaggcgattcttgtgcctcagcctcccaagtagctgggactacagttgcacaccaccacacctggctaatttttgtatttttagtagagatagggtttcaccatgtt

SEQ ID NO: 918882 - DNA, 652 bp, Homo sapiens
ctaactgcacacagatttaatcaccaggccccgcccattcgcactggcagtgagaggcacacccctgaacctttggggttgttcactgaggacaaacgcggcagcatttagaaagtattcctcgtcccggcagtagacaaaagccacaggatttatggaaagaggaaggaaggcacagaactggggcaaggttctggttttgttctgttattttgttgtcattgttactgtttgtttttctttttttgagacagagkctcgcacttgtcccccaggcaggagtgcaatggcgcactcctggctcactgcaacctccacctcccagcttcaagcgattctcctgcctcagcctctcgagtagctgggactacaggcgcctgccaccacatctggctaatttttgtatttttagtagagatggggtttcaccatgttggccaggctggtcttgaactcctaaccttaggtgatccgcccgcctcggtctccaaaactgttgagattacaggtgtgaaccactgcgcccagccttgtactgtgtttttaaagcaggtttgttcatgcttgttagctgcaagaaaggaaactggaaggagttgagggagggagaaaagcgaatagagggacaccctggagtggaagcctccctact

SEQ ID NO: 918883 - DNA, 652 bp, Homo sapiens
ctaactgcacacagatttaatcaccaggccccgcccattcgcactggcagtgagaggcacacccctgaacctttggggttgttcactgaggacaaacgcggcagcatttagaaagtattcctcgtcccggcagtagacaaaagccacaggatttatggaaagaggaaggaaggcacagaactggggcaaggttctggttttgttctgttattttgttgtcattgttactgtttgtttttctttttttgagacagagtctcgcacttgtcccccaggcaggagtgcaatggcgcactcctggctcactgcaacctccacctcccagcttcaagcgattctcctgcctcagcctctcgagtagctgggactacaggcgcctgccaccacatctggctaatttttgtatttttagtagagatggggtttcaccatgttggccaggctggtcttgaactcctaaccttaggtgatccgccygcctcggtctccaaaactgttgagattacaggtgtgaaccactgcgcccagccttgtactgtgtttttaaagcaggtttgttcatgcttgttagctgcaagaaaggaaactggaaggagttgagggagggagaaaagcgaatagagggacaccctggagtggaagcctccctact

SEQ ID NO: 918884 - DNA, 641 bp, Homo sapiens
tcacaagcaacaagcaaaaaaatacagcatcaaaagatactactgatagagtgaaaagaaccagcgggcatgatggctcaggcctgtcatcccagtgctttgggaggccgaggcaggtggatggcttgaggccgggagttcaagaccagcctgggcaacatagcaaaaagttgtctccacaaaaagcacaaaaatttgctgggtgtggtggggcacagccatagtcccagctactgggagtctgaggtgggaggatcgcctgagcccaggaatttgagctgtagtgagccaagatcatgccactgcactccagcctgggaaacagagcgagaccctgtctcaaaataaataaataaataaataataaaataaaaatagaagcaactccagtgttcactgagagatgaatagataaacacaacwtggtacatccgcacaagggaacactatgcagccttaaaaaggaagcaaattctgacacatgctgtaacatggattaatctcgaatccattatgctaagtgaagcatgccagtcacacacaaagaagtactgtgtgctacagaaaaatgctttagatatgagatctaggagtcaaacatatagaaacagaaagcagaatagtggttgctaggggctgcg

SEQ ID NO: 918885 - DNA, 746 bp, Homo sapiens
gtaggataaaatgtaggagaagatcttcaagagctaggactaggcaaaattttcttagacttgacaccaaaaacatagtctacaaaaggaaaaattgctaagctaagtttcatcaaaatttaaaaatttgttctgcaaaacaccttgttaaaaagatgacaagttacagactaggagaaaatattttcaaacaacatatatgaacaaagcactgttatcttgrgtatataaggaacttgcaaactccacacaaaaaatcaaacaatccaattagaagatgggcaaaagacacgagcagacatttcaccagagatgatacacaatggacaaataagcccatgaaaagatcttcaacttcactagccatttgggaaatgcaaattaaaaccacaatgaaatataatttacacacatcagagtggctaaaataaaaaatagtgacaagacaaaactctgctgaagatataagtgtgaatcactcatatattgctggtgggcatataaaataccacagccactgcaaaagtgtggcagtctcttttttctctttagagacagggtctccctatattgcccaggctggactcaaattcctgggctaaagtgatcctctcgcctcagcctccagagtagctgggactaaaggcacatgctactgttgatgtttggcagtttcttatacgactgaacatggaactaccgtatgacctagcaattacattctgactcatctatcccagagaaat

SEQ ID NO: 918886 - DNA, 748 bp, Homo sapiens
acaaggaggattctcccagcacagtgcaccagctctcctaagggacaaactgcctcctcaagtgggtccctgacccccatgccccctgactgggagagacttcccaacaggggttgacacatacctcatacaggacagctctggctggcatcagrccagtgcccccctgggatgaagattccagaggaaggagcaggcagcaatctttgctgttctgcagcctccactggtgataccaggtgtaacagggtctggagtagacccccagcaaactgcagcagacctgaagaaaaaggttcctggctattagaagaaaaactaacaaacagaaagcaacaacatcaacatcaacaaaaaagacacccacacaaaaaacccacccaaagattatcatcctcaaaaatcaaaggtagataaatccatgaagatgaggaaaaaccagtgcaaaaatgctgaaaattccaaaaaccaggatgcctcttctccaaatgatcacaactcctgtccagcatgggcacaagactggaaggagaatgagattgatgaattgacagaaataggcttcagaaggtgggtaaaaacaaacttgtctgagctaaaggagcatgttctaacccaatgcaaggaagctaagagccttaataaaaggttacaggaactgctaacaagaataagcagtttagagaagaacataaatgacctgatggagctgaaaaacacagcatgagaacttcgtgaagcatacaca

SEQ ID NO: 918887 - DNA, 791 bp, Homo sapiens
gacaaggaggattctcccagcacagtgcaccagctctcctaagggacaaactgcctcctcaagtgggtccctgacccccatgccccctgactgggagagacttcccaacaggggttgacacatacctcatacaggacagctctggctggcatcaggccagtgcccccctgggatgaagattccagaggaaggagcaggcagcaatctttgctgttctgcagcctccactggtgataycaggtgtaacagggtctggagtagacccccagcaaactgcagcagacctgaagaaaaaggttcctggctattagaagaaaaactaacaaacagaaagcaacaacatcaacatcaacaaaaaagacacccacacaaaaaacccacccaaagattatcatcctcaaaaatcaaaggtagataaatccatgaagatgaggaaaaaccagtgcaaaaatgctgaaaattccaaaaaccaggatgcctcttctccaaatgatcacaactcctgtccagcatgggcacaagactggaaggagaatgagattgatgaattgacagaaataggcttcagaaggtgggtaaaaacaaacttgtctgagctaaaggagcatgttctaacccaatgcaaggaagctaagagccttaataaaaggttacaggaactgctaacaagaataagcagtttagagaagaacataaatgacctgatggagctgaaaaacacagcatgagaacttcgtgaagcatacacaagtatcaatagctgaatggatcaagcagaagagaggatatca

SEQ ID NO: 918888 - DNA, 791 bp, Homo sapiens
gacaaggaggattctcccagcacagtgcaccagctctcctaagggacaaactgcctcctcaagtgggtccctgacccccatgccccctgactgggagagacttcccaacaggggttgacacatacctcatacaggacagctctggctggcatcaggccagtgcccccctgggatgaagattccagaggaaggagcaggcagcaatctttgctgttctgcagcctccactggtgataccaggtgtaacagggtctggagtagacccccagsaaactgcagcagacctgaagaaaaaggttcctggctattagaagaaaaactaacaaacagaaagcaacaacatcaacatcaacaaaaaagacacccacacaaaaaacccacccaaagattatcatcctcaaaaatcaaaggtagataaatccatgaagatgaggaaaaaccagtgcaaaaatgctgaaaattccaaaaaccaggatgcctcttctccaaatgatcacaactcctgtccagcatgggcacaagactggaaggagaatgagattgatgaattgacagaaataggcttcagaaggtgggtaaaaacaaacttgtctgagctaaaggagcatgttctaacccaatgcaaggaagctaagagccttaataaaaggttacaggaactgctaacaagaataagcagtttagagaagaacataaatgacctgatggagctgaaaaacacagcatgagaacttcgtgaagcatacacaagtatcaatagctgaatggatcaagcagaagagaggatatca

SEQ ID NO: 918889 - DNA, 748 bp, Homo sapiens
acaaggaggattctcccagcacagtgcaccagctctcctaagggacaaactgcctcctcaagtgggtccctgacccccatgccccctgactgggagagacttcccaacaggggttgacacatacctcatacaggacagctctggctggcatcaggccagtgcccccctgggatgaagattccagaggaaggagcaggcagcaatctttgctgttctgcagcctccactggtgataccaggtgtaacagggtctggagtagacccccagcaaactgcagcagacctraagaaaaaggttcctggctattagaagaaaaactaacaaacagaaagcaacaacatcaacatcaacaaaaaagacacccacacaaaaaacccacccaaagattatcatcctcaaaaatcaaaggtagataaatccatgaagatgaggaaaaaccagtgcaaaaatgctgaaaattccaaaaaccaggatgcctcttctccaaatgatcacaactcctgtccagcatgggcacaagactggaaggagaatgagattgatgaattgacagaaataggcttcagaaggtgggtaaaaacaaacttgtctgagctaaaggagcatgttctaacccaatgcaaggaagctaagagccttaataaaaggttacaggaactgctaacaagaataagcagtttagagaagaacataaatgacctgatggagctgaaaaacacagcatgagaacttcgtgaagcatacaca

SEQ ID NO: 918890 - DNA, 748 bp, Homo sapiens
acaaggaggattctcccagcacagtgcaccagctctcctaagggacaaactgcctcctcaagtgggtccctgacccccatgccccctgactgggagagacttcccaacaggggttgacacatacctcatacaggacagctctggctggcatcaggccagtgcccccctgggatgaagattccagaggaaggagcaggcagcaatctttgctgttctgcagcctccactggtgataccaggtgtaacagggtctggagtagacccccagcaaactgcagcagacctgaagaaaaaggttcctggctattagaagaaaaactaacaaacagaaagcaacaacatcaacatcaacaaaaaagamacccacacaaaaaacccacccaaagattatcatcctcaaaaatcaaaggtagataaatccatgaagatgaggaaaaaccagtgcaaaaatgctgaaaattccaaaaaccaggatgcctcttctccaaatgatcacaactcctgtccagcatgggcacaagactggaaggagaatgagattgatgaattgacagaaataggcttcagaaggtgggtaaaaacaaacttgtctgagctaaaggagcatgttctaacccaatgcaaggaagctaagagccttaataaaaggttacaggaactgctaacaagaataagcagtttagagaagaacataaatgacctgatggagctgaaaaacacagcatgagaacttcgtgaagcatacaca

SEQ ID NO: 918891 - DNA, 553 bp, Homo sapiens
aaatgcccaatagagggcaacctacaaaatacctggccagggtcctcaaaactcacaaggtccaccaggcccactggctcacaccttgtaacgccagcactttaggaggccgaaaggggagggtcacttgagtccaggaatttgagaccagcctgggcaacacaggaagaccctgcctctaaaaataataataaaaaaaaaaattagtttggtgtggtggtgcatacctgtggtcccagctactcagaagcctcagggaggaggattgcctgatcccaggaggtcaaggctgcagtgagttgtgatcatgtcattgcacttcagcctgggtgacagagcaagaccctgtctcaaaacaaacacacaaacaaaaaactcaygggccaggcgcggtggctcacgcctgtaatcccagcactttgggaggttgaggcaggcagatcacttgaggtcaggagttcgagaccatcttgcctaacacggtgaaaccctgtctctactaaatatacaaaaactagccgggcatggtggcactcgcctgtagtcccagcta

SEQ ID NO: 918892 - DNA, 657 bp, Homo sapiens
gggggtttctccatgttggtcaggctggtctcgaactccggacctcaggtgatctgcccgcctcggcctcccaaagtgttgggattacaggcgtgagccaccgcacccggcctttgctcaactcttaatttacagatgacaacaccaagactctcttcactgacttgaatctccccagtgccaccacagcttttagttataaaaataactaaaggagagcagaactctgagaatgctgtgagaataaagtgttttggaattgttaaccagtccttagtttttgctttctatctcattttcattgagaatttaaagtggaatttataacgaatttgtcagayctggtaagcatttgatacatgctagtttagtgactaaccaaacccaaccaaccagtcttctagggctgattaagcaaaatcctgataactgtttatgattattactatacctagggctgccataacaaaatacctcagactgagtagcttaagcagcagaagtctatttcctctcagttctagagactggaagtctgagatcaaggtgttggcagcaacgatttctcctgaggcctctctccttggcttgtagatggccattttcacagggtctttgatttttgcacacgtgtctatagccaatatgttctcttat

SEQ ID NO: 918893 - DNA, 567 bp, Homo sapiens
tttgtcttgatggtgcaatgccgaggaggccaagaatttcatacacggtcaaacaaacttcataagcaaaggagaagatacttttcagacaagcaaatgttaagggaatttatcaccaccagacctgccttaaaagaggtctctaagggagtgttaaatatagaaacaagccaggcgcagtggctcacgcctgtaatcccagcacttcrggaggctgaggcaggtggatcacttgagcccaggagttcaaaaccagactgggcaacatggtgaaaccccgtctctacaaaaaatataaaaattagctaggaatggtgttatgcgcctgtggtcccacccactcaggagaccaaggcaggaggatggcttgagtccaggaagcagaggttgcaatcagcccacatcataccactgtactctgcctgggcagcagagtgagatcctgtctcaaaataaaataaaataaatatgagaacaaaagaccattaccaaccaccataaaaacacacttaagtacatagaccattaacactataaagcaactacaaaatcaaatctagtctgcat

SEQ ID NO: 918894 - DNA, 617 bp, Homo sapiens
atttgtatacagaaaatctggaggaatccacacaaaaaaacattaaagctagtaaatagtctcagcatagtttcagtacacaacatctgtatgcaaaaatgatttgtatttctacatactagcaatgaacgattgagaatgatgctttaaaaaccttatttataataacctaaaaaagaaaatattcagaaataactttgacaagtaagtgtaagacctgtacatttaaaactaccaaacatcaacaaaagaagttaaagacctaagtaaatgkaaatacatcacaggaccgtgagttgaaagacttcatattattaagatgacaatactccccaaacttatctacagattcaattcattccatatcaaaattcattgcctttattgttgttattattattcacaatatttggcagaaacaatcaactgatcagttgggaaatgcaaaggactccacacagccaaacaattttgcaaaaataatattatcaacttaattaatttgttaattaatacgttctacttaaaaacttattacaaaacattattcatcaaactggtaataagaattaatacatagatcaatgggatagataagacactccaaaatatacact

SEQ ID NO: 918895 - DNA, 568 bp, Homo sapiens
cagagaaggtactgctctctgcggctggtcctcccattgtccccagctatcagcaggaaaagtactcttttctgtagcagattggctttttagtctcttcctaagttctttcacaaagcgaagtttttaatttagatttgatccagtttaccagttttccttttatgtcttatacctttggtataaaatgtaataactctttgctacacctragaggcttgaattttctttatgatttttttctaaaatgtttcataaaaagtgttataattttatattacattcaagttcataagcattttgagttaatttctgtagtgtgaggtttatgttaaggctttttttctttagcctattgatgttcacttgccctagcaccatttgttgaaaggctatttttcctccactgatttatgtttgccagctttgtgatgtatcaattggtaatagccataccagtgtggctctatttctaggccttccctttggatccatttttatatgaatctatccctatgccaataccacactgtcatgattactttagctgtgtgtaagtccttgaaat

SEQ ID NO: 918896 - DNA, 568 bp, Homo sapiens
cagagaaggtactgctctctgcggctggtcctcccattgtccccagctatcagcaggaaaagtactcttttctgtagcagattggctttttagtctcttcctaagttctttcacaaagcgaagtttttaatttagatttgatccagtttaccagttttccttttatgtcttatacctttggtataaaatgtaataactctttgctacacctgagaggcttgaattttctttatgatttttttctaaaatgtttcataaaaagtgttataattttatattacattcaagttcataagcattttgagttaatttctgtagtgtgaggtttatgttaaggctttttttctttagcctattgatgttcacttgccctagcaccatttgttgaaaggctatttttcctccactgatttrtgtttgccagctttgtgatgtatcaattggtaatagccataccagtgtggctctatttctaggccttccctttggatccatttttatatgaatctatccctatgccaataccacactgtcatgattactttagctgtgtgtaagtccttgaaat

SEQ ID NO: 918897 - DNA, 677 bp, Homo sapiens
gatgctggaggtagaggaggaaaaacccaaaaatttgtgaatgagagctagacctgtgtggtaaaagcttccaatacttcttcccacacagagggctgccttcagtgcatacatcaggtcactgaggtaggacaagttaagacaatctttttattttatagctattatgaatgcctagggactccaaagagaaactttgtatagtaacacccagtacaaagtatgtaatccaggaagtgaccagcccgatgtgtgctatgacccctttgaacctcccatgatcacagtccttgaagtaagactaagaactagtcrttctctaagtgacgcaagtaaagtaatagctagaacagaagaaaaggggtccccaaaaatgtaaccttaaaatttgatgcctgtgctgctattaatagtaaacagcataggttaagatgcggttctctagattagaaaaaaagttacgcagcagaaaataagtacatctgtcaagaatcatatttatgtgagatgtgtcaatactggtcttgtgtcattcatttaggctacttagaaagaagataaaaaagatcctgtttggctccaaaaaaggaaaagtcagcccctcctgcatgaggaggagctgcagccctttagaattgataatcacaaatccctcagacccaaagtagaataaagga

SEQ ID NO: 918898 - DNA, 467 bp, Homo sapiens
aaactctgcattgttctgtcagtcagtggcctaccagcatgctggtgcctgtcagtgtgttcctctcaatgtccagccacctatgtgttcctctccctgtgtgttcctccgctgatgtgctcctcttgatgtccagttgcttctgtatctgccttgctagggtctcaggtttttgcaggcacaggatgggggcatggcaggccagggtggtcttgggaaatgcaacatttgggcgrgaaatacctgttctcagttaggtccgtgagtgtggagccctagccaggactagccagggtatggagccctagccagccatgttcttcccttcctagcactcccatattatttcccctctctgaagaggtgtatctaactgccatgagaatatggacaatgactggtcttagctgcttcccactgacagggggcattcttttggggtaaactgctgtcggatgcttccgaga

SEQ ID NO: 918899 - DNA, 467 bp, Homo sapiens
aaactctgcattgttctgtcagtcagtggcctaccagcatgctggtgcctgtcagtgtgttcctctcaatgtccagccacctatgtgttcctctccctgtgtgttcctccgctgatgtgctcctcttgatgtccagttgcttctgtatctgccttgctagggtctcaggtttttgcaggcacaggatgggggcatggcaggccagggtggtcttgggaaatgcaacatttgggcgggaaatacctgttctcagttaggtccgtgagtgtggagccctagccaggactagccagggtatggagccctagccagccatgttcttcccttcctagcactcccatattatttcccctctctgaagaggtgtatctaactgccatgagaatatggacaatgactggtcttagctgcttccyactgacagggggcattcttttggggtaaactgctgtcggatgcttccgaga

SEQ ID NO: 918900 - DNA, 467 bp, Homo sapiens
aaactctgcattgttctgtcagtcagtggcctaccagcatgctggtgcctgtcagtgtgttcctctcaatgtccagccacctatgtgttcctctccctgtgtgttcctccgctgatgtgctcctcttgatgtccagttgcttctgtatctgccttgctagggtctcaggtttttgcaggcacaggatgggggcatggcaggccagggtggtcttgggaaatgcaacatttgggcgggaaatacctgttctcagttaggtccgtgagtgtggagccctagccaggactagccagggtatggagccctagccagccatgttcttcccttcctagcactcccatattatttcccctctctgaagaggtgtatctaactgccatgagaatatggacaatgactggtcttagctgcttcccrctgacagggggcattcttttggggtaaactgctgtcggatgcttccgaga

SEQ ID NO: 918901 - DNA, 634 bp, Homo sapiens
gtggagcctggaacccactgagacagaatcattcactctgctggaaagggggctgaagccagggagccaagtggtcttgctcagtgggtccaatccccacagagcccagcaagctaagacccactggctggaaattcttgctgccagcacagcagtctgaagtggaccccagatgctcaagcttggtgaggggaggtgcatccgccattactgaggcttgagtaggtgattttcccctcacagtgtaaacaaagccctgggggaagttcggactgggcggagcccaccacagtgcagcaaagccagtgcagcaaagccactgcagccggactgcctctctagattcctcctctctgggcagggcatctctgaaagaaaggcagcagccccagtcaggggcttatagataaaactcttatctccctgggacagagcacstgggggaaagggtggctgtggtcacggcttcaggagacttaaacattcctgccagccagctctgaaaagagcagtggatctcccagcacagtgctcgagctcttctgagggaaagactgccttttcaagtgggtccctgacccccatgcctcctgactgggagacaactcctagcaggggttgataggcacctcat

SEQ ID NO: 918902 - DNA, 634 bp, Homo sapiens
gtggagcctggaacccactgagacagaatcattcactctgctggaaagggggctgaagccagggagccaagtggtcttgctcagtgggtccaatccccacagagcccagcaagctaagacccactggctggaaattcttgctgccagcacagcagtctgaagtggaccccagatgctcaagcttggtgaggggaggtgcatccgccattactgaggcttgagtaggtgattttcccctcacagtgtaaacaaagccctgggggaagttcggactgggcggagcccaccacagtgcagcaaagccagtgcagcaaagccactgcagccggactgcctctctagattcctcctctctgggcagggcatctctgaaagaaaggcagcagccccagtcaggggcttatagataaaactcttatctccctgggacagagcacctgggggaaagggtggctgtggtcacggcttcaggagacttaaacattcctgccrgccagctctgaaaagagcagtggatctcccagcacagtgctcgagctcttctgagggaaagactgccttttcaagtgggtccctgacccccatgcctcctgactgggagacaactcctagcaggggttgataggcacctcat

SEQ ID NO: 918903 - DNA, 591 bp, Homo sapiens
ggagaagtgaggtccagcatgtgtgtggagaacagtccagccacttattcatgaggtgggtgctctgtgctgagggccagatcagcccctggtccccacagactctccagagcctggagacagagcgagggatgcaagacggcaaagatggcaaccttcccctcccactgggaactctktccaggaagtggcagagctgctactggctcgagagccacagcagggggtggctggaggcccaggctgagaagacccgcccagcgaggagatacgggatcaaggtaacagtctggtcatgtaacaatctggccaccattcttgcagggctgttgcagtattctgggagtccactccagtccctagttacctcggattttccagtacctgaaggtatcaacagtgaaggctgtgaaacagcaaagatggcagcctgcctctcccactgggagctccatcccagggaggttccaacatgttgctggcccaaacacactggtgagggtggctggtgatcccagttgggtggtcacacccagtgaggagaaacaggatcagtgactgctataaaaaagcactctggccactttcttg

SEQ ID NO: 918904 - DNA, 605 bp, Homo sapiens
tagaaaaattgacacaaaatgggatccaactaagtgctgtatacatgagacacatcaaggtttaaaacacacaaatagttagaaaataaaagaataaaaaaggtataccatgaatacagttatgaaaagacaaaataggcttcgagataaaaattatttctagaaacaaaaaagggcattttacaattatgaaaaggctaatctgtcataaagacatgacaatcttaaacctayatgcacctaaaaatataccccaaaatttataaagcaaaaacagaattaaaggggaaaaaaagacaattaagcaatagtagttggagatttttgtatccactttcaataatgaactgaacgaaacagaagattgtaaattgtaaaccaaaaccaaaaatgactgaggaaattctcaatagttttacggtttattttgccaaggttgaggatgcacatggggggggaaaaaaaaaaaacaaacaagtaagttacagtacaatctgagacttacactttatccaaagaaggttttgaggacttcaatatttaaagacaagagagtgagcaggaagagaaagaagaaagaaaagaaaagccctgctcactctttt

SEQ ID NO: 918905 - DNA, 546 bp, Homo sapiens
aaatgaatttctagattactcaagaggtttctatgttgtcagtcagacactggctcattgtgagtacacacatacttgtctttattatcatctctatcaacctgaattgcagttataggccacatgactgtgtgggaattaaggagcatyctggggtgtgaggaacttgtgttgcttgatggtggagatgggaagaaatttttttttttgagacggagtctcactctgtcatccaggctggagtgcagtggcatgatctcggctcactgcagcctccgcctcctgggttcaagccattatcatgcctcagactcccgagtagctgggattacaggtacacaccactatgcctgactaatttttgtatttttagtagagacggggcctcactatgttggccaggctggtctcgaactcctgatctcaagtgatccacctgcctcggcctcccaaagtgctgggattacaggcgtgagccaccgcacccagccaggaaggaaatcattgtgggtcttatacctgcttggcaccaggcacagggctggg

SEQ ID NO: 918906 - DNA, 520 bp, Homo sapiens
agctgtccatgtgcaccaggggagagagagaaacccatggtcatgttcaccctgaggttcacttccccttgttctctctacgtctcatcttggctttctcaattttggtttattttgttcgccttttgatttctgcaggctaagtatgttccaacctataatccctcttcctacacacacacacacacacacacacacacacacacacacagtgatctgtctgctactgacaactccatggctaacctggacagagtgtgttacagagccgggaaaggaattccttctgtttcacgtggtcctttggctgtgacaggcagacctctaggacacttctagggggtggtagcctccatagccaggtgctcaagaaggggacgaggagcctgccctctcaattagtgctggcagggtggaaatcaatgccgcttttgaagagcagcttggcagttaaaacccaaaagcttaaaaatgtgcacarcatttgccccagcaattcttacaattgagaacactgcca

SEQ ID NO: 918907 - DNA, 590 bp, Homo sapiens
tacaaccagaattgtgggaggattcattttgcttcaggaggttcgtgaggcatcctggaggcggggtgacaattaagagactctggtgagagaccacccaagactcgctgagatttgacccaaggcacaggttggggaggaattacagagatatgattggcaggactgccacaatgagaacaaagacataattcctggatttgcaactttttgagacaaatgggaacaaataaytacaatacagttgccacatgcaatcaagaatgcaagaggtaccaaggagaaaggtggtaaatataggatttgggaagttattgcctcaaacattaggaattccagaagaataccatcacatctcctgtcagccttagcctgtgaaaacaaaactcattttccctgggaggtatctggggagcacagtctactcctgaggacctgaaggtaggttagcacacagttcacatcagtttctagcatctactggttccagccttttctcagtcagtttcctcccccatcccgccccatagtggaagtgcgggaaatgaaagttcatgaaatgctactattgaatttgctacagatgatag

SEQ ID NO: 918908 - DNA, 580 bp, Homo sapiens
gacagtgccagagagaagagggctgcccagagaagggactttggaaatctgcagaggccctcagagtacttaagcggagtagttattagcacaggcctgtgatgaaactgcctgaggccagggaaagaagtatccaaaaggattagagaaaacagtgccaggaggccaaagagggctgagaagagtgttcctactggcaaggaaacgtcataattcacagggcattgtgaagggtacacaggagtttcttgccttactagtgggaaacacctagcgctagaccaaacactgctctggactcagttcaaaaccttaaaagtaagaccctccaaaattaaacctacaggtaacttagttgtgtcccraacaaaagacaaaaatatttatataaatgcaaaaataatcagcacccaacagggtaaaatcacagttccgagattactagacatgtaaagaatcaagaagagaaaaggaaaaagaaaagaaaaaagaaaagacaaccaaaaccttaaggagcagaaaaatcagtaattaaaaccaacccaaaataggcacagatgttactgtcagaagatgaggc

SEQ ID NO: 918909 - DNA, 421 bp, Homo sapiens
ccaccaatggcctctcccaaatctcaggttctcacatttcaaaacacaatcatgcctttcccacagtccctcaaagtcttaactcattctgaaattaaccccaaagtccaaatccaaagtctcatttggacaaggcaagtccattyttcctatgagtgtgtgaaaccaaaagcaagttagctacttcctagatacaatgaaggtacaggcattgagtaaatacacccacttaaaatgggagacattggccaaaacaaaggtgctacaggaccaatgcaagtccaaaatccagcaggacagtcattaagcctcaaagttacaaaatgatcttctttgactccatgtcccacattcaggtcatgctgatgcaaaagtgggctcccatggccttgggcagctctgcctctggggctttgcaggg

SEQ ID NO: 918910 - DNA, 628 bp, Homo sapiens
aataccctttctttctttctcttgcctgattgccctggccagaacttccaatactgtgttgagtaggagtggtgagacagggtatccttgtcttgtgccggttttcaagggaatgcttccagcttttgcccattcagtatgataatggctgtgtgtttatcataaatagctcttattattttgagatatgttccatcaatacctagttgattgagagtttttagcatgaaggggtgttgaatkttattgaaggccttttcgcatctattgagataattatgtggtttttgttgttggttctgtttatgtgatggattacgtttattgatttgcatatgttgaactacccttgcatcctggggatgaagctgacttgatcgtggtggataagctttttgatgtgctgctggatttggtttgccagtattttattaaggattttcacattgatgttcatcagggatattggcctgaaattctctttttatgatgtgtctctgcctggttttgatatcaggatgatgctggcctcataaaatgagttagggagaagtctccctttttatattgtttggaatagttttagaaggaatggcaccagctcctctttgtacctctggtagaattc

SEQ ID NO: 918911 - DNA, 628 bp, Homo sapiens
aataccctttctttctttctcttgcctgattgccctggccagaacttccaatactgtgttgagtaggagtggtgagacagggtatccttgtcttgtgccggttttcaagggaatgcttccagcttttgcccattcagtatgataatggctgtgtgtttatcataaatagctcttattattttgagatatgttccatcaatacctagttgattgagagtttttagcatgaaggggtgttgaatgttattgaaggccttttcgcatctattgagataattatgtggtttttgttgttggttctgtttatgtgatggattacgtttattgatttgcatatgttgaactacccttgcatcctggggatgaagctgacttgatcgtggtggataagctttttgatgtgctgctggatttggtttgccagtattttattaaggattttcacattgatgttcatcagggatattggcctgaaattctctttttwtgatgtgtctctgcctggttttgatatcaggatgatgctggcctcataaaatgagttagggagaagtctccctttttatattgtttggaatagttttagaaggaatggcaccagctcctctttgtacctctggtagaattc

SEQ ID NO: 918912 - DNA, 624 bp, Homo sapiens
taatattcagaacctacaaagaactcaaacaaatcagcaagaaaaaaacaatcccatcaaaaagtgggataaggacatgaatagacagttctcaaaagaagatctacaatggccaagaaacatatgaacaaatgctcaacatcactaattatcaggaaaatgcaaatcaaaaaccacagtgcaataccaccttactcttgcaagaatgtccataataaaaaatartagatgttggtgtggatgtggtaaaaagggaacacttttacactgttggtgggaatgtaaactagtacactatgtaaaacagtgtggagatttcataaagaactaaaaggcgatctaccattcaatccagcaatcccactcctgggtatctatccaggggaaaataaattatatgaaaaagatacttacacatgcatgtttatagcagcacaattcgcaactgcaaaaatatggaaccaaccctaatgcccatcaattaataagtggataaagcaaatgtggaatatatatatcccatattatatatataaataatattatatatacgtatacataccatggaataccactcagccataaaaaggaatgaaatgtgacatttgcagcaacttggatgga

SEQ ID NO: 918913 - DNA, 585 bp, Homo sapiens
tcacttgctattatacaagttccttattgtcatggtagtaaaatgtcagaagaaaagtgctgtgtactcctgtgggtaggtctcagtcttttagtgagcttctgccccaggttatgacttttaccagggtttctcagcttttatgttcaatcccttaggtgagatagaaaggctggagtaggctggagttgggtatttccttttacccaggtcagttaaactcargtacagttgaacttggttaggctctggtaaaatagtgtcctttgagggcaggcctttgttaaggagaagggagtgctatggatacatctgcaagtggttactcttcctctcttactgctggaagcaggaggggatttttcatggatcttcacagtgagaacatgttggcgctcttagaggtaaaactcacaaaagtatgaggaaccccctaattccgggatttcaggagtttttatctcttaagctagtccacactcagtcttcggcatttagtcagttaagtattctttaactgttctcaccagatgctcctggtgagatcctggtgaggaaatgctcctgtggcatttcctgctcagt

SEQ ID NO: 918914 - DNA, 636 bp, Homo sapiens
ttgctgctaaggagatgatttcattctttttgacggctgcatagtattccattgtatatccatggtgtatatgtaccacattttttaatccagtccacaattcatggccatctaggttgattccatgtcttagctattgtgaaaagtgctgcaatgaacatatgtgtgcatgtttctttattgttgaatgatatgtattcctttagatatatgcccagtaatggaattgctgagtcaaacggtagttctaagttccttgmgaaatctctaaacttttttccacagtggctaaactaatttacattctcaccggcagtgtataaatgtttccttttctctgcagcctcaccaatgtctgttattatttgacattttaataagagccattctgactggtatgagatggtggttttgacttgcatttttccaatgattagtgatgttgagcattttttcatgtgcttgttggccatgtgtatgtcttcctttgagacgtttctgttcgtgtcctttgcccatttttaaatggagtagtgttttgcttattgctttaagttccttatagattctggatattagatctttgtcagacgcatagtttgcaaatattttctcccattttatagcttgtctgtt

SEQ ID NO: 918915 - DNA, 745 bp, Homo sapiens
gacattcctgcactctcaagggcctgggaacaccctttgcccctgcaggcttgaaggtgtctgctcctgctgcctggcctctctgaactcctagcaccgactctgattttggaacaaagctgaggctgagccaggtactgttgtgaccyggcaggtgtgcacattcttgaggcagcactgacacaccaaacccctgccaacttggcccccctctggtctttagacattgatgatcatgggagggaggctgagggggactgagggtgcttggcacaggtctgcaagcaccctttggcatgaacagcctgggcactgtggacagcaggttgatggcagcaggaggcagactgactcctaggtggaaacgggtagatccctggtgaagcacaccttcaagctagggacagcctgaagcatggggtccaggctgtcagttctgggtggagttcctggcccagagcaagaacttatggcgctttttctaggcccaatgatggccgtccatggaccaatcagcatgcacatctcccttctgaagtccataaaaaccccggactcagctagacccacagagacatcaagatgacctgcctgtggataggagctacctgctctgggtttcctctcccctaaggactgcggagatgttggaatgacctgcctgcagataggagctacccactctgggtctcctgtccactactgagagctgcagagatgttgcatgacctgcctgcaaatatga

SEQ ID NO: 918916 - DNA, 745 bp, Homo sapiens
gacattcctgcactctcaagggcctgggaacaccctttgcccctgcaggcttgaaggtgtctgctcctgctgcctggcctctctgaactcctagcaccgactctgattttggaacaaagctgaggctgagccaggtactgttgtgacctggcaggtgtgcacattcttgaggcagcactgacacaccaaacccctgccaacttggcccccctctggtctttagacattgatgatcatgggagggaggctgagggggactgagggtgcttggcacaggtctgcaagcaccctttggcatgaacagcctgggcactgtggacagcaggttgatggcagcaggaggcagactgactcctaggtggaaacgggtagatccctggtgaagcacaccttcaagctagggacagcctgaagcatggggtccaggctgtcagttctgggtggagttcctggcccagagcaagaacttatggcgctttttctaggcccaatgatggccgtccatggaccaatcagcatgcacatctcccttctgaagtccataaaaaccccggactcagctagacycacagagacatcaagatgacctgcctgtggataggagctacctgctctgggtttcctctcccctaaggactgcggagatgttggaatgacctgcctgcagataggagctacccactctgggtctcctgtccactactgagagctgcagagatgttgcatgacctgcctgcaaatatga

SEQ ID NO: 918917 - DNA, 711 bp, Homo sapiens
aggcccaatgatggccgtccatggaccaatcagcatgcacatctcccttctgaagtccataaaaaccccggactcagctagacccacagagacatcaagatgacctgcctgtggataggagctacctgctctgggtttcctctcccctaaggactgcggagatgttggaatgacctgcctgcagataggagctacccactctgggtctcctgtccactactgagagctgcagagatgttgcatgacctgcctgcaaatatgagttacctgctctgggtctcctctctgctgagagcagcagagacgttgcgatgacctgcctgcggataggagctacccattttgggtctcctgagagctgttctgtcactcagtcaagcacctcttcaccttgatcaccctctggttgtcagcatacctcattcttcctggatgcaggaaaggaactcggcacctgctgartggtgagactgaaaaagctgtaacacaagcagggctgaaacactgccctcccccgctcaccatgttgtgggcaacaaggagagaagagctgaggccattctgggagcccagacctaggggctccctgagccagggctgtaagaccctctttggggctctgtggtttctggtgtctccaagcttccaggcaccactatgttcctctcatccagagacaggtgcctacagcagaagccacccacaatgcat

SEQ ID NO: 918918 - DNA, 619 bp, Homo sapiens
gcatcttttgatgtcacctgggagctcattacaaatgcagagcctcccgccccacccaaatcagaatttcatttttacaagatccataggtgatttgtaagcacttgattaatatttgaaaaggattgcataggcagggtgcagtggctcacgcctgaaatcccagcactttgggaggctgagatgggcggatcacttgaggttgggagtttgagaccagcctgaccaacatggagaaaccctgtctgtactaaagatacaaaattagccaggcatggtggtgcatgcctgtaatcccagctacttgggaggctgaggcaggagaatcgcttkaacccaggaggcggaggttgcagtgagctgagatcatgccattgcactccagcctgggcaacaagagtgaaactctgtctcaaaaaaaaaaaaaaaaaaaaaaaaaaaagcactgcctttaagtgtcatgagggcagtataagcaaacgtcccaggcctgctattgcctcatcaaaccatacagaaggcatctatccgctggggtcagacttcagatcctgccctggacacttagtagctgtggatgttaggtgacattgtgaactttgaatttcagtttcctcat

SEQ ID NO: 918919 - DNA, 513 bp, Homo sapiens
tagaacttttaatttccttcaagaattttttctttgcattcataacttgtctaactgtttagcacaagaggcctagcattcagactgtctttggtttagacatgacttcctcacaaaacttaatcatttctagcttttcatttaaagggagagacatacaactcttcctttcatttgaacacttagtggcctttgcagggtttaactggcctagtttcaatattgttgtgtctgagaaaataaggaggtctggggagtggtagatgggggaacaaccgggtggagcagtcagaatgcacacattatwgatgaagtttgccatcttaaatgggtgtggtgcattgcagcccagaacaatttaagtagtaacagcaaagatcactcatcacaaatcacctaacagatataatgaaaaggtttagaatatggtgatgatggcagcggtgggccgtctggagtggtggctgtcgtcatgcctgctacagcagggaggcgtggctgaggccacacact

SEQ ID NO: 918920 - DNA, 726 bp, Homo sapiens
tcatttgaacaacacaaggaacctctgaggctctcagaagagaggtttatctgggcctgaggccagggcccatattagggactccattcagaaccagaatcatgcaactagctccacatcatcaaaaaagatgagatgattaactaaaaattttccgctatagtcctgaaaatttgtttttagccagtctctagtctttttatggaaagtttctgatgccttataccctgttacaacactaaatctggcagatactttggaatagaaaaactgtggccatttagggcaatacctgggtatttccaggtgaatttctcaaatgagaaaagtgcatttctgaatcaggaactttttatagaaaggcgctacatgaacaaaaatacattttctctttatgmtgttactgttactctgtaggattagacttttgcttatctggaactcaagagactgtttctacgttcttggatatgtcttccagtgggtaattcatcctcaatgtgtattgaagggtgaccaggatatagataagtgacaaaggcaagataaaacataagagatttaactgaatggcatgagcttctaaggaagtagtttacaaaagattgcagagcagaattcggcaaactatagccatgagccaaatcccaccaccacacgtttgtgtaccacttgcaagccaagaatggtttttccatttttaaatagttacattttaagcagtta

SEQ ID NO: 918921 - DNA, 584 bp, Homo sapiens
attaatttttgtgtttttttaatgatgggttttccaccatgttgcccaggcttgtctcaagcttcctgaactcaagtgatctgcctgcctcagcctcccaaagtgttgagattataagtgtgagctaccatgcccagcctggtgttcccttttatgcacaactttgtcaacatggtatttttttacttttaataatggccattctgactggygcgagatggtatctcgtcgtggttttgattttgatcatgatttctctgacgattagtgatgctgagcattttttcacatatttgttggctgaatgtatgtcttctttgcaaagtgtcttttcatgtcctgtgctcatttgtaatagagttattttttgcttactcaatttttttaaaatagattctagatattaggactttgtcagatgcataatttaggaatattttctcccattctgtaggttgtctgtttactctgttgatagtttattttgctgtgaagaggctctttagtttaattagatcctacttgtccatttttctttttgtcacaattgcatttggagacttggtcataaattctttgccaaa

SEQ ID NO: 918922 - DNA, 601 bp, Homo sapiens
aagtaatgaggagccaaatgttaatcaccaagacaatggggaaaatgtctccagagcattttagagatcttcaaggcagcccctcccatcacaagcctgaaggcctaggagaggaaaatggcttcatgggccaggcccagggctctgctactgtgtgcagcctcagtagctggtgctctgcaactcagccactccagctccagccatggctaaagcgggccaacatacagytcgggccatggcttaagagggtgtaagccccaacttttggcagtttccacctggtgttgggcctatgggtgcacaggagataagagttgagatttttggaacctctatctggatttcagaaaatgtatggtatacctggatgtccaggcagaagtctactgcaagggtgaaaccctcatggagaacctctagtagggcaatgcagaggggaaatgtggagttggagcacccacacaaagtccctactgtgacactgtctaatggagctgtgagaagaggcccaccaccctccagaccttagaatagtagagccactgacagcttgcaccatgcacctggaaaagccacaggcactcaacagtctacaaaa

SEQ ID NO: 918923 - DNA, 602 bp, Homo sapiens
gagctcaactactctgattaagtcataggcatattgctcagttttctttcctctctcattgcaagagatgtgatcctttttacaggctgcaaaagaggcctctgactttcacatttggctttcaaaatagccttttattcattctcagtctctcagtatctttttytagagcttcagtaaagcataaaaatagctatccaatcccattgtcttttacttactatttccaacatgtttgacaaatgtctaatacttcacaccagctagtgcattcctttctaacaaaatatcccaaatcatcaccaatggaagttttgacaactggaccaccacctttatccaggggctatctgtgctcctcctaccacctgtgatgggatcctcattgccatctgggctgtaaatagtacaactccaaaatcccatcttaataccagctttcttgacctgccaaagtttgagttattcaagaagctgattctgagacagagtttaatgtttaggatatttgttagaaagtactattgtgattaacacctgtggaagggagaaagggaaagaagaactgtgcaaatagagaaactgatttgcaatataagcca

SEQ ID NO: 918924 - DNA, 602 bp, Homo sapiens
gagctcaactactctgattaagtcataggcatattgctcagttttctttcctctctcattgcaagagatgtgatcctttttacaggctgcaaaagaggcctctgactttcacatttggctttcaaaatagccttttattcattctcagtctctcagtatctttttttagagcttcagtaaagcataaaaatagctatccaatcccattgtcttttacttactatttccaacatgtttgacaaatgtctaatacttcacaccagctagtgcattcctttctaacaaaatatcccaaatcatcaccaatggaagttttgacaactggaccaccacctttatccaggggctatctgtgctcctccyaccacctgtgatgggatcctcattgccatctgggctgtaaatagtacaactccaaaatcccatcttaataccagctttcttgacctgccaaagtttgagttattcaagaagctgattctgagacagagtttaatgtttaggatatttgttagaaagtactattgtgattaacacctgtggaagggagaaagggaaagaagaactgtgcaaatagagaaactgatttgcaatataagcca

SEQ ID NO: 918925 - DNA, 717 bp, Homo sapiens
agacgaaatgtacctgacaggcatacatagaacattttgtccacagcagtggaatacatattcttcttctcaagggcacatgtaacattctccaggataggtcatatgtttggacacaaaacaagtcttaacaaatttaagattgaaatcatctcagttaatttttctgatctcaatggtataaaactagaaattgataacaggataaatcttggaaaattcacaaatacatgaaaatttaaaaacccactcccaaacaccaatgtggcaaagaagaaatcaaaagagaaataagacagtatctggagacaaatgaaattaggracacaacatatcaaaacttttaggatgcagcaaaagcagcactaaggaagaagtttatagcaataaatgcctacattaagagaaaaagaaagatccaaaataaacaatataacttcacatcttaaggaactagaaaaagaagaaaaaactaagtccaaaagtagtggaaacaagaaaacaataaaaaaaattgagcagaaataaatgaaatagagactagaaatatgatagaaaatatcaataaaaatgagagttggtcttttataaagataaacaaaattgagaaacagctagacaaccaagaaaataagagtggacttaaataaatgcaactatagaattaggaggtggagcaagatggtggaatagaaggctccactgattgtccccctt

SEQ ID NO: 918926 - DNA, 570 bp, Homo sapiens
ttcaaccaaatgcagattggaaatatttggaaaaatataacaacacaacaataaaaaatgaaaattttaagaagtacagtataactatttacattgcatttatattgtattaaattataagtaatctagagatcattttacaggagaatgtgtatagattatttgcaaatactacacaattttactagagggactgttgattttggtattcaaggcaggtccagtaatcattcccctgcaggtatcagggagtgactgtatatctctcaatttcttcctgtttttgtgaccttcagaaatatttgcaatcttctccataaagatattaaatatattttgttaaatgtaccccttggtacattacaatatgttamatattacatattattacatattttactttgtgttttctggtgtttaggatggtgttaatgtttgcacattgctcccctatctatctgacaactttgttaaattctagtatctctaatagtttatagattcttttggatttactttagagacaatcatgttttccgtgattaagaatatttgttctgctcccttcaa

SEQ ID NO: 918927 - DNA, 627 bp, Homo sapiens
gtgtaaaattaggctgttcattttagatctttgttttttcttattgtagctgcttatcactataaacttccctcatagaactgcttttgctgcatcccataatatgtggtatgctttgttttaaattttttttgtttcaaggtattttctatttttgttttgagttattttataactttttatctttttaattttggggggtcaatgagtatatataattatggggtacactaaatgttttaatacaggcattcaatatgaaataaatacattatggagaatgggacatttatcactgcaagcatgtatcctttgtgttacaaacaatccaattacacytttttagttatctttaaatgtacaattaagttattatcaactatagtcaccctgttgtgctatcaagtagtagtcttatccattctttctatttattttgtacctattaactatccccacatcccctgtagccctccactacccttcccagcctctggtaaccgtcattctactctctatctccatgagtctagttgttttgatttttagatcccacagataagtgagaacatgtgctctttgtgtttctgtgatggcttatttcacttaacttaatgatctccagtt

SEQ ID NO: 918928 - DNA, 705 bp, Homo sapiens
tttctagtcctggacattatttcattggcaatttttttattaccatttcaatctcaaggtttgttattgatctgttcagatattctatattttcctggcttaatctaggaggattttatatttccaggaatttatccatctcctctaggccttctggtttatacatgtaagattgtttatagtagacttgaatactcttttgtatttctgttgttttagctgtaatatcacccatttcatttgtaaatgagcttatttggatcttctcttctttttccctttgttaatcttgctattgttctatcgattttatttatcttttcaaagaaccaactttttgcttcaattatcttttttatttgtttatttcaattccatttagttgtgtttaggtctttgttatttcttttcttctatggagttgggatttggactgttcttgtttctgcagttccatgaggtgtgaccttagattgtctgtctgtggtctttcagactttttgatgtaggcattttatgctrtgaactttcctcttagctccattgttgctgaatcccagaggttttgataggttgtgtcactattgtcattcagttcaaagaatttttaaattttcatcttgatttcattgttgatccattgatcattcaagagcaggttatttaatttccatgtatttgcatggttttcagggttccttttgg

SEQ ID NO: 918929 - DNA, 702 bp, Homo sapiens
tgtttctgcagttccatgaggtgtgaccttagattgtctgtctgtggtctttcagactttttgatgtaggcattttatgctatgaactttcctcttagctccattgttgctgaatcccagaggttttgataggttgtgtcactattgtcattcagttcaaagaatttttaaattttcatcttgatttcattgttgatccattgatcattcaagagcaggttatttaatttccatgtatttgcatggttttcagggttccttttggagctgatttccaattttattccactgtggtctgagaraatacttgacataatttcgattttcttgaatttactgagacttgttttgcagcctatcaaaaagtctatcttggaggatgtcctatgcgctgatgaatagaatgtatattctgcagttgttggggagaatgttctgtaaatatctgctaagtctacttgttgagcggcatagtttaagtccattgtttctttgttgactttctgtcttgatgggctgtctagtgcagtcactgcagtattaaagtccccaactattattgtgttgccatctatctcatttcctaggtccagtaataattgttttataaattttggagctccagtattaggtgcatatatatttagaattgtagaattttactgttagtcattttatcattatataatattcctctttgtc

SEQ ID NO: 918930 - DNA, 509 bp, Homo sapiens
cccaatattcataacgatacatgcttttaagattgctatgctttgggccaggcgcggtggctcacacctgtaatccctgcactttgggaggctgaggtgggcggatcactaggtcaggatattgagaccatcttggctaacatggtgaaaccccgtatctactaaaaaaaacctcaaaatattagccgggcrtggtggcgggcgcctgtagtcccaggtacttgggaggctgaggcaggagaatggtgtgaacccgggaggcggagcttgcagtgagcggagatcgcaccactgcactccagcctgggtgacagagcgagactccgtctcaaaaaaaaaaaaaaaaaaaaaagattgttatgctttgggtgggcacagtggctcacacctgtaatcccagcactttgggaggccaaggcaggtggatcatttgagatcaggagttcgaaaccagcctagcccacatggtgaaaccccatctctaccaaaaaatgcaaaaattagccggg

SEQ ID NO: 918931 - DNA, 509 bp, Homo sapiens
cccaatattcataacgatacatgcttttaagattgctatgctttgggccaggcgcggtggctcacacctgtaatccctgcactttgggaggctgaggtgggcggatcactaggtcaggatattgagaccatcttggctaacatggtgaaaccccgtatctactaaaaaaaacctcaaaatattagccgggcgtggtggcgggcgcctgtagtcccaggtacttgggaggctgaggcaggagaatggygtgaacccgggaggcggagcttgcagtgagcggagatcgcaccactgcactccagcctgggtgacagagcgagactccgtctcaaaaaaaaaaaaaaaaaaaaaagattgttatgctttgggtgggcacagtggctcacacctgtaatcccagcactttgggaggccaaggcaggtggatcatttgagatcaggagttcgaaaccagcctagcccacatggtgaaaccccatctctaccaaaaaatgcaaaaattagccggg

SEQ ID NO: 918932 - DNA, 509 bp, Homo sapiens
cccaatattcataacgatacatgcttttaagattgctatgctttgggccaggcgcggtggctcacacctgtaatccctgcactttgggaggctgaggtgggcggatcactaggtcaggatattgagaccatcttggctaacatggtgaaaccccgtatctactaaaaaaaacctcaaaatattagccgggcgtggtggcgggcgcctgtagtcccaggtacttgggaggctgaggcaggagaatggtrtgaacccgggaggcggagcttgcagtgagcggagatcgcaccactgcactccagcctgggtgacagagcgagactccgtctcaaaaaaaaaaaaaaaaaaaaaagattgttatgctttgggtgggcacagtggctcacacctgtaatcccagcactttgggaggccaaggcaggtggatcatttgagatcaggagttcgaaaccagcctagcccacatggtgaaaccccatctctaccaaaaaatgcaaaaattagccggg

SEQ ID NO: 918933 - DNA, 653 bp, Homo sapiens
cctgtaatcccagtactttgggaggctgaggtggaaggattgcttgagggcaggagtttgagactagccaggccaacatagccagaccctgtctctacaaaaataaaacttaaaaaagaattagctggtggccgggtgcagtggctcatgcctataatcccaacactttgggaggctaagacgggcgggtcacacaaggccaggagttggagaccagcctggccaacatggcgaaaactcatctgtactaaaaatacaaaaattagctgggcatcatagcacgcgtctgtaatcccagctactyggggggctgaggcaggagaatcacttgaatccaggaggcagaggtagcagtgaaccgagatcatgccactgcactccagcctggtgacagagcgagactctgtctcaaaataagtaaataaataaatatataaatatataaataaataaaagaattagctgggagtggtagcacgcaccgatagtcccagctacttgggaggccgaggcaggaggatggcttgagcccagaagttcgaggcggctgtgatcgcaccactgccctaaagcctgagtgactctatctcaaaaataaaaaaggattcaatttcagaagcagaacggtgtgtgcgtgtttgcatgtgcacagc

SEQ ID NO: 918934 - DNA, 653 bp, Homo sapiens
cctgtaatcccagtactttgggaggctgaggtggaaggattgcttgagggcaggagtttgagactagccaggccaacatagccagaccctgtctctacaaaaataaaacttaaaaaagaattagctggtggccgggtgcagtggctcatgcctataatcccaacactttgggaggctaagacgggcgggtcacacaaggccaggagttggagaccagcctggccaacatggcgaaaactcatctgtactaaaaatacaaaaattagctgggcatcatagcacgcgtctgtaatcccagctactcgggrggctgaggcaggagaatcacttgaatccaggaggcagaggtagcagtgaaccgagatcatgccactgcactccagcctggtgacagagcgagactctgtctcaaaataagtaaataaataaatatataaatatataaataaataaaagaattagctgggagtggtagcacgcaccgatagtcccagctacttgggaggccgaggcaggaggatggcttgagcccagaagttcgaggcggctgtgatcgcaccactgccctaaagcctgagtgactctatctcaaaaataaaaaaggattcaatttcagaagcagaacggtgtgtgcgtgtttgcatgtgcacagc

SEQ ID NO: 918935 - DNA, 785 bp, Homo sapiens
atcaaatgcttgtaactaatctgtctttcccatttagcatcctattatccaaaaatatcttggtctgtagctcccacctggtttcctggtcatttgactactggttaaatgagcctgaaaatttcatcaggtttcatataaagaataatatattatagttacatacatataaatgtatatctttgtgtatttttaatatcccttatttatctacaaagagatgaatgtttgaaatatgtgacggataagcaaggtcaattcttgtgtctgctcatgcattggcattgagctttctgcttggagtcctyagcatattccgcacttgagccatccttcttgtttcttcatacttccagagccactagaatcacaggcaaaagggcaggagcttctccttggggcagagggagaacctctgagcattaccctgggtggtttggtcctgccagagtctcttaaacattagagacaactcaccatttggaagttacaaatcatgaaagtgctcactgaagcaaaataataccacataagaaataaatgcctaatgttgatgaacattttaatctttattataaaattataacacaaagaagaatcctgaagaatgaccctaaagcttttgtcacaatagcattgtaatggaaatacaggtgtgttttcttttctttcttttttccttttttgagacagggtcttgctttgtcacccagggtggtgtgcagtggagctatcatggctcactgtagcctcgacctcctgggctcaagcaatcctcccacctc

SEQ ID NO: 918936 - DNA, 785 bp, Homo sapiens
atcaaatgcttgtaactaatctgtctttcccatttagcatcctattatccaaaaatatcttggtctgtagctcccacctggtttcctggtcatttgactactggttaaatgagcctgaaaatttcatcaggtttcatataaagaataatatattatagttacatacatataaatgtatatctttgtgtatttttaatatcccttatttatctacaaagagatgaatgtttgaaatatgtgacggataagcaaggtcaattcttgtgtctgctcatgcattggcattgagctttctgcttggagtccttagcatattccgcacttgagccatcsttcttgtttcttcatacttccagagccactagaatcacaggcaaaagggcaggagcttctccttggggcagagggagaacctctgagcattaccctgggtggtttggtcctgccagagtctcttaaacattagagacaactcaccatttggaagttacaaatcatgaaagtgctcactgaagcaaaataataccacataagaaataaatgcctaatgttgatgaacattttaatctttattataaaattataacacaaagaagaatcctgaagaatgaccctaaagcttttgtcacaatagcattgtaatggaaatacaggtgtgttttcttttctttcttttttccttttttgagacagggtcttgctttgtcacccagggtggtgtgcagtggagctatcatggctcactgtagcctcgacctcctgggctcaagcaatcctcccacctc

SEQ ID NO: 918937 - DNA, 734 bp, Homo sapiens
agaattagaagtggagcctgcagatgtgactgaattactacaatcttgtgctaaacttgaagggatgaggagttgcttcttatggatgagcaaagaaagtggtttcttgagatggatctactcctggtgaaatgacagaaaggatttagaatattacacaaacttagttgataaagtagcatcagggtttgagaggattgcctccgtttttgaaagaagttctactgtgggtaaaatgctatcaaacagtagcacataaatcttctgtgaaaggatgagtaaatcaatgcagtaaacttaaacttcattactgtcctattttaagaaattgtcatagccacccaaccttcagcaaccgccaccctggtcaatcascattcatcaacctcaaggcaagaccttccaccagcaaaaaaggactatatgactcactgaaggctcagataattgttagcttttttagcaatagagcattttaaaattaagatacgtatattgtttagacataatgctaatgcacacttaatagactatggcatagtataaacgtaatttttatatgtactgggaaaccaaaaaatttgtgtgacttgttgtggttgtctggaactgaacccacaatatctccaaggtatgcttgtgtggtatctaggtatatgtattctttttctttttttttttctatttgagacgaagtctcactctgttgcccaggctggagtgcaatggtgcta

SEQ ID NO: 918938 - DNA, 734 bp, Homo sapiens
agaattagaagtggagcctgcagatgtgactgaattactacaatcttgtgctaaacttgaagggatgaggagttgcttcttatggatgagcaaagaaagtggtttcttgagatggatctactcctggtgaaatgacagaaaggatttagaatattacacaaacttagttgataaagtagcatcagggtttgagaggattgcctccgtttttgaaagaagttctactgtgggtaaaatgctatcaaacagtagcacataaatcttctgtgaaaggatgagtaaatcaatgcagtaaacttaaacttcattactgtcctattttaagaaattgtcatagccacccaaccttcagcaaccgccaccctggtcaatcaccattcatcaacctcaaggcaagaccttccaccagcaaaaaaggactatatgactcactgaaggctcagataattgttagcttttttagcaatagagcattttaaaattaagatacgtatattgtttagacataatgctaatgcacacttaatagactatggcatagtataaacrtaatttttatatgtactgggaaaccaaaaaatttgtgtgacttgttgtggttgtctggaactgaacccacaatatctccaaggtatgcttgtgtggtatctaggtatatgtattctttttctttttttttttctatttgagacgaagtctcactctgttgcccaggctggagtgcaatggtgcta

SEQ ID NO: 918939 - DNA, 796 bp, Homo sapiens
gggcttctcctattcccctagcctcagaattgcactggccatgctttgaggtcccactcagacccctcttggggtggggaggttgggggcggccccaggtggccaaaacacaaaagagacatctggttaccttcctgggaactgccctcccctgtggctatgaccccccaccctgaggacccagcacccctcccgggagcgcacatgcttccgggtaaataaataaataaataaatgcaacctcggatgtttatttggtatttccctctccgatgagtcagcttccaggaccaacacctccactcccgatggggagacccctgggtggagggtcgggggtgagaggcggctctgagacccccgaggcctgggcacacgggcgtcgtgcccggctggcatttgctgtcttggcctgcatgcatgtgggcgagcccctaaacccgctcagtgcagggagcgcggctcacccacagcccacggggcgcggtgctcgggaaagtgcgggtgggcaatggggggtggcggagctgtcgtgacatgcccccttcgcaccccctcttggcggattactggcactttatatcagattcatgaatgcaagtgtgtgtgcgcatgtgtgcttacatagagaggtcgggtcgtagrggaacactgtgacatagacagaaacaaaataaactcaaaaacagggtattagccagagaaccgaaaatagtgtctcgtgggacgtgggaaaaagcaataaaaatgagatcttaaccacagcttttgttctaaaagtcaaataatacccaaa

SEQ ID NO: 918940 - DNA, 796 bp, Homo sapiens
gggcttctcctattcccctagcctcagaattgcactggccatgctttgaggtcccactcagacccctcttggggtggggaggttgggggcggccccaggtggccaaaacacaaaagagacatctggttaccttcctgggaactgccctcccctgtggctatgaccccccaccctgaggacccagcacccctcccgggagcgcacatgcttccgggtaaataaataaataaataaatgcaacctcggatgtttatttggtatttccctctccgatgagtcagcttccaggaccaacacctccactcccgatggggagacccctgggtggagggtcgggggtgagaggcggctctgagacccccgaggcctgggcacacgggcgtcgtgcccggctggcatttgctgtcttggcctgcatgcatgtgggcgagcccctaaacccgctcagtgcagggagcgcggctcacccacagcccacggggcgcggtgctcgggaaagtgcgggtgggcaatggggggtggcggagctgtcgtgacatgcccccttcgcaccccctcttggcggattactggcactttatatcagattcatgaatgcaagtgtgtgtgcgcatgtgtgcttacatagagaggtcgggtcgtagaggracactgtgacatagacagaaacaaaataaactcaaaaacagggtattagccagagaaccgaaaatagtgtctcgtgggacgtgggaaaaagcaataaaaatgagatcttaaccacagcttttgttctaaaagtcaaataatacccaaa

SEQ ID NO: 918941 - DNA, 612 bp, Homo sapiens
gagtaactgacattacaagcacatgccgccatgcctggctaatttttgtatttttagtcgagacagggtttcaccatgttggccagactggtctcaaactcccggcctcaggtgatctgcccaacctcgcctcccaaagtgcagggattacaggtgtgagccaccgcacctggccagtttccttttttaaaattttttwaaaaatttttttgtagagataggtcatgctttgttgcccaggctgatcttgaactcctgggctcaagcaatccccttgcctctgcctcccaagatgttgggattacaggcgtgagtcccatgcctggctttccttcttccttctttcctgtctgtcttcctctctctctctctctctttctctttctctctctctttctttctaacagggtctcagggtggagtgcagtggcacgatcacagctccctgcagccttgaccacccaggctcaagcagttctcccacctcagcccaccgagtagctgggactacaggcatgtgccaccacaccggctatttttttttttttttttactttctgtagcgacagggtctcatgttgcccaggctggtctcaaactccggggctcgag

SEQ ID NO: 918942 - DNA, 760 bp, Homo sapiens
aaaaatttaaaatttgtgctaaaagacactatcaacagagtaaagaaacaacccacagaatgggagaaatatttgcaaatcatatatctgatgagagattgacatccagaatatatacacacctcctaaaactagacaacaaaaaacaaacaacstgattcaaatatgggcaaaggacttgaatagacgcttatccaaagaaggcatacaaagaaccaaaagcacatgaaaagatgttcaacatccctaatcattagggaaatgcaagtcaaaaccacaatgagataccatctgacaccccttaggatggctactatccaaaacccagaaaataacgagtgtaggtgaggatgtgagaaatcggaatccttgtgcactgctggtaggaatgtacgccggtgcaatcactttggaaaatggtatggcaattctttaaaaaattaaaaatagaattaccatatgatcagcaattccatttctggctacatacccagaagaaccaaaagcagggtctggaagaaatatttgtacaccgatgtccatagcagcatttttcacaatagccaaaatgtagaagcaaccagactgtccaatgacagataaacagctaaactaaatccaggccaagcatgcaatggaatactattcagccttgaaaaggatggaaattctgacacatgccacaacatggataaaccttatgctaagtgaaataagccagacacaaaaagacagatactattaatatgttattccactt

SEQ ID NO: 918943 - DNA, 667 bp, Homo sapiens
atgtgcaaacaatacacatctgcaattggattcaccaccagattaagtttacagtaatccacgtttgttcctaaaaatccatctaccttctgcacaggccaaatagacaaggtaaatggaaatatggtaggattctctaacgctgactttcaagttcttaagagtggcactaatctctgcagtccttccaggaagggtataatgcttttggattaatatttgaagaggtagaggaagctctagaatcttccacttggtccttcccattatagtagaccttgggtcattccatgggtcagggaaacaatgaggggagkctgacagttgttatgtctattccagttacatattccaaaaccagggatgtaagcataggatgggttcagagacacactcggcacaagatgaaatagacctgagtcaaaactccatgactccagaccccaaaaatttcctactctggctaatgtatcatagtagccttttgagtccaataaaccctcaaagtctcatcacttcccctttcctcaatgcacagttacctgacaaatagctgccacatgcctttggagaagggtaagagggaaatttacagtatatacagtcatgcattgcttaacaacagggatacattctgagaaatgcgtctttaggtgatttcatcatt

SEQ ID NO: 918944 - DNA, 540 bp, Homo sapiens
agcaaggataaacagaagcttaggatttatggtgagccagtcccccaaggctcaggaaagctgcccagggcagatggagtctcatctgtgcttgccccatgtgaaatcccagctgagggaccctgaaagcactctrctctgcattttataccctggatgtcactttgtttgctgagcttgagcattgcagaacatcctgttctgggaggaataaggacacagctgtggttgttccagacattttctccttatctctggacattgtatccttggtacattctgcccaagaattacaagaagagtggggaagagctggattggccaagggcatctagggatctgtcctcttgcaaatataatatggaaactctgaaaatcagatcccccccacacctcactccctagagtattttgctcttgttattcattgctttatgtgttgcttgtttggttggtgatttttctgaactaattatgtaaattccatgtcctttgttgttgtggccactgaaatctctgtttggttagctttgtgatcag

SEQ ID NO: 918945 - DNA, 540 bp, Homo sapiens
agcaaggataaacagaagcttaggatttatggtgagccagtcccccaaggctcaggaaagctgcccagggcagatggagtctcatctgtgcttgccccatgtgaaatcccagctgagggaccctgaaagcactctgctctgcattttataccctgsatgtcactttgtttgctgagcttgagcattgcagaacatcctgttctgggaggaataaggacacagctgtggttgttccagacattttctccttatctctggacattgtatccttggtacattctgcccaagaattacaagaagagtggggaagagctggattggccaagggcatctagggatctgtcctcttgcaaatataatatggaaactctgaaaatcagatcccccccacacctcactccctagagtattttgctcttgttattcattgctttatgtgttgcttgtttggttggtgatttttctgaactaattatgtaaattccatgtcctttgttgttgtggccactgaaatctctgtttggttagctttgtgatcag

SEQ ID NO: 918946 - DNA, 761 bp, Homo sapiens
gctttgcacactttgtaagctcagacactccatggtggggagcaggaggctgggagcagttgctgtgtgacccacggcttgggtgcagcctctggagccagagagtttgggttcaagttcaagccctatggccttgggtaggattcctaacatctatgccttagtttcctcatatgtaaagtaggactaatagtttttgtctttatggggttgttggaagaattaagcaagttaatgtatgtaaagtgcttagtagagtcggcacacaatatcctttttttgagacagggtcttgccctgttgcccaggctggaatgcagtggcgcaatcatggctcactgcagcctcgacctcccaggctcaagcaatcctcccaccccagcttcccaagtggctgggaccacaggtgtgcaccaccacacccagttaatttttgtatttttagtagtgatatggtttggctgtgtcctcacccaaatctcaacttgmattgatctcccagaattcccatgtgttgtgggagagacccatggggaggtaattgaatcatggaggccagtctttcccatgctatttttgtgatagtgaataagtctcacaagatctggtgggtttatcaggggtttcagcttttgcttcttcctcattttctcttgctgctgccatataagaagtgtctttcacttcctgccatgattccgaggcctccccagccacgtggaactgtaagtccaattaaaactctttttcttcccagtctc

SEQ ID NO: 918947 - DNA, 839 bp, Homo sapiens
ggagggtccagaagatatacttttgaccagtgctttgcaaaatagatttgtgagggcagcacctgtatctttcaagagcccgataattgctcttctctgtatgtcagaactaacagtggcaaccatagtcactcaactacaaaatttaaatatgatgggaataactggatcctgaggtggcaggggccaagtggtggcactcagccgtcaaaggcaaggtaggcatagctactgtaatggacagcagaggcaaagcaacaatcagaatagtctgactcgtgtagagctctgscattggctaattaatcacggtgttcctagaagtgaaattgataggaagcctactgcatacctacttaatttatatgagaagaaaattttcagatcgaatggacaaaagactaatttgaattataaaaacagaatcatggctcctcaatcaatttccagaattgagccagtttacagacccagaaccccttgaatgaaggggaggccgggtccccttgaggaaggatcccattatactaccgacaatttatgctgttaatctttctcccatcctcccccaaggagacctccagccttttatcagggtaactgataatgtcatttcagatagtccctgaaatgcctcatcatttccctttctccaatgcacggttgatctgaggtgatgttgattccgggggacccaatgtggtcttccagttaaaatagggccttatggaggtcaggtaattaatggagttttagctcaagtctgacttacagtgtgtccagtgggtccccagactcatcctgtggtcatttccccagggccagaatgcataattggc

SEQ ID NO: 918948 - DNA, 653 bp, Homo sapiens
tagttctgggttcactgccttctcacttgtcccctcgcccctagtaactttctgttcctcaccatccgcagtggcacctccgatgctttcagccaggagaacctagggtttgtgtgctgtggggaccaggttgctcctagggtggacaaatagaaggagatggttttatcgccaccttggaatgtgtgtgtgttttcagacagactctcgctctgtcacccaggctggagtatgtaccatggtgcratcatagctcattacagcctccaactccttcttcagtgtccagagtagcaggggctaatttttttttaattttttaattttttttttgagacagtctctgttgcctgggttggagtgcagtggcgcaatattggctcactacaacctctgcctcctgggttcaagtgattttcctgcctcagcctcctgagtagctggaattacaggcacctgccaccatgcccagctaattttttgtatttctagtagagacggcgtttcatcatattggcccggctggtctcaaactcctgacctcatgatttgcccaccttggcccccaaagtgctgggattacaggcatgagccaccgcgcccagcagcaggagctaatttttaagaattttttgtagcaacaagttgttgct

SEQ ID NO: 918949 - DNA, 580 bp, Homo sapiens
taggcacatctcagattttggaaaattattccagattataagttggcagtcaagcaacgtgatttgatcgaacacttactctatggcaggcactgtccttgtcactgagaacaaaacagtgaagacaataatagctcctgccctcacagagctcaacaatgtaaatggtaaggaaacgaaacggttaaagttataattamtgaaacacgaatagatccctgagctcttgcctttccattatatgaatgaactgtgctggactatttagaattgtttccaccaatttaagaatataatagtagtgtgcttaaatggacattttgttttagaaatttttttaactagaaatagtctcccaactctttaaattttttaatattatactataaatgataaaataaaatacatatttaataaaatgaaaatatgtaaaaatataaactctttaaggatatcagtagtttcaggggcttggcctttcacaactgggcaagtctcacaaatttaatttgtttgttaacaaacaaatttaataaaatcaaacactatatagttatgttatatttttattattttgaga

SEQ ID NO: 918950 - DNA, 603 bp, Homo sapiens
tgactcagggatcttgtgttgtgttgtgttgtgtgtgggtcaccaaaaccgagacccagctttctcctgggagacaacagggtagccaaggacttatttttttgttttgttttgttttgttttttgagacagagtcttgctsggttgcccaggctgaactacaatggtaaaatcttggctcactgcaacttctgcctcccaggttcaagtgattctcctgcctcagcctccggagttgctgggactacaggcatgcgccaccacgcccggctaatttttgtattttttgtagagacagggcttcaccatgctggccaggctggtcttgaattcctgacctcaagtgatctgcccacctcagcctcccaaagtgctgggattacaggcgtgagccacagcacctggccaactttctagtgttctcgggagacctttgcccactcaagtctccagtctctcgggggaagcagtcagtgtgagagaaggaacacagggccccgagccaagccctgctctgcgcctccctcgcgggcaatgagtctttgcatcaaacactcaaagtttctgaacttctgagaaaacaagtgccttgaggtgaatcct

SEQ ID NO: 918951 - DNA, 584 bp, Homo sapiens
ccctcggatgggtcccaaggaggggatgagaaaaagcctgaagactggaaactcaccgcccagattcaaatcccagctcagccagttgttggctttggggcttcttgggcaaggacttcacctttcagaagctgtttccccactgtaaagtggaagtttaaaaygcccccctccgccgggcatggtggctcacgcctgtaatcccagcactttgggaggctgaggtgggcagatcacttgaggtcaagagttcgagagcagcctggccaacatagcgaaaccccgtctctactaaaaatacaaaaattagccgggcgtggtggcagatgtctgtaatcccagctactcgggaggctgaggcaggagaattgaacccggcaggcggaggctgcagtgagccaagatcgtgccattatactccagcctggctgacacagtgaaactccgtctcaaaaaaaaaaaaaaattaaaaattaaaaattaaaaaataaataaaaaatgaaatggctccctcctaggggtcccctgaggattggatgaatacatgtagaatatatagtacagtggcaagcacataaatgctt

SEQ ID NO: 918952 - DNA, 712 bp, Homo sapiens
cctcgtgctattaagttgccacatccttgatggtttaatgcccaactccagggctgcttgctctgcctgcattggttgattcttctggaaaaataaaactctataatattttgatccagggagcccaaggaccatcttcccagctctctcgaattacgacacaatcctcgtcctaactccactagattgccctggttaatggggtaattctgtgagaaaacacaggcgcatcaatattgcagtgtcccttacagaagcgctgagagtaacactattgctttagttggggtcctcatagaacaggtgatacctcatagaattttctagtgctttccaatacctcaattgatatcattcagattcggccgggcgcagtggctcacgtctgtaatcctagcactttgggaggccaaggtgggtggatcacctgaggtcaggagttcgagaccagcccagccaatgcagtgaaaccccatctctactaaaaacacgaaatttagccaggygtggtggtgtacacctgtaatcccagctacttgggaggctgaggcaggagaattgcttgaacccaggaggtggagtttgcagtgagccgtgatggcaccactgcactccagcctgggcgacagagacagagtgagactccatctcaacatatatgtatacacacacacatatatatctcagatcctctagtgcaaagtcacatatc

SEQ ID NO: 918953 - DNA, 732 bp, Homo sapiens
tcagaagatcgagaccagcctgtgcaacatggtgaaaggctatctctactaaaaatacaaaaattagccaggcatggtggtgcacacctgtaatcccagctactcaggaggctgaggcaggagaatcacatgagcctgggaagtggaggctgcagtgagctggattgcattccagcctgggtgacagattgagacttcatctcaaaaaataaaaataaaataactcacaagctgcaatctttcggatgtccacttccacaagcaaactgcaggtcattttcaaagtcaagtgctgtattatgtatttttaagaatttaacttggctaaaactgtgctaccttaagggggctccaatcctttttttttcyttttctttttttttttttgttttagatggagtcttgctcttgtcgcccaggctggagtgcagtggcatgattttggctcactacaacctttgcctcctgggctcaagggtttctcctgcttcagcctcccaagtagctggaattacaggcacccaccaccacacacagctaatttttgaatttttaatagagataggtttcaccgtgttgtccagactggtctcgaactcctgacctcaggtgatccacctgcctcagcctcccaaagtgctgggattacaggcgtgagccacagcgcctggcccaatcctttctttataggccactgttaagttttcaagtgtgaaacaccctagctctatt

SEQ ID NO: 918954 - DNA, 732 bp, Homo sapiens
tcagaagatcgagaccagcctgtgcaacatggtgaaaggctatctctactaaaaatacaaaaattagccaggcatggtggtgcacacctgtaatcccagctactcaggaggctgaggcaggagaatcacatgagcctgggaagtggaggctgcagtgagctggattgcattccagcctgggtgacagattgagacttcatctcaaaaaataaaaataaaataactcacaagctgcaatctttcggatgtccacttccacaagcaaactgcaggtcattttcaaagtcaagtgctgtattatgtatttttaagaatttaacttggctaaaactgtgctaccttaagggggctccaatcctttttttttctttttctttttttttttttgttttagayggagtcttgctcttgtcgcccaggctggagtgcagtggcatgattttggctcactacaacctttgcctcctgggctcaagggtttctcctgcttcagcctcccaagtagctggaattacaggcacccaccaccacacacagctaatttttgaatttttaatagagataggtttcaccgtgttgtccagactggtctcgaactcctgacctcaggtgatccacctgcctcagcctcccaaagtgctgggattacaggcgtgagccacagcgcctggcccaatcctttctttataggccactgttaagttttcaagtgtgaaacaccctagctctatt

SEQ ID NO: 918955 - DNA, 721 bp, Homo sapiens
ccatcaggagagaagagaagtgaacactgatggctcctagggtccctctggctctgatattctctgcttctacttccttcagtgtatgctccatatgagcacaaggaacataacatggcccaattagctcagagtataatttctgagtctctgaatgcctgcgtgccactaggagcaagctgttaggtctgggagctctgggtaatgatgaagaaacatgaaggatgagcatggagaaagagtcacgtgtyggctgagctggggtggccaggcatagtgtaggaccagcctggtgcccgtcacattgggtcctcccatggcctgagggaaaaatccagggctgctttgggaggaggcatcccacttggatgctggcaaaaaaaaaaaacattgcctccagccctcccgtgtaagctagtttcctcattggtaaaatggtcaaagccaaccattttgaaagtgcagtattttattttattttgttttattttattttatttatttgtaatttattatttaatttttgtatttttagtagagatggggtttcatcatgttggccaggctggtctcgatctcctcacctcaagtgatccaccagcctcagcctcccaaagtgctgggattacaggcatgtgccaccgcacccggccgaaagtgcagtatttaacagtctgaacgggatactttgtctgcaaagatctgagaaagagaaagtgag

SEQ ID NO: 918956 - DNA, 618 bp, Homo sapiens
aaaataaatacaactgtcataaattagcactgtgtggaaataaatgtgaacactggtcttgtgtcatttaggccacttggattaaaaaaaaaaatgaaaaagatccatcccaccttcagaaaggaaaaaatggcccttcctgtactcagggacaatgtaaccccttagagctagtcataaccaatccccttgatcctcgctagaaaaaaagaggagcatgtgaccttaggaatcgacggggccagactggatcctygagtaaatatcttggttcgagaagcttacaaagactctcctgagccagtgtttcaaactttctatgatgaactaaatgtgccagtaccagaaattccaggaaaaacaagaaatttgtttttgcaattagccaagcatgtagcccagtctctcaatgtcacttcatgttatgtatgtggagaagctgtaataagagatcaatggccatgggaagcctgagaattagtacctacagtacctgatgaattcctggctcaaaagaatcaccctgataatttctgatcctaaaagcctcaattattaaacaatattgcatagctagagaaggaaaagaattcactcaccgcgtaggatgacttagtt

SEQ ID NO: 918957 - DNA, 580 bp, Homo sapiens
aaagggtctgtgctgaggaggattagtgaagaggaaggcctctatgcggttaagaggaaggcatctgtctcctgcatgcctctgggaatggaatgacttggtgtaaaaccgaccatacattctattctgagacagaagaaaactgccatatggctggaggcgagacatggtggcggcaatactgctctgctactytttaccacaatgagatgtttatgtaaagttaaacataaatctagcctacgtgcacatccaggcacagcaccttcccttaaacttatatatgacacagagtctttcgcttacgtttttctgctgaccctctccccacattcaccctatagttatgccacattcccctcgccgagatagtaaagatagtgatcaataaatactgagggaactcagagaccagcgcgggcgcaggtcctcacttgctgagcgccatccactgggcccacttttcttcctctgtactttgtctccatgtcttatttcttttctcagtctctcatctccaccttgcgagaaatacccatgggtgtagaggggcaggcccccttcacccgggattctggct

SEQ ID NO: 918958 - DNA, 580 bp, Homo sapiens
aaagggtctgtgctgaggaggattagtgaagaggaaggcctctatgcggttaagaggaaggcatctgtctcctgcatgcctctgggaatggaatgacttggtgtaaaaccgaccatacattctattctgagacagaagaaaactgccatatggctggaggcgagacatggtggcggcaatactgctctgctactttttaccacaatgagatgtttatgtaaagttaaacataaatctagcctacgygcacatccaggcacagcaccttcccttaaacttatatatgacacagagtctttcgcttacgtttttctgctgaccctctccccacattcaccctatagttatgccacattcccctcgccgagatagtaaagatagtgatcaataaatactgagggaactcagagaccagcgcgggcgcaggtcctcacttgctgagcgccatccactgggcccacttttcttcctctgtactttgtctccatgtcttatttcttttctcagtctctcatctccaccttgcgagaaatacccatgggtgtagaggggcaggcccccttcacccgggattctggct

SEQ ID NO: 918959 - DNA, 580 bp, Homo sapiens
aaagggtctgtgctgaggaggattagtgaagaggaaggcctctatgcggttaagaggaaggcatctgtctcctgcatgcctctgggaatggaatgacttggtgtaaaaccgaccatacattctattctgagacagaagaaaactgccatatggctggaggcgagacatggtggcggcaatactgctctgctactttttaccacaatgagatgtttatgtaaagttaaacataaatctagcctacgtgcacatccaggcacagcaccttcccttaaacttatatatgacacagagtctttcgcttacgtttttctgctgaccctctccccacattcaccctatagttatgccacattcccctcgcygagatagtaaagatagtgatcaataaatactgagggaactcagagaccagcgcgggcgcaggtcctcacttgctgagcgccatccactgggcccacttttcttcctctgtactttgtctccatgtcttatttcttttctcagtctctcatctccaccttgcgagaaatacccatgggtgtagaggggcaggcccccttcacccgggattctggct

SEQ ID NO: 918960 - DNA, 514 bp, Homo sapiens
agtgcactggtttttttgaatgcaggttgttctagcagtgaagttgtcacatggacagactgaagacttctgtgtagccaggatgttacaatgttacaggtggaattagctgttgttttctcctttattggagtgggttttttttttttttttttttgagatggagtttcactcttgttgcccaggctggagtgcagtggcacgaccttggctcactgcaaccttggyctcctgggttcaagtgattctcctgcctcagcctcctgagtagctgggattacaggcatgttccaccatgcctggttaattttacatttttagtagcgagggggtttctccatttttgtcaggctggtctcaaactcctgacctcaggtgatccacccacctcagcctcccatagtgctgtgattatgggtgtgagccaccccacctggcaggggtcattattttgtgagttactgtaagggcttgagttggttggcctccaacctggaggtggcagctttaagac

SEQ ID NO: 918961 - DNA, 609 bp, Homo sapiens
gctgctccagatgagaaagaatcagcataagaattctggcatcatgaaaaaatctgaatgttgtgacatgactaaaggatcatattagctctctagaaatataccctaaccaaaatggaaactgagaactgacaaagagttcaaagtataaattgcaaggaaattaaatgagattgaagacaaggttgaaaaccaayacaagaaactataaaaacaatccaggaaatgatgggaaagataaatatattttaaaaaatgcaaaaggacttcttgaaataaaaagcctacttaagacatttgaaaatatagttgaaagctttaacaatggattacaccagcagaagaaagaatttcagagcttgaagactgatcattgaaactaatttgtcaaaagtaaaaataattttgaaaaccaaagccagagaaaccatatttctctggtgagaaatatgaattatctaaagcaataaaacctatgacttattagcattcctgaaagagaaaaagtaagccactggaaaacatatttgaaaataactcaagaaaattttcttaattttgctggagagttgaacatccagatacaaaaaattcagagaacatctgtgg

SEQ ID NO: 918962 - DNA, 503 bp, Homo sapiens
cccacactatgctgtgtgaacatttgtgtacatgtttaataatagcgtacacgtttggccgggcgcggtggctcacacctgtaatcccagcactttgggaggccgaggcgggcagatcacgaggtcaggagatcaagaccatcctggctaatacggtgaaaccccatctctactaaaaatacgaaaaaattagccrggcatggtggtgggtgcctgtagtcccagctactcgggaggctgaggcaggagaatggcgtgaacccgggaggcagagcttgcagtgagccgagatcgtgccactgcactccagcctgggggacagagcgagactccatctcaaaaaaagaaaaaaatcgtgtacatgttcaaagtttctccagggtttgaacctaggtatggagttactgggtccccaggtagcaagattcatatgccaagaaccttcatctgcgctagagaagaccaaaccattttccagagtctcataccaatcttcacacccg

SEQ ID NO: 918963 - DNA, 568 bp, Homo sapiens
acgtatctgggactacaggcatgcgctaccacgcccagctaatttttttgtatttttagtagagacggggtttcaccatgttgtccaggatggtcttgatctcttaatcttgtgatctgcctgcctcagcctcccaaagtgctgggattacaggcgtgagccaccacacccggcctgacttttttttgagtacagtcttccctccttttttgtgagttgttccttgtttgggttttccgatgccttttcacgatcaggtcagggtgttctgagtgtctgggtagagttaggttccttcagtggccgcagtctggcctttctctggtggaaatgagtgcggtttcttttgtactttgtaagygctggtggccaagtctctcataaacctcaccttaaaagcatccaaacagctaacgagttgaacccaagagagtaacgctttgtcagctccacactcaacaaatccctagctcttggagcagttctgactatcaaaactgtattcccaaacccttataggagtactgccaaccataggagagacccagaggatgtcagagaaagacat

SEQ ID NO: 918964 - DNA, 691 bp, Homo sapiens
agtggtgattgctgtgccttttcacagttacttaaggataggttttgggatttttttttttagcagctttattgagatacaatttccataatatgaaattgacctgttttaagtatgtaattcaatgaattttagtatgtttacagaattgtacaaccatcaccatatactaatattagaacatttagaacacctaaaaagaaaccttacacctgttcataatcaccccttattcccacctccaccccaggcaaccatttttcaatttgtcttttatagacactccataaatagaattataaattatgtggtcctttgtctagtttattttacttagtgtgattttgaggttcaaccatgtaacatgttatttattcctttgtatcactgaatagtactccactgggtggatattccacaaatacggatattcccttttyttatttttaatccaaagaggttttttggcccagtgtggtggctcacccctgtaatcccagcactttgggaggccgaggcaggcggatcacctgaggccaagagttcaagaccagcctggccaacatggtgaaaccctgcctctactaaaaatataaaaattagaatgggcatggtggcaagcacctatactcccagctactcaggaggctgaggcaggagaatcacttgaacccagaaggaggaggttgca

SEQ ID NO: 918965 - DNA, 636 bp, Homo sapiens
cttgcaatccatcttggaactagcacttcaattttctgaatgctcaagcttaaattcctgtagtagaccagaagcggtggctcatgcctataatcccagcactttggaaggctgaggcgggtggatcacgaggtcaagagatcaaggccatcctggccaacatggcgaaaccccgtctctactaaaaatacaaaaaaaaaaaaaatgagccaggcatggtggcagccacctgtaatcccagctactcgagacgstgaggcaggagaattgcttgaacccgggaggcggaggttgcagtgaactgagatcgcaccactgcactccagcctgggcaaaagagcgagactctgtctaaaataataagaataataaaaattcccatagtaaacactgacccctctctctctttcacatctcacgttcaaaccattacctaagcatacgatcatatagtctttgctttggaaatatatccaaactctgaccacttctcacacctgcaagttctgttccatttaccacgacttctcacccccatgagtgtaatgtctccttctggattccctggttccatcctttcccacacctattctccacccagcagccagagtatttattttaaatgggcatgatgtc

SEQ ID NO: 918966 - DNA, 591 bp, Homo sapiens
tctcttgcaatccatcttggaactagcacttcaattttctgaatgctcaagcttaaattcctgtagtagaccagaagcggtggctcatgcctataatcccagcactttggaaggctgaggcgggtggatcacgaggtcaagagatcaaggccatcctggccaacatggcgaaaccccgtctctactaaaaatacaaaaaaaaaaaaaatgagccaggcatggtggcagccacctgtaatcccagctactcgagacggtgaggcaggagaattgcttgaacccgggaggcggaggttgcagtgaactgagatcgcaccactgcactccagcctgggcaaaagagygagactctgtctaaaataataagaataataaaaattcccatagtaaacactgacccctctctctctttcacatctcacgttcaaaccattacctaagcatacgatcatatagtctttgctttggaaatatatccaaactctgaccacttctcacacctgcaagttctgttccatttaccacgacttctcacccccatgagtgtaatgtctccttctggattccctggttccatcctttcccacacct

SEQ ID NO: 918967 - DNA, 594 bp, Homo sapiens
acatggtggcacatgactgtagtcccagctactcgggaggctgagtcaggagaattgcttgagcccgggagacagaggctgcattgaggggacatcatgccaccgcactccagcctaggtggcagagcaagatgctgtctcaaaaaagaaaaaaaaagaatgtcacatgtcaaggacatcaaaacatgacattggatcaataataaaatacaatcaaaactctcagtaagatattaaataatgattatgatctgttagaatggcccatgttctgtaaggtgtagctaatatattgatcatctatgttctataactttcataagagatgggcatcatcaatgaaggattcatctctacatttttmcaacacctgtcatctacccttctagtccacggcatggtttatgctgactttctcttctctgaacacctttaagttctctgaactattcactaaaacagtagactcctatacactaaatggttaggagagggaatttttctccactaccttcctgttcccagaacccctaatgtggcctcacaagccttgaccagatgtgtatgtgtatgtgtgtgcatgtgtgtgtatga

SEQ ID NO: 918968 - DNA, 565 bp, Homo sapiens
agagttttctatatgtattctggatacaagtccttggttggatatgtgatatgcaaacattttcacccagtctactgtttgtcttttcactttttttaacagcatctttcatagaaaaaaagttctatgttttggtaaagttcaatttatccttttgtttcttgtagagtatgcttttagtgtcacgcctcataactctttgccttacccaagtcacagatatcttctcttctattttcctctaaaagttttgtagtttttccttttacrtctagatctatagtctatgttgagttcatttttgcattaagtgtgaggtgttgatcaaagttctattttttttggaatgtggatgtccaattcaacatcatttgttgaaaagaatatctttctcctatgaattgcctttgcacctttccaaaaatcaattgaacacatttatctgggtctatgtctggagtctctgttctccttcatttatctacttatgttgattcgtttggcaatcccatactgtactgattattgtgatttttatagttaaattttaaaactggtatgactc

SEQ ID NO: 918969 - DNA, 624 bp, Homo sapiens
acagcatctgaaagcctgcgtcctcgctcctggtccctggctcatccatttgtcctttatttatttatttgcttatttactgagacatgatcttgctctgttgcccaggctggagtgcagtggcacaatcagctcactgcagcctcgacctcccaggtcagtcaatcctcctgcctcagcctcccaagtagctgggaccacagacatgcaccaccacgcctggttaatttttgtattttttgtactaatgagagactcactatgttgcccaggctggtctcaaactcctgggctcaagccatcctcctgcctcagcctcccaaattgttgggatgacaggtgtgagccactgcaaccagcctcaccatttattttatacatgccttagattattcattccttcactcgctcattcattcatccatgtctcctttcygttgtccttaggttctctccctgttttctcttgtcttgtttcccttctcatttttccctcgccccaccttctctcctctccctctctgtccctccatctgtgtgtgttgctccttctctctccatcctttctgggtggctccatccctttctccctcatctccccaactctctctatctctctgcctc

SEQ ID NO: 918970 - DNA, 550 bp, Homo sapiens
tctctttttgagatggagtcttgctctgacacccaggctggagtgcagtggtgcaatcttaactcactgcaaactccgcctcctgggttcaagtgattctcctgcctcagcctccagagtagatgggattactggcacacaccaccacacctggctaatttttgtatttttagtagagacggggtttcgccatgttgcccaggctggtctcaaactccagacctaaagtgatccacccgcctcagcctcccaaagtgctgggattacaggkgtgagccatcgtgccccaccccatttacatccttgtctccattgctccttggttacttagcccattatctgcactcgatgtgggactggtatctgacctctagatacatttctgttttgtttttttttgtttgttttttgttttttgttttcctagagaactttctttgtaccaggcatgcttctaagcactttatgatgttcatgcatttacacccccttcacagtcctggcagatagtgacagtgataattcatgcttaacaaatggggaaactgag

SEQ ID NO: 918971 - DNA, 727 bp, Homo sapiens
attatttgtaaaacatgatttttaacttgggcttattatatgtgttcgaaagtatgtcttgaatacttttctcattttaaaataatgtcccagtagagtgggacatagaataaaaatgaaagttctccccttaatacttctcccacacacacacactcctacccccaattctcacttcrctcctcatgggtaaccactgtccacagttcggttaaacaatttttaaatgggtatataattttgcatctggtgggaaaaaattgcactcaaatagttctcctgtttggggacatttaggttgtttccggactgagctctcttgtttaaaacataagtggcagaggattgcatacagcggtagaccatagatctaatggtcctatgttaccctggtgatttccaagtcaagggtagacattaaattagacattgaatttggggataactttctttttcttttcttttctttttttttagacagggtctcgcttttgtcacctaggctacagtgcagtggtacactcatggctcactgcagcctctacctcctgggctcaagcagtcctcccgcatcagcctcctaagtagctgtgaggctaattttttttctgctttttgtagagacagggtctcactatgttgcccaggctggtcttgaactcctgggctcaagcattccacccaccttggcctcccaaactgttgggattacaggcacaaaccactg

SEQ ID NO: 918972 - DNA, 753 bp, Homo sapiens
agtctgtgctgtccatatgcagttactgagtccttaaaacatggctacctggaactcagatacactgtgggtgcgaaacccaccattgtggacattcttgtgcttgcaatatttgaagggaatatgaaaaagtaatgagaactagttcattaatactttttcatattatcactgttaaaatagtaatattttgattctattggcttactaaaataaattttgcctgatttttaaaaatgtggctaagaagagaaaaaatttaagttacactggggaccacactctgttgctatgaggcagcactccactcatccccgcttatttcctacactggctttcttatttctccttgaacaaggcaatcatgccctgggttyatgcacttagcataccatgtggctttttcctttgtctcccctagacctctgttcaaatgtaactttatcagagaggctttccctgagcagattctaaagatgcaccctaatcccccctaatcaccttctcttgctttatttctgttcataggactcaccaccactgatgttatactacccgttggctttgtctgtttattgttgtctcttttaccagaatgtaaacttcaaagggtgggggctttgttttattcatcatctgctctcccagtgcctagaatggcgcctggcatcaagtaggaaaagtccctgcttgcataaagctctgtctcatgagggagactgagggggaagcagatttcttcactgcattata

SEQ ID NO: 918973 - DNA, 605 bp, Homo sapiens
agggaactccctgaccccttgcgcttcccaggtgaggcaatgcctcgccctgcttcggctcgcgcacggtgcgcacacacactggcctgcgcccactgtctggcactccctagtgagatgaacccggtacctcagatggaaatgcagaaatcacccgtcttctgcgtcgctcacgctgggagctgtagaccggagctgttccyattcggccatcttggctcctcccccagatccataatcttatctttgggattctagctcatctttctagaactccttctacatcggagtcaacctccacatgtattgagcacctgtgggatacagggctctaaccagatgtcatttaagagttctttcttctgtgaggctttctcctggttcctcaggaacagagtagtattcagagcaatgctagctgtgataacaaatagatctgaagtatatattagttgcaactcaatataagtttgttctcatttaatagtccaaagagactccaggtgagtgagggaggctctctttcatgctgtcactcagagactcaggccagtggaagttctgctatcttcaacatggtattccaaagtcattattgataataa

SEQ ID NO: 918974 - DNA, 605 bp, Homo sapiens
agggaactccctgaccccttgcgcttcccaggtgaggcaatgcctcgccctgcttcggctcgcgcacggtgcgcacacacactggcctgcgcccactgtctggcactccctagtgagatgaacccggtacctcagatggaaatgcagaaatcacccgtcttctgcgtcgctcacgctgggagctgtagaccggagctgttcctattcggccatcttggctyctcccccagatccataatcttatctttgggattctagctcatctttctagaactccttctacatcggagtcaacctccacatgtattgagcacctgtgggatacagggctctaaccagatgtcatttaagagttctttcttctgtgaggctttctcctggttcctcaggaacagagtagtattcagagcaatgctagctgtgataacaaatagatctgaagtatatattagttgcaactcaatataagtttgttctcatttaatagtccaaagagactccaggtgagtgagggaggctctctttcatgctgtcactcagagactcaggccagtggaagttctgctatcttcaacatggtattccaaagtcattattgataataa

SEQ ID NO: 918975 - DNA, 661 bp, Homo sapiens
aaaagcgcaatattcgggtgggagcgacccgatcttccaagtgcgtccgtcacccctttccttgactcggaaagggaactccctgaccccttgcgcttcccaggtgaggcaatgcctcgccctgcttcggctcgcgcacggtgcgcacacacactggcctgcgcccactgtctggcactccctagtgagatgaacccggtacctcagatggaaatgcagaaatcacccgtcttctgcgtcgctcacgctgggagctgtagaccggagctgttcctattcggccatcttggctcctcccccagatccataatcttatctttgggattctagctcatctttctagaactccttytacatcggagtcaacctccacatgtattgagcacctgtgggatacagggctctaaccagatgtcatttaagagttctttcttctgtgaggctttctcctggttcctcaggaacagagtagtattcagagcaatgctagctgtgataacaaatagatctgaagtatatattagttgcaactcaatataagtttgttctcatttaatagtccaaagagactccaggtgagtgagggaggctctctttcatgctgtcactcagagactcaggccagtggaagttctgctatcttcaacatggtattccaaag

SEQ ID NO: 918976 - DNA, 754 bp, Homo sapiens
agaagggaacatcttctatttgataagcagcatctataaaagctgtacagttaacatactgtttagtgaatgcttttgcccccaccctccacaatattagaaacaaggcaagaatatcttaccactattaaattttttgctagatgggggaactagttagtgcarcaaggcatcaaaagtaagaacaaaggtatggaaatttgaaaggcatagtaaaatttttctctattttcagatgacatgattgtctacatagaaaattctacataaaattctagacataataaatgaaattagcaaagtcaaaaaattcaaggtcaatataaaaatcacttgtgtttaaatttgttgatcataaggaactaaaaaatgaaatttaaatatcatttagaagaagatcaaaaataaaatatttaggaatgaatttaatgaaagatatgcaaaactttaatagtaaaaccaattaacattgctaagagcaattgaaaaggaaaaagaggggagattgagagagataccatgttcttggattggcatattcaatatgattgtggtaggtagacctctaatatggcttccaatgatcagcatctcctggtattcacgtcttacgtaatcctctccctttagtatgtgctgagtctagtgacttgcctctaatgaatagaatatggcaaagatgatagaatgattcttctgagattaggttctagaagactgactactgtcttcttctaactctctcttgcttact

SEQ ID NO: 918977 - DNA, 571 bp, Homo sapiens
tactttgaaacatacccagaatccaaccagttttcactatttccaccactcccactgtgttttcatccaccattatctgccatccattcctacaaattctcccaaatggtttccctccttctttctcagccttcccctttgtggtctgttttcaacacagcaacctgagcataagtcaaatcacatcttccttartatctttcctttgcataaaaccttttaatgttgccccgattcactcagtgtaaaaatctagtttcttacaacatctggcacctcattctcaccttgaccccatttcccagtctctcccactcatcttctctgctccaaccgcactggcttccttgttattcctcgaacgtaccagatatgctttcactgtaagaccttggccagactgtctggaatgctcttcctccaagtaccacttggctcactccttcctccctcaggttgctgtgcaaatgtcatcttctgaatgaaatccacctcactaccctgtttcatattgcaaactgcctctgtggctggcactgcttatcacccacatcctgctgcacctcttctt

SEQ ID NO: 918978 - DNA, 849 bp, Homo sapiens
tggctcacacctgtaatcccagcactttgggaggcggagacaggcggatcacgaggtcaggagatcgagaccatcctggctaacacagtgaaaccccgtctctactaaaaaatacaaaaaattagccgggcgtggtggcgggcgcctgtagtcccagctactcrggaggctgaggcaggagaatggcgtgaatccgggaggcagagcttgccgtgagccaagatcatgccactgcactccagcctgggcgacagagctagactctgtctgaaaaaaaaacaaaacaaaacaaacaaacaaaaaagatatcattccatctattgtgtgtttatctctgtttagttacgcacttgtgtgtagttgcattgacatttaggcagacttgcctattctagacattttcttactatgaaatgcacgtgactagcacagtgtctggttattagtcaattctcattaaatattggctgcataagggatggggatcataggcattcggaatataggaggatcgactctattctggcattattggatgaaaggggttctttattggaaccgactacatttttttgtccttggtaatattagtcttactttgaggcactagggcattttgagactagtgaaactcccatggccttcagaattataatttaaatcttctattcctccagaactcaggacatttaatttatcatgattcataaaagaccagtaataaaccctgtctttatttaaacgtgggcggcattgacttcccgctgtaggaattgggtgttctttatcaacgtctctctatctacttatcacggatcctgcatgtgtacaaaaaggcatctttgtcag

SEQ ID NO: 918979 - DNA, 631 bp, Homo sapiens
gagattgcagcaatgtagttgcctcttcaggctccacttgtaattctagttctttagctatttcctccacatttccaggttcttcctccactgaagtcttgaacccttcaaaatcattcttgagagttggaatcaacttattccaaactcctgttaatgttgctattttgacctccttccatgaatcttgaatgttcttaatggcatctcaaaagcgaatattttttagaatatttcagtgtactttgcccagaaccatcagaagaatccgtgtttayggcagctataaccttatgagatatatttcctaaataataagactggaaatcaaaattattccttgatccattggctgcaggaacctatattgcattaacaggcacgaacagaacacttatgtccttgtgcttctccatcagagctttccggtgaccagatgtgttgtcaatgagcagtaatatttttaaaggaatccttttttctgaatagtaggtgttaatagtgggcttaaaatattcagcaaaccatgctataaacagatgtcctgtttcatttctagagcataggcagagtagatttagagttattcttaagggccctaggagattcaaaatggtaaatgagccttgct

SEQ ID NO: 918980 - DNA, 595 bp, Homo sapiens
gctgtggtctcatatgatggctcaacttggcggttggacgatctactggcagtcccacttacggggttgtggctggattcagttccttggatgctgtcagccagaagccactctcagttccttgatacgtggacctcttcacagagccgcttacaatgtggcaactgctccctcaaagcaagagagggtgccaaaaatggaagcctcagcctgcagccatacccacagcattttcctgcttctccatggtgtctccaccaggtccctgtgaggccattaaagtgacgatagttaacgatctgacatggtgttcccaatggcatcattttatgcctccccaaaattaataatcttatgttggtaaatagaatacagagagtgggagaccacatcaaaattgttatygctgggtagaaaattaaatgtgttttcttttttccatgttgcttattggtatcttcctcaataaacattttatcacaaaataagtggggtggacagttgcaggagcagataaaaaaaattttttaacagaaaagcagagcaaacaactccagttggacttgaccttcgttctggccaggctcatgtacag

SEQ ID NO: 918981 - DNA, 597 bp, Homo sapiens
ctgttaaatttattgagcctttttttatggcctagcgtatggtctagcctggagaatattccatatgtacttgagaagaatctatattctgctgttgttgggcagagtgttctatagatgtttcttaggtctggttgcttttagaatattgttcaagtcttctatttccttgctaatcttctscctagttgtcctatccattatggagtgccagatgttgacatctccaactattattataaaattgtttttccctttgattctgtttttgtctgtgtattcagggctctgtttttgggtgcaaatatgtttataattgtcatatcttcttagtggattgaccctttataatattctctctttctctctagtaatatttttatagtctattttttctgatatgagtacaaccccttctagctttcttatggttgctgtgtgcatcagattcctttctccatctttttactttcaaactatttgtgttcttgaatctaaagtgtctcctgtaaacagcatcgagttggttctttttatccagtctgacaatctctgccttttgattggattgtttcatccattcacagttaatgttat

SEQ ID NO: 918982 - DNA, 647 bp, Homo sapiens
cccactcacgcacggctgatgcacttgtggctaaatgcggtgcagtcagggccccgggccagattcagggcaggaaatagaataccacctccattgccagggaaacaatggtctacggacatgatttaaactggagccaacgagaacgctcagagggccgaccagcagaggaagggagaccagagggcagcttgcacagatcttgtcttgggttataactgttgacaagmcacttaactgcctccaggtttaagtttgtctgtgtataagatggaggtaacaatatttatacatctcactggagacttatgaaaacaagattttggacagatcccttgggacccatggatggaaagtggtatgtaagtgcagtgataaacctactgtgtgtgtgtgggggggtgttttcagcagtgtattagggacttgtagacccaccagaaaacacttttggagtctgatcaaaaacgacaagaaaaatgagcagctcttggttgcaagtgcatgggtttgctttggttttgtacaggtctgggagaattgcatgtgtaactcagacttcagaattgttttccacctgtcgctgtgatgagtcatacaggtgctcagatcatctgagaatgctgtagtgattgttcccaaatatt

SEQ ID NO: 918983 - DNA, 677 bp, Homo sapiens
tgtccccactagagagaaaaggccaaattgtggcctcaaaaaggctaaatttatcagaaatgaaagtaacttttaaaaaccacatttactgagtttcaaaactgagatgactatattaactgattttaacctgttattttttcttgggaggccaacrcaggaggatcacttagcccaggagttcaagatcagcctgggcaacatagtgagaccctgtcttcacaaaaaaatttttaaaataaaaataaaaacattaaccaggcacagtggctcatacctgtaatcccagtgctttgggaggccgaagtggggggatcacttgaggtcaggagcttgagaccagcctggccaacatggtgaaaccccatctctactaaaaatacaaaaattaaccaggtgtggtggtacatgcctgtaatctcagctacttggcaggctgaggcagaagaatggcttgaacctgggaggtggaggctgtagtgagcagagatcgtgctactgcactccagcctgggcaacagagtgagacttcacctcaaaaaaataacaaataaataaaaatatttaaataaatttgacttcaaaatatttaagcacagaatcaggctctggtcatttgtcaatctgttggtttacatatgcagataaattgtgcaggacagcatggaaagataaaa

SEQ ID NO: 918984 - DNA, 600 bp, Homo sapiens
ttttcagatgataaaatatgcataacaaagaatttgccatattgtttttaagtatactattcagtgacattaagtacactcccattgttgtgcaaccatcaccaccacccatctccagaaccttcttcatcttcccagactcaaactatacgaatcaaaccagaactctccattcttctctccctgcagtcctcacaaccacccttctatattctgtctatgaatctgaccactctacgtagttgacataagtagaatcatacagtatttgtccttttgtgactcgcctttttcactaagtataatgtcttcaatgttcatccatgttgtagcatttttcagaatttccttacttttttaaggctgaacaatattccattgtatgtatataccacattttgtttatctgttcattcaytgatgaacatttgggttgcttccaccttttggctattgtaaataatgctgctatgaacacgggggttttacaaatgtctcttcaaaatcctgctttcaatttttttgggtatatacccagaagtgaaattgctggattgtttgacagttctatttttgatattttgaggaaccactatactg

SEQ ID NO: 918985 - DNA, 627 bp, Homo sapiens
tctcgcgggtgctctgtcccagggagttgggagttttatctataagcccttgacaggggctgctgcctttctttcagagatgccttgcctagtgaggaggaatctagaaaggcagcctgtcctcaggcactttgccacactgccatgagttctgcacagtcagagttaacactgtaaggggaaaaccacctgctcaaccctcagtaatggcaggtacccctccctgcaccaagctcgagtatcccaggtcaactttagactcctgtgctggcagcaagaatttcaagccagtggatcttagcttgctggtctccataggagtgggatctgctgagctagamcacttggcttcctagcttcagccccctttccaggggagtgaacagttctctcttgctggcattccaggagccactgggcgggggggagcctcctgcagctagctcagtgtctgcccaaacagccacctagttttgtgcttgaaaccgagggccctggttgtgtaggcacccaagggaatctcctggtctgtgggttgcaaaaaccaagggaaaagtgtagtatctgggccagaatgcacagtccctcacagcgtcctttggctaggggagggagttcactgacccc

SEQ ID NO: 918986 - DNA, 563 bp, Homo sapiens
gcccctgcattccatccatccattcccccaaacatgggcatgttgctatcagcagggagctgtgatggacccctcacagggtcctcttattcctcgtgcaagcctttccctgggaagttcctcccagcattgctggtcagggggaacacacactcacatcttcmctaaatgctaccagtgctatggtgttatcagaaactttatttatttattttttgccaatatgatagctatcaagctaccccatctctactaaaaatacaaaattaggcctttagtagaaaccctgtctctagtaaaaatacaaaaattagctgggcatggtggcacacacctgtaataccagctacttggtggctgaggcaggagaattgcttgaacccaggaggcagaagctgcagtgagccaagatcgcaccactgcactctagcctgggcaacagagaacctgtcttaaaaacaaaaacaaaaaaaatggcacaggtctgattattaggaagctgaggttcttttttatacttagtattcactgaagtgtgaattacctttcatgtcctctaaaca

SEQ ID NO: 918987 - DNA, 486 bp, Homo sapiens
aatgggaacaacacaaaatacaatgaggtattcctttgtatggcacccctttcaagaagaaaacaaaacaaaacccaacctgtgagcctctctgtaggcagcgtactcaccaggagacaggaaagctagaagcaccagtagggcccaccgcatgccttcctctcgggggccttggaaggaaacggaccagatgaagaggagcagaagatcctcttaaaactcmggccccactcaacaaggaagtgatccctagcacagaagacagtaggaggagctggtttcctgagacacaggcagagagaagtgactgaagatgtgtcttaggggactcccaagccttcctcccagaaggggtggtgcctgggaggacctgcagaggagctcctgcatctcctcaggccctttcttcggcgccctcttgtggcagctgagagcaggcccagggcagaagggaggcaggggcattaagagctcaggcctccagct

SEQ ID NO: 918988 - DNA, 635 bp, Homo sapiens
atgtggaccaatcataatctaattttctaatcagtgttaaagataaattcataaaaagaaccagagaaaagaagacatttcactaacagaggaacaacatgaaggtagcagtagatttctcaccagaaataatgaagcaaaaagacagtgaggcaaagtactgagaaaaagaaactgccaacttataattatatgccccttgaaaatactttctaaaataaaaattcaatgaagattttcagacaaacaaaatcagaaagaatacatcaccctcatatacacactacaactaatgtggaagatatctttcaggcaagggaaaaatgataacagaactatgcatstacacaaaggaggagaaccagaaatagtaactgcctaggtaactatatgtgagtttttattatttaaatcttttaaaaagataattggctgcttatacaaaaataataacaaaataatgtgaagtttaaaacgtagataaactaaaatcaatgacaaaaattgcataaaaaacagaagtggagaaatgtgagtatattatcattagatttttatactgtaccttaaatgacatcatataattgaaagttagactgtgataaattaaaatgtacactaaaaccctaaagtaa

SEQ ID NO: 918989 - DNA, 635 bp, Homo sapiens
atgtggaccaatcataatctaattttctaatcagtgttaaagataaattcataaaaagaaccagagaaaagaagacatttcactaacagaggaacaacatgaaggtagcagtagatttctcaccagaaataatgaagcaaaaagacagtgaggcaaagtactgagaaaaagaaactgccaacttataattatatgccccttgaaaatactttctaaaataaaaattcaatgaagattttcagacaaacaaaatcagaaagaatacatcaccctcatatacacactacaactaatgtggaagatatctttcaggcaagggaaaaatgataacagaactatgcatctacacaaaggaggagaaccagaaatagtaactgcctaggtaactatatgtgagtttttattatttaaatcttttaaaaagataattggctgcttatacaamaataataacaaaataatgtgaagtttaaaacgtagataaactaaaatcaatgacaaaaattgcataaaaaacagaagtggagaaatgtgagtatattatcattagatttttatactgtaccttaaatgacatcatataattgaaagttagactgtgataaattaaaatgtacactaaaaccctaaagtaa

SEQ ID NO: 918990 - DNA, 599 bp, Homo sapiens
gaatgttctggaaatgtctgttacatctatttagtcagattaactaagaaaaaaagtagagaaaactagaataaataaaatcagagacaaaaaaggaaatgctataaccgataccatagaaatacaaaggattgtaagaggctattgtgaacaattatatgccaacaaattggataaactagaaaaaatggatacatttctggacacatataacctaccatgaagaaacagaaaacctgaagaatcaataacaagtaataatattaaatcagtaaaaagtctcccatcaaagaaaagcccaggagctgatagcttcattactaaattctatgaaacatttaaagaataactaacaccaattctactaaaactattatttaaaaattgaagagaagggaatacattcaaaygcattctacaaggcaagcattacgatgataccaaaatcagacaaggacacaatgaaaaaagaaaactacaggccaatattcctgatatatataaatgcaaaatccctcaacaaaatactagcaatctgagttcaacagcacattaaaaagttttttcaccattatcaagtgggatttaatccaggaatg

SEQ ID NO: 918991 - DNA, 617 bp, Homo sapiens
gatctccatctgtgaaggcaaggggactgtaataaagacacaacatggagaaggcacgagctcagaacctctctgtcctcaacacaggtcagaacacctcctggctgtcttccccaactccaagctctaatttctgtagactcgtggcaaactttgccaaatccaaagaaaaatagccaggatggtgaagtgtctagacttcttgttgtatgtggcatcaaaggagttgtttctgtctcagtgatgcacacaacaggcatgtaatgagcacctttatgtgccaagtgccaattgtaggtatccaagatgcaaagatgaggaacagaagtcagtgcaaacctttccagaaacctttcaagttattgacagagacacacatgtattgcaattctgacagcaatcagaaatacaaacaagaggccatgggggcatgaaggaggagygacatttgagtggagtcctgagagactcagttgacattctccaagaagacaagaaaaataagatggacaattatgggagaagaatagcttgtgctgcaggtgaggtttgggaacctagcagtgggagatggtcattacagcagaactcttactgtccctagagccatcctagag

SEQ ID NO: 918992 - DNA, 572 bp, Homo sapiens
cttctagctcagcatgacagaagctctactttggatggttttcaccaaaatggtgctccctctcccctcagttcacagttatgggtacaaaatctcactgggagaggcaggccacaggcatttcttttttttctttttttttttttgagacggagtctcactctgttgcccaggctggagtgcagtggtgtgatcttggctcactgcaagctccgcctcccaggttcacaccattctcctgcctcagcctcccaagtagctgggactacaggcacccgccaccacgcccggctgattttttttttttttttgkattttttagtagagacagggtttcaccgtgttagccaggatgaactccatctcctgacctcgtgatccacccgcctccgcctcctaaacggctgagattacaggtgtgagccacggcgcccagccgccaccggcatttcttatcccctctagctccaagctgcagagcctagattctggtgagtgcacctaagaagtcagactcctttcctccatctagcccctactaataggtcctatcctaggtgcagcatggcacg

SEQ ID NO: 918993 - DNA, 588 bp, Homo sapiens
gaataactcagactgaaccctgagagcacgagtctcataggttaagctgaaaacattcccaaacattctgcaacagggaaaatgtttccaggaagcagtgggggactaggttacttttctaggtggagctgcctagaaggcagcaggtcacatttgtgctaagtatagaatcaaagaaaaaatctggggcctgggtaagtgtgctaaggatagcagcattcatgaaayggtgaatttagagcagacatgtccagaagaaagaacaaaaaagaaatttgataagctatgtatttactgtaatttttgaagaagaaacgaagcaattcttcaagggagatactgggaatgccttctgcagatctgcacagggacactgaataccctgactgaccatacccctacaaaaggcttttgcagaaaatacataaaacatcttcatataaacatttcttaaatcagcccatacctaaagtttgaagatatgatattaaactgccatagtctgaaggttttcctaatgggcaaaagtattccaggtttattgttcctctttctcattcttttaatttacatatactttacatagag

SEQ ID NO: 918994 - DNA, 588 bp, Homo sapiens
gaataactcagactgaaccctgagagcacgagtctcataggttaagctgaaaacattcccaaacattctgcaacagggaaaatgtttccaggaagcagtgggggactaggttacttttctaggtggagctgcctagaaggcagcaggtcacatttgtgctaagtatagaatcaaagaaaaaatctggggcctgggtaagtgtgctaaggatagcagcattcatgaaacggtgaatttagagcagacatgtccagaagaaagaacaaaaaagaaatttgataagctatgtatttactgtaatttttgaagaagaaacgaagcaattcttcaagggagatactgggaatgccttctgcagatctgcacagggacactgaataccctgactgaccatacccctacaaaaggctyttgcagaaaatacataaaacatcttcatataaacatttcttaaatcagcccatacctaaagtttgaagatatgatattaaactgccatagtctgaaggttttcctaatgggcaaaagtattccaggtttattgttcctctttctcattcttttaatttacatatactttacatagag

SEQ ID NO: 918995 - DNA, 594 bp, Homo sapiens
aatgaggtagccccttctaactagagtggtgtcataggaggcctagtggagggtcaggaccctcaccacccccactgcataatgccctcccaccacctttgtcagcagaagctatggttagagctgtaatgaggtcttgcccagcgagactggtatcagaggaagcatcatgggaggccagaaccctcactagcactcagcagcaacagggagcctctctctaccacaggtaacagaagaggcttagggggtgcctggaattaatgaggcaatgcctactccttccttcactggggtagtatgaaaggaagccaactaaaacaaaagatttaaataagatccatagtcttataatattcagaaagttcaggcttcaataaaaaaatcattagtaataccaagaaccaggaaaatcaccacttcagtgaaaaagaataakcattagacactaatgctgagatgtcagagatgatgaaattatctgaagaagatttggaaatagccatgatacaaaaaaaaaaaaaaaatcttcaatggcaaatgtgaaaatgcttgagccaaattttttttcccaagacagagtttcactcttat

SEQ ID NO: 918996 - DNA, 668 bp, Homo sapiens
aaagtaaatgagttccaatacgtgtgccaatgaggaatttgataatttaaaaaaattggatttggttttgtcactagatcaaaaaagtgacacactaattaaatgcagtgctacataataattttaagtgtaactgcagtataatttttctgacatgtatttacaatccatctccatcataattatcatgcacagattatgttactttgtttttcaagttctccactatctccttgaagtgcaggcttttcaaatatgggatcatttttaaatatacagtgcctacaatacctatcttatcacaggacctcattatatgaataacaacaatactagtatttatgctaatacctaatgttctggaaagccaaccttgtattacttttcagttcattttataaaagtaagaatgttggggaaggagcatcattttctagcttgtctgtaaaacaaaagagtttctcctrttctttcctatgccatccatctcttcccttactagtgacaggtaggcttgtatacttctaagtccattagacatgacacaaaggttttgacaaatgtgagtgaggtgccttctgcagtttttaatgggaaggagcatccataccacacatgttttcaaggaaaatggtcccagtccttcgaacccaaggaatcctggtgga

SEQ ID NO: 918997 - DNA, 599 bp, Homo sapiens
tctgccatcttttccccaaccccaggttgcacagcttgtggctccaaaagagttccctccttgtatctcaggagaggagaaggaagagtaaaaacgactttcttttgcatcttggataccagctcagccacagtatgayagggcatcagtcagagtagtgaggccctagctcctagatgacatttctagacacactctgcggcagaggaaatgtgctaccttgaggataaagacccagtcctggcagaacacatcacctgctgaataaagagcctttgggccctggataaccagcagtaatacctaggtagtatgtcatgggccatgggtgagactctgagacttgctagcttcaggtgagactcagcacattccaacctgcggtaaatatagaaagagactccttctcctcaagaaaataacagggcaaagtaaataagactttgtcttgcacctgaggtattagcttggccacacaggggtagaacaccaagtgggttactgggttccccaattccaggcctttgctcttggatggcctttctgtatctaccctgggtcagaggagagcctactgcccaaaaggatgagtctcaggt

SEQ ID NO: 918998 - DNA, 633 bp, Homo sapiens
catttcctggcatacaactcctaaaatccttgggatcttcaaagtgctctctgttgtgtgtcttttgtctgataggctcagggtggggctggtcacatgaaagaccaaggcaggattagaaggttgggactttcagccccactcctcaacctccaggaagggaagasggaagggtcacccaccaatagccaatggtttcatcaattgtgcctgtgtaattaagcctctataaaaacccaagaggacagggtttggagagcttccagatagttgaacatgtggaggttcctggagggtggtgcgcccagggagggtatggaaagtccatgccccttccctcataccttgccctatgcatcttttcatctgtgtcttttgtaatattttttataaaaaatcagtaaatgtaaataagcatttcgctaaattctgtgagccactccatcaagttaatcaaacccaaagagaggtttatgggaatcccaaattggagccagtccctcagaagttccagatgtttgaacttgtgacttgtgtctgggagaagaggggcagtcttggggactgagcctctgacctatgggatctgacactgtcttcagcatagatagtgccagaattgaattggaagac

SEQ ID NO: 918999 - DNA, 757 bp, Homo sapiens
atttctaggtcgaatggacaaaagattagtttgaattataaaaacagaatcatagcccctcaatctatttctagacttgagccaacctgcagacccagaaccccttgaatgaaagggaggccaggttcccttgaggaaggaccacactataccactgacaatttatgctgttaatctttctcccatcctttcccaaggagaactctggcctttttaccagggtaactgtgcactggggaaagggaaatgatagaccttttggggactactggacattggctctgagcagacattaattccgtggaacccaaaacatcactgtggtcctccagttaaagtagcggcttatggagatcaggtcattaatggagttttagcagaggtccgacttagagggttccaataatgggtccccggactcatcctgyggtcatttccccagtgccagaatgcataattagcacagacatacttagcaactggcagaacccccacattggctccccaactggtggggtgagggctgttatggtgggaaaggccaaatggaagccattagaggtgcctctacctagaaaaatagtaaatcaaaaacaatgtcacatccctggagggattgcagagattagtgctgccattaaggccttaaaagatgcaggggcaatgattcctacaatatccctgttcgactctactcagcctgtgcagaagacaggtggattttggagaatgacagtggattattgtaagcttaacc

SEQ ID NO: 919000 - DNA, 757 bp, Homo sapiens
atttctaggtcgaatggacaaaagattagtttgaattataaaaacagaatcatagcccctcaatctatttctagacttgagccaacctgcagacccagaaccccttgaatgaaagggaggccaggttcccttgaggaaggaccacactataccactgacaatttatgctgttaatctttctcccatcctttcccaaggagaactctggcctttttaccagggtaactgtgcactggggaaagggaaatgatagaccttttggggactactggacattggctctgagcagacattaattccgtggaacccaaaacatcactgtggtcctccagttaaagtagcggcttatggagatcaggtcattaatggagttttagcagaggtccgacttagagggttccaataatgggtccccggactcatcctgtggtcatttccccagtgccagaatgcataattagcacagacatacttagcaactggcagaacccccacattggctccccaactggtggggtgagggctrttatggtgggaaaggccaaatggaagccattagaggtgcctctacctagaaaaatagtaaatcaaaaacaatgtcacatccctggagggattgcagagattagtgctgccattaaggccttaaaagatgcaggggcaatgattcctacaatatccctgttcgactctactcagcctgtgcagaagacaggtggattttggagaatgacagtggattattgtaagcttaacc

SEQ ID NO: 919001 - DNA, 588 bp, Homo sapiens
agctgactcttggtgagctcctggatggaccctggtcaccagaaagaccaaagccatgatgagaagcttggtactttcagctctaccctcccaacatcctccaggaagcagggaggggctggaagttgggctaacaatcaatcatacctatatgattaagccttcataaaaatttctaaactatggaattcgggagcttctgagctagttgagcacatctatatgccaggagaatggtatgtagcaactacatgggcacagaatctcctgcacctgggaytcttccaaaccttgccctgtgtagttcttcatctggctgtttatttgcatcctttaaaatatcgtttgtaataaattggcaatagtaagtaacatttttctgggttctgggagctgttctagcaaatcattgaatccaggaagtgggtagtgggaacctcccatttatagctggttgatcagaagcacaagtgacacctgaacttgcaaccgggctctgaagtgagatagtcttgtaagactgattccttaacctatggggcctgagctaactccaggtagatagtatcagaattgcactgaatttta

SEQ ID NO: 919002 - DNA, 603 bp, Homo sapiens
agctcccagtgtgatcaacgcagaagacactgatttctgcattttcaatggaggtacctggttctcgttgggactggttggacagtgggttcagcccacggagggcaagccaaagcagggcagggcatcacctcacccgggaaacacaacgggttgcaggatttccctttcctagccaagggaagccgtgacagactgtacctggaaaatggggacattcccacccaaatactgcgcttttccaatggtcttagcaaatggcacaccaggagataatatcctgtgcctggcttggcgggtcccacacccatgaagccttgctcactgctagtgcagcagtctgagatcaacctgcgaggcagcacccwggcagggggaggggcgtccaccattgctgaggcttgagtaggtaaacaaagcagccagggaagcttcacctgggcggagctcaccgcagctctgcaaggcctgctgcctctgtagacccaacctctgggggcagggcatagctgaacaaaaggcagcagaaacttctaccgacttaaacgtccctgtctgacagctctgaagaaagtggttctcccagcatggcatttgagcaga

SEQ ID NO: 919003 - DNA, 464 bp, Homo sapiens
ctaagcaaacttgcttgcagcagcccctggcaaggccccggtgccctagttgcatgataatgaagtcagagtggccgggagtctctgtgctctggagggctgggctgtctctgatttcacagcctggctggccaagccyagccactgggggccactgggagcagacatgttgcctggcatctgctgcatggccttctcttattctctctgggtctgacacgccctcatgggctgcaggatggacagttcatgggaaggcagtgagaaatcccacaggaaagtaggagtgggtcttgggtttccagctaaactgtcaatgtcatgagaacctcggtaggagtgttggatgtctagcccttgggaggacagcaaagaggggggaatacaattgagaggctgaccaaagagaagcttctgggctttgctgtctctgttttctcccagtgaataagaactcttttccc

SEQ ID NO: 919004 - DNA, 464 bp, Homo sapiens
ctaagcaaacttgcttgcagcagcccctggcaaggccccggtgccctagttgcatgataatgaagtcagagtggccgggagtctctgtgctctggagggctgggctgtctctgatttcacagcctggctggccaagcccagccactgggggccactgggagcagacatgttgcctggcatctgctgcatggccttctcttattctctctgggtctgacacgccctcatgggctgcaggatggacagttcatgggaaggcagtgagaaatcccacaggaaagtaggagtgggtcttgggtttccagctaaactgtcaatgtcatgagaacctcggtaggagtgttggatgtctagcccttgggaggacagcaaagaggggggartacaattgagaggctgaccaaagagaagcttctgggctttgctgtctctgttttctcccagtgaataagaactcttttccc

SEQ ID NO: 919005 - DNA, 673 bp, Homo sapiens
tgcatttccaactgaggtaccaggttcatctcactggggcttgtcagacagtgggtgcaggacagtgggtgcaggccacggaccgggagccgaaacagggtggggcaccgcctcacctgggaagcgcgaggggtcagataattccctttcctagccaagggaagccgtgacagacggcacctggaaaatcgggtcactcccaccctaatactgtgcttttccaacagtcttagcaaatggcacaccaggagattatatcccatgcatggctgggagggtcccacgcccacggagctttgctcactgctagcacagcagtctgagattgaatggcaaggyagcagtgaggctgggggatgggcgcctgctattgctgaagcttgagtaggtaaacaaagcggctggaaagctcgaattgggtggagcccaccacagctcaaggaggcctgcctgcctctgtagattccacttctgggggcagggcatagctcaacaaaaggcagcagaaacttctgcagacttaaacatccctgtctgacagctttgaagagagtagtggttctgccagcatggagtctgagatctgagaatggacagactgcctcctcaagtgggtccctgacccccgagaagcctaactgggaggcaccgcccagtaggggccaactgacaa

SEQ ID NO: 919006 - DNA, 673 bp, Homo sapiens
tgcatttccaactgaggtaccaggttcatctcactggggcttgtcagacagtgggtgcaggacagtgggtgcaggccacggaccgggagccgaaacagggtggggcaccgcctcacctgggaagcgcgaggggtcagataattccctttcctagccaagggaagccgtgacagacggcacctggaaaatcgggtcactcccaccctaatactgtgcttttccaacagtcttagcaaatggcacaccaggagattatatcccatgcatggctgggagggtcccacgcccacggagctttgctcactgctagcacagcagtctgagattgaatggcaaggcagcagtgaggctgggggatgggcgcctgctattgctgaagcttgagtaggtaaacaaagcggctggaaagctcgaattgggtggagcccaccacagctcaaggaggcctgcctgcctctgtagaytccacttctgggggcagggcatagctcaacaaaaggcagcagaaacttctgcagacttaaacatccctgtctgacagctttgaagagagtagtggttctgccagcatggagtctgagatctgagaatggacagactgcctcctcaagtgggtccctgacccccgagaagcctaactgggaggcaccgcccagtaggggccaactgacaa

SEQ ID NO: 919007 - DNA, 395 bp, Homo sapiens
gcaggcacagttggagcttctcccattggagcttggtgtgagtgcaactatagacagtctttctggaagacatcagggtgactgcatccccataggaggggcaccctctaggttcaagcttgtatgagagacgttcacaatttttctctatttggaacatcaaaattcctgcagatgaaaagaggtgsctgtctggagatgaaaagctggagcactgaaacaggagtgtgtttgagagggataactttcctgctaacctggcaggggagctgaggtggctccaacccttaccccaggtaagacctcattgcaactcactcctccagccacctctgtcaaggctgagacctctgcccatcactgggtattgcatttacccacctgctttagccaca

SEQ ID NO: 919008 - DNA, 650 bp, Homo sapiens
gctgctgtttgaaaaattttgaaatgcaagatccacaactagatggaaggcactctagtctttgcagaaaaaaatgtacctgaatgtacattgcacaatgcctggcacaaagaaggaagaatataaatgatagttcgactcgtctgtggaagaacttacaatcatggggaaagatggaataaaaacattttttaaacagcatgaaaacatacctatttgtgcatttcctttgatttacacccccacatccaatcagtgatcaggttctattgattctgcttccctgaagcctctgtatcattgccaccttcctcattcccttggttttgcctcagyttagaatctcatcattgagcatccactctagtccttgccaaagtggatcacaggccgggcacagtgtctcacacctgtaatcccagcactttgggaggccgaggcgggcagatcacgaggtcaggcgatcgagaccatcctggctaacatggtgaaaccctgtctccactaaaaatacaaaaaattagctgggcgtagtggcgggtgcctgtagtcccagctacttgggaggccgaggcaggagaatggcatgaacccaggaggaggagcttgcagcgagcccagatcgtgccactgcactccagcctggacga

SEQ ID NO: 919009 - DNA, 625 bp, Homo sapiens
agcccagatcgtgccactgcactccagcctggacgacagagcgagagtctgtctcaaaaaacaacaaaaacaaaaacaaaacaaaacaaaaaaacaaagtggaacacagcaccgtagagatacacaagataatctgttaggggcgagaggaaatattagaggttctatttatacttatttttaaataagaacaaattaagttttattaatcttttatttatagatagccactgtccctcaggtgtcaggtaggggtggatgcctcctagagaagggtgagtgatccacagtcctgagcactggataccttcactctttcacctttaacaatgttatttcactttcagactgaatgcacccagtgcatttaaggtcctgttctcttaacacatacgctccatccaaataagaggtcagagtgatcttgaaaatctgctgtgcyacgtgggggttactgttaattcatggcaaagtacttaaaattattatgcatttttctttttacaagaagacaagtggggaaaaaatgtattaaccttttctgtgataaagtccctgtcagtaatttttaacctggaagatatttttcaataacacttttatatctgcttcttcaagattaagg

SEQ ID NO: 919010 - DNA, 592 bp, Homo sapiens
atgctgtcaaaaatggcaggatttccttcttttctaaggtcaagtaatattcctttgtgtgtgtgtgtgtgtgtgtgtataccacatttatatacatatatatatatatatatatatatatatatatatatatatatacacaccacattttcttcattmatttatctgtcagtggacactttggttgtttccatattttggctattgtgaataatgctgcaatgaaattgagagtgccatgcagatatagtatctctttgaaatagtgactttatttcctttggatatatacccagaagtggaattgctggatcttatggtggttctgtttttttttttttttttttttttttttaatagtctctctgtgttcacccaggctggagtgcagttggcgccatctcggctcactgcaacctctgtcaagcgattctcatgcctcagcctcccagttagctgggattacaggcaggcgccaccatgcctggctaattgttttgtatttttagtagagatgtggtttcaccatgttggccaggctggtctcgagcttctgacctcaggtgatctgcaagtgctgggattacaggca

SEQ ID NO: 919011 - DNA, 592 bp, Homo sapiens
atgctgtcaaaaatggcaggatttccttcttttctaaggtcaagtaatattcctttgtgtgtgtgtgtgtgtgtgtgtataccacatttatatacatatatatatatatatatatatatatatatatatatatatatacacaccacattttcttcattaatttatctgtcagtggacactttggttgtttccatattttggctattgtgaataatgctgcaatgaaattgagagtgccatgcagatatagtatctctttgaaatagtgactttatttcctttggatatatacccagaagtggaattgctggatcttatggtggttctgtttttttttttttttttttttttttttaatagtctctctgtgttcacccaggctggagtgcagttggcrccatctcggctcactgcaacctctgtcaagcgattctcatgcctcagcctcccagttagctgggattacaggcaggcgccaccatgcctggctaattgttttgtatttttagtagagatgtggtttcaccatgttggccaggctggtctcgagcttctgacctcaggtgatctgcaagtgctgggattacaggca

SEQ ID NO: 919012 - DNA, 709 bp, Homo sapiens
tgattcaggatttgttaattcagtgtttgtgacactttatagaacacaactactatgaataaaaataatcagctataggctgggcgcggtggctcatgcctataatcccagcactttgggaggccaaggtgggtagaacacctgaggtcaggagttcgagaccagcgtggccaacatgctcaaccccgtgtctattaaaaaaaaaaattagccgggcatggtggcacaagcctgtaatcccagctactcaggtggctgaggcaggagaatcacttgaacccaggaggcagaggtcgcggtgagccgagattgagccattgcactccagcctgggcaacagagcaggactctgtctcaaaaacaaaacaaaacaggccaggcgcagtggctcatgcctgtaatcccagcactttgggaggccaaggtgggtggatcacgaggtcaggagttcaagaccagcctggccaacatggtgaaaccccgtctctactgaaaatacaaacaatagctgggtatgatggcatgtgcctgtaatcccagctacttgggaggctgaggtgggagaaytgcttgaaccaggacccgggaggcagaggtagcagtgggccaagatcgtgccactgcattccagcctgggctgcagagtgacactctgtctcaaaaaaaaaaaaaaaaaaaagaaaagaaaacaaaacaaaacacaacaaaa

SEQ ID NO: 919013 - DNA, 741 bp, Homo sapiens
aaggtcatgtctccagtccttcctctaagctccatgcccatacaggccatgacctactctggacctccaccatccaaaggcacctcatactcaacgtagcaatgaccaaactcatgatctcactcctaaatctggttttcctccagagccattttccttcactgaatagcatcaccatccagtcaatagtgcatgtcaaaaagcctggttaacttttttgaccttgccatatttctccccatattcagtccaacactaaatctgtgggttttacctcttaaggtgccttgaacccatccatatctctccatcttcaatgacatcatgttacctgtgccttcatgccttacctgcgcttctgyacctgcacttctgatccaccctggaatggatcattctgtgcacagcggccagtctgctgtttcagaaatgaaaatcaactcatgctactctcctgcttttgatctgtctggctgcttgtcattgttcttagaataaaattcatactacttactctgaattgctggttcctacttgatcttggcccccgactacttacccaacctcatcacctgccataatttctctcattcaggatcactctagccctgctttctactcttcagatactccaagttccctcttgtgccagggtcttcacatttgctacttcctcagtctggaaaaaaatctccccaactccatcatccacataatgcttcctgaccatcagcatcacta

SEQ ID NO: 919014 - DNA, 619 bp, Homo sapiens
cagagtcatgaagcccctgttccaggcctcccagataacatttacagacataccatgggccagaaggggacccgctgccttgacggaaaggattcagtccttgcagcattcatcacctgctaacttaagagtccttgtgccatgaataatcagtagcaattatccaggtattacattgaatgccttgggtgagcatctgaaacttgctggctttaggtgagactgagcacattaytagctgcagtgattatagggcaaaactccttttgcttgagaaaagcagaaggaaaagtttgtcttgcacttcaggtactagcatagccacaggggagggtaggtcatgaagcaggctcttgaggtccctgattctgggacttgaatcttggatggcacttctgcacatgccctgggccagaagggagcccagtgccctgaagagtgagtcccaggaaggcagcatttgccacaagctgacttaagagctcttggaccttaagggaaaatctgcggtagtctggcagtactccttgtggccggctgtggcactggctatggatgctgaggctcctctgcctttggaaaggggagggaagagtgggaaggactacgtcttgtggtt

SEQ ID NO: 919015 - DNA, 626 bp, Homo sapiens
aaacacttggtagacttctaaggtttgtttactctaatccctcactcctagatggcacctctggatccacccagggcctgagagaccttgccagtggcaatcagccatgatgggagggacacaggcctggctggctttgccaccggctgattgtagagcaccagggcctaaagcaaacataagcagtagccagggagtgggtaaarcaggccttgggcaagacccagcgctgtgctggcttcaggtctgacccagcagtcctagtggtcatggccaaagtggtgcctgtgtcactccaccatcagctttaggtggctcagaacagacagacagactctgtttgtttgggagaaagtaagggaagagaacaagtctctgcctgatatctagagaattctcccagatattgtccaagatcatcaaggtggtacctctacaggtctgcaagaaccacagcattactgggcttagggtgccccctaaagcagatacagctttgatcgaaacactcaaatcctttggaaggccttcccaagaaggacaagtacaaataagtccagagagtgaagactacaataaatacctaacttttaaatgcccagacactgaagaacatctactagcat

SEQ ID NO: 919016 - DNA, 631 bp, Homo sapiens
caaaacgtaagtcagatcacctctctggtcttaaacaaagaaccctgaagtcttcccatcccagccagactacaagccaagaccctaaaaaagggcacaacattccatataatcaaccctctgccatccccccattacccagacagcctggtcccttatgacttccctcatctctcactatgctccagacatgctgatatttttattctgaaagcctgccaaatactcttggcctctgggcctttgcacatgctgactggaatatttccacaccccaatctgatatccaaatagctctcttttccccttccttaaggtcaactcaaaagtcagcttctcagggaggtttttttctggccacattcaaaaaattaaccttctgcccactgtaatgccaaaaccttatactcttttttcctccctatacttgccatcatatgacacaatataygtctacttatctgttatctctctcttctacaagaatataaaccctatgcaggcaggtatttctgtgtgcactgttccctgctgtatccccagtagctagcacctggcaaaaagagaaaagattagagaaaatgaagaaatggaaagaaacagaaaaagtagtgtatcttgatgacttcca

SEQ ID NO: 919017 - DNA, 773 bp, Homo sapiens
tctaaatttttataggagtgaattcttatttcttctgcaattaaaaaaagaaaacttccaagtaaagataactagttgtacacattcattagtttccgctccgtccaaacatcctactaaaatgataaaaatgtaatttttaaagggaatacgcctataaaaaaatcaagaagatgaaataaaaagcagtacctttagactctggaaagaaaattaatgagtaataattttcactgcagaactaggaaagcagagaagcaaactgatttacagcaggcacaagaaytggcaagcacaagatatccctggaagcaggggtgaaggcaggcctaaaagagaaagattcatcgccagtctgcgtaagaagctgtgagatctcctagttgtcctccctgacttgcagcagctaagcaaccccaaccctggcactctactacaagtttgttattaggagagggaaaagtttctagacttgcagacaacaggaatagctgaaggcagaggtcctgtattgatactaaatacggagattaaatgaaagtatcactttgagtattaagactctcaatcttcttctcactctgctcctagatcactagcataaacgactgtgtattccaggcaagaaaagccatttctggaaaatatgaccagcccaagagaaaagacagtaatattcctaagaaaatggcccagacagaggacactacatgcacagagagcttccaatttgctttttagcgccccccactttaaaagtatcaggagttagc

SEQ ID NO: 919018 - DNA, 599 bp, Homo sapiens
aaaacccagatctagtaaaaatgagaaaagtctctgtatttgtccattctcacattgctataaagaaccacccaagactcggtagtttataaagaaaagaggtgaaattgactcacagttccataatctgtacaggaggcatgattggggaggcctcagaaaacttacagttctggcagaaggtaaagggaaagcaagcacgttttcacatgtcagcaggacagagggaagggggaagtgctgcttacttttaaacaatcagatcttgtgagaactcactcactmtcatgagaacagcaagggggaaatccgcccccatgatccaatcacctcccaccaggtctctctcccaacactggggattacaattcaacatgagatttgggtggcgatgcagagctaaaccatattattccaccccaacctctcccaaatctcatgtccttctcacatttcaaaaccaatcatgccttcccaagagtcccccaaagtcttaactcattccagcattaacccaaaagtccaagtccaaagtcttatctgaggcaaggcaagtcccttccacctataagcctgtaaaaccaaaaacaggttagtta

SEQ ID NO: 919019 - DNA, 481 bp, Homo sapiens
tcagggatattggtctaaaattctcttgttttgttgtgtctctgccaggctttggtatcaggatgatgctggcctcataaaatgagttagggaggattccctctttttctattgattggaatagtttcaaaaggaatggtaccagctcctccttgtacctctggtagaattcggctgtgaatctgtctgaccctggactttttttggttggtaggctgttagttattgcctcaatttcagagcctgttattggtctattcagcaattcagctgtctttggagggtatawgtgtcgaggaatttatccatttcttctagattttctagtttatttgcatagaggtgtttatagtattctctgatggtagtttgtatttctgtgggatcagtggtgatatgccgtttatcattttttattatgtctatttgattcttctctcttttcttctttattagtcttgctagcagtctatcaatctta

SEQ ID NO: 919020 - DNA, 683 bp, Homo sapiens
ccacaggactaggaaagtccccaggctgtgcttgaagctctacgcttttctctcaagtcaggaatttctattaatgtattatgcaacttcctaggaattctctgtggctagaaaggattctaataaaatacagaacaagcaggtccatggttaaaaggaataatctacaaacaaaaagaaataagtcatgtgttcatagctgtggctcctcaaaggcaggagatgaagcttgtttgcttctgcatcccaggcactcagcaaggctggcgggagagaacttctcccatgcgcttttctgccctctttctgattactccctaaaaagctaaagmgacattgcttttctccctgtttctcttccaaatccatttccatagctgctcaaccccatctcctgacaaagaaaagacaacttgataacgagaggctttttcttttttcttgtgcatgtgacctgaagtgagttctaattactcctaggtagctcacagtgtagtctagttgaaagccaatttgtacaattcaaacttcaaccattctgtttatttagccagaagaaaatgaaccaaacaggtgtttgatgaatcaaatgggaggcattgcaatgaaataatacagtgcccctccagccctgtcctgctctagcatgcctcccaaggattagcccacacccctcaggctgc

SEQ ID NO: 919021 - DNA, 677 bp, Homo sapiens
ctaggaaagtccccaggctgtgcttgaagctctacgcttttctctcaagtcaggaatttctattaatgtattatgcaacttcctaggaattctctgtggctagaaaggattctaataaaatacagaacaagcaggtccatggttaaaaggaataatctacaaacaaaaagaaataagtcatgtgttcatagctgtggctcctcaaaggcaggagatgaagcttgtttgcttctgcatcccaggcactcagcaaggctggcgggagagaacttctcccatgcgcttttctgccctctttctgattactccctaaaaagctaaagcgacattgcttttctccctgtttctcttccaaatccatttccatagctgctcaaccccayctcctgacaaagaaaagacaacttgataacgagaggctttttcttttttcttgtgcatgtgacctgaagtgagttctaattactcctaggtagctcacagtgtagtctagttgaaagccaatttgtacaattcaaacttcaaccattctgtttatttagccagaagaaaatgaaccaaacaggtgtttgatgaatcaaatgggaggcattgcaatgaaataatacagtgcccctccagccctgtcctgctctagcatgcctcccaaggattagcccacacccctcaggctgctc

SEQ ID NO: 919022 - DNA, 592 bp, Homo sapiens
tggtcctgggctttttctgattggcaggttttttattactgattcaattttggaacacaccaatggtctgttcagggtttcagtttcctcctggttaggtcttggaggttgtatgtatccaggaatttatccattttttctakgttttctagcttgtgtgtatagaggtgttttaaatagtctctgaaggttttttgtatttctgtggagttgatgataatgttccctttgtcatttctgattgtgtttatttggatcttctctctttttcttgattagtctaactagcagcctatcaatcttatttatattttcaaagaaccaacttttggtttcattgatcttttgtgtcagttttcacatctccattttgttcagttcagctctgattttggttatttcttttcttctgctggctttgttgttgatttcctctaatttttctgcttcctgtagaaaaattctgcttcctgtgacattaggttgttaatttaagacctttctaacttttgatgtgggcatttagtgctatagactttcctcttaatgcttttgctgggtctcagagatcttggtatgttttatccttgtt

SEQ ID NO: 919023 - DNA, 664 bp, Homo sapiens
aatgtactgtaaatgtctgttaagtccctttggtctatgatgtagtttaaatccaatgtttctttttgattttctttctagggatgtctccaatgctaatagtggattgttgaagtctccatctattatcgtattggagcctatccctctctttagatctaataatatttgctttatatatctgggtgctgtggtattgggtgcatatacatttacaattgttattttcttgctgacttgwtccttttgttattattatataatgttcttcattgtttcttttgacagctttttacttgaagtctgttttgtctgatataggtatagctatccctgcttgcttttcgtttctgtttgtgtggaatatctttttctctctctttgctttcaagtgtttgacagtgaagtgattctattttaggcaacatatatttgcatcttgttatgtttatccattcatccagtgtgtatttttaaaatcggcatttaattcatttatattcaaggttatacttgataggtgaagacgttttttgtctgcctgtgttatttcaaaggacctgtcttcaaattcagaaattttttattctgcttggtctagtctgatgttaaagctcttgattgtattttttatttcattcatttaattcctcatagcattcct

SEQ ID NO: 919024 - DNA, 626 bp, Homo sapiens
acatatatttgcatcttgttatgtttatccattcatccagtgtgtatttttaaaatcggcatttaattcatttatattcaaggttatacttgataggtgaagacgttttttgtctgcctgtgttatttcaaaggacctgtcttcaaattcagaaattttttattctgcttggtctagtctgatgttaaagctcttgattgtattttttatttcattcatttaattcctcatagcattcctgtggttctttttttaatgacatctatctctttgttgaagtactcattcaaatcatgatttttcccctgatttcattgaatcctcaatctgtattctcttgtatctcagtgtttccttaagattattattttgaatatttttctggaattttatrtatttccttatgctaggggtctgttactagataattatcgtgttcctttgtgtcatgtttccttgctttttcatgtttgatatgtctctatgtagatttcacatatctggtgtaatagtcacgtcttttggggaaggttttgtagggaaagacttatttgtttagatgggtcttgggtgttggttcagcagggtacactggatttgattctggatggacacagtagtatagt

SEQ ID NO: 919025 - DNA, 620 bp, Homo sapiens
tatggctgtttagcccaagggccagctatgcagatccaaaaattgatttcattatttcacttagtgggcagaattctggccaatactcttcctagagaaacttatacccaattttatgtggacagttcaatgagttttgacaaatgtgtatttttgtgtaatcgtcacccattatcaagaactagaatgtttccatcactacaccattatgtttgatgttagttatagggttttcatagacattcttcattaggtttaagaaagtctcttctagtcctagtttgctgagagatttgatgaataataggtgctggattttgtcagatgctgtttctgaaaytactgatatgatcatatgttttttagtatattagtataataaaatattaatgcacagatatttttattgttaaaccaactttacgttcctaggatcaaccctacttggttataatgtatttatccttttcatatattgttgggttcatttgctaaattttatgagaagtttttcacacatagtcatgagaaatataggtctgtagctttcttgtaatgttgttactagttttggtaaagttggtattgtagaatgagttgggaaatattctccccccttc

SEQ ID NO: 919026 - DNA, 620 bp, Homo sapiens
tatggctgtttagcccaagggccagctatgcagatccaaaaattgatttcattatttcacttagtgggcagaattctggccaatactcttcctagagaaacttatacccaattttatgtggacagttcaatgagttttgacaaatgtgtatttttgtgtaatcgtcacccattatcaagaactagaatgtttccatcactacaccattatgtttgatgttagttatagggttttcatagacattcttcattaggtttaagaaagtctcttctagtcctagtttgctgagagatttgatgaataataggtgctggattttgtcagatgctgtttctgaaattactgatatgatcatatgttttttagtatattagkataataaaatattaatgcacagatatttttattgttaaaccaactttacgttcctaggatcaaccctacttggttataatgtatttatccttttcatatattgttgggttcatttgctaaattttatgagaagtttttcacacatagtcatgagaaatataggtctgtagctttcttgtaatgttgttactagttttggtaaagttggtattgtagaatgagttgggaaatattctccccccttc

SEQ ID NO: 919027 - DNA, 657 bp, Homo sapiens
ttctgaaattactgatatgatcatatgttttttagtatattagtataataaaatattaatgcacagatatttttattgttaaaccaactttacgttcctaggatcaaccctacttggttataatgtatttatccttttcatrtattgttgggttcatttgctaaattttatgagaagtttttcacacatagtcatgagaaatataggtctgtagctttcttgtaatgttgttactagttttggtaaagttggtattgtagaatgagttgggaaatattctccccccttcagtattctagaagaatttatgaataatttgttcttcttttgctattttcttaaggtggagcctgaggtaaacaatttgagatatttcttttttattacatatattattataaatttctaagtactgctttaaatttatcccataaatattgacttatgtttttattttcattcagttcaaaacacattcttatttatctttcgatttgttctttgatggatcggttactcagaaatgtctttagtttcctaacatttgaagattttctagaaatgactgtaatttaattctacttggtcagaaaacatatctatgatttgaatcctttaaaactgaaactgttttatagcctacaattttgtatattt

SEQ ID NO: 919028 - DNA, 657 bp, Homo sapiens
ttctgaaattactgatatgatcatatgttttttagtatattagtataataaaatattaatgcacagatatttttattgttaaaccaactttacgttcctaggatcaaccctacttggttataatgtatttatccttttcatatattgttgggttcatttgctaaattttatgagaagtttttcacacatagtcatgagaaatataggtctgtagctttcttgtaatgttgttactagttttggtaaagttggtattgtagaatgagttgggaaatattctccccccttcagtattctagaagaatttatgaataatttgttcttcttttgctrttttcttaaggtggagcctgaggtaaacaatttgagatatttcttttttattacatatattattataaatttctaagtactgctttaaatttatcccataaatattgacttatgtttttattttcattcagttcaaaacacattcttatttatctttcgatttgttctttgatggatcggttactcagaaatgtctttagtttcctaacatttgaagattttctagaaatgactgtaatttaattctacttggtcagaaaacatatctatgatttgaatcctttaaaactgaaactgttttatagcctacaattttgtatattt

SEQ ID NO: 919029 - DNA, 657 bp, Homo sapiens
ttctgaaattactgatatgatcatatgttttttagtatattagtataataaaatattaatgcacagatatttttattgttaaaccaactttacgttcctaggatcaaccctacttggttataatgtatttatccttttcatatattgttgggttcatttgctaaattttatgagaagtttttcacacatagtcatgagaaatataggtctgtagctttcttgtaatgttgttactagttttggtaaagttggtattgtagaatgagttgggaaatattctccccccttcagtattctagaagaatttatgaataatttgttcttcttttgctattttcttaaggtggagcctgaggtaaacaatttgagmtatttcttttttattacatatattattataaatttctaagtactgctttaaatttatcccataaatattgacttatgtttttattttcattcagttcaaaacacattcttatttatctttcgatttgttctttgatggatcggttactcagaaatgtctttagtttcctaacatttgaagattttctagaaatgactgtaatttaattctacttggtcagaaaacatatctatgatttgaatcctttaaaactgaaactgttttatagcctacaattttgtatattt

SEQ ID NO: 919030 - DNA, 613 bp, Homo sapiens
gcaaaggacatgatttcattttgttacggctacatagtattccatagtgtgtatgtaccacattttctttatccagtccattgttgatgggcacctaggttgactccatgtctttgctattgtgaatggtgctgcratgaacatacaaatgcatatgtctttttggtagaacaatttatttttctttggatatataactggtaatgggactgctggctgaaattgtagttctattttcagttctttgagaaattcctaaagtgctttccacagcggctgaactaatttacattcccactaatagtgtgtaagcattctcttttctctgcagccttgccaacatctattgttttctgacattttaataatagccattctgactggtgtaagatggtgtctcattgtggctttgatttgcatttctctgatgattagtgatgctgagcatttttaaatatgtttgctgcttgtatgtcttcttttgagaagtgtctattcatgtcttttcctcactttttatgagattgttttttgtttgttcaattgtttacattccttataggttgtggatattagtcctttgtcagactcgtagtttgtgaatattttctcc

SEQ ID NO: 919031 - DNA, 741 bp, Homo sapiens
agacagggaagctatcccagattatctcattatgcccagtgtaatcacaggggtctttaaaaagtagaagatagaatcaaagagagaaccagagaaatggcagaatgaggattcagccccaaattgctgactttgaagatggacaaacagggccatgagccaaggaacatgaatagtckctaaaaactggaaaggccaaggaaacagattcccatctggagcctccagaaggaatggagcactgccaaaaccttgattttagctcagtaagactgatttcaaacttctggaccagaacttcagaataataaatttgtgttgcttaagccactaagtttgtggcaatttgttacagcagccattggaaatacagcaagcaaggagcctgaggcacaaaatttaagaaagcactcacagggtgaagtcatcactcatggtgatacccatggtgatggttgattttgtgtgtcaactgtactgggccacaggtgcccagatacttggtcaaacattattctgaatgcctgtagtcccagcactttgggagtccgaggtcaggagttctagaccagcctggccaacatggtgaaaccccatctctactaaaaatgcaaaaattagctgggcatggtgatgggagcctgtaatcccagctacttgggaggctgaggcaggagaatcacttgaacccgggaggcagaggttacagtgagctgagatcatgccactgcactccagcct

SEQ ID NO: 919032 - DNA, 712 bp, Homo sapiens
aacatacactggggaaaggatagtctcttcaataagtggtgctgggaaaactggatattcgtatgcagaagaatgaaagtagacccctatctcttgctatattaaaaaataaaattgaaatggattaaagacttaaatctaagacctcaaactatgaaatcactacaagaaaagatggaggaagctgtccaggaaattggtctgggcaaagattaattgagttataccccaaaagtagaggcaatcaagcaaaaatggacaaatgagatcacagcaagttaaaaagcttctgcacagcaaaagaaaaaacaaagtgaagagacaacccacagaatgggagaaaatatttgcaaattacccatctgataagggattaataaccagaatatataaggagctcaaacaatccaatttaaaaaatctaacaatctgatttaaaaatgggcaaaagatctagaaataaayatttctcaaaagaagacatacagttctgggcacattggctcagactgtaagcccaatactctgggaggctgaggtgggaggatcacttgaggctaggagttcaagatcggcctggtcaacatagtgagacctcttttaattagctgggtgtggtaatacacacctgtagtcatagcttatcaataacctgaggtgaaaggattgcttgaacccaggagttaaaggctgctgtgagctatgattacac

SEQ ID NO: 919033 - DNA, 808 bp, Homo sapiens
acatgagtagataggaagcctactaaattctaacctcatctgtataagcagaaaagttctgggtcgagggaacaaaagtctaacctgcatcataaaaacagagtcatggcctctcaatcaattcccagacttgagctactttacagactcagaactcctttaatgaaagggaggtccttcaaggaaggaccctagtatacttccaaaaatttatgctgttagtatttctcccagccttccccaaagggacctatggccttttaccgtggtatttgtgcactggggagaagggaacaatcagagcttttggggactactagacactgtctctgaactaacactaattccagaggactctgaatgtcactgtgatccatcaatgagtaaggayttatggagctcaactgatcagtagagttttggctaaggtccatctcacagttggctctgtgggtccctgaacatatccagtggttatttccctggttctaggatgcataattggaatagatattctcagtaactggcagaatcattgctttcctgatctgtggaatgaaggcttttattttgggaaaggccaagaagacgccatagaactccctccatctatgaaagtagtaaactgaaagcaatactgcatggaggaattgcagagattagtgccaccatcagggacctgaaaaacacaggaatggcgattcctaccacatctccatttaactcccatatttggcctgtgaagaagacagatggatattagagaatcacagtggattcttgtgagcttagccaagtgacaacttca

SEQ ID NO: 919034 - DNA, 502 bp, Homo sapiens
actcctagaagaaaacataggggaaaatctcattgacactggtgttggcaatgatttattggataagacaccaaaggcacaggcaacaaaaacaaaaacagacagtggggctatatcaaattaaaaagcttctacacagtaaaggaaacaacagagtgaagaggaaacctacagaatgggggaatatatttgtaaaccatatatttgttaaagggctaatattccaaaacatataaggaaacttttcaactcaatagcaaaaaaataaataaataaaaaatggactgagcacttgaatacatatttatccaaagaagacattacaartgtccaatgggtatacaaaaactgtttatcatcattaatcatcaggtaaatacaaatcaaaatcataatgagatatcacacctgttaagatggctattattgaaaagtcaacaagtgttggcaaggatgtgaagaaatttgaaccctagtacactgttgggggaatgtaaaatga

SEQ ID NO: 919035 - DNA, 650 bp, Homo sapiens
ggcccactccctggctcgaagcttgttgcctctgtctttacttattctcggaagatctctgaatgctaaagcacactgtttgttatagttgttgttgttttcccctggaaaaatagaggagcattttaaatagattatactgagttgagtgaactagaaacttaagaagagctaaaagggcacttggcattcgcccctcgtctcctgcaactcttcgcaggcccttcctggccctctagctcagcaaaccttctcccttctccccccggaccagcctckttcctcctgcagcccttgtcgtgttctcctgcctatctaaccctccagccagtctctgctctaatatcacttccttctagtgactgtccccgagggccgcctgccagtctatgttatgtgccctgattaaatgcattcaaagcactagagactttctcttcacaggactcatggttaattataatcacatacttaccagcagggtgtggacatatacacactacggctcaggtttttttgtttgaaaaatgtcgtttacatttatttttataactggtctcatctgttcccactcctgctgatagtggaggggaaaagaaatttacacttaccaatgaaaagtaactgcctcttccggcttaaaacaatct

SEQ ID NO: 919036 - DNA, 479 bp, Homo sapiens
cgtttaataacatagcctctgaatcttagccagatccatgactgttccactaaaaactattttctagcctcccttgcacttggttgaggttagaaatacatttgaactgatgtaggcgacgtgatctgggcaaaagtgataagtaccacttctggtccatgaccttaaaggaaaaggataacaccctcacttcttccttctcccctttctgcaggctgggatacagctatgatggcaggacctggagcagcaatcttcaaccatgaggtggaagacttctgttgaggataatggaaaatcaaggtggaagaaatttgaatttccgtgattgtggagccccygcattagccttggactgttgatgctctgactgaattacaggacagaagataaacttccacttgtttaagctactgttattctgacctttccaacagtagccaaactagtatcctaactaatatcctaacgctttgggc

SEQ ID NO: 919037 - DNA, 673 bp, Homo sapiens
acccaggaggcagggcctgcagtgagccgagactacaccactgcgctccaacctgggcaacagagccagactctatctcagaaaaagaaaagaaatatccaccattagtacttccacctgaaaagaacttttacaagttaaagtgcaaaaattctgatggcaggyatataggggtctgtaagttattttctgtacttttctctctaaataaaatatttgaaaattaaatgtacttttctctatatataaaatatttgaaaattaaattttaagaaacttaaatgaaaacagaaaataaatgcttcctaaaagcttggcactctaggtccatccatgacaacagagttagtatcagcatccttaatatcacgagaagtcactgtgagcctgttctccaagtattacgtcaaaatattcttcggaaaggtgaagcccaccttcaaagtagtgaaaggcagatcctccaggggaactgggagggggcatgccgcgttcagggctgacctgaaacacacaaccacagttacatatcagaaaagaccagtgagacctccatcagatttgtcttagacaaggtcctctctgccagcccaatgtttgtacttcaagttctggttgaagcctcatttccttcctaaagcccatcacagctacagcattctctactacatgc

SEQ ID NO: 919038 - DNA, 784 bp, Homo sapiens
tggccaacatggcaaaaccctgtctctactaaaaatacaagtattagctgggtgcagtgggacgtgcctgtagtcccagctacttgggaggctggggtgggaggatcgcttgagcatgggaggtgaagactgcagtaagtcaagattgtgccactgcactccagcctgcgcaagagagtgaaatcctgtctcgaaaaaaattaaaacataaaagcatggcagaaggtggccgggtgcggtggctcacacctgtaatcccagcactttgggaggcygaggcaggcggatcacgaggtcaggagatcgagaccatcctggccaatatggtgaaaccccttctctactaaaaatacaaaaaattagccaggcatggtggtgggcacctgtagtctcagctacttgggaggctgaggcatgataatggcataagtaaacccaggaggcggagcttgcagtgagcctagatggcaccactgcactccagcctgggcgacagagagagactccatttcaaaaaaacaaaacaaaacaaaacaaaacaaaacaaaaaacaacaaaaaaacatggcagaaggcatgcagcttccacctggctctttttcaggacatttgccctggaacctagacactatgctgtgataagacccatgaatgagacttcaggtgattcctgcccccagcttttgagccaccccaaccgatgctaaatggagtcagttgagccctgtctaaattgcagattcacgaatcaaacaaaatgatgtattaagcactaagtctggggg

SEQ ID NO: 919039 - DNA, 719 bp, Homo sapiens
ttaaatgtgaagtgaagataccaaaaagaacaactcagagatccatgtaatgattccatgatttatgcactacactggcatgtcaggcagaataatggcacctcaaagatgtccacaccctcaatcccctggaagctgtgaatatgttactttacatggcaaaagagaccttccagatctaattaaattaagaaccttgaaatggagggatatcctggattatttagataggcccagggcaatcacaaaggtcattaaaaggagaagagagaggcagaagagggagtcagagtgatgtgagatgggggcttggccaaccattgctccctttgaaaatgaaggaaggggccagaaatcaaggaatgtgggcagctctaggagctgtaaaaggcttggaaatgatggctgggtgcggtggctcatacctgtaattccagcactttgggaggctgaagtgggtggatcacctgaggttaggagttcaagactagcctagccaacattgtgaaaccccatctctactaaaaatacaaaaattagccgggcatggtggcaggccccrtggcaggtgcctgtagtcccagctactcgggatgctgaggcaggagaattgcttgaacccgggaggcagaggttgcagtgagctgagattgcgccactgcactccagcctgggcaacagagcaagactccatctcaatatatacatattaaaaaaaa

SEQ ID NO: 919040 - DNA, 748 bp, Homo sapiens
ataaaaatataaataagccatcctggctaacacagtgaaaccctgtctctactaaaaatacaaaaaattagccgggcgtggtggcgggcgcctgtagtcccagctactcgggaggctgaagcaggagaatggcatgaacccaggaggcagagcttgcagtgagcagagatcacgccactgcactccagcctgggtgacagagcaagactccatctcaaaaagtaaataaataaataaacaaataagcaatcaggaagataaaatgcataaatttcagcaactgacgtcaatgatggaaatagctgctggtgggaaagattagaggcaaccacacctccaatgagtgcaaactgcaaacacagacagcagaaaagagaatctgcagtaaggagtgagaaatagaacatttctgccccctggggagacaaacagctggtgacacaggagggcactgagggaaggctacrtgaaggcagagggagaaagtggcctcggaagaaatcaacattgctgacaccttcatcttgaacttctaacttccagaatgaggaggaaatatatctgtgttgtttaagccagtctgtggtactttgttatggcagcctagcaaactaatagttaatatggcatggttacaggtaaagattttttcttcttccaatttcttcttaaaatattttctagttgatttaataacaatgattctggcaccgcgtataccctccgctgaccctcattatctctctcc

SEQ ID NO: 919041 - DNA, 670 bp, Homo sapiens
gcctcctgagtagctgggattacaggcatgccacgcctggttttttttttttttttttttttttttttgcgacagagtcttgctctgtcacccaggctggggtgcaatagcacaatctcagctcactgcaacctccacctcgcaggtttaagcgattcccctgcctcagcatcccaaatagctggggttacaggcacctgccaccacgcccagctaattttttgtatttttagtagagacagggtttcaccatgttggccaggctggtcttgaactccygacctcaggtgatctgcccgcctcagcctcccaaagtactgggattatagacatgagccactgcacccagccatatacatattttgagacagtgtctcactctgctacccaggctggagttctgtggtgggatcacggctcactgcagcctcaacctctcaggcataagtgatcctcccaccacagcctcctaaatagctgggattatagacatgtgccaccacacccaactgatttttttattttttgtagagatggggttggccaggctgctctgaaattcctgagctcaagtgatcagcctgccttggcttcccaaagtactgagattataggcatgaaccactgcgcccagtctagaaatttattttctcacagttctagaggaacc

SEQ ID NO: 919042 - DNA, 811 bp, Homo sapiens
tgggctttgaggggagccaagcttggccttgctgtggggtacagggagaggggggcatgccatctcctcctcttcctcacctgcccttcttcctgctccaggctgtggctcacactcaggcccctctgtgctctcctgctagagccctgctggcttccctgacctctggggcaagactcagccaacacaatctagagccaggggctggggacttctgtgcatgccccctgcagtacaatgcttccagctctttttgcccctccccagcagttgtggccttcccgatgcgggaacaraggccctgcatacatgtcctgccctctctgggaagccgtgctgttgtgtgagctcaacacaatgtgttgggaagaaatggttaaaccggggtcctgcagggcactccacagctgagaccagccgctgtgaacatctgcacaggacagagtttggaagacaagtttgtgccaatagttagaaatgcagagagaggccgggcacagtggctcatgcctgtaatcctagcactttgggaggccgaggcgggcagatcacaaggtcaggagattgaggccatcctggctaacacggtgaaactctgactccactaaaaatacaaaaaaattagccgggtgtggtggcgggtgcctgcagtcccagctactcgggaggctgaggcgacacagcgaaactccatctcaaaaaaacaacaacaaaaaaagaaatggagagagagctgcccagtgaagtctggatttccatcttctcttgaaaagctcagcttgaattcccatgtggccacagccacaggcac

SEQ ID NO: 919043 - DNA, 734 bp, Homo sapiens
ttgggaagaaatggttaaaccggggtcctgcagggcactccacagctgagaccagccgctgtgaacatctgcacaggacagagtttggaagacaagtttgtgccaatagttagaaatgcagagagaggccgggcacagtggctcatgcctgtaatcctagcactttgggaggccgaggcgggcagatcacaaggtcaggagattgaggccatcctggctaacacggtgaaactctgactccactaaaaatacaaaaaaattagccgggtgtggtggcgggtgcctgcagtcccagctactcgggaggctgaggcgacasagcgaaactccatctcaaaaaaacaacaacaaaaaaagaaatggagagagagctgcccagtgaagtctggatttccatcttctcttgaaaagctcagcttgaattcccatgtggccacagccacaggcacccaggagcgacttcccatggaggcggtgggggggtggtgctgatgggtcccagcacacctgagccgtcccacactgggcccgccatcccctcgtctgtgtgacctgctcctgtaatgctggagcctaggaaccctcttctagagtaacagctactgaggtcactgtcagcctccagaaaaacagcaggcagcaaggaagatgaagggcacccactgacgagcagctcccgctcactagcggcagattctggggaggggctggggtcctggggcaccaggcaccgt

SEQ ID NO: 919044 - DNA, 734 bp, Homo sapiens
ttgggaagaaatggttaaaccggggtcctgcagggcactccacagctgagaccagccgctgtgaacatctgcacaggacagagtttggaagacaagtttgtgccaatagttagaaatgcagagagaggccgggcacagtggctcatgcctgtaatcctagcactttgggaggccgaggcgggcagatcacaaggtcaggagattgaggccatcctggctaacacggtgaaactctgactccactaaaaatacaaaaaaattagccgggtgtggtggcgggtgcctgcagtcccagctactcgggaggctgaggcgacacagcgaractccatctcaaaaaaacaacaacaaaaaaagaaatggagagagagctgcccagtgaagtctggatttccatcttctcttgaaaagctcagcttgaattcccatgtggccacagccacaggcacccaggagcgacttcccatggaggcggtgggggggtggtgctgatgggtcccagcacacctgagccgtcccacactgggcccgccatcccctcgtctgtgtgacctgctcctgtaatgctggagcctaggaaccctcttctagagtaacagctactgaggtcactgtcagcctccagaaaaacagcaggcagcaaggaagatgaagggcacccactgacgagcagctcccgctcactagcggcagattctggggaggggctggggtcctggggcaccaggcaccgt

SEQ ID NO: 919045 - DNA, 694 bp, Homo sapiens
ggagcttgtctgattttggagcctggactaacctttttcacagacctttgtttttacttgaagaaatgactgacagacaacatatagctattcagacttagggatgtggcagatgttttcctgaaaatgaacaaaaaataaatcttccactcaaaggaactgaaacatttttttggaaaacttggatctgctgctgtgagctcaacagcttcccttaaaaactctttctgggccrggcgtggtggctcatgcctgtaatctcagcactttgggaggccgacgtgagtggaccacaaggtcaggaaattgagaccatcctggctaacatggtgaaacaccgtctctactgaaaatacaaaaaaattagcaggcgtggtggcaggcgcctgtagtcccagctactcgggaggctgaggcaggagaatggcgtgaacctgggaggcggagcttgcagtgagccgagatcgtgccactgcactccagcctgggcgactaatcaagactctgtctcaaaaaaaaaaaaaaaaaaaaaaaaaaccctttctggtaagactggcagatgtgaacaaatatgatttttccacactgtacaaagaaatgcatcaacctttgaaagatgtgcataactcactggcctatattttacaaatgcccaccgtttgatgttataaaagcttttgtgggtccaggtgcg

SEQ ID NO: 919046 - DNA, 694 bp, Homo sapiens
ggagcttgtctgattttggagcctggactaacctttttcacagacctttgtttttacttgaagaaatgactgacagacaacatatagctattcagacttagggatgtggcagatgttttcctgaaaatgaacaaaaaataaatcttccactcaaaggaactgaaacatttttttggaaaacttggatctgctgctgtgagctcaacagcttcccttaaaaactctttctgggccgggcgtggtggctcatgcctgtaatctcagcactttgggaggccgacgtgagtggaccacaaggtcaggaaattgagaccatcctggctaacatggtgaaacaccgtctctactgaaaatacaaaaaaattagcaggcgtggtggcaggcgcctgtagtcccagctactcgggaggctgaggcaggagaatggcgtgaacctgggaggcggagcttgcagtgagccgagatcgtgccactgcactccagcctgggcgactaatcaagactctgtctcaaaaaaaaaaaaaaaaaaaaaaaaaamcctttctggtaagactggcagatgtgaacaaatatgatttttccacactgtacaaagaaatgcatcaacctttgaaagatgtgcataactcactggcctatattttacaaatgcccaccgtttgatgttataaaagcttttgtgggtccaggtgcg

SEQ ID NO: 919047 - DNA, 535 bp, Homo sapiens
acatgggcttattcctggatacacagcactgtccccatatctacagtggtgatcctaagggcaacatggcatcacccaaatgtcttgttagtcactacagaatcacagtgtgagggatgaaggccatcaagacagagctgaggctggcagggtggctcatgcctataatcccagtgctttggaaggctgaggcaggaggattgcttgaggccaagggtttgagaccagcctaggtaacatagcaagaccccatctacaattaaaaaaaaaaaaaaaaagacagaaagaaaaaatagccaggcgtggcatgtgcttgtagtccaagctactggggagggaggctgaggcagraggattccttgagcctgggagtgtgaggctgcagtgagctatgatggcatcgccgcactccagcctgcatgacacagtgagacctggtctcaaaaaccaaataataataacagtaataaaagctggaaagagctcaaagttactcatttgacagatgtgacagatgaagaaatagaagcgagtt

SEQ ID NO: 919048 - DNA, 745 bp, Homo sapiens
acagtttcaatggagtgactcagggagccttcaggagctcagggctcactgcccagggccgccttaagtctctgtgccccacattctgccaatgcagtcttcaacaacccaggctcaggtgggcccaggttcaactcagaccgccactccagagaacataagggatgagccttggtaggatccacgtggagctgtccctgcagacatgcagagtgcaagmgtagtggaaacatggctacctccacctatattttaaaggatgtattggatagctttgtggtccaagcagagacttgccacagaggtggagccactactgagagcccccattaggtcaatgcttagcggagctatggagatagggctgtcctcaagactccagacctgtagagccatagcatgcaacactagcttgggaaagagtcaacactagcttgactcttgacacaaatagacacttgactttaactcatgagagctgcatcgtggcctgtgccccacaaagccatgggcaaagggtcacctgaagccttggaggcccaacccaatctggtgtgtccagaaggcaggatatgaaatcaaagaagattgttctccagacctaagatataatgttgtttgttctgttcagttttagaattgagacctgttacttctttcttctttctcctttttggaatgggaatgtctatcttatgtctgtctcactgtattttggaagcacacaacttgtttgatttcacag

SEQ ID NO: 919049 - DNA, 563 bp, Homo sapiens
aattacatcaagtaatttggagtctgactgtacaattcaaggttggtaattattttctctcatctttcttaagatcttgttctatagtctttgggcatctgttgtggctgttgagaagtgaattgtatgcctaattgtcatttttcttgtaggtattttttttctcacctaacttttaagatcttcttttatctttggcatttcatgcatctagtgtgaatttgtttcatttattatactcagggctcttagttactgatcggatactttgtggcttctataattatgggaattctaaactaatgtccctttaaacacttctatgttcacattccatttattcttycttgatagaccctctttcagatttaagttgttcatttttactttatcctccaaacttttgaatttatcttccacactttccatcttttttatcttgctatattgttttattttagcttttcagatatgtcttacaattcactatttttctcttcagctgtgtctagtctgccctctaacctactctatgagtgaatggctatatttttcatttcttg

SEQ ID NO: 919050 - DNA, 609 bp, Homo sapiens
ctctcctcttccacaaagaagaaacaaaatagtgagtagataatcacatttcaaatagatcatctaagagagaacactagcattcaacagagaagtgacaggaaacatccaaggcaaggaaggagcaggaagccaggcatcctgctcagccaggattagctgggagcgcagagaggtttctcaatgtggagaaagagtgagagacccccagtggtccatatttccattgaagactcctgcaatcctatcaatgggaatgctcctcaaccctcacaggccctgagactaacatgaggagcttcctagagacctcataatggcactgctccagacagggagctcatgctgggtctcatgaactccccgagccctaagcagctacagcacagtacsattttgagagccagccaccagattgcattctgccctggggcccaatagcccctgcatctccacatccctgtagccccattgacatttctcatctgcatctgccactgtggttggctgctgctgccagtgccacaaggcaagccattagcagtgaccttgctgtccccagcagctctgcacattttcatgcaccctgagaacataatctctcgcctg

SEQ ID NO: 919051 - DNA, 650 bp, Homo sapiens
tattggtctggacaataatttcttgtgtgtaatcccaaaagcacaggaaacaaaagcataaatagacaaacatgattccatcaaactaaaaagcttctgcacaaaaggacacaattgtgtcaagagaaaatgcacagattaagaaaagtataaaaattatacatcagataatgggctcttttacaaaatatacaagaaactcaaactaatccaaaacaatcctattaaaaacgggcaaagaactcaaatagacatttcttaaaagaagacacacaaattgccaatagttatatgaaaatgttcaacatctctaatcatcagagaaagcaaattaaagtcacaaagatatatcacctcacacctgttagtttggcaattatcaaaaagatgaaagatggctagtgttggtgakgatgctgagaaatgggcacagttatgccctcttggtggtattgtaatttagtgcagccattttgggaaacagcatgaatctttattaaataacaaaaaatagaattaccatgtgatccaacaattccgctacaaaatatatacccaaaagaattcaaatcagtatgttgaagtgatgtcgatactcccaagttcattgcagcactattcacaatagccaattcatggcaacaacctgt

SEQ ID NO: 919052 - DNA, 597 bp, Homo sapiens
tagtggaaaaattaaagtgaaaatcacccataattctaccacatagagaaaatatcacttatctcatgtgtgcatgcactatacatacacacaaaccccaaaacaggaatttctatatgttcacctttgtctactgccataatgtattatataataggaaaataagtagtagtatatgtaacattatgtatgatataagcagtataatatgcaacattaaatattaatgtgtaatatgtatgatatactattatacactattctgttataatattaatatagaatatatcttatatattctataatatattaatatttacatgctataataatatrgaaactatattctataatgtcatcacataattatataatgtatacagttaaatagtgcatatttcttattttactatgtattttttcaagtcattgtttttcatgactggagcctataggcagaatttttgttttactcttctaccaggtcatcctttctttatccaatgtccagtagttttctcttgacttgtatttcccaattattcctttcaatttacaggtacttctcagggcttttgaaatctttatgcaatagct

SEQ ID NO: 919053 - DNA, 560 bp, Homo sapiens
aacatcttgctataatgtatcactaacctcaactgagcccttcctgctgcatggcaatcctattacatttctctattctcgcttccattctccaaaacaaccatttcaacctcctcctctattctaaaactctaccrtccctcccctcctctcagtgcctcctaactggtctctctatgcccacctttgttccctcttcccccaagagtctattcaccacaccagacttaatgatcctttaaaaatatacatcagatcctatcatttctctgcttaaaccgcccccacacccaagactttccatttcaccaggagtcaagccaaaccctttaccatggctgaacaagacctgccctcctgctacccttctgacctcatatcccacctgcccccctcccttgctcactctgctccagccacactggcacactcccaccaacctggggcttttgcatttttcctgcctggaagattcttcccccagacagtcacaaggctcactcctctcacgctcaacttaggtctctgatcaaaagtcacttcatccaaaaggcctttcc

SEQ ID NO: 919054 - DNA, 644 bp, Homo sapiens
atggaaactaaattcattctctttcatctagaatggattcatttgcatgacaggaattcttatggtttaaatgtatcctccaaagttcctgtgttagatacttaatccccaatacaacagtttaaggggggccgggcgcggtggctcacgcctgtaatcccagcactttgggaggccgaggcgggtggatcatgaggtcaggagatcgagaccatcctggctaacaaggtgaaaccccgtctctactaaaaaaatacaaaaaattagccgggcgcggtggcgggcgcctgtagtcccagctactcgggaggctgaggcaggagaatggcgtgaacccgggaggcggagcttgcagtgagccgagattgcgccactgcagtccgcagtccggcctgggcaacagagcgagactccgtctcaaaaaaaaaaaamaaaaaaaaaaccagtttaaggatgcagagcctaatgagaggtgattaggtcacaagggctctgccctcatgaatggattaatgcattctctcaaaagtgggttagctatctctggagtcactctgttataaaagtgagttcaagccccttcttgctctctgtcttgacatactcacttgcctttccaccttccaccatatgataacacagca

SEQ ID NO: 919055 - DNA, 644 bp, Homo sapiens
atggaaactaaattcattctctttcatctagaatggattcatttgcatgacaggaattcttatggtttaaatgtatcctccaaagttcctgtgttagatacttaatccccaatacaacagtttaaggggggccgggcgcggtggctcacgcctgtaatcccagcactttgggaggccgaggcgggtggatcatgaggtcaggagatcgagaccatcctggctaacaaggtgaaaccccgtctctactaaaaaaatacaaaaaattagccgggcgcggtggcgggcgcctgtagtcccagctactcgggaggctgaggcaggagaatggcgtgaacccgggaggcggagcttgcagtgagccgagattgcgccactgcagtccgcagtccggcctgggcaacagagcgagactccgtctcaaaaaaaaaaaacmaaaaaaaaaccagtttaaggatgcagagcctaatgagaggtgattaggtcacaagggctctgccctcatgaatggattaatgcattctctcaaaagtgggttagctatctctggagtcactctgttataaaagtgagttcaagccccttcttgctctctgtcttgacatactcacttgcctttccaccttccaccatatgataacacagca

SEQ ID NO: 919056 - DNA, 646 bp, Homo sapiens
gactaactagataccaaagcttgctctgtgaaaatccctgcataaccattgaagtttgcaacaccctaaaccccaccaccttgctccccgtatcagagagcccagttaaacataactgtgtagaggtgttggactcagtttattctagcaggcccaacctctgagaccatccttgaacatcagtagactggtagctgcacgtggacgggagcagcttcaccaacccctgcaaagtgactctgaagaagatgacaagcgctgctccagtcacacccagaagctgactggtccacgcacagccgaagcatgaggaaactcatcatgggactcattttccttaaaatttggacttgtacagtaaggacttcaactgacctttcccagactgaggactgttcccagtatatacgtcaagtcactgcggtaggacaaaaggttgctacagttctattattttatggttattataagtgtaccaggactctaaaaggagcttgtttgtwtaatgctattctatacaaggtatatagccctggaagtgaccagcctgatgtgtgctataacccatcctttttcctagtgcccataaaaacaggcacacttctaggcttcccagtctgtgcttcccgagaaaagagaagcatag

SEQ ID NO: 919057 - DNA, 663 bp, Homo sapiens
ctcccatttataagagagaacatgcattatgttttgtttgttttttgctggtttttttttttttttttaatggagtcttgccctgtagcccaggctagagtgcagtggcacaatcttggctcactgcaacctccgcctcccaggttcaaacgattctccctcctcagcctcccgagtttaaagtatgtatttttttaaagaaaatcstcttcagtgattttctaatttttctagattttctagtttttccatgcctattttcagcaggttgcattaacatgtacgtggtgacttagctttctgaaaagagctatggtataatgaatatatgccacttgccagaaaccatggtcaacaccatacatacctcattcctaagtgacctataaacatagcaaggctggcattaccatgcccattttatagatgaaaagatcaaggcttggtgatgctaagagacaggtctaaagctacaagtttacaaagtaacaaagtcaatttaatcataagcacattcacttctttgttcacttttcagatacaatgtttaaaaatatgtcaaatgataagcatttcctatttgttttactctgaaatatagtgatgtcctttgccagctacttaaaaatgttttgtccttactctgaaatatgaataactgat

SEQ ID NO: 919058 - DNA, 776 bp, Homo sapiens
ccattatttaccggctttgggatatgtgctgaggagtggccgcgcactgaaggaatgtgaccggttgtcccaagtgttgtcctccaactcaaaatccgcaaccagttcaaaagcatttgggcttttatgtgcctttcacataaagactatgacacagctaagctattcatgtactaatacctgccctgagctgtgtgaccacagacaccaccctataatgtgcccagtgtgtaggaactctacaggctcagatcattccacacatacatgcagatgttggaactcccttgcacagtgactcatgatcccaaggctgagtgctgagggcaggtcagyagttcagagcctcagcattggggctgtatgcttgggttcccatcttggctcttttgctgaggggctcataagcttgggcacattcatctctgtctttttctgcccagcgaaaggtgatagtaaatcaatcatgccatttgtctgtggtgatggccgaatgatttgatgtaggtaaagtgtacagtataagtgctcatgaggcttaattatcagtgaaatgtcttgctttagatttcacagcttaataaggctcagaggcttattcacgcccaggattctgacctcccaagtcattgttctatgacatacacctgcttggcctaaaaccgaccactttatcataatgcagacccagttttgaaagaagcagataaagttgtcaaaagtactgtgtctgcctcagcgcacactcagtgcgctccacacaaagggcatcacca

SEQ ID NO: 919059 - DNA, 630 bp, Homo sapiens
accactaccaccaaagcgcggagaccggtagtggccccgaatgtctggctgcgctgttatttattggatacaaagcaaaaggggcagggtaaagagtgtgagtcatctccaatgataggcaaggtcacgtgggtcacgtgtccactggacagggggcccttccctgcctggcagccgaggcagagagggagaggagacagagagaaagatagcttatgccattatttctgcatatcagagacttttagtactttcactaattgactactgctagctagaaggcagagccaggtrtacaggatgactaggcataataaaggcagactaggagcgggaccactgaagcacagcatcacagggagatggttaggcctccggataactgcaggcaagcctgactcatgtcaggccctccacaagaggtggaggagcagagtcttctctaaactcccccggggaaaaggagcctccctttcccggtctgctaagtagcaggtgttgttccttgacacttttcactaccgctagaccacggcccacctggcaacgggcatcttcccagacgctggcgtcaccgctagaccaaggagcccttctggtggccctgtctgggcataacagaaggctcgc

SEQ ID NO: 919060 - DNA, 658 bp, Homo sapiens
tagtactttcactaattgactactgctagctagaaggcagagccaggtgtacaggatgactaggcataataaaggcagactaggagcgggaccactgaagcacagcatcacagggagatggttaggcctccggataactgcaggcaagcctgactcatgtcaggccctccacaagaggtggaggagcagagtcttctctaaactcccccggggaaaaggagcctccctttcccggtctgctaagtagcaggtgttgttccttgacacttttcactaccgctagaccacggcccacctggcaacgggcatcttcccagacgctggcgtcaccgctagaccaaggagcccttctggtggccctgtctgggcataacagaaggctcgcactcttgtcttctggtcacccctcactgtgtcccctyagctcctatctctgtatggcctggtttttcctaggttatgattatagagtgaggattattataatactggaataaagagtaattgctaccaactaatgattattgatattcatatataatcatatctaagatctatatctggtataactattcttgttttatattttattatactggaacagctcgtgtcctcggtctcttgcctcagcgcctgggtggcttgccgcccacaccag

SEQ ID NO: 919061 - DNA, 701 bp, Homo sapiens
tgtaccaccatgcccaggtaatgcttttgatttttagtaagatgaggtctcgttatattgcccaggctggtctcaaactcctgagctcaagtgatcctcctgcctcagcctcccaaagtgctaggattatcggcatgagccactatgcccagccagaagctaaaaatattaatcaaggagtcataactaaggatgcactgcacacccgaagccagggacmacaagaggtcagcaactgggactgcttcctccagttcccaggctggggctcagcagcagtggcctgggctctggggacttactttaagccgaaatcccaaactcattatcattcaaaccaattttctgtgtccagcatcatcccacctaaactggtccttaaaaccactgacagtcatttctccaatctgtaaaaggcctgctgaggcctttgcattatcaggacttaactgggagtagaatgccctccccatccaaatcctgaccatttctgaacactcagcccatgtcctcttcctgagtgtcttccccaacaacaaccacctacactgaactttactttgatctctgcaggaaactgtagatagagatggggtctcactatgttgcctagctggtcttgaactgctgagctcaagtgatctccctgcttctgcctcccaaagtgctaggattacagcagtgagccaccacacctggcc

SEQ ID NO: 919062 - DNA, 815 bp, Homo sapiens
tatcaggacttaactgggagtagaatgccctccccatccaaatcctgaccatttctgaacactcagcccatgtcctcttcctgagtgtcttccccaacaacaaccacctacactgaactttactttgatctctgcaggaaactgtagatagagatggggtctcactatgttgcctagctggtcttgaactgctgagctcaagtgatctccctgcttctgcctcccaaagtgctaggattacagcagtgagccaccacacctggcctatgtatgcttttttttttcttttctttttttttttttttgagacagagtcttgctctgtggcccagtccgcagtgcagtggtgcaatctcggctcatggcaacctccakgttcaaggcattttcctgcctcagccttccaaggagctgggattacaggcacgcaccatcacgcccagctaattggccaggctggtctcaaactcctgacctcaggtgatccacccaccttggcctcccaaagtgctgggattacaggtgtaagccaccacacctggccacgtatgcattttaaaacgttatgctcagacggggtctataggtttcaccagactgccaaaaggatccatgacacaaaaaaagtactctcagttgcatccttcggaacctttcaacacatacacatatacctcactcatccttttgtgaagagtgtctattaatcactagattaagaggatttggataaaatttataaacgtacaaactttgctaccaaggactgacacatttacttttctagctcatcagtttatgtcctagaaaaattc

SEQ ID NO: 919063 - DNA, 744 bp, Homo sapiens
agctgtggagaaggggggattccgggttaaggggagactagcagggctcctgcttttatgttgccctgttgggaaggctattaaagaaacacaaagtgctaagcagtgaggatagaacatgttttcattatttcaaccaatacattccacagatggaataataagaaatgctacaaccaagctaactgaatccaacagcatatcaaaaagataatccaccatgattcaagtgggtttcatactagggatgcagggatggtttaacatacgcaagtcaataaatgtgatacatcacatcaataaaactaaaaacaaaaatcacatgataatctgaatagatgcagaaaaagcctttgacaaaatccagcatttctttatgattaaaaccgttcgtcaaaatcagcatagaacggacataacttaaggtaataaaagctatctatgacaaacccacagccaacattttcctgaatgggrgagagttgaaagcattccccctgaggaagggaacaagacaaagatgcccacgttcaccgcttctcaacacagtgctgttcactacagcattggttataagagcaagactggaaacagaacaaatggatacccatagcggggtgcttaagtaattttgggaatagtcatggggtgcagtactttatagctctgaaacaatacaatggatttacatttgaaatgtggaatgataactaaggtgcattgcccagtgatatatgcagaggt

SEQ ID NO: 919064 - DNA, 620 bp, Homo sapiens
accactaccaccaaagcgcggagaccggtagtggccccgaatgtctggctgcgctgttatttattggatacaaagcaaaaggggcagggtaaagagtgtgagtcatctccaatgataggcaaggtcacgtgggtcacgtgtccactggacagggggcccttccctgcctggcagccgaggcagagagggagaggagacagagagaaagatagcttatgccattatttctgcatatcagagacttttagtactttcactaattgactactgctagctagaaggcagagccaggtrtacaggatgactaggcataataaaggcagactaggagcgggaccactgaagcacagcatcacagggagatggttaggcctccggataactgcaggcaagcctgactcatgtcaggccctccacaagaggtggaggagcggagtcttctctaaactcccccggggaaaaggagcctccctttcccggtctgctaagtagcaggtgttgttccttgacacttttcactaccgctagaccacggcccacctggcaacgggcatcttcccagacgctggcgtcaccgctagaccaaggagcccttctggtggccctgtctgggcataaca

SEQ ID NO: 919065 - DNA, 648 bp, Homo sapiens
gtgatctcagctcactgcaacctccacttccccgggttcaagcgattctcctgcctcagcctgccgagtagctgggattacaggcatgcgccaccatgcccagctaattttttttttgtatttttagtagagatgggctttcaccatgttggccaggatggtctcgaactcttgacctcaggtgatccacccaccttggcctcccaaagtgctgggattacaggcatgagccactgcgcctggccaaaatgtatactttttaaaagaatcagcaagtactgcatttccctgtagaccgaggtgccagcgttctcgcagttaggggtgggcrtgtgtggaagggatttgcctctgtaattccttccttttatgccagtccctggaaagaatcaccaaaaggaattcagtgtttaatcctaaaaggggaacattaaaatgtatgtatttgaagggtaaattaaaagtcccagagagaaaagaagaaagggctatttaaaagccctcggttgctttttgtgcgttaatcacctgttgggcacccaccaggataggccctgggagtggggttgggggagagggagcaggaagatccctgccttccagggccactcctccctggtctgggtatacggtctccagtgcagcgct

SEQ ID NO: 919066 - DNA, 639 bp, Homo sapiens
cttctttctaacccgatgaaaagatttttaagggactttactgcaatcatgtttctattgcttaagtgaattccgaatgctactgtaaattccattcattatttaaatagctttacctcccttaagagcctaagtgccttacaggaaggaaggagctatcaaatccatgcagggtggggaattgctcaggagggtcaaatcctggggcatagggagagggactgtagtgttcatgatgggtctgtagggaggccgatcaagagcctgactgagtgatagtaggagctgggagaattgytaagatcatctgggcctaggatgctttcctatctttcctggtcctaagagttttctgaatcgcttgttaaaaatagatctgcagacccttcccctggagattctattttagcagacctgacgtggagtccagaattccatactttcaagaaagaccgcagatgattttgacaactagacatgtgtggaaaatactgatctatcaagctgccttgtttataggtgaataaattgagtcccaaggaggggttagtgctagaggttagcgttagtccccagttagtgctagagctaaatccagaacaggatcactgagacccgaatggcagatttaggatgccc

SEQ ID NO: 919067 - DNA, 760 bp, Homo sapiens
ttgaaactgtacctactaaataataattcactattttcccctccccacattccctggcaatcactattctacttcttctttttttttttttcttcaagacgaagtttcaccctgccgcccaggctggagtgcagtggctcaatcttagctcactgcagcgtccacctcctgggttcaagcaattctcctgcttcagcttcccgagtagctagaactacagtcacccgccaccagtcccggctaatttttgtgttttcaatagagacagggtttcaccatgttgaccaggctggtttcaaactcctgacctcaagtgatctgcctgcctcagcctcccaaagtgctggaattacaggcgtgagtcactgcacccagcaacttcttgtctccatgaatttgactactctgcgaagctcgtataagtggaatcrtgcattatttcttctttcgcatctggtttatttcacttagtgtaatgtcctcaaggttcagtagtgtcgcagcacgtaacagaacttcattcttttttaaggctgaataatgtttccttctatgtagatatcacactttgtttatccattcattcatcaacagatatttgggttgtttccaccttttggttattgtgaataatgctgctatgaacactgttgtacaaatatctgcttgggtttctgctttcagttctttgaggtatatgcccagaagtggaattgctggatcatatggtaattctatgtttaaatttttgaggaaatgc

SEQ ID NO: 919068 - DNA, 708 bp, Homo sapiens
cagcactgagagaccctccttcagacatcctcacccacgctttttccaagcctgtgaccttcagagcaagtcccaggctctgggggactcccagtcctttggcttcttataaaacaaagtttcagatcccgggaggcccaggaaactcaaaacactacaggcctgagcctgagcctgagccgtggggaagctgctagcctctaactgaggcccagtctgaaaccaacaggcagattctctgcatctcggcaataaaagcaacagcttcagcagtgcagaccgagcctcggtccctcagaggccaggctcatcacagcactatctcctttctcacttcccggctgtgctataaactaggacctctgatcccattttacagatgaggaaactgacgctcacaagtcaagtactaaggttaaagtcccaagtaggaggtcctgggatgcaaacttatgacctggcaractccagaaccccagaacccaattctttttttttcttttctttctttcttttttttttttagaggcagggtctcactctgttgcccaagctgtagtgcagtggtgcaaacacagctcactcactgcagtcttgaactcctgggctcaagcagtcctcctacaccacaggtgtgtgccactcgtgcacagataatttttttattttttttgtagagatggggtctcgctatgctgcccaggctgg

SEQ ID NO: 919069 - DNA, 610 bp, Homo sapiens
aatcacttgaacctgcgaggcggaggttgcagtgggcagagatcgtgccactgcactccagcctgggtgacagagtgagactctgtctcaaaaaaaaccaaaccaaaccaaaacaaaagaagacatgtccatgaatatgccagcactatktcagaatgggcccatcaagaatcaaacagataaagagtggttggcatgctcctgtgacagattattatacaccaatgagaggcatgatctctaactagaggcaataatgtgaaaagtgaaagatgtcaggtgcaaacgagtagaaactgtgattccatttccataaactagaaatcaggcaaaaccaacctatattattagacatcagcatcgtgatgacctgttggtggtaagggagggcctgaaggagcccaagagggaagcttctgaaatgctggaaatagtctgtttcttgatctgtgtgtgggttacacaagtgtgtttagttcatgaaaattcattaagcttctcacttatgagaagttttctaaatgtacgcagtaaagggttttgtaaaccagtactccgatggcatagctgttaagacaacaatgaaaagatgctagaagaagaaaaacag

SEQ ID NO: 919070 - DNA, 598 bp, Homo sapiens
cacctgcctcagcctcccaaagtgctgggattacaggcatgagtcactgcacccggcccaaatttttaatcaataagcacacaggatgtgtggtgacatcccagagggcctgcagcagggatgggctttgttcagaaccaggcagtgggcaaggcagccacagacacacctgtcccctccacgccaccactgtccccaccccatcacactagagtcacaccagctctgggagcagaaggtcacacatgccaatccagctccctcatggcrctcacacttgccccggccttgagcacaaaccactcctgtctggggtcaggcaggcactgaacagaaaactctggccacagaatccagttacagagtggatggagcagggagttcttcctgcccatgcaatgggaatcatcatcgctcatcagagatgggatccttcccagggctgagtgtgacctcaacaatcaggtggccctggaagggcccaagggcaccacagtagccctgcgaggagctcctgctaaaacacttcaccggacagggccttggaggccccgcccccacagggatggagggggctacacagggaggtaggaacggg

SEQ ID NO: 919071 - DNA, 598 bp, Homo sapiens
cacctgcctcagcctcccaaagtgctgggattacaggcatgagtcactgcacccggcccaaatttttaatcaataagcacacaggatgtgtggtgacatcccagagggcctgcagcagggatgggctttgttcagaaccaggcagtgggcaaggcagccacagacacacctgtcccctccacgccaccactgtccccaccccatcacactagagtcacaccagctctgggagcagaaggtcacacatgccaatccagctccctcatggcgctcacacttgccccggccttgagcacaaaccactcctgyctggggtcaggcaggcactgaacagaaaactctggccacagaatccagttacagagtggatggagcagggagttcttcctgcccatgcaatgggaatcatcatcgctcatcagagatgggatccttcccagggctgagtgtgacctcaacaatcaggtggccctggaagggcccaagggcaccacagtagccctgcgaggagctcctgctaaaacacttcaccggacagggccttggaggccccgcccccacagggatggagggggctacacagggaggtaggaacggg

SEQ ID NO: 919072 - DNA, 586 bp, Homo sapiens
ttcatccctaaagaatcgagggtcctggcaattgaattatgtcagtagtcttttttacgttattaactgatgaaaaaatgggtgctcttaaagaattttttaagatttggggggaaaacaaagtcagaagaagccaaattaagactgtgaggtggatgcttaatgattttctattgaaatcctcccaaaattgcccttgtttcatgaaaagaatgagcagcattgtcacggtggagaaggattctctggtgaagctctcccagtcatttttctgctraaactttggctaactttttcaaaacactgtcataataagcagatgtcatcgttatttagccctccagaaagtcaacaagcaaaatgccttgagcatcccaaaaagctgttgccatgacccttgcttttgactagtccacttttgcttcaactagaacacttccacctcttggtagccattgctttcattgtgtttcgtcttcaggattgtactggtaaagtcatgctttctttcctgctacaattcttcaaaaaaatgtttcaggatcttgatcctatttttttaaaatttccactgaaagccctgctt

SEQ ID NO: 919073 - DNA, 771 bp, Homo sapiens
cagctgagtcatgtgtacactaattatttttatttcccgtgcaaatttccccagagataattgtcttgctttctcattcgttttgttttctatgaacataccactagtgcaactccaaactcccagcctttggtctaaaactctttttaagacatttatgttatctgatgttctaccaatttcctattcttagagaaatctttcctggaggtttctggtatgctccaacctgaattggttgccttctaggcctgktgcatggctactatcttcaacatcttcctgtggattctctttgcctcttccttgtgttggatctcttcttttctgaatctcatatcttccttcttattggtttattccctcttttgggtggagtacatactttagtatcttcttgggaaaggatatgtaggaaataaaattgttgaaacgttgcttacctaaaaacaggtttatttgaccctcatgctttgtaattattatgggaaataaagaaatgctttgtaatattgtttcgagcaaagaatttaagaacagtaaaacaacagcaataaaagcttttgacaactcttattatctagacaacaggaaactcctatctttaaagtaaaagaaacaaaactggggccagcccaaagaaaaagcatttctgattttcacatacacctaaaatagctcctattgccattttttcaccatctctgctagaaaactcacgtaaggcttgtccactctcacacatgattgacagtctggctgtgtatagaa

SEQ ID NO: 919074 - DNA, 771 bp, Homo sapiens
cagctgagtcatgtgtacactaattatttttatttcccgtgcaaatttccccagagataattgtcttgctttctcattcgttttgttttctatgaacataccactagtgcaactccaaactcccagcctttggtctaaaactctttttaagacatttatgttatctgatgttctaccaatttcctattcttagagaaatctttcctggaggtttctggtatgctccaacctgaattggttgccttctaggcctgttgcatggctactatcttcaacatcttcctgtggattctctttgcctcttccttgtgttggatctcttcttttctgaatctcatatcttccttcttattggtttattccctcttttgggtggagtacatactttagtatcttcttgggaaagratatgtaggaaataaaattgttgaaacgttgcttacctaaaaacaggtttatttgaccctcatgctttgtaattattatgggaaataaagaaatgctttgtaatattgtttcgagcaaagaatttaagaacagtaaaacaacagcaataaaagcttttgacaactcttattatctagacaacaggaaactcctatctttaaagtaaaagaaacaaaactggggccagcccaaagaaaaagcatttctgattttcacatacacctaaaatagctcctattgccattttttcaccatctctgctagaaaactcacgtaaggcttgtccactctcacacatgattgacagtctggctgtgtatagaa

SEQ ID NO: 919075 - DNA, 603 bp, Homo sapiens
gggtttggtggggacttggagaacttttctgtcttacaagaggattgtaaaatacaccaatcagcactctgtagctaggattgtaaaacgcaccaaccagcgctctgtggctagctagaggtttgtaaaatgctccaatcagcactctgtaaaaacacaccaatcagcactctgtggctagctagaggtttgtaaaatggaccaatcaccaccctgtaaattgtgccaatcagcacccagtaaaatggaccaatcagcaggacacaggcggggacaaataaggaaataaaagctggccactccagtcaacagcagcaaccygctcaggtccccttctacactatggaggctttgttcttttgctcttcccaataaatcttgctgctgctcactctttgggtccacaccacctctaaaagctgtaaaactcacgatgaaggtccacagcttcattcctgaagtcagcaagaccatgaacccaccagaaggaacaaactcctgacacactatagtgtagcctagctgaccaccacagtcttcaagctcattgttgattcacacttaagttgcattctcagataccagctttccttagcacatagt

SEQ ID NO: 919076 - DNA, 603 bp, Homo sapiens
gggtttggtggggacttggagaacttttctgtcttacaagaggattgtaaaatacaccaatcagcactctgtagctaggattgtaaaacgcaccaaccagcgctctgtggctagctagaggtttgtaaaatgctccaatcagcactctgtaaaaacacaccaatcagcactctgtggctagctagaggtttgtaaaatggaccaatcaccaccctgtaaattgtgccaatcagcacccagtaaaatggaccaatcagcaggacacaggcggggacaaataaggaaataaaagctggccactccagtcaacagcagcaacccgctcaggtccccttctacactatggaggctttgttcttttgctcttcccaataaatcttgctgctgctcactctttgggtccacaccacctctaaaagctgtaaaactcacgatgaaggtycacagcttcattcctgaagtcagcaagaccatgaacccaccagaaggaacaaactcctgacacactatagtgtagcctagctgaccaccacagtcttcaagctcattgttgattcacacttaagttgcattctcagataccagctttccttagcacatagt

SEQ ID NO: 919077 - DNA, 569 bp, Homo sapiens
agctggtttttgaaaagatcaacaaaattgatagaccactagcaagactaataaagaagaaaagagagagaaatcaaatatacgcaataaaaaatgataaaggggttatcaccaccgatcccacagaaatacaaactaccatcagagaatactataaacacctctactcaaataaactagaaaatctagaagaaatggataaattcctggacacacacaccctcccaagactaaaccaggaagaagttgaatctctgaatagaccaataacaggctctgaaattgaggcaacaatcaagagcctascaaccaaataaagtccaggaccagacggattcacagccaaattctaccagaggtacaaagaggagctggtaccataccttctgaaactattccaatcaatagaaaaagagggaatcctccctaactcattttatgaggccaacatcatcttgataccatagcctagcagagacacaataaaaaaagagaattttagaccaatatgcctgatgaacatcaatgccaaaatcctcaataaaatactggcaaaccgaatccagcag

SEQ ID NO: 919078 - DNA, 637 bp, Homo sapiens
tcaatttcactactatccccacagttactcaaaccaaaaccttagaagtattatatccctttcttaacttaccttctacatttaataattgaagattcctgtcaactttatcaaatcctgccctgttgtgtcttaaatctatttatctctgtcttcacttccctggccctcatcatctttcacttagactaccccaaaaggtctcctgaggatcttcttgcctccccataatccagatgtctcccttctatctcaaatcctcacctgaattcccatagctctatgagacccaatccctctctatctcttggatctyaattcttttttttttttttttgagacagagtctcgctctgtcgcccaggctggagtgcagtggtgcgatctccactcactgcaagctccgcctcccaggttcacgccattctcctgcctcagcccccccccctcgcagtagctgggactacaggcgcccgccaccacgcccagctaatttttttttgtatttttagtagagacggggtttcaccgtgttagccagatggtctcgatctcctgacctcatgatctgcctgtctcagcctcccaaagtgctgggattacaggcgtgagtcaccgcgcctggccggatctcact

SEQ ID NO: 919079 - DNA, 637 bp, Homo sapiens
tcaatttcactactatccccacagttactcaaaccaaaaccttagaagtattatatccctttcttaacttaccttctacatttaataattgaagattcctgtcaactttatcaaatcctgccctgttgtgtcttaaatctatttatctctgtcttcacttccctggccctcatcatctttcacttagactaccccaaaaggtctcctgaggatcttcttgcctccccataatccagatgtctcccttctatctcaaatcctcacctgaattcccatagctctatgagacccaatccctctctatctcttggatcttaattcttttttttttttttttgagacagagtctcgctctgtcgcccaggctggagtgcagtggtgcgatctccactcactgcaagctccgcctcccaggttcacgccattctcctgcctcagccccccccccycgcagtagctgggactacaggcgcccgccaccacgcccagctaatttttttttgtatttttagtagagacggggtttcaccgtgttagccagatggtctcgatctcctgacctcatgatctgcctgtctcagcctcccaaagtgctgggattacaggcgtgagtcaccgcgcctggccggatctcact

SEQ ID NO: 919080 - DNA, 649 bp, Homo sapiens
ctccggctcccactgagtgtgggatatggtttcctacctaagtacacacttgccacgggatggggtatgtcctgaggctgtgggggtcatgtacacgtgggttttgtgttactgtgttctacattgtccagattcaggatcctcattttctgggaaatcctactcaacgaaaagtctgggtggaggcttgtctcagaccccaccccccgctgtcttgagcattgccacatgcttcctagtcttactgcatcagtccactcctctgtaaagtgggatgataatatctgctctcaatatctactgtgtgtgttttttkgggggggcatagaaaattcaaattaaagaatgaatgcaaatttgcattccatcaagaatgatgatgattatgggaggccaaggcaggcggatcatgaggtcaggagatcgagatcatcctggctagcatggtgaaaccccgtctctactaaaaatacaaaaaattagccgggcgtggtggcgggtgcctgtagtcccagctattcaggaggctgaacaaggagaatggagtgaacccgggaggcggagcttgcagtgagccaagattgcgccactgcactccaacctgggcgacagagcgaaactccgtctcaaaaaaaaaaaaaagaatgat

SEQ ID NO: 919081 - DNA, 649 bp, Homo sapiens
ctccggctcccactgagtgtgggatatggtttcctacctaagtacacacttgccacgggatggggtatgtcctgaggctgtgggggtcatgtacacgtgggttttgtgttactgtgttctacattgtccagattcaggatcctcattttctgggaaatcctactcaacgaaaagtctgggtggaggcttgtctcagaccccaccccccgctgtcttgagcattgccacatgcttcctagtcttactgcatcagtccactcctctgtaaagtgggatgataatatctgctctcaatatctactgtgtgtgttttttggggggggcatagaaaattcaaattaaagaatgaatgcaaatttgcattccatcaagaatgatgatgattatgggaggccaaggcrggcggatcatgaggtcaggagatcgagatcatcctggctagcatggtgaaaccccgtctctactaaaaatacaaaaaattagccgggcgtggtggcgggtgcctgtagtcccagctattcaggaggctgaacaaggagaatggagtgaacccgggaggcggagcttgcagtgagccaagattgcgccactgcactccaacctgggcgacagagcgaaactccgtctcaaaaaaaaaaaaaagaatgat

SEQ ID NO: 919082 - DNA, 693 bp, Homo sapiens
ccccttgcaactaactggtcgtggccatatgactaatcttaccaattgaatgcattactctgggatagagttttatataaaaggatgtcctcttttttctctctttctgcatttgagaaatgatgcagattactaagaagcccccaggcatggtrgaattacaagacagaagggtctccttggtctccaaatcaccactaagaagaaagatattctctgatcaggttcacgtgcacttggttaataggaaagcaaaaacaacccattgaaatgcaagagtttgtttgttacagcagctatcatgagatccccttactagcatgacattcatttactagtgcagtgacatcagtgtaacaaaagcatgctttacagctctttctcaaaactcttctgggcaaactcagacaccccaactagttctctcgaagttatggcctagttggatcattctataatagtcctgggtcagacccaaaacacaaatgctgacagggctgagcttgaggtgggaggcttgctaccaaatgaccttgcctttgagaaacctctggatagagagagaaagggagtgggggaaggacactgggacagcaagcatttgaagatgtttctgttgccttttgatcccgttgagcacagtttgaatttgtcatttaatgtttactgccaacgtaataaagagtgttaata

SEQ ID NO: 919083 - DNA, 611 bp, Homo sapiens
gaaacaaaattgataacagcacattcccaaaaagacccccttcttgcctggggaccagtctgcctttgcaggactaacaaattagctacaagatttgaaattacagtttaggggtctgcagcctctggctccaagaatctgaacctccccaaattgctcctggggatgacatcactactgtgaaccctaagatcagtgcttgagatactttgcagaccctgcactccatggatcagctgacaccacccagaccggcagtctggctcaaccagttctgccattgcacccaggaacaaagacagcaagaaaaactcacttcgaccccctrtgattccatctccagcctgaccaatcagcactccccacttcccaagattctacctgccaaattatctttaaaaactctgatccccgaatgctcagggagactgatttgagtaataaaactctggtctcccacacagctggctctgtgtgaattagtctttcaccattgtaattcccctgtcttgataaatcggctctgtctaggcagcgggcaaggtgaacccactgggcggttacaataccagcggtgctgctcaacactttacattgcataaggatcataa

SEQ ID NO: 919084 - DNA, 631 bp, Homo sapiens
tggttttatttgttgatgtttaatttttatttagttaacttccatttctatatgtttttagacttcctctgttatttttgaatcttattgacatacatacttagctctttttccatctttctctttttctaataaagctataaatttttcttaaggcatgagtctatctgaagctcatamcaatatcattttgtcattcagctaaaatgtgtataactttttgttgtaatttttgtcctatagatgtttataaacgtgtatttttagatttacaaatagatgtattttcctttcttttttcacttatatttgatgtataacctgactgaattaggaacagaaaacatatgataatgatttaaagtcttagacagttttttgaaactggttttatggaccatcagtatttgtaaatattccaaaaaagcatacatatattagtattgaaaagaatacagtattagttcattctcacgctgctataaggacatactcaagactaggttatttataaaggaaagaggtttaattgactcacagttccgcatggctggggaggcctcaggaaacttacaatcatgatggaagaggaagcaaacacatcgtttttcatatggcaacaggaaagaga

SEQ ID NO: 919085 - DNA, 575 bp, Homo sapiens
aactcaccccctggtcccccaccatgacactacctctgtgaacattttggtagatattctttgggctctgacacgtacacacatgttgacttttatcatcatcatcatcatcatcattattctagtactctctttttcactttgctaaagtttgaatcatcttttgtaatggatgcgtaatactctaccaaatatagagtatgtatttgtccatgttttraattatttccctaggagagcttacccaaggtaaaatacttggtcaaaatttataagcctcttcatagctcttggtacatactgacaaactctctccaaaaggatggtaccaatttttaaaatctcaccagtaatatatgcagatactggtttgatgttattgagatttaaattcagttgtgttggcatggttatagcttagatagatagatgatagatagatagatagatagatagatacatacatacatacatacatacatacatacatacatacatacatacattcattcatgtgtttgtgtgtgtgtatgtgtgtgttactcctccttaatggacaaatggtgatatggatt

SEQ ID NO: 919086 - DNA, 638 bp, Homo sapiens
aacattatcaaagattgtttactagcattttggagaaaacaatagttaatgtggaggtcttccagtcaattactaatgagmgtacgttaatagccaggcttcatctccaaacccaaaacaaaatacagggagaatttcgtgtttcaatctttttcttgcgtgcgtgtgcgtgtgtgaaggataagagggaagagctgctttcagagttcacaagcctggtaagaagggctgattaaagctattcccaatgtcacatagattgttatggagctaataaccactgtcaactgtaatttttgcagtgccctcctacagaacttcctacaatgatggaaattctctgtatctgttttatccaatactaagaaaacaaattataaattttctttcattttaaataacttaaacagccgtaggtagttctatcagacagtgtagcccaccgtctgtcttcaatcatccaggcccaagacaagcttggggctggtccctgggtctccaggagagcccagcaagctgaacaatggcaaccactggtaggtgtgaaatgccagccagttcagtgagacacagggcacagcaagaaccaaaccccgagactgccatggaatcaggacacatctttgttttgagtgcag

SEQ ID NO: 919087 - DNA, 594 bp, Homo sapiens
cattctacatgtgcaatatgaaaaatatagttaataactgtgtattgtattcagaatttttgctgaatgagtagattataactgctctggggtggggactgatgagcaactgcgtgagatgatcaaacgttattttgtttcactgtagtaaccatgttactatatagtatctcataacatcatgttgtgtaccttaaatatacacaataacatttatttaaaaataaaaacaaaaagggcttacatttgtgaatatgcatctcctgtaactctgaagtatccttctcaaggacccgaaagycattactgtgaaaagtcatcatcaggaaggctagggcccctgtcccccatctcagtaggtgggtagaatcctaacttgtcaactcacaaacacagctggcccaaaggcattaatgctggccaacccttcgcagttctttgcctctctgaatctgctgagcccctgcttaccccctccctactccctcactccctttgcaatcccagtcacctctatgcaaatcacaatggagttcagttctttctcctcccatcagtaattactgaataaaatctgttttcactgctttaact

SEQ ID NO: 919088 - DNA, 594 bp, Homo sapiens
cattctacatgtgcaatatgaaaaatatagttaataactgtgtattgtattcagaatttttgctgaatgagtagattataactgctctggggtggggactgatgagcaactgcgtgagatgatcaaacgttattttgtttcactgtagtaaccatgttactatatagtatctcataacatcatgttgtgtaccttaaatatacacaataacatttatttaaaaataaaaacaaaaagggcttacatttgtgaatatgcatctcctgtaactctgaagtatccttctcaaggacccgaaagcsattactgtgaaaagtcatcatcaggaaggctagggcccctgtcccccatctcagtaggtgggtagaatcctaacttgtcaactcacaaacacagctggcccaaaggcattaatgctggccaacccttcgcagttctttgcctctctgaatctgctgagcccctgcttaccccctccctactccctcactccctttgcaatcccagtcacctctatgcaaatcacaatggagttcagttctttctcctcccatcagtaattactgaataaaatctgttttcactgctttaact

SEQ ID NO: 919089 - DNA, 589 bp, Homo sapiens
gatttaatgctgtgctcatgccctcttaaaattattgctgaactctgctctgtaagtgaagtccatggggcagcagcacatgcgcaggagcatggaggaggcgtaatatgcatgtcagctgctctttgctgcccattcccatagaacatttgcaatgcccsagcagcagaggatggatgctggcggtgagaggtgaagccggctgggcttctgggtggggtggggacttggagaacttttctgtctagctaaacgattgtaaacgcaccaatcagcactctgtgtctagctaaaggtttgttacagaccaatcggtctgtaaaacagaccaatcagctctctgtaaaatggaccaatcagcaggatgtgggtgggtccagataagggaataaaagcaggccacccaagccagcagcggcaacccgcttgggtccccttccacgccgtggaagctttgttcttttgctctttgcaataaatcatgctgctgctcactctttgggtccacaacacctttatgagctgtaacactcaccacaaaggtctgcagcttcactcctgaagccatagagaccatgaacccaccggg

SEQ ID NO: 919090 - DNA, 589 bp, Homo sapiens
gatttaatgctgtgctcatgccctcttaaaattattgctgaactctgctctgtaagtgaagtccatggggcagcagcacatgcgcaggagcatggaggaggcgtaatatgcatgtcagctgctctttgctgcccattcccatagaacatttgcaatgccccagcagcagaggatggatgctggcggtgagaggtgaagccggctgggcttctgggtggggtggggacttggagaacttttctgtctagctaaacgattgtaaacgcaccaatcagcactctgtgtctagctaaaggtttgttacagaccaatcggtctgtaaaacagaccaatcagctctctgtaaaatggaccaatcagcaggatgtgggtgggtccagataagggaataaaagcaggccacccaagscagcagcggcaacccgcttgggtccccttccacgccgtggaagctttgttcttttgctctttgcaataaatcatgctgctgctcactctttgggtccacaacacctttatgagctgtaacactcaccacaaaggtctgcagcttcactcctgaagccatagagaccatgaacccaccggg

SEQ ID NO: 919091 - DNA, 573 bp, Homo sapiens
ctctactagaaatacaaaaatgagccgggtgtggtggtgcacacctgtaatcccagctacttgggaggctgaggcaggagaattgcttgaacctgggagacagatgtgcagtgatctgagatcgctccactgcaactccagcctgggtgacaaagggagaccctgtctccgaaaaaaaaaaaagaaaagaaaaaagcagattgggattcttaagtcactctttctccttaatgggtattattattggtacatagacaataacaattatttaaggctagaggggcagagtcttaagaaaaatcaatgtaaatccrtatcccccaatcagaacctcatctacccttatgtttttggaaattatttataatacaaaatgttggagcatcagttatgccaaaagtcaaattgcttcattcatcaatgggaagctacctcagaaacttagtgtttccaaatataaagctgtgttatttccattcatcacagtcatttttataagaccaccaggatcaaaagtactaggcttacattcctatgaggatgtcttaagggtccctagagtcagaagcaccg

SEQ ID NO: 919092 - DNA, 673 bp, Homo sapiens
tgtcagggagatagggcttctgatttcagaggagaccagaggtgtgctcatgcagatgaaggtcctcatgggatggacatggaaggggcagctacaacctggggacaaatggtggtgggctgagcccctgggacttctggagtgagsaggcaagaacgtgaggaggagccaggcagggagccagaggcagagggtaaagagtaaagtagagcccaggaaaggggcagatccagcaagtagatgaaaatttcccctcacctgccccgttggcctctgtccctgcccacacgccctagtgccctcgccctgagtctctgcttgtctcggcctacctggccatcccagacaggtgtggggtaactgtgagggtaactgaagggccactttcagaaggcacagtctagaagtgaacagcattgagtcactgtcgtctcccagtcctgggaagagcctctgccacaacccgctgagctgtcttcatcaccaacgggtctccttcccccacccctggaggtccagaggacagctcagagctgtgattggtgcctcttcccagtgtctctctacactgctcctgcctgtgcctcagcatcctcctctgagaggtgggcctgtcgctgcacgtgaatggcgagcaggtcactgtggggaagggcctcctccttcctctttc

SEQ ID NO: 919093 - DNA, 606 bp, Homo sapiens
cacaagtctctgagtccctaagccacctcctgcacagctccagggcccagcaggcaccagtaagcatggcctcctggaggcctcaactcttttttgtcctagtgtgcaggctttcaccattcctcccccgaaagctcaactagtttttcttctttctgggggctggagtagggctgcctttttgcctggactcatgggtaggctrgattgccatacccccaggagacaggcaccaggagcccaggaaagaggaaggaggaggcccttccccacagtgacctgctcgccattcacgtgcagcgacaggcccacctctcagaggaggatgctgaggcacaggcaggagcagtgtagagagacactgggaagaggcaccaatcacagctctgagctgtcctctggacctccaggggtggggaaggcgacccattggtgatgaagacagctcagcgggttgtggcagatgctcttcccaggactgggagacgacagtgactcaatgctgttcacttctagactgtgccttctgaaagtggcccttcagttaccctcacaattaccccacacctgtctgggatggccaggtaggccgagacaagcagagac

SEQ ID NO: 919094 - DNA, 591 bp, Homo sapiens
gatgtgggacttgagggagatatttaggttggatatatcaattcttacttgttagtcctcctcccctttgtaattttgaattataattcatggtgtaatgaaacatagttcctgacttgaacattcaagatcctgcacaatttggtctcaagctgccttctaagttttctacttgtttgcttaacatacactttgctccaccaaaytggattacatacataaccttgatattagttgcattctctatacacttgaagattgaggtaaaagggatctgacctaccatgccacgaaatgtggaatctgtggctttctctaagatttatagaaatttgtggggtaaagcagagaaaagggttacattatcagaataacttcaattattaaaaactttcaatttccacagatacataaaaaagctctgccagccattaacagatggcaatagcaattacttgtgtggagtcactttggatttatgcacaattagggattttggttacctaagctgtttgtaactagaggagcatctgtgattagtttacagctccacttaccttcctgctaatgtggtccctctattacaattag

SEQ ID NO: 919095 - DNA, 598 bp, Homo sapiens
cctattttttttttttttttttttgcaaaaaattagccaggggtggtggcacatgcctgtagtcccagctactcgggaggctgagacaggagaatcacttgaacctcagaggcataaggttgcagtgagccgagatggcaccgctgcactccagcctgggtgacagagcgagactccatctcaaaaaaaaaaaaaaaaagaagaagaaaaaacaaaaccaagacactggtagtttggtgagaacagtttcagggaagaagatgccaaagaaaccaaatgaactactgtgagttgagactgaaaaagaagtgagcatgtggggtcagcatctcctttcctgaagtttggctgtgaaagggagtcagtaggtggtaactggagcagaacatggagtcacagaaaatgttttatttatagggagggaggaactkgagcatgtctaggtgcaaatgggaaggagtaaaataagactgcaggtgttggattgcagtggggagaagatgacccagggaggagaggatgggattcagagataaggcatccaatcttagtgggaaaactgggagactgcccggggtggtgggtcttgatttgggtt

SEQ ID NO: 919096 - DNA, 580 bp, Homo sapiens
tgagatttaaaatgctcttactcaaggttatgtgatagtacaggataacttaaatgagagcattaccacaaaataaggtgttattgaaatcttacatctccgtagaccttctcaggtatttcaatagaaatacagagagaaagaagttttccttaaggcctttccaattccttccatttattggctttgagtgagggaacttgttccctcagactgaattttcaagataacagatccctgaaatctttctgctttttgtttgtttgtttcttttatttatatatatatatwtttttttattatactttaagttctagggtacatgtgcacaacgtgcaggtttgttacatatgtatacacatgccatgttggtgtgctgcacccattaactcatcatttactttaggtatatcttctaatgctatccctcccccttcccctcactgcacaacaggccccggtgtgtgatgttccccttcctgtgtccaagtgtactcattgttcaattcccacctatgagtgagaacatgcagtgtttggttttttgtccttgcaatagtttgctgagaatgatggtttc

SEQ ID NO: 919097 - DNA, 555 bp, Homo sapiens
tagggacggggtttcaccatgttggccaggctggtctctaactcttgacctcaagcaatccacctgcctcagcctctcaaagtgctgggattacaggcgtgagccaccgcacccgactggagtacatttttaaaaaatcgrcagctttatattgtgcttagttacttgagatttagcaaccttaccatagaagcaattcccaccatcattattttctggaaggggaacaaaatgaagagtgacgagtaagaacgcaaagtgtagaataaaaccatttctaacttgcttaataactttgctgttactaagtcataaaactatggtggctttgtaagtaaaataaaatatagtaagattttggccctgctgtattaaatggcttatggtcatgcctttagaattttaggaacacattcgcttcagttgtctcattttctctcttcaacgctatgaattaggcataacaggtactaatacttccattttatagataagaagattgaggcatagaaaatatcagtgacttacatataactaattcagtagcaaagccag

SEQ ID NO: 919098 - DNA, 594 bp, Homo sapiens
acttcctggaaggcactgaccacattttcttttcctcttaaagcaaataaatgaattaaatggtttaaacacattttgccagcaaatagaaagattatttaatacttttgggtaaaaaaattttgtcctctaaatttagcagctttgcctgtatttctcmgacactcagaaggggttgcggggaagaagcctccaagaatatacttcagaaacatttttttccaaatgtattttgcctgaagtctcgggctaaaagaatcttcctcttcaagaaagggtcagtgtggaagcactctgctgctcacaggttcccaccttgatgatagaaggttctatagccacaaagctctccaagagaggccttgactcactgccattggagaggacaacaggaagtgtgcagccttttgcttttctaagaagataaacacagatagaacctctttgggtggcaagatagtttcattatgaaacttaccttctccataaagctgttgtagtaaattaatatgcatccattttaaaatgacataggaagtacttaacacttgtttgctaataactttagtgacgagagcagtatcatcattctca

SEQ ID NO: 919099 - DNA, 594 bp, Homo sapiens
acttcctggaaggcactgaccacattttcttttcctcttaaagcaaataaatgaattaaatggtttaaacacattttgccagcaaatagaaagattatttaatacttttgggtaaaaaaattttgtcctctaaatttagcagctttgcctgtatttctcagacactmagaaggggttgcggggaagaagcctccaagaatatacttcagaaacatttttttccaaatgtattttgcctgaagtctcgggctaaaagaatcttcctcttcaagaaagggtcagtgtggaagcactctgctgctcacaggttcccaccttgatgatagaaggttctatagccacaaagctctccaagagaggccttgactcactgccattggagaggacaacaggaagtgtgcagccttttgcttttctaagaagataaacacagatagaacctctttgggtggcaagatagtttcattatgaaacttaccttctccataaagctgttgtagtaaattaatatgcatccattttaaaatgacataggaagtacttaacacttgtttgctaataactttagtgacgagagcagtatcatcattctca

SEQ ID NO: 919100 - DNA, 594 bp, Homo sapiens
acttcctggaaggcactgaccacattttcttttcctcttaaagcaaataaatgaattaaatggtttaaacacattttgccagcaaatagaaagattatttaatacttttgggtaaaaaaattttgtcctctaaatttagcagctttgcctgtatttctcagacactcagaaggggttgcggggaagaagcctccaagaatatacttmagaaacatttttttccaaatgtattttgcctgaagtctcgggctaaaagaatcttcctcttcaagaaagggtcagtgtggaagcactctgctgctcacaggttcccaccttgatgatagaaggttctatagccacaaagctctccaagagaggccttgactcactgccattggagaggacaacaggaagtgtgcagccttttgcttttctaagaagataaacacagatagaacctctttgggtggcaagatagtttcattatgaaacttaccttctccataaagctgttgtagtaaattaatatgcatccattttaaaatgacataggaagtacttaacacttgtttgctaataactttagtgacgagagcagtatcatcattctca

SEQ ID NO: 919101 - DNA, 630 bp, Homo sapiens
ctagactttggagaggaagcaggggaaacaatttagctccaaaaattaactaggcctgcctgaaattattgttcagacaagccttgggttgtggttttgcataacagagttccaaatttaatatcattctgacttaaaacttcatctggtcttccagtgatgaccttgattaattgtgcttaaagatttctgaagatgtgtaatattttgaattgaatatgacaggggttttaatatattcaacctcctgcatttcatttttgtgactgaggagactgggtcagcttttagcatcctataaattacctcctctttactcttgcttttttttaaaataacagctttattgagatataattcacatgccatatatatacttccccagtttaaagtatatgattcaatggtttttagyatattcccagagttatgcaaccacctccacagtaaattttagaacgcttccattgccccaaaagcaactccttcccattagcattccctccccatctctctaatatgccccttccttgagatcctggcaaccaatatttttttttctgtgtgtatgaatttgtctattctggatatttcataaaaatagaatgatataatatgtagtattttgtg

SEQ ID NO: 919102 - DNA, 630 bp, Homo sapiens
ctagactttggagaggaagcaggggaaacaatttagctccaaaaattaactaggcctgcctgaaattattgttcagacaagccttgggttgtggttttgcataacagagttccaaatttaatatcattctgacttaaaacttcatctggtcttccagtgatgaccttgattaattgtgcttaaagatttctgaagatgtgtaatattttgaattgaatatgacaggggttttaatatattcaacctcctgcatttcatttttgtgactgaggagactgggtcagcttttagcatcctataaattacctcctctttactcttgcttttttttaaaataacagctttattgagatataattcacatgccatatatatacttccccagtttaaagtatatgattcaatggtttttagtatattcccagagttatgcaaccacctccacagtaaattttagaacgcttccatygccccaaaagcaactccttcccattagcattccctccccatctctctaatatgccccttccttgagatcctggcaaccaatatttttttttctgtgtgtatgaatttgtctattctggatatttcataaaaatagaatgatataatatgtagtattttgtg

SEQ ID NO: 919103 - DNA, 581 bp, Homo sapiens
tgtaattctgatagagattgcactgaatctgtagatcattttgaggagtattgttatcttaaaaatattaagattcagcctgggaaacatggtgaaaccccatctctacaaaaaatacaaaaattagccaggtgtggtggtcccagctacttgggaggctgaggtaggaagatcacttgcactcaggaggttgaggctgaagtgagacatgaccaagccattgcacgccaacttaggcaatagagagagaccttgtctcaaaaaaaaaaaaaaaaagtcttccarttcatgaatgtgggatgtcttttatttattttggttaaaaatttttttttaacagtagttttcagtgtacaaatcttttttttttttttttgagacagagtctcgctcttgttgcccaggctggagtgcagtggcgcaatcttggctcactgcaacctctgtctcctgggttcaagcaattctcttgcctcagcctcctgagtagctgacctcaggtgatcctccctccttggcctcccaaagtgccaggattacaggcgtgagccaccacgcctggcctcagtgtacaaatctta

SEQ ID NO: 919104 - DNA, 732 bp, Homo sapiens
ctttcagtccttttaatgttctatcccattgcttccttacctccatggtttctaatgataaataagctgttaatcttattaagcattacttctacgtgataagctgcttctcttttgctgctttcaagattctatctttgtctttatctttgaacagtttaattataacgtgtctcagtgtggacctctttgagtttatcctacttggagtttcttagatgtatagactaatgttttccatcaaatttggaaagtttttgcccattatttctctcaagtattcttyctattagaccccactacctcctctggcactcccattatgcatatgttgtggtatacttggtgatgtcttttaaagtctgctcattattctatgtctttcttttttatgctcctctgactgagtaatctcaatgacttatcttcaagttcactgattcttctgcctgctcaaatctgctgttgagtctctctaataaatttttcctttcagttattcttttaagcactagaatttatatttggctcttttttataagtttggtctttttattgatattctctatatgtgagacatcattctcatggttttctttagttctttgtacatggtttcctttagttttttgagcatattttaaatggttgaattaaagtctcttaaaagtaagcccaatgtctgggcttcttcaggaataatttctatcaattgtcatttttcttgtgtag

SEQ ID NO: 919105 - DNA, 712 bp, Homo sapiens
acaggctccagctacctgcgaacttgaacccatttgagtaagcaggtaaatcataatcttgtgtttttttttttttttttaagatgaagtctcggtttgtcacctaggctggagtgcagtggcgtgatcttggctcactgcaacctccggcccctggcttcaagcaattctcctgcttcagccttctgagtagctgggactacagacactcaccaccatgcctgactaatttttgtatggggtttcaccatgttggccaggctgatctggaactcctgacctcaaatgatccgccctagttggcctcccaaagtgctgggattacaggcatgagccaccacgcctggctcatcttacttgtttttattcatctttcataaatgtatgtacagctcacatttatttcamtatttaatttaaaagtgttttagtctttacttagaagtttggtgatgctttcatgaccagaaatatgccataggagcttaactcttatttatatcaattagactatggtaaaattggtttcgttatatgtcctttcaagtggcagagtcacggtttccaagaacttactgacgacatcaagtgaggacttaccgtacaaagacagcttcctctttttcattactgaccagtactgtattctggtgtaaggacgcactagtttatttcaccagtcccttattagtggacatttgggttatttcta

SEQ ID NO: 919106 - DNA, 644 bp, Homo sapiens
cgataagcagactttacatttcggtgttttcctgcatagtaggtacaatcggtgatgggattatttttctctcccccattcatgcctgcttctttaagattttaatattaagaattgttttatgaaattaatgttaaaatactacagtgttctcttccctgggggtgcaatagacaggtcggtgttcctgggattccttctgagtgcccatcatccagcctcacttccctttgcctccacactggccccagtggccttctttggaggatgcccatgggcccctggagctgcttggggaaaggtacagagagccagaagtgcctgggggtttacattcgctctgaggyggccagtagcggagaaccgaatatgggagtgacaaaggtcagtggccttgcttcaatgtgggcccatttatgctttggaatctggcagaggctgggccggaatctcacctgtgcttggctttttccccatttctgttctgttcccctcatcccctttccgttttctcctgggagcactttattgatatataactgacaagtgaattgtagtctccagatctgattctgggggacccattttaagatgggggtggcagaaggtggggggatggcatgagagtgtagatcgtagataat

SEQ ID NO: 919107 - DNA, 628 bp, Homo sapiens
gcacacctccaaccaactgatctttgacaaagtcaacaaaataagcaacagagaaaggactccctattcaataaatggtgctgggaaaactggctaaccagaaactggacccctacctatcatcatatatacaaaaattgactcaagatggattaaatacaaatgtataacctcaaactataaaaatcctagaagaaaagctaggaaatacccttctggacatcagcctaggcaaagaatttatgactaagccctcaaaagcaattgcaacaaaaataaaaattgacaagtggaacctaattaaactaaagagmttctacacaacaaaagaaactatcaacagaataaacaacctacaaaatggggggaaatattcacaaactatgcatctgacaaagggctaatacccagaacctataaggaccttaaacaaatcaactaataaccccattaaaaagtgggcaaagacatgaacaaatatttttcgaaagaacacataaatgtggctatcaagcatatgacaaatagttcaacatcactgatcattagagaattgcaaatcaaaaccacaataagataccatcccacaccagtcagaatggctatgattaaaaagtcaaaaaataac

SEQ ID NO: 919108 - DNA, 541 bp, Homo sapiens
tctgagaggccttttaattcattaactgcaaaaatctacacatatgattttagaaaatgtcaatcaactagctaaacaatattttcccagctaaggttataaacagcagctaagtgggtggaaaatgtctaaaacgactatacataccagttcttttataatgcataaaaagtgggcattttgttttcaagctggtatctttgggatgkaacttttagcaagcacacagtacatctcagcagtgtatattatttaaagtgcattctctctctctctctctggcattgtgaagactttttaaattttagctttacaaaggggggaaatcattaaaatgtggtttgtaccattacattccattatttgtcatctttatggctattctatagttttcattgacctttaatggtaagcttggtcaggagaggtgagcaggaatgttcacatacttggctgagggtgctgcttgagagtgtctgttagctgggcttcaatccacgtccctgtagattttaatgtccctacagactgctggcagcct

SEQ ID NO: 919109 - DNA, 599 bp, Homo sapiens
ttttataccccaggctggtctggaactcctggcttcaagtgatcctcccacctcagcctcccaaagtgctgggactacaggcatgagccaccttgcctagccagaacccccaaatttgtagttgaccaggcagaagtggggtcactacctcacttgtagctagcatctgaaggggggcagtcttgtgggactgaggccttaccctgtgagatctgtgctaactctggaagttagtgttagaatctgtttgaattgttggatgcccagcgggtgtcagagaatcggctggtgtcaggaaaaagcacacatttggtgtcagaagtggtgtcagaaaataccaagcaggccccaactttagctgattggrtccatgcctcctgaggtgaccaggttctcaagactaactccaaagaatctgatggagcaggctggggccaatgtgtggctttcaatgagccctatcccttccaggaggaacagatactgcttcaggggttcctgctgctgggtgggcctagcattagaagagaaggcatgaggcatcccagtggacagtgccatggagctgtgcaaacgtgatgtccctgtccctgccacag

SEQ ID NO: 919110 - DNA, 755 bp, Homo sapiens
gacgtcagagaatttccagccaagacagacggactccagaatgccactgtgggacaattttgaagcaagaaaaattaacgtgcaaagtcatcctggagtctggggaagaaagaggcatttcctcatgtttaacaagcgttggagctcaaagagtgagcttgggagcctgtcctgtcacggttctgatgggacatagggtcgcttacaaatgaaaagaaaygttttgtcacatggggcatcattccaggcctgaagtgagggagcctttatattgccacagtgttcattgttcccagcattgttgggctcacctggaatccagaacctaccaagagcggggaaaaagatggatttacaaagtggaaaatcaaaaagaacttatttccagtgaagaaatgagttaactcaacccaagcttttgtcctagggaatggcatagcaaatgtctgcacccaagcctcagaggaaggggactggtgagacttcgacctctaagctttcacatgccccaagtccaggccaaaccaacccaccactttcaagtccctacacaaacccacactgtgaagacctagactcatgacaagatccctgaagctggccaggtagaaggccttgttgccaaaccccagagggcgtggagggctcaggtccacagccagttggtgacagggttgtgctcgatcttggttgcaatgttcctgtcactctaagacagggaagaatcagaaaccctgtctcatggggaacatcgc

SEQ ID NO: 919111 - DNA, 755 bp, Homo sapiens
gacgtcagagaatttccagccaagacagacggactccagaatgccactgtgggacaattttgaagcaagaaaaattaacgtgcaaagtcatcctggagtctggggaagaaagaggcatttcctcatgtttaacaagcgttggagctcaaagagtgagcttgggagcctgtcctgtcacggttctgatgggacatagggtcgcttacaaatgaaaagaaacgttttgtcacatggggcatcattccaggcctgaagtgagggagsctttatattgccacagtgttcattgttcccagcattgttgggctcacctggaatccagaacctaccaagagcggggaaaaagatggatttacaaagtggaaaatcaaaaagaacttatttccagtgaagaaatgagttaactcaacccaagcttttgtcctagggaatggcatagcaaatgtctgcacccaagcctcagaggaaggggactggtgagacttcgacctctaagctttcacatgccccaagtccaggccaaaccaacccaccactttcaagtccctacacaaacccacactgtgaagacctagactcatgacaagatccctgaagctggccaggtagaaggccttgttgccaaaccccagagggcgtggagggctcaggtccacagccagttggtgacagggttgtgctcgatcttggttgcaatgttcctgtcactctaagacagggaagaatcagaaaccctgtctcatggggaacatcgc

SEQ ID NO: 919112 - DNA, 619 bp, Homo sapiens
cattctagtgcttttgggaaggtagaacttgcaagtgataaaattaaatatttagcagaagcgatttctaaacaaagtattaaaggtgcagtttgggtcctccttactgcttatagtaaaattcgggaaacatgagataaactgaagaaatcaaaagcaaaaaggaatcagaggctgggtgtggtggatcacgyctgcaatcctagcactttgagaggttgaggtgggtggatcacttgaggccagaagttcaagaccagcctggcggacatgatgagaccctatctgtactaaaaacacaaaaattagctgggcatggtggtgcatacctgtaattccagctactcaagaggccgaggcattagaatcgcttgaacccaggaggtggaggttgcagagagccaagactgtgccactgcactccaacctgggtgatagagactctgtcttaaaaagaaaaaaaaaaaaaaaggaaccagaacttggggacttggaaaatttcttaacctatccatattgcaaaaattaagaaagcttactctgaagagatcactaagggtgtggctgagcaaccatttgataacagatcatgagtgtgactcatatacttaattagcca

SEQ ID NO: 919113 - DNA, 562 bp, Homo sapiens
gatgcacagcacttttctgtactatttttgcaacttcctgtgaatctataattacttccaaattacagatttgataaataaatatagaatgtttgatgagtaatgagatctttacatagtttcaaagcacctcctcacaaaatacatattaattacaaaagaraaagattaaagtgaaaggcttggcagtcaccaccttaagcaagtgatcaaagtgaatatccttagaaatagaataaatcaaaatctgccccatgtaataggatgcaatgagtagaaaacagcatcacttttgttattcctgccgacgatgcatatctgaatctaatcgaaaggaaacagacaaatgctgatcaagacacgctctataaaacaactggcctgtaatctccaaacgtgtcatggttataagtcacagaagcaccaagaaactctccttccagactgaaggagccatggcaactaaatgtaattcatgattctcagctgggtctttttgctagaagagacattattgagactactggtgaaacttgaatgggacctgaggattgtatggcgg

SEQ ID NO: 919114 - DNA, 562 bp, Homo sapiens
gatgcacagcacttttctgtactatttttgcaacttcctgtgaatctataattacttccaaattacagatttgataaataaatatagaatgtttgatgagtaatgagatctttacatagtttcaaagcacctcctcacaaaatacatattaattacaaaagaaaaagattaaagtgaaaggcttggcagtcaccaccttaagcaagtgatcaaagtgaatatccttagaaatagaataaatcaaaatctgccccatgtaataggatgcaatgagtagaaaacagcatcacttttgttattcctgccgaygatgcatatctgaatctaatcgaaaggaaacagacaaatgctgatcaagacacgctctataaaacaactggcctgtaatctccaaacgtgtcatggttataagtcacagaagcaccaagaaactctccttccagactgaaggagccatggcaactaaatgtaattcatgattctcagctgggtctttttgctagaagagacattattgagactactggtgaaacttgaatgggacctgaggattgtatggcgg

SEQ ID NO: 919115 - DNA, 727 bp, Homo sapiens
gaagctggaagaaatagtgctgttctgtgcaatggtagttgcatctgaataatgtcccagcttctcatttaagaaatgctacccaatggagaagagcaggtggggtctatttatcattctacatgtcagatgcaaaagtgatcttatctgtgactttggtgcmagttgcagtgtcacatgttggattgagcaaaatgcactctcaggatcaacattctctgcttaagtagtgaaacagtagtgttggtgcaggttaactgtttttgtgtgtgtgtgttttatacagtgaaacatttttaatgtgaaattcttgaaatgcacacaaaagtacagaaaatgctaacttggataccatgttttcacgcacagatttaatggatgaggttatattgcttctgatctctttaaaaggctctatttcattggtagggatattgtccctaagtgcaaccttggacaaaatgtttgggatgaggaacatggagtagagcctctttgctgaggctccttccagcccccgcactctagttcctgcttttggaatgtcactgtcaaataagaagtctccttctagtgactgtagcacctacataagagagaacaggggataagaatacaaggggagataaagtcaggtgttcccaaaagctagtagggtgacaagggagaaatggggtagggatacggactcagctagatgttagttgcaccatctgtgagtgtgtca

SEQ ID NO: 919116 - DNA, 727 bp, Homo sapiens
gaagctggaagaaatagtgctgttctgtgcaatggtagttgcatctgaataatgtcccagcttctcatttaagaaatgctacccaatggagaagagcaggtggggtctatttatcattctacatgtcagatgcaaaagtgatcttatctgtgactttggtgcaagttgcagtgtcacatgttggattgagcaaamtgcactctcaggatcaacattctctgcttaagtagtgaaacagtagtgttggtgcaggttaactgtttttgtgtgtgtgtgttttatacagtgaaacatttttaatgtgaaattcttgaaatgcacacaaaagtacagaaaatgctaacttggataccatgttttcacgcacagatttaatggatgaggttatattgcttctgatctctttaaaaggctctatttcattggtagggatattgtccctaagtgcaaccttggacaaaatgtttgggatgaggaacatggagtagagcctctttgctgaggctccttccagcccccgcactctagttcctgcttttggaatgtcactgtcaaataagaagtctccttctagtgactgtagcacctacataagagagaacaggggataagaatacaaggggagataaagtcaggtgttcccaaaagctagtagggtgacaagggagaaatggggtagggatacggactcagctagatgttagttgcaccatctgtgagtgtgtca

SEQ ID NO: 919117 - DNA, 401 bp, Homo sapiens
cagaggggtggggacttggagaacttttctgtctagctaaaggattgtaaatgcaccaatcagcactctgtgtctagctgaaggtttgtaaacgcactaatgagtactctgcatgtctagctaatcgggtggggatttggagaacttttytgtctagctaaaggattgtaaatgccccaatcagcgctctgtgtctggctaaaggattgtaaatgcaccaatcagcattctgtcaaaatggaccaatcagcactctgtaaaatggaccaatcagctctctggaaaatggaccaatcagcaggatgtgggtggggccaaataagcaaataaaagcaggccaccagagccagcagcggcaacccactcgggtccccttccatggtgtggaagctttgttcttc

SEQ ID NO: 919118 - DNA, 401 bp, Homo sapiens
cagaggggtggggacttggagaacttttctgtctagctaaaggattgtaaatgcaccaatcagcactctgtgtctagctgaaggtttgtaaacgcactaatgagtactctgcatgtctagctaatcgggtggggatttggagaacttttttgtctagctaaaggattgtaaatkccccaatcagcgctctgtgtctggctaaaggattgtaaatgcaccaatcagcattctgtcaaaatggaccaatcagcactctgtaaaatggaccaatcagctctctggaaaatggaccaatcagcaggatgtgggtggggccaaataagcaaataaaagcaggccaccagagccagcagcggcaacccactcgggtccccttccatggtgtggaagctttgttcttc

SEQ ID NO: 919119 - DNA, 620 bp, Homo sapiens
ccttatgccagctactgttttaattattgcaattttgcagaaagttttgaaatcaagtcatgtaaatcctacaactaaattacttttcaaaattgttttggatagtctaggtcctttccagttcagtataaaatttaaaatcagttcaatttatacagaaaagactactgggtttacatttgaaagtgcattgactctatagataaatttgggaagaattggcatcataataacatttaattttttgctttatgaacatggtatatctcttcacttattaagtctactttaatttctttccatgttgtagttttccttgtagaggtaatgcacrtattttgttatattgattcccaaatattttataatttaaacactattgtaaataaatttttaatttaatttttcaacagttggctaaaagtatataaaaattcaattgaatattgtatatttaccgtgtatactataaactaattaaattcacttatttatgaagttgttttgtatattttttaaggattttctacaaaaacgatcataccatctgcaaatagaaacaatctttcttctttcttttaaatctttatagcttttgtcatattttttctttgcattat

SEQ ID NO: 919120 - DNA, 594 bp, Homo sapiens
atctagaaaacgggtttttatctaagagggatgtgaagatttggctgctcagagaggcatccaaagaggttgtagagatgagcagttataataagggagtattctcaaaagcagggagaaaatgtttgccaaaactacccactgttatttcataaattaaaatatggatttctcttaatttttaataaatgttgtatctacaaaggaaaatatgctcagaacagtgactggtcctcttggtaattggagyaacattttaagaaatctaagtataaaactgacttaagccttgaaacgcttgtaaaaatcagaaatctgccagtaacatgttgggaaggaattgaccagattgagtttccgtgttaatagattcagatttgtttgccattctacttgattggtagataaaagtggttatctgtggataactgagttagcaaatgaatgtcaatggatcaaaaaacacaccttgcaacatgaaatcctggaatgtggaaattgaagaacccttgtaccatgaaccagtattatctggtagattcatgataaagtaagccatcaggaatggtatctgaaatctttctgtaatgacta

SEQ ID NO: 919121 - DNA, 594 bp, Homo sapiens
atctagaaaacgggtttttatctaagagggatgtgaagatttggctgctcagagaggcatccaaagaggttgtagagatgagcagttataataagggagtattctcaaaagcagggagaaaatgtttgccaaaactacccactgttatttcataaattaaaatatggatttctcttaatttttaataaatgttgtatctacaaaggaaaatatgctcagaacagtgactggtcctcttggtaattggagtaacattttaagaaatctaagtataaaactgacttaagccttgaaacgcttgtaaaaatcagaaatctgccagtaacatgttgggaaggaattgaccagattgagtttcmgtgttaatagattcagatttgtttgccattctacttgattggtagataaaagtggttatctgtggataactgagttagcaaatgaatgtcaatggatcaaaaaacacaccttgcaacatgaaatcctggaatgtggaaattgaagaacccttgtaccatgaaccagtattatctggtagattcatgataaagtaagccatcaggaatggtatctgaaatctttctgtaatgacta

SEQ ID NO: 919122 - DNA, 683 bp, Homo sapiens
acagtttaccatcccagaagagactttttagtaaaaaaaaaaaaaaaaaaaaaaaaattgatgtcaaatatagcatttatttatgcgagacattagggacagggcaaatatgtgaacttagtctgttatcagattgctacttaggtgtcattgagattattcttagggattgctgcttttcttttctttttctctcttttttttttttattttttttgagacagagttttgatcttgttgcccagcctggagtgcaatggcgcggtctcgactcaccgcaacctttgccttctcctccagggttcaagctattctcctgcctcagcctcccgaatagttgggattacgggcatttgccaccacaccgagctaattttgtatttttagtagagacggggtttctccatgttggccaggctggtcttgaactcctgacctcaggtgatccgcctgcctctgcctcccaaagtgctgggattacagaygtgagccacggtgcccggccaggggttgctgcctttctgtgggctactctactagttgctgcttgggccgtgaccactgctggtgacctgcctggcactgtgaaggtgacatggccagccacagcagacagtgtcctatacataggtatctaagaccttggccaaggcagcaacttctagagcacttgccttgcagac

SEQ ID NO: 919123 - DNA, 683 bp, Homo sapiens
acagtttaccatcccagaagagactttttagtaaaaaaaaaaaaaaaaaaaaaaaaattgatgtcaaatatagcatttatttatgcgagacattagggacagggcaaatatgtgaacttagtctgttatcagattgctacttaggtgtcattgagattattcttagggattgctgcttttcttttctttttctctcttttttttttttattttttttgagacagagttttgatcttgttgcccagcctggagtgcaatggcgcggtctcgactcaccgcaacctttgccttctcctccagggttcaagctattctcctgcctcagcctcccgaatagttgggattacgggcatttgccaccacaccgagctaattttgtatttttagtagagacggggtttctccatgttggccaggctggtcttgaactcctgacctcaggtgatccgcctgcctctgcctcccaaagtgctgggattacagacgtgagccacggtgcccggccaggggttgctgcckttctgtgggctactctactagttgctgcttgggccgtgaccactgctggtgacctgcctggcactgtgaaggtgacatggccagccacagcagacagtgtcctatacataggtatctaagaccttggccaaggcagcaacttctagagcacttgccttgcagac

SEQ ID NO: 919124 - DNA, 651 bp, Homo sapiens
cataaggtctgactgcctgtggggtcgggcaaaaacagccatatttttcttcttgcagagagcctataaacggacgtgcaagtaggagagatgtcgctaaattcttttcctagcaaggaatattaatattaataccctgggaaaggaatgcattcctggggggaggtctataaatggccgctctgggaatgtctgtcttatgcagttgagataaggactgagatatgccctggtctcctgcagtaccctcaggtttactagggtggggaaaaactctgccctggtaaatctgtggtcagaccagttctctgctctygaaccctattttctgttatttaagatgtttatcaagacaatacgtgcaccgctgaacatagacccttattagtagttctgtttttgccctttgccttgtgatctttgttggacccttattagtaattctgcttttgccctttgtcctgttccctcagaagcatgtgatctttgttagacacttattagtagatctgctttttgccctttgaagcatgagatctttgtacctactccctgttcttacaccccctccccttttaaaacccttaataaaaacttgctggtctgagactcaggtgggcatcgtggccctaccaatatgtgatgtcaccc

SEQ ID NO: 919125 - DNA, 651 bp, Homo sapiens
cataaggtctgactgcctgtggggtcgggcaaaaacagccatatttttcttcttgcagagagcctataaacggacgtgcaagtaggagagatgtcgctaaattcttttcctagcaaggaatattaatattaataccctgggaaaggaatgcattcctggggggaggtctataaatggccgctctgggaatgtctgtcttatgcagttgagataaggactgagatatgccctggtctcctgcagtaccctcaggtttactagggtggggaaaaactctgccctggtaaatctgtggtcagaccagttctctgctcttgaaccctattttctgttatttaagatgtttatcaagacaatacgtgcaccgctgaacatagacccttattagtagttctgtttttgccctttgccttgtgatctttgttggacccttattagtaattctgcttttgccctttgtcctgttccctcagaagcatgtgatctttgttagacacttattagtagatstgctttttgccctttgaagcatgagatctttgtacctactccctgttcttacaccccctccccttttaaaacccttaataaaaacttgctggtctgagactcaggtgggcatcgtggccctaccaatatgtgatgtcaccc

SEQ ID NO: 919126 - DNA, 642 bp, Homo sapiens
cctattctggttgcaggaggggtggaaggaggctgccagaattgtgaattgttctttgctcagttaaactctgttaaatgtaatgagtgttaagtaaacagattctatggtggaactgccaaggaattcagaagcaagttctggcttccaaagcgtattagtttcttgttgctgcactaacgaagtaccaaaaacttagtggcttaaatcaacaccgatgtattgtcttacagttgtggaggtcaaaagtcctaaaatcaaggagttggcagagttatgtttcttttagaggctccagggaagaatccatttccttcctttctttatcatctggagactgcccgcatgccttggtttatggcctccatccaacaatttcctcactctgacctctgtttcctctgcttccatcatcatacatatcatatctccttctcygactctgtcctgtcccgcttaccccaacacacttgaaggatgcctgtgattccactgggcccacccagataatccaggataatctccccatctcaacaccattaacttaataacatctgcaaagttctttctgccacgtaaggtaacacattcacaggttctgggaatttggacatgcacattggagagggggcagtattctgc

SEQ ID NO: 919127 - DNA, 594 bp, Homo sapiens
ccatgatatgagcatgtccagtggcacaggaagaatgtggggtcctggaggggaaacaggttgcaactgtgtggaaccaggaactgctccgtggaaaatctatcattagcagacatgtaatattgaaaagggggcattcacttctcattaatgtctgatcagaatagaatttctctcctgtcaggaatatattcattataatatgatatttgcratcacaaatgttacgaagattttttttttatggtgacagtaagaaagagaatttatcacataccaatattacaaatagtggatacatctgtaatagctcatatataacagaacatgataataattttcttaaatttgtgagatagtaccagtaattagtgttaaagataaaatatctaaattattaacaataaaacagatattaatcaatattgctgaaatgctgattgttttttattttccctagaaattactgcatttcaaaattatagtcatttgaagaaacaataagagaatatattgtagccaagaatattatagagctatgtcaggcagttgagtaatataaacattgttattttttgtgatgtttgtggtact

SEQ ID NO: 919128 - DNA, 594 bp, Homo sapiens
ccatgatatgagcatgtccagtggcacaggaagaatgtggggtcctggaggggaaacaggttgcaactgtgtggaaccaggaactgctccgtggaaaatctatcattagcagacatgtaatattgaaaagggggcattcacttctcattaatgtctgatcagaatagaatttctctcctgtcaggaatatattcattataatatgatatttgcaatcacaaatgttacgaagattttttttttatggtgacagtaagaaagagaatttatcacataccaatattacaaatagtggrtacatctgtaatagctcatatataacagaacatgataataattttcttaaatttgtgagatagtaccagtaattagtgttaaagataaaatatctaaattattaacaataaaacagatattaatcaatattgctgaaatgctgattgttttttattttccctagaaattactgcatttcaaaattatagtcatttgaagaaacaataagagaatatattgtagccaagaatattatagagctatgtcaggcagttgagtaatataaacattgttattttttgtgatgtttgtggtact

SEQ ID NO: 919129 - DNA, 679 bp, Homo sapiens
ctccactggctttaaaaatctttatttatcagtaatgttctgaatacagattttttttctttttcgagacagaatcttgctctgtcgtccaggctagagtgcagtggcacaatctcagctcactgcaacctctgcctcccaggctcaagcaatcttcccacctcagcctcccaagtagctgggactacaggcatgtgccaccacacctggctaatttttgtgttttttttttggtagagatggtggggttctgtcatgtttcccaggctggtcttgaactcctgggctgaagcgatcctccygccttggcctcccaaagtggtgtgattataggcatgaaccactgcgcctgactctgaatacagattaatctccatcgctaagctaagtgtttgctgttctaggtagtcacaaatgttcactaaggcaagccacagttgaagctgaagtcgctacaggagtgatgtctggggtccccaggaattactttggggttctatagatccccagaattcctgtcatttacagcagggatcttagcaaccactgagcccagttttcttcatttttacaggtaaagacatagaagctcagagagatgaagaggcttttctgaggtcacacagtagggcagtggaagaactcagattagaatacaggccttttctagccttataaa

SEQ ID NO: 919130 - DNA, 679 bp, Homo sapiens
ctccactggctttaaaaatctttatttatcagtaatgttctgaatacagattttttttctttttcgagacagaatcttgctctgtcgtccaggctagagtgcagtggcacaatctcagctcactgcaacctctgcctcccaggctcaagcaatcttcccacctcagcctcccaagtagctgggactacaggcatgtgccaccacacctggctaatttttgtgttttttttttggtagagatggtggggttctgtcatgtttcccaggctggtcttgaactcctgggctgaagcgatcctcctgccttggcctcccaaagtggtgtgattataggcatgaaccactgcrcctgactctgaatacagattaatctccatcgctaagctaagtgtttgctgttctaggtagtcacaaatgttcactaaggcaagccacagttgaagctgaagtcgctacaggagtgatgtctggggtccccaggaattactttggggttctatagatccccagaattcctgtcatttacagcagggatcttagcaaccactgagcccagttttcttcatttttacaggtaaagacatagaagctcagagagatgaagaggcttttctgaggtcacacagtagggcagtggaagaactcagattagaatacaggccttttctagccttataaa

SEQ ID NO: 919131 - DNA, 740 bp, Homo sapiens
tgtatagtaaattaatgagtgaacaagtcttttgaaaacagagacagcagagctcattcattcattgctctgcttaaaacccgtcaacagcttcttcttatcctcagaataaacccttgctcagggttctcatagcagatgaacctggtttcagggagttctaaaatcagatggatgtgttttcaaatcctgatatgtcccagttgtacggcccttttgcctttctgggcctcagattaccctctgtgaacgaggtygatagcatctaagagatggggtgtggatgcaccaggctgtgtgcagcaagcattaatgttttccattttgacgaaatcccacatgagttttgaatttcagccctgagaatgaatcctccaggagcgctccaattcaggagtattatcagttcattcgttcattcagcatctacttggcaccaagcaccatgctaggcattagggattcagcagggaactaaacaaaaagcccagtcctcctggaacataccttctgctggcagtgctgagaatttaataagacagtgtcagtgatggccccggcaagaagtgcctaggcccctaaactgtgctccatcagagtgggatccagggacggttgggtccaagattcattccgggctttgagggacttctagtctgtctggagtggcaaaaggagcccagatgggaggaaagcagcatgtacctggcctggcctcacctgcttctcgtcatcacagt

SEQ ID NO: 919132 - DNA, 552 bp, Homo sapiens
gttaaaacataaatcagaatatgccactcttctgctgcgttctctccaatgacttcctgtgtctctcagaataaaagccaaactctttacaactgcctacaaagactgctatttaaagaagaccacaacagtggcatcatctggtaacttggaaatgcagaagtgcagaacccaactcccaactacaaatcagaatctgcattttcacaagaccaagtcatgtgcacrcacaccaatttttcagaaacactgacctacaagaccttgggtgacctgtccccactaagcccccgagttcatctacttcacttcctctcactcactcttctccagcctctttgttcctctgccattcatcagacatataagacacacttccacctagctgtttcttcggtctagaatcttcctgcccaggtgtctctatagtttgctccgtcacctacttcagttcttgacttagtgaagccttccttgtcatttaaaaagttcaaaaccccctgacacttcatactcttttttttttctacttagtacttcttgctatctaaa

SEQ ID NO: 919133 - DNA, 788 bp, Homo sapiens
aagtccataggttggtgttccaaggttgatagaattgcccaataatgctgatgaggaccaaggcccattttatctttcagacttccttaacatgcagaccttcatccccctgcttgttactttgctgtctcaagatggtcattgaaatattaaatatcacatctattttccattaagtaagaacaaggaaggacattcaggggtatgcccactacaactcttctttttaagaaagcaaatgtttcccataagccctacccagcagttttctacttatatctcattgcccaaacagcaccatagtcactctggtttgaagatgcctagagagagggatgttgtgggtagtttagccaatgagcagtgtctgccacagtctgcttggaaaatatcttctcattttttgtgagattcaactcaagagttatatcttagaaatttagaaatgtgtatatatatgtatataaactatatatgtatataaattatattgatatttatataagcatacataaaacacaaatatataaacgtmtatatagtatgtaccctttcatcattaactgaatatttatcaaacacctgtacacagtgcgtgctaggtactgttctaggcactgggaatacagcaatgaacaacatcttatcctttgtggaatttacatcctagtgtttaccctttgatctaactttttcacctctagtaacttaccttacagactatacctcaaaaacaaggatgctcattgaagtgataactagaataacaaaaatctgattaaatatca

SEQ ID NO: 919134 - DNA, 569 bp, Homo sapiens
tttactggggtgacaaggggagggggtcagcagcaagaatgctgatgtcctgaagcttccataaaaacccaagagaactgtgtcagaatgcttccagatgactgaacctgtggagattcctggagagcagccttcccagaragggcatggaagctccacacccctttccccataccctgccctacagttctcttcatctgtatcttttgtaatatactttataataaactgataaacataagggtttccctgagttctgtgagctgctccagcaaattaactgaactcaaaggggaagttgtggaaatcccaacttgaagcttattggtcagatgttccagaggcccagacttgtgactggtgtctgtgggtgtagggggtgatcttgcatattgaatccctgaaatgtaagatctaacactatctccaggtagataatgtcggaattgaattagaggatacccagttggtgtctgctaattggtatgtggggaacacccctaccacatttggtcacacaagtcttcttctgtgttgataattgtggtagtgctggtgtgaaagcagaa

SEQ ID NO: 919135 - DNA, 569 bp, Homo sapiens
tttactggggtgacaaggggagggggtcagcagcaagaatgctgatgtcctgaagcttccataaaaacccaagagaactgtgtcagaatgcttccagatgactgaacctgtggagattcctggagagcagccttcccagagagggcatggaagctccacacccctttccccataccctgccctacagttctcttcatctgtatcttttgtaatatactttataataaactgataaacataagggtttccctgagttctgtgagctgctccagcaaattaactgaactcaaaggggaagytgtggaaatcccaacttgaagcttattggtcagatgttccagaggcccagacttgtgactggtgtctgtgggtgtagggggtgatcttgcatattgaatccctgaaatgtaagatctaacactatctccaggtagataatgtcggaattgaattagaggatacccagttggtgtctgctaattggtatgtggggaacacccctaccacatttggtcacacaagtcttcttctgtgttgataattgtggtagtgctggtgtgaaagcagaa

SEQ ID NO: 919136 - DNA, 644 bp, Homo sapiens
agacagatagatagatagataaacagacagatagatagatagatatctatctatatatatatctgtatatatctgtctatatctatctatatatatctctatctatctatctatctatctatctatatctcctgtctggcagtgatttaattgacttcctttccactggtggaaaactagttgtgtcttcatttgcaattcatctcaacattcctttgcttcatataaatttgtgctcttttgactttttctttaaagttataacatctgcctagtttcatcatatcatatgagtaaaataaattattttaacacatatttgtatatctgaagtcaaaatgtaatatagagggaaacctctaaattaaacattttattggagaatcatagaattgcaatttgaagcatacacatagactggtagactttggtatgtctgaggaacaaaggaaaggttgggagttttattagaaataggaatgttacctayggttttgaaagaaagcttataggcactagaatttttgagagctgctaagctctgattggtgagtgacagtggtaggtaaaaccagtcctaaagtcacagcaggtcatttcagcagctactagattaaactggtcttagggttacaccaggccat

SEQ ID NO: 919137 - DNA, 728 bp, Homo sapiens
aaacattcagtttctatcaaagcccgataacaagccaagaggtgcatgtcgaaaggaggatggttatctgcagaagatggcagggccctgctccaaaatcctagagacctttgctgtaattcatctatgggggcctgccaaaggctccaaatagcatccctatctgccactgacacctcaagcaccattggatctgctgggtcatatggcccaagtggcagagcagcttgcacagcagyctagacctgttgcagagccttcttctgttctggaccccactcaaaactggcaacatttcgggtcactagataaatgggctggagtaacacacccaaatgaagaatatgttgcctccaaaatccaaataggcccactaggtgttgtgcctctttcttggtggtagtaggggccaaatgcagcaacttatccttcgccttagaaggcatatcttgacaggcctctcatcactggacccctagaaattttactgagctagaaggcccctgaattttagtcagatttatttcccatcccttggcacacaaatgtctcataaataactccagtgtgtttgctacttcttgctcactagatccaatcagcatagtgtaatcaatgtaacggacccatgtgatatcttgtagaagggaaaagtgatcaagatctctgcaaacaagattctggcacaaagccggggagatgatatacccctgaggcaggacagtgaa

SEQ ID NO: 919138 - DNA, 815 bp, Homo sapiens
tttcattgaaccaacaatattaaattagtcttacttgtcaaaaaaatcacacaaagataattctgtttttgtttgtgtttataattttataaaaacagtggcaccttaaaatatctaggagagacaaatataaaatctggacaaaaatgtatgctgacaattctgaagacatttttattcttatcttaccaataactttaaagccagcttatttaacaaaaatgtacttaagagacatgaactggaaaaatgcttgaacttatttacttaatttatgattgctcttttatttacaagccaatttggtactctgtaaaaacaacacataacatccagacatgtatactcacataaaaacaaagacccaatagctttcatcttagaagtatagccatgagagagcaatataatctcayaggtttataaacatgttcacatggctgaatttggtttgccctaataggtaattcaatagaggctgtgaacataagtttagggtaaagcagtttccaaagcagtttgatttttaaaggccaaacctccccaacctccaaagaacactgagactaatcagcaccatagaacaagatactaatcaatcaggctcaatcctgcttagaacagcagcataaaagcctagatatacagacctccatcccactttcccattcaacagcaaaattaatccaattgtaagctctgcaattcaaagaccttgtgcgatgagatcaggcatgttcagagtagtatggctgaagactttcccttactccatcaaccctcaactacattctggccaactctgaagaatgcac

SEQ ID NO: 919139 - DNA, 594 bp, Homo sapiens
gaaaacatatttgacagaataattcaagaaaactctcctggcctagctagagaactagacattaagatacaaaagctcaaagaatacttggaagattctctgcaggaagaatctcatgaaggcatatagccatcagactatccaaagtcaagatgaaagaaaaaaaaaatcctaaaagcagctagaggggagcctctaataatctataaaggaaatctcattagactaacagtggacttctcagcagaagctttataaggcagaagagattgagggcctattttcagccttctcaaagaaaaaaaaatgccagtcaagaatttatatagtgccaaactaagcttcataaatgaaggagaaataaagtctttctcagacaagcaaatgctaaggcaaattcatcaccactagaccagccctacaagaaawgctcaaaagagttctaaacatggaaatgaaaggacaatgatttccataataaaagcacatgtaagtacaaagtttacagatcctataaaggaattacacattgagattacaaagccaactaggtaacaacattatgacaggaagaaaaccttacatattaatatg

SEQ ID NO: 919140 - DNA, 813 bp, Homo sapiens
agctggaaggtaagttagccattaaggcatttaattgaaacactgcactaattcatcaaatacttgctgagctacatatttatatcatcagggaaatgcaaattaaaacaacaagatacccacacacccattatgaaatggcaaaaatctggaacactgacaacwccaaatgctggctgagacgtggagcatcaggaactctgactgaaggtacagccactttggaagacagttttgcagtttcttataaaactaaccttactctcactataccagccaccaatcacaacattcctttgtatttacccaaaggagttgaagtcttatgtccacacaaaaatctgcacacagatgtttatagtagttttattcatagttacaaaaacttggaagtaaccatgatatccttcagcagatgaatggtttcataactgtggtgtatccatacagtggaatgttattcagcctaaaaagaagtgagctgtcaagcaataaaaagacatggaggaaccttcaatacatatcactaagtgagagaaaccagtctgaagagactacacactgcatgattcaaccatatgacagtctgaaaaagaaagatcagtgattgccagaggttggcaagaggaatgaaaaggtgaacacagagcattcttaggacatgcaaacactttgtgtgggactcagaatgagagatacacattctgcctttgttcaaacccatagaagtttcaacactgagagtgcaaaccatggactttggatgatgatgatgccattgtaggttcatcagtggtaacgagcgtacctctc

SEQ ID NO: 919141 - DNA, 596 bp, Homo sapiens
tgttggcattgtatgtatttctccatccctttaacctatctgtgtctttatatttagagtgagtttcttgtagacaacatatatttgggtctttttgttcactcttgtcagttctgtcttttaattggtatatttagatgattcacattgaaagtattgttaaagttgggttttagtgtctaccatatttgtttcttactcattatacttgttccttgttgcttattttaaaatgtactttttttttttttttgagacaaggtctccctctgtcacccaggctggagtgcagtggcgggatctcagctcactgcagccttgacttcctggactcaagtgattctcccacttcaggttcccaagtggctagaactacaagggcacaccaccacacctggctaattttttgtattctttatagagatgggattttgccatgtaggccaggctggtctkgaactcctgggctcaagtgatcctcctgcctcggccttctgaagggattacaggcatgagctacgtgcctagcccattgtctgattttaattgagcattgtatattattccatttttcttttctgtataaaatactaatt

SEQ ID NO: 919142 - DNA, 713 bp, Homo sapiens
atactttgttgaacctaagcataaaaacaaatttcctctatatctttgcatcttcattctgaaggctactgtgtatatacattaagtaaatttgtatgtcttatctccaattaacctgcattttgcaagatgatttttcagtgaamcttcagaagacaatatacatattttatattcttattctatatcattctgttagttttgattcctcaagtattgatatttctgtttattcgatggttctcataatgctttggccagagggatttcttgtgagatcatcttttattctcatgggactactagctgctttgtttacaatgtgtgctggatgatggagtaaaagcatgcctttagtttattttccttcaggaaaatttggggctgttccagggaacagagttccctgtgttacattctagggtctggactctccttactgccttctccccaccatagaactttctaggatttcctttccaggcgctgctctgtccccatggttatcaacctctctgtcattacatgtcccacttggtggaggtggggctcaggggctctgtcaggctggccaagtctgctgtaccatttgctgaggactccacccatgctgtggtctagttccaaattaacatcacccacccaccttgggcgagacagggctgacccatgttttattcttactctgttgatgttaaagcactgacagagat

SEQ ID NO: 919143 - DNA, 629 bp, Homo sapiens
aggccagggtgactggactgtgcttttataagaaatgtgtcagatgctttgtagttactacttaattttacagatggtcagagaaagtgcttatgttacttgcctaaagttaccattggaggctgatgaatacaagatgtcttaacacaggacctatgtgtaaggcagcagaaacaattgaaggagcacaagtttccctgtaggatctgaagttacgtgtttgaagcaatgatagcaaagcatgtctgaaggcaaattggtgaaaatcaatcayatcaggaccatgaagtcaagaatctaaacagctccctaactccactctatggctggctttctaagagtcacaccatttttatctccttcatgctcggagcacatgttattggctatcaacacaaagctggggaaggtgccagagataaggctgagcctgaagctgattcattgagggcaattaggagatatttgatgggaacactttcctacagtcgggggcttcatccacttagtcacttgggcattgctttcattagaaactgaagtaatgcagagaagtaagacgaccttagtcataatgaggatatttattataaacagacttgagacatacaagatttagcattgaggat

SEQ ID NO: 919144 - DNA, 629 bp, Homo sapiens
aggccagggtgactggactgtgcttttataagaaatgtgtcagatgctttgtagttactacttaattttacagatggtcagagaaagtgcttatgttacttgcctaaagttaccattggaggctgatgaatacaagatgtcttaacacaggacctatgtgtaaggcagcagaaacaattgaaggagcacaagtttccctgtaggatctgaagttacgtgtttgaagcaatgatagcaaagcatgtctgaaggcaaattggtgaaaatcaatcacrtcaggaccatgaagtcaagaatctaaacagctccctaactccactctatggctggctttctaagagtcacaccatttttatctccttcatgctcggagcacatgttattggctatcaacacaaagctggggaaggtgccagagataaggctgagcctgaagctgattcattgagggcaattaggagatatttgatgggaacactttcctacagtcgggggcttcatccacttagtcacttgggcattgctttcattagaaactgaagtaatgcagagaagtaagacgaccttagtcataatgaggatatttattataaacagacttgagacatacaagatttagcattgaggat

SEQ ID NO: 919145 - DNA, 629 bp, Homo sapiens
aggccagggtgactggactgtgcttttataagaaatgtgtcagatgctttgtagttactacttaattttacagatggtcagagaaagtgcttatgttacttgcctaaagttaccattggaggctgatgaatacaagatgtcttaacacaggacctatgtgtaaggcagcagaaacaattgaaggagcacaagtttccctgtaggatctgaagttacgtgtttgaagcaatgatagcaaagcatgtctgaaggcaaattggtgaaaatcaatcacatcaggaccatgaagtcaagaatctaaacagctccctaactccactctatggctggctttctaagagtcacaccatttttatcyccttcatgctcggagcacatgttattggctatcaacacaaagctggggaaggtgccagagataaggctgagcctgaagctgattcattgagggcaattaggagatatttgatgggaacactttcctacagtcgggggcttcatccacttagtcacttgggcattgctttcattagaaactgaagtaatgcagagaagtaagacgaccttagtcataatgaggatatttattataaacagacttgagacatacaagatttagcattgaggat

SEQ ID NO: 919146 - DNA, 629 bp, Homo sapiens
aggccagggtgactggactgtgcttttataagaaatgtgtcagatgctttgtagttactacttaattttacagatggtcagagaaagtgcttatgttacttgcctaaagttaccattggaggctgatgaatacaagatgtcttaacacaggacctatgtgtaaggcagcagaaacaattgaaggagcacaagtttccctgtaggatctgaagttacgtgtttgaagcaatgatagcaaagcatgtctgaaggcaaattggtgaaaatcaatcacatcaggaccatgaagtcaagaatctaaacagctccctaactccactctatggctggctttctaagagtcacaccatttttatctccttcrtgctcggagcacatgttattggctatcaacacaaagctggggaaggtgccagagataaggctgagcctgaagctgattcattgagggcaattaggagatatttgatgggaacactttcctacagtcgggggcttcatccacttagtcacttgggcattgctttcattagaaactgaagtaatgcagagaagtaagacgaccttagtcataatgaggatatttattataaacagacttgagacatacaagatttagcattgaggat

SEQ ID NO: 919147 - DNA, 608 bp, Homo sapiens
agtgttaattgaatggagatgccaggaagaagcaacttcctggacatgcacatcaagagacaaaatggcaaagtatgaccttccaagggcactctcccagaaatgggaagaaagtctcagatgggcaagcatactactttttttttttttttttgagacggagtctggctctgtctcccaggctagagtgcagtggcacatctccgctcactgcaagctccgccttcccaggttcacaccattctcctgcctcagcctcctgcatagctgggactacaggcacccaccaccacgcccagctaattttttgtattgtttttagtagagayggggtttcaccgtgttagccaggatggtctcaatctcctgacctcctgatctgcctgccttggcctcccaaagtgctgggattacaggcgtgagtcaccacacccgactgcatgcatactactttctaaacacactatgtgctcccgtcccaagggtaaggagggcactgcacctacaggcagcccatcctaagggaagaatcatgggaaacaggtcagtctataaagttctaacatcagggttaaacatgacacttaaccttcaggtgcccacttgga

SEQ ID NO: 919148 - DNA, 608 bp, Homo sapiens
agtgttaattgaatggagatgccaggaagaagcaacttcctggacatgcacatcaagagacaaaatggcaaagtatgaccttccaagggcactctcccagaaatgggaagaaagtctcagatgggcaagcatactactttttttttttttttttgagacggagtctggctctgtctcccaggctagagtgcagtggcacatctccgctcactgcaagctccgccttcccaggttcacaccattctcctgcctcagcctcctgcatagctgggactacaggcacccaccaccacgcccagctaattttttgtattgtttttagtagagacggggtttcaccgtgttagccaggatggtctcaatctcctgacctcctgatctgcctgcctyggcctcccaaagtgctgggattacaggcgtgagtcaccacacccgactgcatgcatactactttctaaacacactatgtgctcccgtcccaagggtaaggagggcactgcacctacaggcagcccatcctaagggaagaatcatgggaaacaggtcagtctataaagttctaacatcagggttaaacatgacacttaaccttcaggtgcccacttgga

SEQ ID NO: 919149 - DNA, 608 bp, Homo sapiens
agtgttaattgaatggagatgccaggaagaagcaacttcctggacatgcacatcaagagacaaaatggcaaagtatgaccttccaagggcactctcccagaaatgggaagaaagtctcagatgggcaagcatactactttttttttttttttttgagacggagtctggctctgtctcccaggctagagtgcagtggcacatctccgctcactgcaagctccgccttcccaggttcacaccattctcctgcctcagcctcctgcatagctgggactacaggcacccaccaccacgcccagctaattttttgtattgtttttagtagagacggggtttcaccgtgttagccaggatggtctcaatctcctgacctcctgatctgcctgccttggcctcccaaagtgctgggattacaggcgtgagycaccacacccgactgcatgcatactactttctaaacacactatgtgctcccgtcccaagggtaaggagggcactgcacctacaggcagcccatcctaagggaagaatcatgggaaacaggtcagtctataaagttctaacatcagggttaaacatgacacttaaccttcaggtgcccacttgga

SEQ ID NO: 919150 - DNA, 627 bp, Homo sapiens
ttgacaaaggagcaaaggcgattcaatgggaaaaaaataggctttgcaacaaatgctgcttaaacaagtagacatcccaatgcagaaaaatgaacctaatcacagaccttcctaaaacctttcacaaaaattaactcaaaatgggtcatagacataaatgtaaaataaaaaatgtagtttttaagttttattactataaacatctataagaaaataggagaaaatctaggtattcttggctttggcaacgacattttaggtacagcactaaaagtattatctatacaagaaaaaaatgatattgaacttagttaaaattacaaacttctgccctgcaaaagacactgttaagagaattaaaagagaaatcacagactgggagaaagaatttggaaaacgcatatctgataaagcacttgcatccaaaatatacaaaaaacacttaaaaatcaacaggaagaaaacatgcaaacaaatttwaaaaagatctgaacaattcactaaaaatatttgcagacaaacaagaagcatgtgaaaagattttcatcatttgattagggatttgcaaattaaaacaaaaataagataccattacatatttactaaatggctaaaatccataaaaca

SEQ ID NO: 919151 - DNA, 572 bp, Homo sapiens
gttttttggttgttttgtgatcttctttcctttcttcctgtcttccatataatgaaggtaattttatctggtgatgtacttcactttcttgctcttttttttgtgcgtatccattgtatgtttttagatttgtggttaccatgaagctttgcaaatagtatctcatatcttattattttaaactgatgactccttaacactgattgcatgagcaaacaagcaaataataaaaactaaaagcaaaaagaaactaaaaaatctaaaaaaaagaaacaaaaagaaaactaatagaaatgctactctttaacttcatctccctgctttataacttttgttgtctctatcttattttactgtctatgtcttgaaaarttgttgtagttattattttatcttttcatatttctacttaagcgtggttcacacaccacagttacaatgttataatagtctgtgattttctgttttgtacattcaaatgatttttttgttgctcattacaaactttttcttgcatactgaagtactccctttagcatttattgtcagacagttctgatgttgatgaaatc

SEQ ID NO: 919152 - DNA, 542 bp, Homo sapiens
tgcgcccagctgcaagtttgattattaaatgcctcagggtagtcttctttgtgttaaatctgcttggtgttctataaccttcttgtactttctctaggtttggaaagttatctatttttatcccttcaagtgaactytctacttttatctcttcttctacctcctctttaaggccaataactcttagatttgctcttttgaggctattttctagatcctgtagtcatgcttcattgttttttattattttttctttttgtctcctctgtgtattttcaaatagcctctattcgagctaattctgctttatccattctaattctgctttatccattctgctattgagagactctgatgctttactcagtatgtcaaatacatttttctattgcagaatttgtgctgcttttttaaattttcaatccctttgttaaatttatcttatagaattctgaatttcttctctgtgttatcttgaatttctttcttcaagtttcttcaaaacagctattttgaattctctgtctgaaaggttacatatc

SEQ ID NO: 919153 - DNA, 458 bp, Homo sapiens
acaatccagattcagagctgtcccatcaccaaaaacaccgcccatatgttcccctttataatcacacctacacccacctccctaccatccttaactgctgaaaacccctaatctcttttccatctctgaaatgttgtcatttccaraatattatataaataaaacaatacagtatgagaccttttgagatctatttgttttgtatgtaccaagagtttattcctttacattgctaagcagtattccatgttacagatgtaacagatgagtgtttgtttaaacactcatctattgagggatgtttgtattattttcagtttggggctattaatacagctgatgtgaataaacatatatacatctttatgcaagcataagtgtttatttctttggcataaatgcccaggagtgcaatcgtgctggtcatatggtatgtttgcatgtttagttttgttatt

SEQ ID NO: 919154 - DNA, 726 bp, Homo sapiens
ttctccaacgttgaaatgaaggaaaaaatgttaagggcagccagagagaaaggccaggtcacctacaaagagaagcccataagactaacagaggacctgtcagcagaaaccctacaagctagaagagattgggggccaatattcaacatgcttttatttatttattttttaagatggaatttcactctttcatccaggctggagtgcagtggtgcaatctcagcttactgcaacctccagctcctgggttcaagtgattctcctgcctcagcctcctgagtagctgggattactggcatctgccaccatgccaggctaacttttttgtattttcagtagagacggggtttcaccaaattggcyaggctggtctcaaactcctggcctcaagtgatctgtccacctcaacctcccaaagtgctgggattataggcatgagccactgcgcccagctcaatgttcttaaagaaaataattttcaaaccagaattccatatctggccaaactaagcttcataaggaaaggagaactaaagtccttttcaaacaagcaaatgctgaggaaatttgtcaccaccaggcctgcctttcaagagctcctgaaggaaacattaaatatgaaaaggaaaaaccattaccagccactgcaaaaaaaaaacactgaagtacaaagaccaatgatactatgaaggaactacataaacaagtctgcaaaataaccaggta

SEQ ID NO: 919155 - DNA, 621 bp, Homo sapiens
ggccacttgagcaggcactgagacacaggagtatttgcatactccagctctgggaactctggtgaggcatgagatccatccacttctgtgggaagggggctaaagccagggagccaagcggcctcactctcatggaaccccacaagctaaaacccactggcttggaatccctgctggccagcgcagcagkctggagactgcctaacaagagcgagtttggcggcggggaggggtggctgccactactgcagctccagtaggcctttttcccctgccaccagtgccagcaagactgggcagtttggactgggagcagttacccacagtgcagcacagcggctgggtcagtttgtggccagactgcttctttaagtggaaccccaatccactcttcctcatgcaccagggcctccctgtgataatttcagcatccccaaccatgggtttatgaaaagaactatgatatccctgagaggatcccctaggagaaggggcggctatggtatcatggatcaatgaatggtttcagtcttttctgcctgctggctctggagagtcagggaagcccagacaagtgggattcctcccagtgcagcacacccactctgccaaggggcagcc

SEQ ID NO: 919156 - DNA, 623 bp, Homo sapiens
gcggccacttgagcaggcactgagacacaggagtatttgcatactccagctctgggaactctggtgaggcatgagatccatccacttctgtgggaagggggctaaagccagggagccaagcggcctcactctcatggaaccccacaagctaaaacccactggcttggaatccctgctggccagcgcagcaggctggagactgcctaacaagagcgagtttggcggcggggaggggtggctgccactactgcagctccagtaggcctttttcccctgccaccagtgccagcaagactgggcagtttggactgggagcagttacccacagtgcagcacagcggctgggtcagtttgtggccagactgcttctttaagtggaaccccaatccactcttcctcatgcaccagggcctccctgtgataatttcagcatcccyaaccatgggtttatgaaaagaactatgatatccctgagaggatcccctaggagaaggggcggctatggtatcatggatcaatgaatggtttcagtcttttctgcctgctggctctggagagtcagggaagcccagacaagtgggattcctcccagtgcagcacacccactctgccaaggggcagcc

SEQ ID NO: 919157 - DNA, 727 bp, Homo sapiens
aatgtccttctccccctcgagcattttctggaattgctgctgtagacacaagtgtctccacaaagttaagggtacttcattgagctgcttatcaattttctctcagtcaaccctggccaaaatcaaatgtatccacatctaygagcatgtcactcattgggcccccttttgtcccatgggtgagccctttatgggaaaggcaccttccccttctttacagcatggacccctcagtcttgctgacagccttctgcttccccacgggccgccacagcagtgatcacttcatgtatgtggtgccctatgtatggggtgagaacagcagcttggggatgcagaacccaaaaggagatccctcatgtgggaggtgaaacattcaccatctggcccccaagtattcatgtcaaacatagcctgccgcatacccatctcaaagatggcttgcaccaaattggcacatgactaccatttgctcacagttttaggtatttcaccagcattgttccacacagtctatatggctgcccatagccactcagtcagggtgtggtcaccttgccctgttgctcacctcctgctcacttgcaactgctgactgatggagggatgagtcatgatggaggccagctcttccaactcagagacagaacaagagatactatctgctgccttgtcccacaaacgaagcatccaggcagtcaggagttcccctggatgctggtggcac

SEQ ID NO: 919158 - DNA, 727 bp, Homo sapiens
aatgtccttctccccctcgagcattttctggaattgctgctgtagacacaagtgtctccacaaagttaagggtacttcattgagctgcttatcaattttctctcagtcaaccctggccaaaatcaaatgtatccacatctacgagcatgtcactcattgggcccccttttgtcccatgggtgagccctttatgggaaaggcaccttccccttctttacagcatggacccctcagtcttgctgacagccttctgyttccccacgggccgccacagcagtgatcacttcatgtatgtggtgccctatgtatggggtgagaacagcagcttggggatgcagaacccaaaaggagatccctcatgtgggaggtgaaacattcaccatctggcccccaagtattcatgtcaaacatagcctgccgcatacccatctcaaagatggcttgcaccaaattggcacatgactaccatttgctcacagttttaggtatttcaccagcattgttccacacagtctatatggctgcccatagccactcagtcagggtgtggtcaccttgccctgttgctcacctcctgctcacttgcaactgctgactgatggagggatgagtcatgatggaggccagctcttccaactcagagacagaacaagagatactatctgctgccttgtcccacaaacgaagcatccaggcagtcaggagttcccctggatgctggtggcac

SEQ ID NO: 919159 - DNA, 727 bp, Homo sapiens
aatgtccttctccccctcgagcattttctggaattgctgctgtagacacaagtgtctccacaaagttaagggtacttcattgagctgcttatcaattttctctcagtcaaccctggccaaaatcaaatgtatccacatctacgagcatgtcactcattgggcccccttttgtcccatgggtgagccctttatgggaaaggcaccttccccttctttacagcatggacccctcagtcttgctgacagccttctgcttccccacgggccgccacagcagtgatcacttcatgtatgtggtgccctatgtatggggtgagaacagcagcttggggatgcagaacccaaaaggagatccctcatgtgggaggtgaaacattcaccatctggcccccaagtattcatgtcaaacatagcctgccgcatacccatctcaaagatggcttgcaccaaattggcacatgactaccatttgctcacagttttaggtatttcaccagcattgttccacacagtctatatggctgcccatagccactcagtcagggtgtggtcaccttgccctgttgctcaccwcctgctcacttgcaactgctgactgatggagggatgagtcatgatggaggccagctcttccaactcagagacagaacaagagatactatctgctgccttgtcccacaaacgaagcatccaggcagtcaggagttcccctggatgctggtggcac

SEQ ID NO: 919160 - DNA, 674 bp, Homo sapiens
ggtagacagacacgcatggggcaagagagagctctcctccacctactacattgagcgatggtttggctgttgtcacattgtctctctaaaagtgataaactggcagtcagcaccagggagtggccgtttccttatggtccacacctgttgcattaaagtgttaattgaatgcaggtgccagggagaagcaaaaaggggcttccaacaaaatctcaggtattggactaatgagcctgggcatgtgcatcaagagacaaaatggtggagtattaccttcagggggcactccaccagaagasagaagaaagcttcagatgggtgtgcatacaacttcctaaccacactgtacatgctcacctccaagtgtaaggaggacactgtgcatgtgggcagcccaccctaagggaagaatcatgggaaaggggccagcctagaaagtcctaggatcagggctaaacactgcacttgaccttcacatgcctgcttgggtttcttccaagcatgttttcctttctttccttttctgaagccttttaaataaacttccactcctgctctgaaacttgcattggtctctccttctgccttatgcccgtcagttgaattctttctttcggaggaggcaagaattgaggttgctacagacctgtatggattccctgccaggtgactca

SEQ ID NO: 919161 - DNA, 674 bp, Homo sapiens
ggtagacagacacgcatggggcaagagagagctctcctccacctactacattgagcgatggtttggctgttgtcacattgtctctctaaaagtgataaactggcagtcagcaccagggagtggccgtttccttatggtccacacctgttgcattaaagtgttaattgaatgcaggtgccagggagaagcaaaaaggggcttccaacaaaatctcaggtattggactaatgagcctgggcatgtgcatcaagagacaaaatggtggagtattaccttcagggggcactccaccagaagacagaagaaagcttcagatgggtgtgcatacaacttcctaaccacactgtacatgctcacctccaagtgtaaggaggrcactgtgcatgtgggcagcccaccctaagggaagaatcatgggaaaggggccagcctagaaagtcctaggatcagggctaaacactgcacttgaccttcacatgcctgcttgggtttcttccaagcatgttttcctttctttccttttctgaagccttttaaataaacttccactcctgctctgaaacttgcattggtctctccttctgccttatgcccgtcagttgaattctttctttcggaggaggcaagaattgaggttgctacagacctgtatggattccctgccaggtgactca

SEQ ID NO: 919162 - DNA, 807 bp, Homo sapiens
accacatgattggaagtaaagcactcctcagcaaatgaaaagaacaaaatcataacaaattgtctctcagaccacagtgcaatcaaattagaactcagaattaagaaactcactcaaaaccgcacaactacatggaaactgaacaacctgctcctgaatgactactgcataaataacgaaatgaaggcagaaataaagatgttctttgaaaccaatgagaacaaagacacaatgtgccagaatctctgggacacatttaaagcagtgtgtagasggaaatttatagcactaaatgcccacaagagaaagcagaaaaggtctaaaatcgacaccctgacatcacaattaaaagaactagagaaacaagagcaaacacattcaaatgctagtggaaggcaagaaataactaagatcagagcagaactgaagcagatagacatacaaaaaaaaccttcaaaaaaatcaatgaatccaggaggtggtttttttaaaagaccaacaaaatagatagaccactagcaagactaataaagaagaaaagagagaagaatcaaatagatgcaataaaaaatgataaaggggatatcaccaccaatcccacagaaatacaaactaccatcagagaaaactataaacacctctacgcaaataaactagaaaatctagaagaaatatataaattcctggacacatacaccctcccaagactaaaccaggaagaagctgaatctctgaatagaccaataacagtttctgaaattgaggcaataattaataacctaccaaccagaaaaagtccaggaccag

SEQ ID NO: 919163 - DNA, 807 bp, Homo sapiens
accacatgattggaagtaaagcactcctcagcaaatgaaaagaacaaaatcataacaaattgtctctcagaccacagtgcaatcaaattagaactcagaattaagaaactcactcaaaaccgcacaactacatggaaactgaacaacctgctcctgaatgactactgcataaataacgaaatgaaggcagaaataaagatgttctttgaaaccaatgagaacaaagacacaatgtgccagaatctctgggacacatttaaagcagtgtgtagagggaaatttatagcactaaatgcccacaagagaaagcagaaaaggtctaaaatcgacaccctgacatcacaattaaaagaactagagaaacaagagcaaacacattcaaatgctagtggaaggcaagaaataactaagatcagagcagaactgaagcagatagacatacaaaaaaaaccttcaaaaaaatcaatgaatcyaggaggtggtttttttaaaagaccaacaaaatagatagaccactagcaagactaataaagaagaaaagagagaagaatcaaatagatgcaataaaaaatgataaaggggatatcaccaccaatcccacagaaatacaaactaccatcagagaaaactataaacacctctacgcaaataaactagaaaatctagaagaaatatataaattcctggacacatacaccctcccaagactaaaccaggaagaagctgaatctctgaatagaccaataacagtttctgaaattgaggcaataattaataacctaccaaccagaaaaagtccaggaccag

SEQ ID NO: 919164 - DNA, 394 bp, Homo sapiens
catcctatccccatggcaactgttaatctactttctttctctatggatttgcctattcttgacacttcatgtaagtgggatcatacaagttgtagtttgtttgtttggcttcttttacttagcataatcctttcaaaattcatctacgttgcagaatttatcagtatttttcttgatatttctgaataatacttcaytgtatggttatacctcataagttgatgggttgtttctattttctgattattatgaacaatggggctatgaaccttcatatataagctttgtgtgaacatacactttcattgctcttgggtatgttactggaagtggaattgctggttcttatagtaattctaggtttgacatttggaggaattgccaaactgttttc

SEQ ID NO: 919165 - DNA, 647 bp, Homo sapiens
ttcacattcccacgaaaaatgtatgagagttccagtttctccacaacctagccaattatcttagtcagtctgtttgagctgctataactaactaccttagactgggtaatttataaacaatagagatttattgctcatagttctggaggctgggaagtccaagatcaagacaccagcagatttggtgtctggtgagggctcactcactccttcatagatggcaccttcttgttgtgtccttacatgtgagaaggggcaaacaaactcccttggggcttcttttataagggcacccatcccattccttagggtagagctttcatgacytaattatctctaaatgccccatttcctaatatcatattgggaattaggtttcaacatatagattcaggggctgggggacacaaacattcaagaccacagcattgtctttttggttgtagccatcttagtgggtgtgaagtgacatctcattttggttttgatttatgtttccctaaggactaatgttgaacacagttttatgtacttattggtaattttgtatctgttatttggagaaatgtttattcagatactttgcccatattttatttcggtatttgtctttttatttagttgtaattttttaatgtattctggat

SEQ ID NO: 919166 - DNA, 777 bp, Homo sapiens
tctttttgttgtacaacaagaaggcttggacaatgagaaccctttctggattggttccattaatgctttgtccctgaagttaggaaacatcttgccagtaaggactgtcttttaaagttcttttgatattggacaatattcctggccacccagaaccccatcggttcaacactgaaggtattgaagtagtgtacttgctcccaaatacgtctctaattcagcccctagatcaggtggccataagaacctttaaggctcattacacaccacactctatggaataaaggattgtcaatgtgatggaagaaaaccaagacagagagaatatcacgaatatctgggaggattacaccattaaagatgtcatcattgctacagaaaaagctgtgaaagccatcaagcctgaatcaataaattcctgctggagaaaactgtgtccagatrttgtgcatgacttcgtaggatttatgacagagccaatcaaagaactcaaaacagagattgtggttatggcaaaaaggtcgggggatggtggtgaagggtttcaagatatggatcttggagaaattcaagagctaatagacaccacatcagaggaattaatagaagatgacttgatggagatgaatgcttccaaacaactgcaagatgatgagaaagaagacacagaacaaatagcgccagaaacaaattgacattagacaatctggcagaagcgttccaattattcaagactactcttgacttttacaacagggacattctacaggcactgaa

SEQ ID NO: 919167 - DNA, 646 bp, Homo sapiens
accccctctccccagctcctttgctgtgaaactaaatgaggagtcaatcattactctctacaaatttgggttgaaactgagacttcaccaaaagttgatgtcttgtttagtctcttttcctctcctctgctgcttctcccacttccttactggtttttcccttaataaatcactagcacctgaatmcttgactcgggatctgactccaggagagcctattttaagacagttggccccaaaagtggtcttaggatgcacactttatggatgagattctgaccagatgaaaatgacttcatgtcttgtgttaataggccctggcaggccatagcaatgccattcctagaactttcacctgtggttaactaagacaggaaacagaagggaatgctctgatttgttcaatatcttcagcgattgagagatacaaaggaaatcatttatagctactgcagaacaatttgactattgctgagtgtcctcgatacactgaagggagaaaggccatgccgttcaaagcataaaattatataccatatgaaaagcagctcctggctaggtaggtattaagctcccatagagacagagcatctcatcaagtgactctaggatccgagctgcttatcttgagctgagaactttcaga

SEQ ID NO: 919168 - DNA, 686 bp, Homo sapiens
cgtgggacctaaatatagaatttacaccaacacatgccactagatgaatacagttcattccttatattttgaaatgtaattttattttatattattttaaatttattggtaggatatattaagtgactggattctcctaatagcttaaaggttctggaataaccataggctataggcaagatgttccacaaatcaaccaccttttctttctctgccattatgttactaaggtgtgatttcaataagcgacaaaatgcaaatttgacttttccaatgcttttgttttttaggttaaagtttttctttaataaactcttttactgaagcataacaaacatagagaaaaaaagtttacaaattgtaattatgtataacttgatgaatttttttatgtatttttttgtttgttttgttttgagataggatctcaytctgtcatccaggctgaagtgtaatggtacaatcacagctcactacagcctcaacatcctgggctcaagtgatcttcctacctcagcctcccaagtagctggaaccataggcccaagctgccatgcctggctaattttttttttttttttttgtagagacttggtctccctatgttgccctagctggccttgaactactggtctcaagccatccttctgcctcagtctcccaaaatgctaggattacaagtgtga

SEQ ID NO: 919169 - DNA, 679 bp, Homo sapiens
atacatgtctgcgttctggacgccaatatacagtcataatagaaagaaagtaaatctacattttctgttgtcaatcatgtttattaaattgaaaaaaaagtctcctctcccaggcagtctgaaaagtgggaggaagatgaatttattctatgttggaggactaggctaaaaatgtaattaacagatgcaattatgcattctgatgcaaagcgctccaagctgacagggaacttatagtggagctcccaggccacaggctccaaaacctctaacaactttattcttatacgctggcctacggttcaatcttgcttcctttgagtatcttctgcaaataaaaggccctattcttcagcttcccccagctttattcggaatgaaaacaccactttgtgcccacgttgtgttaaaataacagatttgtgttcgttcctgtaggtttctgatggcaggagggaggcggtctatcttcactgcggatggcgaggtgccttttggaggagsaggatggagagaaagggtctccaacagcgaacctttgtcctgcaatgcaaatgaacctctgcaaaacagggcgcagacaatgccagcctagtcctctgcgcgaagcgatccatctgcagctattttgttaacctgatgtttcttacattctttctctcatacaaaatacttgatt

SEQ ID NO: 919170 - DNA, 794 bp, Homo sapiens
tactctgctgattacttcttttgctgtacagatgctttatagtttaattaggtctcatttatttttgttttgtttttgttgcatttgcttttgggttcttgatcatgaattctttgcttaagccaatatctagaagagttctcgatgttatcttctagagtttttatggtttcaggtcttagatttaagtctttgatccatcttgagttgatttttgtataagatgagaagtgaggatccagtttcatccttctacatgtggcttgccaattatgccagcaccatttattgaatagggtatcctttccccactttatgtttttgtttgctttgtcaaaggtcagttggctgtaagtatttggctttatttctgggtcctccattctgttccattagtttatgtgcctatttttataccagtaccatgctgttttggtaattatagccctgtaaaatttgaagtcgggtaatgtgatgcctccagatttttttttttttttttttttttttttgcttagtcttgstttggctatgtgggctcttttttgattccttatgaattttaggatttttttctagttctgtgaagaatgatgatggtattttgatgggaattgcattgaatttgtagattgcttttggcaatatagtcattttcacaatattaactctacccatctatgagcatgggatgtgtttccatttgtttgtgtcatcgatgatttctttcagtagtgttttatagttttccttgtaaagatctttcacctccttggttaagtatattactaagt

SEQ ID NO: 919171 - DNA, 794 bp, Homo sapiens
tactctgctgattacttcttttgctgtacagatgctttatagtttaattaggtctcatttatttttgttttgtttttgttgcatttgcttttgggttcttgatcatgaattctttgcttaagccaatatctagaagagttctcgatgttatcttctagagtttttatggtttcaggtcttagatttaagtctttgatccatcttgagttgatttttgtataagatgagaagtgaggatccagtttcatccttctacatgtggcttgccaattatgccagcaccatttattgaatagggtatcctttccccactttatgtttttgtttgctttgtcaaaggtcagttggctgtaagtatttggctttatttctgggtcctccattctgttccattagtttatgtgcctatttttataccagtaccatgctgttttggtaattatagccctgtaaaatttgaagtcgggtaatgtgatgcctccagatttttttttttttttttttttttttttgcttagtcttggtttggctatgtgggctcttttttgattccttatgaattttaggatttttttctagttctgtgaagartgatgatggtattttgatgggaattgcattgaatttgtagattgcttttggcaatatagtcattttcacaatattaactctacccatctatgagcatgggatgtgtttccatttgtttgtgtcatcgatgatttctttcagtagtgttttatagttttccttgtaaagatctttcacctccttggttaagtatattactaagt

SEQ ID NO: 919172 - DNA, 643 bp, Homo sapiens
gcccactgtcatataaatcacccagttttagaactagagatggaatgtgtgcatgtgtctttatagtacaatgatttataatcctttgggtatatacccagtaatgagattgctgggtcaaatggtatttctggttctagatccttgaggacacaccacactgtcatccacaatggctgaactaatttacactcccaccaacagtgtaaaagcattcctatttctccacagcctcgccagcatctgttgtttctgaatggcaggatttttgtctggtagaagacaagaaggcataagagcagcagaatgttttaggatggtcaagcttgtggccctgcagagggcaaattagggaraggggaagaggaagaccagttagaaagcagttgcaataatgcaagcaggagctgccacaggcctagaccagcaaggacagtgggtgtggcagggaaggacagtggtgagagacctggtaagggaagagctgtgcagtggtcatggttgtaccactcctgttagcatggtctcaagtcaccttgtgttgactaatccaatttcatccttctggtccagtcagcccaggccttgcccgagtcctttgtgtcttgtctgtggcctccagactagctggtaggctggaggg

SEQ ID NO: 919173 - DNA, 643 bp, Homo sapiens
gcccactgtcatataaatcacccagttttagaactagagatggaatgtgtgcatgtgtctttatagtacaatgatttataatcctttgggtatatacccagtaatgagattgctgggtcaaatggtatttctggttctagatccttgaggacacaccacactgtcatccacaatggctgaactaatttacactcccaccaacagtgtaaaagcattcctatttctccacagcctcgccagcatctgttgtttctgaatggcaggatttttgtctggtagaagacaagaaggcataagagcagcagaatgttttaggatggtcaagcttgtggccctgcagagggcaaattagggagaggggaaraggaagaccagttagaaagcagttgcaataatgcaagcaggagctgccacaggcctagaccagcaaggacagtgggtgtggcagggaaggacagtggtgagagacctggtaagggaagagctgtgcagtggtcatggttgtaccactcctgttagcatggtctcaagtcaccttgtgttgactaatccaatttcatccttctggtccagtcagcccaggccttgcccgagtcctttgtgtcttgtctgtggcctccagactagctggtaggctggaggg

SEQ ID NO: 919174 - DNA, 583 bp, Homo sapiens
tagactaagacatggtcttaatacatcaattgataattcttgcctgaatcagtgattccattagagatcagggtggaattttgacctggcattcccactctgtggaactatggtttggtctgaaatatgcttttggtctctgagggcytgatctccctccaagttggaccatctggcttagacccaccatcaccaggcccaggggcagaggtggcctgagatgggaaggggttgggagacctggtgactggtacctgcttctgaaaggcagccaccttggtgtgtctatgcccctctctctatccaatgcccctgagggcctgggctctgtctgtgtggggttgtatcttcctgcagcagagctctgcctgtctgttggattagactctcctaaagcctgtcttgttccctggggcccgatcacaatgaaccagccatgcagagctgcatctggagatacagtcatgtaatgctggcatcaccaaccactggtaaggtgcccatcagataacaaacatcaggacacttaggaaagtttgggtggggtgcacatactccctccaccctggactccctcctggaa

SEQ ID NO: 919175 - DNA, 637 bp, Homo sapiens
ttcagaaaacatcaatcaaatggtgtcatcgccgaccatggtgactcacgcctgtaatcccagtgctttgggaggccaaggcaggaggattgctcaaggccggaagttcaagaccagcctgagcaacacagcaagacctctgtctctacaaaaaaaaaaaamaaaaaaccgtaaaacaaaacaaaatgataccaccaaaaatgtcaaagatgtttgcctcatttcgtttcttctttgagggaggcaggtaatgtttttctcaatggcggcatagtacactatgggagaatggcacctgggagctggtgaggggaccaggaaggctggcctgttgcaggcagctctaagggattcagcaggaaggcctcactctgctggcgacactcgaatggctcctgtcacagaccttaccatttccacacatgctggcccaacttgcaacttccagcccctgtgtctctttctctgtccaccagatccctggccagaagtgcattgaattgccaaccctggggaaacagcttcaaccagtgatggatggagaggcagtgcatacattccccaggcccctcaccgccaaatgggctaacacagggcataagttctataccacctcccgccactccccagtggtggg

SEQ ID NO: 919176 - DNA, 738 bp, Homo sapiens
gtggctcacacctgtaatcccagcactctggaaagccaatgcgggcggatcacctgaggtcaggagttcgagaccagcctggccaacatggtgaaaccctgtctctaccaaaaatacaaaaattagccgagcgtggtggcgggcmcctgtaatcccagctacttgggaagctgaggcagaagaatcgcttgaacctgggaggcggaggctgcagtgagccatgattgcaccactgcactccagcctgggtgacagagtgagactctgtctcaaaaaaaaggctctgtctcaaaaaaaaaaaaaaaaaaaaaaaaaaaaaaggcggggctctctgtccctctttttcacccaccaaatctctgcctgttaaaatctaattcacctttcaaggcacaattgaaaggcactcctcttccataaagtcttgcccagttttctgaatctgacttctgttctctgcagcaccctcagaacatgtattttctaccccctcatttgccactgcacatcatgccttattcatgtatatgtctgttacatgtgctaacacacatgtgagcagcacaagggcagcaactctgttttctcaaatgttcgacaccttaaacctttaaaaaaatttaataacagtttgttagactggactgaggacttccctggactttgagccccgctggtagatgcctgctgaatatgaactgtactttttcaaaagataacagactctactggaagagg

SEQ ID NO: 919177 - DNA, 738 bp, Homo sapiens
gtggctcacacctgtaatcccagcactctggaaagccaatgcgggcggatcacctgaggtcaggagttcgagaccagcctggccaacatggtgaaaccctgtctctaccaaaaatacaaaaattagccgagcgtggtggcgggcccctgtaatcccagctacttgggaagctgaggcagaagaatcgcttgaacctgggaggcggaggstgcagtgagccatgattgcaccactgcactccagcctgggtgacagagtgagactctgtctcaaaaaaaaggctctgtctcaaaaaaaaaaaaaaaaaaaaaaaaaaaaaaggcggggctctctgtccctctttttcacccaccaaatctctgcctgttaaaatctaattcacctttcaaggcacaattgaaaggcactcctcttccataaagtcttgcccagttttctgaatctgacttctgttctctgcagcaccctcagaacatgtattttctaccccctcatttgccactgcacatcatgccttattcatgtatatgtctgttacatgtgctaacacacatgtgagcagcacaagggcagcaactctgttttctcaaatgttcgacaccttaaacctttaaaaaaatttaataacagtttgttagactggactgaggacttccctggactttgagccccgctggtagatgcctgctgaatatgaactgtactttttcaaaagataacagactctactggaagagg

SEQ ID NO: 919178 - DNA, 643 bp, Homo sapiens
gctgtcctatttccgaacttcctgtgatgtgagataacaactggcattgtttacagtaatttgagtcagggtacaatttgatactgtgcccattgtattagtccattctcacagtgctatagagaacggccaaaactgggtaaattataaaggaaagaggtttaattgactcagttccacaggacttgggaggcctcaggaaacttacaatcatggcagaaggggaagcaaacacattcttcttcacatgacagcaggaagcagaagaatgagaacccagtaaagggggaagccccttataaaaccatcagatctcatgagaatttactcactatcacgagactagcatgggggaaccacccccatgattcaattacctcccactgggtctctcccatcacacgtggggattatgggaactataattcaagatgagatttgggtggggacacagccaawccatatcaccatttgtccattaaggaggagtaacacacacatacacacacacaaacacatgaatgaatgtatgtatgtatgtatgtatgtatgtatgtatgtatgtatgtatgtatctatctatctatctatctatctatcatctatctatctaagctataaccatgccaacacaactgaattt

SEQ ID NO: 919179 - DNA, 581 bp, Homo sapiens
aggaggagtaacacacacatacacacacacaaacacatgaatgaatgtatgtatgtatgtatgtatgtatgtatgtatgtatgtatgtatgtatctatctatctatctatctatctatcatctatctatctaagctrtaaccatgccaacacaactgaatttaaatctcaataacatcaaaccagtatctgcatatattactggtgagattttaaaaattggtaccatccttttggagagagtttgtcagtatgtaccaagagctatgaagaggcttataaattttgaccaagtattttaccttgggtaagctctcctagggaaataattcaaaacatggacaaatacatactctatatttggtagagtattacgcatccattacaaaagatgattcaaactttagcaaagtgaaaaagagagtactagaataatgatgatgatgatgatgatgataaaagtcaacatgtgtgtacgtgtcagagcccaaagaatatctaccaaaatgttcacagaggtagtgtcatggtgggggaccagggggtgagttatttttttcctgctttcttttccaaatttcc

SEQ ID NO: 919180 - DNA, 581 bp, Homo sapiens
aggaggagtaacacacacatacacacacacaaacacatgaatgaatgtatgtatgtatgtatgtatgtatgtatgtatgtatgtatgtatgtatctatctatctatctatctatctatcatctatctatctaagctataaccatgccaacacaactgaatttaaatctcaataacatcaaaccagtatctgcatatattactggtgagattttaaaaattggtaccatccttttggagagagtttgtcagtatgtaccaagagctatgaagaggcttataaattttgaccaagtattttaccttgggtaagctctcctagggaaataattyaaaacatggacaaatacatactctatatttggtagagtattacgcatccattacaaaagatgattcaaactttagcaaagtgaaaaagagagtactagaataatgatgatgatgatgatgatgataaaagtcaacatgtgtgtacgtgtcagagcccaaagaatatctaccaaaatgttcacagaggtagtgtcatggtgggggaccagggggtgagttatttttttcctgctttcttttccaaatttcc

SEQ ID NO: 919181 - DNA, 603 bp, Homo sapiens
gctgggtctatgctgtctctgtgcgttcataattgcgatggttgattatatgtgacaattttactaggccatagggtgcccaggttaaatgttatttctgaatgtgcctgtgagggagggtcattctggatgagattagcatttgaatcagtgggctcaatgaagtaggtggccctacacaaggtgggtgggtatcatccaatcttttgaggacctgaatagaacaaaaggtggaagaaggagaaatttcccccactttttcctgcttcactgcttgagctgggatatctcatctcatccccttctgaccttggatacaaatttacaccatttcctytaggcctttagattcagaatgaattatatcactggatttctgtgtctccagcttgccaatgacagatcatgggccttctcagacttcatcgttgcattagccacttccttataatatctctctctctctctctctctctctctcctctcctctctctctttcagctttttgcctgaagtcaggcttcaatcagccaccacacaggtgactaaagcggagaaacccttagcctaagaggcacgaataagcagaggagtttagggtaa

SEQ ID NO: 919182 - DNA, 772 bp, Homo sapiens
tgacttattgatgggtggattccgtcccccagagaaagctctgaggctttctgctttgtcttctgcatctacaaaaatagagaatttgcccttaatccatgtggaagggaatatctgaccacgaatgagagccatcgaaaagatcctgagacatctgccctgagctcacakggccagcattggttaacacggtggctgatggcatggaggtccccaaccccctccccaaggagctctcagaggcagatgcatttgtagctcagccttgactcctggtttgtaaacacacagttgtagagtcccagtttctgagaaggtggaggccatgtaaaaactgcttcattttatagctttatcccaccctttttgaccctgactttccatacatcattcttgacttctcccaccccacatttctgccttctgcatttgatctatggactataagtagatataatgaaatgccaagtttctttaaaaagaatcccccctcccctgctcactgccaacaccaaatattggacctggggatcgtccaataatagacaataatgctctgctcacttgtgttgggctggagcatgtcacctgcataaagtcttgaagacctggagtcgctgtgtgctatgtggtttcactaaccatttctcttaacctgtatttattttcattttgctcacaggaagccacaaataatttgtttaaaggtaacatgaaaagctgagcaaagaggctcccttcccttccttagctcctgcttcagcaaagagac

SEQ ID NO: 919183 - DNA, 641 bp, Homo sapiens
ttacaattaatttgtctatatctataaaaattcatgctgggattttgattgaaattgcattaaatatctggatcattttgggagagaactggtatcttaaccatgttgaattttccaatacatgagcacaacatgtctcttccattattagatcttatttaatttctttcatcattgttttgtagttttcagcatacagatcttgcatacatctttgttagatttatatctatgtagctagtttttctgaaactattgtacatgttattttttaatattccagttttcaactgctcatatctggcatgtaaacaactcttgaccttgctaaactcaatagttctcatttttgtttttgcrttttttgaagatagaattctttgggattttctatgtatacagttctgttatctatgaataaagaggattttctttctttctttcccagttctgtgtcttttttggttttggccttattacctacgacaggattttcacgacaaattggagaattggagttgtgtgagtgaacatctttttcttgtttcctatcttaggatgtaagcatgtattttttttttttcatcattaaatacgatgttggctgtagtttttttgtggatgtcctttatcaggttaaa

SEQ ID NO: 919184 - DNA, 643 bp, Homo sapiens
tcccctgctggtcatatgaccacacacttgccagagagatcttctacaggggcaaatcagattatatcactccctcactcagaccccccaaggttccccttcctgttaggtggaaatctagactctgcaccgtggccccagtggcccacctggtgactcacctgtctccctgacctcatcttccaccacacttcccttctgtatgttctagcaaacttggttttccctctgttcttagcccatgtcaagctggttctcatctcctgatttgagggttgttgttccccatacctgaaaatgttctcttctaggtatttccatggttcccttccttctatgggtctctgttcctttgatgggccttcctcagccaccatctactcccttgttagtgtcgttcatggcctgtaccaccagctttcaacacatgacaggtgtttcctctttgctctctgtytccttttctagagtatacattttctgaatgccaggactctgacaactttatttatcactacatccactgtatccatcacattgcctggcacataaaagatgctaagtaaagaattgttgaatgcatgagagagtgactctcccagtgggccccaggggcatttaagaagctcctgttgcctgggac

SEQ ID NO: 919185 - DNA, 717 bp, Homo sapiens
ttcactaggtgcaataagctaaatctctgtgtcccccaaagttcatatgttgaaaccctaattccagcatgacagtatttggaggtgaggcctttgggaggtaattaggtcatgaaggtggccctctcatgaatgggattagtgcctttatagaaacaagccagagagctctcagtttctttctgccatgtgaggatacaatgaaaagccagcacagtctgcaacctggagaagggtcctcaccagaatctcaccatgccggcaacctgatctcacacttccagcctccagatctatgagaaacagatttctgctgtttataagccacccagtctatgagactttgttgtagcaacctgaatgaactaagacccctgggcaacatgcatcttctccttaagaaattmatttagggtagagttccaagatggccaaataggaacagctccagtctacagctcccagcgtgagcgacatagaagatgggtgatttctgcatttccaacggaggtaccgggttcatctcactggggcttgtcagacagtaggggcaggacagtgggtgcagtccaccgtgcatgacctgaaacaggtcaaggcatcacctcacctgggaagcgcaaggcgtcagggaattccctttcctagccaagggaagcagtgacggacggcacctggaaaattgggtcactcccaccctaatactgtgcttttcca

SEQ ID NO: 919186 - DNA, 717 bp, Homo sapiens
ttcactaggtgcaataagctaaatctctgtgtcccccaaagttcatatgttgaaaccctaattccagcatgacagtatttggaggtgaggcctttgggaggtaattaggtcatgaaggtggccctctcatgaatgggattagtgcctttatagaaacaagccagagagctctcagtttctttctgccatgtgaggatacaatgaaaagccagcacagtctgcaacctggagaagggtcctcaccagaatctcaccatgccggcaacctgatctcacacttccagcctccagatctatgagaaacagatttctgctgtttataagccacccagtctatgagactttgttgtagcaacctgaatgaactaagacccctgggcaacatgcatcttctccttaagaaattaatttagggtagagttccaagatggccaaataggaacagctccagtctacagctcccagcgtgagcgacatagaagatgggtgatttctgcatttccaacggaggtaccgggttcatctcactggggcttgtcrgacagtaggggcaggacagtgggtgcagtccaccgtgcatgacctgaaacaggtcaaggcatcacctcacctgggaagcgcaaggcgtcagggaattccctttcctagccaagggaagcagtgacggacggcacctggaaaattgggtcactcccaccctaatactgtgcttttcca

SEQ ID NO: 919187 - DNA, 484 bp, Homo sapiens
gaagagacagcctatagtaggggtcttctgggccgtgggttgctattggtccatggcctgttatgaacaaggccacagagcaggaggccagtggcaagccagtaagcattaccacctgagctccccctcctgtcagatcagtgacagcatyagatcctcacaggagcacaaaccctattgtgaactgcacacgtgaagaatctaggttgctcctcatgagactctaatgcctgatgatctgaagtggaacagtttcatcccaaaacaattttccctcccccagaccatggaaaaattgtcttccatgaaagttgtccctggtgctgaaaggttgaggactgatgacttatagactgagagactatatttgaaaatcatacatctaatgagaggctaatattcaaaatacgtaagaaactcaaactcagtagtaagaaaacaatctgattaaaatctgggtgaaggacttgaatagatgtttctc

SEQ ID NO: 919188 - DNA, 608 bp, Homo sapiens
aagaaagggataaattcccttccggtcagcaagccatccccagtatggatccccactgagaccttgatgcagaccacggggactggagttgtaaacatctgttgacctgtgttctagaaggactaaggagaattaggaaaaagcccatgaattattcaatgatgtccaccataactcagggaaaggaagaaaatccttctgccttccttgagtggctatgagaggtcttaaggaaatatactcccgagtcacctgaatcactcgagggtcaattgatwctaaaagataagtttattacccaatcagtcacagatatcaggagaaagctccaaaagcaagccctgggccctgaacaaaatttggaggcattattaaacctggcaaccccggtattctataatagggaccaagaggaacaggcccaaaaggaaaagcaagatcagagaaaggccacagccttagtcatggccctcagataatcaaaccttggtggttcacagaggacagaaaatggagcaggccaatcaccctgtagggcttgttaccagtgtggtttgcaaggacacttaaaaaaagattgtccaatgagaaacaagccgccccctcat

SEQ ID NO: 919189 - DNA, 595 bp, Homo sapiens
ggacgttcatggcgatcagacaaccacctacttagataccaggtgctactccttgaggaaccagtgcttcagatatgtatgtgtgtggccctcaaccctgccacttttctcccagaggatggggaaccaatcgagcatgactgccaacaaattatagtccagacttatgctgccaagatgatgtcttagaactccccttagctaatcctgaccttaacctatataccagtgaaatctcatttgtggagaatgggatacaaagggcaggttatgccatagttagtgatgtaactgtacttgaaagtaagcctcttcycccagggaccagtgctcagttagcagaactagtggcacttacccgagcctttgaactgggaaagggaaaaagaataaatgcaaatacagatagcaagtatgcttatctaattctacatgctcttgctgcaatatggaaagaaagggagttcctaatctctgggggaacccccattaaataccacaaggaaattatggagttattgcatgcaatgcaaaaacccaaggaggtggcagtcttacactgccaaagccatcaaagtgggaaggagacgggaga

SEQ ID NO: 919190 - DNA, 616 bp, Homo sapiens
gggtggggtcttggagaacatttatgtctagctggagaattgtaaatgcaccaatcagcactctgtgtctagctcaaggtttgtaaatgcaccaatcagtgctctatgtctagctaatctactggggacttggagaacttttatgtctagctagaggattgtaaatgcaccaatcagcactctgtgtctagctcagggattgtaaatgcaccaatcagcaccctgtcaaaatggaccaatcagctctctgtaaaactgaccwatcagctctctgtaaaacagaccaatcagctctctgtaaaatggaccaatcagcaggatgtgggtggggccagataagggaataaaagcaggctgcctaagccagcagtggcaacctgccagggtccccttccacactgtggaagctttgttctttcactctttgcaataaatcttgctgctgctcagtttttgggtttgtgctgcctttgtgagctgtaacactcaccacgaaggtctacagcttcactcctgaagccagcgagaccatgaacccactgggaggaatgaacaactctggacgggagaaacgaacaattctagacgtgctgccttaagagctgtaacactcacc

SEQ ID NO: 919191 - DNA, 593 bp, Homo sapiens
tccaaaacatgagctttgagggacacattcaaaccatagcagcaattcaaaatgatgcctcttgggtgggaatggtggctcacgcctgtaatcctagcactttgggtggccaaggcaggcagatggcttgaggtcaagagtttgagaccagcctggccaacactggtgaaaccccgtctctacaaaaraatgcaaaaattagctgggcatggtggtgcatgcctataatcgcagctacttgggaggctgaggcatgagaatcacttgaacctgggaggcagaggttgcagtgagctgagagtgcctcactgcactctggcttgggtgacaaaaacaaaaaacaacaacaaaaaaacacctctctaagcagaatcctttcatgaatagtagaggagccaatgagataggccttgaagcttgcttccaaggtctccatggatcctttgaaagtcaagcccataagttaccataatattctttttgccatttaataaatgctttttgaacaagattgtgttaaccacgtgctgcatgacatgaaagaggaaaaggcacagtttatgcctgtgaagaagaagcaggttgtacttcca

SEQ ID NO: 919192 - DNA, 691 bp, Homo sapiens
aagtgatacttcaaagtatggcactttggcatgctgagcactttaaattaaaggattaaaaataaaaatatcctggagggttgcatcattcctggaggtactgcaataccaagtcagtgtgtggagtggatggagcaagctcctactctatctccctgctccaaaaatccatttaatatattgcccttggatagaggacatatcaaatattaaactgataagaacagatactrcacttgatcttagccaaaatatctagaagcaataaattaaaggatgtcagaaggcctcagaagcaatctcagaaccaaggtctcttagattttctgccttgctgtctcttacccttcattctgtcttgaagcaagtcatagaaaccagaattcctcttccccaaggtgggtcatagaaactagaacttctcttttccaaagccagccataaaaactagaataattactgtaacctttctttactgttctggctaggagctggacataaagaaattctctgtcttatccttgtgcaatattaggtcagaagactgtcattccagaggggtcctgcctcatccatacctaggaggaagaaatgctacaacagagagggcaagaagaaactgcataggccttgctgggcttccccacgcagcctattagcattgggtcatactcttttagtccaatcatat

SEQ ID NO: 919193 - DNA, 691 bp, Homo sapiens
aagtgatacttcaaagtatggcactttggcatgctgagcactttaaattaaaggattaaaaataaaaatatcctggagggttgcatcattcctggaggtactgcaataccaagtcagtgtgtggagtggatggagcaagctcctactctatctccctgctccaaaaatccatttaatatattgcccttggatagaggacatatcaaatattaaactgataagaacagatactacacttgatcttagccaaaatatctagaagcaataaattaaaggatgtcagaaggcctcagaagcaatctcagaaccaaggtctcttagattttctgycttgctgtctcttacccttcattctgtcttgaagcaagtcatagaaaccagaattcctcttccccaaggtgggtcatagaaactagaacttctcttttccaaagccagccataaaaactagaataattactgtaacctttctttactgttctggctaggagctggacataaagaaattctctgtcttatccttgtgcaatattaggtcagaagactgtcattccagaggggtcctgcctcatccatacctaggaggaagaaatgctacaacagagagggcaagaagaaactgcataggccttgctgggcttccccacgcagcctattagcattgggtcatactcttttagtccaatcatat

SEQ ID NO: 919194 - DNA, 691 bp, Homo sapiens
aagtgatacttcaaagtatggcactttggcatgctgagcactttaaattaaaggattaaaaataaaaatatcctggagggttgcatcattcctggaggtactgcaataccaagtcagtgtgtggagtggatggagcaagctcctactctatctccctgctccaaaaatccatttaatatattgcccttggatagaggacatatcaaatattaaactgataagaacagatactacacttgatcttagccaaaatatctagaagcaataaattaaaggatgtcagaaggcctcagaagcaatctcagaaccaaggtctcttagattttctgccttgctgtctcttacccttcattctgtcttgaagcaagtcatagaaaccagaattcctcttccccaaggtgggtcatagaaactagaacttctcttttccaaagccagccataaaaactagaataattactgtaacctttctttactgttctggctaggagctggacataaagaaattctytgtcttatccttgtgcaatattaggtcagaagactgtcattccagaggggtcctgcctcatccatacctaggaggaagaaatgctacaacagagagggcaagaagaaactgcataggccttgctgggcttccccacgcagcctattagcattgggtcatactcttttagtccaatcatat

SEQ ID NO: 919195 - DNA, 596 bp, Homo sapiens
catgaatgagcctaactgaaacaagaactgctcaactgacccatagactcatgagcaacaataatgctgttattatttcaagccactgagttttgccatggtttgttatatagcaatagctaattggtacacccttaattccatttctgtacactgtgggctctagccaggctacatcttttgccgttttctgtgtgtaccatcctcatttttaccttttggcctttgaacaggtgggttcctctggctgagatgctcttatcttccaattttacactctgcttggctaaagtgtattcatgtttcatgatttggcatagatgtgtcttcttccagcaagttttgcttctctctcatcatgactaggttagctgtcactgctggcaaaagatcccttctrgacctaactctagtgaggctcctctaaatcctgtaggccttgagcttcagtgtccatccttgctggactcacatcactcagttttagcaagaatcttgttaagttagcgcagtggtttgaatgtgtccccaaaagttcatgtgttggaaacttaatccccaatgcagcagtgttgggagatggggcctaataagag

SEQ ID NO: 919196 - DNA, 590 bp, Homo sapiens
ggaggagggactcctctccaactcattctatgaatccagcatcatcttgataccaaaacctggcagaaatagaagaaaaagtaaacctcacgccaatatccttgatgaacattgagcaaaaatcctcaacaaaatactagcaaaccgaatccaacagcacatccaaaagctaatccaccacaatgaaataggctttatctctgagatgcaaggttggtccaacatacacaaatcaataaatgtgattcatcacataaacaraactaaagacaaaaacagtaagatcgtctaaatagacatagaaaaggcttttgataaaattcaacatcgcttcatattaaaaactcttaaactggatattgaagaaacatacttcaaaataataagagtcatctatgacaaactcacagccaacatcatactgaatgggcaaaagctgaaaccattcctcttgaaaactggcacaagacaaagatgccctctctcaccactccctatgttacatagtattggaagtcctggtcagagcattcaggcaacagaaagaaagaaagggcatcctaatagaaagccatccaaataactggcta

SEQ ID NO: 919197 - DNA, 579 bp, Homo sapiens
gaaatgggcaagatgggctaactggtccccataagtccaaaacccaaaagggaaagcaattaatttctaaagttggagaataatcacctttgactcatgtcccacatcctgggcacactggggtgagggtcaggccccaaaacttcagacagccctgcctgtgtggctatgctggtctcaatccacccagcagctctcatgacttggagcctcatgcctgcagctttcccaggctgaggctgcatgctagtggccctacagttttggggtacggggggctgcttcacttmtatggctcactaggcattgctctagtggggactctctgtagtagccctgcttatatggctctgctgggcattcctctagtggggactctttgtggtggttccatacttgtgacaagtctctgcctgggcccccaggctgttcacaacatcttttgaaatctagtcggaagccaccaagccatcatagctcttgcattctacatccctgcagaattagcactacatggacgctaccaaggtttatggcatgtatcttccagatcagcaagttgagcgatagctgggcctg

SEQ ID NO: 919198 - DNA, 720 bp, Homo sapiens
gaagctggaagaaatagtgctgttctgtgcaatggtagttgcatctgaataatgtcccagcttctcatttaagaaatgctacccaatggagaagagcaggtggggtctatttatcattctacatgtcagatgcaaaagtgatcttatctgtgactttggtgcmagttgcagtgtcacatgttggattgagcaaaatgcactctcaggatcaacattctctgcttaagtagtgaaacagtagtgttggtgcaggttaactgtttttgtgtgtgtgtgttttatacagtgaaacatttttaatgtgaaattcttgaaatgcacacaaaagtacagaaaatgctaacttggataccatgttttcacgcacagatttaatggatgaggttatattgcttctgatctctttaaaaggctctatttcattggtagggatattgtccctaagtgcaaccttggacaaaatgtttgggatgaggaacatggagtagagcctctttgctgaggctccttccagcccccgcactctagttcctgcttttggaatgtcactgtcaaataagaagtctccttctagtgactgtagcacctacataagagagaacaggggataagaatacaaggggagataaagtcaggtgttcccaaaagctagtagggtgacaagggagaaatggggtagggatacggactcagctagatgttagttgcaccatctgtgag

SEQ ID NO: 919199 - DNA, 720 bp, Homo sapiens
gaagctggaagaaatagtgctgttctgtgcaatggtagttgcatctgaataatgtcccagcttctcatttaagaaatgctacccaatggagaagagcaggtggggtctatttatcattctacatgtcagatgcaaaagtgatcttatctgtgactttggtgcaagttgcagtgtcacatgttggattgagcaaamtgcactctcaggatcaacattctctgcttaagtagtgaaacagtagtgttggtgcaggttaactgtttttgtgtgtgtgtgttttatacagtgaaacatttttaatgtgaaattcttgaaatgcacacaaaagtacagaaaatgctaacttggataccatgttttcacgcacagatttaatggatgaggttatattgcttctgatctctttaaaaggctctatttcattggtagggatattgtccctaagtgcaaccttggacaaaatgtttgggatgaggaacatggagtagagcctctttgctgaggctccttccagcccccgcactctagttcctgcttttggaatgtcactgtcaaataagaagtctccttctagtgactgtagcacctacataagagagaacaggggataagaatacaaggggagataaagtcaggtgttcccaaaagctagtagggtgacaagggagaaatggggtagggatacggactcagctagatgttagttgcaccatctgtgag

SEQ ID NO: 919200 - DNA, 642 bp, Homo sapiens
tcactaacttttcatctcttgcattctttacttctctttctcaatttattcatcttgaggtatacttatcctgagttgactctgagcagcccatcctcaaaacacaaacaatgttaggatgagaagttgagtgagcacagagctcgaacacgtgcatggtacttaatgtttccaaactcgagcccaatcagtctagcacagtcaatcccactgcattttaatgactaggatggggcctgctgtacatagctggacatcttggattacagaaaagaggctttatgkgaaggcagcattttctttgtggtagagcaacatagttatcctgctaactgtcctatttgacctgatggaatccataaggtcctgttgatgggttggttctaagaggatggagaagcagaagtcattctactgagaacagacagtcctgttgcttagatacatacatattctttatgacagaattcctcctgagactcttgcacaccttcagtgatcagcgcattcactttggttatttcttggtaacaggcacgagaaatgggtcacatagaaatctgaagagtcatttctcgagcatttttagcttattcccatgtaaagaggcactgagctcctgcagttctagcctgcctctgc

SEQ ID NO: 919201 - DNA, 625 bp, Homo sapiens
agtaaatcagcattttacataagataaggtgaacgtagagtagcttcctgtggagctatctagacttttctgtgtagctgtctgcttaggagcaaaaggaaaggcagtttcttgcatgactcagctttcagcttcattttttccttttggcagattgctttggggtcctgagtttttatcttcctttcatgctatatgtgctgtcttttcatcttttttcactacatgtgtctcatcagtccttttattccaataaacatagattcattcaaaagtgtgtactgaggccgggcgyggtaatccctcaggccgggcgcctgtaatcccagcactttgggaggccgaggcgggtggatcacgaggtcaagagatcgagaccatcctggctaacacagtgaaaccccgtctctactaaaaatacaaaaaattagccagatgtggtggcgggcgcctgtagtcccagctactggggaggctgaggcaggagaatggcgtgaacccgggaggtggagcttgcagtgagccgatcgcgccactgcactccagcctgggggacagagcgagattctgtctcaaaaaaaaaaaaaaaaaaaagtgtgtactgagcttctactatgtgtcagcc

SEQ ID NO: 919202 - DNA, 632 bp, Homo sapiens
aacttccaaacaaatgcaagctgcagccagccccagagctgcagatgggcatgtccctagggtggctttagaaaaatgtagttctctctgtgctcagctcaacctgccccctctgccctgagatgcacacacacacactcacacacacacgccactcccccccgccaccccccacacagttccttcctttgcagaagagatgagaaaacctctctttctttgtactgtagagcarttcctttggaggacaaagactgttgcaatgagctttttgtctcggcagagtttgctaatacactttaaaatatttattgtgaatgggttggaggaggttgctgtgggaagccctgtgtgttatgtatacctttgcatgcttcagcaatgcctgcccagtgctttggggactcagcagatgtccacagatgatgatagtgactttgaggaacccccatatttcttgaatttttcataatgagtgtagaaagaggtcccagcactggaaaggaaggtggggagctgttcccctcattgcttacagtggtctacctcttgtagacacaaacctctaccttgaggagcccctttctgagggcaagtgtgcttctgagagggcagatgccagccatgcatca

SEQ ID NO: 919203 - DNA, 625 bp, Homo sapiens
gaaattcaaaatggtacacccactttgggaaattgtctggcagtttcttataaagtcaaacatatacttaccctatgacttggtaattccatttcttggtaattatccaagggaaatgaaaacctatgttcacaccaaaaacagtgcacagccacttttacaatggctttattcataattgccaaaaactggaaacaattcaaacatccctcagatagtgaaaggataaatgaactgyggtacatccacacagtggaatattattcagcaataaaaatgaacaaactaccaagacatgcaaccacatggacaacatgaatttcaaatgcactatgctaagtcagagaagccagactcaacagcctgcatactctatgaatccacttatatgacattttggaaaagataaaaccagaggggcataaaacagatcttgtcaggttctggggattgggggaggtgatagactacaaagggacatgggagaataatgggaagtgatggtattgttctatgtcttgattgtggtcgtggttatatgactatatatttatcaaaacttacagaagtaaacactaatgaaggtgaaatttactgtgtgtaaattatatcttaattaaaaatg

SEQ ID NO: 919204 - DNA, 625 bp, Homo sapiens
gaaattcaaaatggtacacccactttgggaaattgtctggcagtttcttataaagtcaaacatatacttaccctatgacttggtaattccatttcttggtaattatccaagggaaatgaaaacctatgttcacaccaaaaacagtgcacagccacttttacaatggctttattcataattgccaaaaactggaaacaattcaaacatccctcagatagtgaaaggataaatgaactgcggtacatccacacagtggaatattattcagcaataaaaaygaacaaactaccaagacatgcaaccacatggacaacatgaatttcaaatgcactatgctaagtcagagaagccagactcaacagcctgcatactctatgaatccacttatatgacattttggaaaagataaaaccagaggggcataaaacagatcttgtcaggttctggggattgggggaggtgatagactacaaagggacatgggagaataatgggaagtgatggtattgttctatgtcttgattgtggtcgtggttatatgactatatatttatcaaaacttacagaagtaaacactaatgaaggtgaaatttactgtgtgtaaattatatcttaattaaaaatg

SEQ ID NO: 919205 - DNA, 598 bp, Homo sapiens
aactgagatttgaaaccaggcaggctattgctggagtctattcttcccgcccaactccactgcccctctgtgctatcaaaggccttccacattctcttagattctcttccaatgctgctgtctggtcaacaaactattagatgccaggtactgcgtagggtgccaaagaaatatatattcctaatcataggcttcaagtttaaggttctcttgccattgctcctctgggaagttccccacctcttaagcatttcttttccccccattgcagccarcaaggcctgcttcccactctgaatacacatttccctactgctttcttgcctgtataaatggggtgctcctcaggtcaaatctgctcccctgtggcttgctttccttcaaatcatattctagaaacagatcccatataacagcttctgacttgcagggtcccagaatgtcagtgctgaaagagattgcacagcccaacgccttaccttcttaagatcaggaaactgggagcaccagaagcgctgactaatttgtctgagtcacagtcatatttaggaacaaaatccatcttttttccaaagtcattcagcaagtctctctatga

SEQ ID NO: 919206 - DNA, 612 bp, Homo sapiens
aaacaccaactccaaaagaattcagtcagtgctctgaagtagtgaaattgggatctcatttctataggcagaaacagagaagattttatcaggattacaaaaaaattattcatataaggatggcacctggttacagaaatttcattgattataagcagtgtttcttttggggaagggtacatttaacatttttttacacagagtgtaatagttatttataggttttctgtcatccagcctaagcaaagcaggacaasaaaggggggaagttaatctacaacatgggtcattaattaagaaggcaggagatttttgtccctgacatcatttaattccctctagtcactgcacagaacaagaaaaatgaagtgagttaatctgtaatttgagaacagaagttataactatatgtgactcagatcacagttacgtcttttggggttccaacagcttttaaattttacttatgttcatttttcttttctttttttggtttttttttttttttttttttgagatttcactcttgttgcccaggctggggtgcaatggcgggatctctgctcttggcaacctctgcctcccaggttcaagtgattctcctgcctcagc

SEQ ID NO: 919207 - DNA, 612 bp, Homo sapiens
aaacaccaactccaaaagaattcagtcagtgctctgaagtagtgaaattgggatctcatttctataggcagaaacagagaagattttatcaggattacaaaaaaattattcatataaggatggcacctggttacagaaatttcattgattataagcagtgtttcttttggggaagggtacatttaacatttttttacacagagtgtaatagttatttataggttttctgtcatccagcctaagcaaagcaggacaagaaaggggggaagttaatctacaacawgggtcattaattaagaaggcaggagatttttgtccctgacatcatttaattccctctagtcactgcacagaacaagaaaaatgaagtgagttaatctgtaatttgagaacagaagttataactatatgtgactcagatcacagttacgtcttttggggttccaacagcttttaaattttacttatgttcatttttcttttctttttttggtttttttttttttttttttttgagatttcactcttgttgcccaggctggggtgcaatggcgggatctctgctcttggcaacctctgcctcccaggttcaagtgattctcctgcctcagc

SEQ ID NO: 919208 - DNA, 612 bp, Homo sapiens
aaacaccaactccaaaagaattcagtcagtgctctgaagtagtgaaattgggatctcatttctataggcagaaacagagaagattttatcaggattacaaaaaaattattcatataaggatggcacctggttacagaaatttcattgattataagcagtgtttcttttggggaagggtacatttaacatttttttacacagagtgtaatagttatttataggttttctgtcatccagcctaagcaaagcaggacaagaaaggggggaagttaatctacaacatgggtcattaattaagaaggcaggagatttttgtccctgacatcatttaattccctctagtcactgcacagaacaagaaaaatgaagtgagttaatctgtaatttgagaacagaagttataactatatgtgactcagatcacagttacrtcttttggggttccaacagcttttaaattttacttatgttcatttttcttttctttttttggtttttttttttttttttttttgagatttcactcttgttgcccaggctggggtgcaatggcgggatctctgctcttggcaacctctgcctcccaggttcaagtgattctcctgcctcagc

SEQ ID NO: 919209 - DNA, 622 bp, Homo sapiens
gtttgctgaactgaaaaacacatcacagcagaatggacaaaggagtggaatgattcagggagctaaaagcctatctgaaaatacaccattggaggagaaaaaagaaaaataagactgaaagtaagtgaagtctgactataagatattaaaaaaaaaaggctgggcacggtggctcacacctgtaatcccagcactttgggaggccaaggcgggcagatcacgaggtcaggagatcaagaccatcctggctaacatggtgaaaccctgtctctaataaaaatacaaaaaaaaaaaaaaaattagccagcatggtggcgggtgcctgtagtcccagctactcgggaggctgaggcaggagaatgatgtgaactcrggaggtggagcttgcagtgagccgagatcgcaccactgcacaccagcctgggtgacagagcaagaatctgtcaaaaaaaaaaaaggtattaaaaaaaccttaaaagatcaaacataagaattattagtattcaagggggagctgaataaggaagtttactgaaagaaataataatagaaaacattccaaaacttgagacaggtacaaatagccaggttcatgagggtctgagaataccaaacagatacc

SEQ ID NO: 919210 - DNA, 551 bp, Homo sapiens
tgaagtgaggattttctgaattatctaatatcatctaggttttctttaaaattttattttgttcttcagttcaagcatcttctcactaatgtttttcactataacagagaattcatttcaatttgagttggttctctcaatgatctattgatcattacaccctaactctccttccttggctcaaacaatattttccctataacaaaggcaataggacacaaaattcacatcctgctgggccttttttcatcaagtcagggtgatataaaaacattggaagtcttttcaccaaaccctgactttattgaatgctagtagaagatgtagaattagagacatctgatttgtttatcaccttagcasaaaaaccacagtccaaaagacaagcaaattaagaatggagcttaaccatgcctccattgggaagtctagactttgagccaggtacagtaagaaaaattagcctctgattcattaagtttgccacatgacttattttgatattttggatacattaactcacttaggagaattcagaaaagaatgggtga

SEQ ID NO: 919211 - DNA, 551 bp, Homo sapiens
tgaagtgaggattttctgaattatctaatatcatctaggttttctttaaaattttattttgttcttcagttcaagcatcttctcactaatgtttttcactataacagagaattcatttcaatttgagttggttctctcaatgatctattgatcattacaccctaactctccttccttggctcaaacaatattttccctataacaaaggcaataggacacaaaattcacatcctgctgggccttttttcatcaagtcagggtgatataaaaacattggaagtcttttcaccaaaccctgactttattgaatgctagtagaagatgtagaattagagacatctgatttgtttatcaccttagcagaaaaaccacagtccaaaagacaagcaaattaagaakggagcttaaccatgcctccattgggaagtctagactttgagccaggtacagtaagaaaaattagcctctgattcattaagtttgccacatgacttattttgatattttggatacattaactcacttaggagaattcagaaaagaatgggtga

SEQ ID NO: 919212 - DNA, 551 bp, Homo sapiens
tgaagtgaggattttctgaattatctaatatcatctaggttttctttaaaattttattttgttcttcagttcaagcatcttctcactaatgtttttcactataacagagaattcatttcaatttgagttggttctctcaatgatctattgatcattacaccctaactctccttccttggctcaaacaatattttccctataacaaaggcaataggacacaaaattcacatcctgctgggccttttttcatcaagtcagggtgatataaaaacattggaagtcttttcaccaaaccctgactttattgaatgctagtagaagatgtagaattagagacatctgatttgtttatcaccttagcagaaaaaccacagtccaaaagacaagcaaattaagaatkgagcttaaccatgcctccattgggaagtctagactttgagccaggtacagtaagaaaaattagcctctgattcattaagtttgccacatgacttattttgatattttggatacattaactcacttaggagaattcagaaaagaatgggtga

SEQ ID NO: 919213 - DNA, 676 bp, Homo sapiens
ctttcaccattgcaattccgctgtcttgataaatgggctctgtctgggcagcaggcaaggtgaacgcactgggtggttacaaatttggcgtgtcagccgggaaagctcttgtggctacctgcctgttgttcggtggcccccsactccagcgatggatccagaagccagcccaagtggctgcctagttctcttggactgggggctggctctggtactctctctactggctgggcactgctaactcaatgcccatggatttaattgcaatggagaaataatcgtggggagacatcccctaactatagccctatcatagagtgtctgcctgtagccctattgtggggtatctgtctgtctgtagccccattgccaggtgtctggattgatgagtatcctagccactgccaacgcctccttccttctcctgaccggttctgtagccctgtggtggggtgtctgtagctccgttgcggggtgtctgtttgtagctccaccatgaggtatctgtgtctgtaatcccactgtgggttgtctggctcctgggcggtctcagttggctctttctaactagtagaaagagtcttggtttcagagacttctcaatcaggaacacttcgaggaggtttcttaagtggagaataggaggatagtttggaagggatactcttggagttct

SEQ ID NO: 919214 - DNA, 676 bp, Homo sapiens
ctttcaccattgcaattccgctgtcttgataaatgggctctgtctgggcagcaggcaaggtgaacgcactgggtggttacaaatttggcgtgtcagccgggaaagctcttgtggctacctgcctgttgttcggtggcccccgactccagcgatggatccagaagccagcccaagtggctgcctagttctcttggactgggggctggctctggtactctctctactggctgggcactgctaactcaatgcccatggatttaattgcaatggagaaataatsgtggggagacatcccctaactatagccctatcatagagtgtctgcctgtagccctattgtggggtatctgtctgtctgtagccccattgccaggtgtctggattgatgagtatcctagccactgccaacgcctccttccttctcctgaccggttctgtagccctgtggtggggtgtctgtagctccgttgcggggtgtctgtttgtagctccaccatgaggtatctgtgtctgtaatcccactgtgggttgtctggctcctgggcggtctcagttggctctttctaactagtagaaagagtcttggtttcagagacttctcaatcaggaacacttcgaggaggtttcttaagtggagaataggaggatagtttggaagggatactcttggagttct

SEQ ID NO: 919215 - DNA, 586 bp, Homo sapiens
gaggtgggcagatcacttgagatcaggagtttcaaaccatcctggccaacatggtgaaactccatctctaccaaaatacaaaaattagggcatggtggtgcatgcttataatcccagctacttgggaggctgaggcaggaggattgcttgaacccaggaggtggaggttgcaatgagtcaagatcacrccactgcactccagcctgggcaacagagcaagactccatctaaaaatatatataataaaagaaaaataaaaagtttatatggaaaggcaaaagatccagaatagataacacaatattaagtgagaaggacattcagaggactgacttcaagttttataaagctacagtaatcagaagactgtataatatcggtgaaaaaatagataaatagaccaatggaacagaatagagaaatcagaaatcgacccacacaaataatgtcagctttggtaaagaagcaaagataatagagtggagaaaatatagtctttttaacaaatgatgttggaacaactgggcatccacatgcaaaaagaagaaaagaaaaagaaaaaaatgaacctggatatagatattat

SEQ ID NO: 919216 - DNA, 729 bp, Homo sapiens
ccaagataaattgaaaactaacagggagacagtatgtcaatttcaaagatactggtattataatagctgtggttttaaaatacaaatcccagtcattcgctttgtgggaaaattggtacaagaatatttgatggctaaaagactgaagagcaccaaggctccaacacaagaaccgacagtctggagatgccagctcctggcagggaagagacctcggaaccagttcagctttttgctctgtcactgcactctgccatttagttctggttggggagaaggcagagactgactgagctgacatctctgactgtgatttttacatcttcaaaaacagcagcaatttctccattatggtgtcctttaagattgatttcattgcaacatctgagacttgtattatctaatgacacaagagtaacatggtaacaaaagcgctcggggtcaccctgtttgactatcttcacagttagccttaaaggcttcagtctgggacagttattctgaggtttcttamcgataatgacaggaggcagacaaatgcctagatagacacgggcaggtcctggcgaaaccccacctccaagttgcagacagtttaaagcctgaaagccaagctacaagttaaatcctcggactggattgagaccccacctgcccgtttggcacactttcctctgattgatccccaccgttcacctatttttcatatacccacactttcctaattgg

SEQ ID NO: 919217 - DNA, 517 bp, Homo sapiens
gaacaaaggtgaaagttccaggagaggctgtcagggagataacagagtgattatgaaaggatttgaaagtcataataaaatatttggcttttattctgagtgagttggaataccactggagaaattttaagaggaagaattaaaagtttctaaagcctaactctggtttctgtattgagactaggttaggctatggggttaggggaacgaacagggtgaatatataagaccataatcatatttctttttacaaggctattgaataattcaagttagaacttacgttggcttcaacaagagtagtagcagtggagttggtgagaagtagccagattctggatataccttgaargtggagtcaaaaagatttgaaaggaagatcagaagttcactttgaggcatgttaagtgtgggatgcctattaagcacctgagaggaactaacgagtagatagtttgagatatgattctggagctcaggagagaagtccacactgaagaaatgtttcgcaatcatt

SEQ ID NO: 919218 - DNA, 591 bp, Homo sapiens
tagaagaactatctctgtgtcagaaactcctttctgtgcactgaagagctagctgtgaaccagcaacaaagattccactctcctagagctactatttttgtggcaggaaatagacagtaaacaaatcaataaatgagataattttagattttgttgagtgctatgcargaagaaaacatatgttagagttggggtcagcaaactacagcctatgagctatatctggtgactgcctgttttataaataaagttttattggacacagccttgttaattcatttacttatgatctatagttgctttcacactacaaaagcagagttgggtaattttggcagagactgtatggcctacaaagcctaacttatttattacgtcaccctttacagaaaaggtttgctggtccctgtgacagagagtgacagggaatggggtcacagcttagatagggtggtcagggaagactgaagacttctctgaggaagtgacatttgaagtaagacctgaaatattatactgtatttttcccattagctcattagcttcctggggtcagaggtgatgctatcttcatctgtgagttcttacagt

SEQ ID NO: 919219 - DNA, 471 bp, Homo sapiens
ttgcataggaccattactaataacactattttaatatgaccttcaggatgtagacgttgttattttaataaaaggaaagaatttgatggttcattttaaactattatgtgaattcttagcctaaagactattacacattctataatgtgaagaaatttctaatagataaccattatgaaataacctgattacattttaaaargtgagcagtgactattttataaatgtttcctgagaaacttgattcagttcttctagttttccatatagctaacccttttaaattgagtcagaattacatatagttcagggcaccatgttagatgttaaatgacaagagtttctttatttgctttgagacaggttcttgctcctgtcactcaggctggagtgcagtggcaagatttgcagcttcaacttcccaagctcaggtgatcctcccacctcagcctccagagtagctgggactac

SEQ ID NO: 919220 - DNA, 471 bp, Homo sapiens
ttgcataggaccattactaataacactattttaatatgaccttcaggatgtagacgttgttattttaataaaaggaaagaatttgatggttcattttaaactattatgtgaattcttagcctaaagactattacacattctataatgtgaagaaatttctaatagataaccattatgaaataacctgattacattttaaaaagtgagcagtgactattttataaatgtttcctgagaaacttgattcagttcttctagttttccatatagctaacccttttaaattgagtcagaattacatatagttcagggcamcatgttagatgttaaatgacaagagtttctttatttgctttgagacaggttcttgctcctgtcactcaggctggagtgcagtggcaagatttgcagcttcaacttcccaagctcaggtgatcctcccacctcagcctccagagtagctgggactac

SEQ ID NO: 919221 - DNA, 550 bp, Homo sapiens
ctttccctgctgtggcctcacattcatgtaacacatgtgctttgtaagccttaggccatctgattaccctaaaaggaaatacccaacataggggaaaatatggggcttagtacaggctaatggttgaaattccttggtgtaagattaaccatgctgcaaaatgccaaagaaaaatacaaaagtcatgaggacgttcagcaaggttgtctttttcattattattattattattatactttaagttctgtggtacatatgcacaacgtgcaggtttgttacatatgtrtacatgtgccatgttggtgtgctgcacccattaacttatcatttacattaggtatatctccctaatgctatcccccactccccccaccccaccacatgccccggtgtgtgatgttccccaccctgtgtccaagtgttctcattgttcagttcccacctatgagtgagaacatatggtgtttgattttctgtccttgcgatagtttgctcagaataggatctagaactagaaataccatttgacccagccatcccattactgggt

SEQ ID NO: 919222 - DNA, 550 bp, Homo sapiens
ctttccctgctgtggcctcacattcatgtaacacatgtgctttgtaagccttaggccatctgattaccctaaaaggaaatacccaacataggggaaaatatggggcttagtacaggctaatggttgaaattccttggtgtaagattaaccatgctgcaaaatgccaaagaaaaatacaaaagtcatgaggacgttcagcaaggttgtctttttcattattattattattattatactttaagttctgtggtacatatgcacaacgtgcaggtttgttacatatgtgtacatgtgccatgttggtgtgctgcacccattaacttatcatttacattaggyatatctccctaatgctatcccccactccccccaccccaccacatgccccggtgtgtgatgttccccaccctgtgtccaagtgttctcattgttcagttcccacctatgagtgagaacatatggtgtttgattttctgtccttgcgatagtttgctcagaataggatctagaactagaaataccatttgacccagccatcccattactgggt

SEQ ID NO: 919223 - DNA, 572 bp, Homo sapiens
actcttgaaaaatacctgggtgttacctgagaccagttgttctgaatgtatttaaaagttttccagccaggagaggtggtgcatgccctgttatcccagcactttgggaggctgtagttgagaggatcacttgagcccaggattttaagaccggcctgggaaacatagtgagattctgtctctacaaaatactactactactactactactaataataatgttttccartaactgaattgagcataaattttaaaattgaaattaagtcagaatctctggggttggggcctgatcatccatttctttaggaaactttcttttttttttttctttttgcgacaaagtcttgctctgtcacacaggctggagtgcagtggcacgatctcggctcactgcaacctctgcctcctgggttcaagtgattctcctgtcgcagcctcccaagtacctaggattacaggtgcataccaccacacccacctagtagagataggggtttcaccatgttggccaggctagtcttgaactcctgacctcaaatgatcctcccaccttggcctcccaaagtgct

SEQ ID NO: 919224 - DNA, 702 bp, Homo sapiens
cagggagcacaaggggtccgggaattccctttcctattcaaagaaagggctggcagatggcacctggaaaatcaggtcactcccacactagtactgtgcttttccaacggtcttaggaaatgggacaccaggagattatatcacacacctagtttggaaggcctacacccacggagcctcactctttgctagcacagcagtctgagatcaaactgcaaggcgacagtgaggctgggggaggggagcccatcattgctgcggcttgagtaggtaaayaaagtggctgggaagttcgagctgggtggagcccactgcagctcaaggaggcctgcctgcctctgtagactctgcctgtgggggcagggcatagccaaacaaaaggcagcagaaacctatgcagacttaaatatctctgtctgacagctttgaagaaaatagtggttctcccagcacgcagcttgaaatctcagaacagacagactgcctcttcaagtgggtccctgaaccccacatagcctaactgggaggcaccccccagtagctgcagactgacacctcacatggctgggtactcctctgaggcaaaacttccagaggaacaatcagccagcaacatttgctgttcaccaatatctgctgttctgcaggctccgccgctgatacccagggaaacagggtctggagtggacctccagcaaactc

SEQ ID NO: 919225 - DNA, 592 bp, Homo sapiens
cactgtaagaactcacagatgaagatagcatcacctctgaccccaggaagctaatgagctaatgggaaaaatacagtataatatttcaggtcttacttcaaatgtcacttcctcagagaagtcttcagtcttccctgaccaccctatctaagctgtgaccccattccctgtcactctctgtcacagggaccagcaaaccttttctgtaaagggtgacgtaataaataagttaggctttgtaggccatacagtctctgccaaaattacccaactctgcttttgtagtgtgaaagcaactatagatcataagtaaatgaattaacaaggctgtgtccaataaaactttatttataaaacaggcagtcaccagatatagctcataggctgtagtttgctgaccccaactctaacatatgttttcttcytgcatagcactcaacaaaatctaaaattatctcatttattgatttgtttactgtctatttcctgccacaaaaatagtagctctaggagagtggaatctttgttgctggttcacagctagctcttcagtgcacagaaaggagtttctgacacagagatagttcttcta

SEQ ID NO: 919226 - DNA, 548 bp, Homo sapiens
ttcagaaaccttgtgccatcaagccacccaagcactcttaaatttccttgccacctgtggctacaaggtttccaaaccaaagctcaactctgctcagaacaggctaaatacttagggctaaaattatccaaaggcaccagggccctcagtgaggaacgtatccagcccatactggcttatcctcatcccaaaaccctaaagcaactaagagggttctttggcataccaggcttctgccgaatatggattcccaggtamggcgaaatagctaggccattatatacactaatttaggaaactcagaaagccaatacccatttagtaagatggacacctgaagcagaagcggctttccaggccctgaagaaggccctaacccaagccccagtgttaataagcttgccaacggggcaagactttcctttatatgtcacagaaaaaacagaaatagctctaggagtccttacacaggtccaagggacaagcctgcaacccatggcatacctgagtaaggaaactgatgtagtggcaaagggttggcctcattg

SEQ ID NO: 919227 - DNA, 495 bp, Homo sapiens
tgcccgttcagaaaccttgtgccatcaagccacccaagcactcttaaatttccttgccacctgtggctacaaggtttccaaaccaaagctcaactctgctcagaacaggctaaatacttagggctaaaattatccaaaggcaccagggccctcagtgaggaacgtatccagcccatactggcttatcctcatcccaaaaccctaaagcaactaagagggttctttggcataccaggcttctgccgaatatggattcccaggtacggcgaaatagctaggccattatatacactaatttaggaaactcagaaagccaatacccatttagtaagatggacacctgaagcagaagcrgctttccaggccctgaagaaggccctaacccaagccccagtgttaataagcttgccaacggggcaagactttcctttatatgtcacagaaaaaacagaaatagctctaggagtccttacacaggtccaagggacaagcctg

SEQ ID NO: 919228 - DNA, 598 bp, Homo sapiens
agccccagtgttaataagcttgccaacggggcaagactttcctttatatgtcacagaaaaaacagaaatagctctaggagtccttacacaggtccaagggacaagcctgcaacccatggcatacctgagtaaggaaactgatgtagtggcaaagggttggcctcattgtttacaggtagtggcggcagtagcagtcttagtatctgaagcagttaaagtaatacaggaaagagatcttactgtgtggacatctcatgatgtgaatggcatactcactgctaaaggagacttgtggctgtcagacaaccgtttacttaaatatcaggctctactgcttgaaggaccagtgctgcgactgtgcacttgtgcaactcttaacccagccacatttcttccaggcaatgaagaaaagatakaacataactgtcaacaagtaattgttcaaacctacgccactcaaggggaccttttagaggttcccctgactgatcccgacctcaacttgtatactgatggaagttccttcgtagaaaaagggcttcaaaaagtggggtatgcagttgtcagtgataatggaatacttgaaagtaatcccctc

SEQ ID NO: 919229 - DNA, 614 bp, Homo sapiens
ttaacttttactcagagaagttgctcctcatttctttaatcactatagtttccctttggaatcctgtccaatttctccacataccttattaatagggactaaaagtatggaattatttaaaattgcaagtgatgcatcttttattaacctccatattctaccaaaggaaatgttgtaataaaaatggcaataaagtgctctctgtattgtccaattggtcagaactggkgcactatttatggattacttataggtaattactggtaattataataatagctatgatgcaatgaacgtttcctatgttccaggcactgaatattttgctgtcaaatcctggcaacaactcaaaaaggtaggtatttttatcctagtttttttaaaatttatttatttatttactttttattattatactttaagttctagggtacatgtgcacaacgtgcaggtttgttacatatgtatacatgtgccatgttgatgtgctgcacccattaactcgtcatttacattaggtatatctcctaatgctatccctccccctccccccaccccacaacagggtgtgtgatgttccccttcctgtgtccaagtgttctcattgttccatt

SEQ ID NO: 919230 - DNA, 425 bp, Homo sapiens
aatacctcatttattgaaagttttttagcatgaaaggctgttggatattgttgaaggccttttctgtatctattgagataatcatgtggttttggtcactggttctgtttatgtgatggattacgtttattgatttgcgtatgttgaaccagccttgcatcccagggatgaagccaacttgctcgtggtggataagctttttgatgtgctgctgcattcggtttgccagtattttattgaggatttttgcatcgatattcatcacagatattggcctaaaattctctttttttgytgtgtctctgccagactttggtatcaggatgatgctggcctcataaaatgagttagggaggattccctctttttctactgatcggaatagcttcagaaggaatggtaccagctcctctttgtacttctgg

SEQ ID NO: 919231 - DNA, 570 bp, Homo sapiens
gtcaactctttgccccgggcccctcccctccctctcaacccaaccctctccctgctgccccctcactagtcccacagatctggctggtgcactgcgttaggctccagatggacaaggtccctgtctttctgggtttgggttcttgtggctatgggttgggggtgagtgcagacaatgaacacatgagtaaatgaagcagatgatttcaggtggcgctgtggggaaatacaacaggatgatgcaaaaagggatcaaggaaggtgggcttggtggggtgcagtatatcacgtgtggactggggtcagrgaaagtctctgggacttttgaataaaggaagggagtgagtgggcaaagctgtctttttaagagcctcagaaggtgggtcacgcctttgttggggagactgggtgcagtaaccttgctgcatttgcctgtacttacctggccacaggaggggaccatgggccacccaccagaaagggtggcggggttttttttgtttgtttgttttgagatggagtctcattctgtcgcccaggctggagtgcagtggtgcaatctcagctcact

SEQ ID NO: 919232 - DNA, 822 bp, Homo sapiens
gcctttgctattaatcactatactgtatattagagggcaggatgcaagttattctcctttttatttttatttttgtgggatggaatctcactctgttgctcatgctggagtgcagtggcgtgatcttggcttactgcaacctccacctcccgggttcaagcaattctcctgtgtcagcctcatgagtagctgggactacaggtgcccaccaccacgcctggctaattttttgtatttttggtagagacggggttttaccatgtaggcctggctggtctcgaactcttgacctcaggtgatccacccgcctcagcctaccaaagtgctaggatwacaggtgtgagacaccgcgcctggccagggccgcttcttaaggtgagtgctccccaagactctgttcttgggctacttccagtcccgcttcccacttcctcctgggcaagcaactgacagccctgatgctatccatcttctgtctccagctcccacacctcttgctccgtgagttcggatctgtggatcctaccttgtgcctattggattttattgcatggacatcccacaagcgtaacaaataaacgtctacaacttcttctcaaggcggttcctgcctctggatttgttatacctggacagggcatgacccctgggctaagaactcaagccgtaaatctgagtatcagccttgtttagttttctccatctccatcagtgatcaagtgctgtgtgacaagtcaccccagtatgtagtggtttaaacccaccatggtttattgcttcctgtgactcttctggtttcacctgggctcccttaatgtggct

SEQ ID NO: 919233 - DNA, 822 bp, Homo sapiens
gcctttgctattaatcactatactgtatattagagggcaggatgcaagttattctcctttttatttttatttttgtgggatggaatctcactctgttgctcatgctggagtgcagtggcgtgatcttggcttactgcaacctccacctcccgggttcaagcaattctcctgtgtcagcctcatgagtagctgggactacaggtgcccaccaccacgcctggctaattttttgtatttttggtagagacggggttttaccatgtaggcctggctggtctcgaactcttgacctcaggtgatccacccgcctcagcctaccaaagtgctaggataacaggtgtgagmcaccgcgcctggccagggccgcttcttaaggtgagtgctccccaagactctgttcttgggctacttccagtcccgcttcccacttcctcctgggcaagcaactgacagccctgatgctatccatcttctgtctccagctcccacacctcttgctccgtgagttcggatctgtggatcctaccttgtgcctattggattttattgcatggacatcccacaagcgtaacaaataaacgtctacaacttcttctcaaggcggttcctgcctctggatttgttatacctggacagggcatgacccctgggctaagaactcaagccgtaaatctgagtatcagccttgtttagttttctccatctccatcagtgatcaagtgctgtgtgacaagtcaccccagtatgtagtggtttaaacccaccatggtttattgcttcctgtgactcttctggtttcacctgggctcccttaatgtggct

SEQ ID NO: 919234 - DNA, 822 bp, Homo sapiens
gcctttgctattaatcactatactgtatattagagggcaggatgcaagttattctcctttttatttttatttttgtgggatggaatctcactctgttgctcatgctggagtgcagtggcgtgatcttggcttactgcaacctccacctcccgggttcaagcaattctcctgtgtcagcctcatgagtagctgggactacaggtgcccaccaccacgcctggctaattttttgtatttttggtagagacggggttttaccatgtaggcctggctggtctcgaactcttgacctcaggtgatccacccgcctcagcctaccaaagtgctaggataacaggtgtgagacaccgcgcctggccagggccgcttcttaaggtgagtgctccccaagactctgttcttgggctacttccagtcccrcttcccacttcctcctgggcaagcaactgacagccctgatgctatccatcttctgtctccagctcccacacctcttgctccgtgagttcggatctgtggatcctaccttgtgcctattggattttattgcatggacatcccacaagcgtaacaaataaacgtctacaacttcttctcaaggcggttcctgcctctggatttgttatacctggacagggcatgacccctgggctaagaactcaagccgtaaatctgagtatcagccttgtttagttttctccatctccatcagtgatcaagtgctgtgtgacaagtcaccccagtatgtagtggtttaaacccaccatggtttattgcttcctgtgactcttctggtttcacctgggctcccttaatgtggct

SEQ ID NO: 919235 - DNA, 572 bp, Homo sapiens
tgacgctgcccaatcgcctcagaagccccctggaccatcacagacgccaagcttcaggtaactctcacagtggagggtaagtccatccccttcttaatcaatatggagactacccactccaccttaccttcttttcaagggcctgtttcccttgcctccatgacgggtgtgggtattgaccggcgtgcttctaaacctcttaaaactccccaacgctggtgccagcttggacaacatacttttaagcactcctttttagttakccccacctgcccagctcccttttttggttgagatattttaactaaattatctgcttttctgactattcctgggctacagccacacctcattgccaccttttctcccagttcaaagcctccttcacatcctctccttggatctccccaccttaatccacaagtataggatacctctactccctccttggcaacaaatgatgcaccccttatcatcccattaaaacctaatcacctttaccccactcaacaccaatgtcccatcccacagcatgctttaaaaggattaaagccagttatcactcacctgtt

SEQ ID NO: 919236 - DNA, 569 bp, Homo sapiens
aggctggggtgcagtggcacaatcatggctcatttcagccttgaatttccaggtcaagcaatcctcctgcctcagcctcctaagtatctggaactgtaggcatgtaccacaatgcccatatttttgaagagacagggtctcactgtgctgcctaggctggtctgtaactcctggtctcaagtgatcttcccacttgggcctcccaaagtgctgggattacaggtgcaagccactgtgcctggcctctggggacttttaaaggtttaatccagctaagcatatttatatatgtaatgcagggaaagcgtattatttttatattaataatagatcacggcatcttggcaggctgcatgagcttcaggtggtttggaggatggtgatgtttttggacttcaggctttgcgtttctcagctcttccttttcwtcctctcttaagatagcttaccccttgggccctcaagttctcttttacccacagctctgtctttatgcttgcttcctgtgtagctatgcagagagggaagaattcattaagtagagaaagatgaaatggttggaccgagta

SEQ ID NO: 919237 - DNA, 599 bp, Homo sapiens
cctgcctttggcctcagcttagtatcacaagccctaggacgggtagctgcctccccttcctgttcccagggaccgtagtcttcctgctgtgccactggccactttgtctgagaaccgttgaccacctagatccccaygagatagggagctctgtgagggcaggggcaggggcaggggcagggtccttgtcacactgatgcccagagctcagatcagtgcctggcacaccgttgctcaataaatgtttgttgaatgaatgaagaaacgtgaatgaatgactgaataagtaaatgaattagtgcttccaggcctgtgcagggaggtgcatttgacctcttctgtggtttagctgtgtccccacctaaatctcatcttgaattgtagctcccataattcccacatgttgtgggagggacccagtgtgagataattgaatcacagaggttgttcccctctcctgttcttgtggtagtgagtctcatgagatctgatggttttatgagaggtttcctctttctcttggctctcattcactctcttgtctgccgccatataagacatgcctttcgccttctgccagattgggaggcctccccagt

SEQ ID NO: 919238 - DNA, 482 bp, Homo sapiens
cctaataccctccgaatgagatggggctgtattattgctttcaaaaactcttagagaacagatgctttctacagataaagtcaatttctgcaaagaggatatcatgataaacattctgagtcatctgaatttaaggttgcagattttcatattaaaaaggtgagaaagcccagggcagagctgtgtcccgkgtgtgcctggtcttctgtgctgggactgtccgtgctcatcaagcctgggtcagcgtcccttgttgagcagctagctcagagtaagtgtgcatccccccacctggccatttgtctacacgccaggctgtttgccaagcatggtgaaacctgacatcacccagagacacagttatcatcacatattaagtctgtctgtcctcaagataggggacagaagcaaaccaacatgtctaacacagcagagcgagtgccagccaatgctccctgacaccaggacactacatgggccca

SEQ ID NO: 919239 - DNA, 576 bp, Homo sapiens
ttgctcccatttttttactattataaataatgctgctatgaacattcacatacaagcctttttatggacatatgttttcatctttcttaggtacacgagagttgaactgttgggtcatatggtgatttttacgggttcatttgttgtgtttttgtttcagacagtgttgctttatcacccaggctggagtgcggtggtgccatctcagcttactgcaayctccgcgtttgtgtattatttgtttctttcagacagagtcttgctctgttgcccaggctagaatgcagtggtgtgatcacatgtcactgcagccttcatctcctgggctcaagctatcctcccacctcagcctcccaagtagctgggactacaggcctgcaccaccatgccgtgctatttttttattttttacagagataggatctccctatgttgcccagtctggtctcaaactcctatgctcaagacagcctcccacctcagcctcccaaagtgttaggattacaggcatgagccacctcacccagatgactttatgtttttaaggaactgcccaacttcttgccaatgtggcca

SEQ ID NO: 919240 - DNA, 575 bp, Homo sapiens
atggtcccctcctccatgttcagagtcagaattcactgcactgccttcaaatctctgactctgttccctcttcctcgtccttctactttagaagacacttgtgattccatcaggcacccagatgaccaagaggatcttattttaaggtgagccaatagcaaccttaatttcatctgcaaccttaattcccgcttgccattttacataacatacccacagattccagagactggcatgcagacttgtatrggagccatcattctgcccccgtgaaaggcatcatggcccagttagaagcagagagaaggcacaggtggtagttaggagagtgggtcctgatgcaatcacctgggttcaagttcaccagccaaggtactttgggcaactcacttcacttcactttctgagctttagtctcctcgttgtgtaaatgggacatgaggccagaggccagacttggtggatcatgcctgtaattccagcattttggcagagtgaggagggaggagtttcttgaagccagaagttggagaccagtctgagcaacatagtgagaccccatctctgcaaaaaat

SEQ ID NO: 919241 - DNA, 575 bp, Homo sapiens
atggtcccctcctccatgttcagagtcagaattcactgcactgccttcaaatctctgactctgttccctcttcctcgtccttctactttagaagacacttgtgattccatcaggcacccagatgaccaagaggatcttattttaaggtgagccaatagcaaccttaatttcatctgcaaccttaattcccgcttgccattttacataacatacccacagattccagagactggcatgcagacttgtatgggagccatcattctgyccccgtgaaaggcatcatggcccagttagaagcagagagaaggcacaggtggtagttaggagagtgggtcctgatgcaatcacctgggttcaagttcaccagccaaggtactttgggcaactcacttcacttcactttctgagctttagtctcctcgttgtgtaaatgggacatgaggccagaggccagacttggtggatcatgcctgtaattccagcattttggcagagtgaggagggaggagtttcttgaagccagaagttggagaccagtctgagcaacatagtgagaccccatctctgcaaaaaat

SEQ ID NO: 919242 - DNA, 575 bp, Homo sapiens
atggtcccctcctccatgttcagagtcagaattcactgcactgccttcaaatctctgactctgttccctcttcctcgtccttctactttagaagacacttgtgattccatcaggcacccagatgaccaagaggatcttattttaaggtgagccaatagcaaccttaatttcatctgcaaccttaattcccgcttgccattttacataacatacccacagattccagagactggcatgcagacttgtatgggagccatcattctgcccccgtgaaaggcatcatggcccagttagargcagagagaaggcacaggtggtagttaggagagtgggtcctgatgcaatcacctgggttcaagttcaccagccaaggtactttgggcaactcacttcacttcactttctgagctttagtctcctcgttgtgtaaatgggacatgaggccagaggccagacttggtggatcatgcctgtaattccagcattttggcagagtgaggagggaggagtttcttgaagccagaagttggagaccagtctgagcaacatagtgagaccccatctctgcaaaaaat

SEQ ID NO: 919243 - DNA, 454 bp, Homo sapiens
atgatcatccttgaaacaagtggaaaaaaaaagaagtccagcaaagacctagatagttttgacaaagaaataggagatacaaggaggcactaaatggaaattttagaaatggataaaggagaaaatcttaaaacccaatgaataggcctaacagcagaagagagaagagaaaaaaagaatcagtgaaatagragatagaataataaaaatcacccagagtttcaggggccagtgggactataacatttttgtgattcaagtcccagaaggagataaaaaaaaaagagggcaggattgaaaatgtactcaaaagagtgatggctgaaaaattcccaaatttggcaagagatgtagatgtattcgagaagctgagtgaaactcaaaaggaataaacacaaggaaatccacaccaagacaaatcatattccaactcctgaaaactccaggacaggaa

SEQ ID NO: 919244 - DNA, 607 bp, Homo sapiens
aatcacttgaacctgcgaggcggaggttgcagtgggcagagatcgtgccactgcactccagcctgggtgacagagtgagactctgtctcaaaaaaaaccaaaccaaaccaaaacaaaagaagacatgtccatgaatatgccagcactatktcagaatgggcccatcaagaatcaaacagataaagagtggttggcatgctcctgtgacagattattatacaccaatgagaggcatgatctctaactagaggcaataatgtgaaaagtgaaagatgtcaggtgcaaacgagtagaaactgtgattccatttccataaactagaaatcaggcaaaaccaacctatattattagacatcagcatcgtgatgacctgttggtggtaagggagggcctgaaggagcccaagagggaagcttctgaaatgctggaaatagtctgtttcttgatctgtgtgtgggttacacaagtgtgtttagttcatgaaaattcattaagcttctcacttatgagaagttttctaaatgtacgcagtaaagggttttgtaaaccagtactccgatggcatagctgttaagacaacaatgaaaagatgctagaagaagaaaaa

SEQ ID NO: 919245 - DNA, 642 bp, Homo sapiens
gacctctctaaatctcatgttcaaatctaatccccagtgtggtcgtgttgggagctgggatccagtgggaggtgtttggatcacaggggaaggagcgtgagtgagttcttgttctgttagttcccayagagctgattgttaaaaacagcctggcacctcccccctccctcttgctccctctcttgtcacatgacctctgcacatgctagctctcttccctcttatcctatgagtggaagcagcctgaggccctccccagatgctggtgccatgcttcttctacagcctgtagaactgggagccaaataaacctctttataaatcacccagcctcgggtattccttcacagcaacacacaaggtctaagacaaacgatatctcacttaatcttcacagcaactctctgagagagatgctgtcattatcttgattttatagtcaaggaaagtggggcagcgtgtccaaagtcatagagccaggaaggggcagagcccagactcaaaccaaggtggtctgcctcccagagccacgtctttggcctctaggcctgtcggcaccatcccaaccacacccttggaccaggccaatggcatccacctgcacctctccctcaccccctgagacccctccccatggcctgc

SEQ ID NO: 919246 - DNA, 573 bp, Homo sapiens
ccacattggcaagaagttgggcagttccttaaaaacataaagtcatctgggtgaggtggctcatgcctgtaatcctaacactttgggaggctgaggtgggaggctgtcttgagcataggagtttgagaccagactgggcaacatagggagatcctatctctgtaaaaaataaaaaaatagcacggcatggtggtgcaggcctgtagtcccagctacttgggaggctgaggtgggaggatagcttgagcccaggagatgaaggctgcagtgacatgtgatcacaccactgcattctagcctgggcaacagagcaagactctgtctgaaagaaacaaataatacacaaacgcggagrttgcagtaagctgagatggcaccaccgcactccagcctgggtgataaagcaacactgtctgaaacaaaaacacaacaaatgaacccgtaaaaatcaccatatgacccaacagttcaactctcgtgtacctaagaaagatgaaaacatatgtccataaaaaggcttgtatgtgaatgttcatagcagcattatttataatagtaaaaaaatgggagcaa

SEQ ID NO: 919247 - DNA, 631 bp, Homo sapiens
aacgtgttgtccatcagagttagaatggtaaataaattttgacaaaatcacgcagtacaatacatgcagcagtaaaagggatctgaattagagctactcacaactcggatggaacttacattgttgaaccaaaaaagcragacataaaagaatacacacactgtgattcagtttttacaaagttgagaaacaggcaacattgaactattttgttcagggatgcataccttggtgataaacctattaaaaaaaaaaagaggcaaggaaatgtttaccatagaagtctgtatggtgcttacctgtaggtgtcagggaggtgggatattatatggaagagatacaggggctttcagggtccagcagtgttaatttctttcccaggtgcatgggttttggtttcatagactgtttgttaaactctctatgtatgttgtgtacttaactgtatatatgtcacatttcacaattaaaaataattttaggctgggcatggtggctcacacctataatcccaggactctgggaggccaaggtaggaggatcacttgaggccaggagtttgaaaccagcctgggcagcatagcaagaccccatctctacaaaggaaaaaaaaatacaaaaattagcctgg

SEQ ID NO: 919248 - DNA, 631 bp, Homo sapiens
aacgtgttgtccatcagagttagaatggtaaataaattttgacaaaatcacgcagtacaatacatgcagcagtaaaagggatctgaattagagctactcacaactcggatggaacttacattgttgaaccaaaaaagcgagacataaaagaatacacacactgtgattcagtttttacaaagttgagaaacaggcaacattgaactattttgttcagggatgcataccttggtgataaacctattaaaaaaaaaaagaggcaaggaaatgtttaccatagaagtctgtatggtgcttacctgtaggtgtcagggaggtgggatattatatggaagagatacaggggctttcagggtccagcagtgttaatttctttcccaggtgcatgggttttggyttcatagactgtttgttaaactctctatgtatgttgtgtacttaactgtatatatgtcacatttcacaattaaaaataattttaggctgggcatggtggctcacacctataatcccaggactctgggaggccaaggtaggaggatcacttgaggccaggagtttgaaaccagcctgggcagcatagcaagaccccatctctacaaaggaaaaaaaaatacaaaaattagcctgg

SEQ ID NO: 919249 - DNA, 772 bp, Homo sapiens
ctcaaccaggtatttagactttattgcgaaagactacgcagacggaacagaattttgaaggggcaggaatttggattttgtaaatgtatattgtttgtcatccaatgtgcagaaacctttcccagacacaggaatcatgtatttatagttgccatggggtacagagtcaaaacgaggtatgcaagcagctcctgggcttataattttcttttttgttaaaattgtttgcatccagttatatcaggccagtcaaggctgtatcataaatatcataaaggcctcattaaggtatttggataattctcagccaagcacggtggctcatgcctgtagtcccagcactttgggaggccgaggcgggaggatcacctcaggtcaggagttggagaccagcctggccaacatgatgaaaccgctctactaaaatacaaaactttaactgggcgtggtggtggagatgcctgtaatcccagctactcgggaggctgaggcaggagaatcgcttgaacccaggaggtggggattgcagtgatctgaggttgtgccattgcactccagcctgggcaacaagagcaaaactccatctcaaaataataataataataattgagtamtattctattattttcttcccagttacaagcatttaagtttgattaatatatgtatgtagtacagaattcaaaagttattagaggacagaaactggaaagcctccctcctttctccgacacccagttcctctcccagagtcaagttactgttgcaccag

SEQ ID NO: 919250 - DNA, 565 bp, Homo sapiens
acacctgtaatcctagaactttgggaggccaaggcaggcaaattgctggagcccaggagttcgaaaccagcccgagcaatatggcaaaacctcatctctactaaaaacaaaacagaaaaaaaacaaaaaacagtatccaggtgtagtggcatgcacttgctgtcccgactactcrgaaggctgaggtggaagaatcgcttgagcctgggaggatgaggctgctgtgagctgtcattgcaccactgcactccagcctgggcaacagagccagaccttgtctctatagaaaacaaacaaaaaaccaacaataacaacaaaaattttacatctgctctatgaaagtgtcatatatgcaaagcagccctcaaatgccaaaggaacagagaaaccaaggaatgaggcagatgaaccagtttgtcaatgaagggtgatttatgagggaacttatacacagtagtttagtcttgagcatcagcaagacaggtagatctcagcacgattcctccccagacacaaggctcacctaccaaagggaaaggggctctatgctctatagagacaattc

SEQ ID NO: 919251 - DNA, 565 bp, Homo sapiens
acacctgtaatcctagaactttgggaggccaaggcaggcaaattgctggagcccaggagttcgaaaccagcccgagcaatatggcaaaacctcatctctactaaaaacaaaacagaaaaaaaacaaaaaacagtatccaggtgtagtggcatgcacttgctgtcccgactactcagaaggctgaggtggaagaatcgcttgagcctgggargatgaggctgctgtgagctgtcattgcaccactgcactccagcctgggcaacagagccagaccttgtctctatagaaaacaaacaaaaaaccaacaataacaacaaaaattttacatctgctctatgaaagtgtcatatatgcaaagcagccctcaaatgccaaaggaacagagaaaccaaggaatgaggcagatgaaccagtttgtcaatgaagggtgatttatgagggaacttatacacagtagtttagtcttgagcatcagcaagacaggtagatctcagcacgattcctccccagacacaaggctcacctaccaaagggaaaggggctctatgctctatagagacaattc

SEQ ID NO: 919252 - DNA, 599 bp, Homo sapiens
aatctaaaatagttatttttttgagaaattgccatactatttttacagagtagctgtaccattttacattcccgccagtaatacagaagcattctgatttttcacatcctcaccaacacttattatttttaataacagtcatcccaatagatgtgaagcagtatgtcattatgattttgatttgcatttccctaatgattagtgatgttgaacatcttttcatgtgctcattggtcatttgtgtatttcctttggagaaatatctgctgaagttctttgcactactcccccttttwtttgcgggagattggaattttattaatactcaaatcagtctccctgagcatttggggagcagagtttttagggataactttgtgggtgaggggaggccagtgagccgggagtgccgattggttggggatgaaatcatagggagttgaagctgtcttcttgtgctgagtcagttcctgggtaggggccacaagatcagatgaatgagtttattgatctgggtggtgtcaactgatccattaagtgcagggtctgcagaatatctcaagcactgatgttaggagcagtttagggagggtcagaat

SEQ ID NO: 919253 - DNA, 609 bp, Homo sapiens
ggaggtaattgaatcatgagggtggttacccctatgttgttctgctgatagtgagtcggttctcaggagatctgatggttttataaggagcttcccccgcttcactctgcacttctcgcttctgctgccatgtgaagaaggacatgtttgcttccccttccsacctgattgtaagtttcctgaggcctccccagtcctgtggaattgtaagccagttaaacctctttccttgataaattactcagtctcaagtatttcttcatagcagtgtgagaatggactaatacttctggtcctggaacgcttgtagaaaatcatttaaccatatatgggagggtttatttctgggatctctattctatttcattggtctatatgtctacctttctgccagtaagatacttttttggttattgtagctttgtaatatgttttgaagccaggacgtatgaggccttttctttttcaagattgtttggccatttggggatcctttaagattttatgtcaagttttttttatatttatgaaaaaatgtcattgggattttgatagggattgcattgaatctgaggatagctttggtcagtctagacattttaacaatat

SEQ ID NO: 919254 - DNA, 609 bp, Homo sapiens
ggaggtaattgaatcatgagggtggttacccctatgttgttctgctgatagtgagtcggttctcaggagatctgatggttttataaggagcttcccccgcttcactctgcacttctcgcttctgctgccatgtgaagaaggacatgtttgcttccccttccgacctgattgtaagtttcctgaggcctccccagtcctgtggaattgtaagccagttaaacctctttccttgataaattactcagtctcaagtatttcttcatagcagtgtgagaatggactaatacttctggtcctggaacgcttgtagaaaatcatttaaccatatatgggagggtttatttctgggatctctattctatttcattggtctatatgtctacctttctgccagtaagatacttttttggtyattgtagctttgtaatatgttttgaagccaggacgtatgaggccttttctttttcaagattgtttggccatttggggatcctttaagattttatgtcaagttttttttatatttatgaaaaaatgtcattgggattttgatagggattgcattgaatctgaggatagctttggtcagtctagacattttaacaatat

SEQ ID NO: 919255 - DNA, 567 bp, Homo sapiens
tgtactcggtccaaccatttcatctttctctacttaatgaattcttccctctctgcatagctacacaggaagcaagcataaagacagagctgtgggtaaaagagaacttgagggcccaaggggtaagctatcttaagagaggawgaaaaggaagagctgagaaacgcaaagcctgaagtccaaaaacatcaccatcctccaaaccacctgaagctcatgcagcctgccaagatgccgtgatctattattaatataaaaataatacgctttccctgcattacatatataaatatgcttagctggattaaacctttaaaagtccccagaggccaggcacagtggcttgcacctgtaatcccagcactttgggaggcccaagtgggaagatcacttgagaccaggagttacagaccagcctaggcagcacagtgagaccctgtctcttcaaaaatatgggcattgtggtacatgcctacagttccagatacttaggaggctgaggcaggaggattgcttgacctggaaattcaaggctgaaatgagccatgattgtgccactgcacccca

SEQ ID NO: 919256 - DNA, 465 bp, Homo sapiens
gctccagtttcagctgattggaaagacaggttgagcccaaaccgttcctcaagaaaacacaactgcaagaccagcccaaactggacctactctgttgataacagaaggtcaagttacctggcagatataactgagccaacacagcaagtcaggtatcccagacatgcacagttggaaaagctttgatgtctatcaacacccagaactagtgattcctcygcgcaaaaccaagaagtccaggacatgcccagaacttgaccaccggaactgtttcagaagcgaggggtccattggctaggaggatctggggttatgctttgcctcaacaggctcagcgcggtggctcatgcctgtaatcccagcactttgggaggccaagggcaggagttaagagaccagcctggccaacatggtgaaaccccgtctctactaaaaatacaaaaattaactggctgcgatggctcg

SEQ ID NO: 919257 - DNA, 567 bp, Homo sapiens
ccatcttacagttgagaaaactgaggccaggaggtgatgtgatgtactcaggttcctggctggcaggtgacagagctgggctaatcatatctatctatctatctatctatctatatagatagatatatatatatagatagatagatagatatagatatatatatagatatatatatagatatatatatagatatatatagatatatagatatatatagatatatatagatatatatagatatatatagatatatatagatatatagatatatatagatatatatagatatatagatatagatatagatatakatatagatatatatatatatagtttttttttttttttttgaggaaggttctcactctgtcacccagactagcatgcagtggcacaatcatggctcattgaagcctcaaactcctagggccaagtgatgctcccacctcagcctctggagtagctgggactacaggcaccaccggcatgcctggctaatttttaaattttttgtggagacaggagctccttatgttgcctaggctggtcttgaactcctgggctca

SEQ ID NO: 919258 - DNA, 607 bp, Homo sapiens
tcctaggctcaagtgatcctcctgcctcagcctcccaaggtgctggaattacaggcatgagcctctgtgcccggccaaaagctcagcactcttgggtctccatgcaagtttctctcctctcttggggcacccactgaggccccaattgtctctccagggcctgagccttttttttttttttgccccagacaacaacaagccaagatgccactcttctactckgcttgcaaaagaacctccttgtctagggttttctccaagacgcaccatggctgggctgttgctgtgtttcccgaaatttgaacctccatatcagtgtctgtccatcatctgagacccctggcacgagctgcggtggctcaaggcgggtttcttttcctgaggccagaaggggaagcgcaggtagggagtcgtgcctgtgggtaccgggaagccacaggttgctcaacctcccgagggggtaaccggggcttacggtgcagccaggccccctttggtttttaggaaatggtgaaagcggtgacaatgatgacgtggctttgaaagttccctctggtctctttcgcagcggccacaggacctgagccagcgcctcccttccagaacc

SEQ ID NO: 919259 - DNA, 457 bp, Homo sapiens
gctccagtttcagctgattggaaagacaggttgagcccaaaccgttcctcaagaaaacacaactgcaagaccagcccaaactggacctactctgttgataacagaaggtcaagttacctggcagatataactgagccaacacagcaagtcaggtatcccagacatgcacagttggaaaagctttgatgtctatcaacacccagaactagtgattcctcygcgcaaaaccaagaagtccaggacatgcccagaacttgaccaccggaactgtttcagaagcgaggggtccattggctaggaggatctggggttatgctttgcctcaacaggctcagcgcggtggctcatgcctgtaatcccagcactttgggaggccaagggcaggagttaagagaccagcctggccaacatggtgaaaccccgtctctactaaaaatacaaaaattaactggctgcg

SEQ ID NO: 919260 - DNA, 574 bp, Homo sapiens
actgttcccatcttacagttgagaaaactgaggccaggaggtgatgtgatgtactcaggttcctggctggcaggtgacagagctgggctaatcatatctatctatctatctatctatctatatagatagatatatatatatagatagatagatagatatagatatatatatagatatatatatagatatatatatagatatatatagatatatagatatatatagatatatatagatatatatagatatatatagatatatatagatatatagatatatatagatatatatagatatatagatatagatatagatatakatatagatatatatatatatagtttttttttttttttttgaggaaggttctcactctgtcacccagactagcatgcagtggcacaatcatggctcattgaagcctcaaactcctagggccaagtgatgctcccacctcagcctctggagtagctgggactacaggcaccaccggcatgcctggctaatttttaaattttttgtggagacaggagctccttatgttgcctaggctggtcttgaactcctgggctca

SEQ ID NO: 919261 - DNA, 742 bp, Homo sapiens
tagctgttattttcaatactcaatttgcaaaaaaatttgccataaattgaggaaaaaaactggagaacacaatgtaaaaaataagcctcttaagcatgcgcatagaattatggttctgccataacagaattagtgggttttagattccttgagacacaataatatgtattttagactatccagacatatcaagccaatgctttggaaactgactaaagaattaatgtacctggtttgtcttaaaacaattggttatagatgcaaatcaaaaccacaatgagataccatgtcacaccagtcagaattgctattacaaaaaagtcaaaaaataacagatgctggggaggttgtggagagaaaggaatgcttatacattgttggtggtagtgtaaattagttcagccattatagaaaacagtccaaggtttcctcaaagacctaaaaataaaaataccatttcacccagcaatccctttactgggtacatacccaaaggaatataaattgttctattataaagacacatgaacatgtatgcttgctgcagcactgttcacaatagcaaagatatgaaatcagcctaaatgcccatcartggtagaatgagtaaagaaaatctggtacatatgcaccatggaatactatacaaccatgaaaatgaatgaaatcatgtcctttgtaggaatatggatggagctggaggccattatccttagcaaagtaatgtaagaacagaaaacca

SEQ ID NO: 919262 - DNA, 767 bp, Homo sapiens
aagggagataagggtggggctgttttataggatttgggtaggtaaaggaaaattacagtcaaagggggtttgttctctggcgggcaggagtgggggtcgcaaggtgcccagtgggggtgctttttgagccaggatgagccaggaaaaggactttcacaaggtaatgtcatcagttaaggcaaggaccggccatttacacttcttttttggtggaatgtcatcagttaaggcggggcagggcatattcacttcttttgtgattcttcagttacttcaggccatctgggcatatatgtgcaagtcacaggggatgcgatggcttggcttgggctcagaggcctgacattcctgccttcttatattaataagaaaaataaaacaaaataatggtaaagtgttgggaaaattttgggggatggtatggagagagaatgggcgatgtttctcagggctgcttcaagcgggattaggggcggtgtgggaacctagagtgggagagattaagctggaggcaggtcttgtggtaaggggtgatattgtggggatgttagaagaaacatttgtcgtatagaatgattggtgatggcctggatacggttttgtatgaattgwaaaaactaaatggaataacagaaggagaaaaacaggtataaaaggtctaagaattgggacgactcaggatgtctgattagagagtgcttaaggagattcggcatagtcctgccagcaaagattatttatttacttcaagagttaagagtggcagt

SEQ ID NO: 919263 - DNA, 509 bp, Homo sapiens
tctcccacagttaccattgttcctggcccagacttcaatccggcctcccacattattcctgataccacacctgacccccatgattgtacctctctgatccacctgacattcactccatttccccaaatttccttctttcctgttcctcaccctgatcacacttggtttattgatggcagttccaccaggcctaatcaccacacaccagcaaaggcagrctatgctatagtacaagccactagcccgcctcttagaacctctcatttcctttccatcgtggaaatctatcctcaaggaaatcacttctcagtgttccatctgctattctactacccctcagagattgttcaggccccctcccttccctacacatcaaactcggggatttgccccacccaggactggcaaattgatattactcacatgccccaagtcagaaaactaaaatacctcttagtcttggtagacacagggtctaagaaggcgaccgtggtcatttcttcccttct

SEQ ID NO: 919264 - DNA, 640 bp, Homo sapiens
tctcagtgttccatctgctattctactacccctcagagattgttcaggccccctcccttccctacacatcaaactcggggatttgccccacccaggactggcaaattgatattactcacatgccccaagtcagaaaactaaaatacctcttagtcttggtagacacagggtctaagaaggcgaccgtggtcatttcttcccttctgtcagacataattcctcggtttggccttcccacctctatacagtctgataacggaccagcctttattagtcaaatcacccaggcaatttctctagctcttggtattcagygaactcatggtcttttaaaaactcacctcaccaacctcagccaccaacttaaaaaggactggacaatacttttaccactttctcttctcagaattcaggcctgtcctcggaatgctacagggtacagcccatttgagctcctgtatagatgctcctttttattaggccccagtctcattccagacaccagaccaacttggactgcaccccaaaaaaacttgtcatccctactatcttctgtctagtcatactcctattcaccattctcaactactcataaatgccctgctcttgtttacgctgccagtttacactgtttctccaa

SEQ ID NO: 919265 - DNA, 642 bp, Homo sapiens
atcagtaggagtagaggtttagagttttacctcttggaagtataccttggaagggagttctgagattaaatgtaatcaaacacttactgagagctttctatggaccaggcactacactagactctggggattacagaggcaattacctgtcctggtactcaaggtgttaatgatctagtgtcatttttctttaaaaaagaaagcacctgcatttttcatcttgagcaaatatagtaactctaaccaaagtgatttactcaaggttcaagtcatagttgttttggagaaagtaagtgtcagatgcactgtggctgtcaggcacatagtaggcattaaataaacatggttggtgttcactgaatgtggattgaaggtaaaatgactgatcttaagtttygtgaggaataggtttgcttcatgaaactggtttttatcttcccaaatagttttcaatcattcatttaaagtggtaggttgattaatactgcaaagttatgatgtaaaatgtgatattacctctgtcgaacctgtattgttcatgtgaatgggagtttgactttgggaataaacattgaaaatttgcaggaaggacccacccaaatgtataatgaaatgtgattccaagtatgaaaaaccagtgat

SEQ ID NO: 919266 - DNA, 642 bp, Homo sapiens
atcagtaggagtagaggtttagagttttacctcttggaagtataccttggaagggagttctgagattaaatgtaatcaaacacttactgagagctttctatggaccaggcactacactagactctggggattacagaggcaattacctgtcctggtactcaaggtgttaatgatctagtgtcatttttctttaaaaaagaaagcacctgcatttttcatcttgagcaaatatagtaactctaaccaaagtgatttactcaaggttcaagtcatagttgttttggagaaagtaagtgtcagatgcactgtggctgtcaggcacatagtaggcattaaataaacatggttggtgttcactgaatgtggattgaaggtaaaatgactgatcttaagttttgtgaggaataggtttgcttcatgaaactggtttttatcttcccaaatagttttcaatcattcatttaaagtrgtaggttgattaatactgcaaagttatgatgtaaaatgtgatattacctctgtcgaacctgtattgttcatgtgaatgggagtttgactttgggaataaacattgaaaatttgcaggaaggacccacccaaatgtataatgaaatgtgattccaagtatgaaaaaccagtgat

SEQ ID NO: 919267 - DNA, 559 bp, Homo sapiens
ctgtttttatctatctgaacttttttttgcccacttttgttataaagtcattttttggtgtaattactaagtttttgaagacatattgtgagactccatgaaatctcattttttaatctacctttatttcatcagttataatatctattgatgattcttgcttgaattaattatgctgtgatggctaccaaataactgttttctaaatttttcattccttctacatttattagtttatattctattggaaggaataggtttctcatctccccatttatttattcaaatcagtgcggraacagtcagctcctattttatccaatgagttgtatgtaatctgttattatcattatttctttttcaatctcaaaatgttccaaaattggccagtgacagcatcttcaatctaacttcctgtgtccttttttttttggagatggagtctcgctctgtggcccaggctggagtgcagtggtgcgatcttggctcactgcaagctctgcctcctgggttcacgccattctcctgcctcagcctgccgagtagctgggactacagg

SEQ ID NO: 919268 - DNA, 610 bp, Homo sapiens
gttggtttttcaaacactccaaagcattctgcctgaggaccttggacttggaaggtcttcccctgatctcctcacatctggctcctcactattcagatctcagtttaggggttacaactttacttactgattgtctattataccgtcctgtctcaattctgtgcatagcacttgtgactatatttttcttgattatttatttattatggttattgtctctctcccctaaaacataagttccagaagggagaaccttgttttcctattttttttttagagatagtatctcactttgtcacccaggctagagtgtagtggcatgaasacagctcactgcagctttgacctcctggtctcaaggaattctcctgccttggcctcccaagtagctgggactacaagctcatgccaccatgcccggctaatttttttaattttttgtggatatgaggtctcatcatgttgcccaggctggtctctaacttctgggctcaagtgatcctcccacctcccagagtgctggaattataggcatgagctaccacatggccagaaccttgtttttcatgtttagtgttgtttccttagggcatagaaagtacttggcaca

SEQ ID NO: 919269 - DNA, 610 bp, Homo sapiens
gttggtttttcaaacactccaaagcattctgcctgaggaccttggacttggaaggtcttcccctgatctcctcacatctggctcctcactattcagatctcagtttaggggttacaactttacttactgattgtctattataccgtcctgtctcaattctgtgcatagcacttgtgactatatttttcttgattatttatttattatggttattgtctctctcccctaaaacataagttccagaagggagaaccttgttttcctattttttttttagagatagtatctcactttgtcacccaggctagagtgtagtggcatgaacacagctcactgcagctttgacctcctggtctcaaggaattctcctgccttggcctcccaagtagctgggactacaagytcatgccaccatgcccggctaatttttttaattttttgtggatatgaggtctcatcatgttgcccaggctggtctctaacttctgggctcaagtgatcctcccacctcccagagtgctggaattataggcatgagctaccacatggccagaaccttgtttttcatgtttagtgttgtttccttagggcatagaaagtacttggcaca

SEQ ID NO: 919270 - DNA, 598 bp, Homo sapiens; identical to SEQ ID NO: 919205

SEQ ID NO: 919271 - DNA, 791 bp, Homo sapiens
ctgcctgcatcatcacatggtctcctccctgtgtgtctgggtctcttttcctctttttacaagaacaccggtcatattggattaggagtcgtgctaatgacctcatctcaatttgattacatctgcaaataccctatttccaaatgaggccatagttatgggtatagggtgttaggacctcaacgtatctttttagggggcatagtttaacccagcacacacacacatatacacacacacacctacacacacagagtcacatttccgtggccttttcttcttttttctgttcttttttttttttttttgagrcagtcttgctccgttgcccagggtggagtgcagtggtgtgatctcggttcactgccacctctgcctcccggattcaagcgattcttctgcctcagcctcccaagtagctggaattacaggcacctgccatcacgcccagctaatctttgtatttttagtagagatggggtttcaccatgttggccaggctggtcttgaactcctgacctcaggtgatccaccagcacctcccaaagtgctgggattacaggtgtgaaccacggcgcccggctccagcatcctttttttaatgctcatatcattttcatacctcattcctctcattatcaaacatttgcctctctgacccctctcttctcttctatttgtcttttttacccctccctccctccttccttctctccctccctccctcctgcctgcctgcaccctttaagcatttatggagtttcattctctgccaagctctggagaactgg

SEQ ID NO: 919272 - DNA, 618 bp, Homo sapiens
ttgcttcctgtacatttgtcatagcattttctccaatattgactgataagaaattcacaaaagcaattctgtaggagtggcggggtggtgcagtaaaacgtagtccaggtactaactctctgtttcatagaatccagtagctgaagacagcatactatattccacatgaaggactccatgtacagatctgacaatgaaataaatgtgtactcaaccaatctttctggtgtaatcctctgttgaacacaaaatgtctgtgcttataatcatccaggcwttcagagaagatgaatggctttagcatgtcttaaacttctacacactgagatgaatatgcatgctgtccatcagggaggaattcatgcagtgagacttggaaagagaaagttaaagactgaggcaaaggatattagcctgcttcaagttgaaatattcttacaagtccctgaatttcttcttatctgaatcacttcatacacctcttagaaaagcactatcttctcttctatcaaagaaaatcacattggagattactccaacgatttacacataagggcatggaaaattatgtcacatataaacttaaattaatattactaattcatctacttacaatat

SEQ ID NO: 919273 - DNA, 795 bp, Homo sapiens
caaactagaggataaatgaatacaacagaaaaaatctgttgtgaagggttttgctgtggggccttttggggaagttcttcctaccgtacttgttcccactctctcaaatgtatattttcctctttttttttgcttttttttttgttttgttttgttttgttttgagatggagtctcgctctgttgcccaggctagagtgcagtggcatgatctcggctcactgcaagctatgcctcctgggttcatgccattctcctgcctcagcctcccaagtagctgggactactggcgcccaccaccacgcccggctaattttttgtatttttagtagagacggggtttcatcgtgttagccaggatggtctcgatctcctgacctcgtgatccacccgcctcggcctcccaaagtgctgggattacaggcgtgagccaccgcgcccggcctcaaatgtgtattttcagtacagagggcagcatgctgttttatggctaagaaaccatgtttgttccacaaacatgtagcaygtttcttctcttaaagaagacagaagaagacaacatttcccaggcagttccattggtttccatttgtggctgaatcattgtcattggtgttagatggtcgaggcacatcagtctgtggatcactacatgacaagcattttggggctggaacttcaattttggctctatcatcagattaaatctacatctgatccataagattcttgtgttctgggacacacctgggctcaccagaccaggttcctgaccccatgtccagggcactgagcc

SEQ ID NO: 919274 - DNA, 562 bp, Homo sapiens
agattgtcggtgcatgagtagcagcagcaggtgagttaaacaagcagattctcaggacccatgccaatgatcagttaccttaaaagacaaatactccagtctggagtggggggcagaggcgacttttttttttatactttaagttctagggtacaygtgcacaacgtgcagatttgacacataggtatacatgtggcatgttggtttgctgcacccatcaactcatcatttacatcaggtatttctcctaatgttatccctcccccagccccccatcacctgacaggccccagtgtgtgatgttccccgccctgtgtccaagtgatctcattgttcaattcccacttttgagtgagaacatgcagtgtttggttttctgtccttatgatagtttgctgagaatgatggtttccagcttcatccatgtccctgcaaaggatattaactcatccttttttatggctgcatatattccatggtgtgtatgtgccacattttcttaatccggtctatcattgatggacatttgggttggttccaagtctttgctttcgtgaatagt

SEQ ID NO: 919275 - DNA, 562 bp, Homo sapiens
agattgtcggtgcatgagtagcagcagcaggtgagttaaacaagcagattctcaggacccatgccaatgatcagttaccttaaaagacaaatactccagtctggagtggggggcagaggcgacttttttttttatactttaagttctagggtacatgtgcacaacgtgcagatttgayacataggtatacatgtggcatgttggtttgctgcacccatcaactcatcatttacatcaggtatttctcctaatgttatccctcccccagccccccatcacctgacaggccccagtgtgtgatgttccccgccctgtgtccaagtgatctcattgttcaattcccacttttgagtgagaacatgcagtgtttggttttctgtccttatgatagtttgctgagaatgatggtttccagcttcatccatgtccctgcaaaggatattaactcatccttttttatggctgcatatattccatggtgtgtatgtgccacattttcttaatccggtctatcattgatggacatttgggttggttccaagtctttgctttcgtgaatagt

SEQ ID NO: 919276 - DNA, 563 bp, Homo sapiens
cagattgtcggtgcatgagtagcagcagcaggtgagttaaacaagcagattctcaggacccatgccaatgatcagttaccttaaaagacaaatactccagtctggagtggggggcagaggcgacttttttttttatactttaagttctagggtacatgtgcacaacgtgcagatttgacacataggtatacatgtggcatgttggtttgctgcacccatcaactcatcatttacatcaggtatttctcctaatgttatccctcccccagccccccatcacctgacaggccccagtgtgtgatgttccccgccctgtgtccaagtgatctcattgttcaattcccacttttgagtgagaacatgyagtgtttggttttctgtccttatgatagtttgctgagaatgatggtttccagcttcatccatgtccctgcaaaggatattaactcatccttttttatggctgcatatattccatggtgtgtatgtgccacattttcttaatccggtctatcattgatggacatttgggttggttccaagtctttgctttcgtgaatagt

SEQ ID NO: 919277 - DNA, 761 bp, Homo sapiens
ttcttgtcaggttcatgtttcacttatgtatctatcctctctcagggacacatttcctgaaggaatttatattgtttttattgatcaccgtagaaaattaaagttatattcagcaagaataaaatatatcattcttgaattgctaaacactttgggctttgatacccatgagaaacagttatcagaaaatgaggtcacatttttgtgtatccgaaagaagtatttatatgaagatgttggggaggtgggcaagggaataataaaaattacatattagtcaagtaaacaagctaaagaactttcagactaaataggaagacaactatgtctcaggcagcaagcaagaaaaatttaacgtataaaagtgccaagatgattctaaggtattgcactataatcagaataagatagctgtgtcagagtcaaatcttagcaaaactccaagtttattatgttttctcttkggaatactcctcctctactttcagtgacacctcttttatgccagcctctgaccccagccccaggtcactgagaacacggcacaacacccgtatctgcctctgtattttttccctttccttcatcttccttcagtcaaatattattagtcctgtagttcactaattctaccatctgtcatagcaatgatggtttttgatataaaatgaaactctatttattttatgatacatacctggcaccatgcctggaaaaacatgcatttaaaaaattctttcaataattttctccctactcag

SEQ ID NO: 919278 - DNA, 761 bp, Homo sapiens
ttcttgtcaggttcatgtttcacttatgtatctatcctctctcagggacacatttcctgaaggaatttatattgtttttattgatcaccgtagaaaattaaagttatattcagcaagaataaaatatatcattcttgaattgctaaacactttgggctttgatacccatgagaaacagttatcagaaaatgaggtcacatttttgtgtatccgaaagaagtatttatatgaagatgttggggaggtgggcaagggaataataaaaattacatattagtcaagtaaacaagctaaagaactttcagactaaataggaagacaactatgtctcaggcagcaagcaagaaaaatttaacgtataaaagtgccaagatgattctaaggtattgcactataatcagaataagatagctgtgtcagagtcaaatcttagcaaaactccaagtttattatgttttctctttggaatactcctcckctactttcagtgacacctcttttatgccagcctctgaccccagccccaggtcactgagaacacggcacaacacccgtatctgcctctgtattttttccctttccttcatcttccttcagtcaaatattattagtcctgtagttcactaattctaccatctgtcatagcaatgatggtttttgatataaaatgaaactctatttattttatgatacatacctggcaccatgcctggaaaaacatgcatttaaaaaattctttcaataattttctccctactcag

SEQ ID NO: 919279 - DNA, 540 bp, Homo sapiens
agcatctcatatatttcagccaaataaatgggccaagggaaaaaaatatatatatatagacaggactagagaaaacctatttttgtaatgatgtttctttggatactgtctagtcacccagaaaaatgtatggatgaatttttttttttttttttgagacaaagtctcactgtgtcatgcaggctggagtgcagtggcatgatctcactgcaacctccatctcctgtctcagcctcctagataactgggattacaggtgcccaccaccatgcccggctaatttttgtatttttggtagagacagagtttcaccaggttggtcaggctggtctcaaactcttgacttcaggtaatccacccaccttggcctcccaaagtgmtgggattacaggcatgagccaccatcttcagccagatgatttttttattgagagagtgaaatgctattttgttccccaaatggcgctagtgaatcactaggagggtcccactgataggccatgtttagcactggttgccagggattctctttttgagaga

SEQ ID NO: 919280 - DNA, 561 bp, Homo sapiens
ttctgagaaagcttctgtctagtttatatggggagatattaccttttccaccattggcctcaaagctctccaaatatccacatgcagattttacaaaaagactgtttcaaaacttctcagtcaaaagaaaggttcractaagtgagttgaatgcactcatcacgaaggagttactgagtatgcttccgtctacttctatgtgatgatatttccttttccaccgaaggcctcaaagcccttaaaatgcccacttgccgatcctacaaaaagagtgtttcaaaactgctcaatcaaaggaaaggttcaactctgtgagacaaattcacacctcacaaacaagtttctcagaatgcttctgtccagtttttatgtgaagatatttccttttcagctataggcctcaaagcacccaaaatatccatttgtacttactacacaaatattgtttccaaactgctcaatcaaaagaaaagttcaactctgagagtgaaatgcacacgtcacaaagaagtttctgagaatgcttctgtctagtttttacgtgaagttatttccttttcc

SEQ ID NO: 919281 - DNA, 553 bp, Homo sapiens
atccacttgcagattctataaaaagaatgtttcaaaactgctaaatcgaaagaaaggttcaactctgacagatgaatgcacacatcacatagaagtttctcataatgcttctgtgtagtttttacctgaagatattttattttccactataggcctcaaagcgctccatatatccatttgcacattctacaaagagtgtttcaaaactgctcaatcataagataggttcaaccctgtgagatgaatgcacacatcacaaagtagtttctcagaatatttgtgtgtagtttcaaaactcccctatcaaaagaaaggttcaactctgtgagttgaatgcacacatcacaaagaatttcctcagaatgcttctgagtagtttyatgtgaagatatttccttttccacaagaggtctcaaagggctccaagtatccacttccagattctacaaaaagagagcttcaaaactgcttaatgagaagataagttcaactctgtgagttgaatgcacacctcacaaagtagtttatcagaatgcttctgtgtagtttttat

SEQ ID NO: 919282 - DNA, 781 bp, Homo sapiens
ggtgaaaaaggaaatatcttcatttgaaaactagaaagaaactttctgagacgctgctttatgatgtatgcattcatctcacagagttaaaccattctttggattcagcagtttggaaacactgctgttgtaaatcagcgaagggatatttgggagctcattgatgacaaatgcaaaaagcgaatatccccggatgaaaattagaagaaagctaattgagaaactgctttttgaagtttgcattcaccttgcagtgttaaagcttccttttcattgagcggtttggaaacaattgttttgtagaatctgcgaagggatatttggcagcccgttgaggcctatggtgaaaaaggaaatatcctcagataaaaactataaagaagctttctgcaaaactgttatgtgayatgtgcattcatctcacagcgttaaacttctcattgcattgagcagtttggaaacaatgttttgtccattccacgaatggacatttgggagctcattgaggccaatggtgaaaaagtgaatatccaagaataaaaactagaaggaacctatctgagaaaccactttgtgatgtgtgcattcctcttgcagagttcaaactttcttttcattccaaaatttggaaatgctcttttggcagaatctgcaaaagcatatttgggagggcattgagtcctatggataaaaattaaataacttcagatgaaaattagaaagaagctttatgagaaactgctttgtgatgggtgcatccatcccacaaaggtaaaccttt

SEQ ID NO: 919283 - DNA, 729 bp, Homo sapiens
tcccaaagtccattcacagaaaggacacaaacagtgtttccaaactgctgaagtgaaagaaaagtttacctctctgagatgaatgcacacatcgagaattggtttctcatgtaactcccttttagtttttatcttgggatatttgctgtttccccgtcagcctcaatgagctgaaaaatgtccattcgcagaatcgacagaaacacggtttccaaactgctgaatccaaagaaaattttaacttagtgggatgaatgaatacatcacaaagcagtttctcacaaagcttctttcgaattttatctgaagatatatcctttttcaccataggcctcaatgtgctgtsaaatgtctctttgcagattctaaaaaatcagtgtttccatactgctgaatgaaaagaaaggtttatctctgtgagatgaatgcacacatcaagaattggtttctcagatagcttccttctagtttttgtcatgtgatattcgcttttttttatattagcctcaatgagttcccaaacgtccattccaagaatgtacaaaaactgtgtttccaaactgctgaaagcaaagacaggtttaactctctgggatgaatgcacatatatcaaacgggtttctcattaggcttctttctagtttttatcagaaggtacttcctttttcaccattgacctccatagtcttccaaatatctcttggaagatcctaagaaaccagtgattct

SEQ ID NO: 919284 - DNA, 749 bp, Homo sapiens
tctctttttcgccattggcttcaatgagctcccaaacctccattggcagaaaggacaaaaacagtgtgaccaagcttctgaatccaaagaaaggcttaactctgttggatgaatgaacacatcaccaagcagtttccagaaaacttcctgctactttttaactgaagatatttccttttccaccatgggccacagtcctctaccaaatacctctttgcagattctaagaaaacactctttcgaaactactgaawgaaaagaaaggtttaactctgctagatgaatgcacatgtcaccaagaagtttctcagataacttgcttctagtttttatcctgagataagcgctttctttcaattggcttcaatgaactcccaaatgtctatttgcaggattgagagaaacagtgttttgaaactgctgaattagaagaaaggtttaactctgagagatgaatgtacacataatgaattggtttctcagacaaattccttcaagtttttatcctgcgatatttgcttttttgccattggcctcaatgagttaccaaacgtccattccaagaatgtacaaaaactgtgtttccaaactcctgataccaaaaacaggtttaactccctgagatgaatgcacacatgccaaatgggtttctcattggactgctttctagattttatcagaaatatttcctttttcaccaatgacgtccatagtcttccacatatctcttggcagattctaagaaaaca

SEQ ID NO: 919285 - DNA, 749 bp, Homo sapiens
tctctttttcgccattggcttcaatgagctcccaaacctccattggcagaaaggacaaaaacagtgtgaccaagcttctgaatccaaagaaaggcttaactctgttggatgaatgaacacatcaccaagcagtttccagaaaacttcctgctactttttaactgaagatatttccttttccaccatgggccacagtcctctaccaaatacctctttgcagattctaagaaaacactctttcgaaactactgaatgaaaagaaaggtttaactctgctagatgaatgcacatgtcaccaagaagtttctcagataacttgcttctagtttttatcctgagataagcgctttctttcaattggcttcartgaactcccaaatgtctatttgcaggattgagagaaacagtgttttgaaactgctgaattagaagaaaggtttaactctgagagatgaatgtacacataatgaattggtttctcagacaaattccttcaagtttttatcctgcgatatttgcttttttgccattggcctcaatgagttaccaaacgtccattccaagaatgtacaaaaactgtgtttccaaactcctgataccaaaaacaggtttaactccctgagatgaatgcacacatgccaaatgggtttctcattggactgctttctagattttatcagaaatatttcctttttcaccaatgacgtccatagtcttccacatatctcttggcagattctaagaaaaca

SEQ ID NO: 919286 - DNA, 761 bp, Homo sapiens
aacctttcttttgattgagcagttttcaaacactctttttgtagaatctgcaagtggatatttgtagtgcttgtctcctctattggaaaaggaaataacttcacataaaaactagacagatagttggttggagctaagatggccgaataggaacatctccagtctatagctcccagtgcaagggacccagaagttgggttatttctgcatttccatctgaggtactgggttcctctcactagggatttccagacagtgagtgcaggacagtgggtgcagtgcatcgtgcgtgagctgaagcagggcgaggcattgcctcattcaggaagcacagggggtcatggagttacctttcctagtcaaagaaaggggtagcagaaagcacctggaaaatcgggtcactcccactctaatactgcacttttctgatgggcttaaaatacttcacaccaggagattatatcccatacatagctcagagggtcctatgcccatggagtctcactgattgctagcacagcagtctgatatcaaactgcaagatggcagtgaggcttggggagggamgcccaccatttcccaggcttgcttaggaaaacaaagcagcctggaacctcgaactgggtggagcccaccacagctcaaggaggcctgcctgcctctgtaggcttcacctctggggacagggcacagacaatcaaaaagacagcagtaacctctatagacttaaatgtccctatctgacagctttgaagagagca

SEQ ID NO: 919287 - DNA, 604 bp, Homo sapiens
caaagcgctccaaatatccacctgcagttactacaaaaagagtgtttccaaactgctcaatcaagagaaaggttcaactctgtgagttaaatgcacacatctcaaagaagtttctgagaatgtttctgtctagtttttatgtgaagatatttccttttccaccagaggcctcaaagcactccaaatatccacttgcagattccacaaaaagagtgtttcaaaactgctcaatcraaagaaagtttcaaccctgagagatgaatgcacacatcacaatgaagtttctctgaatgcttctgtctagtttttatatgaagatatttccttttcagctataggcctcaaaatgctccaaatatccttttgcagttactacaaaaagagtgtttccaaactgctcaatcaaaagaaaggttcaactctgtgaattgaatgcacacgccacaaagaagtttctgagaatgcttctgtctagtttttatgtgatgatatttccttttccaccataggcctcaaagcactcaaaatatccacttgcagagtctacaaaaggagtgtttaaaaactgctcaatcaaaataaaggttcaactctgtgggatgac

SEQ ID NO: 919288 - DNA, 594 bp, Homo sapiens
accaaggcattgagtgtaagtaggtagaaaaaaaaataaccatgaattctgggacatacccatccaatgtttagaaactgatgatacaggagctaaaaagaaattatttaggcagatatgagggtaggagagtcctcggcggaatttcccttttaacaaaaagcagcccccaaatcatttctttttcttttcttttctttcttttctttttttttttttttttttttgagacagagtcttgctctgtcgcccaggctggagtgcagtgkcctgatctcggctcactgcaacctccgcctcccgggttcaagcaattctcctgcctcagcctcccgagtagctgggactacaggtgcatgcagccacgccccgctaaatttcgtattttagtagagacagggtttcaccatgttgcccaggctggtcgcgaactcctgagctcaggcaatccgctggtcttggtctcccaaagtgctgggattacaggcgtgagccaccgtgccgggccaaatcatttcttttttaacaaacagcatcctgaaaaatcgagctgcaaaaaaagataaggaagccggaagcttgcatgagggaaat

SEQ ID NO: 919289 - DNA, 594 bp, Homo sapiens
accaaggcattgagtgtaagtaggtagaaaaaaaaataaccatgaattctgggacatacccatccaatgtttagaaactgatgatacaggagctaaaaagaaattatttaggcagatatgagggtaggagagtcctcggcggaatttcccttttaacaaaaagcagcccccaaatcatttctttttcttttcttttctttcttttctttttttttttttttttttttgagacagagtcttgctctgtcgcccaggctggagtgcagtgtcctgatctcggctcactgcaacctccgcctcccgggttcaagcaattctcctgcctcagcctcccgagtagctgggactacaggtgcatgcagccacgccccgctaaatttcgtattttagtagagacagggtttcaccatgttgcccaggctggtcgcgaactcctgagctcaggcaatccgctggycttggtctcccaaagtgctgggattacaggcgtgagccaccgtgccgggccaaatcatttcttttttaacaaacagcatcctgaaaaatcgagctgcaaaaaaagataaggaagccggaagcttgcatgagggaaat

SEQ ID NO: 919290 - DNA, 588 bp, Homo sapiens
cacgataactacttgcttcccatggtcagacaccaagacttgtctggaacatgatggtactggggttagaaatgagccatttcatttcacaaacatagattgagcagatgggggcactggagtagaggctaggcctatgtgatggtcagttttatgcatcagtagggcaaagctacagtcctcagttatttaaacactaatttaggtgttgttgtcacctaggtgatgatgcaactcaagcagaaattatggtgcctaaacaaaggcagtgatgggaaggagaggaagagacaaagtggagggatatttaggaagctgatcaactgcacttggccatcagatgtactcggggttacagagaaggaggattcttggatggcttgcaaattttaaaaggaaaaycagttttttggataggcataagaaatataattatgaacatgtatttggggcctgagtagattttcaggatctgcaatatggatatagaaatatacagtatagaggttacagcttagccatagaggggatggagaaagttagcatttaaagtaagtactcttttttaacctctttaaaaaacaacac

SEQ ID NO: 919291 - DNA, 773 bp, Homo sapiens
agcaaagaccatgcatcctgcaaagcctaaagtatttgctatcagccctttataaaaaaatcttgctgacccctgccctacctcatgccccatctccactctctactgtcgcctctcagaccctacctcatccttgctcactttgctgcatccacactaggctctctgctattctcctaaaagcaacttgtccaacacacggcccacaggccacatgtggtccaggatagcttcgaatgtggcccaacacaaatacataaacataaactttcttaatacattatgagattttttctttctttctttttttttttttttttttrctcatcagctatcattagtgttagtgtattttatgtatggcccaaaacaagtcttctttttccagtgtggcccagggaagccaaaaattcgacaccccttccctaaagcatcatacactcttccatcttggccttgggcttggctggtccttctgctgggaatgtttttccccaggtatcctcatgacttgctcctttccttcccttggggcttcattggatacttgccttctccccagggacttccctggtcactctatttaaattatagcttgcccttgacagcctttagcctgcttccattatttgtgctttgctgagggatttttcactaacataatgtatgttttacttacttatcttgtctccacccctccaccccaaagtaagcatcttgaatacaggtatctttgtctgttttactctttgctatatccccaaggtctcgat

SEQ ID NO: 919292 - DNA, 567 bp, Homo sapiens
agattttaatatatctttctcagtaactgatagaacaagcaggcaaagaagtcagcatgattataaaacatggcctagttgatatatatagagcgctacacctgacaactgcagaatacagactgtttccaagtgcacatggacatttaccaaaattgaccatgtactgggccttaaagtaaatctcaaaacgttttaagggattgaaataaacatgctttctgaccrcagtggaattgagcttgaaataaataacgatgggccactacagtatctctaaatatttggaaattaagcaatatacttctaaataattaacaataaaatcacattggaaatcagaaagtacttagaatggaattgttatgaaaatatgacgtatcaaaacctgtggtcacagctaaagcagtgcttaaagaatatgtatagcttaaaatgcgtatgatggaaaagaagaaaggctgaaactcaattatttatctcttaggaagttagaaaaatatccagcaagtaaaacctatagaaggtagaaggaaaaaagtaatatatataaaagtagaaattaat

SEQ ID NO: 919293 - DNA, 611 bp, Homo sapiens
tccaggggagccttcaacttctgagataaaagaccaaggttagtaatagggactcagaacatatccaaccagaagaaagtcaggtcagtttatttaaataaaaaatgtaaatatgctatgccaggcattgatcctagcgctaagaatagaaagataattatgatctgatccagcctctgccagcttagattatcagkgggagagatgggcaagtaaaaagattatttaaatataagatggaaagtgatatagaaaaattcatagggtgctatgacaatacatattaagggtattagggacaatgctagggttcaatgaaagtgttcttcctgcggaggatgccggagcagagttctgggtaagtaagattttgccaggcaacacaaggtagaaagggagtttcatgtaaagaactaaagcacaggccgggcgtggtggctcatacctgtaatcccagaactttgggaggctgaggcaggtggatcacgaggtcaggagattgagaccatcctggctaacatggtgaaaccccatctctactaaaaatacaaaaaattagccaggtgtggtggcgggcgcctgtagtcccagctactcgggaggctgaggca

SEQ ID NO: 919294 - DNA, 611 bp, Homo sapiens
tccaggggagccttcaacttctgagataaaagaccaaggttagtaatagggactcagaacatatccaaccagaagaaagtcaggtcagtttatttaaataaaaaatgtaaatatgctatgccaggcattgatcctagcgctaagaatagaaagataattatgatctgatccagcctctgccagcttagattatcagtgggagagatgggcaagtaaaaagattatttaaatataagatggaaagtgatatagaaaaattcatagggtgctatgacaatacatattaagggtattagggacaatgctagggttcaatgaaagtgttcttcctgcggaggatgccggagcagagttctgggtaagtaagattttgccaggcaacacaaggtagaaagggagtttcatgtaaagaacyaaagcacaggccgggcgtggtggctcatacctgtaatcccagaactttgggaggctgaggcaggtggatcacgaggtcaggagattgagaccatcctggctaacatggtgaaaccccatctctactaaaaatacaaaaaattagccaggtgtggtggcgggcgcctgtagtcccagctactcgggaggctgaggca

SEQ ID NO: 919295 - DNA, 775 bp, Homo sapiens
tgaagttgtggtgcactgaaggcaactagagccaaacaaaacccaaacccagctcaactactgactagcttgactcaactcccatactaattgcctgaaagaagaagatatgtgtctgtttcagggtatagataccacttacctcagtctttattgtttttctaygcacagcatgcaacattcaataacgaattatgggctgggagttatagctcatgcctgtaatcccagcactttgggaggccaagacaggaggatggctttaggtcaggaatttgagatcagcttggataacatagtaagactccatctttgcaataaaattaaaaattagccaggcttggtggcatacacctgtggtcccagctacttgagaggccaaggcaggaggatccgttgagctcaagaagtcaaggcttcagtgagctatgatcacaccactgcacttcaacctgagtgacagagtaagaccctatctcaaaaaaaaaaaaaaaaaattacactcacacaaaaatgagacaaacaatccattgtcaagagataaagcaatccacagaaccatactggagacattagacagggactttaaaatgactatgattgatgggttaaagtcagtatgaaagtttgtcaaatgctttcctaaaatctagacttaacatatcctaattttcctaaagcagttgacattttaagaatcggtatccatagttgtggccattttttttttttttaacttcttggagtctacttcattagaaactggtctataata

SEQ ID NO: 919296 - DNA, 472 bp, Homo sapiens
accaaggcggtggcccacacctctccctcagggagagatcagaactctgtccatagaaaatgggcaggagtggccgaaggttccagatgggaggtcctgcccagtgaggaggaatgttttgggatactgcttaaagaggcaatctgggcacattctggcaaagcagctctgctgtgttggggggaatctttccttgtccagaccatttggattttccaaagctcacaggctggaatggctgagttgaccaaacagcagagatggtggyctgcctctgtcctccgggtctctgacccatctcaggcaggctccaccctgttgctagtagctggctggaatccaagccagtagatcttatcttgtgaggtaccgtggaagtgaggcccacagactgacactggccccctggattcagctcccttcctaggggtatatacaggtctcctgccttgctgaggatcccaaagccaga

SEQ ID NO: 919297 - DNA, 608 bp, Homo sapiens
ttttagtctcctttttgtgcatttgcaaagtctgggatcctcaggactctctgccagatctacttttttttttttttttcactctatacatttgccctgagtgatcttatctgcttctatggctttaatcaccatctaaatatggacggtgttatattagtcaatactctttgggtttcaacagacagaaatccaacataaagagtcttaggtttaaaaaaagataatcttttggtgtgcagactggagaagtacagtgctttacttccatcaggtctcagtgtgcatccttgtacccaaacatcagcatctggggtccacttcttctcgtcatctctagggcaaagtctcttcaagtccacttagcaatcctagtgaasaatgagagttttttttccccctcattccctggaagaattctgattggttcatccctgaaccaatccttgtggctagagtggttaagtgttctgattggccaggtctaggtcagatgttcattcctgtggtagcaggagaaaggggatgatgtcagctctatttgaactgtataaaatacattctctttaggaaagagagttagctctgttattcaaatacagacaagg

SEQ ID NO: 919298 - DNA, 623 bp, Homo sapiens
gaaaatttgtgtgctaggatattgtctctaaacagtgcagtcttgggcagtctgaaagtcctttagcactttaggatccaattaaaagggaattattttctgttctacagctaaggaaacagatcaacaaagaggctgaatgactgttttaaaatctgacagatgtaacacggcagacaaggaaatgggatttagaaggcttcccctttctgagatgttattttcttcttagtgtggtctgtcagttctcccagcaatgagtcagttgaaattaacctttgatagactcataccagwaaataaaaaaatagctcacctttatccagttgcaggcaacagaaaagagcaagtatgtagaatttattctctctccatcttttggactctatccacacaatcctgcatcctcctccaaataaaagtaaaatatgattttcttcactttagtttgtacccacttactctattctgctgaaatactagcagccctcatgtctttgaatcatcaaatccactggactttaaaaaaatcccctttctggctttttctgctgtttgtcactagtttatcgagatctctgtcctcttggattccttgatgcctcactctcctggttgtcatg

SEQ ID NO: 919299 - DNA, 642 bp, Homo sapiens
catccccggggctgcagagggtgtcctggccttcccctatcagctctgcacccctgaggactcccatccctaggagtccctctgcccaactttggtgcatgttaagccataattaatctgcttcctcatctcttattcatcaaagccacagcagcagcaaagggggctggcacaaggamgggaccgacaaccaaaccctggcagtggccccaagaatcccactgggcctgcccatctccaaatgcctctgacccttcactagcgagggcctcctcccacagaatggcatcctggattgtgccacactaggcaggccccctgacggaccatgcgcacctcccaccacctggaggctgctggggaccgtcaatgggacgtatgcattgcacagtgatggcccttacctctgcgtcccccagccctggactggatcccttgtggcccatctccaggatgggagcctgaacggagatgaaaggacactcggccaagtgggacatgccaggctggcacctggaccctggtccgccactcttcctggtgcctagaggaaggggtgagtccccagggctcctggaccttgagatgagcctcgggccacttgtgtttgccagcagatgggctcagggtcttctctcagtg

SEQ ID NO: 919300 - DNA, 642 bp, Homo sapiens
catccccggggctgcagagggtgtcctggccttcccctatcagctctgcacccctgaggactcccatccctaggagtccctctgcccaactttggtgcatgttaagccataattaatctgcttcctcatctcttattcatcaaagccacagcagcagcaaagggggctggcacaaggaagggaccgacaaccaaaccctggcagtggccccaagaatcccactgggcctgcccatctccaaatgcctctgacccttcactagcgagggcctcctcccacagaatggcatcctggattgtgccacactaggcaggccccctgacggaccatgcgcacctcccaccacctggaggmtgctggggaccgtcaatgggacgtatgcattgcacagtgatggcccttacctctgcgtcccccagccctggactggatcccttgtggcccatctccaggatgggagcctgaacggagatgaaaggacactcggccaagtgggacatgccaggctggcacctggaccctggtccgccactcttcctggtgcctagaggaaggggtgagtccccagggctcctggaccttgagatgagcctcgggccacttgtgtttgccagcagatgggctcagggtcttctctcagtg

SEQ ID NO: 919301 - DNA, 684 bp, Homo sapiens
cagtcatagaagcctcacctcagggcagagggggctgacagactgggctgacgggaaggggggcttcctgtcaccagagaacataaagggaccactagtggcctgggccatgaggctctgtggccctcaaggtgctgagctcaaggtgggcccagcccatggctgcctttgtggggaccccacaaggagatgctggcctctgaggatgctcagacctggttcagcatggccaggccctggcctagcccaaggtcagcactggccactaccctgggggctgagtctccgtctcgccctgtgacatggtgcccacactatgagccagtgtcaaccctttgcccatacaccgggagccttgtgtgtccatactcatggctgagggcctgtttgggggtctctgtgttgggggaggtgggtccagggtgcgtggcccctgggattgttcatcatgagtgccacctggaaggtgctggagcctcacccgtcctccagagtgttttggggagatcctgtgctgrcatcttggctgggccaggatggtgtctaggagggacccttgggagggaagcaggggcatcagggggcctggtgctggggtgggtggcaggagaggcctggagggcggcggcccaagccagtggctgggcaggtgtcaggagggagaggggtgaggcctggcctccc

SEQ ID NO: 919302 - DNA, 811 bp, Homo sapiens
actgagaccctgcctcggcaggggtctccaagcttggctccaccccctgaggggccagttactgcatacctcgcccacccaggagctgggggccctggtcctgtttcccagggagctgttggcacttgtgggctcctggctggggtccaggtgggctctgctcctctgccctgcccagcgctttgtactgagcccatcctgcagagactcaacggggccaaacgcacattccttgaccttctgtgagtctgtcagtcttcatccctccctggacctaggaaggcctggacagctttgaccattggtgttgggtggacatggcgctgcgctgcaccccaggccctcagagcccagctgttctgctttctgcttttggtcctgagctgccttgaaggaatctgaccagcagggagagcccacggagcgggagggcctgtggggctcagccctgcagccggtctgccgaggccaggcctgggggcacagctggggctgagtacactgaatgccccctcgatgccaygcacagcagaagagctgcccacaccgccctgctgggccctgcccgggctccagacccacagaccaagcacacaagagactgggctgctttgtcatgcagcagcaggtagccggacacatgtttccccattcccctgccatcctctgaaatcctgtggggagaaagcatgtgaggtccagtgggggttggggtgagggtctgactgggggctttctaacccacgtctgagtcccatccggcgccagtgccacagtggcgggtgactggtgctgctcacactggcaagct

SEQ ID NO: 919303 - DNA, 674 bp, Homo sapiens
ggtccagagctggagactgacccccctgtgtaggacctctgggaagtccccaggacccaagacggctcagggctagtgaggtagggacaggtggctatttcaagcccccagcgggcttcctgcctggggcacctgggcacagtggagaaagatggctcccggcagaacacatgcccccatccttyggggccagatgccttgggttgggcacggagcagggcccccagcagacacagaggccagggtgggaagggccagggcaccgcgcagtctcttgccctgtgtcagggctccaggcctatggtggggctgggcctacccaccctgtcactttccccatacggctttggggtcccaggggttcaggggcccctcctgcctgacccagccttaactttttgttgtttcttctcattacaaaagaagcatgttcaaaagaaccccacagtcctccatgaaccccacagtaccccgtgaactccagagtcctccatgaaccctacagactctcatgcaccccacagtcccccatgaaccacatagtcccctatgtaccccacaagctcccatgtaccctatagtccccgatgcaccccacagtcccctatgtaccccacaagcccccatgcatcccacaggcccttatgtaccccacaggcccccatgcaccccac

SEQ ID NO: 919304 - DNA, 674 bp, Homo sapiens
ggtccagagctggagactgacccccctgtgtaggacctctgggaagtccccaggacccaagacggctcagggctagtgaggtagggacaggtggctatttcaagcccccagcgggcttcctgcctggggcacctgggcacagtggagaaagatggctcccggcagaacacatgcccccatccttcggggccagatgccttgggttgggcacggagcagggcccccagcagacacagaggccagggtgggaagggccagggcaccgsgcagtctcttgccctgtgtcagggctccaggcctatggtggggctgggcctacccaccctgtcactttccccatacggctttggggtcccaggggttcaggggcccctcctgcctgacccagccttaactttttgttgtttcttctcattacaaaagaagcatgttcaaaagaaccccacagtcctccatgaaccccacagtaccccgtgaactccagagtcctccatgaaccctacagactctcatgcaccccacagtcccccatgaaccacatagtcccctatgtaccccacaagctcccatgtaccctatagtccccgatgcaccccacagtcccctatgtaccccacaagcccccatgcatcccacaggcccttatgtaccccacaggcccccatgcaccccac

SEQ ID NO: 919305 - DNA, 674 bp, Homo sapiens
ggtccagagctggagactgacccccctgtgtaggacctctgggaagtccccaggacccaagacggctcagggctagtgaggtagggacaggtggctatttcaagcccccagcgggcttcctgcctggggcacctgggcacagtggagaaagatggctcccggcagaacacatgcccccatccttcggggccagatgccttgggttgggcacggagcagggcccccagcagacacagaggccagggtgggaagggccagggcaccgcgcagtctcttgccctgtgtcagggctccaggcctatggtggggctgggcctacccaccctgtcactttccccatacggctttggggtcccaggggttcaggggcccctcctgcctgacccagccttaactttttgttgtttcttctcattacaaaagaagcatgttcaaaagaaccccacagtcctccatgaaccccacagtaycccgtgaactccagagtcctccatgaaccctacagactctcatgcaccccacagtcccccatgaaccacatagtcccctatgtaccccacaagctcccatgtaccctatagtccccgatgcaccccacagtcccctatgtaccccacaagcccccatgcatcccacaggcccttatgtaccccacaggcccccatgcaccccac

SEQ ID NO: 919306 - DNA, 646 bp, Homo sapiens
agccaggactccttgcccgtccccgtcactgccctgtgcccgcccagcacctgctggggactaggctgcccattggagaaggaaacacagtgctgggctgtgagctcctgaagcctgtctctgtgccccaggaccaggctcctgggtggagggagagaccaggggcaggtgaggaaaggcagggcccccagaatccctccatgcctgcccctcagtctccaggacttatgtgcaggtaccgkttggagctgtggtgcagttcccagtctcaccaccagatggcaccatgcccctgcagaagcagtgcccagagcaggccaggtggttctcgggggctgcggtggaggaatccacccagccgaagctctggcagggaaggggcagtgctagggggagccccctccccacttggatccgaagttcccatggggcctagggcaggggcttgccaggtagccagaagttcccttgctgagtctagggtgtctatcccacatttcacatggagacgaatcatcccagacaccccggcactgtcccggggccgtttgccacccctcccaaggggcagggctcctgtcttggggccttcccaagcatagtagccttcgggcagccccggcctggccccaggttgtcccacttg

SEQ ID NO: 919307 - DNA, 587 bp, Homo sapiens
ctcccagtagtgcataccaactttcaaagtctgtttaattgtatcttagtgtctgattccaattttatttcttgaaggaggggagtgtctctaatgtcttattttggcacccagagaccaggtaggcatcatttttgtcccaaattgtggaaggaatgtacatttggcacagattacttcccttttttctcttgtacrcctttcaccttttttgtttttgtcttttttttttttgagtttgatgtgtttggacagtaagggtttacgagattaagattaaatttcaactttgtctattgtgcatatagcctaaggaaaacaaaaagaggaaaaatacattgcctctaaaaagaagactcattattcaactttttttatttttaattgttttcagagactgggtctcaccctatcacccaggctggagaggtgatcacagctcaccgtagccttgaactcctgggttcaagggttcctcttgccttagtcttctcactagctgagactgcaggcccgcaccagcacacctggctaattttacaaaaattgttttggagagatgtggtcttgccatcttgcctaggctg

SEQ ID NO: 919308 - DNA, 629 bp, Homo sapiens
tacatcttagatttcctggcatctctcagttcctgtttccaggcctgtagggaaaagaaagagagatcagactgttactgtgtctatgtagaaaaggaagacataagatactccattttgatctgtactaagaaaaattgttttgccttgagatactgttaatctgtaactttagccccaaccctgtgctcacacaaatatgtgctgtatggaatcaaggtttaagggatctagggctgtgcaggatgtgcctggttaacaatatgtttgcaggcagtatgcttggtaaaagtcatygccattctcgattaaccaggggcacaatgcactgtggaaagccacagggacctctgcccaagagagcctgggtattgtccaaggtttccccccactgagacagcctgagatatggcctcgtgggaagggaaagacctgaccgtcccctagcccgacatccataaagggtctgtgctgaggaggattagtaaaagaggaaggcctcttgcagtcgagataagaggaaggcctctgtctcttgcatatccctgggaatggaatgtctcggtgtaaaacccactagtacatttgttctattctgataggagaaaaccaccctgtgcctggagttg

SEQ ID NO: 919309 - DNA, 530 bp, Homo sapiens
tttattgctggattttcattcaacacacattccctgagatctgagataaagcaggggctgtgctgggtacaaggaagcatgtaacaccgtctctgctcccagggagtccacggcctagcagagaatagctcaggtaaccatcagttcagaaaccgacacaagtgactgacatggaaagatgcgcgcgatgtaactttgaaaagcaagctattaaacggttatacaagattaccccattttttttaaggaaaaaaamcagatgtctggctatggatcgaaatacgaacagtctacctttggaaggccagattacgaataatttcaattttgtttgtttgtttttgagatggagtttcactcttctaacccaggctggagtgcaatggtgcaatctcggctcactgcaacctccacccatgggttcaagcaattctcctgcctcagcctcctgagtagatgagactacaggcgcccaccaccacgcccagctaattcttgtatttttagtagagacaaggtttcaccatgtt

SEQ ID NO: 919310 - DNA, 641 bp, Homo sapiens
cgcctgtaatcccagcactttgggaggccgaggcgggcggattatgaggtcagaagattgagaccatcctggctaacacggtgaaaccccatctttactaaaaatacaaaaaattagctgggcgtggtggcgggcacctgtagtctcagctatccgggaggctgaggcaggagaatggcgtgaacctggaaggcagagcttgcagtgagtggagcttgcgccactgcactccagcctgggagacagagcaagactccatctcaaaaagaaaagaaagaaagaaagaaagaaagaaggaaggaaggaaggaaggaaggagagagagagagagagagagagagaragaaagaaagaaagaaagaaatgccgcccagcgtggtggctcacgcctgtaatcccagcactttgggaggccgaggcaggcggatcacctgaggtcaggggttcaagaccagcctggccaacacagtgaaaccccgtctctactaaaaatacaaaaattagccaggcgtggtggtgtgtgcctataatctcagctactcgggaggctgaggcaggagaatcgcttgaacacaggaggcagaggttgcagtgagctgagatcacgccatttgcactccagcctggaggacaaaagcgag

SEQ ID NO: 919311 - DNA, 460 bp, Homo sapiens
agctctgcaaagcagcagccgactgcttttcatgtggatcccaaatcccatttctcttcactgggtagaatctcctgaccaggacctcctgtcacccccactggtgttttctggctgacagcagttccaacccctccctgagatgtagctcccagagggaggggcaggccaccatctttgctctttagcagccttagctgccttcaggcattagagtccatggtgaccaggggmtgtagtggatccccagaaaagcacaactatcttgaggaaaagcagccaggctgcttttttacatgggtccctgatcctatacctccttactgggtgggatctcctgattggggtctccaaccacttcttgcaggtgtgttcaggttggtaacaggtccgacctccctgggatggagctcccagagggaggggcaggccacctttttgctgttttgcagccttcact

SEQ ID NO: 919312 - DNA, 616 bp, Homo sapiens
taatcaagcctgggcaatggcgggcgcccctcccccagcctcgctgcagccttgcagtttgatctcagactgctgtgctagcaatcagcgagactccgtgggcataggaccctccgagctgggtgtgggatataatctcgtgctgcgtcgttttttaagcctgtcggaaaagcgcggtatttgggtgggagtgacccaattttccaggtgccatgggtcacccctgtctttgactaggaaagggaactccctgacctcttgtgcttcccaagtgaggcaatgcctcrccctgcttcagctcgcgcacagtgcgcgcacccactgacctgcgcccactgtctggcactccctagtgagatgaacccggtacctcagatggaaatgcagaaatcacccgtcttctgcgtcgctcatgctgggagctgtagactggagctgttcctattcggccatcttggctcctcccccccatgtgccactcattttaaaagacaactttcttcactaaagtttacctttgccatgaatcaaatgaccatttatgtgtgtgtctttctctacactctttattctgttccgttgttctatatgtgtagccttgagctcaggtcatgct

SEQ ID NO: 919313 - DNA, 616 bp, Homo sapiens
taatcaagcctgggcaatggcgggcgcccctcccccagcctcgctgcagccttgcagtttgatctcagactgctgtgctagcaatcagcgagactccgtgggcataggaccctccgagctgggtgtgggatataatctcgtgctgcgtcgttttttaagcctgtcggaaaagcgcggtatttgggtgggagtgacccaattttccaggtgccatgggtcacccctgtctttgactaggaaagggaactccctgacctcttgtgcttcccaagtgaggcaatgcctcgccctgcttcagctcgcgcacagtgcgcgcacccactgacctgcgcccactstctggcactccctagtgagatgaacccggtacctcagatggaaatgcagaaatcacccgtcttctgcgtcgctcatgctgggagctgtagactggagctgttcctattcggccatcttggctcctcccccccatgtgccactcattttaaaagacaactttcttcactaaagtttacctttgccatgaatcaaatgaccatttatgtgtgtgtctttctctacactctttattctgttccgttgttctatatgtgtagccttgagctcaggtcatgct

SEQ ID NO: 919314 - DNA, 616 bp, Homo sapiens
taatcaagcctgggcaatggcgggcgcccctcccccagcctcgctgcagccttgcagtttgatctcagactgctgtgctagcaatcagcgagactccgtgggcataggaccctccgagctgggtgtgggatataatctcgtgctgcgtcgttttttaagcctgtcggaaaagcgcggtatttgggtgggagtgacccaattttccaggtgccatgggtcacccctgtctttgactaggaaagggaactccctgacctcttgtgcttcccaagtgaggcaatgcctcgccctgcttcagctcgcgcacagtgcgcgcacccactgacctgcgcccactgtctggcactccctagtgagatgaacccggtacctcagatggaaatgcagaaatcacccgtcttctgcgtcgctcaygctgggagctgtagactggagctgttcctattcggccatcttggctcctcccccccatgtgccactcattttaaaagacaactttcttcactaaagtttacctttgccatgaatcaaatgaccatttatgtgtgtgtctttctctacactctttattctgttccgttgttctatatgtgtagccttgagctcaggtcatgct

SEQ ID NO: 919315 - DNA, 616 bp, Homo sapiens
taatcaagcctgggcaatggcgggcgcccctcccccagcctcgctgcagccttgcagtttgatctcagactgctgtgctagcaatcagcgagactccgtgggcataggaccctccgagctgggtgtgggatataatctcgtgctgcgtcgttttttaagcctgtcggaaaagcgcggtatttgggtgggagtgacccaattttccaggtgccatgggtcacccctgtctttgactaggaaagggaactccctgacctcttgtgcttcccaagtgaggcaatgcctcgccctgcttcagctcgcgcacagtgcgcgcacccactgacctgcgcccactgtctggcactccctagtgagatgaacccggtacctcagatggaaatgcagaaatcacccgtcttctgcgtcgctcatgctgggagctgtagactggagctgttcctattcrgccatcttggctcctcccccccatgtgccactcattttaaaagacaactttcttcactaaagtttacctttgccatgaatcaaatgaccatttatgtgtgtgtctttctctacactctttattctgttccgttgttctatatgtgtagccttgagctcaggtcatgct

SEQ ID NO: 919316 - DNA, 842 bp, Homo sapiens
gaattgttgatttgattctcagcttagtcactgttggtgaatagcagagctactaattagtatacattaattttgtatcttgaaactttgctgaattcatttaccagttctaggagctttttggatgagtctttagggttttctaggcatatgattgtatcatcagcaaacagcaggagtttgactttctctttactgatttggatgccctttatttctttctcttgtctgattgctctggctaggacttccagtaccatgttgaatagaagtgatgaaagtggacatccttgtcttgttccagttctcacagggaatgctttcaacttttccccrttcaatataatgttggctgtgggtttgtcatagatggcttttattaccttaaggtaatatgccgattttgctgagtgtcttaatcacaaagggatgctggattttgtcaaatgctttttctgtgtctattcagatagtcatgagaattttttttttttttttgagatggagtctcactctgtccccaggctggagtgcagtggcatgatcttggctcactgcaacctccacctcccgggttcaagtgattcttctgcctcagcctcccaagtaactgagactacaggcacgtgccaccacacccagctaatttttgtatttttagtagagacggggtttcaccatgttggccaggatggtctcgatctctttacctcataatccacctacctcagcctcccaaagtgctgagattacaggcatgagccaccacgcctggcctaagttttgtttttaattctgtttatatgatgtatcacatttattgacttatgtatgttaaacca

SEQ ID NO: 919317 - DNA, 842 bp, Homo sapiens
gaattgttgatttgattctcagcttagtcactgttggtgaatagcagagctactaattagtatacattaattttgtatcttgaaactttgctgaattcatttaccagttctaggagctttttggatgagtctttagggttttctaggcatatgattgtatcatcagcaaacagcaggagtttgactttctctttactgatttggatgccctttatttctttctcttgtctgattgctctggctaggacttccagtaccatgttgaatagaagtgatgaaagtggacatccttgtcttgttccagttctcacagggaatgctttcaacttttccccgttcaatataatgttggctgtgggtttgtcatagatggcttttattrccttaaggtaatatgccgattttgctgagtgtcttaatcacaaagggatgctggattttgtcaaatgctttttctgtgtctattcagatagtcatgagaattttttttttttttttgagatggagtctcactctgtccccaggctggagtgcagtggcatgatcttggctcactgcaacctccacctcccgggttcaagtgattcttctgcctcagcctcccaagtaactgagactacaggcacgtgccaccacacccagctaatttttgtatttttagtagagacggggtttcaccatgttggccaggatggtctcgatctctttacctcataatccacctacctcagcctcccaaagtgctgagattacaggcatgagccaccacgcctggcctaagttttgtttttaattctgtttatatgatgtatcacatttattgacttatgtatgttaaacca

SEQ ID NO: 919318 - DNA, 608 bp, Homo sapiens
cgtcagctacagccacagtaatgctgcgtaacaacactttgaaactcagtaacttaacagcaataaacatttattgtcccacccatgggtctgcaggttggctgtggtttggctgctgtaggcagggcagggctaaggggctgtacttcaggctgmgggtcagggtcagggctgcttcacaggtctcttctcacaccaggatcatgtctacccagagcagttgcccacagaaatgacagaagatcaagagccaagagaaaccacacaggcagatcgagggccactacccatgttactagcattccactggccaaaacaagttccattgccaaactcagtatcagtggaaaatacacttcacctggggtgggagtgggaagaaagatttgctgaacaattatccagactactgtggtacccttgggcctctgttttctcatctgtaaaatgggaaccaagtgctgagtcagcagcagaggcttcggtctgacgcagcacctcccagggtccaagcctttgcctccccaaggctttctgattttaccctgctttattctgtggccttggcacgttggcaacctctggggtggaaaaagctgatgtcctgg

SEQ ID NO: 919319 - DNA, 557 bp, Homo sapiens
gaatggcctgactaggaccacctgtctggggttgtgggtcttctctgtgtggcatcaacaagggctggagtgtctgaggtggttgcttcactcacatgtctggtgcctgaataggctgggcagacatctctgtgtctctgtttgcagcctctccagggggctagcttgggcttcctcagaacatggcgaactcagggtatagagttagattmcctgaatgattctgactcccctggagcaaggatttcgttaggaattgctggtcttcttaaagcctaggtctgggactggccaggcatcacatctgccatattcttttttatttattttattttattttattattttattttattttgagacagagtctcgctctgtcgcccaggctggagtgcagtggtgcgatctcgcctcactgcaagctccgcctcctgtgttcatgccattctcctgcctcagcctcctgagtagctgggactacaggtgcccgccaccacgcctggctaattttttgtatttttagtagagacgggatttcaccgtgttagccaggatgg

SEQ ID NO: 919320 - DNA, 685 bp, Homo sapiens
cctctagctgatcacagatagaaaaatgagcccagccaagaccagaagaaccacctagctgagcccagcccaaattgtcaacccacagaacagaaagatgagctaaataaatgactgttttttgtttttttgtttrtttgttttgagacagagtctcgctctgttgcccaggctggagtgcagtggtacgatcttgactcactgcaagctccgcctcccaggttcatgccattctcctgcctcagcctcccaagtagctgggactacaggtgcccaccaccacgcccggctaattttttgtatttttagtagagacggggtttcactgtgttagctaggatggtcttgatctcctgacctcaagatccacccgcctcggcctcccaaagtgctgggattacaggtgtgagccaccgtgcctggccacagatggttttgttttaagccactaagttctggggtggtttctacacagccaaggctaactgatacaccacctcacagggctgttgtgagggattaaatgacagaccgcaggtcaagtcctcacaacagtacccagaacagtaagacctcaggaaacaacagctatttttatttgaaagccactctttgaggcctgcatggaatacagatgtaatagaaagtataaagatgctactagagaaagacatagcaacggttg

SEQ ID NO: 919321 - DNA, 662 bp, Homo sapiens
tcacagatagaaaaatgagcccagccaagaccagaagaaccacctagctgagcccagcccaaattgtcaacccacagaacagaaagatgagctaaataaatgactgttttttgtttttttgtttgtttgttttgagacagagtctcgctctgttgcccaggctggagtgcagtggtacgatcttgactcactgcaagctccgcctcccaggttcatgccattctcctgcctcagcctcccaagtagctgggactacaggtgcccaccaccacgcccggctaattttttgtatttttagtagagacggggtttcactgtgttagctaggatggtcttgatctcctgacctcaagatccacccgcctcggcctcccaaagtgctgggattacaggtgtgagccaccgtgcctggccacagatggttttgttttaagccactaagttctggggtggtttctacacagccaaggctaactgatayaccacctcacagggctgttgtgagggattaaatgacagaccgcaggtcaagtcctcacaacagtacccagaacagtaagacctcaggaaacaacagctatttttatttgaaagccactctttgaggcctgcatggaatacagatgtaatagaaagtataaagatgctactagagaaagaca

SEQ ID NO: 919322 - DNA, 556 bp, Homo sapiens
tactgcaaactgttttatcagccaggtccttatgacctgtgttttgtgccaacttcctatctcaccttgtgacttggaatgcctaacatcctgggaatgcagcccagtaggtcacagcattattttaccaagcccttattcaagatggagttgctctggttcaagtgcctctgacaaaatcwtctttgcaaaattatgacagtaagagaaatctaacattactaacttcatcttgcttctaacctgacaggctggctgtcttttctcatttctgggcatgggccaagctaattttgggagaaatttagtttatagtttaaattataataggccttctaaaaaaactaaactgctcctataaaactaatggacagccaccaagttatgacggcgagaggggcttgaattctaaataattaccagccattactctggaggtcataagatttgcaactttcccagttactcttggagataacatcactattgtagaacctaagatgggccatttgaaatgtcttttcaggtttttgtattcctaacaactggatagcct

SEQ ID NO: 919323 - DNA, 728 bp, Homo sapiens
ggcgaggagactcatgtctgtaatcccagcagtttaggaagttgaggaaggagaatctcttgaggccaggagttcaagaccagcctgggcaacatagggggatcctgcctctacaaaaaatacaaaaattagccaggcatgatggcctatacctttagttccggttacttgagaggctaacgtgggagaactgcttgagcctgggagattgaggctatgagtgtaccactgcactacagcctgggtgacaaagaaagaccctgtttaaaaaaacatgcactcggcygggcgcggtggctcacgcctgtaaacccagcattttgggaggccgaggtgggcagatcaggaggtcaggagattgagaccatcctggttaacacggtgaaacaccgtctctactgaaaaaaaaagaatacaaaaaattagctgggcgtggtggcgggcgcctgcagtcccagttactcaggaggctgaggcaggagaatggcgtgaaccaggggggcagagctttcagtgagccgagatcgtgccactgcactccaggccgggcgacagagcaagactcctgctcaaaacaaaaacaaaaacaaaaacaaacttcaatcaaaaaaacatggacatgctctcaaaagagttagctcaagcatctggtggtatccactgtataaaaaccacattatgatccagcaatcccacctctaagtatgtatccaaagggatgaaatgag

SEQ ID NO: 919324 - DNA, 728 bp, Homo sapiens
ggcgaggagactcatgtctgtaatcccagcagtttaggaagttgaggaaggagaatctcttgaggccaggagttcaagaccagcctgggcaacatagggggatcctgcctctacaaaaaatacaaaaattagccaggcatgatggcctatacctttagttccggttacttgagaggctaacgtgggagaactgcttgagcctgggagattgaggctatgagtgtaccactgcactacagcctgggtgacaaagaaagaccctgtttaaaaaaacatgcactcggccgggcgcggtggctcacgcctgtaaacccagcattttgggaggccgaggtgggcagatcaggaggtcaggagattgagaccatcctggttaacacggtgaaacaccgtctctactgaaaaaaaaagaatacaaaaaattagctgggcgtggtggcgggcgcctgcagtcccagttaytcaggaggctgaggcaggagaatggcgtgaaccaggggggcagagctttcagtgagccgagatcgtgccactgcactccaggccgggcgacagagcaagactcctgctcaaaacaaaaacaaaaacaaaaacaaacttcaatcaaaaaaacatggacatgctctcaaaagagttagctcaagcatctggtggtatccactgtataaaaaccacattatgatccagcaatcccacctctaagtatgtatccaaagggatgaaatgag

SEQ ID NO: 919325 - DNA, 728 bp, Homo sapiens
ggcgaggagactcatgtctgtaatcccagcagtttaggaagttgaggaaggagaatctcttgaggccaggagttcaagaccagcctgggcaacatagggggatcctgcctctacaaaaaatacaaaaattagccaggcatgatggcctatacctttagttccggttacttgagaggctaacgtgggagaactgcttgagcctgggagattgaggctatgagtgtaccactgcactacagcctgggtgacaaagaaagaccctgtttaaaaaaacatgcactcggccgggcgcggtggctcacgcctgtaaacccagcattttgggaggccgaggtgggcagatcaggaggtcaggagattgagaccatcctggttaacacggtgaaacaccgtctctactgaaaaaaaaagaatacaaaaaattagctgggcgtggtggcgggcgcctgcagtcccagttactcaggaggctgaggcaggagaatggcgtgaaccaggggggcagagctttcagtgagccgagatcgtgccactgcactccaggccgggcgacagagcaagactcctgctcaaaamaaaaacaaaaacaaaaacaaacttcaatcaaaaaaacatggacatgctctcaaaagagttagctcaagcatctggtggtatccactgtataaaaaccacattatgatccagcaatcccacctctaagtatgtatccaaagggatgaaatgag

SEQ ID NO: 919326 - DNA, 769 bp, Homo sapiens
aatttgcataattaacaaggagctgaatgttaatccccaagacaatggggaaaatgtctccagggcacgtcagatgtcttctcggcagcccctcccatcataggcctggaggcctaggaggaaaagatggtttcatgggccaaacccagggctcccgtgctctgtgcagcctarggacttggtaccctgcattccaaccactccagccatggctaaaagggagcaaggtagagctcaggctgttgtttcagagggtggaagccccaagccttggcagcttctacatagtgttcagcctgcaagtgcacagaagtcaagaattgaggcttgggaacctccgcctagaatacagaagatgtatagaaacagtctgtctgggcatggtggctcacgcctgtaatctcagcactatgggaggctgaggcgggcagatcacctgaggtcaggagtttgagaccaccctggccaacatggtgaaaccctgtctctgctaaaaatacacacaaattagccaagcgtggtggcacacgcctgtaatcccagctacttgggaggctgaggcacaagaattgcttaaaccttgaaagcagaggttgcagtgagccaagatcaaaccactgcactgcagcctgggtgacagagtgagactctgtctccaaaaaaaaaaaatgtatagaaatgcctggatgcccaggcagaagtttgctgtaggagtggggccctccaggggaacctctgctagaatagtgcagaaggaaaatgtgggtgg

SEQ ID NO: 919327 - DNA, 710 bp, Homo sapiens
atgacataatatttcatcatttcaaaagctaaaaaattatcagcatccagaaataaatgaaattataaataaaaatttagtagatgatgccggtaagtgttggaattagaggcaaacattttttaaaaattgttatatttcgccgggcgcggtggctcacgcctgtaatcccagcactttgggaggccgaggcgggcggatcacgaggtcaggagattgagaccatcttggctaacacggtgaaacccccgtctctactaaaaacacaaaaaattagctgggcgtggtcgcgggcgcctgtagtcccaactactcggcaggctgaagcaggagaatggcgtgaacccgggaggcggagcttgcagtgagccgagatcscgccactgcactacagcccgggtgacagagcgaaactccgtctcaacaacaacaacaaaaatttcttagatctctgcctcaaaactaatgtctaaatgagttccagctagataaaatgtaaataatgaaatgataaaaggactaaaagaaaatacgggtgaatatgttcatatattcttgggatgaagagaatccaaataagcaagcaaaccaaaacccagactcaaaagaaagaaatcttaaagaagagaatacataaaaattttaacttttaaattcctacaatggatatttcttttcttttcttttcttttttttttcagagacggggt

SEQ ID NO: 919328 - DNA, 607 bp, Homo sapiens
tccccaaaggccccatctccaaataccatcacattaggggttaggactttcatatggtttggctatatccccaaccaaatctcatcttgaattcccacatgttgtggaagggacccaatgggaggtaattgaatcatgggggcaggtctttcctgtgctgttctcatgacagtgaataattctcacgagatccgatggttttataatggggagtttttctgcacaagctctcttctcttgtctgccgccatgtgagatgtgcctttcaccttccaccatgattgtggggcctccccaaccacgtggaactatgagtccattaaacttcttttataaattccctagtgtcaggtatgtccttatcagcactgtgaaaatgaactagtacagacttcaccatatgaattttgggagggatacagcatttagtccataacacaaycatgtgccataaaataaccagtcacaaagcctcagtgccaaataatagcaaacttttttttttttttttttttttgagacagggtctcactctgtcacccaggctggaggacagtggtacaaccttggctcactgcaaaccctgcctccccgggctcaaagaatc

SEQ ID NO: 919329 - DNA, 734 bp, Homo sapiens
gatcacaggaccacaggaccagggcaaaattaaaattgctaatgaagtttctggcaccattgtcattgataacatcttatcaggagacagggttttgagagcaaccagtctgaccaaaatttattaggcagggaatttcctcttcctaataagcctgggagtgctatgggagactggggtctatttcacccctacagtttcgaccatagaagacggccacacccaagggggctgtctataaacccacccccaggcacgtattctctttcccagggatgttcttttctgagaaaaagaattcagcaatatttctcccatttgcttttgaaagaagagaaatacggctctgttccgcccggctcacctgtggtcagagtttaaggttatctctcttgttccctgaacattgctgwtatcctgctcttttttcaaggtgcccagatttcatattgttcaaacacacatgctctacaatttgtgcagttaatgcaattatcacagggtcctgaggcgacatacatcctcctcaactgacaggatgaagagagtaaagtaaagacaggcacaggaaatcacaaggttattgattggtgaagtgataagtgtccatgaagtcttcacaatttatgttcagagattgcagtaaagacaggcataagaaattataaaagtattaatttggggaactaataaatgtccatgaaatcttcacaatccacgttcttctgccatgg

SEQ ID NO: 919330 - DNA, 734 bp, Homo sapiens
gatcacaggaccacaggaccagggcaaaattaaaattgctaatgaagtttctggcaccattgtcattgataacatcttatcaggagacagggttttgagagcaaccagtctgaccaaaatttattaggcagggaatttcctcttcctaataagcctgggagtgctatgggagactggggtctatttcacccctacagtttcgaccatagaagacggccacacccaagggggctgtctataaacccacccccaggcacgtattctctttcccagggatgttcttttctgagaaaaagaattcagcaatatttctcccatttgcttttgaaagaagagaaatacggctctgttccgcccggctcacctgtggtcagagtttaaggttatctctcttgttccctgaacattgctgttatcctgctcttttttcarggtgcccagatttcatattgttcaaacacacatgctctacaatttgtgcagttaatgcaattatcacagggtcctgaggcgacatacatcctcctcaactgacaggatgaagagagtaaagtaaagacaggcacaggaaatcacaaggttattgattggtgaagtgataagtgtccatgaagtcttcacaatttatgttcagagattgcagtaaagacaggcataagaaattataaaagtattaatttggggaactaataaatgtccatgaaatcttcacaatccacgttcttctgccatgg

SEQ ID NO: 919331 - DNA, 910 bp, Homo sapiens
acaaaagagagaaattttaaagctgggcgtccaggggagacatcacatgttggtaggttccgtgatgccccacaagctgcaaaaccagcaagtttttattagggactttcaaaaggggagggagtgtacgaataggtgtgggtcacagagatcacgtgcttcacagggtaatagaatatcacaaggcaaatggaggcagggcgagatcacaggaccacaggaccagggcaaaattaaaattgctaatgaagtttctggcaccattgtcattgataacatcttatcaggagacagggttttgagagcaaccagtctgaccaaaatttattaggcagggaatttcctcttcctaataagcctgggagtgctatgggagactggggtctatttcacccctacagtttcgaccatagaagacggccacacccaagggggctgtctataaacccacccccaggcacgtattctctttcccagggatgttcttttctgagaaaaagaattcagcaatatttctcccatttgcttttgaaagaagagaaatacggctctgttccgcccggctcacctgtggtcagagtttaaggttatctctcttgttccctgaacattgctgttatcctgctcttttttcaaggtgcccagatttcatattgttcaaacacacatgctctacaatttgtgcagttaatgcaattatcacagggtcctgaggcgacatacatcctcctcaactgacaggatgaagagaktaaagtaaagacaggcacaggaaatcacaaggttattgattggtgaagtgataagtgtccatgaagtcttcacaatttatgttcagagattgcagtaaagacaggcataagaaattataaaagtattaatttggggaactaataaatgtccatgaaat

SEQ ID NO: 919332 - DNA, 910 bp, Homo sapiens
acaaaagagagaaattttaaagctgggcgtccaggggagacatcacatgttggtaggttccgtgatgccccacaagctgcaaaaccagcaagtttttattagggactttcaaaaggggagggagtgtacgaataggtgtgggtcacagagatcacgtgcttcacagggtaatagaatatcacaaggcaaatggaggcagggcgagatcacaggaccacaggaccagggcaaaattaaaattgctaatgaagtttctggcaccattgtcattgataacatcttatcaggagacagggttttgagagcaaccagtctgaccaaaatttattaggcagggaatttcctcttcctaataagcctgggagtgctatgggagactggggtctatttcacccctacagtttcgaccatagaagacggccacacccaagggggctgtctataaacccacccccaggcacgtattctctttcccagggatgttcttttctgagaaaaagaattcagcaatatttctcccatttgcttttgaaagaagagaaatacggctctgttccgcccggctcacctgtggtcagagtttaaggttatctctcttgttccctgaacattgctgttatcctgctcttttttcaaggtgcccagatttcatattgttcaaacacacatgctctacaatttgtgcagttaatgcaattatcacagggtcctgaggcgacatacatcctcctcaactgacaggatgaagagagtaaagtaaagacaggcacaggaaatcacaaggktattgattggtgaagtgataagtgtccatgaagtcttcacaatttatgttcagagattgcagtaaagacaggcataagaaattataaaagtattaatttggggaactaataaatgtccatgaaat

SEQ ID NO: 919333 - DNA, 612 bp, Homo sapiens
gcctatggctcctccagggaaataaactttgccctccctaggagcagggccacaatgtagctactgccactttcacctgagcaatttgccagtggcctggggctcatcttgctcctgcataacagagccagtgtcttacacaccatccgagggactgaaagcacaatgtgacttggccccataacccccgtaccttagcacaccattgaagggtcttgggattgcccagcccagtccaccactggtggcacctaagcacttttttgagtgtctgaggttgggcccacttaacttgcccataccaccacaactgttacccacctgtgtgtaccacatgcaggtctgggaatcagctcgcctaactatagtcaaaaacagcatggaccagttgsgtcccaggggtttgtcccaccactgctactgccattgtcaatgtcataccaaccacccaggcacttgagaacctgcccgtacaccaggcccactgctgccattcccagcatctgagcaacccacctggaagctcaagaatcagcctgcctggacccatgaacgccagtgccaatgtgcagcaccctgcaccctggagccattacaaaggcatccttagct

SEQ ID NO: 919334 - DNA, 612 bp, Homo sapiens
gcctatggctcctccagggaaataaactttgccctccctaggagcagggccacaatgtagctactgccactttcacctgagcaatttgccagtggcctggggctcatcttgctcctgcataacagagccagtgtcttacacaccatccgagggactgaaagcacaatgtgacttggccccataacccccgtaccttagcacaccattgaagggtcttgggattgcccagcccagtccaccactggtggcacctaagcacttttttgagtgtctgaggttgggcccacttaacttgcccataccaccacaactgttacccacctgtgtgtaccacatgcaggtctgggaatcagctcgcctaactatagtcaaaaacagcatggaccagttgcgtcccargggtttgtcccaccactgctactgccattgtcaatgtcataccaaccacccaggcacttgagaacctgcccgtacaccaggcccactgctgccattcccagcatctgagcaacccacctggaagctcaagaatcagcctgcctggacccatgaacgccagtgccaatgtgcagcaccctgcaccctggagccattacaaaggcatccttagct

SEQ ID NO: 919335 - DNA, 560 bp, Homo sapiens
aagagaaagaatgcaaatggtaccactagagaaaaccaccaaactacaatgacaagcagtaagaaaaaaagaaaaacaacaacaccaacaacaaataatatacaaaacaaccagaaaatacttagcaaaatgagaagaaaatccctcatatcaataatatccttgaattaaattttccgtttaaaagatatctcatggttgaataaagataatataatccaagtatatgctgcctgcaggaaacaaacataccttatctttaaagaaacatatagactaaaagtaaagggatgaaaaaatatatttcatgcagatggaaactaaaaatgaccaggaggaattatacatgtatatrtcacataagaaataatttaagtcaaaaaacagtgaaaaaaagacaaagacgattattatatagcgataaaggatgaatccagcatgaggatataacaattctaaatatatatgccccaatattggaacatccaaattcacaaaacaaatattactagatcagaagagcgagagactctaatacaataatagcgcaggactataac

SEQ ID NO: 919336 - DNA, 608 bp, Homo sapiens
gcttggaaaaacagtgtaaaccggcagtgtaaacaagagcagggcatgtatgagtagttgagaacggtgaataggagtatgactagacagaagatagtggggatgacaagttttttggggcacagtctaagttggtctggtgtctggaatgagactggggcctaataaaaggagcgtctatacaggagcttaaatgggctgtaccctgtagcattctgaggacaggcctgaattctgagaagsgaaagtggtaaaagtattgtccggtccattttaagttagtggctgagcttggtgaggtgtgtttttaaaagacctttagtccattctacttttcttgaagatggaggaccgtaagggatataaaggtttcgctgaatactaagagcctgaaaaactgcttggctgatttgactaataaaggctcgtctgttatcagactgtattgaggtgggaaggctaaactgaggaattatgtctgacagaacggaagaaatgactgcggtggccttctcagaccctgtaggaaaggcctgtacctatccagtgaaagtatctacctagactaagaggtattttttagttatctgactcagggcatgttgagt

SEQ ID NO: 919337 - DNA, 614 bp, Homo sapiens
agtagctgggattacaggggtgcaccaccacgcccggctaatttttgtatttttagtagagacggggtttcactgtgttgggcaggctggtattgaattcctgacctcaggtgatccacccgcctctgcctcccaaagtgctgggttaacaagcgtgaaccaccgaacctggcctaatttatttttaattttaatttttattttttattgttttgagatagagtctcgctctgtcacccaggcagtggtgtgatcttggctcactgcaacctccgcctccgggttcaagcartcttcatgaatagctggaattacaggcatgcaccaccatgcctggctaatttttgtatttttagtagagacaaggtttcatcctgttggccatgatggcctcaaactcctggcatcaagtgatccgcctgcctgggcctcccaaagtactgggattacagatgtgagccatttttaattttcgtgggtacatagtaggcatatatatttctgggttacatgagctattttgatacagacacgcaatgcataataatcacaccagggtagatggatatctgtcatctcaagtatttatcctttgtgtttcaaacagaccagtt

SEQ ID NO: 919338 - DNA, 637 bp, Homo sapiens
tctgctctgggtccatcattaatttttattttatttattattatttttagagatgaggtcttgctatgttgcccagcctggtctcagactacaggcattcaccactgcatccagcttttccttccttcccgccttccttccttccttccttccttccttccktccttcccttcttcctttttttcttttttttttgacaaagtcttgctctcttgcccatgccggagtgcaatggtttgatctcacctcactgcaaccttcgcctcccgggttcaagcgattctcctgcctcagcctcccaagtagctgggattataggcggctgcaaccatacccagctaatttttgtattttttagtagagatgggctttcaccatgttggccaggctggtcttgaactcctgacctcaggtgattcgcctgcctcggcatcccaaagtgttgagattacaggcgtgtgccaccatgcctggccaacacccagctttttctaggcctttttttttcttttttttttttgagacagagtctcactctgtcacccaggctggactgcagtggcgcaatctcggctcactgcaacctcccgctcctgggttcaagcgattctcctgcctcagcctcccgagtagctgg

SEQ ID NO: 919339 - DNA, 637 bp, Homo sapiens
tctgctctgggtccatcattaatttttattttatttattattatttttagagatgaggtcttgctatgttgcccagcctggtctcagactacaggcattcaccactgcatccagcttttccttccttcccgccttccttccttccttccttccttccttccttccttcccttcttcctttttttcttttttttttgacaaagtcttgctctcttgcccatgccggagtgcaatggtttgatctcacctcactgcaaccttcgcctcccgggttcaagcgattctcctgcctcagcctcccaagtagctgggattataggcggctgcaaccayacccagctaatttttgtattttttagtagagatgggctttcaccatgttggccaggctggtcttgaactcctgacctcaggtgattcgcctgcctcggcatcccaaagtgttgagattacaggcgtgtgccaccatgcctggccaacacccagctttttctaggcctttttttttcttttttttttttgagacagagtctcactctgtcacccaggctggactgcagtggcgcaatctcggctcactgcaacctcccgctcctgggttcaagcgattctcctgcctcagcctcccgagtagctgg

SEQ ID NO: 919340 - DNA, 683 bp, Homo sapiens
cacaagtccatgtgattagatgtttccaagagtctggaataacataccccaaactgttaatagtggttaccctatagaaggggagtaggaaggtgtgtgttggggtggaggatggtttgccaactggaaactcactccaggctaacatttattgctaggcaccattctaaactttgccagtaatcctctccctagaggctgaggaagaccacttctycaagccctatttaatagacagcgtggccaggcatggttgctcacgcctgtaatcccaccactttgggaggccgaggcaggtggatcacctgaggtcaggagttcgagaccagcctggccaacgtggtaaaacctcttctctactaaaaatacaaaaaaaattagctgggcttggtggcgggcacctgtagtcccagctacacgggaggctgaggcaggagaattgcttgaatccaggaggcagaggttgcagtaagccaaggtcgcaccactgcactccagcctgggtgacagagcgagactctgtctcaaaaaaaaaaaaaaaaaaaaaaaaaaagaggaaagaaaaatgaaagaaagaaagaaaaattagctgggtgtggtggcgtacgcctgtagtcccaagtcccagctactcgggaggctgagacaggagaatcgcttatcactggagtccaggaggcaga

SEQ ID NO: 919341 - DNA, 683 bp, Homo sapiens
cacaagtccatgtgattagatgtttccaagagtctggaataacataccccaaactgttaatagtggttaccctatagaaggggagtaggaaggtgtgtgttggggtggaggatggtttgccaactggaaactcactccaggctaacatttattgctaggcaccattctaaactttgccagtaatcctctccctagaggctgaggaagaccacttcttcaagccctatttaatagacagcgtggccaggcatggttgctcacgcctgtaatcccaccactttgggaggccgaggcaggtggatcacctgaggtcaggagttcgagaccagcctggccaacgtggtaaaacctcttctctactaaaaatacaaaaaaaattagcygggcttggtggcgggcacctgtagtcccagctacacgggaggctgaggcaggagaattgcttgaatccaggaggcagaggttgcagtaagccaaggtcgcaccactgcactccagcctgggtgacagagcgagactctgtctcaaaaaaaaaaaaaaaaaaaaaaaaaaagaggaaagaaaaatgaaagaaagaaagaaaaattagctgggtgtggtggcgtacgcctgtagtcccaagtcccagctactcgggaggctgagacaggagaatcgcttatcactggagtccaggaggcaga

SEQ ID NO: 919342 - DNA, 638 bp, Homo sapiens
cactttaaagggatgaattatatctcaataaagctgtttggggttttttttgttgtttttttgtttgtttgtttttttgagacagagtctcgctctgtcactcaggccagagtgcagtggtgcaatcttggctcactgcagcctccgcctcctgcgttcaagcgattctcctgcctcagcctcctgagtagctgggactacaggtacgcaccaccatgcccagctaatttttgtatctttagtagagatggggtttcactatgttggccaggatggtcttcatctcttgacytcgtgatccgcctgccttggcctcccaaagtgctgggattacaggcatgagcccccacgcctggcctaaagctgctgtttttaaaaaaaaaaagaagaagaaaaagactggctttctcctccactgcaggagattaggaactataaagtcattttctagggatacatccacagggaccttggaaggaccaggactcagcatcactgagggtcacatcagactccaaagccattccattttctcgccacctacctggctcttccatgtgaacaatgatccagttgaaggccacctcggcgcccatatttccagtgaagtacacagccttgcgacatgcttccagcgg

SEQ ID NO: 919343 - DNA, 617 bp, Homo sapiens
ccttactgcttcccttcatctccccgacctttgaattttggtgatctggggttcaaaccttcttcttccccccctatccagactctctttctttctctctctggctgatatcatgttagtctatggcagtaaatgatattgktttcttaatttcatttctggaatgttcattgttagtgtatagaaatataatttaattttgtatattgatcttgtttcctgcaaccttgctgaactcatttgttagttctaatcattttttagtcgattcctctggactttctatatatgagattatgtcatctgcaaatagagacagttttacttcttccttgataatccaaataacttttacttctttttcttgcctaactgcaatggctagaacctcctgtacaatgttaaacagaagtgtcaaaagcgggcatccttatcttcttcctgatcttaggaggaaagcattgagtctttcacattaagtgtaaggtgaactgtggggtttttgtagatacattttatcacgttgaggaagatctcttccattcctagtttgctgatcattctccactcagccttatctatctcagtcaatggcaattccattcttccaataactc

SEQ ID NO: 919344 - DNA, 556 bp, Homo sapiens
aagactccaaaaatataataaaatatgttatatatacatacatacatatatatatatatatatatacattttcctataatccagctttctactcttaaatatgcacccaagaggagcaaaagcatagcccctaaagggtcagggtgtctttatccacawagtcaaggtgaatggactgcaaactgtccagaagcccatcagcaggtgaacggatacactagtgcacccacacaatgcaatatgacttagtaaccagaaagaaggaactgctgacatgatgaatcttaaaaaaaacaaaatgagataaagcagccgggcacaaagacgtgcacatggcatgattccatttacatgagataaagcagccgggcacaaagacgtgcacatggcatgattccatttacatgagataaagcagccgggcacaaagacgtgcacatggcatgattccatttacatgaaactctattagcatcgtgcctgtccctggtgagaaaacagcccagggcccaggagaaggtgctgggctgctgcgatccgggtgatgtttacacag

SEQ ID NO: 919345 - DNA, 838 bp, Homo sapiens
ctttcacagcttagtgactccaggaaggggcgtagggggcagccccatttaggaaaatgtggtttcctgttacccgtgcagggaggggccaaagtgcctctctgacctatggatggagaggcatgtgggctgccttgaccttgacagggccaagatcagaggaggtgatgtgtgggtactaggagttaacctgggaaagtacctgagccttcccgccttggcctactccgcccaagaggcctgccgggagcaagcctgcccagtgtgacttgtctcacctctgtgttcccacgtgatagtcactgccacaacatgaagacagaggcatgagatggaaacaccccrtggctctctctgaaccctccccagctggctccgaatttgggactgagccaggcggacgctccctttggggagaaacaccggctgacggggcatttggttccttccttcgcttatccagtgagccttgattaagccccttctgtatgccagccacaccgaaagaggggccaggaggctgagaatcgggtctgttggaggtggctggggggtagggtgggagggcagcatccatctcaggtgggccaagatgcccaggctctcctggctgtcagtgggcgtgtgacccctcggaggaagggtccccaggctcctcctgccttggggcatggacccgcccaccaagggcttcagggccagcccgggctcacgcagtgggttcacatgctccatgctgctcttggggacccacccaggcaccctctcagggcagggtgttgtcccctctgttcatggtggtgtcccggcgccttggcagagcccggcgtgtgatgat

SEQ ID NO: 919346 - DNA, 676 bp, Homo sapiens
agttctaggtggccagggggctgccttccttgacaaagcccttccctgacgagacgccagggcaaggccgagttagccagagctttcatcttcgtccctcacgttattctcttctgaggctgtgcctgcctttcagtaagcacggtgaacacacacagacacgcgcaagtgtaagcaccccccacccacaaggccaacgtgccctgctgyggtcatgaagcccaggctgcaaagacagcacctggccactagagggcgacgctgaacgctgacggccgggtcgcaagaaccaagcgccctccccgcctcagctcctgggggccgggccccagctcccacagcagaagcgagatctccaacaaggcccacaggagagaaaaccgccgcccttcctcaggcctccaacagcaccaagaatgcccactgtctacactaaccagaaacgtgtgacctggaggctgggagcccagcccggggtgaccccggttcccagccagctctgccctcactgtggggctggagggcagccgcctgcttaaccttgtctcgagctcttcagctgtaaaccagcgataaggccagcaatctggggcacgcaggaagggggtgggggtgcagaggggggtcttttggtggctgataacacagtctctacagcacagtgcccagcacagag

SEQ ID NO: 919347 - DNA, 668 bp, Homo sapiens
tctcaccaccacacctgccactaagccacctagtcctctttcccagcattgttttgatagcagctgtcaccttccaacagttaactccatttaactgagctatgttatttatacccggctctcccactgcactgtaagctctgggagagcagagatctaggtctattttgttcactaatattatctccagcacctggggctgttcctaacacatactatgggttgaatacatatttgctggatcagcaaatcatcaaattctcwaaactggtccaagaagcccattcttttctcctcaaagagaatcgtgctaagccaaagatatctccccatttgccatagctacttaaaccaaactcaaccgctttgtgctacagatacagacactgatggccccagaggtaacttggtgaagaccactaccggaaaaagaaagttaaaatctggaccaccaactcctagtcctctgactaggagggtctatctaccacaccacacatcctggctcatccagaaacaaagtttctaggaaagcgtcagccacatatgcaacctaaggaccagggtgtgcataaaccgagggtctaccagcaagaccacctctcctgcagtttatagccctggccaaaccactcactctccaggctaatcgaggagatagttcggaa

SEQ ID NO: 919348 - DNA, 706 bp, Homo sapiens
accagtgcctggggtggcagatcagggcctgcccaggtgacatgacccagagggtctgtgtaggacggtgccctcgggtcagccaggcctgagtgcggagggcaagcccgtgagttaccatgagggaaaggagaaagcctgcagaggtgctgaggacagaaggcaacagtggggacacagcaggaaccagggcgctgcgagggctctcacctgccatctcaagagcgtgcccaaccccgccacctgcctggccctcctgggtctcaccagtgccctgggaggaaggtcccacagggaccctcatcccaaggaaacaaaggaagccagacaggtgagggatggcaccttcccagaccccaccacaggcagtgaccgcagtggcactagagtacaagctgcccgccctccctcccgccctctgctgctgcccaccatggccccactgacccccaagayggacaggcccacggggatccaagcaggtggtgagacagcacgttccacccagcaacccgggaccgggtcagcccaagggaagaccctaaggccctcagatcactcaacactgccatccgagaccaacaagcaagaggctgggaaaggctccaaactcctgggtctaaatcctgtctagctatctcatttttcaaaaactgaaaattaaagtagagtgaaaaataaactccaggaaatggagccgaagcaa

SEQ ID NO: 919349 - DNA, 689 bp, Homo sapiens
ccctgacgcacccccaccctgggtgacccctcttctgatttgcagccagagtgccagcttctgctggaagctctgcagtgccccatcactcccagaacaaaagtcctagagggcaccaggcctgccccacaggtttgtgacctttccttgttgcacagcccctctggtagccaggtacagccgagagatgccgctgagtaaggtaaaatgcatgcattaaaacatgcacgattgccaaggaaaccagctgcactgaaatagttatcacaatcacccgtaaatggtgatagaggtatatgtaggcacctttattgacactaaatggtgaaatatacgcaaaacaggcaagttgttggtttaggcatagagcctgtgggccgagggtgggtggtctcccacaaggttggcctttttgagcactcagaagcccctgggaggcccctccgcctcctccatggcccggctccagtgacacctgccatgggcccacactgccccckgtctgtgtggaggggtcagtgtgggctgccaacgggttaggtaggtctgagccttgttccaagttaggagcaagctgggggaggacctgttgcagaggacagaggggtgggtggaaggggtcggtggctatcacagcatggatgtgttcctgggaaggatgtgagggtgtgtttggcaggttcctagcc

SEQ ID NO: 919350 - DNA, 603 bp, Homo sapiens
aagtgctgtctctccccagaaggctgcctggctgtggcctatggtggctgagggctggctgtggcccatggtggctgagggctggctgtggcctatggtggctgagggtccagatcagtcagcctcgacttcaactgcacagaccacactgaccatggggcggacacgctgagaccttataaaatggcaatggcagcaggagaagmgcgtttgctggagtcccaggagatattcctgagacaaaggaacgtggctgatgaattcacccaggttcttgggcagggccagcagccagaccccaccagcgtgaggcaggaacccttgggggtctggccagcagcccaaggctgaaggcaggcttctaagcctggaagtttctttctgggtagggtgggagtgaccccagtagcttcctttcctgtcctggacacctcaccacatgacttggggccacagggccatacctaagactccaaaactggggccaagggcagtatgacagcctcaggccccagtcccagccaatgtccaggagtagccgtacagaaacagcagggggccgtgcccaggcagggagcagccgcgggtggactagggtcagta

SEQ ID NO: 919351 - DNA, 631 bp, Homo sapiens
caatgaggaaaggatctcctcttcagtaaatggtgctgggaaaactggctacccatatgcacaaaactacaactggaccccttccttataccttaaacaaaaattaactcaagatggcttaaagacttacatgtaaaacccaaaaccataaaaaccctagaagaaaacctaggcaataccattcaggacataggcatgggcaaagacttcatgataaaaacaccaaaagcaactgcaacataagccaaaattgacaaatgagatccaattaaactaaagagcttctgcagagcaaaagaaactatcatcaaaatgaacaggcaacttacagaatgggagaaaatttttgcaawctatccatctgacaaaggtctaatatccagaatctacaaggaacttaaatttacaagtaaaaaacaaccccatcaaaaagtgggagaaggatatgaacagatacttctcaaaagaagacatttatgcggccaagaaacatttaaaaaagctcaacatcactgatcatcagataaatgcaaatcaaaaccacaatgagacaccatctcacaccagccagaatagcaattattaaaaagtcaggaaacaacagatgctggtgaggctacggagaaatggg

SEQ ID NO: 919352 - DNA, 637 bp, Homo sapiens
aaactttacgaagcttgaaaagatttaatgaaattaaaaactagtgtggcttgaaaattaaaacctaagaaatggcaaagtgaggtatttatctaaggcttattaagaaagggaataccgagaaaattagagaagccgcgagaattttaggaagcggtttgggttgtgccattctcccgactgccctttgttgagcccagtgtggctctgcctagaatgcccctgggatgccccctccctgtccctgcctgctggggtggggtggtgggcagcccccctgcatgcctggcccccccctttgccctcagcccatcaccrcaggcagtggctgcagctctgtccctcccaccaggatgagagccccgaggcaggagacgccttccgggtctctggatccccatcctggccacagggcctgacatgctctcaggaaagcgggtttgggttctgtggctgtgaggcagaaagcacccggttgttctggagcagcacagagggcatggaaggagaatgagcgtgtggaaatgacacactctgttgagacacgtggagttttaggtgccggtaggacatctggggcccatctaggggcagacagaaaccgggacatcagatgtcggtgaggcgccaccctgga

SEQ ID NO: 919353 - DNA, 637 bp, Homo sapiens
aaactttacgaagcttgaaaagatttaatgaaattaaaaactagtgtggcttgaaaattaaaacctaagaaatggcaaagtgaggtatttatctaaggcttattaagaaagggaataccgagaaaattagagaagccgcgagaattttaggaagcggtttgggttgtgccattctcccgactgccctttgttgagcccagtgtggctctgcctagaatgcccctgggatgccccctccctgtccctgcctgctggggtggggtggtgggcagcccccctgcatgcctggcccccccctttgccctcagcccatcaccgcaggcagtggctgcagctctgtccctcccaccaggatgagagccccgaggcaggagacgccttccgggtctctggatccccatcctggccacagggcctgasatgctctcaggaaagcgggtttgggttctgtggctgtgaggcagaaagcacccggttgttctggagcagcacagagggcatggaaggagaatgagcgtgtggaaatgacacactctgttgagacacgtggagttttaggtgccggtaggacatctggggcccatctaggggcagacagaaaccgggacatcagatgtcggtgaggcgccaccctgga

SEQ ID NO: 919354 - DNA, 486 bp, Homo sapiens
tctgaggttgtgggaagaaaaggcaacatttctgaggtagatctcatgactcactgggaggaaaaggggttggagaatgagagtagtaagtagagagttcctgttgtttcagctcagatgaccaagtggatggtgactctattcaatggggccaggacataggagatggagatttggtggggagattctgatatattttaggacttgaagggcttgaggtgcctacatgacaaccatgtagaaatgttcagtggagagctagaaacaacgtttccattraaacttctctctagcactgacgtaaattacatacctatattttaaataaattcctagttctgattgtgctaaaggactttgtgatgttggacactacatattaacaactgaagcaaaaggagaagagggagaacctgctgggaatgaaacactgagggtctgaaggggttggtaaactcaggtgtggggtggggactgaagggtagg

SEQ ID NO: 919355 - DNA, 478 bp, Homo sapiens
catcttctgcagctgctcacactcctgaagggaaagtagttaatacagatgggatgcagccagacccgcctcatgcagtgatttcagcagatgcagatctgcctccaagctctcatgggcagaaagagccgcaagagaacagtgtccttgatgagcaattaactcatttacctaagtatctggtgcactaaatagattcacatcctgttctgtatgaatgaatggaaaacatcaaggatggcctttgtatgagtacaagtgtccaatgtgaaatctgtgtacaaagcacatgccatyggaagcttggtcatcaggaaggcagaaaggaaattggctctttatagaatctttatagtacagaaacatatagaggtacatttccttcctctgagagtgccgttccataccacctggagagaatgccaggtggtaacaatgtacagcaggtttaatcaagacccagcatcctaaatcatgc

SEQ ID NO: 919356 - DNA, 600 bp, Homo sapiens
ttttgttttaagatgtgttattatcaaagaatcaaaaaattaaaaaaattaaaagtttataaagttatgataagctaagatgaacttgctaaagaaagaaaaaatttaaatacatttagtgtagcctaagtgtacagtgcatataaagtctatagttatgtacagtaatatcctaggccttcgcattcactcaccaagtactcactgactcatcagagcatctgccagtcctgcaacctctgttcatgctaaatgtcctttactggtgtaccactctctttaaattttgtaatatatatatatttttttctttgttttttttgagaaggagttttattttgttgcccaggctggagttcratgatacgatcttggctcactgcaacctctgcctccggggttcaagtgattctcctgcctcagcctcacgagtagcggggattacagccccacgccagcacgcccagctaattttgtatttttagtacagacggagtttctccatgttggtcaggctggtctcgaacttctaacctcaggtgatccgcccccctcggtctcccaatgtactgtgtttttactgtatcttttccatgttta

SEQ ID NO: 919357 - DNA, 594 bp, Homo sapiens
gtttttgttttaagatgtgttattatcaaagaatcaaaaaattaaaaaaattaaaagtttataaagttatgataagctaagatgaacttgctaaagaaagaaaaaatttaaatacatttagtgtagcctaagtgtacagtgcatataaagtctatagttatgtacagtaatatcctaggccttcgcattcactcaccaagtactcactgactcatcagagcatctgccagtcctgcaacctctgttcatgctaaatgtcctttactggtgtaccactctctttaaattttgtaatatatatatatttttttctttgttttttttgagaaggagttttattttgttgcccaggctggagttcaatgatacgatcttggctcactgcaacctctgcctccggggttcaagtgattctcctgcctcagcctcacgagtagcrgggattacagccccacgccagcacgcccagctaattttgtatttttagtacagacggagtttctccatgttggtcaggctggtctcgaacttctaacctcaggtgatccgcccccctcggtctcccaatgtactgtgtttttactgtatcttttc

SEQ ID NO: 919358 - DNA, 661 bp, Homo sapiens
agctggtcaacatggggaaaccccacctctactaaaaatacaaaaattagctgggtatggtggtgtgtaatcccagctattgaggaggctgaggcacgagaatcgcttggacccaggaggcagaggttgcagtgagccaagatcgtgccaytgcactctagcctgggcaacagggcaagcctctgtctcaaaaaaaaaaaaaaaaagaagaagaagaaagaaaacaaagaagaaagaaagaaagaaagaaaattaaaagaaggaaatgccataaagcatctgggcaaagaacatccaaagaagagcactgatcactgcagcagacagccgttcagaatgggcagagagcagagctggcaggaagagaggacaaaaggaagaccaggaagggaagccaggaaaagagattttgcattgtgttattatttcaatcagaagacttaggaacattatttaattatcaaattttgtgtgtctgatgatcctttacaacactgcagcatcaaataaagtgttatcagatttctttctttttttttttttgagactgggtctgattctgtagcccaggctggagtgcaggggtataataatagttcactgcagcttcaaactcttgagtttgtttgtttgtttgtctgtttgtttgtttgtttgtttg

SEQ ID NO: 919359 - DNA, 661 bp, Homo sapiens
agctggtcaacatggggaaaccccacctctactaaaaatacaaaaattagctgggtatggtggtgtgtaatcccagctattgaggaggctgaggcacgagaatcgcttggacccaggaggcagaggttgcagtgagccaagatcgtgccattgcactctagcctgggcaacagggcaagcctctgtctcaaaaaaaaaaaaaaraagaagaagaagaaagaaaacaaagaagaaagaaagaaagaaagaaaattaaaagaaggaaatgccataaagcatctgggcaaagaacatccaaagaagagcactgatcactgcagcagacagccgttcagaatgggcagagagcagagctggcaggaagagaggacaaaaggaagaccaggaagggaagccaggaaaagagattttgcattgtgttattatttcaatcagaagacttaggaacattatttaattatcaaattttgtgtgtctgatgatcctttacaacactgcagcatcaaataaagtgttatcagatttctttctttttttttttttgagactgggtctgattctgtagcccaggctggagtgcaggggtataataatagttcactgcagcttcaaactcttgagtttgtttgtttgtttgtctgtttgtttgtttgtttgtttg

SEQ ID NO: 919360 - DNA, 676 bp, Homo sapiens
aaccagtatctcttcaccttacctttacataatactttaccctaatgcattttatctgctgttctaaatcatgacttacttcaaatcaaatcttaagtgaaaatcaagatttccttttgggggcattatacaaaaaagactgtaaaatttcattctctgaaagtctttttaaaaagggatagattgtatctggctgggatagggtaggtgtgatcggacccggaggaaatgayggctgctcaactctgcatctcctttcctcaccctgctgaaaagtgccacctagcatggtcaatcaaggtcaccaatgcaaagcagtagtgggcaaacaccacccaggttatccaaagcagcacatggggttgggaaactgatgaccttggagatttcaaaatcacctaacaataaccccaccttccctaaccacagggctaagcaacctaatggatcgaacatatgtgtgttttggtcatccgcaacccagaccactagactaattttgctttagaactggactatatcaagtgtgaacgatcatacttgttatcatgtgggaaaaaaggtttaattactccctaattgtctgggaaacaaaagatttcaaaatacggagctcctgggggaaggagagttaataaaatgggtccttgagaagtgaagtgggaagcctgcctca

SEQ ID NO: 919361 - DNA, 613 bp, Homo sapiens
catggtgatgggctggctggggttggcagggagcttgctctccttctcggagggccggagcagcgtggggccaaacaccgtgccaaggttgtgcagggacatcttattgactgcctccttctctgccatcctgtagaggaccgaagcagagggtgctgtttcaacgccaccaccaggagagaggcagaggggctgtgccgtgctagagtcctcagggagggagtgacctcgaccctggctgtgctgcaagctgactccagccttggtacttctgggtctcagtggcccaggacaaggggccagctctgggctgatggggaggtcttcatgatgtgcttgggagggaagggggggcggtccaaatgcactgctggccacggccaaagctctgagctctttgttaaggccacagtgcagagggaggagggtggcaaagaggagaggcagggcgggggtggcagtggtgctagtccttagaagcagtgagttactgcagacaggggtcrggggataggtccttggtgctgggggtctggtgggagcagaggggcaccccacggcctggagacctggagtcctgggcagccacaagagagctgggctacctttccag

SEQ ID NO: 919362 - DNA, 604 bp, Homo sapiens
actgatctgccactggggttagagacaaacgtggtgggaatggaaagccacgcacagtcactagcgcctctggggggagaatggatgtggctggtgagagaacaggggggcccagggagagtccggcaccaacctgggygggggagcccagtgggtgtgagcacccccactttagagatgaagtgatggagacattcagatgtttaaccccttgttcaagattccatacttgataaatggcagatcaaactcccaacataaaatgtgggtcatttctttattattttatttgtattggttaacaatgatcagccatgcaagaataaatgattattgtaaaatctgcaaacaatgtagatatgtagagagtcccttccttggagcttgaccttgtcagacaggtatagatgagtgttccggggcagccgtaaaaactgccagagactgggctgcttataacagaaacgcatggtctcccagaagcccacattcaaggtgtccaaaggcctggctcctggaggctctggaggagagcctgttccctgtctctcagcttctgccggttgccagcaagtgttgccgttcattcactccagccactgcc

SEQ ID NO: 919363 - DNA, 671 bp, Homo sapiens
ggtcatttctttattattttatttgtattggttaacaatgatcagccatgcaagaataaatgattattgtaaaatctgcaaacaatgtagatatgtagagagtcccttccttggagcttgaccttgtcagacaggtatagatgagtgttccggggcagccgtaaaaactgccagagactgggctgcttataacagaaacgcatggtctcccagaagcccacattcaaggtgtccaaaggcctggctcctggaggctctggaggagagcctgttccctgtctctcagcttctgccggttgccagcaagtgttgccgttcattcactccagccactgcctccatctgcacacagcaaaacagcgtatcctgaagtgctcaaccttatagccattattttaaaatatccggaacacacaggaccgtgggagtggctgttggagaaattttcatgaaggaagaaagattacaactaagttttaaaatgctagttttgtttgttttgtcttggagaggaggtmaaagtgggagtaaaaatagggagtttggtgtaaggtgggaaaagcaaaggaaccccgcatggatgggctgaagggtgtgatgggagaacggtgagaagtacgtttggggaagcaattggaaatagtagctaagcttaatcacaatctatcaaa

SEQ ID NO: 919364 - DNA, 748 bp, Homo sapiens
agctgtggagaaggggggattccgggttaaggggagactagcagggctcctgcttttatgttgccctgttgggaaggctattaaagaaacacaaagtgctaagcagtgaggatagaacatgttttcattatttcaaccaatacattccacagatggaataataagaaatgctacaaccaagctaactgaatccaacagcatatcaaaaagataatccaccatgattcaagtgggtttcatactagggatgcagggatggtttaacatacgcaagtcaataaatgtgatacatcacatcaataaaactaaaaacaaaaatcacatgataatctgaatagatgcagaaaaagcctttgacaaaatccagcatttctttatgattaaaaccgttcatcaaaatcagcgtagaacggacataccttaaggtaataaaagctatctatgacaaacccacagccaacattttcctgaatgggrgagagttgaaagcattccgcctgaggaagggaacaagacaaagatgcccacgttcaccgcttctcaacacagtgctgttcactacagcattggttataagagcaagactggaaacagaacaaatggatacccatagcggggtgcttaagtaattttgggaatagtcatggggtgcagtactttatagctctgaaacaatacaatggatttacatttgaaatgtggaatgataactaaggtgcattgcccagtgatatatgcagaggtgcag

SEQ ID NO: 919365 - DNA, 745 bp, Homo sapiens
aaggtaataaaagctatctatgacaaacccacagccaacattttcctgaatgggggagagttgaaagcattccgcctgaggaagggaacaagacaaagatgcccacgttcaccgcttctcaacacagtgctgttcactacagcattggttataagagcaagactggaaacagaacaaatggatacccatagcggggtgcttaagtaattttgggaatagtcatggggtgcagtactttatagctctgaaacaatacaatggatttacatttgaaatgtggaatgataactaaggtgcattgcccagtgatatatgcagaggtgcagaggactttgtgtaaacacgatcacacatcagcctgcattccaggtgcatgcttctatttgcacatagattgcagggatgatatgcaaacaaaaawgttgacttggtgtttggaagttcagagtggaagggaaacttccttgctaaccttttatgatatttagagtttctaaatgtgaatacgtaatacatttagaaatcttagttaataagaaaagcctctgttcctggcctcttgctggcacatgtcaggtggaaatggggctgtcatgctaatgtgtgcaaactgagaaaaatccaagaatgggagtctgcttttttcatcatacaaataattgttaatagaaacagtatgataattgctcattgatataccatgcatattctattagataataataaatttctgaaatttgaacta

SEQ ID NO: 919366 - DNA, 626 bp, Homo sapiens
tgtccctcagattctgttcaccacaggtgacactcgatgcaaccccaaacctcttctgcacaatcccaaggggtgctgactaatccaagccaaaggctgtgatgtttggcagaggcagaaaagaaaaggccaggtgttctgggaaagaccacctttaaatawcacagcaccctcatagcccagagagacagttctaactattatgccaataaacccggaaaagaccaaatccaatatgacacatatttcctgtttcgttttgatttcatgccccctcccttaacctcccaagcagcatggataccccgaaggcccctgggaactctctccaattggatcttacgtggaaagcagttacctacctacaaatccccatcatcagatatgctctccacaatcaaatctttagaaacacaaacaccaggataagtcattagagagaggcccacccactcttcccaccctagctgaagccatggtgcttcgcacaggatcccctggtgtttcctctgggctcacagatatccctacagcctctctggacatggttttatacttgcaaaatcatttgctctcaccagaccccaaatcctccttcccaaaaggagcccagaatcaggtttctg

SEQ ID NO: 919367 - DNA, 612 bp, Homo sapiens
aaaatttggccataatttttccctggggaattcaggttttaaaaaaacacttcccctatacttattcctatcacaatcccaggatcagggaggctcttcacattgaaaccaggcaaggatgccacacctttcttggcatccagattgttttcttggcaagtgattccagaatacttactagattcaagcctcagaggggccacctgcaccacctgcaatacagaaacaaagctttttgaggggtatgtcatgttgtggattgtttgcacaaggctctgtttctctcaatgaatactgaaaacttgatcagaaagtgtagtcaacttcaaggcctccaaaacaagggtrggatacacactggaaaagacatcagcttctggatggtggatctctcaggtccacgtaggttggcaagtgcaaaatactgaatccaaggagaagacattgcttccaaggacaaggaccccaaggatacagtccacaacctgaagccgtcatagctaaatgccattttggattacatatcagttgctaagagtcacttcttccttcccctcagaaaactgcatttaatacctgtcatggacattgtcattttttcacatgtaaagt

SEQ ID NO: 919368 - DNA, 805 bp, Homo sapiens
acttttattttttaacttgctgacccttttgtaacactacttagcttaaaacacacacacatcgtacaactatataaaactatatttttatacccttattctataaactttttctaattttattttatttttttacttttcaagcttattgctaaaaatgaagatgcaggccgggcgcggtggctcatgcctgtaatcccagcactttgggaggccgaggagggcagataacgaggtcaggagatcgagaccatcctggctaacacggtgaaaccccgtttctactaaaaatacaaaaaaaaaaaaattagctggccktggtggcgggtgcctgtagtccaagctgctcaggaggctgaggcaggagaatggcgtgaacccgggaggtggagcttgcagtgagccgagatggcaccactgcactccagcctggatgacagagcaagactccttctcaaaaaaagaaggtgcaaacacacacattagcctaggcctaattcagggtcagggtcaggattttcagcatcactgtggatgtcttccacctccatatcctgtcccactggaaagtcttcagcaacaataacgtacgtggaggtgtcatctcctatgagagcagtgtctttttctagaacatctcctgaaggacctgcctgaggctgttttatagttaactcttttaataagtgtaagaagtacactctaaaataatgataaaaagtatagtaaatacataaactgataacatagttgtttattattttcaaacattatatattgtacctaattgtatgtgctgtacttt

SEQ ID NO: 919369 - DNA, 636 bp, Homo sapiens
cgcatgtgtttttatgagaattatgccgagataggtaacagatgaggaagaaatttgggcttgactaaagtaatgggggctgtctgtgaagctttgtggcagtatagcctaggtaatttgctgagcttgatgggtgtcagggtcagtccaagtgaaagcgaagagaggctgggattaagggtgcaaaggaatagtaaagaaagcatgtttgagatctagaacagaataatgggttgtagagggaggtattaaggataggagagtatatgggtttggcaccacagggtggataggcaaaacaatttggttgataaggtgcagatcctgagctaacctgtagggcttgtctggttttaggacaggtaaaatgggggaattgtaaggagagtttataggttttagaagcctatgctgtagcaggcgagtgataacaggctttaatccttttaaagcatgmtatgggatgggatattggcattgagtggggtaagagtgaatcagttttaatgggatggtaaggggtgcatggtcggtcgctaaggagggagtagaggtgtcttatacttgtgagttaaggtggggagatataaggggaggatgtgaaggaggctttgaactgggggaaaaggtggcagt

SEQ ID NO: 919370 - DNA, 609 bp, Homo sapiens
ccatggtgccaaacccatatactctcctatcctcaatacttccctccacaatccattattctgttctggatctcaaacacgctttctttactattcctttgcacctgtcatcccagtctctcttcgctttcacttggactgaccctgacacccatcaggcttggcaaattacctgggctgtactgccgcaaagcttcacagacagtccccattacttcagtcaagcccaaatttcttccttatctgttacctatctcagcataagtctcataaaaacacaggtgctctccctgctgatcgtgtctgattaatcttccaaacctcaatcccttacaaaacaacaactcctttccttcctaggcatggttagtgcggtcagaattcttacacaagagccaggaccacaycctgtagcctttctgtccaaacaacttgaccttactgttttagcctagccctcatgtctccgtgcagcagctgccgctgccctaatacttttaaaggccctcaaaatcacaaactatgctcaacttactctctacatttctcataacttccaaaatctattttcttcctcacacctgacgcatatactttctgctccccggc

SEQ ID NO: 919371 - DNA, 609 bp, Homo sapiens
ccatggtgccaaacccatatactctcctatcctcaatacttccctccacaatccattattctgttctggatctcaaacacgctttctttactattcctttgcacctgtcatcccagtctctcttcgctttcacttggactgaccctgacacccatcaggcttggcaaattacctgggctgtactgccgcaaagcttcacagacagtccccattacttcagtcaagcccaaatttcttccttatctgttacctatctcagcataagtctcataaaaacacaggtgctctccctgctgatcgtgtctgattaatcttccaaacctcaatcccttacaaaacaacaactcctttccttcctaggcatggttagtgcggtcagaattcttacacaagagccaggaccacatcctgyagcctttctgtccaaacaacttgaccttactgttttagcctagccctcatgtctccgtgcagcagctgccgctgccctaatacttttaaaggccctcaaaatcacaaactatgctcaacttactctctacatttctcataacttccaaaatctattttcttcctcacacctgacgcatatactttctgctccccggc

SEQ ID NO: 919372 - DNA, 723 bp, Homo sapiens
atttgtttaatacatgcagagaaaagcatataaaatcacacgtttttctgaaaaaaaaattaaataaggggaaaagaggaattttggaaaagaacgagtcacacattgaagtttcccgattgcccccactgggcacaggtttctgtgtcctctactgaagtctcasttttctcttgggatgctccagaaagtcccactcagtggttgagcttggtgctgacaaacagcaccggctctgagctgacggcccaggcagcagaaacttcagatcgtgccggccaaagctcggctttccctgtgattacaccaacttgtatttgagcagctcctgctttctaggagtgaggtacagatacagccagcaatgcttgagaacttctatggataaagttagttatgcccaaagcagagaggccctgtcacagcttacctgtcaaggtgggcacacagggataagcctgggcacccccagcaacccatctaattcaggggcaagtggaatccgtggttgcctggtgagcctgcagggagaaggcgcccaatctcaaacaccacccctgaacaatcccacaaccaaatggcagaaatgcagtttcaaaggagcgtggtcttctgcttgggcttgagtgttctgggcttaccttgcaaaacaacctggcctcaagaggtttccatgtcaaaactggatgcttggggatgggagagtggtttgcaatatcagta

SEQ ID NO: 919373 - DNA, 727 bp, Homo sapiens
atccagggcaggaggcaattgtggatgatgtttcttaccaagcaaatattggagtcattgaagcagaaccattttccatccacagcattccggatgtagacacagtaatgaccggagtctgccattcccacgtgcgcaatcacagcaaaaagctcatactgccctccagactggaaagagacaggcacgagacagttcacccaccaccacaaacacgactgcctcacacatttatacctgtccacccgaggcccgactctgggactttagaatattagaaaacagtcctgacccacggccagtgggcaccctccaggaggggctttcctgagtgtggatcctgaactgtgaaggctcagcagcttggcagggcagagcacacaagagatggaaggcatgaggtcatgagagaggcccccaaagccaaggcaagattagaactttcccctgggaggggtggggatcatcagaacacagttctgyttctccacaagcccaggaatgaccctaacctgagccaccgtacccagccaaaaaagtcttttgtagggggaggggagacagagggcaagggcggcacacgcaaagctgagtcacccacagtggaggctgaaattatccctatttccatttgcagactttgtgcagaactttacaaaatgcagggcaatatctgtatctaaatattagtttacaagaaataaaagggttatagatgatgttaaaa

SEQ ID NO: 919374 - DNA, 483 bp, Homo sapiens
ccgaaaacaactggagctgcttcatgcagtcaagaatcccctgaagaaggaaggcagttacctccctattctccagatctcttcagctggcctggctctcatcctttccaagacctggctgtttgctttgcatttagttatatgagctaattcatatgcttctaataaatgcctttcatccttctccaaagttagccctagagtatattgctgttgtttacaatcaaaaagcccyagaggtgtactctccaattctcttaataacctcatttttctgtcattacccctgttttagtacaagtagctgagcttcagagaagttaaaagatgtgcccaaggtcgcacagctaatgagtgtcacagtcagaatctgaacccaagtctgtctgatgtggggtcatgacaagagcatgggttttcttgggagaaaaaaatgacttcaaatccccacttcccgcataaaaatgcacaatgggtgtagca

SEQ ID NO: 919375 - DNA, 731 bp, Homo sapiens
agcctgcagctgagaggggccccggccagcccctgtggggggacccccacctccaccaatcccgcccactggcttggctgtgtaagtcagagtccttccagcccgtggattccggcccttggcctcctccgtggtggtggcsatggctggccctgcagcggtggctgggctgactgctgtggctgggctggtgggtgtggctgcaggctcagggggaggaggtgggtattctcgtttcttgggtggcctcgggggagcagtgtaagtgataaccgaggcagcttgggaccctcctgtgctggccgtcccactcccccctccaccactgctactgcccccatggacaatgacagagggggctgggtgggcaaaagtgatgacagagggtggagggccaggctctggggcaggtggaggcccaggcggcgggctggctggcattgccacaggggccggtgtgttgagggttggagaaaggggagcctccggggctccctggctgtaggtcttgtagggccgcttggctgcccgcatggggagcaggcggtagagcttgagtgtattgagcttgggcttgtagcctccattgggtgtcttctcactggcaaggaggcccgggctaatgccgtggaaggctcgctggtgggtcttcaggttatagtaagtgacaaaggtctcccaacagaagatgcactggtacctgggtcaggacagcagggaatagggcagga

SEQ ID NO: 919376 - DNA, 575 bp, Homo sapiens
agtgatccttgagataaagggaagagactgagctaagattttcccagctaacttctgggagagtttcaggtcactgaccagtaagaacacaatcaagtagaggctggtagtctcccagaattgaaagaatggagccaggaggccaggaaagtcaagacagctacaattcacaggttaataccagagaggggtgaattgcacagtggtcaagcttcagagctctggaggggccccatgggcatctaaccatgggacagatcaatgcatgtgctggcttcctgagactagggaaggaaccactcacaaggaggcagaaggaacacatttgggagctcacacaaatgttatyggtactccctcagcatcatggaaagctttgtaaataaagcacactcagatagatgctcagaagtgtatggccttgagattggtgaaaaattatccctagatgaaaggtatcccttgttctgcctaaatagctcccaacaactaaaatccacaagatctgtaaactgatttaaaaataaagtcactcaataatggcataaaatatgactcagaataagaagaaaagt

SEQ ID NO: 919377 - DNA, 714 bp, Homo sapiens
acttctgatgtatgatggttctgcaaagaaaaagaacttgtgtgattatgttgcaagctgaaccacctgctgttttcatggaacaccatttttttatttgaatgaatgactgaaaggcagatgatggttttccagactggttatttggcaaagattttcttgaaaatatataaagtaagcccattacttcaatgaaaactcactgtatctgttgccaataataaaattccagctttcaaaggaaaattagaatttttgccaacttgtatttgccaccatgagcttgacagcttcccagtactgaagaacctttctgataagatcagtgrtaatattaataaatgcaatgattttgataacaaataataaaatctgtcactatttggaagatctgcataactcaatctatgaatattttccaagggacaaatgtatgatgttacaaaatcacgtgtggataacagttccattcaaaatgcaagatagaccagtgtattttacagtacagaaagttcattgatattgtttcattttctcccttgtaagaaatccttaagaaactaccatttgtcaagttttagtacagtattagagaagaatacccaaaattacctgaaaagagtattaaaatgatcctttcttttccagctacatatttgtatgaggcccagtttctacataaaccaaaataggcacaacagattgaatgcagaa

SEQ ID NO: 919378 - DNA, 729 bp, Homo sapiens
gtggcaggcgcctgtaatcccagctactcaggtggctgaggcaggagaatctctggaacctgggaggtggaggttgcagtgagctgagatcactccactgtactccagcctggtgacagagcaagactccatctcaaaaagaaaaaaaaaagatataggttaagcagtaaagtgtggtgccaggctgggagtggtggctcaggcttgtaatcccagcactttgtgaagccaaggcggggtggatcacctgaggtcaggagtttgagaccatcctggccaacatggtgaaaccccatctatactaaaaatacaaacattagcagggcatgatgtcgcctggtggtagtcccagctacccaggaggctgargcaggagaatcgcttaaccacgggaggcagaggttgcagtgagccaagatcgtgccactgtactccagcctgggcgacagagtgagactccatctcaaaaaaaaaaaaaaaaagtgtggcaccagatagacataagttcaaatcccagatctacttcttattagttgtgtgatcttgagcattgacttttcacccaaatttggacccaaattctgagaggtgagatacaactataaatttggagtgcaccaaggaaaaatttagagagctcttctttactcctctgttattggaataaacaggtataactcagtgatcacatctagagcatcaaggccatagagaaagaaaaaagcaacc

SEQ ID NO: 919379 - DNA, 638 bp, Homo sapiens
ctcctgaattcattgattttttgaagggtttttcgtgtctcgatctccttcagttctgttcttatcttagttatttcttgtcttctgctagcttttgaatttgtttgctcttgcttctctagttcttttaattgtgatgttagggtgttgatttgagatcttcccagctttctgatgtgggcaattagtgcyataaatttccctcttaacactgttttaactgtgtcccagagattctggtatgttgtctctttgttctcattggtttcaaagaacttcttgatttctgccttaatttctttctctactcagcagtcattcaggagcaggttgttcaatttccatgtagttgtgaggttttgagtaatttcttaatcctgagttctaatttgattggactgtggttatattttataatgttataatttccataatacataatggaaattataatttatacattatacaaattataatttatacattccttatataatttccattcttttgcatttgctgaggagtgttttacttgcaattatgtggtcgattttagaataagtgtcatgtggcactgagaagaatgtatattctactgatttggggtggagagttctgtagacatctattacgtccac

SEQ ID NO: 919380 - DNA, 623 bp, Homo sapiens
ggttatgaagagtagaggggcagacacagacatgggaactcagccctgtctcatttgctggcccctcgggtaacatccctggaacccctggggcttctgaaagttaagtttccacatatgaattttcgggggacaaagacatttagtccataacattwatcatgtacttatattagagatttaataagcagtataaagtccaaatagttcactatatactgtgtttgttctcaactatcctttttaatgtttacataagtttttgaatcaaatgaacctctacagaaaaaaaaagtatctacaatacagaagtggtcctaacaaaactacctttaaaaagacaacccaatacaagaatgagcaaaggctgtgaattgacaattcacaaaaaaagaactcaaaattgccattgcagtgaaggtatgctcagccttactagcagtgaaggaaatgccaatgaaagtaacagtggaaaactgattgtgcccatcataaacatatccattataaagaattatttaaagggctgggcgtggtgcttcatgcctataatcccagcactttgggaggccgaggtgggcagatcacgaggtcaggagatcaagaccatcctggctaacaca

SEQ ID NO: 919381 - DNA, 623 bp, Homo sapiens
ggttatgaagagtagaggggcagacacagacatgggaactcagccctgtctcatttgctggcccctcgggtaacatccctggaacccctggggcttctgaaagttaagtttccacatatgaattttcgggggacaaagacatttagtccataacatttatcatgtacttatattagagatttaataagcagtataaagtccaaatagttcactatatactgtgtttgttctcaactatcctttttaatgtttacataagtttttgaatcaaatgaacctctacagaaaaaaaaagtatctacaatacagaagtggtcctaacaaaactacctttaaaaagacaacccaatacaagaatgagcaaaggctrtgaattgacaattcacaaaaaaagaactcaaaattgccattgcagtgaaggtatgctcagccttactagcagtgaaggaaatgccaatgaaagtaacagtggaaaactgattgtgcccatcataaacatatccattataaagaattatttaaagggctgggcgtggtgcttcatgcctataatcccagcactttgggaggccgaggtgggcagatcacgaggtcaggagatcaagaccatcctggctaacaca

SEQ ID NO: 919382 - DNA, 615 bp, Homo sapiens
ccaaaaatcagggaagcaatcacagtagctggttttaacttaatatcactgaaagaggcactgaagaagataggaaagatagtcttgaattgctgaggccaccccctcctccatcccctggcagaggccatgtggcatgaggagggaatctgtgggcttgtgggaggtagagcaggcaactgcaggattttggaattcagtgctgccaacactgggcagaattcagctggtgctcatagagggagcatttagaccagccctggaaagaagggaatcacscatcccagctggtggaacttgagtttcagcaagcctcaccactgcaggctaaagtactgtgggattctaaataaacttgaaaggctgtctaaaccacaaggactgcaactcctgggcatgtcctagtgctgtgctgggctcacagccagtggacttgtggggcacatgacctagtgagacaccagtcagggtggctaagggagtgcttctgtcacccctctacaagcacaggcagcacagcttgcagctccaaaagagaccgcttccttctgcttgaggagaggagaaggaagagtaaacaggactttgttctgaaagttggataccagctcagcc

SEQ ID NO: 919383 - DNA, 591 bp, Homo sapiens
tggtgggtgcccctctgggatgaaggttccagaagaaggaacaggcagcaaactttgctgttctgcagcctccactggtagtacctagccaaacagggtctggggtggacctgagcaaactccagcagacctgcagcagagggacatgactgttagaaggaaaactaacaaacaggaatggtattaacaccaacaaaaaggacgtccacacagaaaccccatccgaaggtcaccaacatcaaagaccaaaggtagataaatccacgaagatgaggaaaaaccagtgcaaaaaggctgaaaattccaaaaaccggaatgccttttctcctccaaaggatcacaactcctcaccakcaagggaaaaaactagacagagaatgagtttgacaaattaacagaagtaggttacagaaggtgggtaataacaaactcctccaagctaaaagagcatgttctaacccaatgcaaggaagcaaagaaccttgaaaaaagttagaggaatggttaactagaataatcagtttagagaagaacataaatgaactgatggagctgaaaaacacagcacaagaacttcgtgaagcatacaca

SEQ ID NO: 919384 - DNA, 609 bp, Homo sapiens
aaaagctttaaggctctgaatagtcagcaggaatgcccaggcagtacttgccatgggccttgggtgagactcacagatgtgctggcttcaacaaattcccagttgtggtagccataggaagagacttcactgcttgtggaaaaaagagagaagagtrggaagaactttgtcttgtggcttgggtccagctcaggcacagtagaatagaacaccaggtagattcctaaggtttctgactccaggccctggctctgaaataccatttctgagcttgtctgggaagaggaagcaactcaccatcctgaagaaaaggacaaaagcctggctggctttagcacttgctgattgtaaagcccttgaaccttgagtgaacacaggtggtactcaggcagtggttgctgtgagctttcggtgaggcacaaggctgggctggctttaggtctgacccagcgcagtctcattggtagtggccacaggggtacttgtgtcactcttcctcaaccccaggcagtcccacacagacagaaagagagagacagagactccatttgtttgggagagaataaggaaagagaacaagagtctctgcctagcaatccagagaattct

SEQ ID NO: 919385 - DNA, 597 bp, Homo sapiens
cttgtaagacaggtctggtggtgattatctctgtcagcttttgtttgtatgggaaagtatttacctctccttcatttctgaagaacagctttgtgggtaaagtattggttaacagatacttccttcagcactttgaatacatcatcccattctttcctggcttgtaaggtttctgctgagaagcaggctgttggccttactgtaactacgttatgtgtggtttgtttctcttctcttgctttcaggatcctctctgygtctttgatggtttgatcatgccttgatgtggtcgtttatggactgaatctgattggaactccctgaccttcctgtaattggatatttacattttccccaatttggaaactgttctgctattatttctttaagtaaactttctgcccctttctctcttctcctcaaatccctataattcaaaactgcctttttgatgtcccataaatcccataagctttctttgttcttttttgtttcttttttattcctctcactgtatattttcaagtaacttgtctttgaattcaccaattctttcttctgcttgatcaactctgctgctgacattccctattgcat

SEQ ID NO: 919386 - DNA, 610 bp, Homo sapiens
gctggaagaactctcctcagcatttcttgtaagacaggtctggtggtgattatctctgtcagcttttgtttgtatgggaaagtatttacctctccttcatttctgaagaacagctttgtgggtaaagtattggttaacagatacttccttcagcactttgaatacatcatcccattctttcctggcttgtaaggtttctgctgagaagcaggctgttggccttactgtaactacgttatgtgtggtttgtttctcttctcttgctttcaggatcctctctgcgtctttgatggtttgatcatgccttgatgtggtcgtktatggactgaatctgattggaactccctgaccttcctgtaattggatatttacattttccccaatttggaaactgttctgctattatttctttaagtaaactttctgcccctttctctcttctcctcaaatccctataattcaaaactgcctttttgatgtcccataaatcccataagctttctttgttcttttttgtttcttttttattcctctcactgtatattttcaagtaacttgtctttgaattcaccaattctttcttctgcttgatcaactctgctgctgacat

SEQ ID NO: 919387 - DNA, 596 bp, Homo sapiens
acaagcatcaagactacccaggaagacatgaccacaccaaacaaactaagtaaggcactagggwccaatcccagagagacagaaatatatgtcttttaagacagaggaattcaaaatagctgttttgaaggagctcaatgaaattcaagataccacggagaaggaattcagaatcctatcagataaatttaacaaagagattgaaataacgtaaaagaatcaagtagaaattctagagttgaaaaatgtaactgacatactgaagaatgcatgagtctcttcaaagcagaattgatcaagtagaagaaagaattagtgaccttgaagacaggctatttgaaaatacacagtcagaagaggaaaaaaagaacaagaaacaataaagcacacctacaagatctagaaaatagcctcaaaatggcaaatctaagagttattggccttaaatatatagacagagatggggtaaaagttcgttcgaagggataataacagagaacttcccaaacctaaagaaagatatcaatattcgagcacaagcaagttacagaacatcaagcagatttaacccaaagactacctcaaggcatttaata

SEQ ID NO: 919388 - DNA, 632 bp, Homo sapiens
cccagaatggtagatccactgacagcttgcactgtgcacctggaaaagccacaggcactcagtgccagcccatgaaagcagccggaaggggstctgtaccctgcaaagccacagggcagagttgtccaagactatgagaacctacctcttgcatcagtgtgacctggatgtgagccacatggagtcaacagaaatcattttggagctttaagatttgactgtcccactggatttcagacttgcatggggcctgtagcccctttgttttggccaatttctcccattgggaatggctgtatttatccaatgcctatactcccactgtatctaggaagcaactaacttacttttgattttacaggctcataggtggaagggacttgccttgtctcaaatgagattttggactgtggacttctgagttaatggtgaaatgagttaagactttgagggactgttgggaaggcataattggttttgacatatgaggacatgagatttgaaagtggccagggatgaagtgatatggtacagctatgtccccacccaaatctcatcttgaattgtagcttccataattcccacgttttgggaagaacccagggggagacaactgaatcatgggggcagtt

SEQ ID NO: 919389 - DNA, 636 bp, Homo sapiens
agacttgcaatgaggtgttataaaaaccaagtttgactgaaagagctggcaggcgatgcagatgaacactttgtcctgtgattcattgctatcaggagaactaaatttgtacagcccagaggagagatgactaatgggaggcataataattgtcgatttatacctgcgaagaattaatcaagaggcccagaggagagagtgttcggcggccactccaggtgcaagtgctgggggtgggcagagccaggaggagccagagaaattaggctaaatagcaggaatgactgtaataacactgaggtccattaggcagagacattgcatggcctccaccatgggatgctacgggattgccatcagacagacctgcacaaggcaacttggggaatagatctctgcaatgatcggtggatttgacaatgcgtctggaagattttagggtgagatttcctcatcccggggccacttctcagggaacwgaaaagctgcctttgttttgtagacaaaacttccttcactatttcaattaaatgtgtcttagagcacgaactgcagaaaaatccctgtccagtgcaatgtgggaggcagagggagtttgtcatccttagagtccatgaatacctactaaacacctac

SEQ ID NO: 919390 - DNA, 544 bp, Homo sapiens
ctaagtttctccttctttgggaagctgtctcaggccttacagattctgggtcactctggtctcatttgctccactgaatactaactgcaccttattataattgcctgttcccttgtctgtcctcctcactaggtaacatatttttttttattttactttaagttctggaatgcatgtgcagaacatgcagatttgttacataggtatacatctgccatggtggtttgctgaacctatcagcccgtcatctaggttttaagcccatcatgcattaggtatttgtcgtaatgctctcccccaccttgccccacaactycccgacaggccccagtgtgtgatgttcccctccttgtgtccatgtgttctcattgctcaactcccacttatgagtgagaacatgcagtgtttggttttctgttcctgtgttagtttgctgagaatgatggtttccagctcaacatacttctcaagagtaaaaactgtgtagtgcacatgactattcctagcacacatcttgcattcaatgagagctcaaaaggtgttt

SEQ ID NO: 919391 - DNA, 657 bp, Homo sapiens
gttaattagggagctacagttgtagtcaggcatacttgccctccttgccttttgcttatagagcaaatgagtgagttggttccaggcactctctgtctgctaggctcccttgtccaaatcccaattctgctcctcatgagcataccttcaaagggaagactgatgtagcagaaacaaagataggacctgtacacatttggaaacccatgattcacattatgtggtctttttgccccacctgtatcctatcctaagtatgtttacctgttatctcattcctttatccttgttgctcagtctgtttttttgttgttgttgttttgtttttgtttttgtttttgagacaaagtgttgctctgtcatccaggttgcagtgctgtggctcgaccttggctcactgccaccttcgccttatgggttcaagtgattctcctgcctcagcctccctggtagctgggactacatgcatgtggcacyatgcctggctaatttttgaatttttagtagagatggggtttcaccaggttggccaggctggtcttgaactcctggcctcaagtgatctgcctgccttggcctctcaaagtgctaggattacaggagtcagccaccacgcctggcccagtctttattttattttattttatttattttttt

SEQ ID NO: 919392 - DNA, 667 bp, Homo sapiens
attagattgcatccaccagattaagggtggatctgatttcccccagcccactgactcaaatgttaatctcttttggcaacacccatatagacacactcaggattaatactttgtatccctcaagccaatcaagttgcttaacactcagtattaaccattacagctccctagaaaataaacrgttaaaataaacacaattaggaatgatgaagtgatactactactgaccctacagaaataaaaatatttattagaaactactacaaacgcctctatgcacacaaactagaaaacttagaagagatgaataaattcttgaacacatacacccacccaagactgaacctgaaagaaattgattcccttaacagaccaataatgagctccaaaattgaatcactaataaatagtctaccaagcaaaaaaagcccaggacctgatggattcacagataaatttgactagatgtacaaagaagagctggtaccattcctacagaactattccaaaaaattgaggggaaggaactcctccccagctctttctatgaggccagcattttcctgatatcaaaacctggcagaataaaagtaaataacaaacaacaacaacaacaaaaaccgtcagagacacaacagaaaaagaaaacttgaggccaatatccttg

SEQ ID NO: 919393 - DNA, 663 bp, Homo sapiens
tgttggtgagcactcacatggcatacaaatatcttcacagtttttgatcactcagaggggtccacccacatacctcttccccagatttctttgtcaccaattttccaatcattcttcttcctgaccatccagccaaaccattggttatagcccatgaatcagtatrtaatctcacatctggccatttctccttccatgcaaagtgcacaaccaggtgcactgctcaaagttttgcccattgggaagatttcccttcaccactgaccttcagggatgtcttagaatggggctgtagtgctgcagctgtctactttcacatggtgccgccatatcatgcagaaccatctgtgaaccaggccctagtcctctcttcctctgtcaactgatcaaagggaactccccatgaggccatcagtgaaggctggggaagagaaggcagggtggcaggagtggtgaccatgggcatttgagccacctccttatgtaacttacttgtgccttcaggacctgttcgaacccagtcacgtatataccacttccatttgatgaagtgtgcacagcacacttccaatgctgctgtgcatgacccactttatggctagatgggtcagaaagcacccagttcatgataggcagttcaggtctcatggtgacttacttgat

SEQ ID NO: 919394 - DNA, 567 bp, Homo sapiens
gaaacctctttcagcccatataacagcatgatggtgcaggatatggaaggcatatttagagtctgtataaatattgatgcgtagtccttttgcaagagtgagggctcgagttaaggcaatgagtttggcttgctgagaggtagtggagtggggcagagcagtagcctcaatgatagatgtggaagatactatagcatagcctgcctttgctagtgattggtgattaggcttggtggaactgccatcaataaaccaagtgtgatcagggtgaggaacaggaaagaaggaaatatggggaaatggagtgaatacaagttagatcagagagatacagttatgggggtcaggtggggtatcaggaataatgtgggaggcyggattgaagtccgggccaggaacaatggtaatcgttgcagactcaacaaagagtgaatatagctgaaggagccaggggcagaaagtatatgcatcaggtgtgaggaagaaaatagattttggaagttatgagaactgtagggagtgagttaagcatagtttgtgattttgaaggcctctaaaagtattaga

SEQ ID NO: 919395 - DNA, 657 bp, Homo sapiens
ttcatttctggatgatttcatggggccaaggctcagctcagcacttctgggctgcatcgtctaaccctggggagctggtaccaggcccatggctttgtcccctggatcttcagggttaaacacctactgcactagaggggctaaggtgttccccatttgctagcaacaacactccaacgtggggtgttgacaaaagtgcttcatctgggtcacagcagtgggatcttcactcacacatgtgctggtggtggkggagcattgatgtctgtgtgcatgtgcatgctggcaaagtgttgaggggaggctgtgggtgagtgcttgctggcaaagtggtgagaggaggctttggctgggtgcatcctggtgggacctgtctgcaaaggctctctgatagttggacagggtctactggtgaaagggctaaggcagtggcccctgggaagcaccttagtttggcaactgaggctttgctgcaaacagatgtggcgggtagggaacttgggagaggccagcacactgagaggcactcgtatcagactggccccatctcctaggcaagatagtcctattctgtccaggtctgacagtcaagaaaggccaaagccacctagaggagcaaggtgagccttggagaatgagcatccctgtccatgctcc

SEQ ID NO: 919396 - DNA, 599 bp, Homo sapiens
ctttcctcagcttggtttattctactgttaatacttgtgattgcattgtgaaattcttgtgttgtgttattcagctctgccagacctgttaggttcttttttataccagctattttgtcctttggttcttgtatcactttattgtgactcttgttttccttggattgggttttgccatcctcctgaatttcagtgatctttgtttctatctgtattctgaattctacttctgtcatttcagctagttcagcatggttcataactcttgttgcagaactagtgtggtcgtttggaggacatatgaccctctggccatttgagttactggagttcttgcattgcttctttctcatctctgtgtgtgrgtgtttctttaaccacagtgtagattaagtacagtcaatagacttcttttctggatgttttccctgggctgaggctttgtgtggggtctttatttgaaactgacttcttgtctctggtttcagaggccggatatgttagtaaggtattatttatgttgacgctttggggtgtgatccagcaggtggcacttaggcttattggtcagttgtatggctcccctatgtttcctcaca

SEQ ID NO: 919397 - DNA, 770 bp, Homo sapiens
aataaagggacagagtacgaaagagagaaattttaaagctgggcgtctgggcgagacatcacacattggtaggatccttgatgccccacaagccacaaaaaccagcaagtttttattagggattttcaaaagggaagggagtgtatgaataggtgtgggtgacagacatcaagtatttaacagggtaatagaatatcacaaggcargtggaggcagggcgagatcacagggccacaggactgaggcgaaattaaaattgctaatgaagttttaggcaccactgtcattgataacatcttatcaggagacagggttttgagatcaaccggtctgaccaaaatttattaggcgggaatttcctcttcctaataagcctgggagcgctatgggagactggagtttatttcatctctgcaatctcgaccataagagacaggtacgccccggaggggtggccagttcagagacgtacccctaggtgcgcattctctttctcagggacgttccatgctgagaaaaagaattcagcgatatttctcccatttgcttttgaaagaagagaaatatggctctgttctgcctggctcaccggcggtcagagtttaaggttatctctcttattcgctgaataattgctgttatcctgttcttttttcagggtgcccacatttcatattgctcaaacacacatgctttacaatttttgtagttaacacaattattacagggtcctggaatgatatacatcctcctcaactgacaggattaag

SEQ ID NO: 919398 - DNA, 486 bp, Homo sapiens
aacttatagattcaatgctattcccattaaactactattgacattcttcacataattagaaaaaactattttaaaattcatatggaaccaaaaaagagcccaaatagccaagacaatcctaagcaaaaaagaacaaagccrgaggcatcacattacctcacttcaaactatcctacaaggctacagtaaccaaaacagcatggtactggtataagaacagacacataggttgatcaatgcctcctggtctctgatggccatggctgggaatctctctgtacaaaaagatgacagataggaggcaggactaacttgcagctcccacttggagggacagagaagcatgtggagacccacatcatgaaatttttctccaagaacaaccacaggaacataccaggaaagctgagagaatccagagaccctttaaaggaggtggattgctgctgcagattatgtgggacaatcaagaaactgtgagtttgc

SEQ ID NO: 919399 - DNA, 628 bp, Homo sapiens
ttcttactccggcaaagcaacattgacagcttgcaacagccaactttccttgccttaaatgtgaggcacatggaatgaccacatgagcaaggcaggctgaatccagcccaaagcctgcagcacctggagcagagctcaccagtggaggctgtgcgcaaaatcaggcccagagccatggtttctttggcctgtaaagtgttaaaaaatgagattggtgggggaggagccaagatggacgaataggaacagctccggtctacagctcccagcgtgagcgacgcagaagacrggtgatttctgcatttccatctgaggtaccaggttcatctcactagggagtgccagacagtgggtgcaggttggtgggtgcacgcaccgtgcgcgagccgaagcagggcaaggcattgcctcactcgggaagcgcagggggtcagggagttccctttcctagtcaaagaaaggagtgacagacggcacctggaagatcgggtcactcccacccgaatactgcacttttccaacgggcttaaaaaacggcgcatcaggagattatatcccgcacctggctcagagggttctacacccacggagtctcgctgattgctagcacagcagtctgagatcaaac

SEQ ID NO: 919400 - DNA, 638 bp, Homo sapiens
ggagacttgcaatgaggtgttataaaaaccaagtttgactgaaagagctggcaggcgatgcagatgaacactttgtcctgtgattcattgctatcaggagaactaaatttgtacagcccagaggagagatgactaatgggaggcataataattgtcgatttatacctgcgaagaattaatcaagaggcccagaggagagagtgttcggcggccactccaggtgcaagtgctgggggtgggcagagccaggaggagccagagaaattaggctaaatagcaggaatgactgtaataacactgaggtccattaggcagagacattgcatggcctccaccatgggatgctacgggattgccatcagacagacctgcacaaggcaacttggggaatagatctctgcaatgatcggtggatttgacaatgcgtctggaagattttagggtgagatttcctcatcccggggccacttctcagggaacwgaaaagctgcctttgttttgtagacaaaacttccttcactatttcaattaaatgtgtcttagagcacgaactgcagaaaaatccctgtccagtgcaatgtgggaggcagagggagtttgtcatccttagagtccatgaatacctactaaacacctac

SEQ ID NO: 919401 - DNA, 606 bp, Homo sapiens
cattccaaatgggataaatttgccaaaagaaaggctcaggccccatgcaagtctgaaatctagtggggcagtcaaatcttaaagctccaaaatgatctcttttgactccatgtctcacatccaggtcatgctgatgcaagaggtgggttcccatggtcttaggcagctcttcctttgtagctttgtagggcacagcctcycacctggcggctttcacaggctgctgttgagtgtctgcagcttttccaggcgaatggtgtgagctgtcactggatctaccattctggggtttggaggacagtggccctcttctcagagccccactaagcagtgccccagtagggactctgtctgggggctctgaccccacatttctcttccacactgccctagcagaagttctctatgagggcctcacccctacagcaaacttctgcctggatatccagatgtttttatacatcctctgaaatcaagggagaggttcccaaacctcaattcttgacttctgtgtacccacaggctcaacaccaaccacatggaagctgctaaggcttggggcttgcactcactgaagccatggcctgagctgtaccttggcccctt

SEQ ID NO: 919402 - DNA, 564 bp, Homo sapiens
agaatgagtccccgtctccaaaaaaaaaagaaaaccaaaaacaaaaacaaaaaaaaaaacagaaatagagtcagtgttgcagtgttgggtccaaaaactgtagggcagtccccacagtctggaaacgaggactttttttttttctttttttttttttatggagtctcgctgtgtyacccagcctggagtgcagtggcgcgatctctgctcactgcaagctccacctcccgggttcaagcgattctccagcttagcctcccgagtagctgggactacaggcacacgccgccacgcccggctaatttttttgtatttcaggaaagacggggtttcactgtgttgcccaggctggtctcgaactcctgagctcaggcaatcatctgcctcggcttcccaaagtgctgggattacaggcatgagccaccgtgcctgaagaaatgaggatttttatgtcccagtcttgaggcagaattccttcttctctgggaaaacccgaattttgctcttacatccttcaactgattggacgaggcccactcacattacagagggtcgtttccttca

SEQ ID NO: 919403 - DNA, 578 bp, Homo sapiens
catgtgacaatagccaaatctccttgttcctataaatcgttaacaaattatagttgtctacatacttcctctttaatcccaaagttagttttgaaaactatgtgattgctatttctgcattttatctcagttgctctaaaattatcctagccttcatacaggaatgggtaaaggcctttaaacaaaaatggaccagtctggacaacatagtcaacacaaaaaaatttttttaaakattagctggggccggatgctgtggctcacgcctgtaatcctaacactttgggaggccgaggcgggtggatcacctgaggtcaggagttcgagaccagcctggccaacatggtgaaaccctgtctttactaaaaatacaaaaggtagctgggtgtggtggcgggcacctgtaatcccagctacctgtaatcccaactcgggaggttgaggtagtagaattgcttgaacccaggaggtggaggctgcagtgagccgagatcacaccactgcactctagcctgggcaacagagcaagactccttttcaaaaaaaaaaaattagccaggtttggtggtgcatgcctg

SEQ ID NO: 919404 - DNA, 578 bp, Homo sapiens
catgtgacaatagccaaatctccttgttcctataaatcgttaacaaattatagttgtctacatacttcctctttaatcccaaagttagttttgaaaactatgtgattgctatttctgcattttatctcagttgctctaaaattatcctagccttcatacaggaatgggtaaaggcctttaaacaaaaatggaccagtctggacaacatagtcaacacaaaaaaatttttttaaagattagctggggccrgatgctgtggctcacgcctgtaatcctaacactttgggaggccgaggcgggtggatcacctgaggtcaggagttcgagaccagcctggccaacatggtgaaaccctgtctttactaaaaatacaaaaggtagctgggtgtggtggcgggcacctgtaatcccagctacctgtaatcccaactcgggaggttgaggtagtagaattgcttgaacccaggaggtggaggctgcagtgagccgagatcacaccactgcactctagcctgggcaacagagcaagactccttttcaaaaaaaaaaaattagccaggtttggtggtgcatgcctg

SEQ ID NO: 919405 - DNA, 553 bp, Homo sapiens
tgttcctataaatcgttaacaaattatagttgtctacatacttcctctttaatcccaaagttagttttgaaaactatgtgattgctatttctgcattttatctcagttgctctaaaattatcctagccttcatacaggaatgggtaaaggcctttaaacaaaaatggaccagtctggacaacatagtcaacacaaaaaaatttttttaaagattagctggggccggatgctgtggctcacgcctgtaatcctaacactttgggaggccgaggcggktggatcacctgaggtcaggagttcgagaccagcctggccaacatggtgaaaccctgtctttactaaaaatacaaaaggtagctgggtgtggtggcgggcacctgtaatcccagctacctgtaatcccaactcgggaggttgaggtagtagaattgcttgaacccaggaggtggaggctgcagtgagccgagatcacaccactgcactctagcctgggcaacagagcaagactccttttcaaaaaaaaaaaattagccaggtttggtggtgcatgcct

SEQ ID NO: 919406 - DNA, 666 bp, Homo sapiens
cacaggacacctcaccgccctcccggcagcggcaaagggaatcacacccagggccagggtagaaggtctggcccagtgggtagtagcggtcatcgtggaggcagccacactggcccacaggtacacacgtgtcaccactgagcacgaagccagcatcgcagacacagccttcacggcaggccgactcacagccctcgggtgccgacaggctcgggcagctcccaggacaggagtcaccgcagagctcgtagtggctgtgggcagggcactggaaggctgtggggacaaggtgggcatcagccaggtaggtgtttgagtcgcagtcttgggaggccctgagtgggaaaactgctcaggccaacttgggcgtctctgggtaggcacatgtgatccaggacatctaactgggggactcagcgtgggacctggaatgggaggggacatgcccaggtctctctgaccaaatatttctgaagatcaaatgactctgcttggctgatwtttttttttttttttttttgagacaggctctcactctatctcacccaggctggagtgcagaggcgcaatcacagctcgctgcagcctccacctaaacctcaagcaatcctctggcctcagcctcccgattagctgggactacaggagtaagccaccacatctggc

SEQ ID NO: 919407 - DNA, 578 bp, Homo sapiens
agggagtgaggcctgtccagagcagcgcatgagatgggcacggatggcactctccggcttcagggcgccctcgcatgcaccacccacgtgatcctcacaccggccaggtgtggctgccaggatgggcaaattcaaatgagggttctgaggctcaacggagttaagtgtggcagakcctggaaaagaagccaaatcttcttgcccactctgaactcagagctttccctcttcaacacaggctccaggcaaatgtaacaaatgctggcatctcaggcagctcaaggaagagcagtcccacagaccctgatcagaatgtcacacctggaagggaggcccgatgtcccttcctgcctcgtcttctgaagaggccctgagagggtaagtagagtctgttttgtctgtgcctggggagacagtgaaggcaggacctgaatccaggcctggccttcctaagtcggggtaccccctacactaccacctggcccttggcgcacccgagcacctcactccaggccctgcctctcatgggcccaagacccagtgtggggtagaatggccaacagtgtgggggaaagagt

SEQ ID NO: 919408 - DNA, 578 bp, Homo sapiens
agggagtgaggcctgtccagagcagcgcatgagatgggcacggatggcactctccggcttcagggcgccctcgcatgcaccacccacgtgatcctcacaccggccaggtgtggctgccaggatgggcaaattcaaatgagggttctgaggctcaacggagttaagtgtggcagagcctggaaaagaagccaaatcttcttgcccactctgaactcagagckttccctcttcaacacaggctccaggcaaatgtaacaaatgctggcatctcaggcagctcaaggaagagcagtcccacagaccctgatcagaatgtcacacctggaagggaggcccgatgtcccttcctgcctcgtcttctgaagaggccctgagagggtaagtagagtctgttttgtctgtgcctggggagacagtgaaggcaggacctgaatccaggcctggccttcctaagtcggggtaccccctacactaccacctggcccttggcgcacccgagcacctcactccaggccctgcctctcatgggcccaagacccagtgtggggtagaatggccaacagtgtgggggaaagagt

SEQ ID NO: 919409 - DNA, 663 bp, Homo sapiens
ctaaggcccatcttgaaaaacagaacagaaacatctttggatagagatatctgctgaagactcatctaaaggaaggagtttgcactatgacagtggttttcaagcctctgtggaaccctaaggttcttccaaaggcattccaaggggtctcccaaatacctgatgtacaaatacttgtagctctttcaagagcccttattaaaataagacacaccaccttcaaatgtttttgtttttgagacagagtttcgctcttgttgcccaggttggactgcaatggcgtgatctcggctcacygcaacctccacctcccaggttcaagcgattctcctgcctcagcctcccgagtagctgggattacaggcatgtaccaccatgccaggctaattttttgtatttttagtagagacagggtttctccatgttggtcaggctggtctcaaactcccggcctcaggtgatccgcccacctcggcctcccaaagtgttgggattacaggcgtgagccaccgcgcccggcccaaatgttttatatgccaacttttcacccactggagaccatcaacccaataatttgtgctgccaggtgagcttgattttgtggagccctcaggatcaagtttccgcctctctctgtgtgtaagtggctgaactccctgtaaa

SEQ ID NO: 919410 - DNA, 582 bp, Homo sapiens
aattttagatttacaacaaggtttcaaaaatagtactgagtccctttgtacctttacccagcttctccaagtgttatcgtcttccatactcacagtatcatgatcacgaccaggaatttagcatcgatatgataatctaactaatctgttcatattttgccaattgcctacattgtgtttcgttgtcaaagtttcttgtttccttcagtctgagatagtcctcagtctatcttttatggtttggaaacttttgaagaatactggccatctgttcggcaggctgtctcctcactgtggtttgcctgatgtttgctcacgattacattgaggaytgcctttttgcaagaatcctgcagaagtgatgctgtgtcctcagtatagcctatcaggagacacgcaaagtcagttcatcttggttaaagtggtgtccgcctggtttttacactcgtctctactctctctttttttcctttgagacagggttttgctctgttgcccaggctggggtgcagtggcacaattaccatcaccacgtgctttagccttgacctttcagactcaagtgatcctcccacctcagcc

SEQ ID NO: 919411 - DNA, 650 bp, Homo sapiens
tacaggaacatgccaccatgcctggctaattttttattttttgtagagacggggtaaccctaggttgcttgagcttgtcttgaactcctgggctcaagtgattctcccagctcagtctcacaaaatgctgggattacaggtgtgagccacctcacccggcctcttcctttctttacctgtgtaatccctcttcactggctgggcgygcagtggctcacgcctgtaatctcagtactttgggaggctgaggcaggtggatcaccaggtcaggagttcaagaccagcctggccaagatagtgaaaccccgtctctactaaaaatacaaaaattagctgggcatggtggtgggcacctgtaatcccagctactagggaggctgaggcagagaattacttgaacccgggaggcggaggttgcagtgagccgagaccgtgtcactgcactccagcctgggcaacaaagcgagactctatttcaaaacaaaaacaaaaacaaaaaagactttcagctccccttgtttatcctcactttatagtgggtggcacagagtctcagaaaggtgaggaaagctgcccaaggtcacacagccaggacatggtctgctcccaagtccatgtttttccctcgttctccaagatcaagtcttgct

SEQ ID NO: 919412 - DNA, 684 bp, Homo sapiens
caggaacatgccaccatgcctggctaattttttattttttgtagagacggggtaaccctaggttgcttgagcttgtcttgaactcctgggctcaagtgattctcccagctcagtctcacaaaatgctgggattacaggtgtgagccacctcacccggcctcttcctttctttacctgtgtaatccctcttcactggctgggcgcgcagtggctcacgcctgtaatctcagtactttgggaggctgaggcaggtggatcaccaggtcaggagttcaagaccagcctggccaagatagtgaaaccccgtctctactaaaaatacaaaaattagctgggcatggtggtgggcacctgtaatcccagctactagggaggctgaggcagagaattacttgaacccgggaggcggaggttgcagtgagccgagaccgtgtcactgcactccagcctgggcaacaaagcgagactctatytcaaaacaaaaacaaaaacaaaaaagactttcagctccccttgtttatcctcactttatagtgggtggcacagagtctcagaaaggtgaggaaagctgcccaaggtcacacagccaggacatggtctgctcccaagtccatgtttttccctcgttctccaagatcaagtcttgctcaaagtcactgagaatttcactctgctgggacacaa

SEQ ID NO: 919413 - DNA, 851 bp, Homo sapiens
tatcagattgactagggcaggaaaggaaggtacaggctgttgtaaagaggtggttatcctgattagagatgcctgtctggatgatgtcccccaagagccatatgtgagcaggagagagagttttgcctaacagtgaagaacacaaattctggagtgctactttgggttcaaatcactttagcagctatacaaatttagaggaattactgaactcttctgtgactctgtttacacatctataaaataaatatgacartgataatactagtacctgttttataaggttttgtgagtattgaatgaattagtatgttaaagtactttgaaacagcacctgccataaaatgagtgcttcacgaattgcagttattactatgttgaagaactaggatgggtgaagggaatgtcagagaggagggtatagggaccgttctaagcaatatctatgagaattgtgttttcttctatttctggttccttacttaaatagtgctcttgaagaaaattgttcaaaattgtgttattgtttagcccaaatccgttgcaccattgataactgtttcatctgatatgccattcagggtttagaaaagtaatccagtaaaatggaaagagcccaggactagggtcagaagacagaggttttaaaattgtctccatcatggatacaacatgtaatactcattaagccactttccttgtgtgagattcatttttttatcagcaagatgaaggtgctatctagataatctctgaattccttcaggttctaaaatcttacagtcctttttcatttgccagtcggtttcaggttctgagatgaagaatgtgttggagacatgccgtgacta

SEQ ID NO: 919414 - DNA, 633 bp, Homo sapiens
atctgacaaaaacagagccctttgattctccacagttcctctgaggatgactgatttatcactttctgaatggaatgatcttgatgaaagagttgtcccaggatccccacagggctgaaagagatactttatttttwacttattttatgttattttttgcagagacagggtcttgctatgttggccaggctaatctccaactcctggcctcaagcaatcttcccacctcagcctcccaaagtgctgggattataggcatgagccaccatgcctggccaagagatactttaaatcaccttatctacctgctcccagtcccctattgtacaaatgggaaattgagatttaaactaaaaggcttacttaacactgcatggtgagtcacagacccaagtcagccaagaacccccaccccaagactcgtagtccagtggtctggcttctggcctggtgtcactttattaagcaaagtgaatcagtcactcacccagagaactcagaaatctctgaacaaaatggaataaactgctcaactctgccaactgccccctcagcccacatgggtggggcagtaatgcaagcaaaagtgccctgggccagaagtcaaggacccccggctgtagaactagcttc

SEQ ID NO: 919415 - DNA, 837 bp, Homo sapiens
aatatgctatctcacgtgactgtaaacactttggactcctcacctaaaagaggatataaggatatttagttctcaaacctgccgtcagtgtgcttccttagtaaggctgggagaggaggtagaaactatatgtaaatgattctaataccatctagataggactaagaggacagtgactaaggaaattcagaggagagagatgacttccagctaccagcaatcagtgcatacaatttcttgtctgcatgtttaagtttgacttcgagctcacgtctttagacagtatgctttagttgggggccctgcaatcaattcctggatgtcaatggagattcgacttactaacktgaaatctaatgagaaaattttaggtcttggataaagaaaaaaaaaatcagccattcaattgattattaaggctgtgtaataccttgaaataactttgaaataatcgtggtcctttagatgtctagaaaagaaatacttcctttgacttgttgtagacgcgaagtgactgaattgaaattgaattaagtagagtcatgtgtatagaagctcagatggaagggggccaggctgatttagatatgcttaatgctgacaaccagtttccctgagtctcactgtttttccagctcatcctcctccagtgtgactggaggaattccagggactcttcattaatttccaactttgcactctcaagagagttcacctgtgcttgcgaatgcaatgccactggcttccatgtggcaccagcatttctccttgtgcttagcgcttggcactgaccttgtggtcctctttcttcagcatgctgctcgtaagtggcttgat

SEQ ID NO: 919416 - DNA, 837 bp, Homo sapiens
aatatgctatctcacgtgactgtaaacactttggactcctcacctaaaagaggatataaggatatttagttctcaaacctgccgtcagtgtgcttccttagtaaggctgggagaggaggtagaaactatatgtaaatgattctaataccatctagataggactaagaggacagtgactaaggaaattcagaggagagagatgacttccagctaccagcaatcagtgcatacaatttcttgtctgcatgtttaagtttgacttcgagctcacgtctttagacagtatgctttagttgggggccctgcaatcaattcctggatgtcaatggagattcgacttactaacttgaaatctaatgagaaaattttaggtcttggataaagaaaaaaaaaatcagccattcaattgattattaaggctgtgtaataccttgaaataackttgaaataatcgtggtcctttagatgtctagaaaagaaatacttcctttgacttgttgtagacgcgaagtgactgaattgaaattgaattaagtagagtcatgtgtatagaagctcagatggaagggggccaggctgatttagatatgcttaatgctgacaaccagtttccctgagtctcactgtttttccagctcatcctcctccagtgtgactggaggaattccagggactcttcattaatttccaactttgcactctcaagagagttcacctgtgcttgcgaatgcaatgccactggcttccatgtggcaccagcatttctccttgtgcttagcgcttggcactgaccttgtggtcctctttcttcagcatgctgctcgtaagtggcttgat

SEQ ID NO: 919417 - DNA, 837 bp, Homo sapiens
aatatgctatctcacgtgactgtaaacactttggactcctcacctaaaagaggatataaggatatttagttctcaaacctgccgtcagtgtgcttccttagtaaggctgggagaggaggtagaaactatatgtaaatgattctaataccatctagataggactaagaggacagtgactaaggaaattcagaggagagagatgacttccagctaccagcaatcagtgcatacaatttcttgtctgcatgtttaagtttgacttcgagctcacgtctttagacagtatgctttagttgggggccctgcaatcaattcctggatgtcaatggagattcgacttactaacttgaaatctaatgagaaaattttaggtcttggataaagaaaaaaaaaatcagccattcaattgattattaaggctgtgtaataccttgaaataactttgaaataatcgtggtcctttagatktctagaaaagaaatacttcctttgacttgttgtagacgcgaagtgactgaattgaaattgaattaagtagagtcatgtgtatagaagctcagatggaagggggccaggctgatttagatatgcttaatgctgacaaccagtttccctgagtctcactgtttttccagctcatcctcctccagtgtgactggaggaattccagggactcttcattaatttccaactttgcactctcaagagagttcacctgtgcttgcgaatgcaatgccactggcttccatgtggcaccagcatttctccttgtgcttagcgcttggcactgaccttgtggtcctctttcttcagcatgctgctcgtaagtggcttgat

SEQ ID NO: 919418 - DNA, 612 bp, Homo sapiens
actaaattaagctgacggagtccctgccctgtggaacctttcgttcattcacctactcatttcacaaatatttgctgagagtcctactgtgtgccccacactgccaacaaggcagatagggagcttagaacctagtctgtgacacaggcaacaacagatgacagatccataaacaattaaggcatttcagttaagatatttcagatagtgacaattactatgaagaaaatagaagaagataatgagaaggaaagtggctgggtgcaragcatgccattttaaaataagttcttgctagttgaatggatgaatagtaaattccatgtgacctgaaaggggatatacttaggccatttattgtttctgactctgccttccacagggtaagactgaactttcttacccattgtgagcaattctggccaaggagtagtgagcagaattgacatgtcatttctggccttcatgttggaattctagtgagaaaccctccagaggtcattctctcttctggcctgctgctgatcagtgctatgtgtagaggctgccacgttggcctggtctggatgatgctgagattgagcatgatctcaggttgacctgtgatgaaca

SEQ ID NO: 919419 - DNA, 560 bp, Homo sapiens
agaactgaaggctgatcacctcagaaaatgaagattccactacatcctggggatccactaggtaaaagcaagtagcttattctttcttaactcatcaaacacctactgatgtatatcactgatcttcagattaaagttttcaacaagacgattgcctaaacatccatcatgttaataatcctcagattaatggcctctaataatacacaattaacatgacaggcaggttgcaaaacccttattgtcaccgaccctgccagggacacatgaattacccctgcttctactacaagggttttctctactgccgacatcattttttgtccccaccaagatcattttttaaaatgagcaacagcaatgtgtcaaaaagcctgacagttaccaaygggcacacacaaacacaacacacacctgcagaatgcaagaaagcaacatttttcaaaagttccccatccaggtaaatacagacagaacttttcctgcagttactagtactcaaagcaaaaaacccccagagttcagcttggaaactggaattcaccactttctcaaagtcc

SEQ ID NO: 919420 - DNA, 617 bp, Homo sapiens
tcccactccccttactattattgtgtgtgtgtgtgtgtgtgtgtgtagagtaggaatacttaagatctatccttttagcaaactttaagtattcaatacagtattgctagctgtaagcactgtgctatataacagatctccagaaggttttttgcataacaaactttgtatctttagactgtgacctccctgtttccctgccctttattaaccactattctctgcttccatgagtttgactgttttagatgacgtcatttagtatttgtctgtctctggctgattgcacttagcataatttcttccaggtttatctatttagtcacaaagagcaarattctcttcttcctctttttattttttaaatttctatctgtttacacttactctttggtgagccattggtctcacactttcctttaattcatcagacatggttcttttagtgctttgaacatccttatggcacttggtcaccttagtagttggctgatgactggacagatgtccttaaatgccttgcggtctctgccaaggaagcctatgtgtgttggggtatgcggtcagcactccgacatgcaggtcatgattctgtcttcaccttcccttcctgcttg

SEQ ID NO: 919421 - DNA, 594 bp, Homo sapiens
tattgtccatcttttctattttagccatcctagtgtatcgagtagtaactcattgtggttttactttgcatttctccagtgagcaacgacatccaacatctgttcatatgcttgttaaacattcttatatcttcttggtgaaatatttatttgtttagtmcatttttaaattgcattgtttgttttcttatatattgagttataagagttctttatatgttctaaattcaggtcctttgttagatacatgatttgcaagtactttctttttttatatatatattttcttttttttaaattatactttaagctctagggtacatgtgcaaaacgtgcaggtttgttacatatttatacatgtgccatgttggtgtgctgtacccattaactagtcatttatgttaggtatatctcctaatggtatcctgccccctcccccgaccccacaacaggccccggtgtgtgatgttccccttcctgtgtccaagtgttctcattgttcaattcccacctatgagtgagaacatgcagttttggttttttgtccttgcgatagtttgctgagaatgatggtttccagcttcatccatgtcc

SEQ ID NO: 919422 - DNA, 597 bp, Homo sapiens
tgaacggctgaacagaggagccacacccctgtcgcaagtcctgcaaggggagtcagagaactctgccgtttcattacaagatgctccaggctactcttctaaatttgctgccccagccctagaataagccatttctccaaggatgtattctgcttccttttattagtgaatgatataaaaaacaaatatctggatgttaattgtattaattattacttggatgtcatcggttctagaccttcttagttggcagagcaaagaaatatatgtgtgtatactaactcatataaatataaatgtatgtgcattctacatgtarcaatctatatctatatgaaattaaatatgagtttataccgatgtctccatctctaatccattaccacagagaccatactaattttctccccttgcttatctctaacctcctgctccaacagagtaatctagttctcaatatttctcaccagttttcatttttccattcctgtgtacatgtcaagtggtttcagaagtgctagcccatattcccataggaactaactttatcaagtggagtctgttcttacatacagttccttttgcccttaatcttac

SEQ ID NO: 919423 - DNA, 650 bp, Homo sapiens
caaggtgctcagtaggggagctcttgagccaggatgagccaggagaaggaatttcacaagacaatgtcatcagttaaggcaggaacaggccattttcacttcttttgtgggggaatgtcatcagttaaggcaggaaccggccatatggatgtgtatgtgcaggtcacaggggatatgatggcttagcttgggctcagtggcctgatattcttgtcttcttatattaataagaaaaataaaacaaaatagtggtaaagtgttgggatggcgaaaattttgggggatggtayggagagataatgggcgatgtttctcagggctgctttgggcaggattaggggcggcgtgggaacctagagggggagagattaagctgaaggaagattttgtggtaaggggtgattattgtggggtggttagagaaacatttgtcatgtagaattatttgtgatggcctggatatggttttgtatggaatgaaaaactaaacggaataagagaaggagaaatacaggtattaaaggactaagaattgggaggacccaggacatctaattagagagtgcctaaggagattcagcatagtcctgccagcaaagattatttatttactttaagagttaacagtggcagtttggggatagcaccag

SEQ ID NO: 919424 - DNA, 579 bp, Homo sapiens
gagtatgactagacagaagatagtagggatgacaagtttttttgggcacagtccaagttggtctggtgtctggaatgagactggggcttaataaataggagcatcaatacaggagctcaaatgggctgtaccttgtagaattccaaggacaggcctgaattctgagaagggaaactggtaaaagtactgtccagtccttttyaagttggtggctgagcttggtgaggtgtgtttttaaaagaccattagtccgttctacttttcctgaagactgaggactgtaagggataaaaaggtttcactgaataccaagagcctgaaaaactgcttggctgatttgactaataaaggccgatctactatcagactgcatagaggtgggaaggccaaaccgagtaattgtgtctgacagaagggaagaaatgactatggtggccttcttagaccctgtgggaaaggcctctacctatccagtgaaagtgtctacctagaccaagaggtattttagtttcctgactcagggcatgttgagtaaagctaatttgccagtcctgggtgggggcaaatccctgagcttga

SEQ ID NO: 919425 - DNA, 616 bp, Homo sapiens
taaattttttcatggttaagacatttttttcaaggtgtcagacttaaaatatcattcaatgagggaataatttatcctcattttggttccattggctgaaaatgttgagagttatctgaagagtgtactgtccctgtgcatgtttaagtcttgtatgctctaagagaagcatacatgatgcaagttggaactttacttatgagagggaacacaactgtggagaggaccactgtcttctcccctgcatggtggtgccatcttgttccactaatcatttacttagtgggcagtgaaaacacacaacatcacacagcacctcacaagagtgtgagaaaaaaaaaaacaaaacagggggaacatctaatgkgcctaaattcttccaattgctaatagccatttataattgtctgcacaatattccacatgttcaaagcaaagcagttatagcaaaggtgttgaaagcatgggttgtacagttgttaccctgccttaaattatacctttaccacttagtagttctgtggttgatcttgtataacttacctaacctctttaagccatagtattctcagtagtttcccaaccctaaattctcactgcacaattgctattataa

SEQ ID NO: 919426 - DNA, 681 bp, Homo sapiens
caaacaaaacccacaaatgtattattctacaggttgggagatcagaagtctaaaatgggcctcagtgggcagaaatcaaggtgttggcatggctgcatttttcgggggggtgtctacagaagaatcctttttcttgccttttctgttttcttgaagctgcctgcattgcatggctgggtcccctttcatcttcaaggctagcaatggctrgtcaagtctttctcatcccgtgtcgctggactcagactctgtcctgcctccctcttccacatttgaagacccttgtggttccattgggcccacctggataattcaagatcctctcctccacctcaaggtcaacagattaacaaccttaattccacctgcaaccttcattcctctttgccgtgtgatgtattatagtcacaggttctgggactaggacatggacatctttggggagtcagtattcttcctttgatgtggtcaaaaccagcaacagggacagcccagtctcaaggaaaagggaaacagactccactatttgacgagaggaaaagcaaagcttttgtggctctctagtgcacacagcgtgtgttaactcacacagtctgcagagcaactccgtgaggtaggcactagtatcatgcacattttaaagtaggactctaagaacagaggtgttaagaacttggctaa

SEQ ID NO: 919427 - DNA, 687 bp, Homo sapiens
cttgccatccagctactgtttgccagcacctgatgtaggaccctgcaggtcattgcatggatttgagcatcgactttgactgagatgggaggaggggagacaaagattttgagcataagctctgaaaggacccctttccctgttgcattaagaatagatcatggggtacacaaggatggaagcaagagagggagtgaggaaaacagaaggctgatgcagtaatccaaggggagatgatggtgacattttgggtcgggatgttggcattgccattgataagaaatcgttatattctgaatatatttagaagactgagctagcaggatttgctcatggtaaaggtggtaatgtacaagagaagagtcaagggaaactctgaggactttagcctarcaactggcaggatggagcagaaagagtaagagttcagtttcggacatgtaaatgtgagataccacttagacgttcttgaggatgaaaacccttgaactgatgtaatcaagtcaggtcagactggaaatacaaatttgggagttgttggggtttaaatgtatttactacatgggacccaggattgactgtagatagagaactaagaggtcaaaagactgagcattcattaacaaaaggcagggcagtaagaaggagcctgcaaagtagactgactagcgcagtaggaggaagaga

SEQ ID NO: 919428 - DNA, 545 bp, Homo sapiens
aaaactcagttgcattgatgcacaccaataatgattaatctgaaaaggaaattaagaaaacaataccatgaacaacagtattaaaaagaataaaatgctctggaatcaatttaaccaggatgacaaactatttgtacaataaaaactttcaaaatgctgctgtaagaaatcaaaggtacaaataaatggaacagtatcttctgttcataggtgaaaagactttttaaaaaayttcaacttttattttagattcaggggttacaggcacagatttgttatgtaggaatattgtataatgctcaggtttggagcacataggtagtgagcacagcaaccaatatgtagtatattaacttgtcctcccctctgcacactttagtagtccaccgtgtttactgttcccatatttatgtccatatatgctcaatgtttagctcttataagtaagaacatgcagtatttggctttctgtttctgcattaatttgcttgaaattatggcctctggttccacctatgttcataccaaggacatgatttcattat

SEQ ID NO: 919429 - DNA, 825 bp, Homo sapiens
aatgaccaccttgggccagacatatccaacatggggggccccacccctctttgtagcatatgcacagtagaaaagagataagcaacttggagtagctcaggctgagaatctgcctgcataataaaaggttggggtgtgagctgccagagattcatgctctaagcagatgacacacctggtcctaaccagtttttcatgccctatgtggataacataccccctcccactagctcatctataaaaacacttgtatttcactgcagaatggcaactctttttttctggatccctctctgcagcagagagctgttctctttttctcacccattaaacttttgctctaacctcacctttggcatatctgtgtccttgatttcctcggtcctgacaccaagaagttcaggtgtaaccccagaagacacgaccagtttatcatgacttgtctcattgcctcttgggacatagaaacgtcaatgaaaatgtgtccaaaaggacatttcataaagtgctctctcttccaatcttcaagcaatgtgggactatccatcatgtacaaaaaacttgtggctgaaatgcacaatttctaatacaaaaatgaatgctataaattactctaygtatgtgtattatggccattcagacatcgtcacacattgccacatttagatagaagaacctgtgaacttgtggctgttaggaagcttaacttgtgcatactgtcacctatgaaagttagctttccctgtgtttcttgaaaccaaccttgaaatgtccatcttgtacacaatttctatttatccccagtgaggttcacccatctggccc

SEQ ID NO: 919430 - DNA, 600 bp, Homo sapiens
ctttattttctattgtttgtttgcagtgataggatccccaattcagaaatcaaataaaggaagtatgcctccaagaggtattggagtagataaactagatattacaaagcctacagattcagtctattaatttttaaaaataaattattaatttatttataaacagtgtgtgtgtgtgtgtatgtgtgtgtgtgtgtgtgtgtgtgtgatggagtctcgctctgtcgcccaggcttgagggcagtggtgcagtggcccgatcttggttcactgcaacctccccctaccgggttcaagtgattcccctgcctcagcttcctaagtagctgggattacaggcacccgccaccaggcccggttaattttgtatgtttagtggagasggtttcaccatattagccaggatggtctcaatcgcctgacctcgtgattcgcccacctcggcctcccaaagtgctgggattataggtgtgagccaccgtgcccggcctatttaaacaagtttttaaaataaattattgtattttaacttatcatattcctttattcagggagataagttactgagataactggtagtaggcaaagagaagaaacagg

SEQ ID NO: 919431 - DNA, 629 bp, Homo sapiens
gcaaaatgtaaacaggacagagagttccttcttccaaagacagccaaatactgactagagtgtttgcatatcaaacacagtttagtaatgcgtacgaatcatttcagtctatgccactgaggctatttgtagggttctgggaacagaaaattttcctgacctccccctatattcactccagatgctcggacagccgggaagctaatatgacctttaacaacttaatttgaacaaagcaacttctgaccatccatgcaggccatcagagcagatggtaacaccaarggataccagttagagcttggctttggagaaatctagaaagttttaaaaacacatacagtacttcaaattcctggctcctcttagcttgtctgattcatagccttcagcaatgaagagatttaagttttaaaagctcccacaatgtgattctgaaacatcagatttggttcacagcgtgacagaggctttgggccacggtgcaactaggaaagcttaggtctatggacttcaaagacctccatccccagcctgctcacccaaacacctgaacagttgccattaaagtaacacccttttggctgggcatggtggctcaggcctgtaatcctagcactttgggaggc

SEQ ID NO: 919432 - DNA, 635 bp, Homo sapiens
caaatagaagcagcaaaatgtaaacaggacagagagttccttcttccaaagacagccaaatactgactagagtgtttgcatatcaaacacagtttagtaatgcgtacgaatcatttcagtctatgccactgaggctatttgtagggttctgggaacagaaaattttcctgacctccccctatattcactccagatgctcggacagccgggaagctaatatgacctttaacaacttaatttgaacaaagcaacttctgaccatccatgcaggccatcagagcagatggtaacaccaagggataccagttagrgcttggctttggagaaatctagaaagttttaaaaacacatacagtacttcaaattcctggctcctcttagcttgtctgattcatagccttcagcaatgaagagatttaagttttaaaagctcccacaatgtgattctgaaacatcagatttggttcacagcgtgacagaggctttgggccacggtgcaactaggaaagcttaggtctatggacttcaaagacctccatccccagcctgctcacccaaacacctgaacagttgccattaaagtaacacccttttggctgggcatggtggctcaggcctgtaatcctagcactttg

SEQ ID NO: 919433 - DNA, 635 bp, Homo sapiens
caaatagaagcagcaaaatgtaaacaggacagagagttccttcttccaaagacagccaaatactgactagagtgtttgcatatcaaacacagtttagtaatgcgtacgaatcatttcagtctatgccactgaggctatttgtagggttctgggaacagaaaattttcctgacctccccctatattcactccagatgctcggacagccgggaagctaatatgacctttaacaacttaatttgaacaaagcaacttctgaccatccatgcaggccatcagagcagatggtaacaccaagggataccagttagagcttggctttggagaaatctagaaagttttaaaaacacatacagtacttcaaattcctggctcctcttagcttgtctgattcatagycttcagcaatgaagagatttaagttttaaaagctcccacaatgtgattctgaaacatcagatttggttcacagcgtgacagaggctttgggccacggtgcaactaggaaagcttaggtctatggacttcaaagacctccatccccagcctgctcacccaaacacctgaacagttgccattaaagtaacacccttttggctgggcatggtggctcaggcctgtaatcctagcactttg

SEQ ID NO: 919434 - DNA, 635 bp, Homo sapiens
caaatagaagcagcaaaatgtaaacaggacagagagttccttcttccaaagacagccaaatactgactagagtgtttgcatatcaaacacagtttagtaatgcgtacgaatcatttcagtctatgccactgaggctatttgtagggttctgggaacagaaaattttcctgacctccccctatattcactccagatgctcggacagccgggaagctaatatgacctttaacaacttaatttgaacaaagcaacttctgaccatccatgcaggccatcagagcagatggtaacaccaagggataccagttagagcttggctttggagaaatctagaaagttttaaaaacacatacagtacttcaaattcctggctcctcttagcttgtctgattcatagccttcagcaatgaagagatttaagttttaaaagctcccacaatgtgattctgaaacatcagatttggttcacagygtgacagaggctttgggccacggtgcaactaggaaagcttaggtctatggacttcaaagacctccatccccagcctgctcacccaaacacctgaacagttgccattaaagtaacacccttttggctgggcatggtggctcaggcctgtaatcctagcactttg

SEQ ID NO: 919435 - DNA, 563 bp, Homo sapiens
ataatgaaatcatgtccttggtatgaacataggtggaaccagaggccataatttcaagcaaattaatgcagaaacagaaagccaaatactgcatgttcttacttataagagctaaacattgagcatatatggacataaatatgggaacagtaaacacggtggactactaaagtgtgcagaggggaggacaagttaatatactacatattggttgctgtgctcactacctatgtgctccaaacctgagcattatacaatattcctacataacaaatctgtgcctgtaacccctgaatctaaaataaaagttgaarttttttaaaaagtcttttcacctatgaacagaagatactgatccatttatttgtacctttgatttcttacagcagcattttgaaagtttttattgtacaaatagtttgtcatcctggttaaattgattccagagcattttattctttttaatactgttgttcatggtattgttttcttaatttccttttcagattaatcattattggtgtgcatcaatgcaactgagttttgtaagttaattttgtatc

SEQ ID NO: 919436 - DNA, 698 bp, Homo sapiens
cccaaagtgccaggattaccggtgtgagccactgcacctggccagctctttagcatttcttgtaggacaggtctggagctgatgaaatcccttggcttttgtttgtctgggaaagtctttatttctctttcatgtttgaaggatattttcattggatatagtattctaaggtaaaaggttttttccttcggcatttgaaacatgtcatgccactctcttggcctgtaaggtttctactgaaaagtctactgccagccatattggagctccattgtatgttgtttcttttctcttgctccttttagtatccttgctttatccttgtctttgggaattttattattaaatgtctcgagttagtcctctctgggtgaaatttgcttagtgtcctataaccttcttgtacttggatattaatatctttctctaggtttgagaagttctctgttattatyccttcgaataaactttttacccctatctctttctctacctcctctttacagacaataactcttagatttgccccttcaaggctactttctaaatcccgtaggtgtgcttatttttattcttttttcttttgtcttctctgattgtgtattttcaaaaagcctgtcttcaagctcactaactctttcttctgcttgatcaactgccgttttttgttttgagatggagtctcgccctgtcaccca

SEQ ID NO: 919437 - DNA, 720 bp, Homo sapiens
tcttgtacttggatattaatatctttctctaggtttgagaagttctctgttattattccttcgaataaactttttacccctatctctttctctacctcctctttacagacaataactcttagatttgccccttcaaggctactttctaaatcccgtaggtgtgcttatttttattcttttttcttttgtcttctctgattgtgtattttcaaaaagcctgtcttcaagctcactaactctttcttctgcttgatcaactgccgttttttgttttgagatggagtctcgccctgtcacccagactagagtgcaatggcacgatctcgtctcactgcaacctctgcctcccaggttcaagcaattctcctgcctcagcctcctaagtggctcagattacagggatgtgccaccttgcccggctaattttttgtatctttagtagaggcagggtttcaccatgttggccgggctggtctcgaactcctgacctcatgatccaccctcctcagcctcccaaactgatgggattacagacataagccaccacaccyggccgatcaactgcttttaagccattatgatgcattcttcagtatgtcaattgcatttttcaactccagaatatctgtttaattatttttaattatttcaatctgttaaatttatctgataggattctgaattccatctctgtgttatcttgaatttctctgagttttc

SEQ ID NO: 919438 - DNA, 584 bp, Homo sapiens
agggcaccaagtttctaggctgcacacagcaggggccctagacctggcctaggaaaccattttttccttttaggcttcaggtcctgtgatgggaggggttgccatgaaggcctctggcatgccctggagacatttttctcattgttttggtgattaacattggactcctcattacttatgcaaatgtctgcaactggcttgaattccttcccagaaaatgggtttttcttttctattgtatcatcagccttcaaattttccaaacttttatgctgtgcttcctcttgaatgctttgctgcttagaaatttcttccaccagataccccaaatcatctctgtcaagttcaaagttccacatatctctagtgcatgggaaaacaccaccagtgtctttgccaaatcacagcaagagtcacctttgttycaatacattcctcatctccatctgagaacacgtcagcctggactttattgtctatatcactatcagcattttggtcaaagccattcaacaagtgtctaggaagttctaaactttcccacatcttcccgtcttctgagccttccaagtctctaggaagtt

SEQ ID NO: 919439 - DNA, 626 bp, Homo sapiens
tgggaggcctaagttacctccacatgggcctctccatgtgttctgggcttcctcacagcatagagactgggtttcaagggtgagtgtcccaagagaaaccagtggaagtgatatggtttcctaacccagcctcagagggcatgcaatgtcacttttgctgtattctactcatggggacagtcacaaagtccctcttaggtctaagggtaggggaaatagactcctacatggacatttttcagacatgtttaaaaaccattcaggatctaccttggtttatggcatcaagggaggctttttygtaaacacatttcttcagcagagacgtgaaaaataggaggaagttatccagggaaggagagggtcggaagagccttctataccatcaatagagaaggtcatttggacagatgagaatatgtgttttggaggcttgttggggaagacagtgtgactgaggcagagagtgagggagaacagggaagaaataagaacaaagaggtagacagactggttcacataagaccttgtggatcaagttaaggtttctggactttatcctgagtgtgaagggaagcccatcaaaaagtagagcagaggcactatcagatatgccttttaggaaa

SEQ ID NO: 919440 - DNA, 499 bp, Homo sapiens
aatctaaaatagaagttgaaattatttttcaaaaaaaaaaaaaataggctgggcatggtggctcatgcctgtaattccagcacattgggaggccgaggcaggcagatcacctgaggtcaggagttcgagacccgactggccaacatggtgaarccccgtctctactaaaaatacaaaaattagctgagcatggtggcacgtgcctgtaatcccagctacttgggaggctgaggcatgagaatagcttgaacccaggaggcagagattacagtgagctgagatcgtgccactgcactccagcctgggcaatagagcgaaactccatctcaaaaacaaaataaaataaaatcaaatttacctgagtaagaaaaaaataaaaatttaaaaaaattaaaagggaacaaggatttaagtaaacatttctccaaagaaaatatacaaatggctagcgagtacctgaagagatgctcaccatcaccaatcaagtgcaaatcaatag

SEQ ID NO: 919441 - DNA, 499 bp, Homo sapiens
aatctaaaatagaagttgaaattatttttcaaaaaaaaaaaaaataggctgggcatggtggctcatgcctgtaattccagcacattgggaggccgaggcaggcagatcacctgaggtcaggagttcgagacccgactggccaacatggtgaaaccccgtctctactaaaaatacaaaaattagctgagcatggtggcacgtgcctgtaatcccagctacttgggaggctgaggcatgagaatagcttgaacccaggargcagagattacagtgagctgagatcgtgccactgcactccagcctgggcaatagagcgaaactccatctcaaaaacaaaataaaataaaatcaaatttacctgagtaagaaaaaaataaaaatttaaaaaaattaaaagggaacaaggatttaagtaaacatttctccaaagaaaatatacaaatggctagcgagtacctgaagagatgctcaccatcaccaatcaagtgcaaatcaatag

SEQ ID NO: 919442 - DNA, 634 bp, Homo sapiens
ttggtatttgccttgtttgaaggcagtttgaacagatggccacccgtgactggccaaaactctgtgattggtactgttaacttaaaaatcaagattacaaatctgtaagtttagaaaaagagaggagattttattccttatgaagggttacagcaggtggccgtcctcatagtctgggaagcaccacctccagccaagaccagagacaggcacttaaaaggaggaggggttgagataggagctttatgctgaacaggttggctaaacatacatattcaacaggttataggaggagctgtgaatattcataagagtggtcctgacacatgcatattaaacaaatatgtatgcaacacatgacccatgttcactttgggatggagacttcacattaaatgtattacagttagggtctaaacgtcytttcaggatgggagacattcaggtgtgcagcctctgtaaactggcgagaaccaggccatggtcagaagtctcttatcaaaagaaagtgactgaaatcaatgtcttgtccattcaaagctacagttatggctggtggaacagggtggggatcagacagtcagcatctggtagagctgaaaattgttttcatatcacttaccacaaggccagt

SEQ ID NO: 919443 - DNA, 615 bp, Homo sapiens
cctttgggaaatttgggaaaaaaagaattctttgggattttgattgatattgcattgaattttcagtataatctaaaagaagtgtcatatttacaacactatcttccagtccatgaggagtgtgttatatcactccatttagtttgttcttctttaatgtctctcagaaatattctgctcatcttaagagagaccttgcacatcttttgttagatttgatcctagatatttgatatgttttatactcataatatatatttttagaattttatgtgttaactgtttgttaaaggtatgtatgaatacacctgatttctgtacattaattttgtatctagaaaacttactaaattttaaaattattgtaataatttayctatagatttatttagatcttctacatatataatcatatgtccatgaaaattaccattttaatctgtcctttaaaatctttcatactcttttatttactttacttactactctaactagagtcccctgaataatagtcaatacaaaagcagaacttgggcattttgtattgttcttactttgagagagaagctttcaacatttcaccatgatgtgtgaatttgctgaaggttttatgaa

SEQ ID NO: 919444 - DNA, 619 bp, Homo sapiens
tgccccagaggatgaaggttctctggcccagaagcccccaatcagatgattcaacaacaggactgagggtgcccggggcaagcgccagctcatgtcatcaccctcactgagccccgggtacgtttaaccattcagggccaggaaattgacttcctcctggacactggcatggccttctcagtgttaatctcttgttctggacaactgtcctcaaggtccgttaccatccaaggaatcctgrgacagtctgtaaccaggtatttctctcacctcctcagttgtaattgggagattttgctcttttcacatgcctttcttgtcatgcctgaaagtcccacaccgttattagggagagatatgttagccaaagctggagctattatctacatgaatatggggaagaatttacccatgtgttgtcctgtacttgaggagggaatcaaccctggagtctgtgcattggtaggacaatttggaagggcaaaaaatgcctgcccagtccaaatcaggctaaaagaccccaccacttttccttatcaaaggcaatatcccttaaggcctgaagctcataaaggattacagggtattgtttaaacatttaaaagctcaaggcttagta

SEQ ID NO: 919445 - DNA, 620 bp, Homo sapiens
taatttcagtcaatttcagtcatagctacctatctcttcaacatcagtaccatggtaagcagccatggccacattcctggtgagagtttcagaagccagggtggtcaatacagatctcatcctctaataattctgtattctgaactgctgactgctgcttctgatgatggaaaagtgcagacacagaaaagtgaagccattgtttcaaccccaycaacagaagcagcatccagggacagtatctagaatggtgtgagaagggtcttttcttcttttttttcctccctttttctagtgttgggagccagacgtgtaaaacttagaacattgaaaagcaaccatatatacgagaatatttacaatgtcaccataccgcccagggaaagacaaagtatagaaaagcctttaagcttttgcctcaggatgatctctagcacagagatacccgacagcaataaaaaatagaaagcaaccctggggaagggggagaatctgatttccagaattaccacattatatgataaacaaatatccagttttcaacatcaacaacaaatcccaaagcatacaaagaaacaagaaaacatggctcattcaaaggaacaaattaaatcttcaga

SEQ ID NO: 919446 - DNA, 707 bp, Homo sapiens
aacttcattctgggaaaagagttcactacagtcctgctaatgataacaactacctaccctaccatttcttgaatatttagaaatgtgccagatattaagtttaatgtgtgatttaaaaacattatcttgtttaatcatcacaacaactttataaaggatatttacatgagtttagactcttggaggcaacggacagaaactcaaatgaaagttgttaaggaaaatagaatgtatctgcttatataactgggaagtctaacagtgtgctgacttcagccccagctgaatccaggagttcaaatgacgtcgtaagattctgtctcggccgggtgcagtggcttacgcctgtaatccgagcactttgggaggctgaggcaggcggatcacgaggtcaagagattgagaccatcctggccaacatggtgaaacctygtctctattaaaaatacaaaaattagctggaagtggtggcgtgcgcctgtagtcccagctacttgggaggctgaagcaggagaattgcttgaacccgggagggggaggttgcagtgagccaagatcgcaccactgcactccagcctggtgacagagcgagactctgtctcaaaagaagaaaaaaaaggactctctctctctctatctctttcctcaagtttgctgtgtgctggctgcattctaaagtgagttttccttatgaggggtatgaagat

SEQ ID NO: 919447 - DNA, 574 bp, Homo sapiens
tcactctgatggtatttccttttgctgtgcagaagctctttggtttaattagatcccatttgtcaactttggcttttgttgccactgtttttggtgttttagatatgaggtccttgcccatgcctatgtcctgaatggtattgcctaggatttcttctaggktttttatggttttaggtctaatatttaagtcttcaatccaccttgaattaatttttgtataaggtgtaaggaagggatccagtttcagctttctacatatggctagccagttttcccagcaccatttgttaaataaggaatcctttccccatttcttgtttttgtcaggtttgtcaaagatcagatagttgtagatgtgtggtattatttctgagggctctgttctgttccattggtctatatctctgttttggtaccagtactatgctgttttggttactatagccttgtagtatagtttgaagtcaggtagtgtgatgcctccagctttgttctttttgcttcaggttgtcttggcaattcggactcttttttgtttccacatgaactttaaagtagtttttccaattct

SEQ ID NO: 919448 - DNA, 574 bp, Homo sapiens
tcactctgatggtatttccttttgctgtgcagaagctctttggtttaattagatcccatttgtcaactttggcttttgttgccactgtttttggtgttttagatatgaggtccttgcccatgcctatgtcctgaatggtattgcctaggatttcttctagggtttttatggttttaggtctaatatttaagtcttcaatccaycttgaattaatttttgtataaggtgtaaggaagggatccagtttcagctttctacatatggctagccagttttcccagcaccatttgttaaataaggaatcctttccccatttcttgtttttgtcaggtttgtcaaagatcagatagttgtagatgtgtggtattatttctgagggctctgttctgttccattggtctatatctctgttttggtaccagtactatgctgttttggttactatagccttgtagtatagtttgaagtcaggtagtgtgatgcctccagctttgttctttttgcttcaggttgtcttggcaattcggactcttttttgtttccacatgaactttaaagtagtttttccaattct

SEQ ID NO: 919449 - DNA, 565 bp, Homo sapiens
ttaggtcccacttgtcaatttttgtttgtgttgtaactgcttttggggacttggtcataaattctttgccagggccgacatccagaatggctatttcctaggttttcttctagaatttttatggtttgaagttttacatttaartctttaatccatcctgagttaatttttgtatatggtaaaaggtagggatccactttcattcttctgcatatggctagccagttatcccggcaccatttattgaatagggagtcctttcccattgcttgttattgtcgcctttgtcaaagatcagatagctgtatgtgtacagttttatttctgggctctctaacctcctccactggtctatgtgtttgtttttgtaccagtagcatgctgttttggttactgtagctctgcagaacagtttgaagatgggtagtgtgatgcctctcattttgttatttttgcttaggattaatcactttggctatttgagctcttttttagttccatctgaattttagaatagcttttttccaattctgtgaaaaatgacagtagtttgataggaacaaca

SEQ ID NO: 919450 - DNA, 565 bp, Homo sapiens
ttaggtcccacttgtcaatttttgtttgtgttgtaactgcttttggggacttggtcataaattctttgccagggccgacatccagaatggctatttcctaggttttcttctagaatttttatggtttgaagttttacatttaagtctttaatccatcctgagttaatttttgtatatggtaaaaggtagggatccactttcattcttctgcatatggctagccagttatcccggcaccatttattgaatagggagtcctttcccattgcttgttattgtcgcctttgtcaaagatcagatagctgtatgtgtacagttttatttctgggctctctaacctcctccaytggtctatgtgtttgtttttgtaccagtagcatgctgttttggttactgtagctctgcagaacagtttgaagatgggtagtgtgatgcctctcattttgttatttttgcttaggattaatcactttggctatttgagctcttttttagttccatctgaattttagaatagcttttttccaattctgtgaaaaatgacagtagtttgataggaacaaca

SEQ ID NO: 919451 - DNA, 590 bp, Homo sapiens
gtgacccgcacctgtaatcccagctactcgggaggctgaggcaggagaatcgcctgaacccaggaggcggttgcattgtgccgagactgtgccactgcactccagcctgggccacagaccgagagtccgtctcaaaaaacaaaacaaaacaaaacaaaacaaaacaaaacaaaacaaaacaccttctggctgggtgcaatggctcacagctataatcccaacactcagggagactgaggcaagaggatcacttgagctcaggagtttgagaccagcctgggcaacatagtgagacttaatctctacgaaaagaaaaaagaaaaaacattagccagatgtggtggtgcatgccttgtagtcccagctactcaggaggctgaggcaggaggaccacttgagcccaagaggtcttcaaggctgcagggagccatgatcacaccactgcactycagcctgggtgacagagtgagaccttgtctcaaaataaataaataaataaaataaaaaacttctgtacatcaaaaactttataaacaaaatgaaaagacaagccatatgctgcaaagtgtatgtgggaaacacataaacaa

SEQ ID NO: 919452 - DNA, 617 bp, Homo sapiens
catctcaaacttgggtttaccttcctcagcagcctattagaagagggcacgtggcagaaacaacattaaaatccggaggaccaggctgggcacggtggctcacgcctgtaatcctaccactttgggaggccgaggcaggtggatcacgaggtcaggagatcgagaacatcccggctaacacggtgaaacacgtgtgtactaaaaatacaaaaaaatkagccaggcatggtggcgggcacctgtagtcccaactactcgtgaggctgaggcaggagaatggcgtgaacccgggaggtggagcttgcagtgagcggagatcgtgccactgcactccagcctgggggacagagcgagactccatttcaaaaaaaaaaaaaattcctggggaccagcatccagtcacccagagactaccccctttctatctgttttcaaggtgaacagaacctacctgttgcattagacagggccagggattccatggagccccgaggggtctgctctgtgggcgtcatgtcctctgtgtatttcagggaactgatgggatgacgggtccgacactgctgagtggacaagcccccttcctcttcctcttcctcctcatatttggggacttg

SEQ ID NO: 919453 - DNA, 680 bp, Homo sapiens
cctagaagaactgttggacctgatcgctgaagggtggtcttgcacatcagatggggctggtctgacctgtgcaccccttagtctgttggcctcttctggggccccagcctggccacacctgcttagagggcagtcttgggtaccttgggggcccacagcatagcttctgtgccagtgaaccttgcctgactggtggagaagtccagtgaggtgtggcctatacagccatgcacrtgctccctccccatactgcagcttccccggggcccatggcaatgccctacatcactttgctggcacatgtctgcacagataggttttgctttccttgccctgccagcacactggagtgtagtctgcacccacccagcccccagccaccactgcagatggagctttggtgggcataaagccagcaagccctgcccctgccagcaccctgcccttatactaatactgcacagagaacagcggacacccccacaccctcagggatcactcctgcttgcagggcacagagaaggcacccaaacctgccccagccagcaccctgccccaagccaataccatatccagtacaaccacacacataatctccagcaggggccccccactccacccagctatgctgcctctgtcattgtggtgaacacccacagggaggtaggcacccctgcatc

SEQ ID NO: 919454 - DNA, 562 bp, Homo sapiens
atgttttttttttttgttttgttggttttgttgtgttttcgagaaggagtcttgctctgtcgcccaggctggaatgcagtggcgtgatctcggctcactgcagcctctgcccccggggttcaagcaattctcctgcctcagcctccccagtagctgggactacaggtgcgcactgccacgcctggctaatttttgtattcttagtagagacagggtttcaccatgttggccaggatgctcttgagctcctgaccttgttatctgcctgcctcggcctcccaaaatgctggaattacagatgtgagccaccgcgcctggcctagtcaacattttgctagaagttgtagccagagcctttaggtaagaaaaggcaccaaattgagawataagaaataaaaccatcgctttaaatagggaaaatcccaaagaatacacgcacaataattactagagctaataagcaaatgcagcaaagtttcaggacacaagatcaactcacaaaaaccagttgtgtggtttcctgtttgtttttttgaggagttatgctcttatcgcccaggcc

SEQ ID NO: 919455 - DNA, 622 bp, Homo sapiens
tgctcattctcaaggtccatatgaagttgttggcagggctgtgttcttttctggaggctgtcagagacaatctgctcccaagctcattcggattgttggtggaatttgttttcatgcaaaagtgaaagggaggtctctgtttctttgctggctgtggctgagaatcatattcagcttctgaggcctccttggatcatggcccctcgtctccaaagccagcaatgatgggttgagttcttccagtgcttcaggtttccttgacctccatttctgccctccttctcctgtcttttcttctgccatattatctttgaatcttctgcttttcaggcccatataattacactggcacacctggataattcaggataatctccctgcttttaaattagttgattagtaactatccttaattgtatctacaaaatcctttcacaktaatatgtagattaacatttgatcagatgaccaagcatggcaatgttgtggagggggaggcgtttttagattattctatctacctcaagtcagccccatgggcttctaatatgtagccaggatggagagccactaggagagaccttggaatttttatctaggaagagagaaatgggtgtttttt

SEQ ID NO: 919456 - DNA, 710 bp, Homo sapiens
aaattccaggccatttacaatgatttggaacataattacaaagtatcagccctgttcaagccactctgcttgggctgtgttgtgggtagcatggtctagattctctagtatcccaggaatttttggcaggaagaaaagagtgagccaagactggctggggagagtagtgctaccagcacttaaattgtcaaacatccagggcttagaatattggctctcaaacttgtgtgtccaaaaacattctctaggaaacttgttaaaaacgcagatgtctaggctccacattgagaaggtccagggtggacctggaaatctgcatgtatgaagtatctctggtgattctgatgtggatgcctcatggaccactttgagaacagtggctcaaggtctgaggatggctggcatcaaaatcctagaagaggccagscatggtgctcacacctgtaatcccagcactttgggaggctgaggtcggaggattgcttgaggccaggagtttgagaccagcctgggcaacatagacccagtctttacaaaaaattcaaaaattagccaggtttggtggtgtgtgcctgtagtcccagatactggggaggctgaggtggtagaatcgcttgagcctgggaggttgaggctgcagtgagctgtgaacacgccactgcattcagcctggggaacagagtgagaccctgtctcaaaaagaaaaaaaa

SEQ ID NO: 919457 - DNA, 559 bp, Homo sapiens
ttatgtaagtatacattaactaaaatgagaagttcacttattatgtcacccacattttgggtgtttaatagacaacacaaatatggaacatttccaccactgcagaaagttctcttagacagtcctgctctacaggaaactggagaacataggacccaraggctttgtcctctttctcaccttatccaattgacctgatttattatatttctcttctgcaaagaccagctccatctcactcatgtcattgttgaggataaaacaaactttagatttgtagaattctgggtcatctgtttcaaagtactgaggaggcagaaagacacagaacagaacatgaatactcttgccctgaaaggtgtaactgcttagaaccacttatcccttcaaccttaaaaattatttacaagcccaggaggagagatttcagggttaatggccaggggccttagtaggaaatgcacacccaagatgttaccttgtaatgcatacgcagtcctatgatttgggccaggaaagagcgggtgaagcgagctcggaccaactgcttgtaggctcc

SEQ ID NO: 919458 - DNA, 818 bp, Homo sapiens
tgtgtgaagattgagaggagcccacctgatcacatggacagaacgcacaggctcctgggtggccctgcggctccagtgacatagcacatggtcgggcatacaacagtgcccaggaaaggttagctggtggtgtttccagggtatcgtgctgagcttctgagatgagaatgtcctgtgaaagcctctgtctggaggtttcattggaagtaaagtttacatacaattaagggcctaaaattgtattttcatttaccttaacccagattcccagcaagctagagagctgccctcaccccaaagagttcctcatgccccgtcctggataggcctgtcagggccaggcagtgggcgcttgtccctcgccccatcctggacagtcctcacctgtcgctcacagcctgttctgctctggtttttwccctcagtccgttttgcctattctagaacttgatgtaaatggagtcatgcagtctgtactctcgcaaaagtcttcttccactcagtgccacgactgtgaggttcatccatgtctctgcatcatttctgccctttgtatttttagggttttaaaagtaatacttttggctgggcacggtggctcacacctgtaatcccagcactttgggaggctgaggcaggcggatcacaaggtcaggaggtcgagaccatcctggctaacacggtgaaaccccgtctctactaaaaatacaaaaaattagccgggcgtggtggcaggcggctgtagtcccagctactcgggagactgaggcaggagaatggcatgaacctgggaggcagagtttgcagtgagcccagat

SEQ ID NO: 919459 - DNA, 786 bp, Homo sapiens
caccaaggagggccccaggcctggcacagtctggctgacagttctgagacaggatattggagacaggcaggggaacattgctttaagaagcagaataacggccaggtgcggtctgtaatcccagcactccgggaggctgacatgggtggatcatgaggtcaggagatcamgaccatcctggctaacactgtgaaaccccatctctactaaaaatacaaaaaattagctgggtgtggtggcacgcgcctgtagttccgctactccggaggctgaggcagaattgcttgaccctgggaggcggagcttgcagtgagccgagatcgcgccactgcactccagcctgggtgacagagtgagactctgtctcaaaaaaaagaagcagaataacaatttaaggttgtgatagtgactacgaatgctgtgctcacctccaaactccatcccaacactaccctgccccctaagaggggcctgagcatggggtaaaaggctcgctgacagccagagagcaggagcccacgcaagaccaccagaggatgtgcagccgctgttcctagtaggtgaggaaaaagcaggaatctggcatccatacatgtcaggaggcaaaacaggccctgtgctggtttctgcagtcctctccagcccacttccctgctcttcttgctcactggccatgacccaagaaacagcagcagcaccaccagggatcttgttagacacgcagaggctcagactccatccagccctaaccaccagaaccctgggggctcaaacacacagtcaagt

SEQ ID NO: 919460 - DNA, 798 bp, Homo sapiens
aggctgacctgggagaatctctcgaacctgggaggcagaggttgcagtgagctgagatcacatcattgcactgcagcctgggcaacaagagcgaaactccgtctcaaaaaaaaaaaacaaataatcaaataataataataataataataataataataaaaagagggtgggagtggaccaaggcctaatggcatggaatttgcaaactttatcttcctasttttctctggggagccttcctccatcaccagggcccagcagggcctcagatggcggggggtggggcgggggctacacatatccctcatggccaagatgctaggaagcccctgagctggggcaacagcctctggtcacagtcatgagggaggctgggtgcagtagcgcttatctcgcctgaccttgtggagactgaccactccctccttctggaaaacgttgccccctgccctctccaaggcctcctccttcttacatcccctggtcctggctagggcctcagcacccaattctactccttgacccaccaccctgtggtgcttttgccgggccccagcccacagccatctgccaaacatctccccctggagtccctgcggcgtctctgactcagcaggtctgtgcctgcccctgctgttccccccacccagtggctctgcagagcaccatgttgcccaagccctgagtgctggccactcccagggcctcgccttcccccaccaccagcaccaccaatttgaattcctatctctccctctggcctcctccctagacccaggccctgccccagggtggggg

SEQ ID NO: 919461 - DNA, 678 bp, Homo sapiens
gccccgaaagtcatgggcgctggggttcaaggtgccctcactatttgacctttcttgctggtggctttggtgtgtcattctggtccccagcctctgtttcctggactgtaagtggggataataataggtcacccctcccctgcaggattaacctcagcgattgttgctggcatcagtgcagccctgggaccagagcacacctgggtgagtttggagcgctcgcgctcttcctggtggccctgcctgggcactgacccctcccatcctctcctcaatagccacgcccctagcccagctagctaatgaataaatatgtagtagccaggccagcatcctggctccgmggtctagccactttctagtccttcctagctgcggctgccactgagccacgcacgcccctggcatcatgctcgccttgcagtgcagctggtgtggtgcagactctgagagtgagcaccaggactcttcccatctggtctccaatctaccctcttgccatgctccaccaccccttaggtcttgccactgggagtggggagggactggggagagaaaatactggggtaggggtgacaggagagaaggttcttcactggcctcccctggcctaagcccctggcctacttcattcttggaccccagctgatgggatggggcttggagaggacccagatg

SEQ ID NO: 919462 - DNA, 742 bp, Homo sapiens
catgaccacgtctcctgccctcagcgccagcctgcccttcccctggccccccatttgcccatccccaggatcatagtccagagctgctatcatgatctttggagtccacagtgggagtctcttggagttcccctggagcaccagggaggaaccctgggggatggtgagcccctgaaagtcctcgaggtgggccacagaaggcaggtgcccttgggccggagaacgccacctcctatcagtctgctctgtccccacctccatctcagccactaggcacccggggatattgcccacttgcctgttgcactcgctgaggtagaaatcatgggtgtcctgagagccccacactcttagcaactgcyttttctggaagaccagctcctcctctgcagccttgaggttggcagacatcaccagggggttgtaatcagagagggccacaaagaccctggctggagtgttggcccccgtccccagctgttgggggccacccctgggcatcttgatgactttggcggatggagctggacacagtgccgagctgggctcatggagctggcaccctctcttcacccccagagcttgtccttgcctgctgtggggctcaggctccctcctctcctctcgcctctctgtgccccacagatccaagcacagtgcctcctgctcctccttcaaaacgttatggaagtcagatgcatactgttggctggcgcccagctggggaggtgtgaacccttgg

SEQ ID NO: 919463 - DNA, 669 bp, Homo sapiens
gccttctgccttagaaacaccccagaggggatgaggagcttccatctggaaaagatggtgcaatctcaacgcctacagcgggtctcagatggggattttacctctttactctttaaagagactctccctgtccaagcaactgaggtcctgtggcagtcaaccatggaggtgttccactgggatccctttttcaagaaagaacttaaccaggtacagtggcttacacctgtaatcccagcactttgggaggctgaagcaagaggatcacctgagcccaggagtttgggaccagcctgggcaacatggcaagatcccatctctacgccaggcatggtggctcacacctgtgatcccagcactgtgggaggctgagtcaggcagatcacttgaggtcaggagttcaagaccagcctggccaacatggtgaaatcccacctctactaaaaatacaaaaattaggcgggcatagtggtgcacacctgcaktctcagctactcgggaggatcgctttaacccaggaggcagaggttgcagtgagccaagatcacaccactgcactctagcctgggtggcagaacaagcctccatctcaaaaaaaaaaacaaaaacaaaaacaaaatcccatctctacaaaaaaaaacaaaacaaaaacgaaacagccgggcctgt

SEQ ID NO: 919464 - DNA, 653 bp, Homo sapiens
tccttaaattccttggattggattttgacattctcctgaatctcagtggtcttctttcctgtccagattctgaattctatgtctgtcatttcagccatttaagtctgcttaagagccatggctggggagctagcatggccatttgcaggtaagaagacactctgggttttagagttgcscaagttcttaacactgtttttttcttatctgtgtgagctgatgttcttttaatctttgaagttgctgtcttttaaatagggatttgtgattttatattctttgatgtcttggattgactttggtataagatatgtttagtcatctggctttatttctgaatgatctcaggggaccaggactcagctcagaactcctcggctgcctgctgtactcctggggcctaggaataggcccatgacattgttctctgttgagcacctgattctgtcgctgttcggggtgccactatgtaacctgccacgatcactggtggactgaacaaagggggcgaacatgggaatacaagacaagagataaaagagtatatttggaagaaggggtcagggggcaccttgcctctagtggaaaagggccctgagttttacacagccctccatatttattaggcaaaagagatagtgagaaagggggtg

SEQ ID NO: 919465 - DNA, 666 bp, Homo sapiens
taagtagtagaaaattcccactcaactggcttcaacagtgaggacaaaatgtatggagattggacgcttcagtcttcaggggcttggccctcagggtttttcccatctcttcccgtctgctggcctcaacaaacctgctttcctcattgcaacaagatggctgcttcacgtcygagaatctagtgaaagaagctgtcccttctgcatttccttttacaaggaaaaacatctttcccagcatctcccagcagacttctcatacctcagtggccaaaaccatgtctaaactacgggcctccaggatgggctcagctcaatcagcacataccctagagctggaggcagggtcacctttccttgagtggcgtgtgggagaggtgtggcatccaacccaactgggtcctgccagcaggaagagaaaagaagagccactgtaggtaaccaatcacgtctaccacaggcagggaccaataccacatatctgtgtttcccctcacttgccacccccatcctgtgctggcagatgaggatgctcaacaaatagctgtggaactacaaattatcctgtgggtgtgagaaaagagtgtgcattataatagggtggtacaattggacatgtgtgcacggaaaatggaaaaacagccatgaaatccaaacagatgcaaa

SEQ ID NO: 919466 - DNA, 558 bp, Homo sapiens
ctagcaagatatctaccaaaattaaaaccatatttgaggatgctggcactgtgagcaatatataaatgatgcatgtaacatcatttaatatgatcttatttttaaaaacgagtagagtggtgttttctagctgttagtktttccaaatatcaatgtagaaattagccttctgcagctgcagaggcaattcagtttgcagcttgcttgcatgtggcctagagccacccagcctgatatgtactaattttttatgtttaacttgccagagtagaaactcagtttctgggccaggcatagtggctcatgcctgtaatcccagaactttgggaggccaaggcaagcagatcacaaggtcgggagttcaagaccagcctggctgacatagtgaaaccctatctttgctaaaaatacaaaaattagcccggcatggtggcaggcacctgtagtcccagctacttgggaggctgaggcaggagaatcacttgaacctgggaggcagaggttgtggtgaactgagatcatgcccctgcactccagcctgggcaacagagtgagact

SEQ ID NO: 919467 - DNA, 662 bp, Homo sapiens
catcagttattcatatttcagagtaaggacaaaacatttttaagtagctggcaaaggacatcactatatttcagagtaaaacaaataggaaatgcttatcatttgacatatttttaaacattgtatctgaaaagtgaacaaagaagtgaatgtgcttatgattaaattgactttgttactttgtaaacttgtagctttagacctgtctcttagcatcaccaagccttgatcttttcatctataaaatgggcatggtaatgccagccttgctatgtttataggtcacttaggaatgaggtatgtatggtgttgaccatggtttctggcaagtggcatatattcattataccatagctcttttcagaaagctaagtcaccacgtacatgttaatgcaacctgctgaaaataggcatggaaaaactagaaaatctagaaaaattagaaaatcactgaagasgattttctttaaaaaaatacatactttaaactcgggaggctgaggagggagaatcgtttgaacctgggaggcggaggttgcagtgagccaagattgtgccactgcactctagcctgggctacagggcaagactccattaaaaaaaaaaaaaaaaaccagcaaaaaacaaacaaaacataatgcatgttctctcttataaatggg

SEQ ID NO: 919468 - DNA, 680 bp, Homo sapiens
aataaatatgtagcagccaggccagcatcctggctccgcggtctagccactttctagtccttcctagctgcggctgccactgagccacgcacgcccctggcatcatgctcgccttgcagtgcagctggtgtggtgcagactctgagagtgagcaccaggactcttcccgtctggtctccaatctaccctcttgccatgctccaccaccccttaggtcttgccactgggagtggggagggactggggagagaaaatactggggtaggggtgacaggagagaaggttcttcactggcctcccctggcctaagcccctggcctacttcattcttccaccccagttgatgggatggggcttggagaggrcccagatgactggtctctcagctcagcctcctgcccactgtctctatagctgcctggtgctacgactcccaggaccccaagtgtggtgaggacagagtgtcatgtgaggctgagtgacatcagtctgtgtcctgggaccaccagacaccataatacatattatgtaatatgtatgatacatattacagaataaatgacatatataatatatgatatatattacatataatatatgacatatattacatatatgtgacatatattacatataatatgtgacatacattatatgtaatatatgatatataatatata

SEQ ID NO: 919469 - DNA, 607 bp, Homo sapiens
caaaatttggccataatttttccctggggaattcaggttttaaaaaaacacttcccctatacttattcctatcacaatcccaggatcagggaggctcttcacattgaaaccaggcaaggatgccacacctttcttggcatccagattgttttcttggcaagtgattccagtatacttactagattcaagcctcagaggggccacctgcaccacctgcaatacagaaacaaagctttttgaggggtatgtcatgttgtggattgtttgcacaaggctctgtttctctcaatgaatactgaaaacttgatcagaaagtgtagtcaacttcaaggcctccaaaacaagggtrggatacacactggaaaagacatcagcttctggatggtggatctctcaggtccacgtaggttggcaagtgcaaaatactgaatccaaggagaagacattgcttccagggacaaggaccccaaggatacagtctacaacctgaagccggcatagctaaatgccattttggattacatatcagttgctaagagtcacttcttcctccccctcagaaaactgcatttaatacctgtcatggacattgtcatcttttcacatg

SEQ ID NO: 919470 - DNA, 692 bp, Homo sapiens
caacacggtgaaaccctgtctctactaaaaatacagaaattagcggggcgtggtggctggcacctgtagtcccagctactcaggaggctgaggcaggagaatcatttgaaccgaggaagcagaggttgcagtaagctgagatcgcgccactgcactccagcctggtgacagagtgagacaccgtcacaaaaaaaaaaaaaaaaaaaaaaagcaggacactgaactctgggagggcctcctggtgagaggtgagcacagaggggagagatggaggcaggagcatgggyttctggtggccccagcagaccctgtggcagcgtggccagggtcctctgcagggaggaatcttggccaggatgacgctgtagcaggcctcttcctgaggcctccagccagcccggccagggtcccagcgtccagtgacccctgtttcacagcagcagctggggccagccccaggctctcttccactcccagcttcttaaaactggaagtggagagagttgtttgatgaaacactggggcaaaccacatcctctcttcaccaagggagagttcgaggggatgccggcagagggagctttagagtagagacccctacccaaccagtgaccgtcacgcacacagcagggcatgctatggagacccccagacagtcactcggggagacccagcaggtccagactcttcag

SEQ ID NO: 919471 - DNA, 635 bp, Homo sapiens
ggaggctgaggcaggagaatcacttgaacctgggaggtggaggctgcagtaagccaagattgcaccactgccctccagcctgggtaacagagcgatactctgtctcagaaaacacacacacacacacacacacacacacacacacayatacacacacacaaatttgttgggcgtggtggcgcactcctataatcccagctacttgggaggcttaggcatgagaatcgcttgaacttgggaggcggaggttgcagttaactgaaattgcaccactgcactccagcctggcaacagagcaaaactccatctctaaatagatatagatagatagatagatagatagatagatagatagatagataatagatagatagatagatagatagatagatagatagatagatagatagataggaagaaataagtaaaaataacaaccaaacaacaaaacagtggagtttatccaaagaaacagagactcttagaactgagaaaaggggccctgtttggctctagagacccacaccctgctctcggagtcaccgtccccttcccaaaggctactgagagagtccaagcgaagcttacatgtggggaaactgagtctcagaggggtgaaggtattgctcaggtcc

SEQ ID NO: 919472 - DNA, 541 bp, Homo sapiens
gggccacagtggccttgggtagtttgagtgtctttcactttgcccactccaaggaggtaatgcagcacaggggtgaggattctgaagtgctgattctgctttcactactttctgcgtgtcccaggacaagttattaaacttctctagacattgcttacctcatctctaaaacaggtataacaatattgagtgtctctggacataggcatgggcaaggacttcatgtctaaaataccaaaagcaatggcaacaaaagccagaattgacaagtgggatctaattaaaccaaagagcttctgcacagcaaaagaaaccaccatcagagtgaacaggcaacccacaaaatgggagaaaatgtttgcaatctactcatctgacaaacggctagtrtccagaatctacaatgaactcaaacaaatgtacaagaaataaacaaacaaccccatcaaaaagtgggcgaaggatatgaacagacacttctcaaaagaagacatttatgcagccaaaagacacatgaaaaaatgctcatcatcactggcca

SEQ ID NO: 919473 - DNA, 509 bp, Homo sapiens
catcaaatgtccagacaaaaattgaaatgctttttcttatactcttagggagaagagagagtgtagcctttttttcagctttacagctctagagctccttgttctgtggttctccccactacttgaaacatggcctcttatgaaatctatgggttctgcttcccccctctattttttttttggttcgatccttctctatcctttgcctctatcgcccctgcaatttctcctcagaggaggactttgacctgtaagggagttttacatrgttagctataaaagtccatagggccaaggttactccagaaacgtctcacctcactatgccatggttcctttgcttcctcttagttctctttctttttcttttctttttgacagaatcttgctctgtcacccaggctggagtgcagtggtgcgatcttggctcactgcaatcttcgcttcctgggtttaagggattcttgtgcctcagcctcccaagtagctgggattacaggtgtgcatta

SEQ ID NO: 919474 - DNA, 611 bp, Homo sapiens
tctcccacagttaccatttttcctggcccggacttcagtccggcctcccacattattcctgatgctacacctgacccccataactgtatctctctgatccaactgacattcaccccatttccccatatttccttctttcctgttcctcaccctgatcacacttggtttattgatggcagttccaccaggcctaatcgctacacaccaacaaaggcaggctatgctatagtaaaagccactagcccgcctcttagaacctctcatttcctttccatcgtggaaayctatcctcaaggaagtaacttctcagtgttccatctgctattctactacttctcagggattattcaggccccctcccttccctacacatcaagctcgaggatttgtccccacccaggactggcaaattggctttactcaacatgccccgagtcagatgactaaaatacctcttagtctaggtagatactttcactggataggtagaggcctttcctacagggtctgagaatgccaccgcagtcatttcttcccttctgtcagacataattcctcagtttagccttcccacctctatacagtctgataacagaccaacctttattagt

SEQ ID NO: 919475 - DNA, 669 bp, Homo sapiens
tttgtttccatgtctagaactttcttttttttttttgtagctgttgtaaggccagtcttgtggtaatgaattctcttagtgattgattctctgggaaaggcgttattttttcacttaccagcttagtttggcatgagatgcaattcttggttggaattttgtttcttgaagaattctaaaagcaggccccattctcttctggcttgtatgttttctgataggaagtactatgttagcctgatgaggttcccttcagaggtgatatgacccttttctctagctgcctttaagattttttcttttgcgttgaccttggaaaggctgatgactatttgccttggggatggtcaacttgggtagtttcttgcagggaatctctgcatttcttgtatttgcactttcatttctctagcgagattgggaaaatatttgtgggttatatcctcaaatatgttttccatgttttctgctttctcttaagaaygcacaatgaatcatagatttggttgttttacacaatctcttatttctcagaggctttgttcatttcttaaaattattttttctttatttttatctgactgggttgatttgaaggagtgatgttcaggctctgaaattgtttcttctgcttgatctagtctattgttaagacttccaactgtaatt

SEQ ID NO: 919476 - DNA, 609 bp, Homo sapiens
gggaatcacttttgttgtgtagcaagaatgataaaaagaagccagatgagaatgtggtttaggcttggtaatggctagataagaagaacattttgtaacatcagtcattactttcagcatgcctgtttcccaaacagacaggattctgaccttgtcaaaggcctgtgagaatggcactgcatacttmctgggaatatgaaatgtgaagaacgagacggttgatcccagaagcacatcaacagctccacagaaaccacctaggtcagtgacccacctttaataacttcgtaagagggaagcaagaggttcatctggctaaatcttgttgctagtgtttgggtagttttttaactatttagagatgtgaaagaataatttccatggccattacatcactattacattgctattacatataagaaaatgtcacaataaaagaacaaaagattctagaactccagctctctacattttgtattactagctttgactggatttcacagggaactataaactgaaaacacaaagtactcatttgaaggaaaaaaatgtttaaacatgctgcataaacgtataaaggaaagacacttcaagtgttttacactagaa

SEQ ID NO: 919477 - DNA, 477 bp, Homo sapiens
caaaattaaaaacctcttcagaatgcactgttaagagactgaaaagaccaaccacaaactaggcgaaaatatttacaaattatttattttaataaaggattgtatccagaatatataacaaattctcaaaactcattaataagaaaacaagcctttcaccaaaatgcataaaagatttgaaaactttaccaaagaagaggtgtggatgatgtattacttagggttctctagagcgacagaactaataggatatatatatakagagagagaggagtttattaagtattaacttacacaatcacaaagtcccacaataggccgtctgcaagctagcagggagagccagtccgactctcaaaactgaagaacttggagtccgatgttcgagggcaggaagcatccagcatgggagaaagatgtagacggggaggctaagccagtcttgccttttcatgtttttctgcctgcttatattcg

SEQ ID NO: 919478 - DNA, 826 bp, Homo sapiens
acagaattacaaaggatcataagagactgttatgaacaattatatgccaacaaattggaaaacctagaagaaatagatacattcctagacacatagaacctgccaagacacaatcatgaagaaatagaaaacttgaacagaaaaatagtgagtaaatagattgaattagtaaataataagtttcctatcaaagaaaagcccaggaccygatgccatcactgctgaatgttttatttatttatttatttattttgagacagagtctcgctctgtcattcaggctggagtgcaatggcgtgatctcagctcactgcaacctctgcctcccgggttcaagtgattctcctgcctcagcctcccacgtagctgggattacaggtgtctgccaccatgccaagctaatttttgtatttttagtagagacggggtttcaccaggttggccaggctggtctcaaaatcctgacctcaggtgatccacccatctcggcctcccaaagtgctaggatttcaggtgtgagccaccacgcccagcctctatcaaacatttgaagaagaactaatgtcaatccttcccaaagtcttccaaaattcgaagtgggaaaacttctaaactcatttatgaggccaacattaccctgatatcaaagccagagaggacactacaataaaagaaaattacaggctaatatatctgatgaacagagatacaaaaattttcaactgaagattagcaacctgaattaaatagcatgttaaaaaaaacatataccatgatcaagtggaattcatcactgggatgcaaagatggttcaacataggcaaat

SEQ ID NO: 919479 - DNA, 748 bp, Homo sapiens
ggacttggagaacttttctggagctagctagaggcttgtaaaacgcaccaatcagaccaggcacggtggctcacacctgtaatcccagcactttgggaggctgaggcaggcggatcacgaggtcaggagatcgagaccatcctggctaacacggtgaaaccccgtctctactaaaaatacaaaaaagtagccaggtgtgctggcaggcacctgtggtcccagctactccggaggctgaggcagtagaatcactttaacccagaaggcagaggttgcagtgagctsagattgtgccactgcactccagcctgagtgactaagactctgtctcaaaacaaacaaacaaacaaaaaaaaaaaatgcaccaatcagcgctctgtagctagctacgggtttgtaaaatggaccaatcagcaggacatgggcagggacaaataaggaaataaaagctagccacccccagccagcagcagtaacccgctcaggttccccttccacactgtggaagctttgctctttccctcttcacaataaatcttgatgctgctcactctttgggtctgtgccatttttaagagctgtaacactcaccgcaaaggtccgaggctccattcttgaagtcagcgagaccacgaacccaccagaaggaaccaactcgggacacacaaccagaccccagacctgagacatgccatggtttctcgtgcacacacacactggggagagaaatgtggacttagcttggccg

SEQ ID NO: 919480 - DNA, 748 bp, Homo sapiens
ggacttggagaacttttctggagctagctagaggcttgtaaaacgcaccaatcagaccaggcacggtggctcacacctgtaatcccagcactttgggaggctgaggcaggcggatcacgaggtcaggagatcgagaccatcctggctaacacggtgaaaccccgtctctactaaaaatacaaaaaagtagccaggtgtgctggcaggcacctgtggtcccagctactccggaggctgaggcagtagaatcactttaacccagaaggcagaggttgcagtgagctcagattgtgccactgcactccagcctgagtgactaagactctgtctcaaaacaaacaaacaaacaaamaaaaaaaatgcaccaatcagcgctctgtagctagctacgggtttgtaaaatggaccaatcagcaggacatgggcagggacaaataaggaaataaaagctagccacccccagccagcagcagtaacccgctcaggttccccttccacactgtggaagctttgctctttccctcttcacaataaatcttgatgctgctcactctttgggtctgtgccatttttaagagctgtaacactcaccgcaaaggtccgaggctccattcttgaagtcagcgagaccacgaacccaccagaaggaaccaactcgggacacacaaccagaccccagacctgagacatgccatggtttctcgtgcacacacacactggggagagaaatgtggacttagcttggccg

SEQ ID NO: 919481 - DNA, 748 bp, Homo sapiens
ggacttggagaacttttctggagctagctagaggcttgtaaaacgcaccaatcagaccaggcacggtggctcacacctgtaatcccagcactttgggaggctgaggcaggcggatcacgaggtcaggagatcgagaccatcctggctaacacggtgaaaccccgtctctactaaaaatacaaaaaagtagccaggtgtgctggcaggcacctgtggtcccagctactccggaggctgaggcagtagaatcactttaacccagaaggcagaggttgcagtgagctcagattgtgccactgcactccagcctgagtgactaagactctgtctcaaaacaaacaaacaaacaaaaaaaaaaaatgcaccaatcagcgctctgtagctagctacgggtttgtaaaatggaccaatcagcaggacatgggcagggacaaataaggaaataaaagctagccacccccagccagcarcagtaacccgctcaggttccccttccacactgtggaagctttgctctttccctcttcacaataaatcttgatgctgctcactctttgggtctgtgccatttttaagagctgtaacactcaccgcaaaggtccgaggctccattcttgaagtcagcgagaccacgaacccaccagaaggaaccaactcgggacacacaaccagaccccagacctgagacatgccatggtttctcgtgcacacacacactggggagagaaatgtggacttagcttggccg

SEQ ID NO: 919482 - DNA, 569 bp, Homo sapiens
gaccgtctgtgaccaggccctagtcttcttttcctcggccaactgaccatagggaactccctttgaggctatcggtgcaggctcggggacagaagggcaggtggcaggagtggagaccatggacatttgagccactttctcatgtaacttttgcctccaggacctgctggagcctgatcacgtatataccacttgtgtttgatgatggaatgctgttgtgcatgacccactttatggttagataggtcagaaagcacccagctcatgataggcagttcagctcatatggtacttgatgacccatggccaaatgtccaatttccaccttagcccattaacaggccaagagctgttgctcaaaaggggggtagttatctgcagaaratggcagggccttgctccaaaatagaggcctccactgtgattcacctatgggggtctgccaaaggctccaaatagcatccctatttgccaataacacctcaggcaccattggatctactgggtcatatggtccaagtgacagagcagcttgcacagcagcctagaactgttgcagagcattctct

SEQ ID NO: 919483 - DNA, 593 bp, Homo sapiens
attggagtcaccacatagttaagcttatgataatccacaggcattctccaagacccatctgtcttctgcacaggccaaatgggagaattgaatggggatgtggtgggaatcaccacccctgcatctttcaagtccttgatggtgggactcatctacacagtccctttagggatgcaatattgtttttgatttactaggttgaggcagctctaatggcttccatttggccttttccaccatcatcaccctcactctaccagtatggagtcaatgtgggcgttctgccagctgstaagtatgtctatgccaattatgcattctggcactggggaaattaccacaggatgattctagggacccactggacccactgtaagtcaaacctgagctaaaagtttattaattgcttgaccccctataagcccctacttaactggaggaacacaatgacattttgggtcccctggaatcaaagtcagctcagagccagtgtccagtagtccctgaaatgtctgatcattttcttttccccagtgcacatgtaccctggtaaaatgctggaggtcttctggggaaggataggagaaagatta

SEQ ID NO: 919484 - DNA, 634 bp, Homo sapiens
gagacgtgacttttaccttctgccacgattgtgaggcctccccagctatgtggaactgtgaatcgattaaacctctttcttttgtaaattgctcaatcttgggtatgtctttattagcagtgtgaaaataaattaatacaataaatcrgtaccagtagagtggggcactgctgaaaagatacccaaaaatatgcaagcaactttggaactgggtaacagaggttgaaactctttggagggctcagaagaagacaagaaaatgtggaaaagtttggaacttcctagagatttgttgagtggcttcgaccaaaatactgataacgatatgaacaatgaaatccaggcagaggtggtctcagatggaggtgaggaatttgggaactggagcaaaggtgactcttgttatgttttagcaaagagactggtggcattttgctcctgccctagagatttgtggaactttgaacttgagagagatgatttagggtttctggcagaaaaaatttctaagcagcaaagcattcaagaggtgacttgggtgctgttaaaggcattcagttttaaaagggaaacagagcataaaaatttggaaaatttggagcctggcaatgcaatagaaaagaaaatcccattt

SEQ ID NO: 919485 - DNA, 594 bp, Homo sapiens
ctatatgtagttgatataatttcttctgaaattcttaccattagattcattcaattattgttgaaccatcgtattaggagaaacactatcattcttgaaaagtgtggtcatgacatgtgcaatacccatttgataaggaaatcttgagcagagaaactaacataaaaattgctccagaagtcacaaaatgtgctattcctctgacaaacagaaactaccacatgggaatacctccacaacccagtgccatggcagtacttttttgaaaggcaactcacacttgagaaaagttcacatcctcaaattacaaaacrtatagaacacacatggaaactcactagcaagagtgccagtaggcacaagaaatgataaaattcacatctaaggaactacaaataacaaagcaatttaaaagggacttttacattaaattaataaaaagaaagacattttgaaagaaaacattcaaaataagagaataactttcacagaataaaaacattataaaggaatataaaaggagaacaggctgttgcaaaaagagtcaaaaaaaggaattcttaaaaaaaagaaaaaaatagaatcattgaaatt

SEQ ID NO: 919486 - DNA, 726 bp, Homo sapiens
gggcaatgcaccttagttatcattccacatttcaaatgtaaatccattgtattgtttcagagctataaagtactgcaccccatgactattcccaaaattacttaagcaccccgctatgggtatccatttgttctgtttccagtcttgctcttataaccaatgctgtagtgaacagcactgtgttgagaagcggtgaacgtgggcatctttgtcttgttcccttcctcaggcggaatgctttcaactctcycccattcaggaaaatgttggctgtgggtttgtcatagatagcttttattaccttaaggtatgtccgttctacgctgattttgatgaacggttttaatcataaagaaatgctggattttgtcaaaggctttttctgcatctattcagattatcatgtgatttttgtttttagttttattgatgtgatgtatcacatttattgacttgcgtatgttaaaccatccctgcatccctagtatgaaacccacttgaatcatggtggattatctttttgatatgctgttggattcagttagcttggttgtagcatttcttattattccatctgtggaatgtattggttgaaataatgaaaacatgttctatcctcactgcttagcactttgtgtttctttaatagccttcccaacagggcaacataaaagcaggagccctgctagtctccccttaacccggaatccccccttctccacagct

SEQ ID NO: 919487 - DNA, 677 bp, Homo sapiens
cctggatcttcaggctgtattctagtgcttccctagccctggctcttgcctacacctgcatttaccccaacagggacttgctctcctggactgtgtggcctctcttggttttgatataagcaggagctgtggacccacatggccagtcactgaccctcctccaccaggaacttcctgcaggctcaggcaagacaggaggaccccatggctctgggctacagctcagggtttccactgcagagttcctcacccaggtccttgaggttacccactcaccagccgcctggatgtccttcacaatctgggccatgaggctgccgttgtagaaggcctgggcaccctcgatggccagcatctcgtaggtgtcagccagccgcggcagggtcagtctctccccctcccraagcacctttctatcccggcagaacacctcaccggggcagagggggctcatgtgaggcagcaggtggggtggactcagctagaccaccccccacacctgcccacacaggagaccagcacaaagcaggggcagcacctgtcacaggtgggtggccctgtcactcagcgctcatcctcctagtgtcccttccgggagcctcctagtgtcccttgccactcaggacacgtggccagccacagtggccactgggaccccatgctcagaatgtgtcccc

SEQ ID NO: 919488 - DNA, 677 bp, Homo sapiens
cctggatcttcaggctgtattctagtgcttccctagccctggctcttgcctacacctgcatttaccccaacagggacttgctctcctggactgtgtggcctctcttggttttgatataagcaggagctgtggacccacatggccagtcactgaccctcctccaccaggaacttcctgcaggctcaggcaagacaggaggaccccatggctctgggctacagctcagggtttccactgcagagttcctcacccaggtccttgaggttacccactcaccagccgcctggatgtccttcacaatctgggccatgaggctgccgttgtagaaggcctgggcaccctcgatggccagcatctcgtaggtgtcagccagccgcggcagggtcagtctctccccctcccgaagcacctttctatcccggcagaacacctcacyggggcagagggggctcatgtgaggcagcaggtggggtggactcagctagaccaccccccacacctgcccacacaggagaccagcacaaagcaggggcagcacctgtcacaggtgggtggccctgtcactcagcgctcatcctcctagtgtcccttccgggagcctcctagtgtcccttgccactcaggacacgtggccagccacagtggccactgggaccccatgctcagaatgtgtcccc

SEQ ID NO: 919489 - DNA, 677 bp, Homo sapiens
cctggatcttcaggctgtattctagtgcttccctagccctggctcttgcctacacctgcatttaccccaacagggacttgctctcctggactgtgtggcctctcttggttttgatataagcaggagctgtggacccacatggccagtcactgaccctcctccaccaggaacttcctgcaggctcaggcaagacaggaggaccccatggctctgggctacagctcagggtttccactgcagagttcctcacccaggtccttgaggttacccactcaccagccgcctggatgtccttcacaatctgggccatgaggctgccgttgtagaaggcctgggcaccctcgatggccagcatctcgtaggtgtcagccagccgcggcagggtcagtctctccccctcccgaagcacctttctatcccggcagaacacctcaccggggcagagggggctcatgtgaggcagcaggtggggtggactcagctagaccaccccycacacctgcccacacaggagaccagcacaaagcaggggcagcacctgtcacaggtgggtggccctgtcactcagcgctcatcctcctagtgtcccttccgggagcctcctagtgtcccttgccactcaggacacgtggccagccacagtggccactgggaccccatgctcagaatgtgtcccc

SEQ ID NO: 919490 - DNA, 587 bp, Homo sapiens; identical to SEQ ID NO: 919307

SEQ ID NO: 919491 - DNA, 608 bp, Homo sapiens
aatatctaaacatggaaaagatacagtaaaaacacagtacattgggagaccgaggggggcggatcacctgaggtcagaagttcgagaccagcctgaccaacatggagaaactccgtctgtactaaaaatacaaaattagctgggtgtgctggcgtggggctgtaatcccygctactcgtgaggctgaggcaggagaatcacttgaaccccggaggcagaggttgcagtgagccaagatcgtatcattgaactccagcctgggcaacaaaataaaactccttctcaaaaaaaacaaagaaaaaaatatatatatatattacaaaatttaaagagagtggtacaccagtaaaggacatttagcatgaacagaggttgcaggactggcagatgctctgatgagtcagtgagtacttggtgagtgaatgcgaaggcctaggatattactgtacataactatagactttatatgcactgtacacttaggctacactaaatgtatttaaattttttctttctttaacaagttcatcttagcttatcataactttataaacttttaatttttttaattttttgattctttgataataacacatcttaaaacaaaa

SEQ ID NO: 919492 - DNA, 582 bp, Homo sapiens
tgagtagtatttcatggtttacatatactaccttttctttatctactgattggttgatgggcacttaggttggttccgtatcttttcaattgcgagttgtgctgctgtaaacatgtgtgtgcaagtgtctttttcatataatgccttcttttcctctgggtagatacccagcagtgggattgcttgatcaaatggtagttctacttgtcattctttaaggaatctccacrctgtttcccacagttgtactagtttatgttcccaccagtggcataaaagtgttccctttttaccacatccatgccaacagctattattttttgactttttaattatggccattcttgcaggagtaaggtggtatttcattgtgttcttaatttgcaattttctcatgattggtgatgttgaacattttttcatatgtttgttggatgtctgtatatcttcttttgagaattgtctattcatgtcctttggccactttttgatggggttgttttttcttgctgattcctttgagttccttgtagattccggatattagtcctttgtcagatgcatggtttgcaagtattttct

SEQ ID NO: 919493 - DNA, 757 bp, Homo sapiens
gcattacaaatgtttcctctatcttgtctttaacctgttcatgatagctttggttaggcatacattaatttaaatgacagatctatcaatcgtttaccttatgttttgtactttctgcttctcatgtaaggaatcttattttttaaacgatattatttctctacaaccataaagatattcttctatwttttctattgaaatcttgtagttttaattctcatattaaatctttaatctacttaagatttattttatataatgtgagttaaggattgaattttaatttttccttttggttatgtcacagcataaattattaaacagcccatcctttctgcactagttatagtgctgcctctgtcatagatcaagttttcatatcagtccatttctacactctctatcctgctccattgatgtcttcatccttctctaagccaatttcacattgtcttcattattatgggttgagataacctaactatctggtatgtgagcctcccaaccttttttgtttgtttgtttgtttgttttttgttttgttttgttttttgagacagtcttgctctgtcaccaggccagagtgcagtggcgcgatcttggctcactgcaagctccacctgccgggttcaagcgcttctcctgcctcagcctccgaagtagctgggattaaaggcgcctgccaccacgcccagctaatttttgtatttttagtagagacggggtttcaccatattggccaggatgatcttgatct

SEQ ID NO: 919494 - DNA, 774 bp, Homo sapiens
ttcccattagcaacataggaaaattatttaatttcagtaattctagtaggtgtatattaacttgaatttccttgaagaataatggtactgaacatcttttcttttcttgcttattgagcattcatatgtccttttttgcaatgtgtatgttcagaattgtttctttttaaattgggttacatcttcttatttttcagttttaagsgttctttacatattattaatacactttctttgtcagatatgtgcactgcaaatatttttctctcagtctgtggcttacattttcatggtcttagagaaaccttttgaagaacaaaattttatcttggtgaaatgtaatcttttattttttagcacttagtgcttttgtattctaagaaatgtttccccaccccacaagtctgaaatttttatcttatcctttcttttacaagtttataatatgatttttgcttttttgtctatatttagttttgagttatttttgtgtatggtgtgaggtggtggtatttaccttttccaggtggaatcaacttgttctaccaacatttatttaaaagattgtcctattcctgttcttttctgattgaattatgtttgtcctttctcccactgaattctgatatttctcaaaaatcaaataataatatttgtgcatttccagttttgggctctcaataatgttctttctttatgccaatatcacactgtcttgagtgctgaatatttaaattaagtactctagccagaggtatttgatgggttccaatc

SEQ ID NO: 919495 - DNA, 846 bp, Homo sapiens
ccctcagaaaaagagatactagtaactgaaagtggaaaagcatgcattgatatgaggggatatgagcaggacatctatagcatctgctacagttaccagacaagagggcaaatcaatagtcaaatgctgctgataggccaactaacatgagaaccgagaattgacaattgcatatagccacatggaggtcactggtgatatccaaagagcaacttcaggtagtgaggatgagaagaagcctaagtggaatgagtccgaaataatgggaaataggatttagaaactgtgtgaatatcyaaggtgtttcactgcaaaagagagcaaagtggaataagggcataggtaaagtggtgaaaatggtggtaagaggcggcttctttttttaattaaagagaggaaagaagtagtgatcaagtgaaagaagaggaaacagtggtttgaaaagaggaacgaaggtgtgaagtagtcataaagaagagtaggaaaattaaggaaccaggaaagtatagtatgattgccccagagcagtaaagacccacttgaggttcatcatcatcaatgtaaagtgagggtagtcagcgtagttcgctttagttctagttagctacatggctgtaggcacagagtagtagagacttgcttttaaccagcagtgggattttgtcaagtgagtatattaaaagcaagaacagagtaacttaaagccaatcttctgcaagatgtaaatacagttaaagctttccttactcactgatgcttttaacttcctagtcctttgtgggttcatccttcttagtgatatcaacaaaagccagtctttgtctaaaagtatgtttattttacaat

SEQ ID NO: 919496 - DNA, 590 bp, Homo sapiens
ctcacacctgtaatcccagcattttgggaggccaaggtgggtggatctagagatcaagaccatccaggccaacatggtgaaactccatctgtattaaaaacacaaaaattagctgggtgtggtggtgtgctcctgtagtcccagctacttgggaggctgaggcaggagaattgcttgaacctgggagatggaggttgcagtgagccgagatcgctctgcagtccagcctggtgacagagtgagactctgtctcaaawaaaataaaataaaataattaaaataaaataaaataaaataaaaataaaagaagaaaaaatgtgaaatcaaccacagaaagagatttaagaaatcctctctacttggaaattataaataaaatactttaaataactgctgagttaaataagttgaaactgagatcataaactacttagaaattatgaacacaacttctttttccagcaaaacaatagagtaggacatcctacttgctacaaatatctaaaatggattaaaaaatgacaaaataattgtagatggatggctgagtttgtcagaaaggaagaaaaatttttggtttcaggaaatag

SEQ ID NO: 919497 - DNA, 604 bp, Homo sapiens
gagatcgtgccactgcactctagccttggtgacagagcaagagtctgtctcaaaaaagtaacaaaaccaaaagaaaccataaatatccatgagtagggttctgataaaatattttatactatgttccctcaataaaatgctatgtagccattaaaaggatgacacagatrtacatttatggaaccaaaagatgtcatagcagattgtggaatgaaaaaaggtcagaaaatagtatgacagtttatttaaatatctcttcagggttttttcttatatggtggatttctgttgatgtttacttactttttacttttaatgtatttaaattttttataatggtcctattttataattagaaaaaagaaattacatttaaatgtctattttaatatcaggcagctatggagagaatactccctttttttcttacataatttttaaaattaaggatatatagacctacatttactttctatttttaaatagccttattgaagtagaatttatatatcataaaatttacccatttaaaatgtacaatttaagtgtacaattccatgatttttagaaaatttataaagttgtgcaactatcaccacaattc

SEQ ID NO: 919498 - DNA, 604 bp, Homo sapiens
gagatcgtgccactgcactctagccttggtgacagagcaagagtctgtctcaaaaaagtaacaaaaccaaaagaaaccataaatatccatgagtagggttctgataaaatattttatactatgttccctcaataaaatgctatgtagccattaaaaggatgacacagatatacatttatggaaccaaaagatgtcatagcagattgtggaatgaaaaaaggtcagaaaatagtatgacagtttatttaaatatctcttcagggttttttcttatatggtggatttctgttgatrtttacttactttttacttttaatgtatttaaattttttataatggtcctattttataattagaaaaaagaaattacatttaaatgtctattttaatatcaggcagctatggagagaatactccctttttttcttacataatttttaaaattaaggatatatagacctacatttactttctatttttaaatagccttattgaagtagaatttatatatcataaaatttacccatttaaaatgtacaatttaagtgtacaattccatgatttttagaaaatttataaagttgtgcaactatcaccacaattc

SEQ ID NO: 919499 - DNA, 765 bp, Homo sapiens
cctgcaccccccttcctttgtggctcccaccttggcctgctctgttcacttggcatgcagtgttgcagtgaaaatccaggcagccatctcttgtgggggagttctgttctcatccccctcttataaatgagggaacacttagaggttaggggacacacccaggtcatacagccaggagcatgccacttggggctttaacccagattagggttctcacctccacaagcctcctgggcctccatggcctgtcccggcccctctgcttaccataggccccaaccagcccatgatctccaaacaggtgcatggatttcctctcactgatggatccatttgctcatggagtcaccaaacatccaccacctgcagctttgggcctgggcacatggcctgggtgcgcataggcatgtgggggaagggaggcctcgccttggtcagagaccccatttcattcacaggggagcttggagttaaggctgcccactcaccctccagcttgtgaactgcaagcctttctttctgcacctgtcagctcctgtgatgaggagcgtgtggcccagggacgagtctgggygtggtgatgtggcatgtgtgtggtgggtgggagtgaggcaatgtcaggctaccccccccggcctggccagtttggaccaaggagacatctggtggctgtgagatctgcagccttgctgcagggagccctgggtgaaggtatcaggatctgtcgagtcccttgggagcccccggaggcccagaagaacatca

SEQ ID NO: 919500 - DNA, 818 bp, Homo sapiens
gaaactaaccaaaattgaactctagagaatgtgctttaatatctaagaacgcagctaagtaattgctgtgttcatcagaggaggaaatcattcactataaaatgctgtaggacagacaactcatttttaagcaagttcataatgggaattgcctaaacagaattaaacttttatggattttttttaaaagaacctatttattcatcagacttaagagaaacatttcatttcacttaactaaaagggcagaaatttttgatgtctcgattacacaggaaatgtgttatgcacatgttcattagagtttaatggatgacttcagttgtaaaaaaagttcggccatgttgagactcttgctcaatgatccctggtaaaatccccttcttkctactcactctgtaatcagatgttacatctatcgacccaattcttttgaatggtttctaaaaaggagaggccattagttcaaatgtgccattttcgcctgtcaaaaggcaatttgcaaatgaacattacactctaggaagcagagctcttccattctcagaaaaaagtgatgataattggaatttgcatatgtttcttttttgagagacagaccacagagtttgtttatgactatctttagcaccaacgggaagctcatgatgaaatggaggggaaaagagttaaaatgttttaaaactcatgggaaatatgttccaaatgatccaggggcttttaaaagtccattttaaaaacatgagaatggtgtagcgtggggttgttttttcggtagcagggaagggcatcactttgccaactgcactttctggccc

SEQ ID NO: 919501 - DNA, 734 bp, Homo sapiens
gccctgtccccagaggtggagtctacagagtcaggcaggcctccttgagctgtggtgggctccacccagtttgagcttcccggctgctttgtttacctactcaagcctcagcaatggtgggcgctcctcccccagcctcactgctgctttgcagtttgatctcagactgctgtcctagcaatgagcaaggctctgtgggcatgggaccctccaagccatgcgcgggatataatctcctggtgtgtcatttgctaagaccattggaaaagcgcagtactagggtgggagtgacccaattttccaggtgccgtctgtcacagcttcctttggctgggacagggaagtccctgaccccttgcgcttccccaggtgaggtgatgccttgctgtgcttcggctcacactcggtgggctgcacccactgtctgacaaggcccagtgagatgaacctggtacttcagttggaaatgcagaaatcacccgtcttctgygtcgctcatgctgggagctgtagactggagctgttcctattcagccatcttggaaccacatcgagagatcttaactgagtgtcaggagcacatttctatttttgaaaattcacatttgggaaatgtgcagaatagtggaataggaagaggttggatataccagtagagtttaaaggttataatggtagttcagggagggaaatatatgggcctgagctattaaggcagtgagagagaggaggaa

SEQ ID NO: 919502 - DNA, 593 bp, Homo sapiens
ctgccttggctgcacaggcatcatctgctcaagcccacagcctcttttagagggagcccacatccaatgactacccaacaggagggtttaaaggctcagcctcctcgctgtagctcaggacaactctgaagggccatcccagctccccagcatccttaagactgcaccacagtccgacttctcggtttgctaactcctactttcctccctttttttctgcaggagggaatcccaagtatcctccctgatacacccctgcaccgaaatacagtctcagagctggcttcccagggaaccctggtgatagatcctaattatttgaggctcgcttcaaatgctgyttcccccacctctaaccttacccaaacctccccctcccaggttagaagttctccctctgaacaaacttctgtggtgataaccatccctctctgctgtatctgaatgagttaccgcttcacacctgtctctgctttcagactgcactggaagctccttgagggagaggaggacattgtgtctgagtcgtttatctaactacttcactttgttttaattaatttttttgagacaaggtctcactctgtcaccca

SEQ ID NO: 919503 - DNA, 547 bp, Homo sapiens
ctgggaaagttactgccaactgtgttattttgtaatttcaggttgatatttattgctcccaaatcctcctttttaaactgtgctaagatccttctcttctggtttgtgtctatgagtgaccaactcatgaccttctacctatagttatgacagcccacagaactgctgcaaaataaaattggatgcagttaaataagcaaatggagaacttagctttaatgttatccatttaagttttattgatggttttttttttaaagacagagccttatttcgtcacccaggctggagtggctggagtgcagcggcgcgatctcggctcactgcaacctcagcctcctgggttcaagtgattcttgtgcctcagcctccagagtagcagggattacaggygtgtgccaccacacccgactaatttttgtatcttagtagagatggggttttaccgtgttggccaggctggtctcaaactcctgaactcaagtgatccactggcctcggcctcccaaagtactgggattataggtgtaagccatcatgcccagcc

SEQ ID NO: 919504 - DNA, 638 bp, Homo sapiens
gatcacctgaggtcaggagttcgaggccagcctggccaacatggcaaaaccccatctctactgaaaatacaaaattagctggtcatggtggcccatgcctgtaatcccagctacttgggaggctgaggcaggagaattgcttgaacccaggaggtggaggttgcagtgagccaagattgcaccattgcactccagcctgggcaacaagagcaaattccaytaaaaaaaaaattagctggacatggtggtgtgcacctgtagtcctagctactcgggggtgggggtggggggctaaggtgggaggatcacccgagctcaggaggtcgaggctgcaatgagctgttgtgatcgcatcactgcgctccagcctgagtgacaggctgtctcaacaataaaataaaataattttcaaaagaaaaagaaattcaggcatgggggtaggcaggaatttgtcagggcgagaagaagaaagggttccctgagcagagggaatggcaggggcaaaggctgggggaggggaacacccaaggcgtgttcagttaattcctcccagccccgagaggtgccaggctccctgaaggtgtttctgattaacaagaggttagcacacacctctccacggaattcgtctcaaaaaa

SEQ ID NO: 919505 - DNA, 608 bp, Homo sapiens
ttagtctccaccatccagacgacaggaagctggggcttcatgtgatagccctaaaaattgtcctgagcagttaaaagcctttgcacgcttgaaattggcttctctgggctccttccaggaaggaaaacagaaactgtctagtgccgtggctcagtagctaaggctttgtctcttcacactggggacccaggttcaattcccaccttagggaatgagtcctttctggtttaatatctatgtgacctttgccatttattcattytcttctccataaacagcttctgacttctcgtttgaattttcctttctctgcactacccttggcgattctagatctcgtaaaaactgcttatcacctctttgaaaataccttgtatacctgggttaagtgctaaccttagttaaggcttaccggtttcacctgggaggttactgttagtgaagttcaaaagccagaaatattggctgtttgtcccggctagagtctggtaacaagatttggttaaaagtcagcttaattaaaaatggatatccaagctatacatatatttaaaaggcctttatgcttttttttctcttcttggctcttatttttctgaaaaattttt

SEQ ID NO: 919506 - DNA, 772 bp, Homo sapiens
agggtgggcagagagaagcttgggaagagtcacctccaggaagagggaggtggctctggagacttcctgtccagcccccttctcctgctgctaccatccagctctgggggtggggggcagggctcctgccgctttatttatttttagttttaatttttgaaaaatagagacagggtctcactatgttgcccagactggtctcgaactccgggactcgagtgatcctctctccgtggcctcccaaagtgctgggattgcaggagtaagtcactgcacctggccatcctgcccctttaaaactctgccctcacctcagtgctcagctgagacagggtggcatttwaaaaagtaataattgtaccttgtctacatgtattaaccacaaaaaaaatatttttgaattctactaaatgttaaaggagaacaaaaaggaaataaacaaagaaacgccagaagtgtaaaaaccagtctggtttcaaaagcagagtttctgatcctgtgataactcggcaccagcccccagaagctgcaccacctcaaaggtctttttgcccggcttcctgcccacccaacccaggactgtctctagcgcctggtgtccaggctacttcctgcctctctcctggagccctagaccccttcttggccaaggccagagacagatcctcaccaacacttacacttttctgatcctttagaattttttatacctcctagtcctaccccttaattccaatttaccaccttggcatctgattggcaggtctacgat

SEQ ID NO: 919507 - DNA, 708 bp, Homo sapiens
agcaggaggcagagaaaaacaggtgacaccccagggagtggactcaggcctgccccagggccgacggaccctctgtatgtgaggcatctgccattctgcctctgctcctgctgtctcccctgcgctttgtgggtcctgtgacacttgtgttccttatcaagtaagacagcactccagtaactgtaatgaccacacccagctcttcccgggggcttggcagtgcagtgcagtgtggggggtgaagggtgtagactctggagctggatgctccagccctggctcaccagctgggtgacattgggcaacccctgtgccccagtctccccttctgtaaaatgggcataataatggcacctaccttgttgggtcaaggcccaacaagggccttgtttttcaggccctccccagcctgaaggtgggacctcaccagggacccgcctccttctgcccaggctgctcgggccaaggggcacctgcaggccagtgycaagctgtcccctgcacccccgtggcttcccatccccctgtgctcattggtgcctaaagtccagagggggccgaggcagctggggccagtgagtcagtgctgcctcgagcgtgccaggctgtggtagtgcctgggcttggtcccgctctgagattggagtgggcactggagcaggaggaggccagacagtgggagcagacacccctgagcttgtgggggca

SEQ ID NO: 919508 - DNA, 604 bp, Homo sapiens
caaactagataccttttggaaatgttaatttaggtttgcctgactcacaattgcttagagtgaatagttaattgaaggattgatactctaaaataaaataactagatacatgtttataaaagttgggctgtcttagatcaaatgggtcaaaatcttgagttcagagcaatcacataagctatctttgtccgrcatacaaattgctttgtctgccatatagggactacatggcgactgtttctccacctacattgactagtcaagcaaaccagactagaaacaaaagatagcttaattcaaggccagttggagattttgttttttgtatataattcggctagtcatagctgaaatataaacatttaaatatttaaccctaaactcacttggagctggaaaaaaaggataaaagaggtattttttaataaaaaatccaaaattttggtccacagcctttgttagactacttatcaggaaaaataaaatttagccatgtggacagtcccactttgtcagaaatataatttagatctgactgtcttttataaatgatgtatttgtatgattaagttttactgtctcatgacaaaaattctaaaattaa

SEQ ID NO: 919509 - DNA, 612 bp, Homo sapiens
aactgctggctggcacggactccgcaccaagaaagcactttcaggacatatatagctaagtgatcaaggctgggtggctctggcagagatcaatggaacagagcagagaacccagaaatagacccaaacacatgtgcccaactgatttttgacaacaatgcaaaagtaattcgatggaggaaaggtggtcttttcaacagacggtgccagagtaactgggtgttcacaggccaaaaaaatgaagcttgacctaagtttcatagcatatacaaaaattaattcaaaatggatcacmgacatacatgtgcaatgtaaaacaataaaactttccaaaaaatacataggagaaaatattcaggatgtagggttaggcacagagcttttaaaattgataccacaaaaggaatcattcttaaattgggcttcataaactaaaaacttttgccctgagaaaaccttgtaagaggatgagaagacaagctacggagtaagagaaaatatttgcaaaccatatatatatatatatttgtcttcttgggaagccaaagtgagaggatcacttgagtccaggagtttgagacagcctgagcaacactgtgagacctcatctct

SEQ ID NO: 919510 - DNA, 659 bp, Homo sapiens
tcctttctccattgtcatacaactcttcatcatcaccatttacggttttttccttcgccagaaaaaaaaatgctgtaaggtcctacatacacttgaagctccttccggaacccccgagcccaccacacccccatgcaatagcttagctgcctgccaggccttcctgctttctggcccaatcctgcccatctctggaggttgctgtgttgccatggcaactagcaacctgccaagtcagcaagctcagggtgtgcttgtctggccttgggcattggtccagcagccgacctcccttagcactgtatgaaacgacccccttcggtagcgccttcatcgtcctagaaggatcctgccagctctcagttctcacccatcctgactcagttacacgtgggggtgaagatcaccccaggtgaagagcagcagaaagttttctgtattttctctgcagagaaatctgtcatcactctgtcctcgagtaggtttattggaaygtcaagaatgagattgggtgtggtggcttatgcctataatcccagtaatttgagaggctgaggtgggaggatcacttgagcccaggaatctgaaaccagcctgggcaacatagtgagaccccgtctctacaaaaaaaaatgttttaattagccaggcatggagat

SEQ ID NO: 919511 - DNA, 607 bp, Homo sapiens
tggctcatgattgtcatcccaatgctctgggaggctgaggagggaggatcttttgaggtcaagagttcaagaccagcctgggcaacatagtgagactctgtctctacaaaaattaaacaattggtggtgtgcacctgtagtcctacctactcgggaggctgaggtgggaggattgcttgagcccaggaggtcgaggctgcagagagccatgagtgcgtcactgcactctggcctagaagacagaatgagactatctcaaaaagtaaataaataaaacaggtcgggcgcgatggctcatgcctgtaatcccatcactttgggaggctgaggcaggtggatcacctgaggtcaggagttcaataccagcctgaccaacatggagaaaccccrtctctactaaaaatacaaatttagctgggtatggtagctcatgcctgtaatcccagctacttgggaagctgaggcaggggaatcgcttgaacccggaaggtggaggttgtggtaagccaagatagcaccattgcactccggcctgggcaacgagagcaaaactctgtctcaaaaaataataataataaataaataaaaataaaatcacccacaaaac

SEQ ID NO: 919512 - DNA, 626 bp, Homo sapiens
cttggagtaacagtgtaaactggcagtgtaaacaagagcagggcatgtatgagtagttgagaacagtgaataggaatatgactagacagaagatagtagggatgacaagttttttggggcacagcctaagttggtctggtgtctggaatgagactggggcctaataaaaaggagcatctatacaggagcttaaatgggctgtaccctgtagcattccaaggacaggcctgaattctgagaagggaaagtggtaaaagtattgtccagtcctttttaagttggtggctgagcttggtgaggtgtgtttttaatagatcattagtctgtcactgaatactaagagcctgaaaaaatgcttggctgatttgactaataaaggctggtcygttattagactgtatagaggtgggaaggctaaactgaggaattatgtctgacagaagggaagaaatgacggcggtggacttctcagacactgtaggaaaggcctctacttatctagtgaaagtgtctacctagactaagaggtattttagttatctgactcagggcatgttgattaaagctaatttgccagtcctgggtgggggcaaatcctcaagcttgatatgtagggaagggagggg

SEQ ID NO: 919513 - DNA, 568 bp, Homo sapiens
gaggaattatgtctgacagaagggaagaaatgacggcggtggacttctcagacactgtaggaaaggcctctacttatctagtgaaagtgtctacctagactaagaggtattttagttatctgactcagggcatgttgattaaagctaatttgccagtcctgggtgggggcaaatcctcaagcttgatrtgtagggaagggagggggcctgaataatccttgagaagtagtagaatagcagatggaacactgagaagttatttccttgaggacagatttctacgatggaaaggaaatgagaagttttaagaggcgggctagtggtttgtactatagcatagtctgcctttgctcgtgtgtggtgagtaggcctggtggaactgccatcaataaaccaagtgtgatcagggtgagaaacaggaaagaaggaaatgtgcggaaatggggtgaatgtcaggtggatcagagagatgcagtcatgagggtcaggtgtggtatcaggaataatgtgggaggctggattgaagtccgggccaggaacgatggtaattgtgggagacttaacaaag

SEQ ID NO: 919514 - DNA, 568 bp, Homo sapiens
gaggaattatgtctgacagaagggaagaaatgacggcggtggacttctcagacactgtaggaaaggcctctacttatctagtgaaagtgtctacctagactaagaggtattttagttatctgactcagggcatgttgattaaagctaatttgccagtcctgggtgggggcaaatcctcaagcttgatatgtagggaagggagggggcctgaataatccttgagaagtagtagaatagcagatggaacactgagaagttatttccttgaggacagatttctacgatggaaaggaaatgagaagttttaagaggcgggctagtggtttgtactatagcatagtctgcctttgctcgtgtgtggtgaktaggcctggtggaactgccatcaataaaccaagtgtgatcagggtgagaaacaggaaagaaggaaatgtgcggaaatggggtgaatgtcaggtggatcagagagatgcagtcatgagggtcaggtgtggtatcaggaataatgtgggaggctggattgaagtccgggccaggaacgatggtaattgtgggagacttaacaaag

SEQ ID NO: 919515 - DNA, 579 bp, Homo sapiens
cctctccttttgggtttcccttaggcacttaaactcaatctgtacacaactgaactcatcgtcttttatcagcccatcacccgttcgcctttcctgttctaacttattgcctgttgtattgtttttcttatttgatgggcactgacattcatctttagtcactcaagacaggaacctagaaktacttctacttttctccttctactgtactgacctactctgcccaccatggctaatcagtcctattgtatataccatcaaattttctagcacttttcctcttctccattaccaatgtcaactccttggttgatatcctggtcatttctccactgtattcgtgctataataaactaaactgaactggccaccgcatttcaccctcccttgcttctctattcatattcaaattgatgacaggttggttttctctaaaacttaaaagggatgaaagaatgaatgacaaaacaaaaacgagcaatttagaatgaaatctactctcaagtacaaatagtataatagcaacaaatcagctagaaaaaaatacaagctgtgtatactcctttaaattgaggtaaa

SEQ ID NO: 919516 - DNA, 655 bp, Homo sapiens
gaggccaccttcatttcttcccttgtatcactccaaccttttgcttctgccttcacatcttctactactcaccctactcctcttgcttccctcttaaaaggatccccatgattacattgggcccacatggatagtccaggataatcttccacctcaatatcttaatataatcacacctcaagatcttaatgtaatcacacctgcaaaaacccttttaacatattaacaaattttggggattaggacagggacgtctttagtgtggccgttattcagtctaccacaccaactgtgagagtgagctaccttggaggcagacctaccatcaccacccaagccatcagatgatctgcaacctctgctgacaactgractgcaaaaatgcccagctaagccattcctaaagtcctgatccacagaaactttgtgagatgatacaaagtttgtattattttgttgtttgttataatagtttgtttaattattttgttttttatgattgtcataagccgttaaattgtgggatgacttgttacccagcaatagataatacaaaatggaaaagtttattaatatttaaaagtctatttacattttcataggaaattttaatactagatttattaaggaggaaatgacttttagattctttaga

SEQ ID NO: 919517 - DNA, 647 bp, Homo sapiens
gagccttgtctgaccctagagcagtttatctctatgacaccactattgtgcaatgcagtgctgtggttacatgtctctgttcccccactgcattgctttctcctgttctccttgaatacactaatcacaagtttggctttgaagagttcatgaatggatgcatgaatgaatgaatgaatgaatgaatgaatgaatgaatgaaagaaagagtgaatgcagtgtcagatgtgtaatattggaaaagcactgkccacaatggtagctgtagaactccagaacttctcctgagtaatagttatagtattatcccttttgcaaggttgttgaggagtaaaacaatgagataatctgtattattttatttagcaaatgtataattgagtgtctacttggagcaaaatactgtaaaaatattccaaagtgctttaaaaatgatactgtttctctttattttataatagaatttggttggccaatttctctaactgtacatacactactaggcagggtggctttccattgttctctaacatcctgtttttagattttcttgctaggaattcacatttcctcataactcacttttattactactttgtaatactatagcagtatgaacggtcctgtagggagcctgaactgtgagt

SEQ ID NO: 919518 - DNA, 585 bp, Homo sapiens
ttgcctgagtatgaatcccaactttgtggaactttgagcaagttccttaacttctttgatagtcattggagccagcctccatcatggttcccaatgatctccacctcctggtatttacacacttgtgtagtgccctcccacattgtatcagkgttggtctgtgtgaccaatagtacacagcagaaggaatggtatacctgccacttctgaggctaggtcataaaaggcaactcagcttcctgcttagttcctctcttggatccttcattctaagggaaagtagctaccatattatcctaagtataatttagtgcaagtaagtaaatctggacctattattactactaatactactaaacagaaccattcaaaagcttgagatgtcagtcattgcctgtatacagctttatataggaatgaaggcatccacagtaggctcttcttcagaatgcttacgacacagagattagaagtcatgaaattataatataattcccacatggtggggaactggggcccacacactagggaactgaggcctctagctaacaggcacatgagtgagcttggaaggggatccttcag

SEQ ID NO: 919519 - DNA, 658 bp, Homo sapiens
ttctctttcttttgcctattaaacctctgctcctaaactcactccttgtgtgtgtccatgtccttaattttcttggcatgagacaacaaacctcatgtttctctctgtctctctctctctccctccctgcctccccacctcctccttccccctatgtgaaaatacagaaagaaggcacctgtctggaaaccagaaatagggccctcaccagacactgaatctaccarcaccttgatcttggacttctcggcctctagaactgtaagaaataaatgtttgtttgtgtagggtagaagaaaagcttcctctctgcccactgaaggtttgctgaaaatgaactgacaaaagagagattgatcagagaaagaggcacacaaaatttatttaacatgcacaggggaaaatcacaggaatgtgattacccaataacccaatgaggttcagatgcttatatatcctcctccacaggggaaggggagatgatgggtgtaggagtaaatgcttttcagggaaatgaatgagcccaaaaaacaatggcctgaaacaaagttcttctgagctctgaggaaggtgataaaaaggtgaggggtggaagttcttgtgaataaatgtcttattatgtagatgaaacctcccaagtaatctccaagagctgccc

SEQ ID NO: 919520 - DNA, 524 bp, Homo sapiens
cagatgccatttttataagtccacatttaaatgcatttagaagagtttagaataaagcccaggtgggctctgctttcccaactgaccagtgtccatcatgccctctcttcttaggctcctaccttcattcacgtacctgccccacccagtgggccctggaacccttgatccacacacatgccttccaaggactcatgaaatactgctgtctatagacaaacgataaaaccaaaagccatcgaggacaagggctcacattgkctccatcattggctagaaggagaagaatgagaaaaggaggaggaagagatcttgatccttaaaagtgcctttacactaattttctcaactgaggctgcccaaggaaccacagtaagtcagaggtagaggaggctccaaggcttctactccccatttcccagtgcccagctcttccaaagatcccaaaactacttctactccaaaccgagtggattctttgcaagcaatcactgataaaagatacaagagatggctaaggaaca

SEQ ID NO: 919521 - DNA, 614 bp, Homo sapiens
acctgtaatcccagcactttgggaggccgaggtgggtggatcacgtgagatcgggagtttgagaccaacctgaccaacatggagaaaccacatctctactaaaaataaaaaaagccaagcgtggtggtgcatgcctgtaatcccagctactcgggaggctgaggcaggagaatcacttgaactggggaggcggaggttgcggtgagccaaaatcttgccattgcactccagcctggggaacaagagtgaaactccatctcaaaaaaaaaaaaaaacaaaaaaactgtagaattctctggaacagaattttctaatactatttctaaatgctgagaaataaatctctgtttaaaggaaaaatattctcaggtccctcagttgacttaaaatattcttactatgttgtttatgaacacaaatccaggtataagctccttgtacatagagctcctattcagccacaaaatcaaaataagtacaagtacaaccacaaaaccaataaaactcgaattaacagcrgtatagtgtgactgctgatgttttactgaaaataaattgcaactctcattataaagaagctactgaccatcatcatgcaggttcttttgacttca

SEQ ID NO: 919522 - DNA, 582 bp, Homo sapiens
actttactaaaactgtgctggcaggaacaatggctggcagggaaaggggagcactgactctttaatactatgcagaggtgaagttctggctttccacagggcctccatttataccctggggagtatccctgttaccactgcaaagggctggaaggccatggtccccactcatcctccaccaacactgtaggaggccttgttactgctggatgtggtggaggtccaggctctycactttgttcactgactctaaccctagtggaaaggacaactcatcaccacaaagcaagggtagatatcaactgacattgcaggagcaggatgatggcacagaagggaatgcattattgctgtgtgatcctacgtggatcaccactggcaccatggggaaggaaaggggtaccttgttcctgctgggtagggggtcagagtccaggatccccactcaacctcctctgccatcaccccagtgggaaacgggaggggtatatttaatgtcaaacaggtttccaactttctaggctgcccttttcttagttcactggcaagaaagaagaggtttttcttggggcttttggggga

SEQ ID NO: 919523 - DNA, 665 bp, Homo sapiens
tcaaagctgtagtgagctatgactgtactccagcctgggcaacatagcaatgtagcaagaaaaaaaattctgtctctaaaaaaaatccgtatttgataattccaacatcttaagtctcaactccaattctcctatttttgtgtgtgttatcgtttgtttataataccctgcttccagtatgattgatatatattattaattcattcactatttccataactcatattctttaaagcttggaacaggcataaagacagacatctaagaccaataaaataggaagaagagttccaagataagccttcacatatatggtgaaatgatgttccacaagggtgccaagaccattcagtgrgagaaagcacagtctgcaacaaatagtgccaggaaaactggatatccatgtgcaaaagaatgaagttggattcttactttaaaccatgtaaaaaaattaactgcaaatgggtcaaagattaaagataagagttaaaactatcaaactgttagaaaacaaaaaacataaagaaaaagcctaatgtgaaggtattgggaggtggggccttcagaagctgattaggtatgaaaggtggtgccttcatgaaggtacccttacaaacagactgtgaagacctcctttgtagcttccaccatgtgaagatgcagcg

SEQ ID NO: 919524 - DNA, 607 bp, Homo sapiens
tggtaaaaatactgaatgatgttgtaccacatatagactgacaaaaatgcaaaagactgtgtgaggaatatccacatgtttctgagggtcatttccctggaaacagcttccttatggcccttggaaggtggaaaagctcctgtttcataaaaatgtgataagaggtcctctttttcagtaaaccatagatagatcccattggtaaggtcaccagtctccagagatacatctttaactggaaagatcctgtaatgtacatgtgtgactgttggtttcctgaacccaaggatccaggtttgaatattgataggttcagctttaggataagctatcgttgtatctattayccactggaggccttttgatttgctaattctttagcatctcctcttgctggacttccatttccctgttgtgctacaagtgcattcagaataattttagttgccacagatctttacagagtaacatgtgtaagaaatggcaagttatttttctctgcaaatgcctgacttgtttctcacctcttcctgaggaagcccctttctggaaacgaaataattcattttcaatctctgctcctgtaattactttctaagtgcttctt

SEQ ID NO: 919525 - DNA, 530 bp, Homo sapiens
agtggcactgagtatggggaccaggaaaggccaccggggaagaccattccagatggaaatatttctgggggaattctctgacatggggacaaaaatggggcatgtgagaaacagccaggaagtctctgcagcctgggcacattgggcagggtatgaatgaaagtaaacagagacagagaagaaaccagggaccagttctttccggctacacaggccatggcaaggacttcagattttgttctaagtgggatagaaagctactggaagtctataagcaggasagtgacatataggatttaccttaaaaggatcactattacaggggaaagagactgtaggagaggactggaagtgggaaaacgatgaggttggtttaattttccaggtaaaagatgatggggacatgggctagtggggtggggacggaagaggtgagaaatcgttggatttagagtctatttttaaaataattcaggatttgtcaataggttggatatggtgtgcaagagaaagaaaagagtcaaggacgc

SEQ ID NO: 919526 - DNA, 772 bp, Homo sapiens
gcaacaaaagtgcacataacatatcctcatgcatcctcctgaaagatatatgacacaaaagcaagcgttgttgctttgttgtcaacattagcaggcttgtcaacctggatgatgtgccacaatgactcattaatcctctaacaattgtgcctcaacatcctttgctatttcatcaattcatctagttatggtgctagtaaagaggaacacatgccaccttctgaactgcagccactcctgaaagtttatgacaaatatcttcagtagcagacaggatcaactcttcaccaatagtaaagggcttcttagctttagcaatgaagttagccactaagatgaggcattcagtgcagatacatttgatgaaatgatggtcttcaataattgattctgttcttcatattcatggtttttggtttttaaacgctaaaggcttgtcttttaatgagggtgcttggtcttcatgtkgtgaagcaggtttgaaggtttcatggctttgctgcctagccagtcaccacatattatacaaagcaggactggagaatgtaaataaccagtcgccatgaacccataatttaagtagactcttggtattttcttccaaatgcagcatattagtccattttcatacagctacaaagaacttccaaaaactgggtaatttataaagaaaagaggtttaattgactcatagttccacatggctggggaggtctcaggaaacttacaatcatggtagaaggcaaaggggaagcaaggcaccttcttcaca

SEQ ID NO: 919527 - DNA, 642 bp, Homo sapiens
aacaatatctgctaccacagaaacacacttaagtccatactctatagtctctataaagcaactacacaatgtaaattaacgcaaccagctaacaactccatgatagaatcaaaacctcacatatcattattaaccttatatgtaaatgctctaaatgctccacttaaaaggtacatattggcaagctggataaaaaattaagacccattttcctgctatcrtcaagagacccatttctcacataatgacacccacaggctcaaagtaaagaattggacaaagatctattacaaaaacagaaaagataaaaagagcagaggtcactattaatcggaaaaaaatgactttaaaccaatgacagcacaaaaggacaaagaaggcccttatataaagatcaagggttcaattcaacaagaaaacttaactatcctaaatatatatgcacccaacattggaggactcagatttataaaacaagtacttctagacctacaagaagacttagacaaccacacagtaatagtgggggatttcaataccccattgatagcactagacagatcatcaaggcagaaaactgacaaagaaattctggacttaaatttgacatttgatgaattggacctaatagacatctataga

SEQ ID NO: 919528 - DNA, 642 bp, Homo sapiens
aacaatatctgctaccacagaaacacacttaagtccatactctatagtctctataaagcaactacacaatgtaaattaacgcaaccagctaacaactccatgatagaatcaaaacctcacatatcattattaaccttatatgtaaatgctctaaatgctccacttaaaaggtacatattggcaagctggataaaaaattaagacccattttcctgctatcawcaagagacccatttctcacataatgacacccacaggctcaaagtaaagaattggacaaagatctattacaaaaacagaaaagataaaaagagcagaggtcactattaatcggaaaaaaatgactttaaaccaatgacagcacaaaaggacaaagaaggcccttatataaagatcaagggttcaattcaacaagaaaacttaactatcctaaatatatatgcacccaacattggaggactcagatttataaaacaagtacttctagacctacaagaagacttagacaaccacacagtaatagtgggggatttcaataccccattgatagcactagacagatcatcaaggcagaaaactgacaaagaaattctggacttaaatttgacatttgatgaattggacctaatagacatctataga

SEQ ID NO: 919529 - DNA, 642 bp, Homo sapiens
aacaatatctgctaccacagaaacacacttaagtccatactctatagtctctataaagcaactacacaatgtaaattaacgcaaccagctaacaactccatgatagaatcaaaacctcacatatcattattaaccttatatgtaaatgctctaaatgctccacttaaaaggtacatattggcaagctggataaaaaattaagacccattttcctgctatcatcaagagacccatttctcacataatgacacccacaggctcaaagtaaagaattggacaaagatctattacaaaaacagaaaagataaaaagagcagaggtcactattaatcggaaaaaaatgactttaaaccaatgacagcacaaaaggacaaagaaggcccttatataaagatcaagggttcaattcaacaagaaaacttaactatcctaaatatatatgcacccaacattggargactcagatttataaaacaagtacttctagacctacaagaagacttagacaaccacacagtaatagtgggggatttcaataccccattgatagcactagacagatcatcaaggcagaaaactgacaaagaaattctggacttaaatttgacatttgatgaattggacctaatagacatctataga

SEQ ID NO: 919530 - DNA, 581 bp, Homo sapiens
gggtgatttctgcatttacaactgaggtaccaagttcatctcactggggagtgacggagagtgggcgcaggacagtgggtgcagcgcaccgagcatgagccatagcagggtgagccattgcctcacctggcaagtgcaaggggtcagggaattccctttcctagtcaaagaaaggggtgacagatggcacctggaaaattgggtcactctcaccctaatactgcacttttccaacggtcttagcaaayggcataccaggagattatatcctgcacatggctcagaggattctacacccacagaacctcgctcattgctagcacagaaatctgagatcaaactgcaaggctgcaggaaggctgggggaggggcgcccaccattgctgaggcttcagtaggtaaacaaagcggccaggaagctcgaattgggtggagcccaccacagctcaaggaggcctgcctgcctctgtagactccacctctgggggcagggcatagccaaacaaaaggcagcagaaacctctgcagacttcaatgtccctgtctgacagctttgaagagagtagcggttctcccagcac

SEQ ID NO: 919531 - DNA, 585 bp, Homo sapiens
catgagctcctcaatatcttaacaaaaaaagtttttcaggttctacctacagcaggcttctcactattctgtaaacatgtatagcattcttagggtctctctcctggtgcttccttcctcctggatggctctctccccccaaaatccagatggccctcgctttctttttttctttttttattattataattaagctctagggtayatgtgcacaatgtgcaggtttgttacatatgtatacatgtgccatgttggtgtgctgcacccattaactcgtcatttactttaggtatatctcctaatgctatccctgccccctcccccgacctcatgacaggcccctgtgtgtgatgttccccttcctgtgtccaagtgttctcattgttcagttcccacctatgagtgaggacatggatgaaactggaaaccatcattctcagcaaactatcgcaaggacaaaaaaccagatggccctccctttcacaccttcacgtctttgctccatgtcacggtctcaatgagacctaccccagtcacattacaccctctttaaaattcgcaaactgtgcctccacctggaaatcc

SEQ ID NO: 919532 - DNA, 628 bp, Homo sapiens
gactgaggtgggaggatcccttgagctcaagagaccagcctgagtaacatagtgagaaccgtctctattaaaaagaaaagtaacagatggtttatttcaatcaggataaaactgattctacatggaagagttgagatgtaataataaacaaagaattaaaaagcaaactaaaataattgtggaatgtaataatrataatagtaatgaattataatacaccccataataatatataagttggaaggggataagttgaattgaaaagttttcttcaaggtccttatattttgcagaaaataaaggtgctaactgtagacattgatacgttaatacacaagttgtaactttgggtaataattaaacgaataaaagaacaacgtataatttctaaattaccagagaaaaacaacagaatgattaaaaaattgatttattcaaaagaagtcaagaaagaaaaggataaaaataggtaagataaaatgcattggttacatattgctacataacgaattatccccaatctagcagctgaaaactacaggctggatacgaaagtggaaatatctagaatttgtttacaaaatagatatgtgaatgaacatgaataagtactaatacattagtttta

SEQ ID NO: 919533 - DNA, 788 bp, Homo sapiens
tttttcagctgagtctcactctatcacccgggttgcagtgcagtggcatgatctcagcttactccaacctccgcctcccgggttcaagcaattcttgtgcctaagcctcccgagtagctgggattacagatgtgcaccaccatgcccagctaatttttgtatttttagaagagttgaggtttcaccatgttggccaagctgatcttgaactcctggcctcaagtgatccgcctgccttggcctcccaaagtgatggaattacgggcatgagtcactgtgcctggcctatttcttaaattattttttctattccctccatcttttgggaaatacaactgtatgtacaataacctgcttgaarttgtcctgtagctcactgatattctggtaattttcttcagtttttcccccgtgcatttcattttggaaagctgctgttgctatgcttttaagttcactaactttctgtaatgtctaatctgctaataaacctacctagcatatttttatctcaagtataatttgtgtccctagaagttttatctggattcttttgtttcgttttttgttggtttgttgctgttgttgttgttgttgagacgggatctctctatgtagcccaggctggtcttgaactcctggcctcaagtgatcctcctaccttggcctcccaaagcactgggattacaggtgtgagccatcatgcctggcccttagctctttttcaaacatttttttctgtctcaacatgtctagtcttctagcttccctaacttatgaactacagg

SEQ ID NO: 919534 - DNA, 697 bp, Homo sapiens
ctcccaaagcactgggattacaggtgtgagccatcatgcctggcccttagctctttttcaaacatttttttctgtctcaacatgtctagtcttctagcttccctaacttatgaactacaggaataataacttttaatgtcctggtttaataattatagtgtctttgtcattttgggggcagttttggttaattttccttcttattattggttaaattttcctatttctttgtatacctggygattattggttaaattttcctatttctttgtatgcctgatgatttttgattaaatgcaagactgtgaattttaaccatattgagtactagatatttttgatttgctataaatactcttttttttttaagtacaagtgcacagatttcccataaatatttttcatttttccccttggattcagttaagttacttggacacagcaggattctttcaggtcttgcctccgagttttgcttgacaggaccacagcagtatctaccgtagggccaattttgtttcagtactgatacaaaacctctccaaatactctactctatgcacttcaaactatgggaatttttttttttttcctctggctgatgctaaagggaacaaacactcctgggactgtgtgacctctagggattgattccctaattcttgcaggtgtttctttgcccattgttcctttgggc

SEQ ID NO: 919535 - DNA, 729 bp, Homo sapiens
atcttttaacatgttcctgtaacccttttatttcttgtaaactaatatttagatacagatattgccctgcattttgtaaagttctgcacaaagtctgcaaatggaaatagggataatttcagcctccactgtgggtgactcagctttgcgtctgccgcccttgccctctgtctcccctccccctacaaaagacttttttggctgggtacggtggctcaggttagggtcattcctgggcttgtggagaaacagaactgtgttctgatgatccccacccctcccaggggaaagttctaatcttgccttggctttgggggcctctctcatgacctgccttccatctcttgygtgctctgccctgccaagctgctgagccttcgcagttcaggatccacactcgggaaagcccctcctggagggtgcccactggctgtgggtcgggactgttttctaatattctaaagtcccagagtcgggcctagtgtgggcaggtataaatgtgtgaggcagtcgtgtttgtggtggtgggtgaactgtctcgtgcctgtctctttccagtctggagggcagtatgagctttttgctgtgattgcgcacgtgggaatggcagactccggtcattactgtgtctacatccggaatgctgtggatggaaaatggttctgcttcaatgactccaatatttgcttggtaagaaacatcatccacaattgcctcctgccctggatt

SEQ ID NO: 919536 - DNA, 745 bp, Homo sapiens
agctgtggagaaggggggattccgggttaaggggagactagcagggctcctgcttttatgttgccctgttgggaaggctattaaagaaacacaaagtgctaagcagtgaggatagaacatgttttcattatttcaaccaatacattccacagatggaataataagaaatgctacaaccaagctaactgaatccaacagcatatcaaaaagataatccaccatgattcaagtgggtttcatactagggatgcagggatggtttaacatacgcaagtcaataaatgtgatacatcacatcaataaaactaaaaacaaaaatcacatgataatctgaatagatgcagaaaaagcctttgacaaaatccagcatttctttatgattaaaaccgttcgtcaaaatcagcatagaacggacataccttaaggtaataaaagctatctatgacaaacccacagccaacattttcctgaatgggrgagagttgaaagcattccccctgaggaagggaacaagacaaagatgcccacgttcaccgcttctcaacacagtgctgttcactacagcattggttataagagcaagactggaaacagaacaaacggatacccatagcggggtgcttaagtaattttgggaatagtcatggggtgcagtactttatagctctgaaacaatacaatggatttacatttgaaatgtggaatgataactaaggtgcattgcccagtgatatatgcagaggtg

SEQ ID NO: 919537 - DNA, 742 bp, Homo sapiens
aaggtaataaaagctatctatgacaaacccacagccaacattttcctgaatgggggagagttgaaagcattccccctgaggaagggaacaagacaaagatgcccacgttcaccgcttctcaacacagtgctgttcactacagcattggttataagagcaagactggaaacagaacaaacggatacccatagcggggtgcttaagtaattttgggaatagtcatggggtgcagtactttatagctctgaaacaatacaatggatttacatttgaaatgtggaatgataactaaggtgcattgcccagtgatatatgcagaggtgcagaggactttgtgtaaacacgatcacacatcagcctgcattccaggtgcatgcttctatttgcacatagattgcagggatgatatgcaaacaaaaawgttgacttggtgtttggaagttcagagtggaagggaaacttccttgctaaccttttatgatatttagagtttctaaatgtgaatacgtaatacatttagaaatcttagttaataagaaaagcctctgttcctggcctcttgctggcacatgtcaggtggaaatggggctgtcatgctaatgtgtgcaaactgagaaaaatccaagaatgggagtctgcttttttcatcatacaaataattgttaatagaaacagtatgataattgctcattgatataccatgcatattctattagataataataaatttctgaaatttgaa

SEQ ID NO: 919538 - DNA, 620 bp, Homo sapiens
tgtgctcccaggctttttctcaccctaatagctctcatccatatcatgtgggtcccattaatacagatacttccgaatgcaccactcttccattatatccagtcaattgctggttaccttgggcctaccaactgggggagggcaggggctgctggccacctcctcatctacagtaagagtcaatgagcagttaartggatactgaaaaccatttatcctgctggagtgagaaataaatggtttctttcaatagcgtagtaaaatgcatcttttccaaactatttatatgactcaaggcccatctcaatttcagatgtggttagcctcaattcctgattctcaccaaggtgtgtaatgtcatccacggcccagtgcagaggaacacaggtgctgccgtcagactgccagggtccgatcccgcctcctcactcaccccgggagatccctttaagccaggagtcaacagtgaggatggaaacatgagtgctttttaaagtcctgaaagttcagaggcagactgtcaatttctcctccacccctgggcacacaccaggagaactctgtctccaggttgaaggaagtgcctgtgagagagttgtgtccctcagattctgttcacc

SEQ ID NO: 919539 - DNA, 598 bp, Homo sapiens
ttttgttttaagatgtgttattatcaaagaatcaaaaaattaaaaaaattaaaagtttataaagttatgataagctaagatgaacttgttaaagaaagaaaaaatttaaatacatttagtgtagcctaagtgtacagtgcatataaagtctatagttatgtacagtaatatcctaggccttcgcattcactcaccargtactcactgactcatcagagcatctgccagtcctgcaacctctgttcatgctaaatgtcctttactggtgtaccactctctttaaattttgtaatatatatatatttttttctttgttttttttgagaaggagttttattttgttgcccaggctggagttcaatgatacgatcttggctcactgcaacctctgcctccggggttcaagtgattctcctgcctcagcctcacgagtagcagggattacagccccacgccagcacgcccagctaattttgtatttttagtacagacggagtttctccatgttggtcaggctggtctcgaacttctaacctcaggtgatccgcccccctcggtctcccaatgtactgtgtttttactgtatcttttccatgtt

SEQ ID NO: 919540 - DNA, 750 bp, Homo sapiens
actgctcgtatttatcattgtcctggggtttctggccagttcagttaagataggacaaagaaatattatagaaagaggaagaaaaaaagaaaacacatacgttgtcattgtgtggagtttctgtttgtttgtttatgtgtttttgtgagatggtgtctcactctgtcgcccaggctggagtacagtggtgtgatcttggctcactgcaacctcattgtgtggagatttgtaattacccatagaaaatccaagaaaatttgtggatgcactaatcaaatcagcaaggttttcagatatgaaggcaaagtaaagagaaaatgaaattcttataaacagtagcaaccaattaaaaatattatattataatatcacattcatggtaacataaaacattaaygtatctaagaattaattcagaaaacacatgatctttcatttaattttattaaagttatttcaataaatataccaccagtatttttttagaacttgattggaaaagtcatattaaaataatcaatggaaaggaagaaccaaagttattctgaacaataatagcctatcaatatttaaatgtgttttaattataataattaaaatggtttgctttggctcagtgatacaccgttaaacaatgggaaaaaatggaagcaccaagaaatagatccatagatatgctgaatacattggacttgtaataaaagatatgatactaaaagtcagtagaaaaattatactattcaataaatg

SEQ ID NO: 919541 - DNA, 781 bp, Homo sapiens
ttttttttgagagagagtagtcccaaaatttccctattatgtggtttttcatccaaagtgttgtaatccgtgtgttctaacccgcatattacgattactcaagaaatgcaaaataggccgggcgcggtggctcacgcctgtaatcccagcaatttgggaggccgaggcaggtggatcacgaggtcaggagatcaagaccatcctagctaacacggtgcaaacccatctactaaaaataaaaaatattagctgggcgtggcggcaggcgcctgtagtcccaactactcgggaggctgaggcaggagaatggcgtgaacctgggaggcggagcttgcagtgagccaagatcsggccactgcactccagcctgggcgacagagggagactccgtctcaaaaataaaaataaaaataaaaaaagaaaaaagaaatgcaaaataatgtgaacacgtcatcgagactgcggtctacaattgtggttgccatgatggggtgggtcggaagacaccgaggctgcttgaatcatgttcctggcaggttaattttgttccttttagggcatctaaatgttggagttggctttcctggcagagagtccagttgtgagtggagtattgggtggaggccccaccctccccaggttttctgcagcttgttcctggctcttctggggcttctctgaggaccccgattggtcctggggcttctttagtggtgggcctgggccagttccttccgttgctcacctctccccgaagcttaaggataacatttcgggaaga

SEQ ID NO: 919542 - DNA, 576 bp, Homo sapiens
ttagttcttcccctacgagtgaagtctgcatactggattcacgccctcccctgagttctggccaggaggtttctcaccctgttcaaattggtacaaatttcggctagagcattccttctccctgtggagttttaccccctgcatctctggccaccctctcagtggatccctgtggtgccaggcaggaatgggctgcaggggcacccagcgagctyccagggcctttctgccgcttcctctacccctgtttttcgcttggctctctaacttgactcagcttcaggtaaagtcagaaacttctcccacaaacagatcttcggcttctccagtgggggtgtgtgttcgggagaggagggtctccctttcccacttctgcagttgtggcactgcagttggggcactcacagtatttgggggtctcctgggtcctgcaggagcagtctgcttccttcagagagtctgtggatcctctcaggattgctggtttgttcttgcagtcgatctggagctaaaattcacaaggcaagcctctgcatgccgctctgtctggagctgtaatctaatcctgcctcccat

SEQ ID NO: 919543 - DNA, 576 bp, Homo sapiens
ttagttcttcccctacgagtgaagtctgcatactggattcacgccctcccctgagttctggccaggaggtttctcaccctgttcaaattggtacaaatttcggctagagcattccttctccctgtggagttttaccccctgcatctctggccaccctctcagtggatccctgtggtgccaggcaggaatgggctgcaggggcacccagcgagcttccagggcctttctgccgcttcctctacccctgtttttcgctyggctctctaacttgactcagcttcaggtaaagtcagaaacttctcccacaaacagatcttcggcttctccagtgggggtgtgtgttcgggagaggagggtctccctttcccacttctgcagttgtggcactgcagttggggcactcacagtatttgggggtctcctgggtcctgcaggagcagtctgcttccttcagagagtctgtggatcctctcaggattgctggtttgttcttgcagtcgatctggagctaaaattcacaaggcaagcctctgcatgccgctctgtctggagctgtaatctaatcctgcctcccat

SEQ ID NO: 919544 - DNA, 576 bp, Homo sapiens
ttagttcttcccctacgagtgaagtctgcatactggattcacgccctcccctgagttctggccaggaggtttctcaccctgttcaaattggtacaaatttcggctagagcattccttctccctgtggagttttaccccctgcatctctggccaccctctcagtggatccctgtggtgccaggcaggaatgggctgcaggggcacccagcgagcttccagggcctttctgccgcttcctctacccctgtttttcgcttggctctctaacttgactcagcttcaggtaaagtcrgaaacttctcccacaaacagatcttcggcttctccagtgggggtgtgtgttcgggagaggagggtctccctttcccacttctgcagttgtggcactgcagttggggcactcacagtatttgggggtctcctgggtcctgcaggagcagtctgcttccttcagagagtctgtggatcctctcaggattgctggtttgttcttgcagtcgatctggagctaaaattcacaaggcaagcctctgcatgccgctctgtctggagctgtaatctaatcctgcctcccat

SEQ ID NO: 919545 - DNA, 619 bp, Homo sapiens
gcagactttcatggtgagtgttacagctcataaaagcagtgtggacccaaagagtgagcagtagcaagatttattgcaaagagtgaaagaacaaagctttcacagtgtggaaggtgacctgagcgggttgccactgctggctctggcagcctgcttttattctcttatctggccccacccacatcctgctgattggtagagcagagtggtctgttttgacagggcgctgattggtgcgtttacaatccctgagctagacaaaaaggttctccacctccccaccagattagctagayacagagtgtggacacaaaggttctccaaggccccaccagagtagctagatacagtgtcaactggtgcattcacaaaccctgagctagacacagggtgctgattggtgcgtttacaaactttgagctagatagagtgccaattggtatatttacaatccctgagctagacataaaggttctccaaggccccaccagagtagctagatacagagtgtccattggtgcattcacaaaccctgagctagataccaagtactgattggggtatttacaatccctgggctagacataaaggttctccacgtccccaccagactcaggtg

SEQ ID NO: 919546 - DNA, 619 bp, Homo sapiens
gcagactttcatggtgagtgttacagctcataaaagcagtgtggacccaaagagtgagcagtagcaagatttattgcaaagagtgaaagaacaaagctttcacagtgtggaaggtgacctgagcgggttgccactgctggctctggcagcctgcttttattctcttatctggccccacccacatcctgctgattggtagagcagagtggtctgttttgacagggcgctgattggtgcgtttacaatccctgagctagacaaaaaggttctccacctccccaccagattagctagacacagagtgtggacacaaaggttctccaaggccccaccagagtagctagatacagtgtcaactggtgcattcacaaaccctgagctagacacagggtgctgattggtgygtttacaaactttgagctagatagagtgccaattggtatatttacaatccctgagctagacataaaggttctccaaggccccaccagagtagctagatacagagtgtccattggtgcattcacaaaccctgagctagataccaagtactgattggggtatttacaatccctgggctagacataaaggttctccacgtccccaccagactcaggtg

SEQ ID NO: 919547 - DNA, 619 bp, Homo sapiens
gcagactttcatggtgagtgttacagctcataaaagcagtgtggacccaaagagtgagcagtagcaagatttattgcaaagagtgaaagaacaaagctttcacagtgtggaaggtgacctgagcgggttgccactgctggctctggcagcctgcttttattctcttatctggccccacccacatcctgctgattggtagagcagagtggtctgttttgacagggcgctgattggtgcgtttacaatccctgagctagacaaaaaggttctccacctccccaccagattagctagacacagagtgtggacacaaaggttctccaaggccccaccagagtagctagatacagtgtcaactggtgcattcacaaaccctgagctagacacagggtgctgattggtgcgtttacaaactttgagctagatagagtgccaattggyatatttacaatccctgagctagacataaaggttctccaaggccccaccagagtagctagatacagagtgtccattggtgcattcacaaaccctgagctagataccaagtactgattggggtatttacaatccctgggctagacataaaggttctccacgtccccaccagactcaggtg

SEQ ID NO: 919548 - DNA, 644 bp, Homo sapiens
ggcatgtgaaaagagtaaacttccccagtcacaacttagtggctgggagaagtatctagtgactgcctgtcctaggacccctcggatactgacagatctggaggacagttatccaggacaggagagtaagactgagaaggctgcaccagtgtccaggagacagttaacctggccctcaatggtcaagcatacctgtggctctgtgagggtgatggcataggctggtgcttgcgccgggcaccctcaatcctgctgctggatcatctggttagtggcttctgactcagaggacyttcatcccctggggcagtgggccttccagtgattcccttgacataggggtacggacaagggggcagcttattgctatttggacgatctttttaaagtgtccttgtgtactgcactggaagcaagccctatcaggcattcaatttgcccaggctttccctgttccagagcctccaaagtctgcttgcctgaaggccctgactaaagtggtggccttttttttttttttaatcctgtgttgtcctgttctgcctgctcctcttgatctctattataaaaaaactgaggttgccaagttcaatagggtttctaagttttgctccaggcctaaggcggacttttgaagtttgttt

SEQ ID NO: 919549 - DNA, 586 bp, Homo sapiens
attttcctaacccttgtaaaatatcaatatagccatcagggttatctgagaatttacctaggtctattttaattcgcttcaagtctgagagggaaaaaggtacatacactctgactaggccaaattctccagaatacatcttaggggtgtttttgccttggggggaacgtttmccatctgaaaaaagaacatagggatgccagcaaccctagtcattttctgatgagcattagtcctagagcgtcctctatggtcctaatgcttattcctttccagggtgcataaccacccatggacctctgcttatctgattagttacgctcaccaatgtagcagtcctgcacctgttttcccgcctttcttgaccacagagaaaggggtccgggctgctggattctagtggtcctttaccagcgtgcccaacattgcctttgtgctcgggcgtgagttcctttccaggatgtgtaaccacccatggacctctgcttattggattagttacgctcactgatgtagcagtcctgcacctgttttcccatctttcttgaccacaaggaaaggggtccaggttgctggattctagtgg

SEQ ID NO: 919550 - DNA, 670 bp, Homo sapiens
aacagacagaactttcttccctcataatacataaataaataggctaagaaacccattacatggcaatatgacaaacataaataaatgaagcgcatggaaagttaggaggtgaagagtgctacgggaagtgagaggagggtttgggagtgcctagggagatatggttttaaagactggtcagtgcagcctcattgagaaggtgacatttggccacgtgcggtggctctcgcctgtaatcccagcactttgggagggcaaggcaggtggatcacctgatgtcaggagttcatgaccagcctggccaacatggtgcaaccccgtctctacaaaaatacaaaaattagctgggcatgatggcaggtgcctgtaatcccagctacttgggaggctgaggtgggagaattgcttgaacctgggaggtggaggttgcagtgagctgagatcacaccaagcctgggctacagagcaagactcyacctcaaaaaaaaaaaaaaaaaagaagatgacatttaaacaaagccttacaggaggtgaaggaggaaccgtttgggtgctgagggacagagcattccaggcaagagaatagcaagtcctaaggccctgggagcctggagtgtacctgccgtgtttgagaaacagcaaggaggctgtggtggcaggagcacagtaa

SEQ ID NO: 919551 - DNA, 554 bp, Homo sapiens
aatcaaccttctgaattttttttctggcaattcggagatttcatcttggtttgatccattgctagtgagctagtgtgatcttttggggatgttaaagaaccttgttttttttttcatattaccagaattgtttttctggttccttctcatttgggtagactatgtcagagggaagatctggaactcaagggctgctgttcagattcttgtgtcccatgggggtgctcccttgacctggtgctctcccctttgccctagggatggggcttcctgagagccaaactgcagtgattgttagttstcttctggatctagccacccagtggagctactgggctttgggctggttctggggagtatctgtaaagagtcttttgatgtgattcatcttcaggtctctcagctttggataccaacacctactctggtggaggtagcaggagaatgaagtggactctgtgagagtccttggttgtatttttatatgtgttggtttttgtattttcatgtgtgttgcttttgtgttggctggcctccaggaaggaggtagcact

SEQ ID NO: 919552 - DNA, 622 bp, Homo sapiens
ggggactcacagttcctcggctacccatggagcctgcagtggcaatcaactgtcttcaacgcatctgtggattctctcagctttcctggtatgttcctgggatagttcttggagaaaagttagcaatgtgggtctccacatgctgctctgtccctctgagtaggagctgcaagttcrtcctgcttcctgtctatcactctctcctctttttctcattttaacaaggaggaagagcagaatatctacttttaatcgctgttgaaagaactaaccaagataactcacagaatatgtctggcctagaataaaattttaataaatataaagtatgtttacccttcatttttgtttatcagagggaaaagcattcccagagttttctgagtgatcatagcagaggtaggcatataacctcatcttattttttaacttttattttagttttggagtacatgtgcaagtttgttatataggtgaattatgtgttgtcaggatttggtgtacagagcatgtcatcaccccagtaataagcatagtatccaataggtaggttttccttaccctcttcccaaacactaggcacagtgtctgttgttcccttatttatgtccatgtgtacaga

SEQ ID NO: 919553 - DNA, 622 bp, Homo sapiens
ggggactcacagttcctcggctacccatggagcctgcagtggcaatcaactgtcttcaacgcatctgtggattctctcagctttcctggtatgttcctgggatagttcttggagaaaagttagcaatgtgggtctccacatgctgctctgtccctctgagtaggagctgcaagttcgtcctgcttcctgtctatcactctctcctctttttctcattttaacaaggaggaagagcagaatatctayttttaatcgctgttgaaagaactaaccaagataactcacagaatatgtctggcctagaataaaattttaataaatataaagtatgtttacccttcatttttgtttatcagagggaaaagcattcccagagttttctgagtgatcatagcagaggtaggcatataacctcatcttattttttaacttttattttagttttggagtacatgtgcaagtttgttatataggtgaattatgtgttgtcaggatttggtgtacagagcatgtcatcaccccagtaataagcatagtatccaataggtaggttttccttaccctcttcccaaacactaggcacagtgtctgttgttcccttatttatgtccatgtgtacaga

SEQ ID NO: 919554 - DNA, 622 bp, Homo sapiens
ggggactcacagttcctcggctacccatggagcctgcagtggcaatcaactgtcttcaacgcatctgtggattctctcagctttcctggtatgttcctgggatagttcttggagaaaagttagcaatgtgggtctccacatgctgctctgtccctctgagtaggagctgcaagttcgtcctgcttcctgtctatcactctctcctctttttctcattttaacaaggaggaagagcagaatatctacttttaatcgctgttgaaagaactaaccaagataactcacagaatatgtctggcctagaataaaattttaataaatataaagtatgtttacccttcatttttgtttatcagagggaaaarcattcccagagttttctgagtgatcatagcagaggtaggcatataacctcatcttattttttaacttttattttagttttggagtacatgtgcaagtttgttatataggtgaattatgtgttgtcaggatttggtgtacagagcatgtcatcaccccagtaataagcatagtatccaataggtaggttttccttaccctcttcccaaacactaggcacagtgtctgttgttcccttatttatgtccatgtgtacaga

SEQ ID NO: 919555 - DNA, 675 bp, Homo sapiens
agtctggtggggacttggagaatctttatgtctagctaagggattgtaaatataccgatcggcactctgtatctagctcaaggtttgtaaacacaccaatcagcaccctgtgtctagctcagggtttgtgaatgcaccagtcgaccctctgaatctagctactctggtggggacttggagaacctttgtgtccacactctgtatctagctaatctagtggggacgtggagacgttttgtgtctagctcagggattgtaaacacacccatcagcaccctgtcaaaacggaccaatcagctctctgtaaaacagaccaattggctgtctataaaatggaccaatcagcaggatgtgggtggggccagataagagaataaaagcaggctgcccgagccagcagtggcaacctggtcaggtttccttccatgctgtggaagctttgttgtttcattctttgcwgtaagtcttgctactgctcactctttgggtccacactgcctttatgaactgtaacactcaccgcgaaggtctgtagcttcactcctgaagccagcaagaccacaaaccaaccaggagggactaacaactccagacgcgctgccttaagagctgtaacactcaccgtgaaggtccgcagcttcgctcctgaagccagcgacaccacgaacccaccgg

SEQ ID NO: 919556 - DNA, 593 bp, Homo sapiens
cctgtctggttaattttctttttttctttgtagagataagatcttaatactcaggctgccagcttttgtagagacagggggtcttgctatgatgcccaggctggtttcaaactcctgggctcaagcgatcctcccactttggcctctcaaagctctgagattgcaggtgtgggctgccatacctggccctaaattcctatactggagccctaatccctaaagtgactgcatttggagatagtgccctaaggatgtaatatggttaaatgaggtcagaagggtggggccctaatctgatagggctggcatccttattaaaggaagacacaagggcttacatatgctctctgtgcacagaggaaaggccacatgaagacacacctagaatgtgcccgtctgcagccaagaagaaaggcctcaccaraaaccaacccctactggcaccttaatcttggacttccagtctccagaactgtgagaaaatgtttgctttttaagccactcattctatggtattttgttatggtagcccatgcagactaacacaacactcaaactagaaaatgagccttgctgggttctcttggccttgt

SEQ ID NO: 919557 - DNA, 635 bp, Homo sapiens
accactaccaccaaagcgcggagaccggtagtggccccgaatgtctggctgcgctgttatttattggatacaaagcaaaaggggcagggtaaagagtgtgagtcatctccaatgataggcaaggtcacgtgggtcacgtgtccactggacagggggcccttccctgcctggcagccgaggcagagagggagaggagacagagagaaagatagcttatgccattatttctgcatatcagagacttttagtactttcactaattgactactgctagctagaaggcagagccaggtrtacaggatgactaggcataataaaggcagactaggagcgggaccactgaagcacagcatcacagggagatggttaggcctccggataactgcaggcaagcctgactcatgtcaggccctccacaagaggtggaggagcggagtcttctctaaactcccccggggaaaaggagcctccctttcccggtctgctaagtagcaggtgttgttccttgacacttttcactaccgctagaccacggcccacctggcaacgggcatcttcccagacgctggcgtcaccgctagaccaaggagcccttctggtggccctgtctgggcataacagaaggctcgcactct

SEQ ID NO: 919558 - DNA, 722 bp, Homo sapiens
ttatttatttctctccttctctcctctccctcagagacttcggctgcacctatattaggccacaggaagttatctaacagcttcctgatgctttgttttagccttttatttttctctctgtgtttaattctgggtagtttttattgctatatcttcaaattcactagttttccttctgcaaagactaatctgctgttaatcccattgagtatgttttttcctcccagaaattgtatttttcatctttataacttcatgcaggtcattaaaaaaatcttccatgtgtttatttaacatgttaaatctttcctctagctttctgaagatatggaatacaatyataataattattttaatgaccttgtctgttaattctatcatctatatcagttctgggtcagtttgaatgattaatttgttttctccttatgagttgtagtctcttgtcttgtatgcttggaaacttttgagtggatgtcatatgttgtgaattttaccttctgtgagctggatatttttgtattcctataaaaattttttggctttgttctggttaggttacttgggaacagtttgattatctctggttgtgctttcaagatttattaggtaggatcagaacagtgtttggtcaagggctagttataaccccctactgaggcaatctcttgtcagtactctattcggtgcctcataaatcatgaggttttccagtctggctg

SEQ ID NO: 919559 - DNA, 646 bp, Homo sapiens
tgtgctttcaagatttattaggtaggatcagaacagtgtttggtcaagggctagttataaccccctactgaggcaatctcttgtcagtactctattcggtgcctcataaatcatgaggttttccagtctggctggtgtgaacaggcactacttgcaaccctgtgtgagtactgggcattgttgcctataatccttttgggttgctgtttcccagccttgagttatttcctcatatgcacatatgtatgtgctgaycagtactcagacgaacagtcaaagtgaactctacagatcttcagagttttctctctgtgcaactctctcctctctgatactctgctccacaaattctagctgccttagtctctctcactgttgaaaagctctgtctttgtctactgggctctgcctgggcttcccccactgctcatcctgggactggaaagtctctcaagacagaaaactggcaaattgcagggctcatcacctcatttttttcttcatatttcagggaacattgtctttccttgcttgatgtccactgtcttgaaaaccactgtttcacacattttgtccttttctccccacatagatatctttttcccactttttttttttttttttttttagacggagtcttgttctg

SEQ ID NO: 919560 - DNA, 646 bp, Homo sapiens
tgtgctttcaagatttattaggtaggatcagaacagtgtttggtcaagggctagttataaccccctactgaggcaatctcttgtcagtactctattcggtgcctcataaatcatgaggttttccagtctggctggtgtgaacaggcactacttgcaaccctgtgtgagtactgggcattgttgcctataatccttttgggttgctgtttcccagccttgagttatttcctcatatgcacatatgtatgtgctgatcagtactcagacgaacagtcaaagtgaactctacagatcttcagagttttctctctgtgcaactctctcctctctgatactctgctccrcaaattctagctgccttagtctctctcactgttgaaaagctctgtctttgtctactgggctctgcctgggcttcccccactgctcatcctgggactggaaagtctctcaagacagaaaactggcaaattgcagggctcatcacctcatttttttcttcatatttcagggaacattgtctttccttgcttgatgtccactgtcttgaaaaccactgtttcacacattttgtccttttctccccacatagatatctttttcccactttttttttttttttttttttagacggagtcttgttctg

SEQ ID NO: 919561 - DNA, 601 bp, Homo sapiens
ctggggatgctgtaatgcaggatgccatgtcctgagactgcacagagcaacggagccccgggtctggcccatgaaaccatttttaccccaggcctctaggcctgagatgataggagctactacaaaggtctctggaatgccctggagrcattttctccattgtcttggctattaacattcagctcctccttacttatgcaaatttctgcacctggtttgaatttctcctgagcaaatgggtttttcttttctaccacatgaccaggctgcaaatttcccaaacttttatgttctgcttcccttttaagtataagtttgagtttcaggccatttatttgtttatgcaaatgagcactggcttttagaagcagccaagctacatcctgaatgctttgctgcttacaaatttcttcagacagataccctataacatttgtctcaggttcaaagttctacagatctctagagcaggggcaaaatgctgccagtctctttgctaaagcatagcaagagtgacctttacgccagttcccaataagtttgtcatctccatatgccagttcccaataagttcgtcatctccatctgagacctcctcagc

SEQ ID NO: 919562 - DNA, 601 bp, Homo sapiens
ctggggatgctgtaatgcaggatgccatgtcctgagactgcacagagcaacggagccccgggtctggcccatgaaaccatttttaccccaggcctctaggcctgagatgataggagctactacaaaggtctctggaatgccctggagacattttctccattgtcttggctattaacattcagctcctccttacttatgcaaatttctgcacctggtttgaatttctcctgagcaaatgggtttttcttttctaccacatgaccaggctgcaaatttcccaaacttttatgttctgcttcccttttaagtataagtttgagtttcaggccatttatttgtttatgcaaatgagcactggcttttagaagcagccaagctacatcctgaatgctttgctgcttacaaatttcttcagacagataccctataacatttstctcaggttcaaagttctacagatctctagagcaggggcaaaatgctgccagtctctttgctaaagcatagcaagagtgacctttacgccagttcccaataagtttgtcatctccatatgccagttcccaataagttcgtcatctccatctgagacctcctcagc

SEQ ID NO: 919563 - DNA, 625 bp, Homo sapiens
gccctttctcaccactcctattcaacatagtattggaagttctggccagggcaatcaggcaggagaaagaaataaagggtattcaattaggaaaagaggaagtcaaattctccctgtttgcagatgacatgattgtatatttagaaaaccccatcgtctcagcccaaaatctccttaatctgataagcaacttcagcaaagtctcaggatacaaaatcaatgtgcaaaaatcacaagcattcctatacaccaataacagacaaacagccaaatcmgaagtgaactccaattcacaattgcttcaaagagaataaaacacctaggaatccaacttacaagggatgtgaaggacctcttcaaggagaattacaaaccactgctcaatgaaataaaagaggacacaaacaaatggaagaacattccatgctcatagataggaagaatcaatatcatgaaaatggccacactgcccaaggtaatttatagattcagtgccatccccatcaagctaccaatgactttcttcacagaattggaaaaaaactactttaaagtttatgtggaaccaaaaaagagcccgcattgccaagacaatcctaagccaaaagaacaaagctggaggcat

SEQ ID NO: 919564 - DNA, 682 bp, Homo sapiens
acgattacaaaaattaaggtttaatatgcatatagaaatagtcaccctttttggtgtacagttctgcaagttttgatgaacatatataatggcggaaacatcatcacaataaaaatatataggccaagtgcagtggttcatgccggtaatcccaamattttgggaggccaaggcaggagaatcccttgagcccgagagttcgagaccagcctgggcaacatagggaaaccctatctctacataaaattaataaataagataaaattagctgggcatggtgattccagctacttgggaggctgcagtaggaggatcacttgaacctgggaggtgagccatgattttgccacagcactccagcctgggagatatacatatacacaaacacacacacacacacacacacactatatatatacacacacatatacatatttatacatatacatatatatacatatatacacatacacatgtatatgtgtgtatgtgtatatatgtatatatatctatacacataaatatgagtgtgtgtgtgtatgtgtgtatgcatatatacatatatagagagagaaaacattccccaaaacctcctaaaattcatttctgccctacctccagcccctggcagccattgatctgttttcagaccttatagtttttcttcacaagggtgtcatat

SEQ ID NO: 919565 - DNA, 435 bp, Homo sapiens
tgtgccatcacgcctggctaattttgtacttttagtagagacggggtttctccaagttggccaggctggtctcgaactcctcacctcaggtgatctgcccgtctcggcctcctaaagtgctgggattacaggtgtgaggcactgcgcccggcsgaattgtttaaaccacccagagctagcagtaaactcaacatcctaactgtctaatattttctttcaacattgcaaaccttttgctttgaccgattgtcctgaagagatttgctttgactatagttgctgagagggatatacttctgtgtctggtcttcagtccaggtcattagaaatttctccatatctgatataggccctcctagaatttttgttagtctcattgctttcaataaagcagatccttcaacagtttctgtgactttgttcttgttcatcaag

SEQ ID NO: 919566 - DNA, 435 bp, Homo sapiens
tgtgccatcacgcctggctaattttgtacttttagtagagacggggtttctccaagttggccaggctggtctcgaactcctcacctcaggtgatctgcccgtctcggcctcctaaagtgctgggattacaggtgtgaggcactgcgcccggccgaattgtttaaaccacccagagctagcagtaaactcaacatcctaackgtctaatattttctttcaacattgcaaaccttttgctttgaccgattgtcctgaagagatttgctttgactatagttgctgagagggatatacttctgtgtctggtcttcagtccaggtcattagaaatttctccatatctgatataggccctcctagaatttttgttagtctcattgctttcaataaagcagatccttcaacagtttctgtgactttgttcttgttcatcaag

SEQ ID NO: 919567 - DNA, 714 bp, Homo sapiens
cactttacagtggtgcctgcatatggtgcagaaccatctgtgaaccaggccctagtcatctgttccgctgtcaagtgatcatagggacccctgtgaggccatcagtacaggctggggaagagaacgcagcgtgacaggagtggagatatgggcatttgagccacttcctcatgtaaattacttgtgccttcggaacctgcttgagcccaatcacgtatatactgcttccatttgatgatggaatgctgctgtgcatgacccrctttatggctaaatgggtcagaaagcacccagttcatgatagtcatctcaggtcacatggtgacttgatgacccatagtcaaatgttcagtttccaccaaagcccagttaacaggccaagagctgtctctcaaaaggagagtagttacctgcaaaagatggcagggccttgctccaaaatcctggaggcctccactgtgattcatctgtggggtcctgccaaaggctctcacagcatccctctctgcccctcacacctcaagcaccattgaatctgctgggtcctatggtccaagtggcagaacagcttgctcagtagcatggacctgttgcagagccttctcctgttctggaccgcactcaaaactggcagcctttcaggtcactcgataaatgggctggagtaacacacccacatgaggaatgtgttgtctccaaaatctaaatcggccc

SEQ ID NO: 919568 - DNA, 726 bp, Homo sapiens
gcaagttaaggactaggggttgcactacctggaaagctagcaaacgccctgggagtgaaaaatttccagagagggcccttcctggaaaaacgcagccccggtgttccctgatttcctggctgggtaccatcgggcagtggactggagaggcgcagggatgttttaggcaggtrtctcttgggtgttggcgtggactacatagcggaggttcagccgcgggactagcattgagcgacaagaaggcggcggcgcgtgcaaaccacaagacttaccttactgtcatccatcgcggcagacaggccggcctggccaggcactccctcccggagccctcccccggctcagccggcctggcccggcccccgccccgaggaagaaggggatatggttctggctgcctcctcctctcgcctaacagttcgcttccctgatgccagagtcacggggacgagggaccagttcaggaatggcagagcggaccctggaggcggccccaaacgcctcccttcgccgccgccgcctcctcctccccctccatgacagtctctgggtgtttacagacgctctggagagccgccgagaccggagggtgggcgggagcgctgcacacggaatggccccttcggctgccgtagcaccgcggcattctgggaattgtgatttttcttatcacagtctctgcgctactgactggaaaaaaaactacgatgtccacatagcctcatt

SEQ ID NO: 919569 - DNA, 718 bp, Homo sapiens
caaggggaataaggctggttcagcgtgcactaaagtctccaaactggagagaggaggcagcaaaaaagtgcaagaagaaaaagtacagtagtttcttatctcgacaggcaagttaaggactaggggttgcactacctggaaagctagcaaacgccctgggagtgaaaaatttccagagagggcccttcctggaaaaacgcagccccggtgttccctgatttcctggctgggtaccatcgggcagtggactggagaggcgcagggatgttttaggcaggtgtctcttgkgtgttggcgtggactacatagcggaggttcagccgcgggactagcattgagcgacaagaaggcggcggcgcgtgcaaaccacaagacttaccttactgtcatccatcgcggcagacaggccggcctggccaggcactccctcccggagccctcccccggctcagccggcctggcccggcccccgccccgaggaagaaggggatatggttctggctgcctcctcctctcgcctaacagttcgcttccctgatgccagagtcacggggacgagggaccagttcaggaatggcagagcggaccctggaggcggccccaaacgcctcccttcgccgccgccgcctcctcctccccctccatgacagtctctgggtgtttacagacgctctggagagccgccgagaccggagggtgggcgggagcgctgcacacg

SEQ ID NO: 919570 - DNA, 664 bp, Homo sapiens
ctcccaccgcaagcacacagtttcagtccttcctcgaggatgtttataatgaggcagcactcaactccaccattcttctaagctcacatatttttagactttgggaatttcacagtcatctccttctgacacttttaattcaatttcacaaatatttacggagcaccttctattaatttgcttattccttctttctttcaacaaatatttattgagtgcctcctctatgccagacattatccttaggctctgggaacacagaagtaaacaaacagatttaaactagaatgatgctgacattccaaaaaggggagaggagacagaaaatgaacacagcacatkaaagaagtacatactatgtaaggaggtgaaaaatgctatggagaaacaataagcggagagggaaaaggaagtgtttcaaggatcacaatgtgaataagtggtcagggaaggcctcatggagaaagtggcctttgaggccaggtgcagtggctcacacctgtaatcccagcactttgggaggcagaggcaggtggatcacttgatgtcaggagttcaagaccagcctggccaacatgatgaaactcatctctactacaaatacaaacattagctgggcatggtagtgcaggcctgtaatcccagctactcaggaggctgaggc

SEQ ID NO: 919571 - DNA, 664 bp, Homo sapiens
ctcccaccgcaagcacacagtttcagtccttcctcgaggatgtttataatgaggcagcactcaactccaccattcttctaagctcacatatttttagactttgggaatttcacagtcatctccttctgacacttttaattcaatttcacaaatatttacggagcaccttctattaatttgcttattccttctttctttcaacaaatatttattgagtgcctcctctatgccagacattatccttaggctctgggaacacagaagtaaacaaacagatttaaactagaatgatgctgacattccaaaaaggggagaggagacagaaaatgaacacagcacatgaaagaagtacatactatgtaaggaggtgaaaaatgctatggagaaacaataagcggagagggaaaaggragtgtttcaaggatcacaatgtgaataagtggtcagggaaggcctcatggagaaagtggcctttgaggccaggtgcagtggctcacacctgtaatcccagcactttgggaggcagaggcaggtggatcacttgatgtcaggagttcaagaccagcctggccaacatgatgaaactcatctctactacaaatacaaacattagctgggcatggtagtgcaggcctgtaatcccagctactcaggaggctgaggc

SEQ ID NO: 919572 - DNA, 635 bp, Homo sapiens
tctgaaactcctagcctcaagtgatctgcccacctctgcctcccaaagtgctgggattacaggcatgagccactgcgcccggccaatttacagactttctacaatgaacatgtattgctttataataaaacataaggtcaataaagcataatgtaaacaaaggaascaaactctccgtcattccctgctacttataatataaagtctaaaatctttgactgaggcctgatgtaatttggcccaaactgctttccaggcttattatatacccttaaatttaaatgttctgcatcaggtaaactattttaaacccaatttttcctgctgtatctctgacttctgcttcttttttcttcctgaaatgagcttccccattctctttcaatatcccaactcaatctattgttcaaggtcttagacccaaggagagcctttcctaagaaggaaggagtcagtatgtagtgtttactatgtgtgctaggccctctacttggagctttacttggtacttcatgtaaccctcacaataactctggaaggttgatgttatcttcattttgcagatgaggagactatgtttccctcaagccacacagccagtgtgtggtgaagctggaatttgttgccggctgaat

SEQ ID NO: 919573 - DNA, 521 bp, Homo sapiens
gaacaaaggtgaaagttccaggagaggctgtcagggagataacagagtgattatgaaaggatttgaaagtcataataaaatatttggcttttattctgagtgagttggaataccactggagaaattttaagaggaagaattaaaagtttctaaagcctaactctggtttctgtattgagactaggttaggctatggggttaggggaacgaacagggtgaatatataagaccataatcatatttctttttacaaggctattgaataattcaagttagaacttacgttggcttcaacaagagtagtagcagtggagttggtgagaagtagccagattctggatataccttgaargtggagtcaaaaagatttgaaaggaagatcagaagttcactttgaggcatgttaagtgtgggatgcctattaagcacctgagaggaactaacgagtagatagtttgagatatgattctggagctcaggagagaagtccacactgaagaaatgtttcgcaatcattagtc

SEQ ID NO: 919574 - DNA, 624 bp, Homo sapiens
aagctcttaaagtggtgagtgacagggacccttagcgtagatttttcattctcttattccttatattcattatcaagtgatggcctctttagctccaaaatgtaattgaatccatttctttctcaccacctccaccactactacccttgcccaagcacccagagtaacggcatcaggcgattactctcagtctctcacccacaggaatgaaataacctcctccaagctctccttgcttccattcttgcccttaacacccacctttcacacaccacccagagtaactgcaccaggtaggataggtcacattatgctgcaataacaaataatccccaaaagtcagtgacttataacaaccagggtttacttcttgkttatgctccattcagctgggacatctgctccaagtccctgcttgcaagattcaacattggtggttgccatggcccatgacagagggaaagagttctggagcatcttgcatcagcaatgcaacgttccagcccggaggtgacatctattatttccactcgcaactcactggataggactagtcacatgaccctgccctataataagaaggcagtaagtgcaaccctctcccatctcctgaatacagagaga

SEQ ID NO: 919575 - DNA, 636 bp, Homo sapiens
catgccatcaccctcacagaaccccgggtatgcctaaccattgagggccaggaggttaactgtctcctggacactggcgcggccttctcagtcttactctcctgtcctggacaactgtccttcacatctgtcaccatccaaggggtcttaggacagccagkcactagatacttctcccagccactaagatgtgactggggaactttactcttttcatgtgcttttctaattatgcctgagagcctcactcccttgttagggagagacattcaagcaaaagtgggggccattatacacctgaacataggagaaggaacacccgtttgttgtcctctgcttgaggaaggaattaatcctgaagtctggacaacagaaggacaatatggatgagcaaagaatgcccatcccgttcaagttaaactaaaggattctgcctcctttccctaccaaaggcagtaccccctcagacccaaggccaaacaaagactccagaagattgttaaggacctaaaagcccaaggcctagtaaaaccatgcagtagcccctgcaatactccaattttaggagtacagaaacccaatggacagtgaaggttagtgcaaaatctcaggattttcagtgaggttgttgttcct

SEQ ID NO: 919576 - DNA, 753 bp, Homo sapiens
gatcaattacatgcacattgatgtatgagaagggccattgagtctattcttcttatttcttctttaccagcccatagcttgatctcagtccttctcctcacccctcccaccttctgtctttttgtttcctgttctcttctgccctctggcctttctctctttttcttcttcttccctgcctccttcrtttcttcctttcctttccttctttcttcctctcctttctgcattcatttattcatcctttcacttacttattctcccttttccctctgattctccacacttctttccttctgtatctatttccctctctttgccccatctcttcctcttcttcttgctgaagcttaagagaaaacacaaatgtcctttcatcccctcctgccccacgccgcccaccgtgcttgcccacccagcccatcttcttccttttcctcaaactgccctgaatctaaggtgaagtaagcctcctgctaaagcaggtggtgtggaagccccaggcccagcaaccccaccaggcagccctgggttgtacctgcagaggattttttgtgcttatggcgatgacgtggtacttgtagtagcacagctcgcagctccagcagccccgctcgctgatccacttgatgaggcaaggctggtgtgtgcacttgaccgagccatcacagcggcatgggctcagcagctccccctgcagggagagagcacagggtgatgaggctgagacctacagtggctggtgggtgagtg

SEQ ID NO: 919577 - DNA, 623 bp, Homo sapiens
tttgagccacccaagtaggccacaggctttgtttgggggcaccagactccatggaggaggcctgggctcctgcacccccaccatgagagccaaaccatgttggtcagcacaacaaacggctctgagcccctgctactgcttgatacagcacagtactattaattactaaggttctacgaacatgagcgggctggtttctgcggaagcctctgctgttcacagtggggtgtcaggctgcagaagtgtctccgtaaaggctcagccaagagttgcaaactcaaatgccctcaaggacagacaggcaacagagataacaaaagctagctagtggagactgaattggaaggatcagacccaagctaaagggaaagccaccatcagctctagccagtgtagatgtggggatctaggaggttggacaaatgccctcactgaaggcctgggtccctccagycacccttgggtctggctgggggtagctaggaagcccagtttggaggagttggaatcagagaggcagaggactcaactgagcaagatggtgtgaggatttgaaacttcctttgagtggacggcagcattgggctcactctccagaacttcccatgaccatatgtcagatg

SEQ ID NO: 919578 - DNA, 773 bp, Homo sapiens
atactgtgtgtgttctgactactccactgactggtcattctcccatttctctcccttctccttgggcatccctataccctgagacacaactatattgaaattaggccacaacggcctctaagcgttcaagtgaaaggaagagttgcatatctctcactttaaatcaaaagctagaaatgattacgcttaatgaggaaggtatttcaaaagccaagatatgccaaaagctagacctcttgcactaaacatttagctatgttgtgaatgtaaaaggaaagttttgaagaaaaataagtgctactccagggaacacacaaatgataaagtgaaacacccttatggctggtaagtagaaagtctgagtggtctagacagaagatcaaaccagccagacattcctttaagccaaagcctaatccagaacaaggtcgtaactctcttcaattcaaggaagactgagagaagtgaggaagctgcagaaggaaagtctgaagctagcaaaggttgttggtttgtgaggtttacaaaaagacgttatcttcataacataaaagtgcaaggtgaagcagcaagtggtgacagtgaatctacagcaggatatccagaagatctagctaaggtaaatgayagaactggctacactaaacaacagattttcaacatagatgaaaaagccttctattggaagaagatgccatctgagactttcagagctagaaaggaaaagtcaatgcctggcttcaaagcttcaagggaaaagctgactcttttgt

SEQ ID NO: 919579 - DNA, 702 bp, Homo sapiens
ccatctgggaagtgaggagtgcctctgcctggctggccaaccggctgggaagtgaggagtgcctctgcccgcctgccaaagcgtctgggaagtgaggagtgcctctgcccggcccccaaccatctgggaagtgaggagcgcctctgcctggccggccaaccggctgggaagtgaggagtgcctctgcccggctgccaaagcgtctgggaagtgaggagtgcctctgcccggccgctgccccatctgggaagtgagaagcacctctgcctggctgccaactgtctgggaagtgaggagcacctctgcccggctgccaccccatctgggatgtgaggagcacccctgcctggccgccaaccatctgggaagtgatgagggcctttgcccrgccacccacagtctgggaagtgaggagtgcctctgcctggccactgccctgtttgggaagtgagaagcgcctctccccggccgcccaattgactgggaagtgaggagggcctctccccggctgcccaattgactgggaagtgaggagcgcctctgcccggctgactcgtctgggaattgagcgcctctgcccggctgccaccccgtctaggaagtgaggagcgtccctgctcggctgccactccatctgggatgtcgggagcgccactgcccggctgcccaccgtctcggaagtgaggagcgcctctgcctagc

SEQ ID NO: 919580 - DNA, 686 bp, Homo sapiens
gaggctggtgtgcccagagagggcatggaagcttccccacttcccacacactttgctttatacatggcttctatctggctgttcctgatttttatttatttatttatttttgagacagagtcttgctctgttgcccaggctggagatgcattggcatgatcttggctcactgcaacctccgcctcccaggctcaagatattttcccatcttagaccccyagtagctgggactacaggcacaaaccaccacacccagctactttttgtgttttttagtagagctggggttttgccatgtttctcaggctggtctcaaactcctgagctcaagtaatccacccgcctcggcctcccaaagtgctgagattacagccatgagcaccttgttcattccaggctattcctaatttgtatccttttataagaaaccagtgatctaataagcaactgttttcttgaatcctgtacgctgttctagcaatagtcaaacatgaggaagggttaccaggaacctccaatttatagccaattggtcagaagcacaggtaacagcttggacttacgattgatgtctgaagttggtaggggagttagcagtggaatgtattcaagtcctgtggcaccaaagtatgttagtagcagtgaatcgtatgggtctgcagcaacctccattcttgcctcctcat

SEQ ID NO: 919581 - DNA, 762 bp, Homo sapiens
tgttctagcaatagtcaaacatgaggaagggttaccaggaacctccaatttatagccaattggtcagaagcacaggtaacagcttggacttacgattgatgtctgaagttggtaggggagttagcagtggaatgtattcaagtcctgtggcaccaaagtatgttagtagcagtgaatcgtatgggtctgcagcaacctccattcttgcctcctcataagaaagaatccgatgaaggggcataaggcaaagggagagaccaaggcaagttttagaacaggagtgaaagtttatttaaaagctttagagtgggaatgaaaagaagtaaagtacacttgaaagagggccaagtgggcaacttgaaagatcaagtgcacaatatgacctttgacatggggttttatatgttggcatgcttctggggtcttgcatcccttctcccctgattcttcccttggggtgggctgtctgcatgtgcagtggctgccagcactttggaggggccgcaggagcagtgtgtttactggagttgtacacaygctcacttgaggcattcttcccttaccagtctaatgttcctataaggtcatataccagttaaacgctgccattttgcccattaatgctcatgtgtgagcccaatcgcccacctcctgagatcttatcaggaagctgctggtcatcagtttcaggtgtttctatctactagaagattgccttttcctggcactggctgagaccaattattattttagagagacagt

SEQ ID NO: 919582 - DNA, 587 bp, Homo sapiens
tcctaaattatgctctgtagctggaggaaaatcgagtggggaagaaccaacaggagggaatggctgggaggtggtacaggtggtgtgtgttagtccatttttgcattgccttataggaatagctgaggctgggtaatktataaagaaaagaggcttaattggcttagggttctgcagggtttttaaaacgtgtggtgccagcatctgctcggcttctggggaggcctcagtcaggaaatttccaatcatggcagaagtcgaagtgggagcaggaaggtcatatggggagagctggagcaagagagaaggagtaagagagagaaggggaaggttcccagactcctttaaacaaccagatcttgcatgaactaatggagcaataactaaattgtgagcaggggaatgatactagaccattcatgagggatttgcttccatgatcaaatcacctacacccaggcaccacctcccaacactgggaagcacgttgcaacaggaaatttggaggggccaaacatcctaaaccatattgtggtgcacacaaccctaagctggcgacatgcactatcttatgacatgcaccacaa

SEQ ID NO: 919583 - DNA, 587 bp, Homo sapiens
tcctaaattatgctctgtagctggaggaaaatcgagtggggaagaaccaacaggagggaatggctgggaggtggtacaggtggtgtgtgttagtccatttttgcattgccttataggaatagctgaggctgggtaatgtayaaagaaaagaggcttaattggcttagggttctgcagggtttttaaaacgtgtggtgccagcatctgctcggcttctggggaggcctcagtcaggaaatttccaatcatggcagaagtcgaagtgggagcaggaaggtcatatggggagagctggagcaagagagaaggagtaagagagagaaggggaaggttcccagactcctttaaacaaccagatcttgcatgaactaatggagcaataactaaattgtgagcaggggaatgatactagaccattcatgagggatttgcttccatgatcaaatcacctacacccaggcaccacctcccaacactgggaagcacgttgcaacaggaaatttggaggggccaaacatcctaaaccatattgtggtgcacacaaccctaagctggcgacatgcactatcttatgacatgcaccacaa

SEQ ID NO: 919584 - DNA, 587 bp, Homo sapiens
tcctaaattatgctctgtagctggaggaaaatcgagtggggaagaaccaacaggagggaatggctgggaggtggtacaggtggtgtgtgttagtccatttttgcattgccttataggaatagctgaggctgggtaatgtataaagaaaagaggcttaattggcttagggttctgcagggtttttaaaacgtgtggtgccagcatctgctcggcttctggggaggcctcagtcaggaaatttccaatcatggcagaagtcgaagtgggagcaggaaggtcatatggggagagctggagcaagagagaaggagtaagagagagaaggggaaggttcccagactcctttaaacaaccagatcttgcatgaactaatggagcaataactaaattgtgagcaggggaatgatactagaccattcatgagggatttgcttccatgatcraatcacctacacccaggcaccacctcccaacactgggaagcacgttgcaacaggaaatttggaggggccaaacatcctaaaccatattgtggtgcacacaaccctaagctggcgacatgcactatcttatgacatgcaccacaa

SEQ ID NO: 919585 - DNA, 613 bp, Homo sapiens
agctggtcaacatggggaaaccccacctctactaaaaatacaaaaattagctgggtatggtggtgtgtaatcccagctattgaggaggctgaggcacgagaatcgcttggacccaggaggcagaggttgcagtgagccaagatcgtgccaytgcactctagcctgggcaacagggcaagcctctgtctcaaaaaaaaaaaaaaaaagaagaagaagaaagaaaacaaagaagaaagaaagaaagaaagaaaattaaaagaaggaaatgccataaagcatctgggcaaagaacatccaaagaagagcactgatcactgcagcagacagccgttcagaatgggcagagagcagagctggcaggaagagaggacaaaaggaagaccaggaagggaagccaggaaaagagattttgcattgtgttattatttcaatcagaagacttaggaacattatttaattatcaaatttgtgtgtctgatgatcctttacaacactgcagcatcaaataaagtgttatcagatttctttcttttttttttttttgagactgggtctgattctgtagcccaggctggagtgcaggggtataataatagctcactgcagcttcaaa

SEQ ID NO: 919586 - DNA, 613 bp, Homo sapiens
agctggtcaacatggggaaaccccacctctactaaaaatacaaaaattagctgggtatggtggtgtgtaatcccagctattgaggaggctgaggcacgagaatcgcttggacccaggaggcagaggttgcagtgagccaagatcgtgccattgcactctagcctgggcaacagggcaagcctctgtctcaaaaaaaaaaaaaaraagaagaagaagaaagaaaacaaagaagaaagaaagaaagaaagaaaattaaaagaaggaaatgccataaagcatctgggcaaagaacatccaaagaagagcactgatcactgcagcagacagccgttcagaatgggcagagagcagagctggcaggaagagaggacaaaaggaagaccaggaagggaagccaggaaaagagattttgcattgtgttattatttcaatcagaagacttaggaacattatttaattatcaaatttgtgtgtctgatgatcctttacaacactgcagcatcaaataaagtgttatcagatttctttcttttttttttttttgagactgggtctgattctgtagcccaggctggagtgcaggggtataataatagctcactgcagcttcaaa

SEQ ID NO: 919587 - DNA, 686 bp, Homo sapiens
caacacggtgaaaccccgtctctactaaaaatacagaaattagcggggcgtggtggctggcacctgtagtcccagctactcaggaggctgaggcaggagaatcatttgaaccgaggaagcagaggttgcagtaagctgagatcgcgccactgcactccagcctggtgacagagtgagacaccgtcacaaaaaaaaaaaaaaaaaaaaaaaaaagcaggacactgaactctgggagggcctcctggtgagaggtgagcacagaggggagagatggaggcaggagcatgggyttctggtggccccagcagaccctgtggcagcgtggccagggtcctctgcagggaggaatcttggccaggatgacgctgtagcaggcctcttcctgaggcctccagccagcccggccagggtcccagcgtccagtgacccctgtttcacagcagcagctggggccagccccaggctctcttccactcccagcttcttaaaactggaagtggagagagttgtttgataaaacactggggcaaaccacatcctctcttcaccaagggagagttcgaggggatgccggcagagggagctttagagtagagacccctacccaaccagtgaccgtcacgcacacagcagggcatgctatggagacccccagacagtcactcggggagacccagcaggtccag

SEQ ID NO: 919588 - DNA, 764 bp, Homo sapiens
aagagtgaactcaagagtttcattttggacatgccaaatttgagatatattagatatcccatagcagatattgtgtatgattagaaggcatatataagattggggtttaggagaaaggtcagtgctgaagatacatacatgtcaatggttttaaaaccatgagaatggatgagatcaccttgagttaagaaggaaacccatggctgggcccagtggcttaygcctgtaatctcagcactttgggaggccaaggcaggcagatcacaaggtcaggagatcgagaccatcctggctaacacggtgaaaccccgtctccactaaaaatacaaaaaattagccgggcatggcagcacgcacctgtagtcccagatactcaggaggctgaggtgggagaatggcgtgaacccgggaggcagagcttgcagtgagccgagatcgcaccactgcactccagccagggcaacagagtgagactccatctcaaaaaaaaaaagaaggaaacccatgatttagagataaagtacagaaagaggaatcagaaggagacagaaggagggactactgaagttggagaagtatttggagtgctcacaaaatgccaagtgttctggaagtgcttcagaaagaaaataatggattaattgcgtccgatgtagcctgagaggctgagtaagctgaggccagaaaagggacattgggttttggcaacatagaggttggagtttgtgttagtcaaggttcttagtgtaagtaaaagtaaatga

SEQ ID NO: 919589 - DNA, 764 bp, Homo sapiens
aagagtgaactcaagagtttcattttggacatgccaaatttgagatatattagatatcccatagcagatattgtgtatgattagaaggcatatataagattggggtttaggagaaaggtcagtgctgaagatacatacatgtcaatggttttaaaaccatgagaatggatgagatcaccttgagttaagaaggaaacccatggctgggcccagtggcttacgcctgtaatctcagcactttgggaggccaaggcaggcagatcacaaggtcaggagatcgagaccatcctggctaacacggtgaaaccccgtctccactaaaaatacaaaaaattagccgggcatggcagcacgcacctgtagtcccagmtactcaggaggctgaggtgggagaatggcgtgaacccgggaggcagagcttgcagtgagccgagatcgcaccactgcactccagccagggcaacagagtgagactccatctcaaaaaaaaaaagaaggaaacccatgatttagagataaagtacagaaagaggaatcagaaggagacagaaggagggactactgaagttggagaagtatttggagtgctcacaaaatgccaagtgttctggaagtgcttcagaaagaaaataatggattaattgcgtccgatgtagcctgagaggctgagtaagctgaggccagaaaagggacattgggttttggcaacatagaggttggagtttgtgttagtcaaggttcttagtgtaagtaaaagtaaatga

SEQ ID NO: 919590 - DNA, 764 bp, Homo sapiens
aagagtgaactcaagagtttcattttggacatgccaaatttgagatatattagatatcccatagcagatattgtgtatgattagaaggcatatataagattggggtttaggagaaaggtcagtgctgaagatacatacatgtcaatggttttaaaaccatgagaatggatgagatcaccttgagttaagaaggaaacccatggctgggcccagtggcttacgcctgtaatctcagcactttgggaggccaaggcaggcagatcacaaggtcaggagatcgagaccatcctggctaacacggtgaaaccccgtctccactaaaaatacaaaaaattagccgggcatggcagcacgcacctgtagtcccagatactcaggaggctgaggtgggagaatggcgtgaacccgggaggcagagcttgcagtgagccgagatcgcaccactgcactccagccagggcaacagagtgagactccatctcaaaaaaaaaaagarggaaacccatgatttagagataaagtacagaaagaggaatcagaaggagacagaaggagggactactgaagttggagaagtatttggagtgctcacaaaatgccaagtgttctggaagtgcttcagaaagaaaataatggattaattgcgtccgatgtagcctgagaggctgagtaagctgaggccagaaaagggacattgggttttggcaacatagaggttggagtttgtgttagtcaaggttcttagtgtaagtaaaagtaaatga

SEQ ID NO: 919591 - DNA, 754 bp, Homo sapiens
tggtcggacagtgggtgcagcccatggagggcaagccaaagcagagtggggtgttgcctcacccgggaagcacaaggggtcaggggatttccctttcttagctaagagaagctgtgatggactgtacctggaaaaatgggacactcccacmcaaatactgcacttttcccatggtcttagcaaccggcagaccaggagattctctcccgtgcctgactggacgggtcccacacccacggagccttgctcactgctagtgcagcagtctgagatcgacctgcaaggctgcagcctggcggggggaggggcttctgtcattgctgaggcttgagtaggtaaacaaagtggctgggacgctcaaactgggcggagctcagcaaggcctactgcctctataaactccacctctgagggcagggcatagctgaacaaaaggcagcagaaacttttatagacttaaccgtccctgtctgacagctctgaagagagcagtggttctcccaccatggtgtttgagctctgagaacagacagattgcctcctcaagtgggtccctgacccctgtgtagcctaactgggagacacctcccagtaggggccgactgacacctcatacaggcaggtgcccctctggaatgaagcttccagaggaagaatcaggcagcaatatttgctgttctgcaatacttcctgttctgcagcttctgctggtgatacccaggcaaacagggtctggagtggacctccagaaaac

SEQ ID NO: 919592 - DNA, 566 bp, Homo sapiens
cccctttactgagtaactcccaaagctgctagttttgagtgaagcccagaataagataaggttctgcaataggtccaggctgctgtgcaagctgctctgccccttgcgccacatgacccagcagatccagtggcgcttaaagtgtcagtggcaggtagcgatgctgcttggaggctttggcaggcccctataggtgaatcacagtggagagtataagatttcatggcaagagcctgctgtcatttgcagataactactccccttctgagaaacagctcttggcctactagcgggcctcagcagagactgaacgcttgacatgggccatgacattatcatgcaacttgagctgcctgtcatragctgggtgttatctgacccaccacaccataaagttgggtggacaaagcaagactccatcatcaaatggaagtggtgtatctgtgatcaggcccgagcaggttccgaaggcacaagtaagttacatgaagaagtgacccaaatgcccacggttcctaaccctgctatgttgccttctctctcccagcctgcacctgtggcttcat

SEQ ID NO: 919593 - DNA, 580 bp, Homo sapiens
attcctgccccagcgtctctgccctggccattccctcagcctggaacactctctcccaaggtgtatccatggctttctccttcctttcatttagttctgtacttacatgttactttctcacagagatcttttttgaccaccttatctaaaatggcatcccctgacactatattttaacttactctgctktattttctttattttaccattacttaacaggatattaattatctttctatattttcgtttttattgcctaactcttccactcagtggtaaactctgggaagccagagactttgtgtgaacctccagcacctagaacagtgcctggtacatagtagcactcaatatatacttgtcaaatgaacaaacacctttactatatatgtcaatgttctttaagataactgacatatattgaacagcaatcccatgcctgatattttgccagatgtttttcattatagtatctcatatattactttgccacagccctatgggagaggtgtattattttattttcattttacagacacagataaggaaatcgagttcagagaggttaaagaacaggctc

SEQ ID NO: 919594 - DNA, 580 bp, Homo sapiens
attcctgccccagcgtctctgccctggccattccctcagcctggaacactctctcccaaggtgtatccatggctttctccttcctttcatttagttctgtacttacatgttactttctcacagagatcttttttgaccaccttatctaaaatggcatcccctgacactatattttaacttactctgctttattttctttattttaccattacttaacaggatattaattatctttctatattttcgtttttattgcctaactcttccactcagtggtaaactctgggaagccagagactttgtgtgaacctccagcacctagaacagtgcctggtacrtagtagcactcaatatatacttgtcaaatgaacaaacacctttactatatatgtcaatgttctttaagataactgacatatattgaacagcaatcccatgcctgatattttgccagatgtttttcattatagtatctcatatattactttgccacagccctatgggagaggtgtattattttattttcattttacagacacagataaggaaatcgagttcagagaggttaaagaacaggctc

SEQ ID NO: 919595 - DNA, 761 bp, Homo sapiens
agaggctcttgttctcttccgttacattcttcaaaacaaatgaagtctcgctctgttctgagccacctgaaccaggggtggagtgacacaagcacccctgtggctaccagtcctagaactatgctgggtctgacctaaagccagcccagcattgagtctcaacaaagccctgctctaaccacttgctggttactacctatgttttctcaaagccctggggcctcatgatcagcaagtagctaagtcagccwggcctgtgtcctttccttcagggtggcaagttcctccaggcccctggtgaatctagaggtgctgttcaggagccagggattagagtaaaaaaccttacatatctacctggtgttctattgtactaaggctgaggtggcactcaaaccataagatgcagtctttcccactctttcctaccctttctaaaggcagaggagcctcactgtatggccaccaccacctcaaatcaatgggaagtactgccagactaccatcaatgttttcttaaagctcaaggcctcttaagtcagtttgtggtgaatgctgtctggcctgggactcacactttaaggcaatgggctcccttctggtccagggcacatccagaaattctgtccaagagccaagttctagaatcagggatcccaagagctcactggtactctgcccccggtggctgagctggtacctaaagtgcaagacaaagacccttttatttttccttctacttttctcaggcataaggagtc

SEQ ID NO: 919596 - DNA, 813 bp, Homo sapiens
acggaggagaaagacacaactcagctttctcacggaggagaaagacacaaggagcagcttttgttgcctccctctttttcataaataccctcattgtactttacctcccacatcaagatatgcttgctggcaatttatgccatcctacatgcatggtacatgcaygcacgcatacatacacacattcacacaaatacacacaatcttgcatccacggcattcacctaccaaaagagtcacatatatcttctacagcaacatcccaaattttttaccatctccaaagccaacacttacttaactttctcccatctctgttatctcccagagtgcctaataaaatatatgtgctgatgaatgttatcaaatatttccaggaccatctaagattatgtgctagtaatcatctggtgacagcagccctagaagtttttggctcatttagaaaaggagacatctagagaagaagtatttggctaaaatcaagacccagaaggccagtcccactcttgaatgttgcacccaaagtttgcttcactggcggtgaagtcagtttgtgattctacattcctcctgcgttgtccagtaaagagcatccttggaagagcttccacagtttgctgaccacaggcagaagcttccaccaaatcctcagattagacccctggagatggtgtgtgtgaccatgagcacatgactgtgtcattgagtttgttaaactttttcccactgcagaaaaacaaacagaaccttccactgggaaacttttcaacaaggattaagcaataaaagtatgataaacaggattttctt

SEQ ID NO: 919597 - DNA, 739 bp, Homo sapiens
cagtgaatatgaatatggctgtcactcttgtgattaagttatattgtaggagaaaggtaaagggatttgcaaatgtcattaaggtcccaaattagttgagttttcattaatcagaggtaattatcctgggtggggctgcctgaatcaggtgaatccttaaaaggtactgagtccctcctaaagggagacatttggagcattctcctgcccaatttgaaaaagtaagctaccatattgtagagcgaatcatgtggcaggaaacagtgggtggcctcgagttgctgagggcctccattcctacaattataagaagctaaaggctgggtgcagtggctcatgcctgtaatcccagcactttgggaggccaaggtgagcagatcacctgaggtcaggagttcaagaccagccttgccaacatggtgaaagcccgtgtctactaaaaatacaaaaattagcctggcatgatggcgggtgcctgtaatcccagctactcgggaggctgaagcaggagaatcacttgaacctggtaggcggaggttgcagtgagccaagattgcmccactctactccagcctgggtgacagagtgagactccatatcaaaaaaaaaaaaaaaaaaaaaaaaaaaaaaaaagcagctaaattctgccaaccagtgaacatgagcatgacaaggaacttatgcttaacgtaagatcatagctccaggtgacctctccatttgagccttctgagatcca

SEQ ID NO: 919598 - DNA, 625 bp, Homo sapiens
ccagcacacaaacacttcaaaatgcctaagccacagcagtcaagcattccttcaggacttcctccatcaggatcttgcttcaagtgccagaaatctggcttcaagtgccagaaatctgggccaaggaatgccctcagcctgagattcctcctaagctgtgtcccatctgtgcaggaccccactggatatcagactgtccaacttgcccagcagccactcccagagaccctggaactctggctcaaggttctctgactgactccttcccagatcttcttggcttagcgggctgaagactgacgctgcctgattgcctcrgaagcctcctggaccatcacagacgctttgggtaactcttacagtggagggtaagtcctccccttcttaatcaatatggaggctaccaactccacattaccttcttttcaagggcctgtttcctttgcctccataactgttgtgtattttgatggccgggcttctaaacctcttaaaactccccaactctggtgccaacttggacaatattcttttacgtactcctttttagttatccccacctgcccagttcccttattaggctgagacattttaactaaattatctgcttccctgactattcctg

SEQ ID NO: 919599 - DNA, 811 bp, Homo sapiens
gctgttattctatgagcctcggctggggaactcctctctcacagggcccaatcagaattccacttcaattagcttaattggaggaagacgcaaccacattttcaattaaagttctaaacaggctattagaacagactatttttgtcttccagattaagctctcctaatagtcattttttaaaaggtacaaatcttaaaggagaaaaagtggtcacaattagatcaattactgctagtaatcatttctcctagtaacattgggtcttttcacttaggtaatttggaagtaagacacttactcattttttattaactttaattttattaaattaatatattgtttaaaatgccaaatagttcttcaaagcttatggcaaaaactttccactccacttccaacttgttacccacagatacccagtttgactcttcaagatagcgcttctattattgacatccgtgtttctaaataacaggaatcatcagaagctaccattttcgtaggcraaagggggttaatatcaacaattttagatggttcaacttaacactactagttccggggtttatagttttgactattgtctactgacttctcactatggagagtaaggatttagactacctacaatattcccaacacccctccccaccactgcccacctctctctctctaaaatacacacacacaaacacacacacacacactcactcactcttccctcatcattccaatatagttatagcacaattggtagttcaacattgaaagtttctattatgactcctatgtaaatattgttcacagttg

SEQ ID NO: 919600 - DNA, 811 bp, Homo sapiens
gctgttattctatgagcctcggctggggaactcctctctcacagggcccaatcagaattccacttcaattagcttaattggaggaagacgcaaccacattttcaattaaagttctaaacaggctattagaacagactatttttgtcttccagattaagctctcctaatagtcattttttaaaaggtacaaatcttaaaggagaaaaagtggtcacaattagatcaattactgctagtaatcatttctcctagtaacattgggtcttttcacttaggtaatttggaagtaagacacttactcattttttattaactttaattttattaaattaatatattgtttaaaatgccaaatagttcttcaaagcttatggcaaaaactttccactccacttccaacttgttacccacagatacccagtttgactcttcaagatagcgcttctattattgacatccgtgtttctaaataacaggaatcatcagaagctaccattttcgtaggcgaaagggggttaatatcaacaattttagatggttcaacttaacactactagttcyggggtttatagttttgactattgtctactgacttctcactatggagagtaaggatttagactacctacaatattcccaacacccctccccaccactgcccacctctctctctctaaaatacacacacacaaacacacacacacacactcactcactcttccctcatcattccaatatagttatagcacaattggtagttcaacattgaaagtttctattatgactcctatgtaaatattgttcacagttg

SEQ ID NO: 919601 - DNA, 603 bp, Homo sapiens
gctgaacactgagaagccacagggaaggagctgcctaaggccttgggaccccatcccttgcccttgcatcagtgcaccctggatgtgagacatagaatcaaaggagattattttggagctttaagatttaatgactgccctgctgccttgcatggggccttagacccttcttttggccaacttctgccktttggaatgggagtatttacccaatgcctatacccccattgtatcatggagtaactaacttgttttttattttacagggtcataggtggaaaagactagctttgtctcagatgagactttggactttggactttttagttaatgctgaaatgatttaagactttgggggactgttgagaagcgatgattgtattttgcagtttgagaaggacatgggatttgaaggtccagggtggaattgtatggttggatctgtgtccccagtgttggagatggggcctattgggaagtggttgcatcatggggttgtgatatggtttggatctgtgtctcccatcaaatctcatgttgagttgtaatcctcagtgttagaggtggggcctgatgggaggtgattgaatcatgacggtggag

SEQ ID NO: 919602 - DNA, 603 bp, Homo sapiens
gctgaacactgagaagccacagggaaggagctgcctaaggccttgggaccccatcccttgcccttgcatcagtgcaccctggatgtgagacatagaatcaaaggagattattttggagctttaagatttaatgactgccctgctgccttgcatggggccttagacccttcttttggccaacttctgccttttggaatgggagtatttacccaatgcctatacccccattgtatcatggagtaactaacttgttttttattttacagggtcataggtggaaaagactagctttgtctcrgatgagactttggactttggactttttagttaatgctgaaatgatttaagactttgggggactgttgagaagcgatgattgtattttgcagtttgagaaggacatgggatttgaaggtccagggtggaattgtatggttggatctgtgtccccagtgttggagatggggcctattgggaagtggttgcatcatggggttgtgatatggtttggatctgtgtctcccatcaaatctcatgttgagttgtaatcctcagtgttagaggtggggcctgatgggaggtgattgaatcatgacggtggag

SEQ ID NO: 919603 - DNA, 603 bp, Homo sapiens
gctgaacactgagaagccacagggaaggagctgcctaaggccttgggaccccatcccttgcccttgcatcagtgcaccctggatgtgagacatagaatcaaaggagattattttggagctttaagatttaatgactgccctgctgccttgcatggggccttagacccttcttttggccaacttctgccttttggaatgggagtatttacccaatgcctatacccccattgtatcatggagtaactaacttgttttttattttacagggtcataggtggaaaagactagctttgtctcagatgagactttggactttggactttttagttaatgctgaaatgatttaagactttgggggactgttgagaagcgatgattgtattttgcartttgagaaggacatgggatttgaaggtccagggtggaattgtatggttggatctgtgtccccagtgttggagatggggcctattgggaagtggttgcatcatggggttgtgatatggtttggatctgtgtctcccatcaaatctcatgttgagttgtaatcctcagtgttagaggtggggcctgatgggaggtgattgaatcatgacggtggag

SEQ ID NO: 919604 - DNA, 599 bp, Homo sapiens
ggccagtattaccattataatgaaactagacaaaacatcacgggaaaagaaaactacaaacaagtatctcttgtgaatacagacacacaaatcttaagcaaaatactaccaaactgaatacagcagcacatgagaagaatgagacaccacaatcaagtgggaggcatcccaggaaagccaggttggcttatcaccccaaatcaattagaataaaagaataacatgattatgttaatagctacagaaaaagcatgtgacaaaattcaacaccatttcatgataaaaacactcagcaaactaagattagaagagaccttctttactctgataaaaagcatctataaaaacccaacagctaacatcatcctcaatagtgaaagactgaatgcttcctactgagrttaggaagacaaagatctgctctcaatacttctattcagtattgtactggaggctctagctaggggaactaagttaagaaaatgaaattaaaaggattacacgggaagaagtaaaactactgctatttgtagatgatattatttcaaaaataacaaaatcctaaggaatccactaaaagactattagacctaatgaac

SEQ ID NO: 919605 - DNA, 601 bp, Homo sapiens
agtctcactctgtcacccaggctggagtacagtggcaccatctcggttcactgcaacctccacctcccgggttcaagcaattctctgcatcagcctcccaagtggctaggattacaggcgcccgccaccacgcccggctaatttttgtatttttagtagagatgaggtttcaccatcttggccagkttggtcttgaactcgtgacctcgtgatccacccgccttggcctcccaaagtgttgggattacaggtgtgagccaccgcgcctggccaaatttggtatatttctaagttttcctatatttcttgaggatttccacaccagttacacagattagaaaacccagtcccttctctccttcattctactaaattcatcaccagctatattattaaaatgtcctaagattatccttttctcatctctatcatcttcctaggccaaactataccattccttgcctagatgactgaaatgaacgtcttcttttttctactctatgggtcttcaaaccaccacccttcagccaaatctagactattgcctggttttgtatgctctgtaagctaagaatagtttttgtactttaaataaaaatgg

SEQ ID NO: 919606 - DNA, 601 bp, Homo sapiens
agtctcactctgtcacccaggctggagtacagtggcaccatctcggttcactgcaacctccacctcccgggttcaagcaattctctgcatcagcctcccaagtggctaggattacaggcgcccgccaccacgcccggctaatttttgtatttttagtagagatgaggtttcaccatcttggccaggttggtcttgaacycgtgacctcgtgatccacccgccttggcctcccaaagtgttgggattacaggtgtgagccaccgcgcctggccaaatttggtatatttctaagttttcctatatttcttgaggatttccacaccagttacacagattagaaaacccagtcccttctctccttcattctactaaattcatcaccagctatattattaaaatgtcctaagattatccttttctcatctctatcatcttcctaggccaaactataccattccttgcctagatgactgaaatgaacgtcttcttttttctactctatgggtcttcaaaccaccacccttcagccaaatctagactattgcctggttttgtatgctctgtaagctaagaatagtttttgtactttaaataaaaatgg

SEQ ID NO: 919607 - DNA, 623 bp, Homo sapiens
gaggttgcagtgagctgacgtcatgccactgcactacatcctgggcaacagtgtgagagtccatctcaaaaaacaaaacaaaacaaaacaaaatgtagggttcacttccaagatggctgaaaggtacagcttcaatctacagctcccagcgagatggacaaagaagacaggtgatttctgcatttccaactaaggtacctggttcatctcactgggattggttggacagtgggtgcagcccacagagggtgagccaaagcagggtggggtgtcgcctcaccccggaagagcaagaggtcagggcatttccttttcctagccaaaggaagccgtgagtgactgtacctggaggaacagtacactcctgcgcaaatacygtgctactcccacagcttcacaaccagcagaccaggaaattcccttgcttggctccgcaggtcccatgcccacagagccttgctcgctgctagtgcagcagcctgagatagacctgggaagctgaagcctggcagggggaggggctttttccattgctgaggcttgagtaggcagttctatgctcacagtgtaaacaaagtggcagggaagcttgaactgggtggagcccagcgcagctcagcaag

SEQ ID NO: 919608 - DNA, 623 bp, Homo sapiens
gaggttgcagtgagctgacgtcatgccactgcactacatcctgggcaacagtgtgagagtccatctcaaaaaacaaaacaaaacaaaacaaaatgtagggttcacttccaagatggctgaaaggtacagcttcaatctacagctcccagcgagatggacaaagaagacaggtgatttctgcatttccaactaaggtacctggttcatctcactgggattggttggacagtgggtgcagcccacagagggtgagccaaagcagggtggggtgtcgcctcaccccggaagagcaagaggtcagggcatttccttttcctagccaaaggaagccgtgagtgactgtacctggaggaacagtacactcctgcgcaaatactgtgctactcccacagcttcrcaaccagcagaccaggaaattcccttgcttggctccgcaggtcccatgcccacagagccttgctcgctgctagtgcagcagcctgagatagacctgggaagctgaagcctggcagggggaggggctttttccattgctgaggcttgagtaggcagttctatgctcacagtgtaaacaaagtggcagggaagcttgaactgggtggagcccagcgcagctcagcaag

SEQ ID NO: 919609 - DNA, 574 bp, Homo sapiens
attgacatacgtttttaagtcatttggataaaataccaaggagcacgattgccagatcatacagtaagagtatgtaagaaactactgcactcttccaaagtggctgcattgttttgcattcccagagcaatgaataagggttcctgctgctccacatactcaccagcatttggtgttgtcagtgtattagaatacttttcatcattctaataggtttgtcatgatattttattactgcttcaatttgtaattccctaaagatacatgatattgaacatctttgcatatggttacttgccatctatctrtcttctttggtgaattacctgctcagtcctttcctcattttttattctggttgcttgttttcttattgttgatttttaaaagttctttatatattttgaataacagtcttttgtcaggcatgtcttttacaaatactttctctcactgtgagttttcttcacttacttttgatattgtaattcatagtaaagggaaatttgatcttaatgaagtccagatgatcaattctttatcttcatgtatcattcctttcatgttgtataat

SEQ ID NO: 919610 - DNA, 833 bp, Homo sapiens
tcgtgcagaaccatctgtgaagcatgtcctagttttctctttctctgtcaactgatcttagggaacttcccataaggccactggtgcaggcttggggagagaaggcagggtggccggagtacagaccatgggcatttgagccacttcctcatgtaacttccttgtgccttcaggacctgttcaagcctgatcacatatataccacttctatttaatgatggaatgctgctgcacacaacccactttatgrctagatgggtcagaaagcacccagttcatgataggcagtacaggtggcatggtgccttgatgacccgtaggcaaacattcagtttccaccaaagcccagtaacaggtctagagctgtctctcaaaaggagaatagttatctgcagaagatggcatggccttgctctaaaatcctagaggactctgctctgatccacctatgggggcctgcaaaggctccagtaagcctccctatctgccactgacacctcaagcaccatgggatctgctggatgatatggcccaagtggcagagcagcttgcacagcagcctagatctgttgcggagccttctccgcctggattccactccaaactggcagcctttcgggtcacttgataaatggcccagagtaacaaagccaaatgacgaatgtgttgcctccaaaatacaaatagacccactgggcgttgtgcctctttcttgcttgtaggaggggccaaatgcagcaacttatctttcaccttaggaggaatatctcaacaggccccacaccactggacccctagaaattactgaggtagaaggtccctgaaattcagtt

SEQ ID NO: 919611 - DNA, 618 bp, Homo sapiens
tcagaaacagagccagtattcaaataaatactcagatgatttggcaccagagtcctctgtgactttatgctgggtctttctcaatgtacacactaacttgctgtatatacctgcataacaatgtactgagaagcattcaatcagtaatgtgtttacaaagctgttagaaccacgcctggcatatagtaaacacttattcagtgtatgcaattattgctataatgtttatttgttttaatgagatataatcttgctatacattagtctataacttgcttgtattacttagcataagtattggatattctctcttgttttctagtttacttatgcatttaaatatgtctgtacacacatagaaatcattttacataaataggttcctgtatgcttagaatctcctgtttcctacaattyctatcttcttccctttatccactctaatgaacatattaacaacctgatcataatgtgttttatgaaatattattattaatccaactgtacctccaaattcaacagaaaagaaaaaacatttccaagaacaacagcaaaaatcccacaaacacacttccagacaaggtcctttggtcattgtacaatacaatacctacttct

SEQ ID NO: 919612 - DNA, 564 bp, Homo sapiens
ttcaagggagacattagactcctcctttcacttgaacacttagagaccattgcagagttattaattgtcctaacttcaatattttgatgtctaagggagcagaatgaccacaacaaaggagagagatgcagaatggctagtaggtgaagcagtcagaatacatgcgacatttatgaaataaattcattctctcttatgggtgtagtttgtggcactctgaaacaattacaactgtaaaatcaaaaatcactgatcacagatcaccataacataataataaaattttgaaatagtgcaagaattaccaaaacgtaacatagagacatgaagtaagaacatgctgttataaaaatgacatctatgatttgctcgaggccagaaaccttcaatttgtaaaaaccgtggctggrcgtggtggctcatgcctgcaatcccagcactttgggagaccaaggctggaggatcactttgagctcaggagttggagaccagcctgggcaataaggtgaaacgctgtctctataaaaaatacaaaaaatagctgggtgtgatagtgtgcacctg

SEQ ID NO: 919613 - DNA, 633 bp, Homo sapiens
acaggtcctggatattctgttctggtttggagtgatctttttgtttgttttactctgtgcatttcagttgataagtttctattgacatatcttcaagctcactgattgttttctgagtcatgtctaatctagtgatgaacctatccaaggcattcttcatttctgttacagtgctttttatttcttgcatttccttttgattttcttcgtgragttttcattgttcccaatgcttatatcacacatctattctggaatattgtcaactcttcccactagaacccttaatgtattcatcatagttattgtaaattttctatctgataattctaaaatctatgtcatacctgagtctagttctgatccttgtttcgtctccttacttaattttttgttgaaagctgaacataatgtgtcaattagcagaaactgagttaactaagtttttaatgtgaggtttttacattacacctggctaggagcttagtggtatttaatgtttgcagtgaatgtagatgcaagagtcttcagttttgtctagtttctttgttcttttgtttgcttgttttttacctcctgttgttttggggtttctctcagacctccttcttaaactgaatctgtgtcttgcag

SEQ ID NO: 919614 - DNA, 633 bp, Homo sapiens
acaggtcctggatattctgttctggtttggagtgatctttttgtttgttttactctgtgcatttcagttgataagtttctattgacatatcttcaagctcactgattgttttctgagtcatgtctaatctagtgatgaacctatccaaggcattcttcatttctgttacagtgctttttatttcttgcatttccttttgattttcttcgtggagttttcattgttcccaatgcttatatcacacatctattctggaatattgtcaactcttcccactagaacccttaatgtattcatcatagttattgtaaattttctatctgataattctaaaatctaygtcatacctgagtctagttctgatccttgtttcgtctccttacttaattttttgttgaaagctgaacataatgtgtcaattagcagaaactgagttaactaagtttttaatgtgaggtttttacattacacctggctaggagcttagtggtatttaatgtttgcagtgaatgtagatgcaagagtcttcagttttgtctagtttctttgttcttttgtttgcttgttttttacctcctgttgttttggggtttctctcagacctccttcttaaactgaatctgtgtcttgcag

SEQ ID NO: 919615 - DNA, 578 bp, Homo sapiens
ctcgtgagacttattcactaccatgagaacagtatgggggaaactgcttccgtgattcaaattatctcccaccaggtctctcccacaacccatgggaattatgggagtacaatctcaagacgagatttgggtggggacacagccaaaccatatcattccgcccttgttccctccaaatctcatgtcctcacatttcaaaaccaatcttgccttcccaacagtcccccaaagtcttaactcatttcagcattaactcaaaagtycacagtccaaagtctcatctgagacaagtcccttccacctatgagcctgtaaaatcaaaagcaaactagttacttcctagatacagtggggataaaggtattgggtaaatacagccattccaaatggaagaaactggctaaaacaaaggggttacagggcccatgcaagtcaaaaatccagtggggcagtcaaattttaaaactccaaaatgatttcctttgactccaggtctcacatccaggtcaggctaatgcaacagatgggttcccatggtcttggacagctccacccctgtggctttgcagtgtacagcc

SEQ ID NO: 919616 - DNA, 652 bp, Homo sapiens
aggttggcattgcgtgtctgtagcttttccaggcaaacggtgtaagctgttggcggatctaccattctggggtctggaggacagtggccctcttctcacaggtccactaggcagtgctctggtagggactgtgtgtgtaggctccagccccacatgtcccttcccccactgctgtagcagaggttctccatgagcaccttgcccttgtagcaaacttctgcctgggcatccaggcatttccatacatcttctgaaatctaggcagaggttcccaaaccccaattcttgaattctgtgcactcataggctcaacatcacatggaagctgccaaggatagaggcttccaccctctgaagccatggcccaagctctacatyggcccctttcagtcatggctggagtggctgggacccagggcaacaagtccctaggctgcacacagcacacggggatcctgggcccagcccatgaagccattttctcctaggcctctgggcctgtgacagaaggggctgccgtgaagacctctgacatgccctagagatattttccccattgttttagggattaactttctgctccttgttacttatgcaaatttctgcagcaggtttgaatttctcctaagaaaatgtttttttcttttctatc

SEQ ID NO: 919617 - DNA, 652 bp, Homo sapiens
aggttggcattgcgtgtctgtagcttttccaggcaaacggtgtaagctgttggcggatctaccattctggggtctggaggacagtggccctcttctcacaggtccactaggcagtgctctggtagggactgtgtgtgtaggctccagccccacatgtcccttcccccactgctgtagcagaggttctccatgagcaccttgcccttgtagcaaacttctgcctgggcatccaggcatttccatacatcttctgaaatctaggcagaggttcccaaaccccaattcttgaattctgtgcactcataggctcaacatcacatggaagctgccaaggatagaggcttccaccctctgaagccatggcccaagctctacatcggcccctttcagtcatggctggagtggctgggacccagggcaacaagtccctaggctgcacacagcacacrgggatcctgggcccagcccatgaagccattttctcctaggcctctgggcctgtgacagaaggggctgccgtgaagacctctgacatgccctagagatattttccccattgttttagggattaactttctgctccttgttacttatgcaaatttctgcagcaggtttgaatttctcctaagaaaatgtttttttcttttctatc

SEQ ID NO: 919618 - DNA, 551 bp, Homo sapiens
ctacgcccacggagtctcactcattgctagcacagcagtctgagatcaaactgcaaggcagcagtgaggctgggggaggggcacccaacattgcccagttagtcgtttgactaggtaaacaatgtggccgggaagctcgaactgagtggagcccaccacagctcaaggaggcctgcctgcctctgtcagctccacctctkggggcagggcacagacaaacaaaaagacagcagtaacctctgcagacttaaatgtccctgtctgacagctttgaagagagtagtggttctcccagcatgcagcttgagatctgagaacaggaagactacctcaagtgggtccctgatccccaagtagcctaactgggaggcatcccccagtaggggctgactgacacctcacatggccaggtactcctctgagacaaaacttccagaggaacgatcaggcagcagcatttgcagttcaccaatatacactgttctgcagccaccgctgctgatacccaggcaaacagggcctggagtggacctctagcgagctccaacaga

SEQ ID NO: 919619 - DNA, 552 bp, Homo sapiens
aaccaaaccaggtgcatccagcattttggcattaatcagccatgcccatggggagaacaagagacagaatatgggcaagactggtgtcagaaaaaaatgaaataagaaagtttcatattcaatgattaaaatgaatagcaagaggtgaatgcgtgcccctcataagcaaggaatgtttytgtatgcctagtcacacccacggtgtctagcacatagcagtatttcagtaaatgttgaaagggataaaatactgaaaaaaggaagaaagaggggatgaaagaggaaggaaagaaggaaggaggagagtaagggagaaggaaaggaagcaaaacaaaataaaaatttcattggggggactgacaatcatttagcaaattatattaagtaaactcacaaaggggcaaattcagaaagctacaagttctaaagagccttcattttacatataaaatcatgattaaaatcagattatttttctgtaatttaaggtttccatgatgaacatagatgttgacagtttagccctcaagggaaattcagggagccagaaat

SEQ ID NO: 919620 - DNA, 616 bp, Homo sapiens
ggcgggtgcccctctgggatgaagcttccagaggaaggatcaggcagcaatatttgctgttctacagcctccgctggtgatatccaggcaaacagggtcgggagtggacctactgcaaactcaaacagacctgcagctcaggggtctgactgttagaaggaaaacaaacagaaaggaacagcatcaacatcaacaaaaaggacatccacacmaaaacccaatctataggtcaccaacatcaaagaccaaaggtagataaacccacaaagacggggagaaaccagagcagaaaagctgaaaattgcaaaaaacagagtgcgtcttctcctccaaaggattgcagctcctcgccagcaactgaacaaagctggacagagaatgagtttgacgagttgacagaagtaggcttcagaaggttggtaataacaaacttctccgagctaaaggagcatgttctaacccatcacaaggacgctaaaaaccttgaaaaaatgttagaggaatggctaactagaattaacagtgtagggaagaccttaaatgacctaatggagctgaaaaccacgacacgagaactttgttactcatgaacaagcttcattacccaatttgatca

SEQ ID NO: 919621 - DNA, 613 bp, Homo sapiens
aaaaggtgagtttttaaaaatcgaaaattgatttaccttttttcattagatttgaattatttaaacttaacatatactattatttttgtttttagagatggaatcttgctatgtttccaggctagagtgcagtgccgattcacagacacaatcataactcactgtagcctctaactctgggtctcaagtgatcctcctgcctcagcctcctgagtagctggaattacaatgtgtgccactatgcccagttgcatatattactcttgtttgcaattgacttatagggcactatacatacatacatacatatatatacacacacacacacacacacacatatacacacatatatatgtgtgtwtatgtgtatatatataatttgtgtatgtgtatatataatttttaaatatataatttttccaattttatttatatatataattgctatatatatatgtgtgtgtgtgtgtgtgtgtgtgtgtgtgtgtgtgtatacatatattttttctttttttctttgaggcagagtcttgccctgtcgcccaggctggagtgcagttgcatgatcttggctcactgcagctcctgcctcctgggttcaagcgattctcct

SEQ ID NO: 919622 - DNA, 610 bp, Homo sapiens
tgggataatgcccactggtacctcctgacacttctctactagaggaatgtctatgggacctagatcaagttggacagctccttgtccccttctcagttctacaaagagaaggcagttctcagcagggagtgttgggagtagctttgtggcagcatggcttcttcaactggccctagagttatgaaagcaagcccctgccacagttaagatgctcatcatcaattatttggtaaggatacagatgcaattaacatgatcatggcttctttctttcctcatgatgtgtatctgctccytaagaatgacttcctttgtttgatcaataagcatttctcaaatgaccataagagaagcacaaggagacaaaacaaagagtccctctattggagaagccaaagatccagaaggacagagatacatagtgttaacagtgagttcagaatagaagaataagatgttacaggaatgagattcggctgaggtggacatcttccttagcctagaaaatccatttccaagaaagtgtgacttcaactaaggtttttttttttaatgagatatgattcacataccataaaattcaccattttaaatactgttttttgtagcg

SEQ ID NO: 919623 - DNA, 569 bp, Homo sapiens
aggttgtctcgaactcctgtcctcaagtgatctgcctgcctcagcctccgaaagtgctaggatttacaggcatgagccaccatgcccggccttaaaagttttaaaatgttgatcatgtccaatttacattttttattttattgcttgtatttttagtgtcattcttagaaggctttgtataatccagtatcacaaataattatgtctatgttttcttccaagagttttatagttttacattttactttayatctttgatccatttagagttaaattatgagtatgatgtaatgtaagggttattgtaatctttatgatagggttgtaaatgggattattttcttcctttcactttcagattgttcattgcaggtgcaagttcaactaacttgtatattgcttttatattctgcaatattggtaaacttgtttagtaattgtaacagtttttcagtggatgtcttaggattttctgtatagaagatcatgttatctgcaaatagagatagttttctcccttctctttttccaatgtagaggcctttttttttcctttttattcctagttg

SEQ ID NO: 919624 - DNA, 569 bp, Homo sapiens
aggttgtctcgaactcctgtcctcaagtgatctgcctgcctcagcctccgaaagtgctaggatttacaggcatgagccaccatgcccggccttaaaagttttaaaatgttgatcatgtccaatttacattttttattttattgcttgtatttttagtgtcattcttagaaggctttgtataatccagtatcacaaataattatgtctatgttttcttccaagagttttatagttttacattttactttatatctttgatccatttagagttaaattatgagtatgatgtaatgtaagggttattgtaatctttatgatagggttgtaaatgggattattttcttcctttcactttcagattgttcattgcaggtgcaagttcaactaacttgtatattgcttttatattctgcaatattrgtaaacttgtttagtaattgtaacagtttttcagtggatgtcttaggattttctgtatagaagatcatgttatctgcaaatagagatagttttctcccttctctttttccaatgtagaggcctttttttttcctttttattcctagttg

SEQ ID NO: 919625 - DNA, 825 bp, Homo sapiens
actttagagccacaaagtgttttcttactcaaactgcctgtaatacaatttgggatgaaagttatttaaataatgttgagatcatatattgtgaacctccagcaaatagcagaagatgccctcaccctccactgaaattataaaatgaaataaatacagtaaaggtctttaaagggtgctctacgcaaagggtgctctgtgcagttatgcagctaccctagctcccacctggtgtttatggaatccactgttggcttaaagaagtgactttgatacaggagttaagaagaaattacttaggcagatagtgagggtatggaagtccttggtaaggttttctttttaatgaaaagcagccccaaattatttttctgtctaacaaaggcagcctgtaaaattgagctgcagacatagatgctggcagtagtaccaatcatgttcaagatggaggctccatcttcccttctctttgtcaccatgtgtacggtaaggcgcagamaagatggcctggctaagggaaagttcatttgcataataagattagggtgggttgaccagccttccctgtgcactatgtaaatgtcacacctgatggaaccaatctgtgagcccaacataaatcagacaccgcctcctcaagctggactataaaatccggcgcgttagtcaccagccagtgttttcctctgggaagtcccatctctctcactagagagaaagttgttttcctttctatttctttctcttttctttgcctattaaacctccactcctaaactcctcctgtgtgtccttgtcctaaattttcctggtgagagacaacga

SEQ ID NO: 919626 - DNA, 825 bp, Homo sapiens
actttagagccacaaagtgttttcttactcaaactgcctgtaatacaatttgggatgaaagttatttaaataatgttgagatcatatattgtgaacctccagcaaatagcagaagatgccctcaccctccactgaaattataaaatgaaataaatacagtaaaggtctttaaagggtgctctacgcaaagggtgctctgtgcagttatgcagctaccctagctcccacctggtgtttatggaatccactgttggcttaaagaagtgactttgatacaggagttaagaagaaattacttaggcagatagtgagggtatggaagtccttggtaaggttttctttttaatgaaaagcagccccaaattatttttctgtctaacaaaggcagcctgtaaaattgagctgcagacatagatgctggcagtagtaccaatcatgttcaagatggaggctccatcttcccttctctttgtcaccatgtgtacggtaaggcgcagacaagatggcctggctaagggaaagttcatttgcataataagattagggtgggttgaccagccttccctgtgcactatgtaaatgtcacacctgatggaaccaatctgtgagcccwacataaatcagacaccgcctcctcaagctggactataaaatccggcgcgttagtcaccagccagtgttttcctctgggaagtcccatctctctcactagagagaaagttgttttcctttctatttctttctcttttctttgcctattaaacctccactcctaaactcctcctgtgtgtccttgtcctaaattttcctggtgagagacaacga

SEQ ID NO: 919627 - DNA, 717 bp, Homo sapiens
caaggcaccctgtcctgaggctgcatagagcagggggccccagatcccagcccaggaaaccatttttctctcctaggcctccaggcctgtgatgaaaggggctgtcccaaaaatctctgacatgccctggagacattttccccattgtcttggtgattaacatttggctcctcattacttatgcaaattcctgcagcagcagcttgaatttatccccagaaaatgtttttttttccttttctattggatcatgaggctgcaaattttccaaacttttatgatctgcttcttcttgaatgctttgccagttagatatttcttctgccagatacccccaatcatctctctcaagttcaaagttccacagatctctgaggcagggaaaaatgccaccagtctctctgcatagcaagagtgacctttactccagttctcaacaagttcctcgtctccatctgagaccacctcatcctggactttattgtccatatcactatcagcattttggtcaaagccattcaacaagtctctaggaagttccaaactttcccacatcttcttrtcttcttctgagccctccaaactgttgcaacttctgcctgttacccatttccaaagttgctttcacatttttaggtatctttacagcagtgccccactacctcagtatcaatttactgcattagtccattcccacgctgctacgaagagctgtcc

SEQ ID NO: 919628 - DNA, 705 bp, Homo sapiens
tatcttcttctgagccctccaaactgttgcaacttctgcctgttacccatttccaaagttgctttcacatttttaggtatctttacagcagtgccccactacctcagtatcaatttactgcattagtccattcccacgctgctacgaagagctgtccaagactgtgtaatttttaaagaaaagagatttaattggctcacagttccacagggcttgggaagcgtcaggaaacttacaatcatggtggaaggggaagcaaacagatccttcttcacatggtggcaggaaggagaagtgctgagcaaagagggaaaaagccccttatwaaaccatcagatctcatgagatctcactatcacaagaacagcatggggataactacccccatgattcaattacttcccactcggtcactcccatgatgtggggattatgggaactacaattcaagatgagatttgggtggggccacagccaaaccatatcagagactattatgcatacctctatgcatgcaaaattgaataattaggagactggacaaaatccaggaaacataaaactttccaagattgacccaggaagaaatttaaatcctgaaaagaccaataattagttccaaaattgaattagtaaaaaacaaaacaaaatgaacaaaacaaacaaaacacctaccaactaaaaaaagccctggatcatactgat

SEQ ID NO: 919629 - DNA, 600 bp, Homo sapiens
agcacaccagactggctacaacttaagaccagcctcacaaatcctttttcataattaaaactttacagagaatataaacattgatccttatcattcctagcctagtaaaatgtcttctaaaaggaaaacacaaacaaaaaataaataaacaacmaccacgcttaaaagtcaactcctgacctgatggagaaaaggaaagaaaaaaattttttttaatgcctgggaagaacctcttattcttatgcaaatgcgttcctccaccggggagagaaacttaattgctctccaatggggttgaaccccttggccaagggaggtgaagaggccatggatgcatagcattccccagccccagccgggatgggacggggaacggggagctgccgtttgcccgtccatccggaaaaaagaaggaaaaggccaaggaaaggctgggttggactgaggccgtcttttctgacccctgagcgtgacagtggtgggggcacagtttcctctagcctcagaagtctgaggttgagaaggtttagaaatgagagggaaaggccgggcgcggtggctcacgcctgtaatcccagcactttgggaggccgaggcggg

SEQ ID NO: 919630 - DNA, 600 bp, Homo sapiens
agcacaccagactggctacaacttaagaccagcctcacaaatcctttttcataattaaaactttacagagaatataaacattgatccttatcattcctagcctagtaaaatgtcttctaaaaggaaaacacaaacaaaaaataaataaacaaccaccacgcttaaaagtcaactcctgacctgatggagaaaaggaaagaaaaaaattttttttaatgcctgggaagaacctcttattcttatgcaaatgcgttcctccaccggggagagaaacttaattgctctccaatggggttgaaccccttggccaagggaggtgaagaggccatggatgcatagcattccccagccccagccgggatgggasggggaacggggagctgccgtttgcccgtccatccggaaaaaagaaggaaaaggccaaggaaaggctgggttggactgaggccgtcttttctgacccctgagcgtgacagtggtgggggcacagtttcctctagcctcagaagtctgaggttgagaaggtttagaaatgagagggaaaggccgggcgcggtggctcacgcctgtaatcccagcactttgggaggccgaggcggg

SEQ ID NO: 919631 - DNA, 572 bp, Homo sapiens
cctgactttttaatgatcgccattctaactggtatgagatggtatctcattgtggttttaatttgcatttctctgatggccagtgatgatgagcatttcttcatgtgtgtgttggctgcataaatgtcttcttttgagaagtgtctgttcagaccctttgcccactttttgatggggttgtttgtttttttcttgtaaatttgtttgagttctttgtagattctggatattagccctttktcagatgagtagattgcaaaaattttctcccattctgtaggttgcctgtttgctttgatggtagtttcttttgcagtgcagaagctctttagtttagttagattccatttgtcaattttggcttttgttgccattgcttttggtgttttagtcatgaagtccttgcccatgccaatgtcctgaatggtattgcctaggttttcttctagggtttttatggttttgggtctaacatttaagtctttaatccattttgaattattttttgtataaggtgtaaagaagggatccagtttcagctttctacatatggatagccagttttcccagca

SEQ ID NO: 919632 - DNA, 690 bp, Homo sapiens
aagatgaaatgatttgcccacaagccacccttttgcaatgtgaggtgctcggacctgagcccagttcactctctctgtctggaaaccctgttcctccggctgctgttctggaggagaggggagcgcctaggtcaggggcattgggaaaggctcccaggaggggcaagaaaccagcggtggaaggagcagcacgcagggaagtgggggtggggaaaacagtgctgagcaggtgagggaggcagaggaaggagtaggccccaccgcagaggcttcccctccagggccatcggggagcccctgaaggcttttgggcggaagatgactcgagtgatgctttaggtaagttactctggcaccatgacttgggaaatggcagatggagagataatcctccaaagccagcagggcagtcatacctccctccaaaccagaggaagctgaggtttagaaaaactgagtgggtcgcccagggtcccgcggctaagtgactcaggtgggactgaggcccaggtcttctcgttctcaaaccagcacactctccagggggtgggcaaggagataatttcaaatatagaagtgcacagcatacaatacrttcattccctccctccctcctcctaaaaacacgcatgttcagacaaggcatgtggcttagaccagagctgaccttggggactttgtggtggctgc

SEQ ID NO: 919633 - DNA, 615 bp, Homo sapiens
tagcttgccgactcctctgtttgccgggtgcctcccacggacccagagcttggagtttcttcattgcctggggtggggcagggtggcagaggggcatctctgctccctggccctggctgcagccagcagctccacccagggccctgaacttgggaggcgactgcagttccatgccttggctcccagcaccccagggaagtacatctgggctctggaacagcagaaacggcctcctgcaaatctcctacccgacacaggaccaagtgtgggaatgctctggtccaaggggctttctccaactctctggaccacagggagccggcaggatgggggmcagtccaccttcagattacacctttacctctgactcagacccctttgcctcccaggccaccatacgacgtctcctgcttgcagatctggccatgctggaggcaaaatggatccccagcccctcagttgtgacccttcctagcttgttaagttagtagaaaactcagctcacaatctcggggactgctcctcccctggttcatccacaaaccccaaaggttcatgggattcctaaaagcagcctgacaaatttccctcctgtggggagaagaccctgtggtc

SEQ ID NO: 919634 - DNA, 787 bp, Homo sapiens
tgtccttcagctcctataacactttattgttattcttattttccttggattgggttctgccattgtcctgagtcttgatgattttttttcctatccatattctcaattatatttatgtaattccagacagttcatccaggttaagaactcttgttggagaactggtgtggttgtttgaaggacatatgacacagaggccatttgagttactggagttcttgcattggtttcttctcatttccacctatgggttttcctttaattgcagtgtagattgagtacagtccgtagacttattttcagatgttttcaccaggctgaggctttgtgcaggttctttatttgaagctgacttctcatttctggtttcagaggggagtatattagtaaggtatttttggtgctgaagctttgggatgtgatccagtaggtggcacttgggcttactggtcagttggtagagtcttgcttggtcatgtggctcccctatgtttcctcacagttgcagccatgttcmctctcaatgatctgaaaatgtgcttctctcctccttgagtgctggctgtagatcatggcttggcactcctaggctgcccactgcagctctggggcaatctcagtgtttatatttcttccctaactttggggaagaagaggaagggacattagtagtggttgtagccaagggtcttttgtttgtctcctcagggttctacccccggagaatacaggtcagcaactgtttattgcaatcagcaagcaggatggagaattcatgctgtggggg

SEQ ID NO: 919635 - DNA, 536 bp, Homo sapiens
ggcagctggtaggtctcccaagaggcgtgaaacctagtagagtgggttatttatgcaaattacagagaaaccccatgttataagattacgtctcctgagctgtttcttttctgtccttgttggagaagctgagatggactcaattcagtttcttcattcattcatccatccrttcattccctctccaacacaatacctgctatgtaacagatattgtgcagggaaacagaaataaatctgaccctaattctggatctccagagatctaatggagggaacccagcttaagcttaaacctgtgattcaggacaataaagtgaaaggtgtctgttggtggagggccttacagtactccgggggctgcagggaaagagacagggaaggttgtctgaagcaaggggcaactaaactaggttgataaacagggaaaagcagaggaaggaggttccagtctgagaaaatacattgatcaaaggcaaagggctgtgagggtcaggggtcagaatacaaagctctagtgctggaggggagtgcct

SEQ ID NO: 919636 - DNA, 536 bp, Homo sapiens
ggcagctggtaggtctcccaagaggcgtgaaacctagtagagtgggttatttatgcaaattacagagaaaccccatgttataagattacgtctcctgagctgtttcttttctgtccttgttggagaagctgagatggactcaattcagtttcttcattcattcatccatccattcattccctctccaacacaatacctgctatgtaacagatattgtgcagggaaacagraataaatctgaccctaattctggatctccagagatctaatggagggaacccagcttaagcttaaacctgtgattcaggacaataaagtgaaaggtgtctgttggtggagggccttacagtactccgggggctgcagggaaagagacagggaaggttgtctgaagcaaggggcaactaaactaggttgataaacagggaaaagcagaggaaggaggttccagtctgagaaaatacattgatcaaaggcaaagggctgtgagggtcaggggtcagaatacaaagctctagtgctggaggggagtgcct

SEQ ID NO: 919637 - DNA, 564 bp, Homo sapiens
cagggggagctttctcattcccttctggagtcagtttctctatcccttattgacttggaaatatcctatttaaccacagaaatatcattaaactagaaactctcctctgccgtgaacttggaaagaactaatgcctgtggcacaattaaatgctgatcttagccttcaaatgctcattatgtgaaagaaaattgagtatggaatgattcccctgttaccgatcagtaacagatatgtgggtgtaggccaagtttcttgggattattcttgcagtacaaggaaaaagcaatctaaaggaagaaacccatacgagcrttcatgacagcctgacagatgctgggggtgaggtgtgacctgcccttttcccacagtggtggtggcttccttttgggtcaaggcaatattagggtaccatcttctctgaatttgccttattttacattccctagaaacaatccaaacttctaaaagactctcagacaaagcataacctgagaatgagcagatatgtcagctctgccctagcctaggccagtactcaaggcagcacaggcaaactcaatc

SEQ ID NO: 919638 - DNA, 627 bp, Homo sapiens
tgaaaaactacagaggttcctcaaaaaataaaaaatagaaccaccacatgatccagcaattccattgctgggtactcaaccaaaagaatcgaaaacaggatctggagaaggtaatagcactctcatgttcattgcagcattattcacaataaccaagaagtacaaacaacttgatgtccattgacagaagaacggacaggtcaagcaaaagtggtacataatacaatggaatattattcagccttaaaaaggaagaaaatcttgtcatgtgctacaatatggatgaaccttcaggacattacattacatgaaataagccagtcacagaaggacaaatactgtatggttccacctatatgatgtatttttaaaayagtcaaactcacagaagcagaaagtagaatgatgatgattgccagggtctgcggaaggggaaaaatggagagctgctatttaactatgcaagatgttatgcaagatgaataagttccagatatctgctggaaaacagtgtgtgtatggtaaataatactgtaatgtatacttaaacatttgttaagaaggtacatttaatgctgtgtttttttaccactatatatataaatatatatgtattattaaatatac

SEQ ID NO: 919639 - DNA, 717 bp, Homo sapiens
acatcccaaatccaaaacgtctcactacttccagcaccacagtggtcaagctgtccttatctctagcctgataaatgcacatattttaaaaatagcctcctaactggttttccaatttgtcctccctatgtttattctgccccagactccacagtgatccttttaagtggaaagtccaatggctcagcccagttcatgccctcagtggcttcctgtcactctcagaatgagctccctgtccttccttcctggccaggtccaggttccttctcagcttgctcaggtctcatcatargttctctcgggcactgtgctccggctcttcaaacacgctgggcatattcctgcatcatgacctttgcacattatcttggtccattcaggctgctagagcaaaatacctgacactaggaaatttacgaggtgcatgcagattcagtgtttggtgagggcccattcctcatagacggcaccttcgagatgccctcacatggcagaaaaagaaggcagctctctgggccctctttcatgagggtactaatcccattcatcaggtgaagctctcatgacccaatcacctcccaaaggctccaccttctaataccaacaccttggtgattaggtttcaacacaggaattttagggaaacgcaaacacagatcatagcacttgtgcatagcatataactatttcctctgcctgcaatcctattcccct

SEQ ID NO: 919640 - DNA, 717 bp, Homo sapiens
acatcccaaatccaaaacgtctcactacttccagcaccacagtggtcaagctgtccttatctctagcctgataaatgcacatattttaaaaatagcctcctaactggttttccaatttgtcctccctatgtttattctgccccagactccacagtgatccttttaagtggaaagtccaatggctcagcccagttcatgccctcagtggcttcctgtcactctcagaatgagctccctgtccttccttcctggccaggtccaggttccttctcagcttgctcaggtctcatcataggttctctcgggcactgtgctccggctcttcaaacacgctgggcatattcctgcatcatgacctttgcacattatcttggtccattcaggctgctagagcaaaatacctgacactaggaaatttacgaggtgcakgcagattcagtgtttggtgagggcccattcctcatagacggcaccttcgagatgccctcacatggcagaaaaagaaggcagctctctgggccctctttcatgagggtactaatcccattcatcaggtgaagctctcatgacccaatcacctcccaaaggctccaccttctaataccaacaccttggtgattaggtttcaacacaggaattttagggaaacgcaaacacagatcatagcacttgtgcatagcatataactatttcctctgcctgcaatcctattcccct

SEQ ID NO: 919641 - DNA, 548 bp, Homo sapiens
gagcttaattctccatacaagtgtgggctcttggaaagaaatttcttttttcaggtctaaaatctattttatctcccctaattaggagaatatgtaaagcaagacgggggaatggcattcaatttgccataaaaagcaaacctggtagtttataagaccacactttccaaacaagctccgacccattagaggggatcatacataattcaggagccacttgttactgcgtgtatcatgcaaattctctcaaattacatttggaaaaaatgaggttcatcttctagctttaaatagactattaagagaagggtagatatacaagccataaggaagcaaatgatttaagtagcctaaatcaagggagaccttgaatgaaagagtgaacacccctcaattctgagycccatgttaagatagaatccaacaggtaacaagttgcatttctgactgtctgctgtacaaagacatcagctttcatcaatagtgaagatctttcctttctgggcacttttatttctgagatcatctggatcatcttgccttcgagg

SEQ ID NO: 919642 - DNA, 677 bp, Homo sapiens
gctggagtagccaggatgcagcaagtgtcctgagattgagcaggagaacgggccctgggcctgccccctgaaaccattctttcctcctaggcctctggacttgtgatgggaggagctgtgttagaaatctctgaaatatctttgagatctttcttcccattgtcttggatrttaggacttggctccctttgagtcatgctaatctctctagcaagtggtcgctctacagcctgcttggattctttctttaccatagggccaggctgtaaattttccaaacttgtatgctctctttcccttttaaacataagttccaactctaagttattcttttgctccctcctctgattgtaggctgttagaagcaactattccacttcttgaacacttaggacacaagccataagccttgccagcatccatgtggtggtaagcctgtaggggcagattgctgtctagaaatttcttccactgggtaccataagtcatcactctcaagttcagacttccacaaagccgtaggacatggagacaatgcagccaagctctttgctagggcataactagggtgagcttccctccagttcccaatagcttccacatttctatctgagaccttgtcagcctggaattcaccgtccatatctctaccagaattttgctcacaatcacttaac

SEQ ID NO: 919643 - DNA, 677 bp, Homo sapiens
gctggagtagccaggatgcagcaagtgtcctgagattgagcaggagaacgggccctgggcctgccccctgaaaccattctttcctcctaggcctctggacttgtgatgggaggagctgtgttagaaatctctgaaatatctttgagatctttcttcccattgtcttggatgttaggacttggctccctttgagtcatgctaatctctctagcaagtggtygctctacagcctgcttggattctttctttaccatagggccaggctgtaaattttccaaacttgtatgctctctttcccttttaaacataagttccaactctaagttattcttttgctccctcctctgattgtaggctgttagaagcaactattccacttcttgaacacttaggacacaagccataagccttgccagcatccatgtggtggtaagcctgtaggggcagattgctgtctagaaatttcttccactgggtaccataagtcatcactctcaagttcagacttccacaaagccgtaggacatggagacaatgcagccaagctctttgctagggcataactagggtgagcttccctccagttcccaatagcttccacatttctatctgagaccttgtcagcctggaattcaccgtccatatctctaccagaattttgctcacaatcacttaac

SEQ ID NO: 919644 - DNA, 677 bp, Homo sapiens
gctggagtagccaggatgcagcaagtgtcctgagattgagcaggagaacgggccctgggcctgccccctgaaaccattctttcctcctaggcctctggacttgtgatgggaggagctgtgttagaaatctctgaaatatctttgagatctttcttcccattgtcttggatgttaggacttggctccctttgagtcatgctaatctctctagcaagtggtcgctctacagcctgcttggattctttctttaccatagggccaggctgtaaattttccaaacttgtatgctctctttcccttttaaacataagttccaactctaagttattcttttgctccctcctctgattgtaggctgttagaagcaactattccacttcttgaacacttaggacacaagccrtaagccttgccagcatccatgtggtggtaagcctgtaggggcagattgctgtctagaaatttcttccactgggtaccataagtcatcactctcaagttcagacttccacaaagccgtaggacatggagacaatgcagccaagctctttgctagggcataactagggtgagcttccctccagttcccaatagcttccacatttctatctgagaccttgtcagcctggaattcaccgtccatatctctaccagaattttgctcacaatcacttaac

SEQ ID NO: 919645 - DNA, 713 bp, Homo sapiens
ttattacaaagttatagcaatgaagacaaggtggtataatataaggatagaaataaagcttagtggaacacagtagggagttcccaaacagacttacactgaggccaatttactttcaacaaatgtgccaagataaataaatggggatagaaagtcttttcaacatctgatactgaacaactaaataaatgtatggaaaataatgaaccttaacattttcttcacatcattctcaaatgtaatctgagaaggattgtaagtctacatgtaaaaattgaagttgtaaacattctactgtaaaatattgtgaaatatatttatgactttggattgacaaatattttgagaaccaattgaaaataaccttgtcatataagaaaagaaataataaataaaatcttatcaaaaaaagtattaaaacccaataaawtattggtaatgcatacatctgataacttatactcaaaatatatgaaacaaaaactcttacaagtcaacaatgtaacaactaacccccaaataaaaatggtgaaaagactaaaacagacattttagaataaaaagtgtaagaattgaaagaccttaaaaagatgtttaacatcattagtattcaagaggattcaaattcaaattaaaatgctttaccctttcacatctattataaagaataaaattcaaaaaactgacatcagcaaatgttggtacagatataa

SEQ ID NO: 919646 - DNA, 656 bp, Homo sapiens
agtattaaaacccaataaattattggtaatgcatacatctgataacttatactcaaaatatatgaaacaaaaactcttacaagtcaacaatgtaacaactaacccccaaataaaaatggtgaaaagactaaaacagacattttagaataaaaagtgtaagaattgaaagaccttaaaaagatgtttaacatcattagtattcaagaggattcaaattcaaattaaaatgctttaccctttcacatctattataaagaataaaattcaaaaaactgacatcagcaaatgttggtacagatataaagtatcttgaaatctcagaaattacttatgggagtataataagatacaactactttggaaaactgaactttcatataaagttaaacattatatacagtcacycttaatactgacatttccctctcaaatttattaaaaagtaacggaagtatatttccaaaaaatctcacacgcacacacacccacacacacacacacagagagagagagagagagagagagagacagaattttgatagtggcttatttcacataatagccaaaaaatgaaacaacccattctacacttgtcgatcaagtgtagaatgggtaagcaaattgattgttcatacaatggaatgctacttaacaat

SEQ ID NO: 919647 - DNA, 748 bp, Homo sapiens
aaacaagaggaatgagaccccaaagcattatgatgaatgaaagaagccaggaaaaaagtagctactctgattttatttatagaagtccaaataaagatacactgatctatagggatagataagagagtagtggctgtccataaggaggggaattgattgaagaagtacacaaaggaactttcaggagtgattgaaatgtactatatctggattgggtattgattacagggggtayatatttgtaaaactcatttgaattatacacgagatctgtgcaccttactgtacaaacattaccttaattggaaaataggaatacagaagcaatattcatagataagtaatggtcaaaaagcagatacaatttaaatgactgtcataggagaataaacagagtgagtaaattgtaataaaatcattcaatatatattcataaaaaataagagtgaacaaattgtatcttcaaagtacaataactaaatcttagaaatatagaaaaatagaagatagacataaaataaaacatgcactattattctatttgtattacatttaaaaaaggcaaaactaattcaggatgttaaaaatcagcattgtgattacccttgagcaggacagtaaatggaacgaaaaacaaaaaaagctattggggttctggttatattctgctttttgaaccaggtgatgactgcatgggtttattctcttggtgaaaattcagtgagatgtataaactaataatctgtat

SEQ ID NO: 919648 - DNA, 715 bp, Homo sapiens
tgagaacactgaagtggcccagggagagatctatgtggagaaaagcagaggcctcccactcactgccagcacagacaagggagtgaccaagctttaaaaactgatctttccgccctagcaaagccttgtgatgactgcaatcccagctagcagcttggctactactgcaagagtgactccaagtggaacctgcctagccaagctgcttctgaattcctgttccacaaaagctrggagtaataataaatgtttattgttttaagttactagattttggggcaactggtttcgtagcaatagataactaatgagagcatataaattaggattaggtttggctgcgtgagacagactgccctcatctccccttcctgcaaagaaagaagatagatctttatttctctctcatttaagaaatctagagtcacaatttttggctggtatggttctccaaaggtgtcagagactcaagctatttttctgttatttttctgctattctcagtatatggctctcatttagtggtccaaaatggctgctcaaaccccagccatcacatcctcattccatccaacaggaaggaagaaataaggaggaacacaacacctccattatggacatttcccagaagtcacatttgacacctctgtttatataccactggtcagaacatgggtatatggccatatatagctaccaggaaggctggcaaata

SEQ ID NO: 919649 - DNA, 715 bp, Homo sapiens
tgagaacactgaagtggcccagggagagatctatgtggagaaaagcagaggcctcccactcactgccagcacagacaagggagtgaccaagctttaaaaactgatctttccgccctagcaaagccttgtgatgactgcaatcccagctagcagcttggctactactgcaagagtgactccaagtggaacctgcctagccaagctgcttctgaattcctgttccacaaaagctgggagtaataataaatgtttattgttttaagttactagattttggggcaactggtttcgtagcaatagataactaatgagagcatataaattaggattaggtttggctgcgtgagacagactgccctcatctccccttcctgcaaagaaagaagatagatctttatttctctctcatttaagaaatctagagtcacaatttttggctggtatggttctccaaaggtgtcagagactcaagctatttttctsttatttttctgctattctcagtatatggctctcatttagtggtccaaaatggctgctcaaaccccagccatcacatcctcattccatccaacaggaaggaagaaataaggaggaacacaacacctccattatggacatttcccagaagtcacatttgacacctctgtttatataccactggtcagaacatgggtatatggccatatatagctaccaggaaggctggcaaata

SEQ ID NO: 919650 - DNA, 560 bp, Homo sapiens
aaaggaatttttttaaagagatggggtctcactctgttgcccaggctggagtgcagtggtgtgatcatagctcactatggtctcaaactcttggccttaaccaattctctcacctcaacattccaagtagctagaactacaggtgcacaccaccacgtctggatagttttaaaatttttgtagagatggagtctgacyatgctgctcaggctagtctcaaacttctggcttcactcaatccaactgcctcagcctcccaaagcactgggattacaagcatgagccactacctccagccaaaaaaaaaatggaatttgaaaagctcagtgaacttctgaatgaaaggcacttgctgatacagaggttcctccagtgatacaaaacacgttaaatgatgaactattcttgatcagggatctgtccatcaaagaagatagacttctatttattaaaccacccaatctaacaaagaaaaaccagtgcatgcttcagtttggctaatgtgtggcactttcaaaaccatccccaccattttttgccaattgcatatgattcatccc

SEQ ID NO: 919651 - DNA, 631 bp, Homo sapiens
gacagagtctcactctgttgctcaggctggagtgcagtgatgtgatctccccttactgcaacctctgcctggaggttcaagcaattgggttcaagcaattcttgtgcttcaacttcccaagtagctgggactacaagcgcacaccaccatgcccggygaattatttttgtatattactagagacagggtttcaccatgttggccaggatgatcttgatctcctgaccacgtgttccaaccacctcgacctcccaaagtgctgggattacagatgtgagccaccacgcctggcctgatcataatttcttatgttaccacctctagggaagattcttattttgactggaaccttctggaaacagtgctcaatgcaaaggaaccggtgtcccttcatcctatcatgtcagtggcgttggtcttagctctcccccctgttggactcccttagagaggcagtgtggggagccggccccgtcaggtccaccaagagcagactcggtctgtgtaactcagattgggcgttggcctggagtgtagttcattgggacaggggagaaaatggagctgaccacatagatgatggtgtgacagactgtccatcttgcagaaggaagactgaggcatagagaca

SEQ ID NO: 919652 - DNA, 631 bp, Homo sapiens
gacagagtctcactctgttgctcaggctggagtgcagtgatgtgatctccccttactgcaacctctgcctggaggttcaagcaattgggttcaagcaattcttgtgcttcaacttcccaagtagctgggactacaagcgcacaccaccatgcccggtgaattatttttgtatattactagagacagggtttcaccatgttggccaggatgatcttgatctcctgaccaygtgttccaaccacctcgacctcccaaagtgctgggattacagatgtgagccaccacgcctggcctgatcataatttcttatgttaccacctctagggaagattcttattttgactggaaccttctggaaacagtgctcaatgcaaaggaaccggtgtcccttcatcctatcatgtcagtggcgttggtcttagctctcccccctgttggactcccttagagaggcagtgtggggagccggccccgtcaggtccaccaagagcagactcggtctgtgtaactcagattgggcgttggcctggagtgtagttcattgggacaggggagaaaatggagctgaccacatagatgatggtgtgacagactgtccatcttgcagaaggaagactgaggcatagagaca

SEQ ID NO: 919653 - DNA, 631 bp, Homo sapiens
gacagagtctcactctgttgctcaggctggagtgcagtgatgtgatctccccttactgcaacctctgcctggaggttcaagcaattgggttcaagcaattcttgtgcttcaacttcccaagtagctgggactacaagcgcacaccaccatgcccggtgaattatttttgtatattactagagacagggtttcaccatgttggccaggatgatcttgatctcctgaccacgtgttccaaccacctcgacctcccaaagtgctgggattacagatgtgagccaccacgcctggcctgatcataatttcttatgttaccacctctagggaagatkcttattttgactggaaccttctggaaacagtgctcaatgcaaaggaaccggtgtcccttcatcctatcatgtcagtggcgttggtcttagctctcccccctgttggactcccttagagaggcagtgtggggagccggccccgtcaggtccaccaagagcagactcggtctgtgtaactcagattgggcgttggcctggagtgtagttcattgggacaggggagaaaatggagctgaccacatagatgatggtgtgacagactgtccatcttgcagaaggaagactgaggcatagagaca

SEQ ID NO: 919654 - DNA, 563 bp, Homo sapiens
agcaggctgcaagctgggaggagcagggtcaggagagagggaccccaggcagaggggactgaattggcatagtgctggcccactcatggctttgcctcttgccaagactcttggcccccagcttctaacagcacgagattcacccccaaattaaaactaaataaatcacggtaataacagtgtgaagtgcatcattgctggygtgtggcagctctctgggggtggaaacaaggagcaggaggcagcaggttaacccttggaggctgacttgtctggagagctggggagggaggtgggacaagggcaggttagtggctgtccccaagccagggtggagtgagggaagtttggagtgtcagcagtcatggtggcccacccagctggctaaagaatgtttggggttggaagacgtcgcctgatcttcagggccccttctccagtcccctccaccccctgccgattagccctgagcacagtggccatgtggctcctgcccccacaatgcttctttagacccctgaggaaatgggctactgtccatgtcatggttctgaggggtgtcc

SEQ ID NO: 919655 - DNA, 563 bp, Homo sapiens
agcaggctgcaagctgggaggagcagggtcaggagagagggaccccaggcagaggggactgaattggcatagtgctggcccactcatggctttgcctcttgccaagactcttggcccccagcttctaacagcacgagattcacccccaaattaaaactaaataaatcacggtaataacagtgtgaagtgcatcattgctggcgtgtggcagctctctgggggtggaaacaaggagcaggaggcagcaggttaacccttggaggctgacttgtctggagagctggggagggaggtgggacaagggcaggttagtggctgtccccaagccagggtggagtgagggaagtttggagtgtcagcagtcatggtggcccacccasctggctaaagaatgtttggggttggaagacgtcgcctgatcttcagggccccttctccagtcccctccaccccctgccgattagccctgagcacagtggccatgtggctcctgcccccacaatgcttctttagacccctgaggaaatgggctactgtccatgtcatggttctgaggggtgtcc

SEQ ID NO: 919656 - DNA, 690 bp, Homo sapiens
aaatacaaattttattacacttgtatccaccagcttgagcttgacagcttgccagtacttaaagacttttctagtaaaagaagcattatattaacaatttatttttgactatataatgaaatatgtcaacatttttgtgatctttacaacttagtggacacctatttttcaaatggccagtgggtgccattacaaaggcaaaaagcctctggtatgtgcaagatagattgatggatttcagtgcttaattgatgtggtttcagattcagtccacactgcaatgaaggctaagaaactaccacatgtaagtttggtaccgtatcaaagaataatatctagaactatctggaaaggctrtaaagtagttttcccttttccaacaccttatctttatgagatcagatttccctcatatatttcaaccaaaacatatcacaacagatcgaatacacagaaaactcatgatcacaaagaaggaaacgtcagtcactgtggtctacttgagggtggagggtggaaggagggagaggagcagaaaaaattattgagcactgggcttaatacctggatgatgaaataatctgtacaacaaacccccatgacatgaatttatctatgtaacaaaccttcacatgtacccctggacctacaataaaagttggaaaaaaataaagaatacatagataggag

SEQ ID NO: 919657 - DNA, 582 bp, Homo sapiens
ctttttcctcccaatttttctaaaacacatactaaattatggggctctacgtcacctatggaataaagtcaaaataccttaaagtagcaggcaaggcctctcataatcaaatattatgtacaattttttttaaattagcaggatttaaaacacttactttgattgttcacaaatttagacaataatcaattctatcagtaaatgtgtaatgataatttagtatatttaggactaagacmggtacaactgtttttgtgcttctagaatttattaaggtttgaaaaattgttagctgacaactttaagattcagggattgaatactgactttttttctttctctaagaaactaatagttcattataacttcagaattccaattaaagtgatggattgtttgaaaagaatattactcaaaaagtctgaattataaattgagtcagtatctgatgctttacacaaaggttttatttggtgccaaatagtttctctggcttgcatgatttaataatgtcactcaaattatttctgagactgtaaggactaaggtttcaaggatttttccctcaatgtatggtacata

SEQ ID NO: 919658 - DNA, 568 bp, Homo sapiens
gtggcccaggggttgaggacccctgctgtaagattataatggagctgaaaaattcctgtcacctagtgactttctagccaatataacactgtagcacaataccattactcatgtgtttgcagtgatgctgctgtaaacaaacctactctgctgccagtcatataaaagtataacataaaattatgtacagtacataatacttggtaatgataataaatatgttactggttcatgtgcctactatactatactttttatcattactttggagcatatgccttatttatttaaaaaaagttaactgtaaaacagcctcaggtccttcaggaggtattccagaagaaggcattgttatcatagaatgtgatagctctgtgtgtgttattgtccctgaagatcttccagtggrgccagatgtggaggtgaaagccagcaccaatgatcctggacactgtgtaggcctaggctaatgggtgtttgtgtcttaatttttaacaagaaagtttaaaaagttaaaaaatttttaagaagatagcttatagaataaggatataaagaaaaaatattt

SEQ ID NO: 919659 - DNA, 586 bp, Homo sapiens
gttaacagctcttaaggcagcgcgtctggagttgttcgttcctcccggtgggctcgcggtctcgctggcttcaggaatgaagctgcagaccttcgcagagagtgttacagctcataaaggcagtgtggacccaaaaagtgagcagtagcaagagttagtgcaaagagcgaaagaacaaggctaccacagcgcaaaagcggaccggagcsgattgctgctgctgtctctggcagcctgcttttattatcttatctggccccacccacatcctgttgattggtagagccgagtggtctgttttgacagggtgctgattggtgcgtttacaatccctgagctagacacaaaggttctccacctccccaccagattagctagatacagagtgtccacacaaaggctctccaaggccccaccagagtaactagatacagagtgtcgattggtgcactcacaaaccctgagctagacacagggtgctgattggtgtgtttacaaaccttgagctagatacagagtgccgattggtgtatttacagtccctgagctagacataaaagttctccacgtccccaccagactcagg

SEQ ID NO: 919660 - DNA, 763 bp, Homo sapiens
ggcccttccaaccctgctctgggttcccgtaagccttcctcagccaggataggtgtgatagaactacatgctcagaggaagccaggcctgtgatgtatgggacacggaggagctgggtgaactcttaaggagtcttctttaattactaaattctctaagttaagcaggaacaatgaggacacaaagcacttaatcagaaatacacaagccttgaaggctgacaaacagaatggagtgatggctcccaaagagggctagctcaagtctctgcaggacaggctgaacctccctcagggctactcttaccttccatcctactaggattcccaaggtagggaatagctgggcggcttctatccaagttgcttctgcctaattcactcttgcctggtgaggctcagaatttgagggtagttggccgggcatggtggctcacgcctataatcccagcactttgggaggccgaggcgggtggatcackaggtcaggagattgagaccatcctggctaacatggtgaaaccccatcttcacaaaaaatacaaaaaaaaaaaaatagccggacatggtggtgggcacctgtagtcccagctactcaggaggctgagacaggagaatggcgtgaacccaggaggcagagcttgcagtgagccgagatcacgccactgcactctagcctgggcaactgagcaagactccgtctcaaaaaataaaaaataaaaaataatttgagggaagtttaggggtctatcccaaaggcttga

SEQ ID NO: 919661 - DNA, 669 bp, Homo sapiens
cttgagcttccctggtttccgacaccatctttactgtccacgtgagcatagctgctgtccagggccagcccagcacaggcacagcagtgggtgacagtcccagaaggggatcccccagttggcctcagggtctctgagtgtaccaggtcagccggacccagaaagggccaaggagggctggtcgctgttggttgcaaactcctgaagctgcttttgacgtgtggtggcacctgggctggaaattggaaaaacacgcgggttcgtttctggacccacagtccgcctcgctcttttactttagaaggaattgctccaagcagagtctacacaggtttcccctgtggcttttcttcagagagcgtgttgaccccagctagtgtcacggttctcacwctgtgatctcagggccgttgacattccccaggattacggaggacctcagagagctttcccttttgaaactcactgttgcagagtccagacacaaagtggatcttagaagtctagaatgtgaagctgactttgggttgatctggaggtagtgatccttggaaaatttggaaataacctggcaaatgtcacctcgtgagctggcagcgttttgtgacaaaatgacaaaggctgtgacagaagggtccagactgacccctgcgacgcagccagggaagt

SEQ ID NO: 919662 - DNA, 706 bp, Homo sapiens
cagggtgtggttccgcaggtcacccttggtcctggaaggtcgtgtggagtgtgcgtctgataaggagacacagcctgttgtgagtacggatttggaggtcagggaatggagggtgtgcgcttaatctttctctcactctctttctctctctgtctctttctctctttctcgctctctctctctttctctctttgtggtcttgtctttttctcctctctgtctcttttctctctctctctttctccttccttyctttctttcttccttcttcaagagacaaagtcttactctgttgcccaggctggaatacagtggtgtgatcacaccttattgcagcctcaaactcctgggctcaagtggtcttcctgcctcagcccccctagtagccaggattacaggcgtgcaccaccgtgccgggctaattaaatttttttttctttttttagagatggggtcttgtcatgttgcccaggttggtcttgaactcttggcctcaagagattctcccacttcagcttcctgagtagctgggattataggtgtgagccactgtgccaggctgagctgcttaatttctgtatttctactgctcagcaggattcggttactgctgcttaatgtatttgtgattgggagatgcctaatgttgagccttattcagttgttaagaccctgacgagacgcacagcggtgacaaatggtctgc

SEQ ID NO: 919663 - DNA, 614 bp, Homo sapiens
ctcacacctgtaatcccagcactttgtgaggccgaggctggcagatcacgagatcaggtgttcaagaccagcctggccaacacagtgaaacctcatctttactaaaaatacaaaaattagctgggtgtggtggcatgcgcctgtagtcccagctactcaggaggctgaagagggagaatcacttgaacccaagaggcggaagttgcagtgagctgagaccatgccattgcactccagcctgggtgacagaatragactccgtctaaaaaaaaaaaaaaaaaaaaaaaaaagaaagaaagaaaacatctctcaggtgatgaacgggccagattccaatgcctataagtggattacttgcagctctaaaacaagcatacacactacagtagaccagcttacatgagccactttaactcatatcctgtcccatgagtactgtcctaagcagcatgtttagccgtgtttcccaggagaatccagggttcctgtttaagaattccaagaacatactttctcctgacacaaccctggcagtgggattacacttctccctctccccacatacacagagctatggaaaccaggacacccaatcaggtgagaaaaaggacttg

SEQ ID NO: 919664 - DNA, 614 bp, Homo sapiens
ctcacacctgtaatcccagcactttgtgaggccgaggctggcagatcacgagatcaggtgttcaagaccagcctggccaacacagtgaaacctcatctttactaaaaatacaaaaattagctgggtgtggtggcatgcgcctgtagtcccagctactcaggaggctgaagagggagaatcacttgaacccaagaggcggaagttgcagtgagctgagaccatgccattgcactccagcctgggtgacagaatgagactccgtctaaaaaaaaaaaaaaaaaaaaaaaaaagaaagaaagaaaacatctctcaggtgatgaacgggccagattccaatgcctataagtggattacttgcagctctaaaacaagcatacacactacagtagaccagcttacatgagccactttaactcatatcctgtyccatgagtactgtcctaagcagcatgtttagccgtgtttcccaggagaatccagggttcctgtttaagaattccaagaacatactttctcctgacacaaccctggcagtgggattacacttctccctctccccacatacacagagctatggaaaccaggacacccaatcaggtgagaaaaaggacttg

SEQ ID NO: 919665 - DNA, 602 bp, Homo sapiens
ccttatggtcctgggcattttttttggttggtaggcgatttattactgcctcaatttcggaactcgttatggttatttagtgattcactttcttcctggttcagccttgggagggtgtaggcatccagaaatttatgtgtttcttctagattttctagttcatgtccatagagatgtatatagtattctctgatggttgtttgtatttctgtggggtcattggtgatattccccccttaccatttctgattgtgtttatttaaatattatctcttttcttctttattagtctagctgrtggtttattttattaattttttcaaaaagccagctcctgcatttgttgattttttgaatatttttttgtgtctctatctccttcagttccactctgatcttgattatttcttatcttctgctagctttgggatttgtttgctcttggttctctagttcttttagttgtgatgttaggtcatttcatttgagatctttcttgttttttttttttttttatgtgagcatctagtgctataaatttccatttttacactgctttaggtacatcctcgaggttcttgcattgtctctttgttctcatt

SEQ ID NO: 919666 - DNA, 608 bp, Homo sapiens
tggtcctgggcattttttttggttggtaggcgatttattactgcctcaatttcggaactcgttatggttatttagtgattcactttcttcctggttcagccttgggagggtgtaggcatccagaaatttatgtgtttcttctagattttctagttcatgtccatagagatgtatatagtattctctgatggttgtttgtatttctgtggggtcattggtgatattccccccttaccatttctgattgtgtttatttaaatattatctcttttcttctttattagtctagctgatggtttattttattaattttttcaaaaagccagctcctgcatttgttgattttttgaatatttttttgtrtctctatctccttcagttccactctgatcttgattatttcttatcttctgctagctttgggatttgtttgctcttggttctctagttcttttagttgtgatgttaggtcatttcatttgagatctttcttgttttttttttttttttatgtgagcatctagtgctataaatttccatttttacactgctttaggtacatcctcgaggttcttgcattgtctctttgttctcattagtttcaaaga

SEQ ID NO: 919667 - DNA, 590 bp, Homo sapiens
ctggctcgtgaactgtagctaggcggccggctgcattgccttgattaccggacaggtcagctctgcctgtgggggcggcagggggtggtcagggtgtagcaggtcctgcaaacaagaggtctcctggctggggtggacactggccccccaggcccagatcttgttcctggcacgttgcgatcttccgcctccctttttccatccctccctctcccaagtggtctttgccatccttatatccacctctcatcaccctacggccacttcatcttggcacacagtgtatgacacctgaatgcccgaccacttacctgcttttcttttttcttttctttttttttttttttttgagacagagtttygctcttgttgcccaggctggagtgcaatgctgtgatcttggctcaccacaacctccgcctcctgggttcaagcgattctcctgcctcagcctcccgagtagctgggattacaggtgcacgccaccatgcctggctggctacttttctgtatttttagtaaagacggggtttcaccatgttggccaggctggtctcgaactcccgacctcgggtgatccacctgactca

SEQ ID NO: 919668 - DNA, 664 bp, Homo sapiens
tacaggggccacgccaccatgccaggccaattttgtttattttttgtagagatgaggtttcactatgttgcctaggctgctctcgaatccactttcctggattcaagcgatcctcctgccttggcctcccaaagttctgggattataggcgtgagccaccaccatgccaggcacctcaatttttttttttttttttttttggagacagagtttcactctttttgcccaggctggagtgcaatcgtgcgatctccgctcactgcaacctctgcctcctgggttcaagcaattcttcttcctcagactcctgagtagctgagaktacaggtatgtgccaccacacctggctaattttgtatttttaatagagacggggtttctccatgttggtcaggctggtctggtctcgaactcctgactgcaggtgatccgccggcctcggcctcccaaagtgctgggattataggcgtgagccaccgcacccaaccacctcagttttttttgttaagtacagtacattaggtaaaaacgaaggaaatctgaataaagtagggaatttagtcattacaaacaaaacaaaactgcttcttaagtggttcagggaggttggttctctgaaggtgtctctaggttgactcatcctctctaagggaaaacagagggc

SEQ ID NO: 919669 - DNA, 788 bp, Homo sapiens
cctaggccctggcagcctcctcctccctgccctgaggccccagcactgcccccttcctgcttccacccctgcttctgactgttccagaaccctctgtggctgcttctcatgtcactcagggcccacatcctccccatttcctgcccttctgtttgctcctgtgtcccctgggcacagggcctttgcacgggactgtcctcctgacccctgctggtccagaatgttctttcccaaggtggctggctccctcgtctctcaggcccttcctgaatcttcagtgtccttctctcaccttccctgaccacctcttcattcacctcctcacgagcccgccctgtttctggtttctttttcttttttttgagagtctcgatctgtcgcccaggctggagtgcagtggcgcgatctcagctcactgcaacctccgcctcccaggttcaagcgattctcctgcctcagccttctgagtagctgggattacaggtttgtgccatcacgtccggctaatttttgtatttttaatagagatggggtttcaccatgatggccaggttttgaactcctyatctcaggtgatccgcccacttcggcctcccaaagtgctggggttacaggcatgagccactgcgcctggcctggtttcttctttttacagcatttatgcatttgatatgcatatgcttgtggctggctcactcctgtggaacggaaggattgccggggctgtgtcaccagcacctgggacaaggcaagtggccctagtgccaggctcgtgccaggccctgggc

SEQ ID NO: 919670 - DNA, 654 bp, Homo sapiens
tccttatcctctaaggctccggtgccttccgtcttcccccaccccgaccatcctcagcacatgggccgtgtctccccccatggttcccactggctgccacatttacagccacatccagaggtggaaaagtggtgaatcactattctaaaaaaaagtagtgaatcactattctataaaactttttaagagtgaggaaaacttccccagaatcccaccccaacccctcagcccccagcacactgctcagcaataagtggtctatcacaggtccttggccacagcaaccagaggccaaaagaatgaaattaagggggaggagccaagatggctgaataggaacagctctggtctacagctcccagcgtgagagacgcaaagacgggtgatttctgcatttccatctgaggtaccgggttcatctcactagggagtgmcagacagtgggtgcaggtcagtgggtgcgcgcaccgtgcgcgagccgaagcagggcgaggcattgcctcactcgggaagcgcaaggggtcagggagttccctttccgagtcaaagaaaggggtgagggacagcacctggaaaatcgggtcactcccacccgaatactgcgcttttccgacgggcttaaaaaacgtcacaccacaagattatatccagcac

SEQ ID NO: 919671 - DNA, 593 bp, Homo sapiens
tttaattattttgaggatatctcagatatggacttgctgaatcatatggtaattctatttttatttatttattttgagacagtgtcttgctttgtcacccaggctggagtgcagtggcatgatcacagctcactgtagccttgacctcccaggctcaarcaatcctcttgcctcagcctcctgagtagctgggactacaggcgcatgccaccagatccagttaatttttgtattttttgtagagatggggtttcgtcatgttgccccgactggtctcgaactcctgggctcaagcaatcctcctgcttctgcctcccaaagcgctggaattataggcgtaagccaccatgcccagcctattttcacttttttgaggaatcattatacggttttccacagtgtctgtaccattttacattcccaccaacagtgcacaagggttcaatttccccacatccttgccaatgcttgtagtttctttcttttccttttttttttttctagtggccatcttaatgggtatatgacgtagtatctcattgttctttatctcattgtgatttgtgtttctctaatgattagtgatgttgagt

SEQ ID NO: 919672 - DNA, 598 bp, Homo sapiens
acaaaaaaagctactagaactaataaatgaatctagcaagtgtgtaatataaagtttgacaaagatcaattgtacttctgtatgtaatcaatgaacaatcagaaattgaaattaagaaagcataactatttataatatcataagaatgttaaatactcggttggggggaggtgggagggatagcatyaggagatatacctaatgctaaatgatgagttaatgggtgcagcacctgagcatggcacatgtatacatatgtaactaaccggcacattgtgcacatgtaccctaaaacttaaagcataataataataataataaaaagaaaaacaaaaacaaacaaaaaagaatgttaaatactcagagatgcactttactaatgacatgaaagccctacgatactgaaaactgttacacatttatgggaggagttaaagatttgaaaaaacagggagttatcaaaagactaaatactgttcaggtatcatttctccccagattatctatagattcagcacaatcccaatagcatcaaagtttttcccagaaattgaaaaactgattttaaaatcattatggaaataaaatggacctaggc

SEQ ID NO: 919673 - DNA, 598 bp, Homo sapiens
acaaaaaaagctactagaactaataaatgaatctagcaagtgtgtaatataaagtttgacaaagatcaattgtacttctgtatgtaatcaatgaacaatcagaaattgaaattaagaaagcataactatttataatatcataagaatgttaaatactcggttggggggaggtgggagggatagcatcaggagatatacctaatgytaaatgatgagttaatgggtgcagcacctgagcatggcacatgtatacatatgtaactaaccggcacattgtgcacatgtaccctaaaacttaaagcataataataataataataaaaagaaaaacaaaaacaaacaaaaaagaatgttaaatactcagagatgcactttactaatgacatgaaagccctacgatactgaaaactgttacacatttatgggaggagttaaagatttgaaaaaacagggagttatcaaaagactaaatactgttcaggtatcatttctccccagattatctatagattcagcacaatcccaatagcatcaaagtttttcccagaaattgaaaaactgattttaaaatcattatggaaataaaatggacctaggc

SEQ ID NO: 919674 - DNA, 758 bp, Homo sapiens
gctgagctgggaggagtttggggccaggagtttgaaaccagccagggcaacatagtgagaccccgtctctaaaatgtaaaaaaaagaaaaagaaaaaaaacttgatgctggcccagagaaggagggatccaaacagaggtcaggccagagcttcaacggcacagcctgttctccttactgactgtggaaatactgccttctgttttgccagtatttctgtttataagattttttcacatgtatgacttcaatcacataacaacacttattcccattaaacaggtggcaaaactaaggttcaaagaggtgatgtaacctacccaaggttgtacaactaagggggaagaaccaggattcacaaccaagtgtgtctggctctttagccactgctatggtgccacacaacaatcttccaaggaattgttgtccccttttataggcaggcaagccagcactcagactcactgggccaaggttatcattaaagggcagagtcagtatttgaacacmggcccctctgctctactgcctcatagcaaccttattctttcttactgaagcagctattttttcaactttaagaaccaagccatgattcccttctgagaggggcctaactctgagaagggggcggtggttgcacagacgggtcttggttggccagtgagttcactggcaccttctcactgcttggtccaggctctgaagtctgctggccctgggagccccgggagccgggagattgggaggacagcagg

SEQ ID NO: 919675 - DNA, 566 bp, Homo sapiens
tagctttcaataaaaattttaagtaggtgggatgaagatccagaaggattttttttctaagaattttagcaggaaatgaaacatagctttaccagtatgatcctgaagacaaagcaatggctttgtaaaagtggtaaaagtggttcagtcaaacaaaaattgatagatcaagagcaartgtcatggcaacagttttttgggatgcttaaggcattttgcttattcactttctgaagggccaaagattgataatgtctacttgttattagagtattttgagaatgttagccaaagctttagcagaaaaacgcccagggaagcttcaccagagaggccttctccatcacaacaatcctcctgctatttttctcatcaaacaaaggtaattttgtgaaagttttgatgggaaatcattaggcacacaacctatgtttctgatttggcttcttctgacttctttgtttttaatcttaaaaactctataaagggtccaggcacggtgactcatgcctataatcccagcactttgggaggccgaggaaggtggatcacttgaggtcaagagc

SEQ ID NO: 919676 - DNA, 656 bp, Homo sapiens
  misc_feature 573, 574, 590, 597: n = A,T,C or G
gagtggaagccccaagtcttggcagcttccatgtggtgttgagcctgtgggtgcacagaagtcaagaattgaggttggggaacctctgcctagatttcagaagatgtatagaaacacctggatgcccaggcaaaagtttgatgcaggggtggggccctcatggagaacctctgctagggcaatgcagaagggaaatgtggggttggagcctccacacacagtccctactggggcactgcctagtggagctgtgagaagagggccaccatcctccagaacccagaatggtagatccactgacagcttgcactgtgcacctagaaaacctgcagacactcaatgccagccagtgaaagtaaccaggagggaggctgtrtcctgcaaagccacagaggtagggctgcccaagaccatgggaacccacctcttgcatcaccatgacctggatgtgagacctggagtcaaaggagattattttagagctttaaaatttgactgccatgctatattttggatgtgcatgggccctgtaattcctttgttttggccaatttctcccatttggaaggggcnntgtatttacccccaantacctgntaccccccaattggtatctaggaagtaattagctggcttttgattttataggttcatag

SEQ ID NO: 919677 - DNA, 630 bp, Homo sapiens
tgtaaattactctttctccattgcaatttccctgtcttgataaactggctctgtctaggcagtgggcaaagtgaacccattgggtgtttacaaatttgggggctcgtctgggattgcccttgtggctacctgccccatggttcagtagccccctcccacaacagatccaaagaccagcccaagtggctgcttagttctgttggatgaggggctractctggtactctctctactggtggggcactgctgagccaatgtgcatggatttaattgcaataaggaaatagtcctggggagatataactataggcatatcacagggtctctgtgtgtagcccagtcatggagtgtccatagctttagctccattatatagtgtttggtttggtgagtattgtaggtgctgccaatgcctccttccttctcctgattggtttgtcttattctggggcctgagttcttccgtagccccactgtgggatgtctgtctcagtttggctccttctgggttcttggtcagctctccctaattattaggaagagttttgttttgggagatgtctcctcagtcaggaagatttgaaggagatttctctcattcagagaataggtgggtagcttggaagggat

SEQ ID NO: 919678 - DNA, 584 bp, Homo sapiens
gggtttcgcagcaacatggatgaagctggaggccattattttaagcaaattcacataagaaaccaaatactgcatgtgctcacttataagtaggacctaaacactgagtacacaggaacacaaaacggtaaacagtagatgcttgagggtggagggtgggaagaggatgagggttgaaaaactactcatcgggtactatgcttttyacctgggtgacacaatcctttgtacaccacaacccagtgacatgcaatttacccatgtgacaaaccttcacacatagctcctgaacctgaattagaagttgaaaacataaaatccatatttctgaaaacagtatgtttcttgcaaacagcatataattgtgtcttaatagttaatcaaatctgatgaagtttggcttttaatcacatatataggctaacagtccccagtctttttgcaccaggaactggttttatggaagacattttttttcacagatgggaaggggcaagggatggtttcaggataaaactgttgcacctcagatcatcaggcattaattagattctaagaaggtgcaggcattaattagattctaa

SEQ ID NO: 919679 - DNA, 641 bp, Homo sapiens
gtggtgcctgcatatcgtgcagaaccctctgtgaaccagggcctagtcttctcttcctctgtcaacttatcatagggaattccccatgaggccatcagtgcaggctggggtggcaggggtggagtcacttccatttgagccacttcctcatgtaacttacatgggcatttgagccacctcctcatgtaatttacttgtgctttcagcacctgcttgagcccagtcacatatataccacttccatgtgatcatggaaygttgctgtgcacacctcactttatggctagatggatcagaaagcacccggttcatgataggcagttcaggtcacatggtgacttgatgacccatagttaaacgttcagtttccaccaaaccccagtaacaggccaagagctgtctctcaaagggaaagtagttatccacagaagatggcagggccttgctccaaaattcttgaggcctctgctgtgattcactgatgagggcctgccaaaggctccaaacagcatccctatctgccactgacacctcaagcaccattggatctgttgcagagcagcttgcacagcagcctggacctgttgcagagccttctgttctggaccctactcaaaactgccagccttttgagtcattca

SEQ ID NO: 919680 - DNA, 733 bp, Homo sapiens
gtattccatggtgtatatataccacactaaaaaaaaatccaaaccaccattaatgggtacctaggctgattccatgtctttgctactgtgaatagtgctacaatgaacatacaagttcatgtgcccatttggtagaaagatttatttttcttggggtacatacccagtaatggatttgttgggtcaagtggtagttgtgctttaasttctttgaaatcttgaaactgctgtccacagaagctgaactaatttacatttccaccaatagtgtaaagtgttccttttttttcctgctgcctcaccagcatctgctgttttttgtatttttaataatagccattctgactggtgtgagatggtatctcattgtggctatttgatttacattcctttgatgattaatgatgttgagtattttttcatatgtttgttggtcatttgtggttttttttgagaagtgtctgttcatgtcttttgcccatttttaatggttttttttttgcttgttcaattatttgagttccttatagattctggatattagacttttgtggggcatagtttacaaatattttctcccattttgtaggttgtctgtgtactctgtgaatagtttcttttgctgtgcaggaagtctttagtttaaataggtcccatctgtcaattcttgtttttcttgcttttttttttgagtgcttagtcataaagtatttcccaaggctgatgttcagaa

SEQ ID NO: 919681 - DNA, 633 bp, Homo sapiens
tcacgaggtcaggagatcaagaccatcctggctaacacggtgaaaccccgtctctactaaaatacaaaaaaattagccaggcgtggtggcaggcgcctgtagtcccagctgctcgggaggctgaggaagaagaatggcgtgaacccaggaggcggagcttgaagtgagccgagatcgcgccaccgaactccagcctgggcgacagagcgagactccrtctcaaaaaaaaaaaaaaaaaaagagagaaaaagaaatatttaccgattgcctactgcatgcgtggtactgaagacccttggaagtctggaatttaccattgaaagctttagctgtaagagacttgaaagatccatgacatgatggaaagatcaatgacatgatggcatataataaattatatggtgataatactgcctacacctgtggtttccaaactttagtgagcattggaatcattttgggggcttactaaaacacagattgctggcccagtacgtcaggctaagacccaaggacatacatttctggtaagttcttaggtgatgctgatgttgtgaggaccacactttgagaaccactgccctatatcaaatggtttcatgaagacaaactagattatataagtaaagtggc

SEQ ID NO: 919682 - DNA, 633 bp, Homo sapiens
tcacgaggtcaggagatcaagaccatcctggctaacacggtgaaaccccgtctctactaaaatacaaaaaaattagccaggcgtggtggcaggcgcctgtagtcccagctgctcgggaggctgaggaagaagaatggcgtgaacccaggaggcggagcttgaagtgagccgagatcgcgccaccgaactccagcctgggcgacagagcgagactccgtctcaaaaaaaaaaaaaaaaaaagagagaaaaagaaatatttaccgattgcctactgcatgcgtggtactgaagacccttggaartctggaatttaccattgaaagctttagctgtaagagacttgaaagatccatgacatgatggaaagatcaatgacatgatggcatataataaattatatggtgataatactgcctacacctgtggtttccaaactttagtgagcattggaatcattttgggggcttactaaaacacagattgctggcccagtacgtcaggctaagacccaaggacatacatttctggtaagttcttaggtgatgctgatgttgtgaggaccacactttgagaaccactgccctatatcaaatggtttcatgaagacaaactagattatataagtaaagtggc

SEQ ID NO: 919683 - DNA, 592 bp, Homo sapiens
ggctaatatccagaatctacaaagaactcaaacaaatttacgagaaaaaaaaaactcattaaaaagtgggcaaaggatatgaacagacacttctcaaaaaagacatctacgccaccaacgacacatgaaaaaatgctcatcatcactggtcatcagataaatgcaaatcaaaaccacaatccacaaaaccacatctcacggcagttagaatagtgatcattaaratgtcaggaaacaacagatgctggagaggatatggagaaataggaacacttttacactgttggtgggactgtaaactagttcaaccattgtggaagagagtatggtgattcctcaaggatctagaaccagaaataccatttgacccagtgatcccattactgggtatacaccaaaaggtttataaatcatgctactataaagacacatgcacacatatgtttattgcatcactgttcacaatgacaaagacttggaacgaacccaaatgtccatcaatgatagagtgaattaagaaaatgtggcacatatacatcgtggaatactatgcagccataaaaaggatgggttcatgtcctttgcagggaca

SEQ ID NO: 919684 - DNA, 571 bp, Homo sapiens
agcttcagctgagagctgggaggggagacagtccattcccccatcgctgtgtgacgaaagtgaacctctgcaagtcaattttgttttaaatttttttattgtgagaaaatacatgtaacgtaaaatttaccatattctccatttttttttttttttttttttttttttttacagatggagtctggttctgtagcccaggctggacggctgtggcgccatctyggctcactgcaagctccgcctcccaggttcacgccattctcccgcctcagcctccccagtagctgggactacaggcgcccgccaccacacccggctaatttttttttgtatttttagtagagactgggtttcaccgtgttagccaggatggtctcaatctcctgacctcgtgatccgccctcctcggcttcccaaagtgctgggattacaggcgtgagccaccgcgcccggccctccatttttaagtatacatacatttcactggtaccgtatacattcataatattgctcaaccatcacccactatccatttctataactcttcatcttgtaaaactgaaattctttc

SEQ ID NO: 919685 - DNA, 571 bp, Homo sapiens
agcttcagctgagagctgggaggggagacagtccattcccccatcgctgtgtgacgaaagtgaacctctgcaagtcaattttgttttaaatttttttattgtgagaaaatacatgtaacgtaaaatttaccatattctccatttttttttttttttttttttttttttttacagatggagtctggttctgtagcccaggctggacggctgtggcgccatctcggctcactgcaagctccgcctcccrggttcacgccattctcccgcctcagcctccccagtagctgggactacaggcgcccgccaccacacccggctaatttttttttgtatttttagtagagactgggtttcaccgtgttagccaggatggtctcaatctcctgacctcgtgatccgccctcctcggcttcccaaagtgctgggattacaggcgtgagccaccgcgcccggccctccatttttaagtatacatacatttcactggtaccgtatacattcataatattgctcaaccatcacccactatccatttctataactcttcatcttgtaaaactgaaattctttc

SEQ ID NO: 919686 - DNA, 571 bp, Homo sapiens
agcttcagctgagagctgggaggggagacagtccattcccccatcgctgtgtgacgaaagtgaacctctgcaagtcaattttgttttaaatttttttattgtgagaaaatacatgtaacgtaaaatttaccatattctccatttttttttttttttttttttttttttttacagatggagtctggttctgtagcccaggctggacggctgtggcgccatctcggctcactgcaagctccgcctcccaggttcacgccattctccygcctcagcctccccagtagctgggactacaggcgcccgccaccacacccggctaatttttttttgtatttttagtagagactgggtttcaccgtgttagccaggatggtctcaatctcctgacctcgtgatccgccctcctcggcttcccaaagtgctgggattacaggcgtgagccaccgcgcccggccctccatttttaagtatacatacatttcactggtaccgtatacattcataatattgctcaaccatcacccactatccatttctataactcttcatcttgtaaaactgaaattctttc

SEQ ID NO: 919687 - DNA, 564 bp, Homo sapiens
ttaggctaagaccactctctagctaaaaaccattaagcgccacattaatagtgatttctctggccatctccatatttagagaggcttttgaaggagtgcttcaagtggcccagttctttttgaaaggtctgaattaaggccttcttgtcctgtcccgggagscttccacaggccctgccagtggagctgggaggttgaagcacaaactaacagccgctgctattatggagcccttactggatgccaaggcccatgctaagtgccttctatacatgctctcatcagtcttaaatcaacccagcagggtgggtgctaccgtccccatgtcggcaagtcatttaaattaggttgctaggaacaggcgcggtggctcacgcctgtaatcccagcactttgggaggccgaggcgggcagatcacttgaagtcaggagtttgagaccagcctggccaacatggtaaaactgcatttctactaaaaatacaaaaatgagctaggtatggcggcgggtgcctgtaatcccagctactcaggaggctgaggcatggatggcaaagattgcagt

SEQ ID NO: 919688 - DNA, 564 bp, Homo sapiens
ttaggctaagaccactctctagctaaaaaccattaagcgccacattaatagtgatttctctggccatctccatatttagagaggcttttgaaggagtgcttcaagtggcccagttctttttgaaaggtctgaattaaggccttcttgtcctgtcccgggagccttccacaggccctgccagtggagctgggaggttgaagcacaaactaacagccgctgctattatggagcccttactggatgccaaggcccatgctaagtgccttctatacatgctctcatcagtcttaaatcaacccagcagggtgggtgctaccgtccccatgtcggcaagtcatttaaattaggttgctaggaacaggcgcggtggctcacrcctgtaatcccagcactttgggaggccgaggcgggcagatcacttgaagtcaggagtttgagaccagcctggccaacatggtaaaactgcatttctactaaaaatacaaaaatgagctaggtatggcggcgggtgcctgtaatcccagctactcaggaggctgaggcatggatggcaaagattgcagt

SEQ ID NO: 919689 - DNA, 749 bp, Homo sapiens
acacttgcttggctacgtaggttttctattttctttctttttctttctttctttctttctttctttctttctttctttctttctttctttctttttctctctttctctctttcttctttctttcttttcttctctctctctctctctctgtctctctctttctctctcagatagggtctttgtatgttgcctaggctggtcttgacttcctagtgctcaagtgatcctcctaccttggcctcccaaagtgctgggaaattggcggctaacccttaaaaatcaaagtctttccataaatacctgaattctcagtttcttttgaaaaggtggatgattaatccatactggacccacaatccagcagggcaaatttgattggagctgagtagcagctacctccttgggatgtggcctgagttctctagtttgccrcagtccccgccactttctctttttgagatggagttttgctcttgtcacccaggctggagtgcaatggcgtgatcttggctcactgcaacctctgcctcccgattcaagtgattctcctgcctcagcctcccgagtagctaggattacaggcacctgccaccatacctggctaattttcgtatttttagtagagacagggttttgccatgttggccaggctggtctcgaactcctgacctcaggtgatccgcccacctcggcctcccacagtgctgagattacaggtgtgagccactgcgcccggcccccaccactct

SEQ ID NO: 919690 - DNA, 805 bp, Homo sapiens
cagctgaaaaccctagcaggatttattactccttagcccagtagtgtatatggaatgtgcactgtgtatggccaccagtactactgctgccaccgttgctggagtgattgccacctgccagacattggactaggtgctttgaattatctgtctcatttaatgctcacgacactgaatataggtatttttaaatctattgtacataattttaaaaggcttagatttggtttatttatttatttatttatttttgagacagagtcttgctctgtctcacccaggytggagtgcagtggcgcgatcttggctcactgcaggcttcacctcctgggttcaagcgattctcctgtctcagcctcctgagtaactgggattacaggtgcccgccaccacaactggctagttttgtatttttagtagagacagggtttcaccatgttggccaggttggtctcaaactcttgacatcaggtgattcacctgcctcggcctcccaaagtgctgggattacaggtgtgagccactgcacccagtcctaaaaggcttgtaacttgtaatttgtaacttgtccaaagcatagctgttttcagtgacagagcttggatctgaacacggctctttgtagctcctgttcttcccactaagccatgttgcctctcctatttctttttttttaagcaaaataattttatttcctaacatatggtaacatatacatccaatatgtgctccccttgcacatctattcacaagtgacttccaaatgacaactgccttgatatttaagcacgtgctgaaagttatc

SEQ ID NO: 919691 - DNA, 744 bp, Homo sapiens
gacagaaaaaaactcgacatgaggcagtttcatctttgggtgctatattcatttgctagggctgccataacaaagtaccacagactgagtggcttacacagcagaatttttttctctcactattttggtggccagaagtctgagaacaaggtttcagcagggttggtttcttgtaaggcttcctccttgacttgtaatggccatcttctccctatgccttcatagggccttcccccatgtgtatctgtgtcctaatcccctcttyttataaggacaccaatcacattagattagggcctaccctgatgacctcattttaactcagttacctctttaaaggccccatctccaaatacagtcatattctgaggtaactggcagtgggattggggggtgcagtggagtcaggacttcaacatatgatttttttttttttttttgagacagagtcttgctctgttgcccaggctggagttcagtggcatgatctcagctcactgcaacttacgcttctcgggttcaagcaattcatctgcctcagcctcccaagtagctgggattacaggcatgcgccaccacacccggctactttttgtatttttagtagagatggagtttcaccatgttggccaggctggtctcgaactcctgactcaggtgatccacccacctcggcctcccaaagtgctgggattacaggcgtgagccaccgcgcccggccaacatatgaactttagaaaggag

SEQ ID NO: 919692 - DNA, 837 bp, Homo sapiens
gcccaggcagctgagcagacagaaaaaaactcgacatgaggcagtttcatctttgggtgctatattcatttgctagggctgccataacaaagtaccacagactgagtggcttacacagcagaatttttttctctcactattttggtggccagaagtctgagaacaaggtttcagcagggttggtttcttgtaaggcttcctccttgacttgtaatggccatcttctccctatgccttcatagggccttcccccatgtgtatctgtgtcctaatcccctcttcttataaggacaccaatcacattagattagggcctaccctgatgacctcattttaactcagttacctctttaaaggccccatctccaaatacagtcatattctgaggtaactggcagtgggattgggkggtgcagtggagtcaggacttcaacatatgatttttttttttttttttgagacagagtcttgctctgttgcccaggctggagttcagtggcatgatctcagctcactgcaacttacgcttctcgggttcaagcaattcatctgcctcagcctcccaagtagctgggattacaggcatgcgccaccacacccggctactttttgtatttttagtagagatggagtttcaccatgttggccaggctggtctcgaactcctgactcaggtgatccacccacctcggcctcccaaagtgctgggattacaggcgtgagccaccgcgcccggccaacatatgaactttagaaaggagatgatgattcagcccataacaaggtcactctctgaggcagcgtgatttccactcattctcacctgggctgctctct

SEQ ID NO: 919693 - DNA, 599 bp, Homo sapiens
ttaataattaatatcttgtaataatgtcgaaatgatagtatttggaaattgtaagggaagtatacttaaaggatatgctctttccatgttttgcttattagattccactgatgtttaccaaatgagaagaagcatagcatcttagaaatatgagatccttaaaaaacaacatttccagtattttatctgttattttaaataggctatggattggagagatgataaacatttcacaaagctaattctgagataaacactttaaaaaagaagaatgcagtgagtgtgaagacaaaacaagaaagtmtttctctagacagtgtctgatttcattaccacatccccatggaatgcacgttctatgattgtcattccacgcatgaggaactcaagactcctagaggctgagagacttgatcagggcacatagccaataagtgtgagagtcacgattgacacctgtcggatgcctgaactttctgcagttgaactattatctgtatcgaaggtacaactgaatttggggattgcttatagtctagacataacaaagggattgactggatgttagtatgctatcagcactcagtgtccaatcagga

SEQ ID NO: 919694 - DNA, 610 bp, Homo sapiens
attaatgcctgaagggcctaaatttgatccatgctctgatccaatttagttatggcaggtgtagttttgaggcccagtctcctgaggttggttctgaccctagtagggctctccttacgtatctctttctcaggttcattcagaactagctggcctgtgattcagcttattgctcttcatgcagaggagctacttattttcttactaccagtatctccattgtttctgagagggctgttagtgtttgaataaagttagttcctttgagagactgcttcttacccttggcaaaatctttgagtcattactccacgtgctaggtggagcaatagcctgaatcttctaagtttttccagtgtgaaactacttattgcttattcagcttattgctcttcatggagaggagcctcttattttctyactaccagtatctccattgtttctgagagggctgttagtgtttgaataaagttatttcctttgagagactgcttcttacccttggcaaaatctttgagtcattactccacgcgctaggtggagcaatagcctgaatctgagtttttccagtgtgaaactactgccctattagatagctggagcaagagca

SEQ ID NO: 919695 - DNA, 797 bp, Homo sapiens
ctatgctcataatagatggtggtgaggggcatctggggtaaaacacaggaatgtataggttaagtatatgacaaatgtgtaggaaatagaaccagagctgttgttttataaaatgaagagaggaagtagcttgtactcttaatatagtgctattgtcattattacrtcatataactctacaatattgatttatttattgtttctcaatttgtgaaatttcacaacaaattttcagcagcaatgagctaaagatgaaagtgaatatttcatgataattaaatattgaatttttattttccaagaaactagatacaaaaagtaatttgcacaaaatgtttgtcatttcctatccaccatgagatctctactgtatcactaatatatgaaaaccagaagacacagatcatctaaagaagcatcagccatctacctcaaaaatttattattttgagactgtgccagaaaaaaaaatttgtgtgtgcagtcatagaaaatgtgtctacatatcaacctgtgaagcataactttcatgtacatcaaaagacaattttttaaattaaatacattcagtttcaattcccaggtttcttgtgaacataagaaaatgaagcaataggttttaatgcatccactgttagcaaaagaaaaacactgtaagcagttaattaatgctgtttctttatcagtatcattaagtgcttcaaatagaaatcagttaaactcatatcaataatcattcaaatatttttcatctaattattggaatcaaagagaagtttttagttcacttcgcaaaa

SEQ ID NO: 919696 - DNA, 630 bp, Homo sapiens
taaaacctaattatgctgggtaaaacgtaataaaaatatttgtttttttaaattgtagtaacatgtacacaacataaaattaaccattcttaagtgtgcagttcagtgctattaaatacattcatattagcatgaaaccatgaccactgttcagctccagaacttttccagcttccaaagcagaaacttcacacccaataaacaaaaacttccacctctttcctctccctagcccctgacaacaccattcaactttctgtctctatgaattgaattactctaatacttcacataattgaaaccatttgttcttttgtgactggcttgtttcacttagcatgttttgaaggtttatctatgttatagcatgtgtcataatttcyttccttttaaagactgaataatattccaacgtatgtacatgtcacctttagtctatccattcatccactgatggacacttggattgctttcaccttttggctattgtgaataatgcttctataaacatttgtgaacaaatatctactcaaatccctgttttcaattcttttgggtatatactgtgataatgtgttctttcattgctataaagaaagaacctgaggctggataatttgtaaagaaaga

SEQ ID NO: 919697 - DNA, 682 bp, Homo sapiens
cttttaagaagcacatacaggctgggcttgtggatcacacctgtaatcccagcactttggggggctgaagagggaggatcacttgagcctaggagctcgggaccagcctgggcaacatagtgagaacctgtctcttaaaaaaacaaaaaacaaaaaaaaaccacacacacccccctaaaaattagctggatgtggtgggggtggtgtgtgtctgtagtcccagctatgcaggaggctgaggtgggaggattgcttgagtccagccgttggaggctgcagtgagccatgattgtgccactatactccagcctgggtgatggagagagaccctgattccaaaaaaggaaaatctaaattaaaaaacaaacaaaaaaaagcrgctaagcacagtgtcttacaccggtaatcccagcactttgggaggccgaggtgggtggatcacctgaggtcagaagtttgagaccagcctggtcgacatggtgaaaccctgcctacactaaaaatacaaaaattagccaggtgtggtggcacacacctgtaatgccagctactcgggaggctgaggcaggagaatcgcttgaacctagtaggcggaggttgcagtgagccaagatccctccactgtgctccagcctaggtgacagggtgagactctgtctcaagaacaaaaacaaaaaaagca

SEQ ID NO: 919698 - DNA, 576 bp, Homo sapiens
actatcctaaatatatatgcaccaaatacagggcacccagattcataaatcaagttcttagagacctacaaagagacttagactcccatacaataataatgggaggctttaataccccactgtcaatagtagacagatcaacaagacagaawattaacaaggatattcaggacttgaactcagctctggactaagcagacctaatagacatctacagaactctacaccccaaatcaacagaatatacattcttctcagcaccacatcacacttattctaaaattgaccacataattggaagtaaaacactcgtcagcaaatacaaaagaatggaaatcataacaaacagtctctcagaccacagcacaatcaaattagaactcggcattaagaaactcacttgaaactgaacaactacatggaaactgaacaacctgctcctgaatgaccactgggtaaataatgaaattaaggcagaaataaagaagttctttgaaaccagtgagaacgaagacacaatgtaccagaatctctggacacagctaaagcagtgtttagagggacgtttatagcact

SEQ ID NO: 919699 - DNA, 604 bp, Homo sapiens
aaatcaataatgatctgtcttaagtaggagcagtaattcctttaccttcagcagtgattggtccagggtgggcacatgatccagctcttagccaatgagaggtcaagggatacctgtttttttaattattattatcaataagatagagtcatgaggtaaaagccttttgtcccaccttttccttcctgcttttgtcagtgccctgtgaccaaatgatgtgtggcactgcagccactgttttgggcaatgagtttaaggacaaagccaactactgctagagatcccagagcagaaagatgaaaagagcctggattyttggacacactgagcccctggctgccaaccttaagatgttttgctataaaagatgatatttcttctttgattaagctgctgtcaggcacactgtcacttgcagttgaaaatgtaacaaatgccatcacattcccaatgccatattcctcagattaccttcagagaaggaagctaaagctagcaaacccttgaaggtacagggatcagcattccagctgaggtgtttggacttttcctgggagggaaatgtgttcagaagatcctcctatctccaatgtgccaacatcta

SEQ ID NO: 919700 - DNA, 604 bp, Homo sapiens
aaatcaataatgatctgtcttaagtaggagcagtaattcctttaccttcagcagtgattggtccagggtgggcacatgatccagctcttagccaatgagaggtcaagggatacctgtttttttaattattattatcaataagatagagtcatgaggtaaaagccttttgtcccaccttttccttcctgcttttgtcagtgccctgtgaccaaatgatgtgtggcactgcagccactgttttgggcaatgagtttaaggacaaagccaactactgctagagatcccagagcagaaagatgaaaagagcctggattcttggacacactgagcccctggctgccaaccttaagatgttttgctataaaagatgatatttyttctttgattaagctgctgtcaggcacactgtcacttgcagttgaaaatgtaacaaatgccatcacattcccaatgccatattcctcagattaccttcagagaaggaagctaaagctagcaaacccttgaaggtacagggatcagcattccagctgaggtgtttggacttttcctgggagggaaatgtgttcagaagatcctcctatctccaatgtgccaacatcta

SEQ ID NO: 919701 - DNA, 604 bp, Homo sapiens
aaatcaataatgatctgtcttaagtaggagcagtaattcctttaccttcagcagtgattggtccagggtgggcacatgatccagctcttagccaatgagaggtcaagggatacctgtttttttaattattattatcaataagatagagtcatgaggtaaaagccttttgtcccaccttttccttcctgcttttgtcagtgccctgtgaccaaatgatgtgtggcactgcagccactgttttgggcaatgagtttaaggacaaagccaactactgctagagatcccagagcagaaagatgaaaagagcctggattcttggacacactgagcccctggctgccaaccttaagatgttttgctataaaagatgatatttcttytttgattaagctgctgtcaggcacactgtcacttgcagttgaaaatgtaacaaatgccatcacattcccaatgccatattcctcagattaccttcagagaaggaagctaaagctagcaaacccttgaaggtacagggatcagcattccagctgaggtgtttggacttttcctgggagggaaatgtgttcagaagatcctcctatctccaatgtgccaacatcta

SEQ ID NO: 919702 - DNA, 770 bp, Homo sapiens
ctgctccagccatgactaaaaggggccaaggtacagcttgggctgttgcttcagagggaggaagcccccagccttggcagcttccacatgatattgagcctttaagtgcacagaagtcaagaattgaggtttgggaacctctgcctagatttcaaagggtgtatggaaactcctggatgtccaggcagaagtttgctgcagggatggggcccggatggagaacctctgctagggcagtgcagaagggaaatgtgggatcagagcccccacacagagtccctactggggcactgcctagtggagctgtgagaagagagccactatcctccagaccccagaatggtagatccactgacagcttgcacygtgcacctggaaaagctgcagacactcaacaccagcccgtgaaagcagccaggagggggcctataccctgcaaagccacaggggcagagctgcccaaggcagtgggagcccacctcttgcatcagcatgacctagatatgagacctggagtcaaagaagatcatttggagctttaagatttgactgcctcactggattttggacttgcatgggccctgtagcccctttattttggccaacttctcccatttggaatggctgtatttacccaatgcctgtaaccccattgcatctaggaagtaattaacttgcttttgattttacaggcccataggcagaagggacttgtcttgtctcagatgaccatttggactgtggacttttgagttaatgctgaaatgagt

SEQ ID NO: 919703 - DNA, 735 bp, Homo sapiens
ctgcaaagccacaggggcagagctgcccaaggcagtgggagcccacctcttgcatcagcatgacctagatatgagacctggagtcaaagaagatcatttggagctttaagatttgactgcctcactggattttggacttgcatgggccctgtagcccctttattttggccaacttctcccatttggaatggctgtatttacccaatgcctgtaaccccattgcatctaggaagtaattaacttgcttttgattttacaggcccataggcagaagggacttgtcttgtctcagatgaccatttggactgtggacttttgagttaatgctgaaatgagttaagacttacggggacttgttggggaggcacgattggttttgaaatgtgaggacatgacatttgggaggggccaagggtggaatgatatggtttggccatgtccccacccaaatctcatctcgaattgtaactcacacaattcccacstgttatgggagggatcttgtgggaggtaactgaatcatgggggcaggtctttcccatgctagtctcatgatactgaataagtctcatgagatatgagggtcttataaaggggagttttcctgaacaagctctcttctcttgtctgccaccatgtgagatgtgctcttcaccttctgccatgattgtgaggcctccccagccacatggaactgtaagttcaataaacctctttcttttgtaaattgtagtc

SEQ ID NO: 919704 - DNA, 690 bp, Homo sapiens
tctttcaaaatctgagtcaatccaattggaaaaatagcactgatagacttgctcagtgcaggggtgccacaaaccttcaatttgtgaaagaacacaatatctgcaaaatgcaataaagcaaaatatgcctacacacacacacaggcacacacacacagatttattttaaggatatggctcacaccagtttggaggttgataagtctgaaatcttaggggcagtcaagttggcttgagactcagggaagagttgatgttgcagtctcaaatctgaagactaygtggtggcagaattccttcttttttgggaaaccttagctttctcttaaggcctttgactgattgaataagaccaaaccacgttttgaacactaatctgctttactcaaaatctatagttttaaatgttaatcacatctaaaaaataccttcccagcaacatctatactgctgtttgaccaaaaactggggtaccatggcctagccatttgacacataaaattagccatcccaggacccttaaatagaaacaagtttatttaatagttgtattagtctattcctacattgctataaagaactacctgagactgggtaatttatgaagaaaatagatttaattggctcaaagttctgcatggctgatgaggcctcaggaaacttactatgagggtggaaggcaaaggggaa

SEQ ID NO: 919705 - DNA, 690 bp, Homo sapiens
tctttcaaaatctgagtcaatccaattggaaaaatagcactgatagacttgctcagtgcaggggtgccacaaaccttcaatttgtgaaagaacacaatatctgcaaaatgcaataaagcaaaatatgcctacacacacacacaggcacacacacacagatttattttaaggatatggctcacaccagtttggaggttgataagtctgaaatcttaggggcagtcaagttggcttgagactcagggaagagttgatgttgcagtctcaaatctgaagactatgtggtggcagaattccttcttttttgggaaaccttagctttctcttaaggcctttgactgattsaataagaccaaaccacgttttgaacactaatctgctttactcaaaatctatagttttaaatgttaatcacatctaaaaaataccttcccagcaacatctatactgctgtttgaccaaaaactggggtaccatggcctagccatttgacacataaaattagccatcccaggacccttaaatagaaacaagtttatttaatagttgtattagtctattcctacattgctataaagaactacctgagactgggtaatttatgaagaaaatagatttaattggctcaaagttctgcatggctgatgaggcctcaggaaacttactatgagggtggaaggcaaaggggaa

SEQ ID NO: 919706 - DNA, 584 bp, Homo sapiens
gtatatgtgccacattttcggatgcggagaaataggaacacttttacactgttggtgggactgtaaactagttcaaccattgtggaagtcagtgtggcgattcctcagggatctggaactagaaataccatttgatccagcaattccattacctggtatatacccaaaggattataaatcacactgctrtaaagacacatgcacacgtatgtttattgtggcactattcacaatagcaaagacttggaaccaacccaaatgtccaacaacgatagactgtaatagtctatttttgtttccacattccatttgtatgtatttggtagagttccttccctggagaagaagctgagtatcccataaatttcctggttacacttatgtgacaaatcttgcagttattctaagtttcagcacagtctttatttataaattataagcccagtaccctgtaatcaaaactatgaagttgatttaaaattgaggcatcccccagtgccaagcttgggtcagctccaagtagaaagcagaggggataatggttggtttctgtctcccctcctagagctattctactcatctca

SEQ ID NO: 919707 - DNA, 744 bp, Homo sapiens
ctgctttaccactttgcttgcctcctgggggctctaccccagagagatgtgggtcagcaaccactcgggacaatggacccgggatggagggtctgtgctgtgggcccaagccaggggttccctatctgatgacaagcagtagggggtgtgtgggacccataggagatgsactggccccctctgcttgggccaactgcagcttgttgaaggtgtggataaggcacttagggtatttgctccttattagtccaagggttgcaaggatggttccactgcagaggcagtggcagagaggctttcagttgcccctggaggctctgtccagggaatttccaagttgctactggcctagtagctctggcagagggtgcctggaggctcaggcctggaggacctccccagtgaggagatatgggaacaggtacccatgtaagagactggacacttttccatagggctgctgtgatatgctgaacacccactccagtcccactatagttgccttggattttccagtacctggaggtatcaccagtgaaggctgtgaaacagtaaagatggcagcctgccttgacctctgagagctccctcccagggagatacagacctgttgctagcccgaatgcacctgtaggaagtcactggagaccccagttaggaggtcttgcccagtgaagaggaatggatagctgtgctgctctgctgtgctgtgctgggggatcccttctgcccctggttggcttg

SEQ ID NO: 919708 - DNA, 744 bp, Homo sapiens
ctgctttaccactttgcttgcctcctgggggctctaccccagagagatgtgggtcagcaaccactcgggacaatggacccgggatggagggtctgtgctgtgggcccaagccaggggttccctatctgatgacaagcagtagggggtgtgtgggacccataggagatgcactggccccctctgcttgggccaactgcagcttgttgaaggtgtggataaggcacttagggtatttgctccttattagtccaagggttgcaaggatggttccactgcagaggcagtggcagagaggctttcagttgcccctggaggctctgtccagggaatttccaagttgctrctggcctagtagctctggcagagggtgcctggaggctcaggcctggaggacctccccagtgaggagatatgggaacaggtacccatgtaagagactggacacttttccatagggctgctgtgatatgctgaacacccactccagtcccactatagttgccttggattttccagtacctggaggtatcaccagtgaaggctgtgaaacagtaaagatggcagcctgccttgacctctgagagctccctcccagggagatacagacctgttgctagcccgaatgcacctgtaggaagtcactggagaccccagttaggaggtcttgcccagtgaagaggaatggatagctgtgctgctctgctgtgctgtgctgggggatcccttctgcccctggttggcttg

SEQ ID NO: 919709 - DNA, 492 bp, Homo sapiens
cctctgagagctccctcccagggagatacagacctgttgctagcccgaatgcacctgtaggaagtcactggagaccccagttaggaggtcttgcccagtgaagaggaatggatagctgtgctgctctgctgtgctgtgctgggggatcccttctgcccctggttggcttggactctgtaaagccagaaggctggaatgccaatttgcccaaacagcaaagatggtagcctgcccctctccccagaaactcccacccaaggaagcacaaggctgccaccagtagctgactggaattccaagctagtggtattatcctgtaagatgccatgaaagtggggccctgcagactgtcactkcttggccccctgtattcagcctctttcctagtggtatgtacaggggtctaacctcctgctttgctagacccttgtggttacttttgctgggaagccctgaacctgagtatctaaggctcctacatctccaggtgtg

SEQ ID NO: 919710 - DNA, 766 bp, Homo sapiens
ataaaatcgggctaggatgttacaaactgttttttcccatttaaggttagactcctggattgaacagaaaaagagaaaaagaaaagaaaggaatagaggaaaaggttaagctttacaggatggcttttgagcctgcagccactggacagtgcagggcagcatccctacccctctcgctcatttcctatcagggagagccttagcaccccagacctacacagtatgggatgaattcctcctacctccacaagccaccagttaaagtgagctgtctccagcgggagcagagagccccttcagcttaaggccatcaggggtcaggattctgttccaggggcccttcggtcctcagtgcagtcccttttccagcggccgagctyatgggttggggtaagccatgtgggttttttttcccatttatcccattagggcagtttgcctgttagtggcctagccttttgtaccaatgacagttatttggaggagtgttcttagggaaacctggagggggctgagggcttgtaaagcagccaagagctgagcctgccttttgttcctatggttttctttctttttagccctgtcctccttattctgcttttggctatgaaagactgaggaggctaatttgaggattttctgcacaggggctatgctgtattacacaagaaaattagacgtttcttcttgagagtctaaaggttaaatttctccagtgttttagaatgcagcctagaggtgaggctaaaggaatagatggggttta

SEQ ID NO: 919711 - DNA, 614 bp, Homo sapiens
ttttttttttttttttttttttttgagatagagtcttactctgccacccaggctggagtgcagtggcgggatcacagctcacttaagtgatcctaagcacaagcaatcctcccacctcagcctcctgagtagctgggatcacaggcacatgccaccatacccagcttacccagctagttttttgtagagcccaggttttgccatattgcccaggccgatctggaactcctggagtcaagtgctgcacccaccttggcctcccaaagtgctgggtttatgagcmtgagccaccgcacctggccctattttttctatttttaaagtgaaaggaatgatagcagtttgaagccatttctatagaacaatagaaatagaaaaataggatacaaaccaaaaatacaaatagaggcaccctctttcacacactcagctcagtccagattgcaaagtgcttctccagccacaatcctacttgccttaaacatttttgtgaataagaaagggcagagttttttttttttctttaatcccaagcacagcctacaacagagcccttctttcagagacatgaatgtcgcctcattagcttgtacagtactggctgtacagcgcaa

SEQ ID NO: 919712 - DNA, 614 bp, Homo sapiens
ctgagaggatgggaaggaacaatccctggacggcccttcacacctaccgccctgacggcacctgagcctagcactctgctcgccaggcctggactcagccctgggccctggaccaggccttatcctcaagggactttgagcctctagatgataagggtcatctaaagaccacttgtgcttggcagtgttttacttttgtcaggttgtaattggtgcattacaatgaacacagtaaaaggggaaatgaactgattgacatttatttgtagaagctgtcatcttctctgtgtgagcattttgtagatcttttggcctccattcctgttctcttagtcaagctaaatggtccagggactgaagatcccacagcttggctcttttgcaaggtgaggggatctcctgcaggttgggcaaagcttcattttctcttctgtacaatgcgggtgaaaaaratctccgctgtgtctacctctcaagggctgctgtggggcaccaaggaattggtgtacagaatgagaaagttcatttgttctttctttctttctgtttttttttttttggcgggggggctgtggggggacggagtctcgctctgttgcccaggctggagtgca

SEQ ID NO: 919713 - DNA, 611 bp, Homo sapiens
agtatatgtgtgtgtgtgtgtgtgtgtgtgtgtgtgtataatttttttttttttttttagacagcatcttgcaccatcacacagggtggagtgcagtggcgtgatcatggctcatagcggccttaacctcctgggctcaagtgattctcctgccccagcctccttagtacctgggactataggcatgggctgccacacatggctaatttttaaaactttttttgtagagatggggtctcgctatgttgcctgggctggtcttgacctcttgacctcaagtgatcctcctacctcatcctccccaggtgctgtgattacagccagcctgggagatgatatttaaaacttactttagtatacaratgtgtaaagaactataaatcctaagaaaaaggccaacaacccagcgggaaagtgagcaaaagacatgatcaggcagtttacataaccgaaagaaatttagttcatttaattaatgaaccaatgaaaatgaaaaacagtgggatatggctttatactcatagactatctcagcccatgcaggctgctgtaatagaaggcttgaaaatgacagaaatgtgtttctcacagttctggaggctgggaagtac
